United States Patent Application Publication US 2013/0332133 A1 - sequence listing, part 5

SEQ ID NO: 89626 - protein, 272 aa, Unknown
  Bacterial polypetide isolated from the Sargasso Sea
FDNLFGYDWELTASPAGAHQWKPKKNGREIEMTPDAHEKSRKNLPMMQTTDLSLKMDAKYGPISRHFHNNPKEFADAFARAWFKLTHRDMGPRACYLGPDVPKEQLIWQDPIPKAKYKLKNKDIKQLKSKIMKSGFSISELVSTAWASASTFRGSDKRGGANGARIRLEPQKSWEVNNPKKLSKILGRLEKIKRGFDTKKKIVSIADLIVLAGGVGIEMAAKKAGYKINVPFTPGRGDALQDQTDEFSFGLLEPKADGFRNYITRKTNGHGK

SEQ ID NO: 89627 - protein, 241 aa, Unknown
  Bacterial polypetide isolated from the Sargasso Sea
MSSDLVKEQSKCPFTGAGTPSKFPTGRGTSNRDWWPNAINLKILSLHSSLVNPMDEKFSYKKEFKKLKYKSLKKDLHKLMINSQSWWPADYGHYGPLFIRLAWHAAGTYRTGDGRGGAGTGNQRFAPLNSWPDNVNLDKARLLLWPIKKKYGKKISWADLFILVGNVALESMGFKTFGFGAGREDIWEPEDDIYWGSEKEWLGVNRYSGKRELENPLGASHMGLIYVNPQGPDANPDPILA

SEQ ID NO: 89628 - protein, 254 aa, Unknown
  Bacterial polypetide isolated from the Sargasso Sea
MENLGNKGSSNGQSTGKCPFMHGGSTSPDTSPLKWWPKRLNLDILHQHDEKTNPYSQDFNYREAVKSLDFKALEKDMHELMTTPQSWWPADWGHYGGLMIRMAWHAAGTYRVADGRGGAGTGNLRFAPLNSWPDNGNLDKARRLMWPIKKKYGNKISWADLFILAGNIAYESMGLKTFGFSYGRPDIWQPEIDIYWGPEDEIMAPSENRYADLEDTSTLETPLGATHMGLIYVNPEGVNGKPDPMKTALHVRET

SEQ ID NO: 89629 - protein, 280 aa, Unknown
  Bacterial polypetide isolated from the Sargasso Sea
GMKGHGTTNPTKWDNGYFDLLLGYDWELTKSPAGANIWHAVNQTDDHMAPDAEDSSIKVPTMMTTADIAMIEDPEYKKISVRFHENPSEFADAFARAWFKLLHRDMGPKSRYMGPEVPEEELIWQDPVPEGNRNYDLDILKEKILASGLNNQEMIETAWASASTYRGTDMRGGGNGARIRLEPQKNWEVNKPESLSKILSVYETISSETGASIADIIIYAGNLAIEKSSGIEVPFLKGRGDASQENTDINSFDVLEPLSDGFRNFHKDGIEVPAEEMLLD

SEQ ID NO: 89630 - protein, 269 aa, Unknown
  Bacterial polypetide isolated from the Sargasso Sea
MPGANIWHAVDQKEEHKAPDAEDSSKRVPTMMTTADMAMREDPEYRKISERFHKNPDEFQDAFARAWFKLLHRDMGPKTRYMGPEVPEEDLIWQDPVPIGNSDYNVDEVKTKIAESNLSIQEMVETAWASASTYRGTDMRGGANGARIRLEPQKNWQVNKPKQLSKVLNILENIAKETGASIADVIVLAGNVGIEKASGASVPFVPGRGDASQENTDVESFSVLEPEADGFRNYLKKNFTIMPEELLLDRAHLLGLSAPEMTVLVGGMR

SEQ ID NO: 89631 - protein, 212 aa, Unknown
  Bacterial polypetide isolated from the Sargasso Sea
TAWASASTFRGSDRRGGANGARIRLVPQKDWEVNNPSELSKVLKILEKIKKGFDTKSKTVSIADLIVLGGCAGIEKAAKNAGQKVSVPFTPGRGDASQDQTDTYSFDLLEPKADGFRNYIVNKPNGSPNKPTVTAEEMLVDRAQLMKLTAPEMTVLVGGMRVLGTNFDNSKHGVFTKKPGALTNDFFINLLDMNTKWKETSKEEVLFEGIDR

SEQ ID NO: 89632 - protein, 297 aa, Unknown
  Bacterial polypetide isolated from the Sargasso Sea
RPILWTISRHFHNNPKEFADAFARAWFKLTHRDMGPRACYLGPEVPKEKLIWQDPISKPNYKIKNKDIKFLKTKILKSGLSISQLVSTAWASASTFRGSDKRGGANGARIRLEPQKSWSVNNPSQLNKVIKILEKIKNNFDNKKKNVSIADLIVLGGSVGIEKAAKKAGYKINVPFSPGRGDATQDQTDTHSFSLLEPKADGFRNYITNMTNGSTKKPDVSAEEMLVDKAQLMKLSVPEMTVLIGGMRVLNTNFDKSTTGVFTKKPETLTNDFFINLLDMGITWKETDSNEQLFKGR

SEQ ID NO: 89633 - protein, 287 aa, Unknown
  Bacterial polypetide isolated from the Sargasso Sea
VPDEELIWQDPIPEGNTDYDVSNVKKLISESGLSIQEMVETAWASASTYRNSDMRGGANGARIRLAPQKDWEANKPEQLSKVLSIYEKISSETGASIADVIVLAGNVGIEKASGCEVQFTPGRGDASQDQTDVESFDVLEPIADGFRNYYSSDASIPAEEMMLDKSQLLGLTAPEMTVLLGGMRSLGISNNDYGIFTDNPEQLSNDYFSTLLDMSVAWKPNGTGNTYEGADRVSGETVRTATRVDLAFGSNSQLRALAEVYASDDAKEKFTNDFISAWNKVMNNDLI

SEQ ID NO: 89634 - protein, 317 aa, Unknown
  Bacterial polypetide isolated from the Sargasso Sea
FADAFARAWFKLTHRDMGPRSCYLGPEVPKEELIWQDPISKPKYKLKKNDVDSLKKNLSKSGLSVSELVSTAWASASSFRGSDKRGGANGARIALEPQKNWEVNNPLRLSKVLNKLKNIKKNFDTKKRIVSLADLIVLGGSVGIEKAAKKAGYKINVPFISGRGDASQAQTDEFSFGLLEPKADGFRNYTVKKTNGSSKNSISDEEMLIDKAQLMKLTAPEMTVLIGGMRMLNTNFDGSNYGVFTKKTETLTNDFFVNLLDMNTTWKEIDKDETTFEGKDRRTNKVMWKATRADLIFGSNSQLRALSEVYACEDSMQ

SEQ ID NO: 89635 - protein, 286 aa, Unknown
  Bacterial polypetide isolated from the Sargasso Sea
ETVALTAGGHTFGKSHGAADPDTYVGPEPEGAPMEEMGLGWKNSYESGKGGHTITSGIEGAWTANPTQWDNGYFDILFGYEWELVKSPAGAYQWHPINPKDEDMAPDAHDSSKKVTTMMTTADMAMREDPEYRKVSKRFHENPDQFADAFARAWFKLLHRDMGPKSRYLGPEVPEEDLIWQDPIPEGNKSFDIDAAKEKIANSGLSVSEMVETAWASASTFRGTDMRGGANGARIRLAPQKDWVANKPDQLSKVLSKYQQIANDTNASIADIIVLGGKCRNRKSYW

SEQ ID NO: 89636 - protein, 240 aa, Unknown
  Bacterial polypetide isolated from the Sargasso Sea
MSNELIKEQSKCPFTGAGTPPKHPTGKGQTNKDWWPNSLNLKILSQHSSLVNPMGEKFNYKKEFKKLNFKALKKDLHKLMTDTQDWWPADYGHYGPFFIRLAWHAAGTYRTGDGRGGAGTGNQRFAPLNSWPDNVNLDKARLLLWPIKKKYGKKISWADLFILVGNISLESMGFKTFGFGAGREDIWEPEEDIYWGSEKEWLGVNRYSGKRELENPLGASHMGLIYVNPQGPLMLIQIPY

SEQ ID NO: 89637 - protein, 172 aa, Unknown
  Bacterial polypetide isolated from the Sargasso Sea
MSTENFKSKSFKANELSKCPFTGAGTPAKFSAGRGQTNRDFWPNSLNLKILSQHSNLSNPMDKKFNYAKEFKKLNFKALKKDLKKLMTNSQEWWPADYGHYGPLFIRLAWHAAGTYRTGDGRGGAGTGNQRFAPLNSWPDNVNLDKARLLLWPIKQKYGKKISWADLFILVG

SEQ ID NO: 89638 - protein, 294 aa, Unknown
  Bacterial polypetide isolated from the Sargasso Sea
PAGASGQGSAQVGAVRTNQFWWPDQLNLSALRDHDVRSNPYGADFSYAEAFSKLDLDKVKLDINALLTQSQDWWPADFGNYGPFFIRMTWHSAGTYRTLDGRGGAGGGQQRFEPLNSWPDNGNLDKARRLLWPVKQKYGEALSWSDLMVLAGNVALENMGFKTYGFAGGRADDWEPDMVYWGPEVEMLASDREDKDGKLQRPLGATHMGLIYVNPEGPKGVPDPIGSAKNIRVAFERMAMNDEETLALIAGGHTFGKMHGARKPADCMGPEPAAAGVEEQGLGWKNKCGKGHQK

SEQ ID NO: 89639 - protein, 271 aa, Unknown
  Bacterial polypetide isolated from the Sargasso Sea
DCLFNHEWELTKSPAGAHQWTPKQNGQKIKMVPDAHDKNKMHPPMMQTTDISLRMDPAYGPISKHFYNNPKEFADAFARAWFKLTHRDMGPRACYLGNEVPKEELIWQDPVKKPKYKLKKNDIKTLKSKIYKSKLSVSELVSTAWASASTFRGSDKRGGANGARVILEPQISWEVNDPKQINKVIKTLEKIKNKFDNKKKSVSLADLIILGGNSGIEIAAKKAGIKVDVPFSPGRGDATQEQTDIHSFGLLEPQADGFRNYNKDETYYSFS

SEQ ID NO: 89640 - protein, 67 aa, Unknown
  Bacterial polypetide isolated from the Sargasso Sea
KFIGSDRKTKKAKWKGTRVDLIFGSNSQLRALAEVYACEDSKDKFIKDFVAAWVKVMNADRFDLKLN

SEQ ID NO: 89641 - protein, 189 aa, Unknown
  Bacterial polypetide isolated from the Sargasso Sea
ADVIVLAGNVGIEKASGMNVSFTPGRGDATKDQTDADSFAVLEPFSDGFRNYHNNNLEVTPEQMLLDKAQLLGLTAPEMTVLVGGMRSLGISSDGHGVFTDTEGKLTNDFFVNLLDMNVEWKPSGRNSYEATDRSTGEKVRTATRVDLVFGSNSQLRALAEVYASNDSQKKFANDFVDAWTKVMNLDRF

SEQ ID NO: 89642 - protein, 254 aa, Unknown
  Bacterial polypetide isolated from the Sargasso Sea
SIQELVETAWASASTFRGSDLRGGANGARIRLEPQKNWEVNKPEQLEKVLSVYETISSETGVSIADIIILGGNLGIEKASGKTLDFIPGRGDSSQDQTDIDSFAYLEPLSDGFRNYHRDGLDVKAEEMMLDRAQLLGLTAPEMTVLLGGLRSLGITHNGYGNFSENPNELTNDYLTKLLDMSVSWQTNGTGNSFESIDRATGDKVSSASRVDLVFGSNSQLRAIAELYAQEDSKDKFVSDFISAWNKVMNSDLY

SEQ ID NO: 89643 - protein, 276 aa, Unknown
  Bacterial polypetide isolated from the Sargasso Sea
MRKTVALVAGGHTFGKAHGAGDPDLVGVEPEGAPIEEMGFGWSNAHGSGHGVDATTSGIEGPWTANPTVWDNGYFDLLFKYEWQLTKSPAGANIWHPVDLDEADMAPEVDGSGKKVSPMMTTADMAMITDPDYRKISKRFHENPSEFSDAFARAWFKLLHRDMGPKSRYLGPEIPDEELIWQDPIPEGNANFDIKALKSDIAKSSLSVTEMIETAWASASTFRGSDLRGGANGARIRLAPQKDWEANKPKQLKAVLDVLETLAAKHEASLADTIVL

SEQ ID NO: 89644 - protein, 258 aa, Unknown
  Bacterial polypetide isolated from the Sargasso Sea
GSYRISDGRGGAGTGNLRFAPLNSWPDNTNLDKARRLLWPIKKKYGNSISWADLFILAGNIAYESMGLKMFGFSYGREDIWHPEKDIYWGSEKEFLAPSEERYENLQDTSTMENPLAATHMGLIYVNPEGVNGNPDPQVTALHIRETFARMAMNDEETVALTAGGHTVGKAHGNGDSSALGAEPEGAAVHEQGFGWKNPNGYANANETVTSGIEGAWTTNPTKWDDGYFEMLFNHDWELKKSPAGAWQWEPVDIDEKG

SEQ ID NO: 89645 - protein, 290 aa, Unknown
  Bacterial polypetide isolated from the Sargasso Sea
WADLFILVGNVALDSMGFKTFGFGAGREDIWEPEEEIYWGSEKEWFGVNRYSGKRDLEQPLGASHMGLIYVNPQGPDANPDPLLAAHDIRETFGRMAMNDYETAALVAGGHTFGKSHGAASESHKGPEPEGSKIHEQSTGWNSNYKSGKGIDTISSGIEGAWTQNPIKWDMGYLDCLYDHEWELTKSPAGAHQWTPKKNGQTIKMVPDAHDKNKKHPPMMQTTDISLKVDPSYGPITRHFHKNPKEFHDAFARAWFKLTHRDMGPKVCYLGPDVPKEELIWQDPIPKQKF

SEQ ID NO: 89646 - protein, 296 aa, Unknown
  Bacterial polypetide isolated from the Sargasso Sea
MQTTDLSMRFDPEFGRISKHFHNNPDEFADAFARAWFKLTHRDMGPKVNYLGAEVPKEDLIWQDPVPKNKYKLKNKDIEALKAKIAKSGLSVSHLVTTAWASASTFRGSDKRGGANGARVRLSPQKDWKVNNPLQLSKAIKVYEKIQKGFNSKKKNVSLADLIILGGNVGIEKAAKDAGNKIKLPFTPGRGDASQDQTDIHSFGLLEPQADGFRNYTNSESSSQAEELLVDKAQLMQLTGPEMTVLIGGMRVLGTNYDGSKHGVFTKRPGKLTNDFFVYLLDMNIKWKETSDKEDF

SEQ ID NO: 89647 - protein, 228 aa, Unknown
  Bacterial polypetide isolated from the Sargasso Sea
EMARGLIVTAEKRKLENPLGASHMGLIYVNPQGPDANPDPVLAAHDIRETFGRMAMNDYETVALVAGGHTFGKSHGAASESYKGPEPEGSKIQDQATGWNSNYKSGKGVDTISSGLEGAWTQNPKKWDMGYFDNLFGYDWELTKSPAGAHQWKPKKNGHAIEMVPDAHDKNKKHLPMMLTTDLSMRMDPKYGPISKHFHNNPKEFSDAFARAWFKLTHRDMGPRACYL

SEQ ID NO: 89648 - protein, 265 aa, Unknown
  Bacterial polypetide isolated from the Sargasso Sea
TFRGSDKRGGANGARIRLEPQKDWEVNNPTQLSKVIKTLQKIKKKFDNKKKNVSLADLIVLGGCAAIEKAAKKSGNNINVPFTPGRGDASQEQTDTYSFNLLEPKADGFRNYIIKKSNGSSSSTKQTVSAEEMLVDKAQLMKLTAPEMVVLLGGMRVLNTNFDKSNNGVFTKKPETLTNDFFVNLLDMKITWKEVDKNEELFVGKDRKTNKVKWTGTRVDLIFGSNSQLRAIAEVYATEDSRTKFINDFVVAWSKVMNLDRFDLN

SEQ ID NO: 89649 - protein, 250 aa, Unknown
  Bacterial polypetide isolated from the Sargasso Sea
YEWELTKSPAGAHMWRAKNQRQEDMAPDAEDPSILVPTMMTTADMAMREDPKYLEISERFHKNPKEFADKFARAWFKLLHRDLGPKSRYIGPEIPSEDLIWQDPVPVGPTSYDVQKVKELIKELNLSITQLVETAWASASTYRDTDKRGGANGSRIRLLPQKNWEVNKPQQLENILASYGKISSQTGASIADVIVLGGNLGVEQASGKSLDFSPGRGDATQEQTDIESFEVLEPIADGFRNYMKDGYSTS

SEQ ID NO: 89650 - protein, 263 aa, Unknown
  Bacterial polypetide isolated from the Sargasso Sea
TFRGFDKRGGANGARIRLSPQKDWEVNNPSKLLKVIKSLEKIKKSFDKKNKKVSYADLIVLCGNVGIEKAAKKNGYNINVPFKPGREDASQDQTDTFSFSLLEPKADGFRNYISKKTNGYSKIHSVSAEEMLIDKSQLLKLSAPEMTVLVGGMRVLGTNFDNSNNGVFTKKPGKLTNDFFVNLLDMGTTWKEVDKHEQLFEGKDRKTNKVKWTATRADLIFGSNSQLRAIAEVYATEDSESKFIDDFVSAWTKVMNLDRFDLN

SEQ ID NO: 89651 - protein, 307 aa, Unknown
  Bacterial polypetide isolated from the Sargasso Sea
FCRKRSTVRDFWPNSLNLKILSQHSNLSNPMDKKFNYAKEFKKLNYKALKKDLKKLMTDSQEWWPADYGHYGPLFIRLAWHAAGTYRTGDGRGGAGTGNQRFAPLNSWPDNVNLDKARLLLWPIKKKYGRKISWADLFILVGNIALDSMGFKTFGFGAGRTDIWEPEDDIYWGSEKEMLGVERYSGKRDLEQPLGASHMGLIYVNPQGPDANPDPLLAAHDIRETFGRMAMNDYETAALVAGGHTFGKSHGAASESFKGPDPEASKLQDQSTGWNSGYKSGKGVDTISSGIEGAWTQNPTKWDMGYL

SEQ ID NO: 89652 - protein, 120 aa, Unknown
  Bacterial polypetide isolated from the Sargasso Sea
LLGLTASEMTVLIGGMRALGISADGHGVFTDTPGKLTNDWFVTLLDMDVEWEATGRNTYVAKHRTTGDEVRTATRSDLVFGSNSQLRALAEVYAADGSHDKFVKDFISAWTKVMNLDRFD

SEQ ID NO: 89653 - protein, 281 aa, Unknown
  Bacterial polypetide isolated from the Sargasso Sea
RYIGPEAPTEELIWQDPVPVGNTNYDVDAVKAQIEASGLSIQEMVETAWASASTFRGSDMRGGANGARIRLSPQKDWAANKPDQLARVLSALEGIAAKSGASIADVIILAGNVGIEQASGVDVPFTPGRGDASQAQTDVESFAVLEPVADGFRNYQKTDFSVSPEEMLLDKAQLLGLSAPEMTVLLGGMRSLGISESGHGVFTKTPGKLTNDFFITLLDMDVTWKPTGSNSYEAYDRATGKAVRSASRVDLVFGSNSQLRAIAEVYATDSAQSKFVNDFVA

SEQ ID NO: 89654 - protein, 246 aa, Unknown
  Bacterial polypetide isolated from the Sargasso Sea
MDGTSKCPVMHGSSTTNSGISTSNRDWWPNQLNVNILHQNDKRSNPMALNFNYKEEFKKLDYFALKKDLTDLMTDTQEWWPADYGHYGPFFIRMTWHAAGTYRTADGRGGGGTGDQRFAPLNSWPDNGNLDKARRLLWPIKQKYGNQISWADLFILTGNVAIESMGGKTFGFSGGRDDIWSAPEDIYWGRETEWLGNKRYTGERDLEVPLGAVQMGLIYVNPQGPDGNPDPIASGKDIRETFARMA

SEQ ID NO: 89655 - protein, 270 aa, Unknown
  Bacterial polypetide isolated from the Sargasso Sea
YQGERELDNPLAAVQMGLIYVNPQGPDANPDPLASAHDIRTTFGRMAMNDYETVALVAGGHTFGKCHGAGDAELVETEPEGAPIEQMGFGWTNKHGTGLGADTITSGLEGAWTSNPTKWDNGYFELLFKYEWELGKSPAGAHQWYAIDQKEEDMAPDAHDPSKKVPTIMATTDIALREDPEYKKISKRFLENPEEFADAFAKAWFKLLHRDMGPKSRYMGPEVPEEDLIWQDPVPAGSSDYDVAAVKSKLNDSGLTIQEMVETAWASAST

SEQ ID NO: 89656 - protein, 169 aa, Unknown
  Bacterial polypetide isolated from the Sargasso Sea
MENEGKCPVMHGAMTSNSSSGTSNKDWWPEQLNLNILHQHDRKSDPMDEGFDYRKEFEDIDYDALKKDLNDLMTDSQEWWPADYGHYGPFFIRMTWHAAGTYRSTDGRGGGGTGAQRFAPLNSWPDNGNLDKARRLLWPIKQKYGKKISWANLLILAGNVAIESMGERP

SEQ ID NO: 89657 - protein, 242 aa, Unknown
  Bacterial polypetide isolated from the Sargasso Sea
MSDNDNKCPVIHGSLTSNSNSGTSNRDWWPDQLDLNILHQHDKKSDPMDEDFDYAEEFKKLDYDSLKKDLNDLMTDSQDWWPADYGHYGPFFIRMTWHAAGTYRIGDGRGGGGTGAQRFAPLNSWPDNGNLDKARRLLWPIKQKYGKQISWADLLILAGNVAIESMGGKTFGFGGGRPDIWAPEEDIHWGAETEWLTNERYSGERDLANPLGAVQMGLIYVNPQGPDGNPDPKASAIDIKET

SEQ ID NO: 89658 - protein, 282 aa, Unknown
  Bacterial polypetide isolated from the Sargasso Sea
MNDYETVALVAGGHTFGKSHGAAAESHKGPEPEGSKIQDQATGWNSNYKSGLGVDTISSGIEGAWTSNPIKWDMGYFDNLFGYDWELTKSPAGAHQWKPKRNGHDIEMTPDAHDRSKKNLPMMQTTDLSLKLDPKYGPISKHFHENPNEFADAFARAWFKLTHRDMGPKVNYLGSDVPKEELIWQDPITKNKYKLKNKDIELLKKKISKSGLSVSQLVTTAWASASTFRGSDKRGGANGARIALEPQKDWKVNNPSKLSAVIRVLNKIKKGFDSKNKSVSLA

SEQ ID NO: 89659 - protein, 276 aa, Unknown
  Bacterial polypetide isolated from the Sargasso Sea
LIWQDPINKPKYKLKSKDIKDLKLKISKSKISTSDLVSTAWASASTFRGSDKRGGANGARIMLEPQKNWKVNNPKKLSKVINDLKKIKDKFDNKKKSVSMADLIVLAGGVGIEIAAKKAGYKINVPFSPGRGDARQDQTDAHSFGLLEPQSDGFRNYLNGGATNVSSEEKLIDKAQLMGLTAPEMTVLIGGMRVLNTNYDKSKEGVFTNKPGVLTNDYFINLLDMNTTWRETDKSEQKFHGIDRKTKKTKWKATRVDLIFGSNSQLRALAEVYACD

SEQ ID NO: 89660 - protein, 146 aa, Unknown
  Bacterial polypetide isolated from the Sargasso Sea
MDAESKCPVMHGANTKNTGEGTTNRDWWPNQLDISILHQHDEKSNPMEKDFNYREHFKKIDYDGLKKDLNELMTNSQDWWPADYGHYGPFFIRMTWHAAGTYRTADGRGGGGTGAQRFAPLNSWPDNGNLDKARRLLWPIKQKIWK

SEQ ID NO: 89661 - protein, 276 aa, Unknown
  Bacterial polypetide isolated from the Sargasso Sea
RYWEPEEDIYWGSEKEWLGVNRYSGKRDLEQPLGASHMGLIYVNPQGPDANPDPLLAAHDIRETFGRMAMNDYETAALVAGGHTFGKSHGAAPESHKGPEPEGSKIYEQSTGWNSNYKSGIGVDTISSGIEGAWTQNPTKWDMGYLDCLYDHEWELTKSPAGAHQWTPKQNGQKIKMVPDAHEKGKKHPPMMQTTDISLKVDPSYGPITRHFHKNPKEFHDAFARAWFKLTHRDMGPRVCYLGPDVPKEKLIWQDPIPKQKYKIKKEEVKNLNRKF

SEQ ID NO: 89662 - protein, 279 aa, Unknown
  Bacterial polypetide isolated from the Sargasso Sea
LIWQDPISKPNYKIKNKDIKFLKTKILKSGLSVSQLVTTAWASASTFRGSDKRGGANGARIRLEPQKSWSVNNPSQLSKVIKILEKIKKSFDNKKKNVSMADLIVLGGSVGIEKAANNAGHRINVPFTPGRGDATQDQTDSHSFSLLEPKADGFRNYITKMTNGSTKKPTVSAEEMLVDKAQLMKLSVPEMTVLLGGMRVLNTNFDKSNIGVFTKKPETLTNDFFINLLDMGITWKETDNTEQLFKGRNRKTKKVEWTASRVDLIFGSNSQLRAIAEVY

SEQ ID NO: 89663 - protein, 278 aa, Unknown
  Bacterial polypetide isolated from the Sargasso Sea
MCDRILDNPLAAVQMGLIYVNPEGPDGKADPLASAKDIRETFARMAMNDTETVALTAGGHTFGKAHGAGDPALVGAEPEGAPLEQMGLGWNNLHGSGVGRDTTTSGIEGPWTPNPTQWDNGYFDMLLGYEWKLVKSPAGAQIWHAIDQKEEHMAPQVDDPSVKVPTMMTTADMAMREDPEYRKVSEKFHKDPEYFADQFARAWFKLLHRDMGPKTRYMGPEVPEEELIWQDPVPQGDSNYDVETLKAKILSCGLTTQEMVETAWASASTFRGSDMRGG

SEQ ID NO: 89664 - protein, 270 aa, Unknown
  Bacterial polypetide isolated from the Sargasso Sea
VNRYSGKRDLENPLGASHMGLIYVNPQGPDANPDLLLAAHDIRETFGRMAMNDYETVALIAGGHTFGKSHGAAPESHKGPEPEGSKIQDQATGWNSNYESGMGVHTISSGLEGAWTVDPIRWDNGYFDLLFGHEWELTKSPAGAHQWKPKKNGADINIIPDAHDPSKKHPPMMLTTDLSLRMDPKYGPISKKFHENLDEFADAFARAWFKLTHRDMGPRACYLGPEVPKEELIWQDPVPKAKYKLKKGDVNSLKTKISKSGLSVSQLVST

SEQ ID NO: 89665 - protein, 234 aa, Unknown
  Bacterial polypetide isolated from the Sargasso Sea
MSTQSEQSKCPFTGAGTPPKHPTGRGTSNRDWWPNNLNLKILSQHSEMVDPMDGKFSYSKEFKKLNYKALKKDLNKLMTDSQDWWPADYGHYGPLFIRLAWHAAGTYRTGDGRGGAGTGNQRFAPLNSWPDNVNLDKARLLLWPIKKKYGRKISWADLFVLVGNVALESMGFKTFGFGGGRADIWEPEEDIYWGSEKEWLGVNRYSGKRDLENPLGASHMGLIYVNPQGPRTLI

SEQ ID NO: 89666 - protein, 229 aa, Unknown
  Bacterial polypetide isolated from the Sargasso Sea
TLNKIKKGFDSKNKSVSLADLIVLGGSVGIENAAKKSGKKIKVSFKSGRGDAKQDQTDKNSFNLLEPIADGFRNYIKLHAKGYTNGKGIPTNSAEEMLIDKAQLLGLTGPEMTVLIGGMRVLNTNFDGSDYGVFTKKPGSLTNDFFVNLLDMKTTWREVDKEEQFFEGIDRKTKRVKWRATRADLIFGSNSQLRALSEVYATDDSNEKFLNDFISAWTKVMNLDRFDLN

SEQ ID NO: 89667 - protein, 127 aa, Unknown
  Bacterial polypetide isolated from the Sargasso Sea
DLLILAGNVAIESMGGTTFGFSGGRPDIWAPEEDINWGIEAEWLGNDRYTGERRLDNPLGAVQMGLIYVNPEGPDGNPDPLASARDIRETFGRMAMNDRETVALVAGGHTFGKAHGAGDTANVGNEP

SEQ ID NO: 89668 - protein, 260 aa, Unknown
  Bacterial polypetide isolated from the Sargasso Sea
IFGNQKKIFIGGSEKEWLGVNRYSGKRELENPLGASHMGLIYVNPQGPDANPDPILAAHDIRETFGRMAMNDYETVALVAGGHTFGKSHGAASESFKGKEPEGSKIQEQATGWNSSYKSGKGVDTISSGLEGAWTQNPKKWDMGYFDNLFGYDWELTKSPAGAYQWRPKKNGHAINMVPDAHDKTKKHLPMMLTTDLSMRMDPKYGPISKHFHDNPKEFADAFARSWFKLTHRDMGPRVCYLGPEVPKEKLIWQDPITKP

SEQ ID NO: 89669 - protein, 220 aa, Unknown
  Bacterial polypetide isolated from the Sargasso Sea
MSSEINNDINKCPFHGEGIPQKHNSGKGQTNKDWWPNSLNLKILSQHSSMVNPMDKKFSYKKEFKKLNFKALKKDLHKLMTQSQNWWPADYGHYGPLFIRLAWHAAGTYRTGDGRGGAGTGNQRFAPINSWPDNVNLDKARLLLWPIKKKYGNKISWADLFILVGNVALESMGFKTFGFGGGREDIWEPEEDIYWGSEKEWLANNRYNSKRELENPLGAV

SEQ ID NO: 89670 - protein, 269 aa, Unknown
  Bacterial polypetide isolated from the Sargasso Sea
KAHGAGDPSLVGPEPEGAKIEEMGFGWISKHGSGKGSDSITSGIEGAWTTNPIKWDNGYFDLLLNYEWELTKSPAGANIWHAVNQKDEHKAPDAEDSSKRVPTMMTTADMAMREDPSYRKISERFHKNPDEFQDAFARAWFKLLHRDMGPKIRYMGPEVPEEELIWQDPIPKGNADYNIDSAKAKILESGLSIQEMVETAWASASTFRGTDMRGGANGARIRLEPQKNWEANKPDQLSKVLNIFEGIASDTGASVADIIVLAGNVGIEK

SEQ ID NO: 89671 - protein, 260 aa, Unknown
  Bacterial polypetide isolated from the Sargasso Sea
YWVKWHFKTNQGIKTLTNEEAAKMPAYGAQQDLVESIDNGDFPSWTVNVQIMTEEEARNYHINPFDLTKVWPHSDFPLIEVGQLELNRNVDNYFAETEQAAFAPSNLVPGIGASPDRMLQARLIGYQDAHRYRIGANYNQIPVNAPRCPVHNYQRDGAFAGINPALAGSGANFYPNNRARVGEPAEAPEFQEPPMPLEQDAWLDIYDNRDEDNYSQAGDLYRIMSEDQKQQLVNNIAEGLSQATKDVQEAMFVQYDLADS

SEQ ID NO: 89672 - protein, 240 aa, Unknown
  Bacterial polypetide isolated from the Sargasso Sea
RELENPLGASHMGLIYVNPQGPDANPDPLLAAHDIRETFGRMAMNDYETVALVAGGHTFGKSHGAASESHKGPEPEGSKLQDQATGWNSNYKSGLGVDTISSGLEGAWTQNPKKWDMGYFDNLFGYDWELTKSPAGAHQWTPKKNGHAIKMVPDAHDKTKKHAPMMLTTDLSMRMDPKYGAISRHFHKNPKEFADAFARAWFKLTHRDMGPKSCYLGPEVPKEALIWQDPIPKSKYKLKK

SEQ ID NO: 89673 - protein, 219 aa, Unknown
  Bacterial polypetide isolated from the Sargasso Sea
MKNFGNGKCPVMHGGSTTQETSVTKWWPKTLNLDILHQHDKKTDPLGESYSYKKQLKSLDFSSLEKDMHELMTTPVEWWPADWGHYGGLMIRMAWHAAGSYRISDGRGGAGTGNLRFAPLNSWPDNTNLDKARRLLWPIKKKYGNSISWADLFILAGNIAYESMGLKMFGFSYGREDIWHPEKDIYWGSEKEFLAPSEQRYENIKDTSTMENPLAATHM

SEQ ID NO: 89674 - protein, 193 aa, Unknown
  Bacterial polypetide isolated from the Sargasso Sea
MSTESQEKCPVMHGALTSNQSSGTSTKDWWPEQLNLNILHQHDRKSNPMGEDFNYREEFAKIDYEALKKDLNDLMTDSQEWWPADYGNYGPFFIRLTWHAAGTYRSTDGRGGGGTGAQRFAPLNSWPDNGNLDKARRLLWPIKQKYGNQISWADLLILSGNVAIESMGGKTFGFSGGRDDIWGPEEDILWGAE

SEQ ID NO: 89675 - protein, 201 aa, Unknown
  Bacterial polypetide isolated from the Sargasso Sea
GCAAIEKAAKKAGHNVKVPFSPGRGDASQDQTDIHSFGLLEPKADGFRNYIIKRTNGSSKKVAVSAEETLVDKAQLLKLTAPEMTVLVGGMRVLNTNFDKSKHGVFTKKPEVLTNDFFVNLLDMNTTWKEVSKEEELFKGRNRKTNKVSWTGTRFDLIFGSNSQLRALAEVYACEDSKSKFITDFVSAWTKVMNLDRFDLK

SEQ ID NO: 89676 - protein, 284 aa, Unknown
  Bacterial polypetide isolated from the Sargasso Sea
NSDINVLKTKILKSGLSISDLVFTAWASASTFRGSDKRGGANGARIRLAPQKDWKVNNPTQLSKVIKTLEKIKKSFDGKKKSVSMADLIVLGGCAAIEKAANKAGHNVKVPFSPGRGDASQDQTDIHSFGLLEPKADGFRNYITKKTNGSSTKPTVSAEETLVDKAQLLKLTAPEMTVLIGGMRVLNTNFDRSKHGVFTTKPETLTNDFFVNLLDMSTTWKETSKEEDLFIGKNRKTNKVKWSGTRFDLIFGSNSQLRAIAEVYACEDSKSKFITDFISAWSKK

SEQ ID NO: 89677 - protein, 226 aa, Unknown
  Bacterial polypetide isolated from the Sargasso Sea
MAMNDYETVALVAGGHTFGKSHGAAPESHKGPEPEGSKIQEQATGWNSNYKSGLGVDTISSGIEGAWTSNPIKWDMGYFDNLFGYDWELTKSPAGAHQWKPRKNGHAISMTPDAHLKSQKNMPMMQTTDLSLKLDPSYGPISKHFHNNPKEFADAFARAWFKLTHRDMGPRSCYLGPEVPKEELIWQDPIPKPKYKLKKKDINTLKNNLSKSGLSVSDLVSTAWAS

SEQ ID NO: 89678 - protein, 276 aa, Unknown
  Bacterial polypetide isolated from the Sargasso Sea
TNQLGWNSSYRSGKGFDTISSGIEGAWTQSPTKWDMGYFDCLFSHEWELTKSPAGAHQWTPKKNGQRIKMVPDAHDKNKTHPPMMQTTDLSLRMDKSYGPISKYFYNNPNEFADAFARAWFKLTHRDMGPKTCYLGSEVPKEELIWQDPIDRPKYKLKSVDIKNLKSKILKSKITVSDLVSTAWASASTYRGSDKRGGANGARILLEPQKSWKVNNPKQLTKVIKSLQKIKKSFDTKNKSVSMADLIVLGGNVGIEIAAKKAGHKVNVPFLPGRGD

SEQ ID NO: 89679 - protein, 292 aa, Unknown
  Bacterial polypetide isolated from the Sargasso Sea
MLFGYEWELVKSPAGAHQWHPVSPKDEDLAPDVEDSSIKVTTIMTTADMAMREDPSYRKISKHFHENPDEFADAFARAWFKLLHRDMGPKKRYLGPEVPGEELIWQDPVPEGSTDYDVEDVKSKIESSNLTIQEMIETAWASASTFRGSDLRGGANGARIRLAPQKDWEANKPEQLEKVLNVLEPIANSTGASIADVIVLAGNVGIEKACGKSIPFTPGRGDASQEQTDEHSFAVLEPYSDGFRNYHKSNFQISSEHMLVDKAQLLGLTSTEMTLLVGGLRSLGIDHKTQVI

SEQ ID NO: 89680 - protein, 439 aa, Unknown
  Bacterial polypetide isolated from the Sargasso Sea
PESHKGLEPEGSKIQEQATGWNSNYKSGKGVDTISSGIEGAWTTNPIKWDMGYFDNLFGYNWELTASPAGAHQWKPKKNGRDVEMTPDAHEKSRKNLPMMQTTDLSLKMDPKYGPISRHFHNNPKEFADAFARAWFKLTHRDMGPRACYLGPDVPKEKLIWQDPIPKAKYKLKNKDIKQLKSKILKSGLSISELVSTAWASASTFRGSDKRGGANGARIRLEPQKSWEVNNPKKLSKVLSKLEKIKKGFDTKKKIVSIADLIVLAGGTAIEKAAKKGGHKINVPFSPGRGDASQDQTDKFSFGLLEPKADGFRNYVTRKTNGHGKISISAEEMLIDKAQLMKLTAPEMTVLVGGMRVLNTNFDGSKNGVFTKKTETLTNDFFINLLDMNTTWKETDKNETLFEGRDRKSNKVKWKGTRADLIFGSNSQLRALAEVYGCE

SEQ ID NO: 89681 - protein, 296 aa, Unknown
  Bacterial polypetide isolated from the Sargasso Sea
MSTENFKNKSFKANELSKCPFTGAGTPAKFSAGRGQTVRDFWPNSLNLKILSQHSNLSNPMDKKFNYAKEFKKLNYKSLKKDLKKLMTDSQEWWPADYGHYGPLFIRLAWHAAGTYRTGDGRGGAGTGNQRFAPLNSWPDNVNLDKARLLLWPIKKKYGRKISWADLFILVGNVALDSMGFKTFGFGAGRTDIWEPEDDIYWGSEKEMLGVERYSGKRDLEQPLGASHMGLIYVNPQGPDANPDPLLAAHDIRETFGRMAMNDYETAALVAGGHTFGKSHGAASESYKGPDPEASK

SEQ ID NO: 89682 - protein, 279 aa, Unknown
  Bacterial polypetide isolated from the Sargasso Sea
MGPRACYLGPDVPKEQLIWQDPVPKQKYKIKKSEIKKLKAQILKSGLKTSELISTAWASASTFRGSDKRGGANGARLRLEPQKNWEINKVSKTDKVIKALEKIKKQFDGKKKSVSIADLIVLGGCVAIEKAAKKAGHKVDVPFSAGRGDASQDQTDINSFGLLEPKADGFRNYLNSDTNISAEELLVDKAQLMRLTAPEMTVLVGGMRVLDANYDGSDNGVFTKKPGSLSNDYFKNLLDMNTTWKEVDKEEQLFVGKDRNTNKVKWKGTRVDLIFGSNL

SEQ ID NO: 89683 - protein, 242 aa, Unknown
  Bacterial polypetide isolated from the Sargasso Sea
LEPQKSWAVNNPKKLSVVIKTLNKIKDQFDNKKKSVSMADLIVLAGGVGIEMAAKKAGHKVNVPFSAGRGDARQDQTDIHSFGLLEPQSDGFRNYLNGGASNVSAEEKLVDKAQLMGLTAPEMTALIGGMRVLNTNYDGSNYGVFTNKPGSLTNDYFVNLLDMNTTWKEEDKSEQTFVGKDRKTQKTKWKATRVDLIFGSNSQLRALAEVYACEDSSEKFVKDFIAAWVKVMNSDRFDLKLN

SEQ ID NO: 89684 - protein, 199 aa, Unknown
  Bacterial polypetide isolated from the Sargasso Sea
MENLKHNGSINGQSTGKCPFMHGGSTSPDTSPLKWWPKRLNLDILHQHDEKTNPYNKEFNYRDEVKSLDFKALEKDMHDLMTTPQSWWPADWGHYGGLMIRMAWHAAGTYRVADGRGGAGTGNLRFAPLNSWPDNGNLDKARRLMWPIKKKYGNKISWADLFILAGNIAYESMGLKTFGFSYGRPDIWQPEIDIYWGPE

SEQ ID NO: 89685 - protein, 231 aa, Unknown
  Bacterial polypetide isolated from the Sargasso Sea
MSTEFRNKDFKNKELSKCPVTGAGTSAKFSAGRGQSNRDFWPNSLNLKILSQHSNLTNPMDKKFNYAKEFKKLNYKALKRDLTKLMTDSQEWWPADYGHYGPFFIRLAWHAAGTYRTGDGRGGAGTGNQRFAPLNAWPDNVNLDKARLLLWPIKQKYGKQISWADLFILVGNVALESMGFKTFGFGAGRVDIWEPEDDIYWGSEKEMLGVERYSGKRDLEQPLGASHMGII

SEQ ID NO: 89686 - protein, 246 aa, Unknown
  Bacterial polypetide isolated from the Sargasso Sea
MDAESKCPVMHGAITKNMGEGTSNREWWPNQLNLNILHQHDRKSDPMEPNFNYREEFKKLDYTALKKDLNNLMTDSQDWWPADYGHYGGFFIRMTWHAAGTYRTGDGRGGGGTGAQRFAPLNSWPDNGNLDKARRLLWPIKKKYGNKISWADLFILTGNVAIESMGGKTFGFSGGRPDIWAPEEDIYWGVEEEWLQNKRYTGDRVLDNPLAAVQMGLIYVNPEGPDGKADPLASARDIRETLEEWQ

SEQ ID NO: 89687 - protein, 361 aa, Unknown
  Bacterial polypetide isolated from the Sargasso Sea
QKEEDMAPDAGDPSVRVPTMMTTADMSMREDPAYNKISKRFHENPDEFADAFARAWFKLLHRDMGPKSRYLGPEVPDEELIWQDPIPEGNANYDIESVKSKINESGLTIQQMVETAWASASTFRGSDLRGGANGARIRLAPQKDWEANKPKELSEILKVFEGIANDTGASIADVIVLAGNVGIEKASGSEVPFTPGRGDATAEQTDEESFAVLEPVSDAFRNYHQSGINMPSEELMLDKAQLLGLTAPEMTALVGGMRSLGISADGHGVFTDDVNNLSNDFFDALLDMSVEWKPNGTGNSYEATDRVSGEKVRTASRSDLVFGSNSQLRAIAEVYASSDGMNKFTSDFIGAWNKVMNADLV

SEQ ID NO: 89688 - protein, 219 aa, Unknown
  Bacterial polypetide isolated from the Sargasso Sea
MGRKYPEQLSRVLGVLENIASDTGASVADVIVLAGNVGIEQASGATVPFTPGRGDATQDNTDEHSFEVLEPFSDGFRNYHKSDFEIGAEHMLLDKAQLLGLTAPEMTVLVGGMRALGISADGHGLFTDTPGKLTNDWFSKVLDMTVEWTATGRNSYEGKDRSTGEKVRTATRADLVFGSNSQLRALAEVYGSDGAQDKFVSDFIAAWNKVMNLDRFDLS

SEQ ID NO: 89689 - protein, 343 aa, Unknown
  Bacterial polypetide isolated from the Sargasso Sea
MSAEFHKSKTFKSAELSKCPFTGAGTPAKFSAGRGQTNRDFWPNSLNLKILSQHSNLSNPMEKKFNYSKEFKKLNYKALKKDLNKLMTDSQDWWPADYGHYGPLFIRLAWHAAGTYRTGDGRGGAGTGNQRFAPLNAWPDNVNLDKARLLLWPIKQKYGKRISWADLFILVGNIALESMGFKTFGFGAGRTDIWEPEDDIYWGSEKEMLGVKRYSGKRDLEQPLGASHMGLIYVNPQGPDFNPDPLKAAHDIRETFGRMAMNDYETVALVAGGHTFGKSHGAAPESHKGPDPEASRIQDQATGWNSNYKSGKGVHAISSGIEGAWTQTPTQWDMGYFDLLFNH

SEQ ID NO: 89690 - protein, 464 aa, Unknown
  Bacterial polypetide isolated from the Sargasso Sea
ATPWGKCHGNGKAQDLGPEPEGEELEAQGLGWLNKKGPGTGANAVTSGLEGAWTTHPTQWDNGYFHLLLNYDWELKKSPAGASQWEPINIKEEDKVVSVGDPNRKFNPIMTDADMAMKMDPEYRKISEKFYQDPAYFSEVFARAWFKLTHRDLGPKSRYLGPEVPNEDLLWQDPIPSVDYRLDASEIVELKAKLLASGLSVSELVATAWDSARTFRGSDFRGGANGARIRLAPQKDWQANEPERLQKVLKVLTELQASLSKKVSIADLIVLGGAAAIEKAAHAAGVKITVPFIPGRGDATQAMTDVESFAVLEPLHDAYRNWQKKDYVVQPEEMMLDRTQLMGLTAHEMTVLIGGMRVLGTNYGGTRHGVFTDKVGVLSNDFFVNLTDMAYNWKPAGSNLYEIVERKTGAVKWTATRVDLVFGSNSILRSYAEVYAQDDAKEKFVHDFVAAWTKVMNADRFDLA

SEQ ID NO: 89691 - protein, 254 aa, Unknown
  Bacterial polypetide isolated from the Sargasso Sea
RGSDKRGGANGGRICLEPQKNWKVNNPKHLSKVINALEKIQKAFNSKSKSVSIADLIVLGGSVGIEKAAKAAGEKITVPFTPGRGDATQEQTDIDSFGLLEPQADGFRNYVKGDYSLSAEEMLVDRANLMKLTAPEMTVLIGGMRVLNTNFDNSNHGVFTKKPGKLTNDFFINLLDMNTTWKETSNKEDLFEGKDRKTGKVKWKGTRADLIFGSNSQLRAFAEVYACEDSKEKFLADFVAAWTKVMNLDRFDLK

SEQ ID NO: 89692 - protein, 231 aa, Unknown
  Bacterial polypetide isolated from the Sargasso Sea
MSEKSKCPFTGAGTPPKFPTGKGTSNRDWWPNSLNLKILSQHSSLVDPMGKKFNYEKEFKKLNYKALKKDLHKLMTDSQDWWPADYGHYGPLFIRLTWHAAGTYRTGDGRGGGGTGNQRFAPLNSWPDNVNLDKARLLLWPIKKKYGKQISWADLFILVGNVALESMGFKTFGFGGGREDIWEPEEDIYWGSEKEWLGVNRYSGKRDLENPLGASHMGLIYVNPQGPDANP

SEQ ID NO: 89693 - protein, 271 aa, Unknown
  Bacterial polypetide isolated from the Sargasso Sea
DVNSLKAKIAASDLSIQEMIETAWASASTFRGSDLRGGANGSRIRLAPQKDWDVNKPEQLTKVIATLQPLADEAGASLADTIVLAGNVGIEKAAGVEVPFMPGRGDASEEQTDSESFKVLEPLADGFRNYQKTEFSVSPEEMLVDKAQLLGLSAPEMTVLVGGMRSMGISQSGLGLFSDNSNKLDNSFFKTLLDMSVEWKPSGKNSYEGFDRVSGEKVRSASRVDLVFGSNSQLRSLAEVYAMDDANDKFVQDFISAWNKVMNADRFDLDT

SEQ ID NO: 89694 - protein, 454 aa, Unknown
  Bacterial polypetide isolated from the Sargasso Sea
EPEGSKIHEQSTGWNSNFKSGKGVDTISSGIEGAWTQNPIKWDMGYLDCLYDHEWELTKSPAGAHQWTPKKNGQKIKMVPDAHDKNKMHPPMMQTTDISLKVDPSYGPITRHFHKNPKEFHDAFARAWFKLTHRDMGPKVCYLGPEVPKEDLIWQDPIPKQKYKLNKRDIGNLENQILKSGLSISQLVSTAWASASTFRGSDKRGGANGARIRLQPQKDWHINKISKVDKVIKVLEKIKKNFDKKNKNVSIADLIVLAGNVAIEKAAKKSGHKIKIPFTQGRGDALQEQTDVFSFNLLEPVADAFVNYQKSVSNTSSEEMMIDKAQLMQLTSPEMTVLFGGMRVLGTNFDGSNYGVFTKKVGTLTNDYFKNLLDMNITWNEKGEDEQYFEGRNRKSKKVVWEGSRVDLIFGSNSQLRAIAEVYASEDSNKKFVNDFAKVWSKVMNLDRFDKKIN

SEQ ID NO: 89695 - protein, 186 aa, Unknown
  Bacterial polypetide isolated from the Sargasso Sea
MDNTETDIEKCPVMHGSMTKNTTSGTSNKDWWPDQLNLSILHQHDKKSNPMGEDFDYKSEFEKLDYYALKQDLLDLMTDSQEWWPADYGHYGPFFIRLTWHAAGTYRSTDGRGGGGTGAQRFAPLNSWPDNGNLDKARRLLWPVKEKYGNKISWADLLILAGNVAIEIMGGKTYGFSGGRPDIWSP

SEQ ID NO: 89696 - protein, 423 aa, Unknown
  Bacterial polypetide isolated from the Sargasso Sea
MGFGWKNAHGSGKGSDTITSGIEGAWTTNPTKWDNGYFDLLLNNEWELVKSPAGANQWHIVNPKDEDLAPDAGDDTKRVPTMMTTADMAMREDPDYRKVSERFHKNPDEFADAFARAWFKLLHRDMGPKVRYLGPEVPEEDLIWQDPVPVGNSDFDVKEVKEKILASDLSIQEMIETAWSSASTFRGSDMRGGANGARVRLAPQKDWDANKPEQLAKVLGVLEGIASETGASVADVIVLAGNVAIEKASGVEVPFLSGRGDATSEHTDVESFEVLEPLADGFRNYQKIDFSVTPEEMLVDKAQLLGLTAPEMTVLVGGLRSLGVSADGHGVFTDNINTLSNDFFKTLLDMSVEWKPVSKNSYEATDRVSGEKIRTASRVDLVFGSNSQLRAIAEVYAEDDSKNKFVNDFIAAWNKVMNADRFD

SEQ ID NO: 89697 - protein, 520 aa, Unknown
  Bacterial polypetide isolated from the Sargasso Sea
GVEDEWLENKRYKGERELDNPLAAVQMGLIYVNPQGPDANPDPLASAHDIRETFGRMAMNDYETVALVAGGHTFGKCHGAGDAELVQDEPEGAPIEQMGLGWTNKHGSGLGADSITSGLEGAWTTNPIKWDNGYFDLLFKYEWKLGKSPAGAHQWYAVDQDEEDMAPSAHDPSIKEPTIMATTDIALREDPEYNKISKHFHENPDEFADAFAKAWFKLLHRDMGPKANYIGPEVPEEELIWQDPVPAGNSDYDVAAVKSKIDGLGLSIQEMTETAWASAFTYRGSDLRGGANGARLRLAPQKDWEVNKPEQLSKVLSAYEGISEDTGVSMADIIVLAGNLAIEKASGSEVPFTPGRGDASQEQTDEESFAYLEPFSDAFRNYHRSGLDVSAEEMMLDKAQLLGITAPEMTVLLGGMRSLGITASDYGLVSENSDTLSNDYFKTLLDMRVQWKPNGTGNSYEAFDRVSGEKARTASRADLVFGSNSQLRAYVEVYAQDDSSEKFTKDFIKAWNKVMNNDLF

SEQ ID NO: 89698 - protein, 227 aa, Unknown
  Bacterial polypetide isolated from the Sargasso Sea
MSEQSKCPFTGAGTPPKHPTGRGTSNKDWWPNNLNLKILSQHSSLVNPMDKKFSYAKEFKKLNYKSLKKDLNKLMTNSQEWWPADYGHYGPLFIRLAWHAAGTYRTGDGRGGAGTGNQRFAPLNSWPDNVNLDKARLLLWPIKKKYGKKISWADLFILVGNVSLESMGFKTFGFGAGREDIWEPEEDIYWGSEKEWLGVNRYSGKRDLENPLGASHMGLIYVNPQGP

SEQ ID NO: 89699 - protein, 363 aa, Unknown
  Bacterial polypetide isolated from the Sargasso Sea
QLIPSEEDMAPDPEDPTKKVNTIMTTADMAMKMDPEYNKISKHFHENPEEFADAFARAWFKLLHRDMGPKKRYLGPEVPSEDLIWQDPVPEGSTDYDVESVKKQIKESGLSIQEMVETAWASASTYRHTDMRGGANGARIRLAPQKDWAVNKPEQLQKVLNILEPIAEQNKASVADVIVLAGNIGIEMATGKSLTFSPGRGDASQDQTDIESFAVLEPFSDGFRNYHNKDFSINAENMLLDKAHLLGLNAPEMTVLVGGMRSLGIDFNENGNFTDDQNSLTNDFFNNLLDMNVKWEPAGRNSYNGNDRSSGEVIRSATRADLVFGSNSQLRALAEVYSQDDSSVKFINDFIDAWTKVMNNDRF

SEQ ID NO: 89700 - protein, 202 aa, Unknown
  Bacterial polypetide isolated from the Sargasso Sea
GIASDIGASVADIIVLAGNVGIEKASGVSVPFTPGRGDATQENTDIESFNVLEPEADGFRNYLKKNYTVTPEELMLDKAHLLGLTAPEMTVLYGGMRSLGISSDDRGIFSDNSEKLTNQFFTKLLDMSVKWEATGSNSYQATDRQSGSKIRRASRTDLVFGSNSQLRALAEVYAQSDSHDKFIADFIIAWNKVMNADRFDLN

SEQ ID NO: 89701 - protein, 312 aa, Unknown
  Bacterial polypetide isolated from the Sargasso Sea
MSAESKCPFTGVGTPPKFPTGRGTSNRDWWPNSLNLKILSQHSSLVNPMDKKFNYKKEFKKLNFKALKKDLQKLMTDSQDWWPADYGHYGPLFIRLSWHAAGTYRTGDGRGGAGTGNQRFAPLNSWPDNVNLDKARLLLWPIKKKYGNKISWADLFILVGNVALETMGFETFGFGGGREDIWEPEEDIYWGSEKEWLGVNRYSGKRELENPLGASHMGLIYVNPQGPDANPDPLLAAHDIRETFGRMAMNDYETVALVAGGHTFGKSHGAASESFKGPEPEGSKIQEQATGWNSNYKSGLGADTISSGIEGA

SEQ ID NO: 89702 - protein, 148 aa, Unknown
  Bacterial polypetide isolated from the Sargasso Sea
MDAESKCPVMHGANTKNTGEGTTNRDWWPNQLDISILHQHDEKSNPMEKDFNYREHFKKIDYDGLKKDLNELMTNSQDWWPADYGHYGPFFIRMTWHAAGTYRTADGRGGGGTGAQRFAPLNSWPDNGNLDKARRLLWPIKQKYGNQN

SEQ ID NO: 89703 - protein, 229 aa, Unknown
  Bacterial polypetide isolated from the Sargasso Sea
KFFERIKKNFDNKKKSIFLADLIVLGGCVAIEKAAKKAGHNINVPFKPGRGDASQDQTDSYSFGLLEPKADGFRNYIVKPTNGSSNKPTVSAEEMLVDKAQLMKLTAPEMTVLIGGLRMLNTNFDKSKNGVFTKKQETLSNDFFVNLLDMKTIWKEVDKEEELFIGRDRKTNKVKWTATRVDLIFGSNSQLRAISEVYASEDSKSKFIEDFVKAWTKVMNLDRFDVNQN

SEQ ID NO: 89704 - protein, 252 aa, Unknown
  Bacterial polypetide isolated from the Sargasso Sea
MESQNKCPVSHGAESQHTQGAHSNHQWWPDNINLDILHQHDKKSNPMNGFDYKKEFEKLDYESLKNDLHKLMTDSQEWWPADYGHYGPFFIRMTWHAAGTYRTADGRGGGGTGAQRYAPLNSWPDNGNLDKARRLLWPIKKKYGNQISWADLIILTGNVAIESMGGKVFGFGGGRDDIWAPEKDIFWGKETEWLTNERYTGERELDQPLAAVQMGLIYVNPQGPDGNPDPLKSAVDIRETFKRMAMNDYETV

SEQ ID NO: 89705 - protein, 721 aa, Unknown
  Bacterial polypetide isolated from the Sargasso Sea
MSEGLKKNGNGNGKCPVMHGGVTKAGESNTSRQWPNSINLDILHQHDTKTNPLPKFDYKKEVKKLNFKALKKDLLKLMTDSQEWWPADLGTYSGLMVRLTWHQVGTYREFDGRPNVGSHRFSPQDSWPDNTNLDKARRLLWPIKKKYGNRLSWSDLMVLAGTMAYEHAGFKTFGFSFGREDIWEPEKDVYWGKETEPLAVNRYGDPKDRSSLEAPLAASHFQLVYVNPQGVEGKPDPVRTAMDVRETFGRMGMNDVETAALTVGGHSIGRAHGNGNPDNLGPEPAGADIHEQGFGWNQKNGTGANQITSGLEGAWTTNPDKWDHQYLDLLLNYKWESKKSPAGAWQWEPVNLEEDKKPRDLGDPNKKARLMFTDADMAMAMDPEYRKISERFYADPKFFEDSFARAWFKLTHRTMGNKGNYIGPWAPKEDLLWQGNVTSPKKKYNVNKVKKMISATSLSTGDLITIAWDSARTYRRTDKRGGANGARIRLAPMKDWEANEPKKLAKTLKILENIANKTGATIADTIILAGNVGLEKAIKKAGSKVKVPFSPGRGDSSQEQTELKSFKWLEPLHDGFRNYAKADYSVMPEELILERASLMGLTAQEMTCLVGGMRVLGTNHESAKDKGLLTNKVGALTNDFFINLLDMKYTWKPTGKNSYDIVDRKTNRVKYTASRADLVFGSNSILRSYAEVYAQDDNKEKFIEDFVKIWTKIMNADRQVH

SEQ ID NO: 89706 - protein, 204 aa, Unknown
  Bacterial polypetide isolated from the Sargasso Sea
VLGGSVGIEKAAKNAGHKINVPFIPGRGDATQDQTDTHSFGLLEPKADGFRNYITKMINGSSRKPTVSAEEMLVDKAQLMKLSAPEMTVLIGGMRVLNSNFDNSNIGVFTKKPETLTNDFFINLLDMGITWKETDSNEQLFNGRDRKTNKVKWTASRVDLIFGSNSQLRAIAEVYACEDSKIKFISDFIAAWTKVMNLDRFDLN

SEQ ID NO: 89707 - protein, 371 aa, Unknown
  Bacterial polypetide isolated from the Sargasso Sea
MGYLDCLYGHDWELTKSPAGAHQWTPKKNGQKIKMVPDAHQKGVLHPPMMQTTDISMKVDPSYGPITKHFHKNPKEFHDAFARAWFKLTHRDMGPRVCYLGNEVPKEQLIWQDPIDKPKYKLKSKDIKDLKNKISKSKISISDLVSTAWASASTFRGSDKRGGANGARIMLEPQKSWAVNNPKKLSTVVKALNKIKDQFDNKKKSVSMADLIVLAGGVGIEMAANKAGYKVNVPFSAGRGDARQDQTDIHSFGLLEPQADGFRNYLNGGASNVSAEEKLVDKAQLMGLTAPEMTALIGGMRVLNTNYDGSNYGVFTNKPGSLTNDYFVNLLDMNTTWKEEDKSEQTFVGKDRKTQKNKWKATRVDLIFGSN

SEQ ID NO: 89708 - protein, 226 aa, Unknown
  Bacterial polypetide isolated from the Sargasso Sea
RLAPQKDWEANKPEQLSRVLGVLENIASETGASVADVIVLAGNVGIEKASGESVPFTPGRGDATQEHTDEHSFAVLEPVSDGFRNYHKKGFDINSEHMLVDKAQLLGLTASEMTVLIGGMRALGISADGHGVFTDTPGKLTNDWFVTLLDMDVEWEATGRNTYVAKHRSTGDEIRTATRSDLVFGSNSQLRALAEVYAADGSHDKYVKDFISAWNKVMNLDRFDQA

SEQ ID NO: 89709 - protein, 213 aa, Unknown
  Bacterial polypetide isolated from the Sargasso Sea
DTKKKTVSIADLIVLSGNVGIEKAAKKAGKKVEIPFLPGRGDATQKQTDIHSFNLLEPLADGFRNYLKSGKSITSAEEKLVDKAQLMGLTAPEMTVLVGGLRVLNTNFDNSKNGVFTKNPGALTNDYFINLLDMNITWKEIDEKDEFFEGKDRKSNKIKWKGSRVDLIFGSNSQLRAISEVYACEDSMPKFINDFVNAWTKVMNLDRFDVRYN

SEQ ID NO: 89710 - protein, 323 aa, Unknown
  Bacterial polypetide isolated from the Sargasso Sea
HRDMGPRVCYLGNEVPKEQLIWQDPIDKPKYKLKSKDIKDLKNMISKSKISISDLVSTAWASASTFRGSDKRGGANGARVMLEPQKNWKVNNPKKLSIVTKALSKIKSKFDNKKRNVSMADLIVLAGGVGIEMAAKKAGYKVQVPFSAGRGDARQDQTDIHSFSLLEPNADGFRNYLNGGASNVSAEEKLVDKAQLMGLTAPEMTALVGGMRVLNTNYDGSKHGVFTNRPGSLTNDYFVNLLDMNTTWKEEDKSEQTFVGKDRKTQKTKWKATRVDLIFGSNSQLRALAEVYACEDSGDKFVKDFIAAWVKVMNSDRFDLRLN

SEQ ID NO: 89711 - protein, 159 aa, Unknown
  Bacterial polypetide isolated from the Sargasso Sea
MTDKSEGKCPVMHGAMTTNSSSGTSTRDWWPNQLNLNILHQHDKKSNPMDEDFDYREEFKKIDYEALKKDLNELMTDSQDWWPADYGHYGPFFIRMTWHAAGTYRNTDGRGGGGTGAQRFAPLNSWPDNGNLDKARRLLWPIKQKYGKQISWADLLILA

SEQ ID NO: 89712 - protein, 456 aa, Unknown
  Bacterial polypetide isolated from the Sargasso Sea
SSVSLVSNNVSTNRAKSGDNLTLFFTSSEPIPVPTVTLSGSTTTATSGNGTDWQAVHPVGNNTPNGSASFSISFVDEAGNVGTAVTTTTDQSSVNVDTTTPTLTLVKLKSNNSDNTSLAKFGDTVTLEFDASETIEAPSVQINGIESTVSFGSDSDWMATYNVPEYRAKVSTYAGQAGVSGLVNAQGSEARMKYPYGLAYDSAGNLYFSDQGNHSIRKIDTLGNITTFAGSGISGSTDGQGLSASFNNPYGIVFDQADNLYVVDNLNKKIRKIDPSGYVSTFAGNGTASLIDGQGTDASFNKPTNIAIDSSGNLYVSEYGSSSIRKITPDANVTTFAGTGSRGSNNGQGTSASFDRPYGLVFDSSSNLYVGDYGNHVIRKIDPSGNVTTFAGIMDSSGFSDGQGTSASFYGPVGLTIDPQGNLYVTDQRNHSIRKIDPSRKVITIAGTGSEGAAEE

SEQ ID NO: 89713 - protein, 261 aa, Unknown
  Bacterial polypetide isolated from the Sargasso Sea
AKLSDCGLSIQEMVETAWASASTFRGSDLRGGANGSRIRLAPQKDWEANKPEQLARVLGVYESIASESNASLADVIILGGNVGIEKASGAQVPFTPGRGDASEEQTDADSFDALEPIADGFRNFQKEGSSLPSEEMMLDRAQLLGLTAPEMTVLIGGMRALGISSNNHGVFTETPGKLTNDFFVNLLDMGVEWKSTGENSYEAIDRQSGDKVRTATRVDLVFGSNSQLRAIAEVYASDDSKEKFVSDFVAAWNKVMNADLT

SEQ ID NO: 89714 - protein, 180 aa, Unknown
  Bacterial polypetide isolated from the Sargasso Sea
PGRGDATQDQTDTHSFNLLEPKADGFRNYITKMTNGSTKKPTVSAEEMLVDKAQLMKLSAPEMTVLIGGMRVLNSNFDKSNIGVFTKKPETLTNDFFINLLDMGITWKETDSNEQLFNGRDRKTNKVKWTASRVDLIFGSNSQLRAIAEVYACEDSKIKFISDFIAAWTKVMNLDRFDLN

SEQ ID NO: 89715 - protein, 271 aa, Unknown
  Bacterial polypetide isolated from the Sargasso Sea
EESQGVKSLDAEAVTKTQGMDFNHLTRDLYQNINAGNNPKWDLYVQVITPEQLDDFDFNPLDATKTWPGVKERKVGTMTLNRMPDNFFEETEQAAFAPANLIPGIEPSEDRLLQGRIFSYADTQLYRLGVNHSQLPINRARVMVDNHNQDGVMNFGNSTSTVNYEPSRIEPKTVTTAARAVETQLDGTVMQKAISKQDNFSQAGALYRSFDKQQQANLIRNLSGDLGQVKDAVTKHKMLAHFYKADSDYGTRLTKAVNGDLKQVQQIAKSL

SEQ ID NO: 89716 - protein, 376 aa, Unknown
  Bacterial polypetide isolated from the Sargasso Sea
TCKSPAGALQWFAVDQKEEDMAPDAHDPTKKVPTMMATTDIALKEDPIYKVISKRFHENPEEFADAFARAWFKLLHRDMGPKSRYMGPEAPDEELIWQDPVPAGNADYDIDSVKEKINQSGLTIQEMVETAWASASTYRGSDMRGGANGARIRLAPQKDWEVNKPEQLSKVLEVYEKISSDTGASIADVIVLAGNVGIEKASGMDVPFSPGRGDASQDQTDIESFAYLEPRSDGFRNYHESGIEVKPEEMLLDKSQLLGLTAPEMTVLIGGMRSLGINHSDYGIKPENPDALDNDFFKTLLDMRVSWKPNGTGNSYEGSDRVTGESVRTATRPDLVFGSNSQLRALVEVYAANDSKEKFLKDFVKAWDKVMTNDLF

SEQ ID NO: 89717 - protein, 211 aa, Unknown
  Bacterial polypetide isolated from the Sargasso Sea
MTDKTEGKCPVMHGAMTTHSSSGTSNKDWWPNQLNLNILHQHDRKSNPMDDDYDYRKEFEKIDYDALKNDLVELMTDSQEWWPADYGHYGPFFIRMTWHAAGTYRNTDGRGGGGTGAQRFAPLNSWPDNGNLDKARRLLWPVKQKYGKQISWADLLILAGNVAIESMGGTTFGYSGGRPDIWGLEDDIHWGLESEWLDNKRYKGERELDNP

SEQ ID NO: 89718 - protein, 516 aa, Unknown
  Bacterial polypetide isolated from the Sargasso Sea
QWLENTRYKGERELDNPLAAVQMGLIYVNPQGPDANPDPMASAHDIRTTFGRMAMNDYETVALIAGGHTFGKCHGAGDAELVESEPEGAPIEQMGLGWTNGHGTGLGQDAITSGLEGAWTSNPIQWDNGYFELLFKYEWELGKSPAGAHQWYAKDQAEEDMAPDAHDPSKKVPTIMATTDIALKTDPSYKKISEGFLNNPEEFADAFAKAWFKLLHRDMGPRSNYMGPESPEEDLIWQDPIPEGNANYDVSEVRSKLEASGLSLQEMIETAWASASTYRGSDMRGGANGARIRLAPQKDWEANKPEQLSKVLAIYDSIAAETGASVADVIVLAGNIGIEKSAGVEVPFTPGRGDATEDQTDPESFEYFEPLSCAFRNYHRSGLSVSAEEIMLDKSQLLGLTAPEMTVLIGGMRSLGITGSDYGLISESIDELSNDYFKTLLDMRVQWKPNGTGNSYEAFDRVTGEKARTASRADLVFGSNSQLRALVEVYATDDNKDKFVADFISAWNKVMNADLF

SEQ ID NO: 89719 - protein, 268 aa, Unknown
  Bacterial polypetide isolated from the Sargasso Sea
EASRIQDQSTGWNSDYKSGKGVDTISSGIEGAWTQSPIKWDMGYFDCLFNHEWELTKSPAGAHQWTPKQNGQKIKMVPDAHDKNKMHPPMMQTTDLSLRMDPSYGPISKHFYNNPAEFADAFARAWFKLTHRDMGPRACYLGNEVPKEELIWQDPVKKPKYKLKKSDIKTLKSKISKSKLSVSELVSTAWASASTYRGSDKRGGANGARVSLEPQINWDVNDPNQIKKVIKTLEKIKNKFDNKKKSVSLADLIVLGGNAGIEMAAKKA

SEQ ID NO: 89720 - protein, 288 aa, Unknown
  Bacterial polypetide isolated from the Sargasso Sea
MDAESKCPVMHGAITKNMGEGTSNREWWPNQLNLNILHQHDRKSDPMEVGFNYREEFKKIDYAALKKDLNDLMTDSQDWWPADYGHYGGFFISMTWHAAGTYRTGDGRGGGGTGAQRFAPLNSWPDNGNLDKARRLLWPIKKKYGNKISWADLFILTGNVAIESMGGKTFGFSGGRPDIWAPEEDIYWGVEEEWLQNKRYTGDRILDNPLAAVQMGLIYVNPEGPDGKADPLASAKDIRETFARMAMNDTETVALTAGGHTFGKAHGAGDPALVGAEPEGAPLEQMGL

SEQ ID NO: 89721 - protein, 313 aa, Unknown
  Bacterial polypetide isolated from the Sargasso Sea
YGKKISWADLFILVGNVALDSMGFKTFGFGAGREDIWEPEDDIYWGSEKEMLDVKRYSGKRDLEQPLGASHMGLIYVNPQGPDANPDPLLAAHDIRETFGRMAMNDYETAALVAGGHTFGKSHGAAPESHKGPDPEASRIQDQATGWNSNYKSGKGVDTISSGIEGAWTQNPIKWDMGYLDCLYGHEWELTKSPAGAHQWTPKKNGQEIKMVPDAHNKNVFHPPMMQTTDISLKVDPSYGPITRHFHENPKEFHDAFARAWFKLTHRDMGPRACYLGSDVPKEELIWQDPIDKPKYKLKSKKINFLKAKILKS

SEQ ID NO: 89722 - protein, 315 aa, Unknown
  Bacterial polypetide isolated from the Sargasso Sea
MDAESKCPVMHGAITKNMGEGTSNREWWPNQLNLNILHQHDRKSDPMEAGFNYREEFKKLDYAALKKDLHNLMTDSQDWWPADYGHYGGFFIRMTWHAAGTYRTGDGRGGGGTGAQRFAPLNSWPDNGNLDKARRLLWPIKKKYGNKISWADLFILTGNVAIESMGGKTFGFSGGRPDIWAPEEDIYWGVEEEWLQNKRYTGDRILDNPLAAVQMGLIYVNPEGPDGKADPLASAKDIRETFARMAMNDTETVALTAGGHTFGKAHGAGDPALVGAEPEGAPLEQMGLGWNNLHGSGVGRDTTTSGIEGPWTPNP

SEQ ID NO: 89723 - protein, 342 aa, Unknown
  Bacterial polypetide isolated from the Sargasso Sea
NPDEFADAFARAWFKLTHRDMGPRACYLGPEVPKEQLIWQDPVTKPKYKIKNNDINALKLKILKSGLSISQLVSTAWASASTFRGSDKRGGANGARVRLAPQKDWKVNNPAELSKVLKTLEKIKKSFDGKKKSVSMADLIVLGGCAAIEKAAKKAGHNIKVPFSPGRGDASQDQTDVHSFGLLEPKADGFRNYITKKTNGSSTKPTVSAEETLVDKAQLLKLTAPEMTVLIGGMRVLNTNFDKSKHGVFTTKPETLTNDFFVNLLDMSTTWKETSKEEDLFTGKNRKTNKVKWTGTRFDLIFGSNSQLRAIAEVYACEDSKPKFIADLISAWTKVMNLDRFD

SEQ ID NO: 89724 - protein, 321 aa, Unknown
  Bacterial polypetide isolated from the Sargasso Sea
ILAGNVAIESMGGTTFGYSGGRPDIWGPEEDIHWGVESEWLDNKRYKGERELDNPLAAVQMGLIYVNPQGPDGNPDPLASAHDIRETFGRMAMNDEETVALVAGGHTFGKAHGAGAEDHVQSEPEGAPLEEMGFGWSSTYASGVGSDTITSGIEGAWTANPTQWDNGYFDLLFGYEWELTKSPAGAHIWHAVGQTEEDMAPDAEDSEKKVPTMMTTADMALREDPSYNKISKRFHENPGEFADAFARAWFKLLHRDMGPKTRYMGPEVPEEELIWQDPVPAGNTEYDIEEVKQSIINSGLSIQEMVKLHGQAHQLLEVRIC

SEQ ID NO: 89725 - protein, 336 aa, Unknown
  Bacterial polypetide isolated from the Sargasso Sea
NPQGPDGNPDPLKAARDIRETFGRMAMNDYEIVALVAGGHTFGKSHGAASESYKGPEPEGSKIQEQGTGYNSSYKSGIGADTISSGIEGAWTSNPIKWDMGYFDNLFGYNWQLTKSPAGAYQWKPKRNGKAIEMTPDAHIKGKKNMPMMQTTDLSMRMDPGFGRISRHFHTNPDEFADAFARAWFKLTHRDMGPKVNYLGPEVPKENLIWQDPVPKNNYKLKNSEVESLKRKIASSGLSVSKLVSVAWSSASTYRSSDKRGGANGARIRLAPMKNWKVNNPTVLSKVIKVYEKIQKSFNTKSKSVSIADLIVLGGSVGIEQAAKAAGKKVKVPFRP

SEQ ID NO: 89726 - protein, 280 aa, Unknown
  Bacterial polypetide isolated from the Sargasso Sea
HTMDAESKCPVMHGANTKNKGEGTTNKDWWPNQLDISILHQHDEKSNPMGKDFDYREHFKNIDYDGLKKDLNDLMTDSQDWWPADYGHYGPFFIRMTWHVAGTYRTADGRGGGGTGAQRFAPLNSWPDNGNLDKARRLLWPIKQKYGNQISWADLLILTGNVAIESMGGKTFGFSGGRPDIWAPEEDIYWGLETEWLTNKRYSGDRVLENPLAAVQMGLIYVNPEGPDGNPDPLASARDIRETFGRMAMNDEETVALTAGGHTFGKAQRAGDASLVGPEP

SEQ ID NO: 89727 - protein, 346 aa, Unknown
  Bacterial polypetide isolated from the Sargasso Sea
KIQEHRIETGWPNQLNLFILHQHDQKSNPMNKDFDYKEEFKSLDYTALKKDLTNLMTDSQDWWPADYGHYGPFFIRMTWHAAGTYRTGDGRGGGGTGAQRFAPLNSWPDNGNLDKARRLLWPIKQKYGNKISWADLLILAGNVAIESMGGKTFGYSGGRPDIWAPEEDIYWGIEKEWLENKRYKGERELDNPLAAVQMGLIYVNPEGPDGNPDPLASAKDIRETFGRMAMNDEETVALTAGGHTFGKAHGAGDPSLVGPEPEGAKIEEMGFGWISKHGSGNGSDTITSGIEGAWTTNPVKWDNGYFDLLLNYEWELTKSPAGANIWHAVNQKDEDKAPDAEDSSKR

SEQ ID NO: 89728 - protein, 317 aa, Unknown
  Bacterial polypetide isolated from the Sargasso Sea
WPDNGNLDKARRLLWPIKQKYGKKISWADLLILAGNVAIESMGGKTFGFSGGRPDIWGPEEDIHWGVETGWLENNRYKGDRELDNPLAAVQMGLIYVNPQGPDGNPDPLASARDIRETFGRMAMNDEETVALVAGGHTFGKAHGASTEDHVQAEPEGAPLEEMGFGWTSSYGSGVGSDTITSGIEGAWTANPTQWDNGYFDLLFGYEWELTKSPAGAHIWHAVGQKEEDMAPDAEDASVKVPTMMTTADMAMREDPSYKEISKRFHENPDEFADAFARAWFKLLHRDMGPKTRYMGPEVPEEELIWQDPVPAGNFNL

SEQ ID NO: 89729 - protein, 317 aa, Unknown
  Bacterial polypetide isolated from the Sargasso Sea
KNKQLGWNSNYKSGLGVHTISSGLEGAWTADPIKWDMGYFDNLFNYEWKLTKSPAGAHQWTPKQNGSAIEMVPDAHDKSKKHPPMMLTTDLSLRMDPKYGPISRNFHENPDEFADAFARAWFKLTHRDMGPRACYLGPEVPREELIWQDPVSKPKYKLKNNDVNALKARILKSGLSISELVSTAWASASTFRGSDKRGGANGARIRLAPQKDWKVNNPTQLSKVLKTLEKIKKNFDSKKKNVSLADLIVLGGSAAIEKAAKKAGQNVKVPFSPGRGDASQDQTDAYSFGLLETKADGFRNYIYKRTNGSSEKPTVSA

SEQ ID NO: 89730 - protein, 342 aa, Unknown
  Bacterial polypetide isolated from the Sargasso Sea
QRYQKKHFGRMAMNDEETVALIAGGHTFGKAHGASLESNVGVEPEGAPIESMGFGWKNEHGSGVGGDAITSGLEGAWTADPIKWDNGYFDLLFGYDWELGKSPAGAHQWFAKDQKDEDMAPDAHDSSKKVPTMMATTDIALREDPIYKEISKRFHENPDEFADAFARAWFKLLHRDMGPITNYIGPEAPTEELIWQDPVPAGNKDYDVESVKSKIEESGLSIQELVETAWASASTFRGSDLRGGANGARIRLEPQKSWEVNKPEQLKKVLSVYETISSETGVSVADIIILGGNLGIEKASGKTLDFTPGRGDSSQDQTDIDSFAYLEPISDGFRNYHKDGLD

SEQ ID NO: 89731 - protein, 283 aa, Unknown
  Bacterial polypetide isolated from the Sargasso Sea
ILSQHSSLVNPMDNKFNYSKEFKKLNYKALKRDLVKLMTQSQSWWPADYGHYGPLFIRLAWHAAGTYRTGDGRGGAGTGNQRFAPLNSWPDNVNLDKARLLLWPIKKKYGKKISWADLFVLIGNVALESMGFKTFGFGAGREDIWEPEEDIYWGSEKEWLGVNRYSGKRELENPLGASHMGLIYVNPQGPDANPDPLLAAHDIRETFGRMAMNDYETVALVAGGHTFGKSHGAAPESHKGPEPEGSKVQDQATGWNSNYKSGLGADTISSGIEGAWTSNPIKW

SEQ ID NO: 89732 - protein, 283 aa, Unknown
  Bacterial polypetide isolated from the Sargasso Sea
LGVNRYSGKRDLENPLGASHMGLIYVNPQGPDANPDPLLAAHDIRETFGRMAMNDYETVALIAGGHTFGKSHGAAPESHKGPEPEGSRIQDQATGWNSDYKSGKGVDTISSGLEGAWTINPTKWDNGYFDLLFNHEWELTKSPAGAHQWKPKKNGADINVVPDAHDSTKKHPPMMLTTDLSMRMDPKYGLISKKFHENPDEFADAFARAWFKLTHRDMGPRACYLGSEVPKEELIWQDPIPKVKYKLKNKDINTLKAKILKSGFSIPKLVSTAWASASTFRGS

SEQ ID NO: 89733 - protein, 203 aa, Unknown
  Bacterial polypetide isolated from the Sargasso Sea
MFNKYFLLIFSLFFISNCEQTYVDKNGDSSFRGKFKTNREWWPNQLDLSVLRKHSSLSNPMDSNFNYEEAFNSLDYQALKKDLKDLMTDSKDWWPADYGHYGGLFIRMAWHSAGTYRTGDGRGGTREGQHRFAPQNSWPDNANLDKARRLIWPIKQKYGNKISWADLMILTGNVALESMGFETLGFAGGREDVWEPAGNIYWG

SEQ ID NO: 89734 - protein, 228 aa, Unknown
  Bacterial polypetide isolated from the Sargasso Sea
GVESEWLENKRYKGERELDNPLAAVQMGLIYVNPQGPDGNPDPLASAHDIRETFGRMAMNDEETVALVAGGHTFGKAHGAGAEDHVQSEPEGAPLEEMGFGWTSTYASGVGSDTITSGIEGAWTANPTQWDNGYFDLLFGYEWELTKSPAGAHIWHAVGQTEEDMAPDAEDASKKVPTMMTTADMALREDPSYKKISKRFHENPDEFADAFARAWFKLLHRDMGPKSR

SEQ ID NO: 89735 - protein, 246 aa, Unknown
  Bacterial polypetide isolated from the Sargasso Sea
MLREQSKCPFTGVGTPAKHSAGKGQTARDFWPNSLNLKILSQHSDLSNPMEKKFNYSKEFKKLNYKELKKDLRKLMKDSQDWWPADYGHYGPFFIRLAWHAAGTYRTGDGRGGAGTGNQRFAPLNSWPDNVNLDKARLLLWPIKQKYGKKISWADLYILVGNVALESMGFKTFGFGAGRVDIWEPEDDIYWGSEKEMLGVNRYSGKRDLEQPLGASHMGLIYVNPQGPDANPDPLLAAHDIRETFG

SEQ ID NO: 89736 - protein, 248 aa, Unknown
  Bacterial polypetide isolated from the Sargasso Sea
PKASAKDIRETFGRMAMNDEETVALVAGGHTFGKAHGAAPDSHVEAEPEGAAVENMGFGWNSSFGSGKGRDTITSGIEGAWTANPTQWDNGYFDLLLGYDWELTKSPAGANIWHAVNQTNDHMAPDAEDPSIKVPTMMTTADIAMIEDPDYKKISVRFHENPSEFADAFARAWFKLLHRDMGPKSRYMGPEIPEEELIWQDPVPEGNSDYDLNILKEKILASGLNNQEMIETAWASASTYRGTDMRGG

SEQ ID NO: 89737 - protein, 260 aa, Unknown
  Bacterial polypetide isolated from the Sargasso Sea
PADYGHYGPFFIRMTWHAAGTYRTGDGRGGGGTGNQRFAPLNSWPDNGNLDKARRLLWPIKQKYGNKISWADLFILTGNVAIESMGGKTFGFGGGRPDIWAPEEDIDWGAEKEWLANERYSGERDLANPLGAVQMGLIYVNPQGPDGDPDPIASGKDVRETFGRMAMNDEETVALVAGGHTFGKGHGAGPEENVQVEPEGASLENMGFGWMSNHASGKGTDTITSGFEGAWTADPTKWDNGYFDLLFGYEWEKVETPAGK

SEQ ID NO: 89738 - protein, 243 aa, Unknown
  Bacterial polypetide isolated from the Sargasso Sea
GNKISWADLVILAGNVAIESMGGKTFGYSGGRPDIWAPEEDIYWGKEKEWLSSSRYTGDRDLENPLAAVQMGLIYVNPEGPDGNPDPVASAKDIRETFGRMAMNDEETVALIAGGHTFGKVHGAGDAALVGPAPEGAPIEEMGLGWRNAHGSGKGRDTITSGLEGAWTSNPIKWDNGYFDMLFGYEWKLVKSPAGANQWHAINQKDEDLAPDAEDSSIRVPTVMLTSDMAMREDPIYNKISKH

SEQ ID NO: 89739 - protein, 317 aa, Unknown
  Bacterial polypetide isolated from the Sargasso Sea
TFGRMAMNDEETVALTAGGHTFGKAHGAGDASLVGPEPEAAAIEEMGLGWISKYASGKGSDSITSGIEGAWTANPTKWDNGYFDILLGYEWKLTKSPAGANIWHAIDPKEEHLAPDAEDSSKRVPTMMTTADMAMREDPEYRKISERYHKNPKEFQDAFARAWFKLLHRDMGPKSRYIGPEVPKEDLIWQDPIPKGNSNYDVNAAKTKISESGLTIQQMVETAWASASTFRQTDMRGGANGGRIRLEPQKNWEVNKPDQLSKVLKILEGIAAETGASVADIIVLAGNVGIEKASGAIVQFTPGRGDATQEHTDIESF

SEQ ID NO: 89740 - protein, 304 aa, Unknown
  Bacterial polypetide isolated from the Sargasso Sea
PKACYLGPEVPKEDLIWQDPLPAATHNPTAADIADLKAKIAASGLSVGDLVSVAWASASTFRGGDKRGGANGARLALAPQKDWAVNQRAIKVLPKLVEIQQASGKASLADVIVLAGNVGVEQAAKAAGVAVDVPFAAGRVDARQDQTDVESFDVLEPAADGFRNYSKGNLGVPTETMLVDKAQMLTLTAPELTALVGGLRVLGANHDGSQHGVFTDKVGVLSNDFFVNLLDMGTVWKATDDSNEVFEGRTRKDGQVKYTATRNDLVFGSNSILRAYAEVYASSDGKEKLVHDFVAAWTKVMNLD

SEQ ID NO: 89741 - protein, 205 aa, Unknown
  Bacterial polypetide isolated from the Sargasso Sea
MKLNSWGSLRYGAHGYFETYESLSDITCAEIFQEKGKKTPVFTRFSTVAGNQGSPDLARDVRGFAVKFYTQEGNWDLVGNNIPVFFIQDAIKFPDLVHSAKQEPDRGFPQAQTAHDNFWDFTSLSPESVHMLMWAMSDRAIPRSFRFMEGFGVHTFKLINAKGEMKYVKFHWKPKQGLQSVVWNEALKINGADPEVSPQIMTKIQ

SEQ ID NO: 89742 - protein, 164 aa, Unknown
  Bacterial polypetide isolated from the Sargasso Sea
MSKCPFSGTAINPTTLTSSNGAPVANDNQSRTAGPRGPVTFDNHYLFEKLAHFNRERIPERVVHARGSAAYGTFTLTKSLSDYTIADFLQQEGQQTNVFLRFSTVGGGQDSSDYARDPRGFSVKFYTEQGNWDMVGNNTPVFFLRDGIKFPDFIHSQKKNPRTN

SEQ ID NO: 89743 - protein, 330 aa, Unknown
  Bacterial polypetide isolated from the Sargasso Sea
IRLAWHAAGTYRTGDGRGGAGTGNQRFAPLNSWPDNVNLDKARLLLWPIKKKYGNKISWADLFILVGNVALDSMGFKTFGFGAGRTDIWEPEDDIYWGSEKEMLGVDRYTEKRDLEQPLGASHMGLIYVNPQGPDANPDPKLAAHDIRETFGRMAMNDYETAALVAGGHTFGKSHGAAPESHKGPDPEASRIQDQSTGWNSGYKSGKGVDTISSGIEGAWTQNPIQWDMGYLDCLYGHDWELTKSPAGAHQWTPKKNGQKIKMVPDAHNKGVLHPPMMQTTDISMKVDPSYGPITRHFHENPKEFHDAFARAWFKLTHRDMGPRACYLGA

SEQ ID NO: 89744 - protein, 307 aa, Unknown
  Bacterial polypetide isolated from the Sargasso Sea
FKPDPRTNLDDDSRRFDFFSHVPESTRTLTELYSDSGTPASYREMDGNGVHAYKLINAKGEVHYVKFHWKSQQGIKNLDPKQVTEVQGRDYSHMTHDLVTHINKGDFPKWDLYVQVLKPEDLAKFDFDPLDATKIWPNVPERKVGQMVLNRNPANVFQETEQVAMAPANLVPGIEPSEDRLLQGRVFSYADTQMYRLGANALQLPINAPRVTVNNGNQDGAMNVGKTTTGVNYQPSRLLPREEPQAARYSQSPLSGSTQQAKIQREQNFKQAGDLYRSYTKKEREDLINNFGGSLATTDDESKHIIL

SEQ ID NO: 89745 - protein, 305 aa, Unknown
  Bacterial polypetide isolated from the Sargasso Sea
MHGAMTSNSSCGTSNKDWWPEQLNLNILHQHDRKSDPMDEGFDYRKEFEDIDYDALKKDLNDLMTDSQEWWPADYGHYGPFFIRMTWHAAGTYRSTDGRGGGGTGAQRFAPLNSWPDNGNLDKARRLLWPIKQKYGKKISWADLLILAGNVAIESMGGKTFGFSGGRPDIWGPEEDIHWGVETGWLENNRYKGDRELDNPLAAVQMGLIYVNPQGPDGNPDPLASARDIRETFGRMAMNDEETVALVAGGHTFGKAHGASTEDHVQAEPEGAPLEEMGFGWTSSYGSGVGSDTITSGIESAWTAN

SEQ ID NO: 89746 - protein, 284 aa, Unknown
  Bacterial polypetide isolated from the Sargasso Sea
GDGRGGAGTGNQRFAPLNAWPDNVNLDKARLLLWPIKQKYGKQISWADLFILVGNVALESMGFKTFGFGAGRVDIWEPEDDIYWGSEKEMLGVERYSGKRDLEQPLGASHMGLIYVNPQGPDANPDPLLAAHDIRETFGRMAMNDYETVALVAGGHTFGKSHGAASESHKGPDPEASRIQDQATGWNSDYKSGKGVDTISSGIEGAWTQSPIKWDMGYFDCLFNHEWELTKSPAGAHQWTPKQNGQKIKMVPDAHDKNKMHPPMMQTTDLSLRMDPSYGPIQNT

SEQ ID NO: 89747 - protein, 302 aa, Unknown
  Bacterial polypetide isolated from the Sargasso Sea
MKADLKTLMTDSQDWWPADWGHYGGLFIRLAWHSAGTYRSADGRGGAGHGNQRFAPLNSWPDNTNLDKARRLLWPLKRKYGNAISWADLIILSGNVALESMGFRTFGFAGGRTDIWQPEEDVFWGKETEWLGDERHNNQGKLDQPLAAVEMGLIYVNPEGPHGNPDPVASGPQVRDTFARMGMTVEETVALVAGGHTFGKCHGAAPASHLDAEPEGAELHQQGLGWQNRFESGKGEHTITSGIEGAWKPNPTRWDQGYFEMMFSYEWELTKSPAGAWQWVAKNVKPEHMVPDAHVPGRSSAP

SEQ ID NO: 89748 - protein, 321 aa, Unknown
  Bacterial polypetide isolated from the Sargasso Sea
KRDLEQPLGASHMGLIYVNLQGPDANPDPLLAAHDIRETFGRMAMNDYETAALVAGGHTFGKSHGAAPESHKGPDPEASKIQDQATGWNSGYKSGKGIDTISSGIEGAWTQNPTKWDMGYLDCLYGHDWELTKSPAGAHQWTPKKNGQEIKMVPDAHNKNLMHPPMMQTTDISLKVDPSYGPITKHFHKNPKEFHDAFARAWFKLTHRDMGPRACYLGSDVPKEELIWQDPIDRTKYKLKSKDINDLKSKLLKSKLSVSDLVSTAWASASTFRGSDKRGGANGARIMLEPQKNWKVNNPSRLLKVISVLKKIKNQFDNRKR

SEQ ID NO: 89749 - protein, 323 aa, Unknown
  Bacterial polypetide isolated from the Sargasso Sea
QHSNLSNPMIKKFKYSKEFKKLNFKSLKKDLKKLMTDSQEWWPADYGHYGPLFIRLAWHAAGTYRTGDGRGGAGTGNQRFAPLNSWPDNVNLDKARLLLWPIKKKYGKKISWADLFILVGNVALDSMGFKTFGFGAGRIDIWEPEDDIYWGSEKEMLDVKRYSGKRDLEQPLGASHMGLIYVNPQGPDANPDPLLAAHDIRETFGRMAMNDYETAALVAGGHTFGKSHGAAPESHKGPDPEASRIQDQATGWNSGYKSGKGVDTISSGIEGAWTQNPIKWDMGYLDCLYGHEWELTKSPAGAHQWTPKKNGQEIKMVPDATMI

SEQ ID NO: 89750 - protein, 308 aa, Unknown
  Bacterial polypetide isolated from the Sargasso Sea
TYRIGDGRGGAGTGAQRFSPLNSWPDNGNLDKARRLLWPIKQKYGKQLSWADLLVLAGNAAIESMGGKTFGFGGGRPDIWEPEEDIYWGPEEEMLGNNRYVGERVLNNPLAAVQMGLIYVNPQGPDANPDPKLSAHDIRETFGRMAMNDYETVALIAGGHTFGKCHGAGDDNLVGVGPEDAPIEQQQFGWKSGHGKGMGRDTITSGLEGPWTKDPAKWDNGYFENLFKYEYELVKSPAGAFQWHPIDLEEENYAPDVEDPNMKVTTIMLTSDLALKEDPEYRKISMHFKDNPDEFADAFARAWFKLLH

SEQ ID NO: 89751 - protein, 272 aa, Unknown
  Bacterial polypetide isolated from the Sargasso Sea
EAVKKDINDVLTTSQDWWPADYGNYGPFFIRMAWHSAGTYRVTDGRGGAGGGQQRFDPLNSWPDNASLDKARRLLWPLKQKYGANISWADLMVLAGTVAMENMGFKTLGFAGGRVDEWEPDIVYWGPETEWLASNRHGKDGKLSRPLGATHMGLIYVNPEGPNANHDPLSAADAIRDAFGRMAMSEEETVALIAGGHTFGKAHGAHDPKKCLGAEPGAAPIEAQGFGWHNKCGKGNAEDTITSGLEGAWTSAPAQWTHMYLDNLFSFEWEKA

SEQ ID NO: 89752 - protein, 296 aa, Unknown
  Bacterial polypetide isolated from the Sargasso Sea
DIRETFGRMAMNDEETVALTAGGHTFGKAHGAGDAALVGPEPEGAPMEEMGFGWISKHASGVGSDTITSGIEGAWTTNPTKWDNGYFDLLLGYEWKLTKSPAGANIWHAVDQKEEHMAPDAEDASKKVPTMMTTADMAMREDPEYRKISERFHKNPDQFQDAFARAWFKLLHRDMGPKTRYIGPESPEEVLIWQDPVPAGNTNYDVDSVKAKIEDSGLSIQEMVETAWASASTYRHTDMRGGANGARIRLEPQKNWEVNKPDQLSKVLEKLETIASETGASVADVIVLAGNVRIGK

SEQ ID NO: 89753 - protein, 306 aa, Unknown
  Bacterial polypetide isolated from the Sargasso Sea
QTRFKWDMGYFDNLFGYDWELTKSPAGAHQWKPKRNGHDIEMTPDAHDRSKKNLPMMQTTDLSLKLDPKYGPISKHFHQNPNEFADAFARAWFKLTHRDMGPKANYLGSDVPKENLIWQDPIPKNKYKLKNKDIELLKKKISKSGLSVSQLVTTAWASASTFRGSDKRGGANGARIALEPQKDWQVNNPSKLSAVIRILNKIKKGFDSKNKSVSLADLIVLGGSVGIENAAKKSGKKIKVPFKAGRGDAKQDQTDKNSFNLLEPIADGFRNYIKLHAKGYTNGKGIPTNSAEEMLIDKAQLLGLTG

SEQ ID NO: 89754 - protein, 270 aa, Unknown
  Bacterial polypetide isolated from the Sargasso Sea
MHGAMTSAGQSNRDWWPEALNLDILHQHDTKTNPMDPNFNYREEVKSLDFDGLKRDLHALMTDSQSWWPADWGHYGGLMIRMAWHAAGSYRIADGRGGAATGNQRFAPLNSWPDNVNLDKARRLLWPVKKKYGNKISWADLIVLAGTIAYESMGLKVYGFAYGREDIWHPEKDTYWGAEKEWLAPSDSRYDDVDKPESMENPLAAVQMGLIYVNPEGVNGNPDPLKTAQQVRETFARMAMNDEETVALTAGGHTVGKCHGNGNADNLGAD

SEQ ID NO: 89755 - protein, 303 aa, Unknown
  Bacterial polypetide isolated from the Sargasso Sea
SKIQEQSTGWNSNYKSGLGADTISSGIEGAWTSNPIKWDMGYFDNLFGYDWELTKSPAGAHQWKPKQNGHDIDMTPDAHIKSKKNLPMMQTTDLSLKMDPKYEPISKHFHDNPKEFADAFARAWFKLTHRDMGPRTCYLGPEVPKEQLIWQDPVPKNKYKIKNKDIKTLKLKILKSGLSTSDLVSTAWASASTFRGSDKRGGANGARINLQPQKSWEVNNPSQLSKVIKTFEKIKKEFDSKKKNVSLADLIVLGGCVGIEKASNKSGKNINVPFTPGRGDATQEQTDINSFSLLEPKAEDQKL

SEQ ID NO: 89756 - protein, 294 aa, Unknown
  Bacterial polypetide isolated from the Sargasso Sea
MTPDAHIKGKKNLPMMQTTDLSMRFDPEFGRISRHFHNNPDEFADAFARAWFKLTHRDMGPKVNYLGNEVPKEDLIWQDPVPKNKTKLKNKDIEALKTKISKSGLSVAQLVFVAWASASTFRSSDKRGGANGARIRLAPQKDWKVNNPSQLSKTIKVYEKIQKGFNSKKKYVSLADLIVLGGNVGIEKAAKDAGKKIKLTFSPGRGDASQDQTDIHSFSLLEPQADGFRNYANSESASKAEELLVDRAQLMKLTAPEMTVLIGGMRVLGITYDGSKHGIFTKRPGKLTNDFFVN

SEQ ID NO: 89757 - protein, 233 aa, Unknown
  Bacterial polypetide isolated from the Sargasso Sea
QLSKVLKTLEKIKKKFETKKKSVSLADLIVLGGCAAVERAAKKAGHNVKVPFSPGRGDASQEQTDIHSFGLLEPKADGFRNYIINKTNGSSKKPSVSAEETLVDKAQLLKLTAPEMTVLLGGMRVLNTNFDKSKNGVFTKKPETLTNDFFVNLLDMSTTWKEVSKEEDLFRGKNRKTNKVKWTGTRFDLIFGSNSQLRALAEVYACEDSKSKFINDFISAWTKVMNLDRFDLK

SEQ ID NO: 89758 - protein, 281 aa, Unknown
  Bacterial polypetide isolated from the Sargasso Sea
MGGLFIRMAWHSAGTYRIADGRGGSGTGNHRFAPLNSWPDNTNLDKARRLLWPIKKKYGNKISWADLMILAGNMAYESMGLKMYGFSFGREDIWHPEKDVYWGSEKEWLQNKRYSSNSNRESLANPLAAVVMGLIYVNPEGVDGKPDPLRTAHDVRETFGRMAMNDEETCALTVGGHSVGRAHGNGDASLLGPEPEAGEIHEQGFGWNRKGGGGLGVNQVTSGIQGAWTTHPNKWDDTYLKLLLDYEWELKKSPAGANQWEPINMKEKDKPVDLGDPSFKK

SEQ ID NO: 89759 - protein, 285 aa, Unknown
  Bacterial polypetide isolated from the Sargasso Sea
ADYGHYGPLFIRLVWHAAGTYRTGDGRGGAGTGNQRFAPINSWPDNVNLDKARLLLWPIKKKYGRRISWADLFILVGNVALESMGFKTFGFGGGREDIWEPEEDIYWGSEKVWLDNERYNSKRELENPLGAVQMGLIYVNPQGPDGNPDPLLAARDIRETFGRMAMNDYEIVALVAGGHTFGKSHGAAPESHKGPEPEGSKIQDQATGWNSNYKSGLGADTISSGIEGAWTSNPIKWDMGYFDNLFGYEWELSKSPAGAHQWKPVENGHAPNMTPDAHIKGRKNL

SEQ ID NO: 89760 - protein, 238 aa, Unknown
  Bacterial polypetide isolated from the Sargasso Sea
MDAESKCPVMHGANTKNKGEGTTNRDWWPNQLDISILHQHDEKSNPMGKDFDYREHFKNIDYDGLKKDLNHLMTDSQDWWPADYGHYGPFFIRMTWHAAGTYRTADGRGGGGTGAQRFAPLNSWPDNGNLDKARRLLWPIKQKYGNQISWADLLILAGNVAIESMGGKTFGFSGGRSDIWAPEEDIYWGLETEWLTNKRYSGDRVLENPLAAVQMGLIYVNPEGPDGNPDPLASARDI

SEQ ID NO: 89761 - protein, 293 aa, Unknown
  Bacterial polypetide isolated from the Sargasso Sea
TAQTTPTHWWPKNLNLDILHQHDTKTNPMDKKFDYKKEVKKLNFKGIKKDLLKLMTDSQEWWPADLGHYGGLFIRMAWHSAGTYRIADGRGGSGTGNHRFAPLNSWPDNTNLDKARRLLWPIKKKYGNKISWADLMILAGNMAYESMGLKMYGFSFGREDIWHPEKDVYWGSEKEWLQDKRYSNNGNRKSLANPLAAVVMGLIYVNPEGVDGKPDPLRTAHDVRETFGRMAMNDVETCALTVGGHSVGRAHGNGDASLLGPEPEAGEIHEQGFGWNRKGGGGLGVNQVTSGIQ

SEQ ID NO: 89762 - protein, 283 aa, Unknown
  Bacterial polypetide isolated from the Sargasso Sea
MHGSMTEQSTPTHWWPKNLNLDILHQHDAKTNPMDKKFDYKKEVKKLNFKGIKKDLLKLMTDSQEWWPADLGHYGGLFIRMAWHSAGTYRIADGRGGSGTGNHRFAPLNSWPDNTNLDKARRLLWPIKKKYGNKISWADLMILAGNMAYESMGLKMYGFSFGREDIWHPEKDVYWGSEKEWLQDKRYSNNGNRKSLANPLAAVVMGLIYVNPEGVDGKPDPLRTAHDVRETFGRMAMNDEETCALTVGGHSVGRAHGNGDASLLGPEPEAGEIHEQGFGWNRK

SEQ ID NO: 89763 - protein, 291 aa, Unknown
  Bacterial polypetide isolated from the Sargasso Sea
IKQKYGNQISWADLIILAGNIAIESMGGKTFGFSGGRSDIWAPEQDIYWGLETEWLTNKRYSGDRVLENPLAAVQMGLIYVNPEGPDGNPDPLASARDIRETFGRMAMNDEETVALTAGGHTFGKAHGAGDAGLVGPEPEGAPLEEMGFGWISKHASGKGSDSITSGIEGAWTTNPTKWDNGYFDLLLGYDWKLTKSPAGAKIWHAVNQKEEHMAPDAEDASKKVPTMMTTADMAMREDPEYRKISERFHKNPDQFQDAFARAWFKLLHRDMGPKTRYIGPEAPAEDLIWQ

SEQ ID NO: 89764 - protein, 326 aa, Unknown
  Bacterial polypetide isolated from the Sargasso Sea
GPVLLQDFILQENLAHFVRERIPERIVHAKGTGAYGTFTVTHDITQYTKAKLFSKVGNSCRMFARFSTVGGEKGSADTARDPRGFALKFYTEDGNWDLVGNNTPVFFIKDAKKFPDFIHTQKRVPKTNLKSATMMWDFWSLNPESLHQVLILMSDRGTPYGHRHMHGFGSHTFSMINAQNERVWVKFHLKSKQGIKNFTNDEAVKMAGENPDFAQEDLCNAIEEGNFPKWTMYIQVMTEEQARDFRWNPFDITKVWFQSDFPLIEVGEMELNEVPVNYFAHVEQSVFSPSNLIDGISFSPDKMLQGRLFSYPDAHRYRVGVNAHLL

SEQ ID NO: 89765 - protein, 295 aa, Unknown
  Bacterial polypetide isolated from the Sargasso Sea
LDLKALKQDLYDLMTDSQDWWPADYGHYGPFFIRMAWHSAGTYRIGDGRGGAGAGAQRFAPLNSWPDNANLDKARLLLWPIKQKYGKKISWADLMILAGNCALESMDFKTFGFAGGRADVWEPEEDIYWGPENEWLGDKRYTGARQLENPLAAVQMGLIYVNPEGPNGTPDPLASAHDIRETFGRMAMNDEETVALIAGGHTFGKTHGAADPNEYIGSEPAGASIEEQGQGWKNTFGSGNGANTITSGLEGAWTSTPTKWSNSYFENLFGFEWELTKSPAGAHQWRPKNGGGAGT

SEQ ID NO: 89766 - protein, 296 aa, Unknown
  Bacterial polypetide isolated from the Sargasso Sea
FAPLNSWPDNVNLDKARLLLWPIKKKYGKKISWADLFILVGNISLESMGFKTFGFGAGREDIWEPEEDIYWGSEKEWLGVNRYSGKRELENPLGASHMGLIYVNPQGPDANPDPYLAAHDIRETFGRMAMNDYETVALVAGGHTFGKSHGAAPESHKGPEPEGSKIQDQATGWNSNYKSGLGVDTISSGIEGAWTSNPIKWDMGYFDNLFGYDWELTKSPAGAHQWKPKRNGHDIEMTPDAHDRSKKNLPMMQTTDLSLKLDPKYGPISKHFHQNPNEFADAFAKAWFKLTHRDMG

SEQ ID NO: 89767 - protein, 323 aa, Unknown
  Bacterial polypetide isolated from the Sargasso Sea
LDSMGFKTFGFGAGRVDIWEPEDDIYWGSEKEMLDVKRYSGKRDLEQPLGASHMGLIYVNPQGPDANPDPLLAAHDIRETFGRMAMNDYETAALVAGGHTFGKSHGAAPESHKGPDPEASRIQDQATGWNSGYKSGKGADTISSGIEGAWTQNPIQWDMGYLDCLYEHDWELTKSPAGAHQWTPKKNGQKIKMVPDAHDKNVLHPPMMQTTDISMKVDPSYGPITKHFHNNPKEFHDAFARAWFKLTHRDMGPRACYLGTDVPKEELIWQDPIDKPKYKLKSKDINYLKSKISKLKLSVSELVSTAWASASTFRGSDKRGGAY

SEQ ID NO: 89768 - protein, 252 aa, Unknown
  Bacterial polypetide isolated from the Sargasso Sea
DYGHYGGFFIRMTWHAAGTYRTGDGRGGGGTGAQRFAPLNSWPDNGNLDKARRLLWPIKKKYGNKISWADLFILTGNVAIESMGGKTFGFSGGRPDIWAPEEDIYWGVEEEWLQNKRYTGDRILDNPLAAVQMGLIYVNPEGPDGKADPLASAKDIRETFARMAMNDTETVALTAGGHTFGKAHGAGDPALVGAEPEGASLEQMGLGWNNLHGSGVGRDTTTSGIEGPWTPNPTQWDNGYFDMLLGYEWKLV

SEQ ID NO: 89769 - protein, 306 aa, Unknown
  Bacterial polypetide isolated from the Sargasso Sea
EDQISGLQKKRLIGGLETEWLTNERYSGERDLANPLGAVQMGLIYVNPQGPDGNPDPVASGRDIRETFGRMAMNDEETVALVAGGHTFGKGHGAGPDDNVGVEPEGASLEEMGFGWTSSYGSGKGADTITSGFEGAWTSNPTQWDNGYFDLLFGYEWEQVTTPAGAIVWHAIDQKEEDMAPDAHDPSKKVPTMMTTADMALREDPIYKDISKRFHENPDELADAFARAWFKLLHRDMGPKSRYLGPEVPEEELIWQDPVPEGNSTYDVESVKAKIAESDLTIQEMVETAWASASTYRGSDMRGGAN

SEQ ID NO: 89770 - protein, 293 aa, Unknown
  Bacterial polypetide isolated from the Sargasso Sea
RMAMNDYETVALVAGGHTFGKSHGAAPESHKGPEPEGSKIQDQATGWNSNYKSGLGVDTISSGIEGAWTSNPIKWDMGYFDNLFGYDWELTKSPAGAHQWKPKRNGHDIEMTPDAHNKSKKNLPMMQTTDLSLKLDPKYGPISKHFHQNPNEFADAFARAWFKLTHRDMGPKANYLGSDVPKEELIWQDPIPKNKYKLKNKDIELLKKKISKSGLSVSQLVTTAWASASTFRGSDKRGGANGARIALEPQKDWKVNNPSNLSAVIRVLNKIKKGFDSKNKSVSLADLIVLGGS

SEQ ID NO: 89771 - protein, 247 aa, Unknown
  Bacterial polypetide isolated from the Sargasso Sea
QWGEKFNYKKEFKKLNFKALKKDLHKLMTDTQDWWPADYGHYGPFFIRLAWHAAGTYRTGDGRGGAGTGNQRFAPLNSWPDNVNLDKARLLLWPVKKKYGKKISWADLFILVGNISLESMGFKTFGFGAGREDIWEPEEDIYWGSEKEWLGVNRYSGKRELENPLGASHMGLIYVNPQGPDANPDPYLAAHDIRETFGRMAMNDYETVALVAGGHTFGKSHGAAPESHKGPEPEGSKIQEQATGWNS

SEQ ID NO: 89772 - protein, 277 aa, Unknown
  Bacterial polypetide isolated from the Sargasso Sea
MHGFGSHTYSLINAQGERHWVKWHYKTKQGIKNLAPAEAARLAGTDPDYAQRDLFGAIERGDFPKWRVCIQIMTEAQANAHYENPFDVTKTWSQKEFPLIEVGELELNRNPQNYFAEVEQAAFGPSNMVPGVGLSPDRMLQGRVFAYADAHRYRVGTNHQQLPVNAPRSPVNSYQRDGSMAFGSNGGAAPNYEPNSYADAPKQAPQYAEPALALSGAADRYDHREDTDYYSHAGALFRLMNDEQKALLTNNIAGAMAGVSSDVVQRQLQHFYKSDPA

SEQ ID NO: 89773 - protein, 251 aa, Unknown
  Bacterial polypetide isolated from the Sargasso Sea
MTPDAHIKSKKNLPMMQTTDLSLKMDPSYGPISRNFHNNPKEFADAFARAWFKLTHRDMGPRACYLGPEVPKEQLIWQDPIPKNKYKIKNKDIKALKTKILKSGLSISELVATAWASASTFRGSDKRGGSNGARIRLEPQKNWEVNNPAQLSKVIKTLQKIKKKFDNKKKNVSLADLIVLGGCTAIEKAAKKSGNNINVPFTPGRGDASQEQTDTYSFGLLEPKADGFRNYIVNKSNGSSTKPKVSAEEML

SEQ ID NO: 89774 - protein, 275 aa, Unknown
  Bacterial polypetide isolated from the Sargasso Sea
PKQNGQKIKMVPDAHDKNKMHPPMMQTTDLSLRMDPSYGPISKHFYNNPAEFADAFARAWFKLTHRDMGPRACYLGNEVPKEELIWQDPVKKPKYKLKKSDIKTLKSKIFKSKLSVSELVSTAWASASTYRGSDKRGGANGARVALEPQISWDVNDPKQINKVIKTLEKIKNKFDNKKKSVSLADLIVLGGNVGIEMAAKKAGVNVDMPFYAGRGDATQEQTDIHSFSLLEPQADGFRNYNKDETSTVSAEEKLIDKAQLMGLTAPEMTVLVGGM

SEQ ID NO: 89775 - protein, 258 aa, Unknown
  Bacterial polypetide isolated from the Sargasso Sea
MDAESKCPVMHGANTKNKGEGTTNRDWWPNQLDISILHQHDEKSNPMGKDFDYREHFKNIDYDGLKKDLNDLMTDSQDWWPADYGHYGPFFIRMTWHAAGTYRTADGRGGGGTGAQRFAPLNSWPDNGNLDKARRLLWPIKQKYGNHISWADLLILAGNVAIESMGGKTFGFSGGRPDIWAPEEDIYWGLETEWLTNKRYSGDRVLENPLAAVQMGLIYVNPEGPDGKPDPLASARDIRETFGRMAMNDEETVALTAG

SEQ ID NO: 89776 - protein, 310 aa, Unknown
  Bacterial polypetide isolated from the Sargasso Sea
PADYGHYGPFFVRLTWHAAGTYRIGDGRGGAGTGAQRFSPLNSWPDNGNLDKARRLLWPIKQKYGKQLSWADLLVLAGNAAIESMGGKTFGFGGGRPDIWEPEEDIYWGPEEEMLGNNRYVGERLLNNPLAAVQMGLIYVNPQGPDGNPDPKLSAHDIRETFGRMAMNDYETVALIAGGHTFGKCHGAGDDGLVGVGPEDAPMEQQQFGWKNGYGKGMGRDTITSGLEGPWTKNPAQWDNGYFENLFKYDYELVKSPAGAFQWHPKDLEEENYAPDVEDPNQKVTTIMLTSDLALKEDPEYRKVSLHFKD

SEQ ID NO: 89777 - protein, 194 aa, Unknown
  Bacterial polypetide isolated from the Sargasso Sea
MSQQYLTSQSGSPIADDQNSLSAGERGPLLLQDWHLIEKLAHFNRERIPERVVHAKGTGVYGTFTLTKDLSEYTIADHFNGVGKQTETFVRFSTVGGEMGSADAERDPRGFGLRFYTARGNHDIVGNNTPTFFLRDGIKFPDFIHTQKRNPLTNLKDPQAMWDFWSLNPEAMHQVTILMSDRGIPANYRQMHGY

SEQ ID NO: 89778 - protein, 283 aa, Unknown
  Bacterial polypetide isolated from the Sargasso Sea
MDAESKCPVMHGAITKNMGEGTSNREWWPNQLNLNILHQHDRKSDPMEAGFNYREEFKKLDYAALKKDLHNLMTDSQDWWPADYGHYGGFFIRMTWHAAGTYRTGDGRGGGGTGAQRFAPLNSWPDNGNLDKARRLLWPIKKKYGNKISWADLFILTGNVAIESMGGKTFGFSGGRPDIWAPEEDIYWGVEEEWLQNKRYTGDRILDNPLAAVQMGLIYVNPEGPDGKADPLASAKDIRETFARMAMNDTETVALTAGGHTFGKAHGAGDPALVGAKPEGAPL

SEQ ID NO: 89779 - protein, 289 aa, Unknown
  Bacterial polypetide isolated from the Sargasso Sea
FKNKDIESLKVKMQKSGLSVSQLVSTAWASASTYRGSDKRGGANGARVRLAPQKDWKVNNPSQLSKAIKVYEKIQKAFNSKNKRVSLADLIVLGGNFGIEKAAKDAGKKIKLPFSPGRGDASQDQTDIHSFSLLEPQADGFRNYANSESATQAEELLVDKAQLMQLTGPEMTVLVGGMRVLGTNFDGSKHGVFTKRPGKLTNDFFVNLLDMDVKWKETSSKEDLFNGVDRKSGKVKWTGTRADLIFGSNSQLRALAEVYATDDSSEKFVNDFTAAWTKVMNADRFDLQK

SEQ ID NO: 89780 - protein, 167 aa, Unknown
  Bacterial polypetide isolated from the Sargasso Sea
AQGQTDIESFGVLEPLADGFRNYLQADFSVSAEELLLDKAQLMTLSAPEMTVLVGGMRALDANTDQASHGVLTDRPGTLSNDFFVNLLDMGTEWKPASAAEDVFEGRDRVSGDLKWTGTRVDLVFGSNSQLRGLAEVYAGAGGEARFVGDFVAAWTKVMNLDRFDVA

SEQ ID NO: 89781 - protein, 289 aa, Unknown
  Bacterial polypetide isolated from the Sargasso Sea
WPIKKKYGNKISWADLFILVGNVALDSMGFKTFGFGAGRTDIWEPEDDIYWGSEKEMLGVERYTEKRDLEQPLGASHMGLIYVNPQGPDANPDPKLAAHDIRETFGRMAMNDYETAALVAGGHTFGKSHGAAPESHKGPDPEASRIQDQSTGWNSGYKSGKGVDTISSGIEGAWTQNPIQWDMGYLDCLYDHEWELTKSPAGAHQWTPKKNGQKIKMVPDAHDKNVLHPPMMQTTDISMKVDPSYGPITKHFHKNPKEFHDAFARAWFKLTHRDMGPRVCYLAAMFQKN

SEQ ID NO: 89782 - protein, 298 aa, Unknown
  Bacterial polypetide isolated from the Sargasso Sea
LSQHSSLVNPMGEKFNYKKEFKKLNFKALKKDLHKLMTDTQDWWPADYGHYGPFFIRLAWHAAGTYRTGDGRGGAGTGNQRFAPLNSWPDNVNLDKARLLLWPIKKKYGKKISWADLFILVGNISLESMGFKTFGFGAGREDIWEPEEDIYWGSEKEWLGVNRYSGKRELENPLGASHMGLIYVNPQGPDANPDPYLAAHDIRETFGRMAMNDYETVALVAGGHTFGKSHGAAPESHKGPEPEGSKIQDQATGWNSNYKSGLGIDTISSGIEGAWTSNPIKWDMGYFDNLFGYDWELT

SEQ ID NO: 89783 - protein, 270 aa, Unknown
  Bacterial polypetide isolated from the Sargasso Sea
TSNSGSGTSNREWWPNQLNLNILHQHGKKSNPEKIDFNYRKEFKKLDYNSLKKDLNNLMTDSQEWWPADYGHYGPFFIRMTWHAAGTYRTGDGRGGGGTGAQRFAPLNSWPDNGNLDKARRLLWPIKKKYGDKISWADLVILAGNVAIESMGGKTFGYSGGRSDIWSPEEDIYWGKEKEWLDNKRYTGDRNLENPLAAVQMGLIYVNPEGPDGNPDPVASAKDIRETFGRMAMNDEETVALIAGGHTFGKVHGAGDAALVGAAPEGAPIE

SEQ ID NO: 89784 - protein, 294 aa, Unknown
  Bacterial polypetide isolated from the Sargasso Sea
FSRIGKTTEMFARFSTVAGERGAADAERDIRGFALKFYTEEGNWDLVGNNTPVFFLRDPLKFPDLNHAIKRDPRTGLRNAESNWDFWTQLPEALHQVTIVMSDRGIPRSYRHMHGFGSHTFSLINASNERFWVKFHMRSEQGIENLTDEEATRIMGSDRESHHRDLYESIEARQFPRWNLYFQVMPESEASAYKVNPFDLTKVWSKKDYPLIEVGYFELNRNAENWFADVEQAAFNPANVVPGISFSPDKMLQGRLFSYGDAQRYRLTVNHFQIPVNAPRASTHTNSYHRDGVL

SEQ ID NO: 89785 - protein, 185 aa, Unknown
  Bacterial polypetide isolated from the Sargasso Sea
MSKRTNDDPATENLTGLAPSPADANRSEQAAAVLAELPGESLTTNQGLLISDNQNSLRAGVRGPTLLEDHILREKIMHFDHERIPERVVHARGAGAHGVFEVYESMSDLTKAGFLQDPSLKTPVFVRFSTVAGSRGSMDTARDVRGFSVRFYTEQGNFDLVGNNMPVFFIQDAIKFSDLIHARQT

SEQ ID NO: 89786 - protein, 223 aa, Unknown
  Bacterial polypetide isolated from the Sargasso Sea
DFDYKEEFKKIDYEALKQDLYDLMTDSKEWWPADYGHYGPFFVRLTWHAAGTYRIGDGRGGAGTGAQRFSPLNSWPDNGNLDKARRLLWPIKQKYGKQLSWADLLVLAGNAAIESMGGKTFGFGGGRPDIWEPEEDIYWGPEEEMLGNNRYVGERLLNNPLAAVQMGLIYVNPQGPDGNPDPKLSAHDIRETFGRMAMNDYETVALIAGGHTFGKCHGAGDDG

SEQ ID NO: 89787 - protein, 261 aa, Unknown
  Bacterial polypetide isolated from the Sargasso Sea
MDIESKCPVMHGANTQNKGEGTSNRDWWPNQLDLSILHQHDKKSNPMEEGFSYKDEFKKIDYEALKKDLTSLMTDSQDWWPADYGHYGPFFIRMTWHAAGTYRTGDGRGGGGTGAQRFAPLNSWPDNGNLDKARRLLWPIKQKYGNKISWADLIILAGNVAIESMGGKTFGYSGGRQDIWAPEQDIYWGVEKEWLDNKRYKGDRELDNPLAAVQMGLIYVNPEGPDGNPDPIASARDIRETFGRMAMNDEETVALTAGGHT

SEQ ID NO: 89788 - protein, 282 aa, Unknown
  Bacterial polypetide isolated from the Sargasso Sea
IGGQTKLNLNILHQHDRKTNPMDEDFDYAEEFKKLDFNALKKDLKDLMTDSQEWWPADYGHYGPFFIRMTWHAAGTYRTGDGRGGGGTGAQRFAPLNSWPDNGNLDKARRLLWPIKQKYGKKISWADLLILAGNVAIESMGGKTFGFGGGRPDIWAPEEDINWGAETEWLSNERYSGVRDLANPLGAVQMGLIYVNPQGPDGDPDPIASGRDVRETFARMAMNDEETVALVAGGHTFGKGHGAGTEDHVQNEPEGAPLENMGFGWQSSHASGKGSDTITQWF

SEQ ID NO: 89789 - protein, 278 aa, Unknown
  Bacterial polypetide isolated from the Sargasso Sea
WPEQLNLAPLRQHGVESSPMDQSFNYAEEFKKLDLKAVKADITKLMTTPQDWWPPDYGHYGPFFIRMAWHSAGTYRISDGRGGAGGGQQRFEPLNSWPDNVNLDKARRLLWPIKQKYGRQISWADLMVLTGNVALESMGFKTFGFAGGRTDDWEADIVYWGPETKFLDDKRYSGDRKLQKPLAAVQMGLIYVNPEGPNGNPDPLLAAKDIRETFGRMAMNDEETVALIAGGHTFGKAHGAHKPEECVGKEPAAAGLEEQGFGWKKECGKGHSEDTVTS

SEQ ID NO: 89790 - protein, 238 aa, Unknown
  Bacterial polypetide isolated from the Sargasso Sea
SLVDSMDKKFNYSKEFKKLNFKALKKDLHKLMTDSQDWWPADYGHYGPLFIRLAWHGAGTYRTGDGCGGAGTGNQRFAPLNSWPDNVNLDKARLLLWPIKKKYGKKISWADLFILVGNISLESMGFKTFGFGAGREDIWEPEEDIYWGSEKEWLGVNRYSGKRDLEQPLGASHMGLIYVNPQGPDANPDPLLAAHDIRETFGRMAMNDYETVALVAGGHTFGKSHGAAPESHKGLEPE

SEQ ID NO: 89791 - protein, 309 aa, Unknown
  Bacterial polypetide isolated from the Sargasso Sea
DFNYAAEFKKINYSELKGDIKKAMTDSQEWWPADWGNYGGLFIRMAWHSAGTYRLVDGRGGAGRGQHRFAPLGSWPDNANLDKSRRLLWPVKQKYGQKISWADLFVLAGNIALEASGFRTFGFAAGRIDSWEPDNDVNWGVEKAWLEHRKSEALKDSPLSATEMGLIYVNPEGPEASGDPKSAAPFIRATFGNMAMDDEEIVALIAGGHTLGKTHGAVPGDMIGPDPEGAPIESMGLGWTSGQGSGVGKDSITSGLEVIWTQTPTQWSNYFFENLFKYEWVQTRSPAGAIQWEAKDAPEIMPDPFDPSK

SEQ ID NO: 89792 - protein, 287 aa, Unknown
  Bacterial polypetide isolated from the Sargasso Sea
EFKKLKFKSLKKDLHKLMTNSQDWWPADYGHYGGLFIRLAWHAAGTYRTGDGRGGAGTGNQRFAPLNSWPDNVNLDKARLLLWPIKKKYGRKISWADLFILVGNVALESMGFKTFGFGGGREDIWEPEEDIYWGSEKEWLGVNRYSGKRELENPLGASHMGLIYVNPQGPDANPDPLLAAHDIRETFGRMAMNDYETVALIAGGHTFGKSHGAASESYKGPEPEGSKIQEQATGWNSDYKSGKGVDTISSGLEGAWTQNPKKWDMGYFDNLFGYDWELTKSPAGAHQ

SEQ ID NO: 89793 - protein, 223 aa, Unknown
  Bacterial polypetide isolated from the Sargasso Sea
KLDYEALKKDLHDLMTDSQDWWPADYGHYGPFFIRMTWHAAGTYRTGDGRGGGGTGNQRFAPLNSWPDNGNLDKARRLLWPIKQKYGNKISWADLFILTGNVAIESMGGKTFGFGGGRPDIWAPEEDIDWGAEKEWLANERYSGERDLANPLGAVQMGLIYVNPQGPDGDPDPIASGKDVRETFGRMAMNDEETVALVAGGHTFGKGHGAGPEENVQVNQKEL

SEQ ID NO: 89794 - protein, 301 aa, Unknown
  Bacterial polypetide isolated from the Sargasso Sea
LVDYFWPIKQKYGNKISWADLLILAGNVAIESMGGKTFGFGGGRPDIWAPEEDIHWGIETEWLANERYSGERDLANPLGAVQMGLIYVNPQGPDGEPDPIASGKDVRETFGRMAMNDEETVALVAGGHTFGKGHGAGDEEHVQAEPEGAPLEKMGFGWQSNHASGMGSDTITSGFEGAWTANPTQWDNGYFDLLFGYEWEKVETPAGKIVWHAIDQKEEDKAPDAENSSVRVSTMMTTADMAMREDPIYKKISKRFHENPDEFADAFARAWFKLLHRDMGPLSRYLGPEVPKEELIWQDPV

SEQ ID NO: 89795 - protein, 250 aa, Unknown
  Bacterial polypetide isolated from the Sargasso Sea
MARTPTSRGAAPKSPSALPSSTQSETFRGNAGELQQQAGGKHPVLTTQQGIAVADNQNSLRPSPRGPALLEDFILREKITHFDHERIPERIVHARGSGAHGFFELTHSLKKYTTAQVLTEVGVQTPVFTRFSTVAGGAGSVDTPRDVRGFAVKFYTPEGNWDLVGNNIPVFFIQDAMKFPDLVHAVKMEPDRAFPQAASAHDTFWDFVSLMPESMHMVMWAMSDRTLPRSMRTMEGFGVHSFRLINAAGE

SEQ ID NO: 89796 - protein, 234 aa, Unknown
  Bacterial polypetide isolated from the Sargasso Sea
DTKTNPMDKKFDYKKEVKKLNFKGIKKDLLKLMTDSQEWWPADLGHYGGLFIRMAWHSAGTYRIADGRGGSGTGNHRFAPLNSWPDNTNLDKARRLLWPIKKKYGNKISWADLMILAGNMAYESMGLKMYGFSFGREDIWHPEKDVYWGSEKEWLQDKRYSNNGNRKSLANPLAAVVMGLIYVNPEGVDGKPDPLRTAHDVRETFGRMAMNDEETCALTVGGHSVGRAHGNGDA

SEQ ID NO: 89797 - protein, 280 aa, Unknown
  Bacterial polypetide isolated from the Sargasso Sea
MEDKSEGKCPVMHGAMTRNSTSGTANQDWWPDQLNLNILHQHDKKSNPMGEDFDYRAEFEKIDYAALKKDLNDLMTDSQDWWPADYGHYGPFFIRLTWHAAGTYRSTDGRGGGGTGAQRFAPLNSWPDNGNLDKARRLLWPIKEKYGNKISWADLLILSGNVAIESMGGKTFGFSGGRPDIWAPEEDILWGVEDEWLENRRYQGERELDNPLAAVQMGLIYVNPQGPDANPDPLASAHDIRETFGRMAMNDYETVALVAGGHTFGKCHGAGDADLVQVEP

SEQ ID NO: 89798 - protein, 268 aa, Unknown
  Bacterial polypetide isolated from the Sargasso Sea
MVSVAWASASTFRGSDKRGGANGARIRLAPQKDWTVNQPAQLSKVLSVLEQTQASFNQQSASRKVSLADLIVLAGAAAIEQAAKNAGVAIEVPFKPGRADATQEQTDVESFAVLEPVADGFRNYVKGRYSVKAEELLLDKAQLLTLTAPQMTALLGGLRVLNINADKSAHGVFTKQADTLSTDFFVNLLDMNTVWTPVSAEAEVFEGKDRKTGALKWTASRVDLVFGSNSQLRALAEVYAQHDNKQKFVRDFVTAWNKVMNADRFDLK

SEQ ID NO: 89799 - protein, 313 aa, Unknown
  Bacterial polypetide isolated from the Sargasso Sea
LTAGKRGPTLMEDHVFREKMFHFDHERIPERVVHARGYGAHGYFETYDTLEDLTCADIFQRKGEKTPVFTRFSTVAGNKGSPDLARDVRGFAVKFYTKEGNWDLVGNNIPVFFIQDAMKFPDLIHSAKAEPDRGFPQAQTAHDNFWDFVSLSPESMHMVMWAMSDRAIPRSLRFMEGFGVHTFKFVNAKGEQKYVKFHWKPKAGMQSVVWNEALKLNGADPDFHRRDMWESIQNGDFPEWELGVQVFDQAFADEFEFDVFDATKLIPEEQVPVKIIGRMVLDRVVDNFFAETEQVAFCTQNIVPGIDFTPDPL

SEQ ID NO: 89800 - protein, 301 aa, Unknown
  Bacterial polypetide isolated from the Sargasso Sea
GNQRFAPINSWPDNVNLYKARLLLWPIKKKYGRRISWADLFILVGNVALESMGFKTFGFGGGREDIWEPEEDIYWGSEKVWLDNKRYDSKRELENPLGAVQMGLIYVNPQGPDGNPDPLLAARDIRETFGRMAMNDYEIVALVAGGHTFGKSHGAAPESHKGPEPEGSKIQDQATGWNSNYKSGLGADTISSGIEGAWTSNPIKWDMGYFDNLFGYEWELTKSPAGAHQWKPIENGHAPNMTPDAHIKGKKNLPMMQTTDLSMRFDPEFGRISKHFHNNPDEFSDAFARAWFKLTHRDMGP

SEQ ID NO: 89801 - protein, 270 aa, Unknown
  Bacterial polypetide isolated from the Sargasso Sea
YRNTDGRGGGGTGAQRFAPLNSWPDNGNLDKARRLLWPIKQKYGKQISWADLIILAGNVAIESMGGTTFGYSGGRPDIWGPEEDIHWGVESEWLENKRYKGERELDNPLAAVQMGLIYVNPQGPDGNPDPLASAHDIRETFGRMAMNDEETVALVAGGHTFGKSHGAGAEDNVQSEPEGAPIEEMGFGWSSTYGSGMGSDTITSGIEGAWTANPTQWDNGYFDLLLGYEWELTKSPAGAHIWHAIGQTEEDMAPDAENASKKVPTMMTTA

SEQ ID NO: 89802 - protein, 284 aa, Unknown
  Bacterial polypetide isolated from the Sargasso Sea
KALKKDLHKLMTQSQNWWPADYGHYGPLFIRLAWHAAGTYRTGDGRGGAGTGNQRFAPINSWPDNVNLDKARLLLWPIKKKYGQRISWADLFILVGNVALESMGFKTFGFGGGRKDIWEPEEDIYWGSEKAWLDNKRYNSKRELENPLGAVQMGLIYVNPQGPDGNPDPLLAARDIRETFGRMAMNDYEIVALVAGGHTFGKSHGAAPESHKGPEPEGSKLQDQATGWNSNYKSGLGADTISSGIEGAWTSNPIKWDMGYFDNLFGYEWELSKSPAGAHQWKPS

SEQ ID NO: 89803 - protein, 257 aa, Unknown
  Bacterial polypetide isolated from the Sargasso Sea
MDAESKCPVMHGAITKNMGEGTSNREWWPNQLNLNILHQHDRKSDPMEAGFNYREEFKKLDYAALKKDLHNLMTDSQDWWPADYGHYGGFFIRMTWHAAGTYRTGDGRGGGGTGAQRFAPLNSWPDNGNLDKARRLLWPIKKKYGNKISWADLFILTGNVAIESMGGKTFGFSGGRPDIWAPEEDIYWGVEEEWLQNKRYTGDRILDNPLAAVQMGLIYVNPEGPDGKADPLASAKDIRETFCRMAMNDTETVALTA

SEQ ID NO: 89804 - protein, 272 aa, Unknown
  Bacterial polypetide isolated from the Sargasso Sea
TGLGTPSKHPTCKGTSNRDWWPNSLNLKILSQHSSMVNPMDKKFDYAKEFKKLNFKALKKDLKKLMTDSQDWWPADYGHYGGLFIRLAWHAAGTYRTGDGRGGAGTGNQRFAPLNSWPDNVNLDKARLLLWPIKKKYGNKISWADLFILVGNVALESMGFRTFGFGGGREDIWEPEEDIYWGSEKEWLGVNRYSGKRELENPLGASHMGLIYVNPQGPDANPDPVLAAHDIRETFGRMAMNDYETVALVAGGHTFGKSHGAASESFKGPEPE

SEQ ID NO: 89805 - protein, 290 aa, Unknown
  Bacterial polypetide isolated from the Sargasso Sea
IYVNPQGPDGNPDPLLAARDIRETFGRMAMNDYEIVALVAGGHTFGKSHGAAPESHKGPEPEGSKIQDQATGWNSNYKSGLGADTISSGIEGAWTSNPIKWDMGYFDNLFGYEWELTKSPAGAHQWKPIENGHAPNMTPDAHIKDKKNLPMMQTTDLSMRFDPEFGRISKHFHNNPDEFADAFARAWFKLTHRDMGPKVNYLGSEVPKEDLIWQDPVPKNKLKLKNKDIESLKVKITKSGLSVSQLVSTAWASASTFRGSDKRGGANGARVRLAPQKDWKVNNPAQLSKA

SEQ ID NO: 89806 - protein, 309 aa, Unknown
  Bacterial polypetide isolated from the Sargasso Sea
LNLKILSQHSSLVDPMGQKFNYSKEFKKLNFKALKKDLHNLMTDSQDWWPADYGHYGPLFIRLAWHAAGTYRTGDGRGGAGTGNQRFAPLNSWPDNVNLDKARLLLWPIKKKYGKRISWADLFILIGNVALESMGFKTFGFGGGREDIWEPEEDIYWGSEKEWLGVNRYSGKRDLENPLGASHMGLIYVNPQGPDANPDPLLAAHDIRETFGRMAMNDYETVALVAGGHTFGKSHGAASESHKGPEPEGSKIQEQATGWNSNYKSGLGADTISSGIEGAWTSNPIKWDMGYFDNLFGYDWELTKSPAEH

SEQ ID NO: 89807 - protein, 310 aa, Unknown
  Bacterial polypetide isolated from the Sargasso Sea
GVEPEGGALHDMGFGWLSSFNSGKGRDTITSGIEGAWTPTPTQWDNSYFDVLFGYEWQLTKSPAGAHQWAAKNLAEKDHAPDAEIAGKKVGIMMTTADMAMREDPAYRKISQHFHQNPDEFADAFARAWFKLTHRDMGPKSRYLGPEVPAEDLIWQDPVPAVDHELVNTADIASLKHAILASGLTVSELVYTAWSSASTFRGSDCRGGANGARIRLAPQKDWQVNQPEQLKKVLHILTDIQHKFNGSQSGNKKISLADLIVLGGSAAIEKAAADAGTTITVPFAPGRTDATDEQTDADSFDVLEPIADGF

SEQ ID NO: 89808 - protein, 261 aa, Unknown
  Bacterial polypetide isolated from the Sargasso Sea
RISWADLFILVGNISLESMGFKTFGFGAGREDIWEPEEDIYWGSEKEWLGVNRYSGKRDLEQPLGASHMGLIYVNPQGPDANPDPLLAAHDIRETFGRMAMNDYETVALVAGGHTFGKSHGAAPESHKGPEPEGSKIQEQATGWNSNYKSGLGVDTISSGIEGAWTANPIKWDMGYFDNLFGYEWELTKSPAGAHQWKPKKNGFDIEMTPDAHEKSKKNLPMMQTTDLSLKMDPDYGPISRHFHNNPKEFADAFARAWFKL

SEQ ID NO: 89809 - protein, 268 aa, Unknown
  Bacterial polypetide isolated from the Sargasso Sea
MSKENEEKCPVMHGSLTSNSASGTSNQDWWPNQLNLNILHQHDQKSDPLAEDFDYREEFKKLDYKALKKDLNDLMTDSQDWWPADYGHYGPFFIRMTWHAAGTYRIGDGRGGGGTGAQRFAPLNSWPDNGNLDKARRLLWPIKQKYGNKISWADLLILAGNVAIESMGGKTFGFGGGRPDIWAPEEDIDWGIETEWLANERYSGERDLANPLGAVQMGLIYVNPQGPDGEPDPIASGKDVRETFGRMAMNDEETVALVAGGHTFGKGH

SEQ ID NO: 89810 - protein, 311 aa, Unknown
  Bacterial polypetide isolated from the Sargasso Sea
FPTGRGTSNRDWWPNSLNLKILSQHSSLVDPMDKKFNYAKEFKKLNLKALKKDLHKLMTDSQDWWPADYGHYGPLFIRLAWHAAGTYRTGDGRGGAGTGNQRFAPLNSWPDNVNLDKARLLMWPIKKKYGKKISWADLFILVGNVALESMGFKTFGFGGGREDIWEPEEDIYWGSEKEWLGVNRYSGKRDLENPLGASHMGLIYVNPQGPDANPDPFLAAHDIRETFGRMAMNDYETVALIAGGHTFGKSHGAAPESHKGPEPEGSRIQEQATGWNSNYKSGKGVDTISSGLEGAWTGNPTKWDNGYFDLL

SEQ ID NO: 89811 - protein, 276 aa, Unknown
  Bacterial polypetide isolated from the Sargasso Sea
MSAESKCPFTGAGTPPKFPTGRGTSNRDWWPNSLNLKILSQHSSLVNPMDEKFNYKKEFKKLNYKDLKKDLHRLMTDSQDWWPADYGHYGPLFIRLSWHAAGTYRTGDGRGGAGTGNQRFAPLNSWPDNVNLDKARLLLWPIKKKYGNKISWADLFILVGNVALESMGFKTFGFGGGRTDIWEPEEDIYWGSEKEWLGVNRYSGKRELENPLGASHMGLIYVNPQGPDANPDPFLAAHDIRETFGRMAMNDYETVALVAGGHTFGKSHGAAPESHK

SEQ ID NO: 89812 - protein, 252 aa, Unknown
  Bacterial polypetide isolated from the Sargasso Sea
WWPADYGHYGPFFIPLAWHAAGTYRTGDGRGGAGTGNQRFAPLNSWPDNVNLDKARLLLWPIKKKYGKKISWADLFILVGNISLESMGFKTFGFGAGREDIWEPEEDIYWGSEKEWLGVNRYSGKRELENPLGASHMGLIYVNPQGPDANPDPYLAAHDIRETFGRMAMNDYETVALVAGGHTFGKSHGAAPESHKGPEPEGSKIQDQATGWNSNYKSGLGVDTISSGIEGAWTSNPIKWDMGYFDNLFGYD

SEQ ID NO: 89813 - protein, 286 aa, Unknown
  Bacterial polypetide isolated from the Sargasso Sea
SGLGADTISSGIEGAWTSNPIKWDMGYFDNLFGYDWELTKSPAGAHQWKPKQNGHGVNMTPDAHIKTKKNLPMMQTTDLSLKMDPSYGPISRNFHNNPKEFADAFARAWFKLTHRDMGPRACYLGPEVPKEQLIWQDPIPKAKYKIKNKDIKTLKTKILKSGLSISELVSTAWASASTFRGSDKRGGANGARIRLEPQKHWEVNNPNQLSKVIKTLQKIKKNFDSKSKNVSLADLIVLGGCAAIEKAAKKSGKNINVPFIPGRGDASQEQTDTYSFGLLEPKSGWI

SEQ ID NO: 89814 - protein, 332 aa, Unknown
  Bacterial polypetide isolated from the Sargasso Sea
LMTSSQEWWPADYGHYVPLFIRLAWHAAGTYRTGDGRGGAGTGNQRFAPLNSWPDNVNLDKARLLLWPIKQKYGKKISWADLFILVGNVALDSMGFKTFGFGAGRVDIWEPEDDIYWGSEKEMLDVKRYSGKRDLEQPLGASHMGLIYVNPQGPDANPDPLLAAHDIRETFGRMAMNDYETAALVAGGHTFGKSHGAAPESHKGPDPEASRIQDQATGWNSGYKSGKGIDTISSGIEGAWTQNPTKWDMGYLDCLYGHEWELTKSPAGAHQWTPKKNGQEIKMVPDAHDKNVLHPPMMQTTDISLKVDPSYGPITRHFHENPKEFHDAFARA

SEQ ID NO: 89815 - protein, 315 aa, Unknown
  Bacterial polypetide isolated from the Sargasso Sea
FFIRLTWHAAGTYRTWDGRGGGGTGDQRFAPLNSWPDNGNLDKARRLLWPLKKKYGSKISWADLFILAGNVAIESMGGKTFGYSGGRPDIWTPPEDIYWGKENEWLKNERYTGERVLETPLGAVQMGLIYVNPQGPDGNPDPKASAMDIRETFARMAMNDEETVALTAGGHTFGKAHGAAPEENVGPEPEGAPIEQMGFGWKNVHGVGKGGDTITSGIEGPWTTNPTKWDNSYFELLFKYDWELVKSPAGAFQWHPINPDENDLAPDAADSSKKVTTIMTTADMAMKEDPAYNKISRRFLENPDEFADTFARAMV

SEQ ID NO: 89816 - protein, 318 aa, Unknown
  Bacterial polypetide isolated from the Sargasso Sea
SWPDNGNLDKARRLLWPIKKKYGNKISWADLFILTGNVAIESMGGKTFGFSGGRPDIWAPEEDIYWGVEEEWLQNKRYTGDRILDNPLAAVQMGLIYVNPEGPDGKADPLASAKDIRETFARMAMNDTETVALTAGGHTFGKAHGAGDPALVGAEPEGAPLEQMGLGWNNLHGSGVGRDTTTSGIEGPWTPNPTQWDNGYFDMLLGYEWKLVKSPAGAQIWHAIDQKEEHMAPQVDDPSVKVPTMMTTADMAMREDPEYRKVSEKFHKDPEYFADQFARAWFKLLHRDMGPKTRYMGPEVPEEELIWQDPCASRSFQN

SEQ ID NO: 89817 - protein, 321 aa, Unknown
  Bacterial polypetide isolated from the Sargasso Sea
KIKMVPDAHDKNKMHPPMMQTTDLSLRMDPSYGPISKHFFNNPDEFADAFARAWFKLTHRDMGPRACYLGSEVPKEELIWQDPVKKPKYKLKAKDIKDLKSQISKSKLSVSELVSTAWASASTYRGSDKRGGANGARIRLEPQINWEVNNNGKTTKVISALEKIQNKFSTKKKSVSLADLIVLGGNVGVEMAAKKAGKKIEVPFSPGRGDATQEQTDVHSFGLLEPQADGFRNYNKDEQTKVSAEEKLIDKSQLMGLTAPEMTVLLGGMRVLDTNFDNSKNGVFTKKPGTLTNDYFVNLLDMNTTWKETDSSEPVIEGKTE

SEQ ID NO: 89818 - protein, 298 aa, Unknown
  Bacterial polypetide isolated from the Sargasso Sea
YSGKRDLENPLGASHMGLIYVNPQGPDANPDPLLAAHDIRETFGRMAMNDYETVALVAGGHTFGKSHGAAPESHKGPEPEGSKIQDQATGWNSNYKSGKGVDTISSGLEGAWTQTPIKWDMGYLDCLYDHEWELTKSPAGAHQWTPKQNGQAIKMVPDAHDRTKKHPPMMLTTDISMRVDPQYGPISKKFHENPDEFADAFARAWFKLTHRDMGPKACYLGPEVPKENLIWQDPVPKAKYKLKNKDINTLKKQISKSGLSISQLVSTAWASASTFRGSDKRGGANGARIRLEPQKDWE

SEQ ID NO: 89819 - protein, 321 aa, Unknown
  Bacterial polypetide isolated from the Sargasso Sea
HGGVESEWLENKRYKGERELDNPLAAVQMGLIYVNPQGPDGNPDPLASAHDIRETFGRMAMNDEETVALVAGGHTFGKAHGAGAEDHVQSEPEGAPLEEMGFGWTSTYASGVGSDTITSGIEGAWTANPTQWDNGYFDLLFGYEWELTKSPAGAHIWHAVGQTEEDMAPDAEDASKKVPTMMTTADMALREDPSYKKISKRFHENPDEFADAFARAWFKLLHRDMGPKSRYMGPEVPGEELIWQDPVPLGNSDYDIEKVKEMISKSGLSIQEMVETAWASASTFRGSDMRGGANGSRIRLAPQKDWGANNPSQLCKVLDIY

SEQ ID NO: 89820 - protein, 181 aa, Unknown
  Bacterial polypetide isolated from the Sargasso Sea
MDKTQHSQGKCPVMHGANSAVASNNMDWWPKALNLDILHQHDKKTDPMDPNFNYREAFKTLDLAAVKQDLHSLMTDSQDWWPADWGHYGGLMIRMAWHSAGTYRIADGRGGAGTGNQRFAPLNSWPDNANLDKARRLLWPIKKKYGNKLSWADLMILAGNVAYESMGLKTYGFAGGREDIW

SEQ ID NO: 89821 - protein, 278 aa, Unknown
  Bacterial polypetide isolated from the Sargasso Sea
GQTNRDFWPNSLNLKILSQHSNLSNPMEKKFNYSKEFKKLNYKALKKDLNKLMTDSQDWWPADYGHYGPLFIRLAWHAAGTYRTGDGRGGAGTGNQRFAPLNAWPDNVNLDKARLLLWPIKQKYGKRISWADLFILVGNVALESMGFKTFGFGAGRTDIWEPEDDIYWGSEKEMLGVKRYSGKRDLEQPLGASHMGLIYVNPQGPDFNPDPLKAAHDIRETFGRMAMNDYETVALVAGGHTFGKSHGAAPESHKGPDPEASRIQDQATGWNSNYKSGK

SEQ ID NO: 89822 - protein, 287 aa, Unknown
  Bacterial polypetide isolated from the Sargasso Sea
SNRDWWPNQLNLSILHQHDQKSNPMNKDFDYREEFKSIDYTALKKDLTNLMTDSQDWWPADYGHYGPFFIRMTWHAAGTYRTGDGRGGGGTGAQRFAPLNSWPDNGNLDKARRLLWPIKQKYGNKISWADLLILAGNVAIESMGGKTFGYSGGRSDIWAPEEDIYWGVEKEWLENKRYKGERELDNPLAAVQMGLIYVNPEGPDGNPDPLASAKDIRETFGRMAMNDEETVALTAGGHTFGKAHGAGDPSLVGPEPEGAKIEEMGFGWISKHGSGKGSDSITSGIER

SEQ ID NO: 89823 - protein, 293 aa, Unknown
  Bacterial polypetide isolated from the Sargasso Sea
GDGRGGAGTGNQRFAPLNSWPDNVNLDKARLLLWPIKKKYGKQISWADLFILVGNVALESMGFKTFGFGGGREDIWEPEEDIYWGSEKEWLGVKRYSGKRELENPLGASHMGLIYVNPQGPDANPDPLLAAHDIRETFGRMAMNDYETVALVAGGHTFGKSHGAAPESHKGPEPEGSKLQEQATGWNSNYKSGKGVDTISSGLEGAWTHNPIKWDMGYFDNLFSYDWELTKSPAGAHQWKPKQNGSAIKMVPDAHDKSKKHPPMMLTTDLSMRMDPKYGPISRNFFENPDRIC

SEQ ID NO: 89824 - protein, 251 aa, Unknown
  Bacterial polypetide isolated from the Sargasso Sea
KKDLHKLMTQSQSWWPADYGHYGPLFIRLAWHAAGTYRTGDGRGGAGTGNQRFAPINSWPDNVNLDKARLLLWPIKKKYGKKISWADLFILVGNVALESMGFKTFGFGGGREDIWEPEDDIYWGSEKEWLANNRYNSKRELENPLGAVQMGLIYVNPQGPDGNPDPLLAARDIRETFGRMAMNDYEIVALVAGGHTFGKSHGAAPESHKGNEPEGSRIQDQATGWNSDYKSGIGADTISSGIEGAWTSNPI

SEQ ID NO: 89825 - protein, 297 aa, Unknown
  Bacterial polypetide isolated from the Sargasso Sea
IKWDMGYFDCLFNHEWELTKSPAGAHQWTPKQNGQKIKMVPDAHDKNKMHPPMMQTTDLSLRMDPSYGPISKHFFNNPDEFADAFARAWFKLTHRDMGPRACYLGSEVPKEELIWQDPVKKPKYKLKAKDIKDLKSQISKSKLSVSELVSTAWASASTYRGSDKRGGANGARIRLEPQINWEVNNNGKTTKVISALEKIQNKFNTKKKSVSLADLIVLGGNVGIEIAAKKAGKKIEVPFSPGRGDATQEQTDVHSFGLLEPQADGFRNYNKDEKTKVSAEEKLIDKSQINGSYSTQR

SEQ ID NO: 89826 - protein, 146 aa, Unknown
  Bacterial polypetide isolated from the Sargasso Sea
RNPLTNLKDPQAMWDFWSLNPEAMHQVTILMSDRGIPANYRQMHGYGSHTFSFWNAKGERFWVKFHFKSQQGVVNLTNEQADKLKGIDPDSSQRDMVVAVTDGNFPRWTVNVQIMPESDANTYHINPFDLTKVWPHGDYPLIEIGV

SEQ ID NO: 89827 - protein, 269 aa, Unknown
  Bacterial polypetide isolated from the Sargasso Sea
PISKHFHQNPNEFADAFARAWFKLTHRDMGPKANYLGSDVPKENLIWQDPIPKNKYKLKNKDIELLKKKISKSGLSVSQLVTTAWASASTFRGSDKRGGANGARIALEPQKDWKVNNPTKLSAVIRIFNKIKKGFDSKNKSVSLADLIVLGGSVGIENAAKKSGKKIKVPFKAGRGDAKQDQTDKNSFNLLEPIADGFRNYIKLHAKGYTNGKGIPTNSAEEMLIDKAQLLGLTGPEMTVLIGGMRVLNTNYDGSDYGVFTKKPGSLTN

SEQ ID NO: 89828 - protein, 301 aa, Unknown
  Bacterial polypetide isolated from the Sargasso Sea
GHTFGKSHGAASESHKGPDPEASRIQDQSTGWNSDYKSGKGVDTISSGIEGAWTQSPIKWDMGYFDCLFNHEWELTKSPAGAHQWTPKQNGQKIKMVPDAHDKNKMHPPMMQTTDLSLRMDPSYGPISKHFYNNPAEFADAFARAWFKLTHRDMGPRACYLGNEVPKEELIWQDPVEKPKYKLKKSDIKILKSKISKSKLSVSELVSTAWASASTYRGSDKRGGANGARVKLEPQISWDVNNPKQINKVIKALEKIKNKFDNKKKSVSLADLIVLGGNVGIEMAAKKAGIKVDVPFSPGRG

SEQ ID NO: 89829 - protein, 285 aa, Unknown
  Bacterial polypetide isolated from the Sargasso Sea
FSGGRVDIWSPEEDIYWGKEKEWLANNRYTGDRNLENPLAAVQMGLIYVNPEGPDGNPDPLASARDIRETFGRMAMNDEETVALTAGGHTFGKAHGAGDAGLVGPEPEGAPIEEMGFGWISKHASGKGSDTITSGIEGAWTANPTKWDNGYFDLLLGYDWKLTKSPAGANIWHAVDQKEEHMAPDAEDSSKKVPTMMTTADMAMREDPEYRKISEYFHKNPDQFQDAFARAWFKLLHRDMGPKTRYMGPEAPAEDLIWQDPIPSGNKDYDIESVKTRISESGINN

SEQ ID NO: 89830 - protein, 309 aa, Unknown
  Bacterial polypetide isolated from the Sargasso Sea
MEKDKQIKIGWPNSLNLKILSQHSSMVNPMDKKFDYKKEFKKLNFKALKKDLHKLMTQSQSWWPADYGHYGPLFIRLAWHAAGTYRTGDGRGGAGTGNQRFAPINSWPDNVNLDKARLLLWPIKKKYGKNISWADLFILVGNVALESMGFKTFGFGGGREDIWEPEEDIYWGSEKEWLANNRYNSKRELENPLGAVQMGLIYVNPQGPDGNPDPLLAARDIRETFGRMAMNDYEIVALVAGGHTFGKSHGAAPESHKGPEPEGSKIQDQSTGWNSNYKSGLGSDTISSGIEGAWTSNPIKWDMGYFDNL

SEQ ID NO: 89831 - protein, 297 aa, Unknown
  Bacterial polypetide isolated from the Sargasso Sea
TFGRMAMNDEETVALTAGGHTFGKAHGAGDPSLVGPEPEGAKIEELGFGWISKHGSGKGSDAITSGIEGAWTTNPTKWDNGYFDLLLNYEWELTKSPAGANIWHAVNQKDEHKAPDAEDSSKRVPTMMTTADMAMREDPSYRKISERFHKNPDEFQDAFARAWFKLLHRDMGPKTRYMGPEVPKEELIWQDPIPKGNADYDIDSVKTKIVESGLSIQEMIETAWASASTFRGTDMRGGANGARIRLEPQKSWEVNKPEQLSKVLSIFEGIASETGASVADIIVLAGNVGIEKASGVP

SEQ ID NO: 89832 - protein, 233 aa, Unknown
  Bacterial polypetide isolated from the Sargasso Sea
GTGAQRFAPLNSWPDNGNLDKARRLLWPIKQKYGKKISWADLLILAGNVAIESMGGETFGFSGGRPDIWGPEEDIHWGVESEWLDNKRYKGERELDNPLAAVQMGLIYVNPQGPDGNPDPLASAHDIRTTFGRMAMNDEETVALVAGGHTFGKSHGAGPEDNVQQEPEGAPLEEMGFGWSSTFGSGVGSDTITSGIEGAWTANPTKWDNGYFDLLFGYDWELTKSPAGAHIWH

SEQ ID NO: 89833 - protein, 324 aa, Unknown
  Bacterial polypetide isolated from the Sargasso Sea
FFIRMTWHAAGTYRTGDGRGGGGTGAQRFAPLNSWPDNGNLDKARRLLWPIKKKYGNKISWADLFILTGNVAIESMGGKTFGFSGGRPDIWAPEEDIYWGVEEEWLQNKRYTGDRILDNPLAAVQMGLIYVNPEGPDGKADPLASAKDIRETFARMAMNDTETVALTAGGHTFGKAHGAGDPALVGAEPEGAPLEQMGLGWNNLHGSGVGRDTTTSGIEGPWTPNPTQWDNGYFDMLLGYEWKLVKSPAGAQIWHAIDQKEEHMAPQVDDPSVKVPTMMTTADMAMREDPEYRKVSEKFHKDPEYFADQFARAWFNFYIEIWVQ

SEQ ID NO: 89834 - protein, 192 aa, Unknown
  Bacterial polypetide isolated from the Sargasso Sea
MENEGKCPVMHGAMTSNSSSGTSNKDWWPEQLNLNILHQHDRKSDPMDEGFDYRKEFEDIEYDALKKDLNDLMTDSQEWWPADYGHYGPFFIRMTWHAAGTYRSTDGRGGGGTGAQRFAPLNSWPDNGNLDKARRLLWPIKQKYGKKISWADLLILAGNVAIESMGGKTFGFSGGRPDIWGPEEDIHWGVET

SEQ ID NO: 89835 - protein, 259 aa, Unknown
  Bacterial polypetide isolated from the Sargasso Sea
IEDSGLTIQEMVETAWASASTFRGSDMRGGANGSRIRLAPQKDWEANKPEQLARVLAILEGIAADTGASVADVIVLAGNIGVEQASGAEVPFTPGRGDASQEQTDVDSFEVLEPFSDGFRNYHDKNLEVTPEQMLLDKAQLLGLTAPEMTVLVGGMRSLGISSDGHGIFTDSPGKLTNDFFVNLLDMSVEWKPTGRNSYEASDRSSGEKQRTATRVDLVFGSNSQLRALAEVYATDNSKQKFVDDFVAAWNKVMNLDRF

SEQ ID NO: 89836 - protein, 300 aa, Unknown
  Bacterial polypetide isolated from the Sargasso Sea
PFTGAGTPPKFPTGRGQSNRDWWPNSLNLKILSQHSSLVDPMEKKFNYAKEFKKLNFQALKKDLHKLMTDSQDWWPADYGHYGGLFIRLAWHAAGTYRTGDGRGGAGTGNQRFAPLNSWPDNVNLDKARLLLWPIKKKYGKKISWADLFILVGNVALESMGFKTFGFGGGREDIWEPEEDIYWGSEKEWLGVNRYSGKRELENPLGASHMGLIYVNPQGPEANPDPVLAAHDIRETFGRMAMNDYETVALIAGGHTFGKSHGAAPESHKGPEPEGSKIQEQATGWNSNYKSGLGVHTISS

SEQ ID NO: 89837 - protein, 296 aa, Unknown
  Bacterial polypetide isolated from the Sargasso Sea
MSRELIKEQSKCPFTGAGTPSKHPTGKGTSNRDWWPNSLNLKILSQHSLLVDPMDKKFNYEKEFKKLKLKSLKKDLHKLMTNSQDWWPADYGHYGPLFIRLAWHAAGTYRTGDGRGGAGTGNQRFAPLNSWPDNVNLDKARLLLWPIKKKYGKKISWADLFILVGNVALESMGFKTFGFGGGREDIWEPEEDIYWGSEKEWLGVNRYSGKRNLENPLGASHMGLIYVNPQGPDANPDPLLAAHDIRETFGRMAMNDYETVALVAGGHTFGKSHGAAPESHKGPEPEGSKIQEQATG

SEQ ID NO: 89838 - protein, 298 aa, Unknown
  Bacterial polypetide isolated from the Sargasso Sea
KKLMTDSQEWWPADYGHYGPLFIRLAWHAAGTYRTGDGRGGAGTGNQRFAPLNSWPDNVNLDKARLLLWPIKKKYGRKISWADLFILVGNVALDSMGFKTFGFGAGRTDIWEPEDDIYWGSEKEMLGVERYSGKRDLEQPLGASHMGLIYVNPQGPDANPDPILAAHDIRETFGRMAMNDYETAALVAGGHTFGKSHGAASESFKGPDPEASKLQDQSTGWNSGYKSGKGVDTISSGIEGAWTQNPIKWDMGYLDCLYGHEWELTKSPAGAHQWTPKKNGQEIKMVPDAHKKGVCIHL

SEQ ID NO: 89839 - protein, 295 aa, Unknown
  Bacterial polypetide isolated from the Sargasso Sea
PEPEGSKIQDQATGWNSNYKSGLGVDTISSGIEGAWTSNPIKWDMGYFDNLFGYDWELTKSPAGAHQWKPKRNGHDIEMTPDAHDRSKKNLPMMQTTDLSLKLDPKYGPISKHFHQNPNEFANAFARAWFKLTHRDMGPKANYLGSDVPKENLIWQDPIPKNKYKLKNRDIDLLKKKISKSGLTVSQLVTTAWASASTFRGSDKRGGANGARIALEPQKDWKVNNPSKLSAVIRIFNKIKKGFDSKNKSVSLADLIVLGGSVGIENAAKKSGKKIKVPFKAGRGDAKQDQTDKNS

SEQ ID NO: 89840 - protein, 175 aa, Unknown
  Bacterial polypetide isolated from the Sargasso Sea
MDDQSISKCPVMHGSATQNSGISTTNRDWWPNQLNVNILHQNDKRSNPMSIDFDYREEFKKVDYFALKKDLTDLMTDSKDWWPADYGHYGPFFIRMTWHAAGTYRTADGRGGGGTGDQRFAPLNSWPDNGNLDKARRLLWPIKQKYGNKISWADLFILTGNVAIESMGGKTFGFS

SEQ ID NO: 89841 - protein, 246 aa, Unknown
  Bacterial polypetide isolated from the Sargasso Sea
FKIDHDYRKEFLKLDYFALKDDLRNLMTDSKTWWPADFGHYGPFFIRLTWHAAGTYRTGDGRGGAGTGAQRLAPLNSWPDNGNLDKARRLLWPIKQKYGKKISWADLLVLAGNVAIESMGGKTFGFSGGRTDIWSPEEDIFWGVEKGWLDNNRYKGKRELDIPLAAVQMGLIYVNPEGPDGNPDPLASAHDIRETFARMAMNDEETVALVAGGHTFGKAHGAGNPDLVGAEPEGAPIEQMGLGWKN

SEQ ID NO: 89842 - protein, 258 aa, Unknown
  Bacterial polypetide isolated from the Sargasso Sea
RTGDGRGGTREGQHRFAPQNSWPDNANLDKARRLIWPIKQKYGNKISWADLMILTGNVALESMGFETLGFAGGREDVWEPAGNIYWGMEEKWLEDGRYSGNRELEKPLAAVQMGLIYVNPEGPNGNPDPIAAAKDIRETFGRMGMNDEETVALIAGGHTLGKTHGAGAASHVGVEPEAAAIEEQGFGWKSNYKSGKGADAITSGLEVIWTSTPTKWNHTYFKMLFDNEWELTKSPAGANQWVAKDMGAIFPDAFDENK

SEQ ID NO: 89843 - protein, 297 aa, Unknown
  Bacterial polypetide isolated from the Sargasso Sea
MGYFDCLFNHEWELTKSPAGAHQWTPKKNGQEIKMVPDAFDSNKKHPPMMQTTDLSLRMDPSYGPISKNFHENPDEFADAFARAWFKLTHRDMGPKVNYLGPEVPKEQLIWQDPIPKAKYKLNKQDINALKSKILKSGLTISELVKTAWASASTFRISDKRGGANGARIRLSPQKDWEVNSPKKLSKVISVYEKVKKSFDNKKKSVSIADLIVLGGCAAIEKAASKAGNKINVPFTPGRGDATQDQTDAFSFDLLKPKADGFRNYKYSNGSKISAEEMLIDKANLMELTGPKMTVLV

SEQ ID NO: 89844 - protein, 164 aa, Unknown
  Bacterial polypetide isolated from the Sargasso Sea
MDDIGKCPVMHGSVTTNSGVSTTNRDWWPNQLNLNILHQNDKRSNPMSLDFDYREEFKKLDYQALKKDLHDLMTDSQDWWPADYGHYGPFFIRMTWHAAGTYRTSDGRGGGGTGDQRFAPLNSWPDNGNLDKARRLLWPIKQKYGNKISWADLFILTGNVAIES

SEQ ID NO: 89845 - protein, 288 aa, Unknown
  Bacterial polypetide isolated from the Sargasso Sea
YRTGDGRGGAGTGNQRFAPINSWPDNVNLDKARLLLWPIKKKYGKNISWADLFILVGNVALESMGFKTFGFGGGREDIWEPEEDIYWGSEKEWLANNRYDSKRELENPLGAVQMGLIYVNPQGPDGNPDPLLAARDIRETFGRMAMNDYEIVALVAGGHTFGKSHGAAPESHKGPEPEGSKIQDQSTGWNSNYKSGLGSDTISSGIEGAWTSNPIKWDMGYFDNLFGYEWELTKSPAGAHQWKPVKNGHAPNMTPDAHIKGKKNLPNDATTDFIMRFDPEFGRFSNTL

SEQ ID NO: 89846 - protein, 290 aa, Unknown
  Bacterial polypetide isolated from the Sargasso Sea
YDALKKDLTDLMTDSQDWWPADYGHYGPFFIRMTWHAAGTYRNTDGRGGGGTGAQRFAPLNSWPDNGNLDKARRLLWPIKQKYGKKISWADLLILAGNVAIESMGGTTFGYSGGRPDIWGPEEDIHWGIESEWLENKRYKGERELDNPLAAVQMGLIYVNPQGPDGNPDPLASAHDIRETFGRMAMNDEETVALVAGGHTFGKAHGAGAEDHVQSEPEGAPLEEMGFGWSSTYASGVGSDTITSGIEGAWTANPTQWDNGYFDLLFGYDWELTKSPAGAHIWHAVGQTEE

SEQ ID NO: 89847 - protein, 247 aa, Unknown
  Bacterial polypetide isolated from the Sargasso Sea
NRDWWPNQLNLSILHQHDQKSNPMNKDFDYREEFKSIDYTALKKDLTSLMTDSQDWWPADYGHYGPFFIRMTWHAAGTYRTGDGRGGGGTGAQRFAPLNSWPDNGNLDKARRLLWPIKQKYGNKISWADLLILAGNVAIESMGGKTFGYSGGRPDIWAPEEDIYWGVEKEWLENKRYKGERQLDNPLAAVQMGLIYVNPEGPDGNPDPLASAKDIRETFGRMAMNDEETVALTAGGHTFGKAHGAGD

SEQ ID NO: 89848 - protein, 277 aa, Unknown
  Bacterial polypetide isolated from the Sargasso Sea
GLEPEGSRIQDQSTGWNSNYKTGLGADTISSGIEGAWTSNPIKWDMGYFDNLFGYEWELTKSPAGAHQWKPKKNGHAPNMTPDAHIKGKKNLPMMQTTDLSMRFDPEFGRISKHFHNNPDEFADAFARAWFKLTHRDMGPKINYLGTEVPKEDLIWQDPVPKNKSKLKNKDIETLKSKISNSGLSVSQLVSTAWASASTYRGSDKRGGANGARLRLYPQKDWKVNNPSQLSTVIKVYEKIQKKFNSKKKYVSLADLIVLGGNVGIEKAAKSAGKKIK

SEQ ID NO: 89849 - protein, 276 aa, Unknown
  Bacterial polypetide isolated from the Sargasso Sea
SKYFHQNPNEFADAFARAWFKLTHRDMGPKANYLGSDVPKEELIWQDPIPKNKYKLKNKDIELLKKKISKSGLSTSQLVTTAWASASTFRGSDKRGGANGARIALEPQKGWKVNNPSKLSAVIKVLNKIKKDFDSKKKSVSLADLIVLGGSVGIENAAKKSGKKIRVPFVAGRGDAKQDQTDKNSFNLLEPIADGFRNYIKMHAKGYTNGKGIPTNSAEEMLIDKAQLLGLTGPEMTVLIGGMRVLNTNYDGSDYGVFTKKPGTLTNDFFVNLLDR

SEQ ID NO: 89850 - protein, 190 aa, Unknown
  Bacterial polypetide isolated from the Sargasso Sea
IEVGVLELNRNPDNHFAEVEQAAFSPANVVPGIGFSPDKMLQARLFSYGDAQRYRLGVNFNLIPVNAPRCPYHSYHRDGQMRTDGNQGSTIAHYPNSQGEWEDRQELREPPLPLQGSATNWDHRVDDDHFQQPGDLFRLMSPAQRQVLFENTARAMGDASAEIKRRHIANCSKADPAYGAGVARALGLGD

SEQ ID NO: 89851 - protein, 303 aa, Unknown
  Bacterial polypetide isolated from the Sargasso Sea
KRISWADLFILVENVALESMGFKTYGFGGGRVDIWEPEEDIYWGSEKEWLANNRYNSKRELENPLGAVQMGLIYVNPQGPDGNPDPLLAARDIRETFGRMAMNDYEIVALVAGGHTFGKSHGAAPESHKGPEPEGSRIQDQSTGWNSNYKTGLGADTISSGIEGAWTSNPIKWDMGYFDNLFGYEWELTKSPAGAHQWKPVKNGHVPNMTPDAHIKGKNNLPMMQTTDLSMRFDPEFGRISKYFHNNPDEFADAFARAWFKLTHRDMGPKINYLGNEVPKEDLIWQDQVPKNKFKLTNKDIET

SEQ ID NO: 89852 - protein, 313 aa, Unknown
  Bacterial polypetide isolated from the Sargasso Sea
NRKQRFAPLYSWPDNVNLDKARLLLWPIKKKYGKKISWADLFVLIGNVALESMGFKTFGFGAGREDIWEPEEDIYWGSEKEWLGVNRYSGKRELENPLGASHMGLIYVNPQGPDANPDPLLAAHDIRETFGRMAMNDYETVALVAGGHTFGKSHGAAPESHKGPEPEGSKIQDQATGWNSNYKSGLGEDTISSGIEGAWTSNPIKWDMGYFDNLFGYEWELSKSPAGAHQWKPIKNGKAINMTPDAHIKSKENLPMMQTTDLSLKLDPSYGPISRHFHNNPEEFADAFARAWFKLTHRDMGPRACYLGPEVQK

SEQ ID NO: 89853 - protein, 294 aa, Unknown
  Bacterial polypetide isolated from the Sargasso Sea
ELENPLGASHMGLIYVNPQGPDAHPDPILAAHDIRETFGRMAMNDYETVALIAGGHTFGKSHGAASESHKGIEPEGSKIQEQATGWNSDYKSGKGIDTISSGLEGAWTQNPKKWDMGYFDNLFQYDWELTKSPAGAHQWTPKKNGHAIKMVPDAHDRTKKHAPMMLTTDLSMRMDPKYGPISKHFHKNPKEFADAFARAWFKLTHRDMGPRPCYLGPEVPKEKLIWQDPVTKPKYKLKSKDIKILKAKIIKSGLSISQLVSTAWASASTFRGSDKRGGANGARIRLLPQKEWEV

SEQ ID NO: 89854 - protein, 261 aa, Unknown
  Bacterial polypetide isolated from the Sargasso Sea
AESNLTIQELVETAWASASTFRSSDLRGGANGARIRLAPQKDWEANKPEQLSRVLGVLENIASETGASIADVIVLAGNVGIEKASGASVSFTPGRGDATQEHTDEHSFAVLEPVSDGFRNYHKKGFDINSEHMLVDKAQLLGLTASEMTVLIGGMRALGISADGHGVFTDTAGKLTNDWFVTLLDMDVEWKATGRNTYAAKHRTTGDEIRTATRSDLVFGSNSQLRALAEVYAADGSHDKFVKDFISAWTKVMNLDRFDQA

SEQ ID NO: 89855 - protein, 228 aa, Unknown
  Bacterial polypetide isolated from the Sargasso Sea
MNDISKCPVMHGAITSNSSAGTSNKDWWPNQLNLNILHQHDKKSSPINNGFNYRKEFKKLDYQSLKNDLLKLMTDSQDWWPADYGHYGPFFIRMTWHAAGTYRTGDGRGGGGTGAQRFAPLNSWPDNGNLDKARRLLWPIKQKYGNKISWADLVILAGNVAIESMGGKTFGYSGGREDIWSPEEDIYWGKETEWLENNRYTGERNLENPLAAVQMGLIYVNPEGPDGN

SEQ ID NO: 89856 - protein, 324 aa, Unknown
  Bacterial polypetide isolated from the Sargasso Sea
LMKDTQDWWPADYGHYGPFFIRLAWHAAGTYRTGDGRGGAGTGNQRFAPLNSWPDNVNLDKARLLLWPIKKKYGSKISWADLFILVGNISLESMGFKTFGFGAGREDIWEPEEDIYWGSEKEWLGVNRYSGKRELENPLGASHMGLIYVNPQGPDANPDPYLAAHDIRETFGRMAMNDYETVALVAGGHTFGKSHGAAPESHKGPEPEGSKIQYQATGWNSNYKSGLGVDTISSGIEGAWTSNPIKWDMGYFDNLFGYDWELTKSPAGAHQWKPKKNGRAIQTTPDAHDRSKKNLPMMQTTDLSLKLDPKYGPISRHFIKIQRN

SEQ ID NO: 89857 - protein, 275 aa, Unknown
  Bacterial polypetide isolated from the Sargasso Sea
VEKSFHGKFKKNKDWWPNQLDLGVLREQSSLTNPMGEEFDYEKAFNSLDYQALKSDIKDLMTESKDWWPADYGHYGGLMIRMAWHSAGTYRTGDGRGGTREGQHRFAPQNSWPDNANLDKARRLVWPIKQKYGSKISWADLMILSGNVALESMGFKTLGFAGGREDIYQPAGSIYWGSEEKWLGDDKRYKGERELEKPLAAVQMGLIYVNPEGPGGNSDPLAAAKDIRETFGRMGMNDEETVALIAGGHTLGKTHGAGKTSHVGAAPEGAGIEEQ

SEQ ID NO: 89858 - protein, 304 aa, Unknown
  Bacterial polypetide isolated from the Sargasso Sea
RMAMNDYETVALIAGGHTFGKCHGAASESHKGPEPEGSKIQEQATGWNSSYKSGIGVDTISSGLEGAWTQNPKKWDMGYLDNLFQYDWELTKSPAGAHQWKPKQNGHAIKMVPDAHEKSKKHAPMMLTTDLSLRMDPKYGPISKHFHENPDEFADAFARAWFKLTHRDMGPRSCYLGPEVPKEKLIWQDPIAKNKYKLKKKDIKTLKTKILKSGISISELVKTAWASASTFRGSDKRGGANGARIRLSPQKDWNINNPSELSKVIKSYEKIKKGFDTKKKVVSIADLIVLGGCAAIEKAAKKAG

SEQ ID NO: 89859 - protein, 166 aa, Unknown
  Bacterial polypetide isolated from the Sargasso Sea
MDGENRCPVMHGALTNAAAGGTTTRDWWPNQLNLNILHQHSAQADPMDPDFDYAEAFNALDYKALKQDLHGLMTDSQDWWPADYGHYGPFFIRMTWHAAGTYRTADGRGGGGTGAQRFAPLNSWPDNGNLDKARRLLWPIKQKYGRNISWADLLILAGNVAIESMG

SEQ ID NO: 89860 - protein, 247 aa, Unknown
  Bacterial polypetide isolated from the Sargasso Sea
MSKVPPLTNATGAPVPDNTNTMTAGPRGPALLQDIWLLEKLAHFDREVIPERRMHAKGAGAYGTFTVTHDISRYTRAKLFSQIGKKTDVFLRFSTVAGERGAADAERDIRGFAVKFYTEEGNWDIVGNNTPVFFFRDPMRFPDLNHAVKRDPRTGLRSAESNWDFWTLLPEALHQVTIVMSDRGIPATYRHMHGFGSHTFSFINAANERYWVKFHFHSQQGIKNLSAEESEKVIGKDRESHLRDLYD

SEQ ID NO: 89861 - protein, 222 aa, Unknown
  Bacterial polypetide isolated from the Sargasso Sea
MDPKYGPISKHFHNNPEEFADAFARAWFKLTHRDMGPKSCYLGPDVPKENLIWQDPIAKQKYKLKNKDIKFLKSKILKSSLSVSELVSTAWASASTFRGSDKRGGANGARVRLEPQRNWEVNNPKKLSKVLHKFEKIKKNFDNKIKNVSLADLIVLGGCVGIEKAAKKAGYKVNVPFTSGRGDALQNETDEFSFGLLEPKADGFRNYVTRKTNGHGKSSISA

SEQ ID NO: 89862 - protein, 266 aa, Unknown
  Bacterial polypetide isolated from the Sargasso Sea
MNEKSKCPFTGAGTPPKFPTGRGTSNRDWWPNSLNLKILSQHSSLVDPMDKKFNYEKEFKKLNFKALKKDLQKLMTDSKDWWPADYGHYGGLFIRLAWHAAGTYRTGDGRGGAGTGNQRFAPLNSWPDNVNLDKGRLLLWPIKKKYGKKISWADLFILVGNVALESMGFKTFGFGGGREDIWEPEEDIYWGSEKEWLGVNRYSGKRDLENPLGATHMGLIYVNPQGPNANPDPLLAAHDIRETFGRMAMNDYETVALIAGGHTFGK

SEQ ID NO: 89863 - protein, 276 aa, Unknown
  Bacterial polypetide isolated from the Sargasso Sea
KKKYGKRISWADLFILVGNISLESMGFKTFGFGAGREDIWEPEDDIYWGSEKEWLGVNRYSGKRDLEQPLGASHMGLIYVNPQGPDANPDPLLAAHDIRETFGRMAMNDYETVALVAGGHTFGKSHGAAPESHKGPEPEGSKIQEQATGWNSNYKSGLGVDTISSGIEGAWTTNPIKWDMGYFDNLFGYEWELTKSPAGAHQWKPKKNGHDIEMTPDAHEKTKKNLPMMQTTDLSLKMDENYGPISRHFHNNPKEFADAFARAWFKLTHRDMGPKA

SEQ ID NO: 89864 - protein, 230 aa, Unknown
  Bacterial polypetide isolated from the Sargasso Sea
MVNPMDKKFKYSKEFKKLNYKGLKKDLVKLMTQSQSWWPADYGHYGPLFIRLAWHAAGTYRTGDGRGGAGTGNQRFAPLNSWPDNVNLDKARLLLWPIKKKYGKKISWADLFVLIGNVALESMGFKTFGFGAGREDIWEPEEDIYWGSEKEWLGVNRYSGKRELENPLGASHMGLIYVNPQGPDANPDPLLAAHDIRETFGRMAMNDYETVALVAGGHTFGKSHGAAPES

SEQ ID NO: 89865 - protein, 259 aa, Unknown
  Bacterial polypetide isolated from the Sargasso Sea
SGAFGTFTVTHDVTRYTRAKIFSRIGKTTEMFARFSTVAGERGAADAERDIRGFALKFYTEEGNWDLVGNNTPVFFLRDPLKFPDLNHAIKRDPRTGLRNAESNWDFWTQLPEALHQVTIVMSDRGIPRSYRHMHGFGSHTFSLINASNERFWVKFHMRSEQGIENLTDEEATRIMGSDRESHHRDLYESIEARQFPRWNLYFQVMPESEASAYKVNPFDLTKVWSKKDYPLIEVGYFELNRNAENWFADVEQAAFNPA

SEQ ID NO: 89866 - protein, 272 aa, Unknown
  Bacterial polypetide isolated from the Sargasso Sea
MSGELIKEQSKCPFTGAGTPAKHPTGRGTSNRDWWPNSLNLKILSQHSSLVDPMGQKFNYLKEFKKLNYKALKKDLNKLMTDSQDWWPADYGHYGPLFIRLAWHAAGTYRTGDGRGGAGTGNQRFAPLNSWPDNVNLDKARLLLWPIKKKYGKRISWADLFILIGNVALESMGFKTFGFGGGREDIWEPEEDIYWGSEKEWLGVNRYSGKRELENPLGASHMGLIYVNPQGPDANPDPILAAHDIRETFGRMAMNDYETVALVAGGHTFGKS

SEQ ID NO: 89867 - protein, 301 aa, Unknown
  Bacterial polypetide isolated from the Sargasso Sea
PEVPKEQLIWQDPITKPKYKLKNKDIKTLKTQILKSGLSISQLVSTAWASASTFRGSDKRGGANGARISLAPQKDWEVNNPSKLSKVIESLKKIKNKFDKKKKEVSLADLIVLGGNTAIEKAAKKAGHKVKVPFTSGRGDALQNQTDIFSFSLLEPKADGFRNYITKNTNGSSNKPTVSAEEMLIDKSQLMKLSAPEMTVLVGGMRVLNTNFDKSNHGVFTKNTEILTNDFFVNLLDMSTTWKEVDNNEQLFKGRDRKSNKVKWTATRVDLIFGSNSQLRAISEVYALEDSKKKFVNDFVS

SEQ ID NO: 89868 - protein, 242 aa, Unknown
  Bacterial polypetide isolated from the Sargasso Sea
MSTKKPATPPKSELAGTDTLDRGNTNAKLQALEEFRSDATGQALRTNQGVKISDNQNSLKVGARGPSLLEDFIMREKITHFDHERIPERIVHARGTGAHGYFQSYGDHSALTKAGFLRTPEHKTPVFARFSTVQGPRGSGDTVRDVRGFAVKFFTDEGNFDLVGNNMPVFFIQDAIKFPDFVHAVKPEPHNEIPTGGSAHDTFWDFVSLQPESAHMVIWAMSDRAIPKSLRAMQGFGVHTFR

SEQ ID NO: 89869 - protein, 307 aa, Unknown
  Bacterial polypetide isolated from the Sargasso Sea
RGGGGTGAQRFAPLNSWPDNGNLDKARRLLWPIKKKYGNQISWADLIILTGNVAIESMGGKVFGFGGGRDDIWAPEKDIFWGKETEWLTNERYTGERELDQPLAAVQMGLIYVNPQGPDGNPDPLKSAVDIRETFKRMAMNDYETVALTAGGHTFGKAHGAASEDHKGPEPEAAAIEEMGFGWSSDYKSGVGRDTITSGIEGAWTANPTQWDNGYFDLLFKYEYELKQSPAGAHQWHPVNPSEEDMAPDPEDPTKKVNTIMTTADMAMKMDPEYNKISKHFHENPEEFADAFARAWFKLLHRDMGPK

SEQ ID NO: 89870 - protein, 280 aa, Unknown
  Bacterial polypetide isolated from the Sargasso Sea
GNQISWADLLILTGNVAIESMGGKTFGFSGGRPDIWAPEEDIYWGLETEWLTNKRYSGDRVLENPLAAVQMGLIYVNPEGPDGNPDPLASARDIRETFGRMAMNDEETVALTAGGHTFGKAHGAGDASLVGPEPEGAPIEEMGFGWISKHASGKGSDTITSGIEGAWTTNPTKWDNGYFDLLLGYDWKLTKSPAGANIWHAVGQTKEHMAPDAEDSSKKVPTMMTTADMAMREDPEYRKISEHFHKNPDQFQDAFARAWFKLLHRDMGTKTRYMGPEAPE

SEQ ID NO: 89871 - protein, 259 aa, Unknown
  Bacterial polypetide isolated from the Sargasso Sea
LQTSGIMVLFFIRMTWHAAGTYRTGDGRGGGGTGAQRFAPLNSWPDNGNLDKARRLLWPIKQKYGNKISWADLLILAGNVAIESMGGKTFGYSGGREDIWAPEEDIYWGVEKEWLQNKRYKGDRELDNPLAAVQMGLIYVNPEGPDGNPDPLASARDIRETFGRMAMNDEETVALTAGGHTFGKAHGAGDPTNVGPEPEGAEIEEMGFGWISKHGSGKGSDTITSGIEGAWTTNPTKWDNGYFDLLLKYEWKLVKSPAG

SEQ ID NO: 89872 - protein, 252 aa, Unknown
  Bacterial polypetide isolated from the Sargasso Sea
KKFNYAKEFKKLNYRELKRDLTKLMTDSQEWWPADYGHYGPFFIRLAWHAAGTYRTGDGRGGAGTGNQRFAPLNAWPDNVNLDKARLLLWPIKQKYGKQISWADLFILVGNVALESMGFKTFGFGGGRVDIWEPEDDIYWGSEKEMLGVERYSGKRDLEQPLGASHMGLIYVNPQGPNANPDPLLAAHDIRETFGRMAMNDYETVALVAGGHTFGKSHGAASESHKGPDPEASRIQDQSTGWNSDYKSGKRC

SEQ ID NO: 89873 - protein, 283 aa, Unknown
  Bacterial polypetide isolated from the Sargasso Sea
YGHYGPLFIRLAWHAAGTYRTGDGRGGAGTGNQRFAPLNSWPDNVNLDKARLLLWPIKQKYGKKISWADLFILVGNVALDSMGFKTFGFGAGRVDIWEPEDDIYWGSEKEMLDVKRYSGKRDLEQPLGASHMGLIYVNPQGPDANPDPLLAAHDIRETFGRMAMNDYETAALVAGGHTFGKSHGAASESHKGPDPEASKIQDQATGWNSGYKSGKGGDTISSGIEGAWTQNPIKWDMGYLDCLYGHEWELTKSPAGAHQWTPKKNGQKIKMVPDAHDKNVLTL

SEQ ID NO: 89874 - protein, 256 aa, Unknown
  Bacterial polypetide isolated from the Sargasso Sea
RRLLWPIKQKYGNQISWADLLILTGNVAIESMGGETFGFGGGRADIWHPEEDIYWGAENEWLIVGKDNKRYSGERNLENPLAAVQMGLIYVNPQGPDGNPDPLASASDIRETFARMAMNDEETVALVAGGHTFGKAHGAGSEDNVAAEPEGAPIENMGLGWNNKFGKGLGRDTITSGIEGPWTTNPIKWDNGYFDLLLGYEWELTKSPAGAHIWHAVNQKKEDLAPDVEDSNTKVPTMMTTADIALITDSNYKRIS

SEQ ID NO: 89875 - protein, 134 aa, Unknown
  Bacterial polypetide isolated from the Sargasso Sea
MSQQYLTSQSGSPIADDQNSLSAGERGPLLLQDWHLIEKLAHFNRERIPERVVHAKGTGVYGTFTLTKDLSEYTIADHFNGVGKQTETFVRFSTVGGEMGSADAERDPRGFGLRFYTARGNHDIVGNNTPTFFL

SEQ ID NO: 89876 - protein, 294 aa, Unknown
  Bacterial polypetide isolated from the Sargasso Sea
MKKIFIGGLETEWLTNKRYTGDRVLENPLAAVQMGLIYVNPEGPDGNPDPLASARDIRETFGRMAMNDKETVALTAGGHTFGKAHGAGDAALVGPEPEGAPMEEMGFGWISKHASGKGSDAITSGIEGAWTTNPTVWDNGYFDLLLGYDWKLTKSPAGANIWHAVDQKEDHMAPDAKDASKKVPTMMTTADMAMREDPEYRKISEHFHKNPDDFQDAFARAWFKLLHRDMGPKTRYMGPESPEESLIWQDPIPAGNTRYDVNAVKAKITDSGLSIQEMVETAWASASTYRHTDM

SEQ ID NO: 89877 - protein, 296 aa, Unknown
  Bacterial polypetide isolated from the Sargasso Sea
HSAGTYRIGDGRGGGGRGQQRFAPLNSWPDNVNLDKARRLLWPIKQKYGRKISWADLMILAGNVALESMGFKTFGFAGGREDTWEPDLDVYWGAEKGWLDGDKRYSGKRDLENPLAAVQMGLIYVNPEGPDGNPDPKAAAHDIRETFSRMAMDDEETVALIAGGHTFGKAHGAGDPDKIGPDPEAAGLAEQGMGWHNPVGTGKGDDTMGGGPEVTWSQTPTQWSNYFFENLFGYEWELTTSPAGAKQWVAKDADEVIPYAQDKTKKHKPMMLTTDLSLRFDPDYEKISRRFYENPE

SEQ ID NO: 89878 - protein, 277 aa, Unknown
  Bacterial polypetide isolated from the Sargasso Sea
MDAESKCPVMHGANTKNTGQGTTNRDWWPNQLDISILHQHDEKSNPMEKDFNYREHFKKIDYDGLKKDLNELMTNSQDWWPADYGHYGPFFIRMTWHAAGTYRTADGRGGGGTGAQRFAPLNSWPDNGNLDKARRLLWPIKQKYGNQISWADLIILAGNVAIESMGGKTFGYSGGRPDIWAPEQDIYWGLETEWLTNKRYSGDRVLENPLAAVQMGLIYVNPEGPDGNPDPLASARDIRETFGRMAMNDEETVALTAGGHTFGKAHGAGDAGLVGPE

SEQ ID NO: 89879 - protein, 305 aa, Unknown
  Bacterial polypetide isolated from the Sargasso Sea
MARPPTSRSADHKSPSALPSSTQSDNFRGNAGELQQQAGGKHPVLTTQQGIPVADNQNSLRAGPRGPALLEDFILREKITHFDHERIPERIVHARGTAAHGFFELTHSLKKYTTAKVLTELGVQTPVFTRFSTVAGGAGSVDTPRDVRGFAVKFYTPEGNWDLVGNNIPVFFIQDAMKFPDLVHAVKMEPDRGFPQAASAHDTFWDFVSLMPESMHMIMWAMSDRTIPRSLRMMEGFGVHSFRLLNAAGESTFVKFHWRPKLGIQSTVWDEAVKLQSADNDFHRRDLFESIEGGRLPEWELSVQL

SEQ ID NO: 89880 - protein, 278 aa, Unknown
  Bacterial polypetide isolated from the Sargasso Sea
LNRLMTDSQDWWPADYGHYGPLFIRLAWHAAGTYRTGDGRGGAGTGNQRFAPLNSWPDNVNLDKARLLLWPIKKKYGKKISWADLYILIGNVALESMGFKTFGFGGGREDIWEPEEDIYWGSEKEWLGVNRYSGKRELENPLGASHMGLIYVNPQGPDANPDPLLAAHDIRETFGRMAMNDYETVALVAGGHTFGKSHGAAAESYKGPEPEGSKIQDQATGWNSSYKSGLGVDTISSGIEGAWTSNPIKWDMGYFDNLFGYDWELTKSPAGAHQWKPK

SEQ ID NO: 89881 - protein, 263 aa, Unknown
  Bacterial polypetide isolated from the Sargasso Sea
GGAGGGQQRFEPLNSWPYNVSLDKARRLLWPIKQKYGRQISWADLMVLTGNVALESMGFKTFGFAGGRTDDWEADIVYWGPETKWLDDKRYSGDRKLQKPLAAVQMGLIYVNPEGPNGNPDPLLAAKDIRETFGRMAMNDEETVALIAGGHTFGKAHGAHKPEDCVGKEPAAAGLEEQGFGWKNKCGKGHSEDTVTSGLEGAWTVNPIAWTTQYLDNLYAFDWVKTKSPAGATQWIPKDGQAANLVPDAHDKTKRHAPIMFTT

SEQ ID NO: 89882 - protein, 275 aa, Unknown
  Bacterial polypetide isolated from the Sargasso Sea
KEIRKKNIWADLFILVGNISLESMGFKTFGFGAGREDIWEPEEDIYWGSEKEWLGVNRYSGKRELENPLGASHMGLIYVNPQGPDANPDPYLAAHDIRETFGRMAMNDYETVALVAGGHTFGKSHGAAPESHKGPEPEGSKIQDQATGWNSNYKSGLGVDTISSGIEGAWTSNPIKWDMGYFDNLFGYDWELTKSPAGAHQWKPKRNGHDIEMTPDAHDISKKNLPMMQTTDLSLKLDPKYGPISKHFHQNPNEFADAFARAWFKLTHRDMGPKA

SEQ ID NO: 89883 - protein, 278 aa, Unknown
  Bacterial polypetide isolated from the Sargasso Sea
VQMGLIYVNPQGPDGDPDPVASGRDVRETFARMAMNDEETVALVAGGHTFGKGHGAGAEDHVQLEPEGAPLENMGFGWQSTHASGKGADTITSGFEGAWTADPTKWDNGYFDLLFGYEWEKVETPAGKIVWHAIGQKEEDMAPDAADPSKKVPTMMTTADMSMREDPAYREISKRFHENPEEFADAFARAWFKLLHRDMGPKGRYLGPEVPAEELIWQDPVPEGNIDYDLTALKKALSESGLSIQEMVETAWASASTFRNSDLRGGANGARIRLAPQK

SEQ ID NO: 89884 - protein, 304 aa, Unknown
  Bacterial polypetide isolated from the Sargasso Sea
SWPDNGNLDKARRLLWPIKKKYGNKISWADLFILTGNVAIESMGGKTFGFSGGRPDIWAPEEDIYWGVEEEWLQNKRYTGDRILDNPLAAVQMGLIYVNPEGPDGKADPLASAKDIRETFARMAMNDTETVALTAGGHTFGKAHGAGDPALVGAEPEGAPLEQMGLGWNNLHGSGVGRDTTTSGIEGPWTPNPTQWDNGYFDMLLGYEWKLVKSPAGAQIWHAIDQKEEHMAPQVDDPSVKVPTMMTTADMAMREDPEYRKVSEKFHKDPEYFADQFARAWFKLLHRDMGPKTRYMGPEVQKKN

SEQ ID NO: 89885 - protein, 264 aa, Unknown
  Bacterial polypetide isolated from the Sargasso Sea
GPDANPDPLLAAHDIRETFGRMAMNDYETVALIAGGHTFGKSHGAASESHKGPEPEGSKIQEQATGWNSNYKSGLGADTISSGIEGAWTSNPIKWDMGYFDNLFGYDWELTKSPAGAHQWKPKQNGHDINMTPDAHIKSKKNLPMMQTTDLSLKMDPSYGPISRNFHNNPKEFADAFARAWFKLTHRDMGPRACYLGPEVPKEQLIWQDPIPKANYKIKSKDIKALKSKILKSGLSISELVSTAWASASTFRGSDKRGGPNGAR

SEQ ID NO: 89886 - protein, 298 aa, Unknown
  Bacterial polypetide isolated from the Sargasso Sea
MGAVTSNNSERTTNKEWWPNQLRINILHQHDKRSNPLKVDHDYRKEFLKLDYFSLKEDLKKLMTDSKKWWPADFGHYGPFFIRLTWHAAGTYRTGDGRGGAGTGAQRFAPLNSWPDNGNLDKARRLLWPIKKKYGKKISWADLLVLAGNVAIESMGGKTFGFSGGRADIWSPEEDIFWGVEKGWLDNNRYKGKRELDIPLAAVQMGLIYVNPEGPDGNPDPLASAHDIRETFARMAMNDEETVALVAGGHTFGKAHGAGNPDLVGPEPEGAPIEQMGLGWKNDHGTGVGRDATTSGIE

SEQ ID NO: 89887 - protein, 306 aa, Unknown
  Bacterial polypetide isolated from the Sargasso Sea
MGAGTPPKHPTGKGQIYKDWWPNSLNLKILSQHSSLVNPMGEKFNYKKEFKKLNFKALKKDLLKLMTDSQDWWPADYGHYGPFFIRLAWHAAGTYRTGDGRGGAGTGNQRFAPLNSWPDNVNLDKARLLLWPIKKKYGKKISWADLFILVGNISLESMGFKTFGFGAGREDIWEPEEDIYWGSEKEWLGVNRYSGQRELENPLGASHMGLIYVNPQGPDANPDPYLAAHDIRETFGRMAMNDYETVALVAGGHTFGKSHGAASESHKGPEPEGSKIQDQATGWNSNYKSGLSVDTISSGIEGAWTS

SEQ ID NO: 89888 - protein, 294 aa, Unknown
  Bacterial polypetide isolated from the Sargasso Sea
QGPDGIPDPLQSAHDIRETFGRMPMNDEETVALVAGGHTFGKAHGAGAEDHVQSEPEGAPLEEMGFGWTSTYASGVGSDTITSGIEGAWTANPTQWDNGYFDLLFGYEWELTKSPAGAHIWHAVGQTEEDMAPDAEDASKKVPTMMTTADMALREDPSYKKISKRFHENPDEFADAFARAWFKLLHRDMGPKSRYMGPEVPGEELIWQDPVPLGNSDYDIEKVKEMISKSGLSIQEMVETAWASASTYRGSDMRGGANGSRIRLAPQKDWEANNPSQLSKVLDIYESISNETGA

SEQ ID NO: 89889 - protein, 225 aa, Unknown
  Bacterial polypetide isolated from the Sargasso Sea
MDNKSNGKGDVSKCPYLGGVLREGAGGGSVNRDWWPNQLNLNILRQHSSLSDPMDENFDYAEEFKKLDLAAVKQDLYELMTNSQEWWPADYGHYGPFFIRMAWHSAGTYRIADGRGGAGAGMLRFAPLNSWPDNANLEKARLLLWPIKQKYGKKLSWADLMVLTGNCAMESMGFKTFGFGGGREDQWEPEEDVYWGPESEWLGDKRYTGNRELENPLGAVQMGLI

SEQ ID NO: 89890 - protein, 230 aa, Unknown
  Bacterial polypetide isolated from the Sargasso Sea
MTDKSEGKCPVMHGAMTTNSSSGTSTRDWWPNQLNLNILHQHDKKSNPMDEDFDYREEFKKIDYEALKKDLNELMTDSQDWWPADYGHYGPFFIRMTWHAAGTYRNTDGRGGGGTGAQRFAPLNSWPDNGNLDKARRLLWPIKQKYGKQISWADLLILAGNVAIESMGGTTFGFSGGRADIWGPEDDIHWGVESEWLENKRYKGERELDNPLAAVQMGLIYVNPQGPDGN

SEQ ID NO: 89891 - protein, 521 aa, Unknown
  Bacterial polypetide isolated from the Sargasso Sea
MSTEFKDGNFKSNELSKCPFTGAGTSAKFSAGRGQTNRDFWPNSLNLKILSQHSNLTNPMDKKFNYSKEFKKLNYKALKKDLKKLMTDSQEWWPADYGHYGPFFIRLAWHAAGTYRTGDGRGGAGTGNQRFAPLNAWPDNVNLDKARLLLWPIKQKYGKQISWADLFILVGNVALESMGFKTFGFGAGRVDIWEPEDDIYWGSEKEMLGVERYSGERDLEQPLGASHMGLIYVNPQGPDANPDPLLAAHDIRETFGRMAMNDYETVALVAGGHTFGKSHGAASESHKGPDPEASRIQDQSTGWNSNYKSGKGVDTISSGIEGAWTQSPIKWDMGYFDCLFNHEWELTKSPAGAHQWTPKQNGQKIKMVPDAHDKNKMHPPMMQTTDLSLRMDPSYGPISKHFFNNPDEFADAFARAWFKLTHRDMGPRACYLGSEVPKEELIWQDPVKKPKYKLKAKDIKDLKSQISKSKLSVSELVSTAWASASTYRGSDKRGGANGARLRLEPQINWEVNDNGKITKVI

SEQ ID NO: 89892 - protein, 288 aa, Unknown
  Bacterial polypetide isolated from the Sargasso Sea
RSEGKNTKIRSIYFTIGFTAWASASTFRGSDKRGGANGARIRLSPQKDWDVNNPPQLSKVIKTLEKIKKSFDNKKKSISLADLIVLGGCVAIEKAAKKGGYNVNVPFTPGRGDASQDQTDIYSFGLLEPKADGFRNYIVKRSNGSSTKPSVSAEEMLIDRAQLMKLTAPEMIVLLGGMRVLNTNFDKSNNGVFTDKKETLSNDFFINLLDMSTTWKEVDKNEELFEGKNRKTNKVKWTGTRVDLICGSNSQLRAIAEVYACEDSKSKFITDFVSAWSKVMNLDRFDLS

SEQ ID NO: 89893 - protein, 286 aa, Unknown
  Bacterial polypetide isolated from the Sargasso Sea
IKNLKSKISKSKLSVSELVSTAWASASTYRGSDKRGGANGARVALEPQISWDVNDPKQINKVIKTLEKIKNKFDNMKKSVSLADLIVLGGNVGIEMAAKKAGIKADVPFSPGRGDATQEQTDIHSFGLLEPQADGFRNYNKDETSTVSAEEKLIDKAQLMGLTAPEMTVLVGGMRVLNTNFDHSKNGVFTKKPGTLTNDYFVNLLDMNTTWKETDKSEQLFVGKDRKTNKVKWHGTRVDLIFGSNSQLRALAEVYACNDSSKKFINDFVSAWTKVMNSDRFDLKLN

SEQ ID NO: 89894 - protein, 389 aa, Unknown
  Bacterial polypetide isolated from the Sargasso Sea
GKPDPLAAAIDIRETFYRMAMNDEETVALIAGGHTFGKSHGAAPADHLGPPPEGASIEEQGLGWKNSFGSGNAGDTISSGLEGAWTSTPTRWSHGYLQNLFQYEWELTKSPAGAWQWTPKDTSAQNTVPDAHDPTCSHAPMMFTTDLALRVDPDYEVISRRFLKNPAEFADAFARAWYKLTHRDMGPVTRLLGPEVPEAQLWQDPVPNGDYETIDQHDVSVLKQRILSSDLSITDLVRTAWAAASTFRGSDKRGGANGARIRLSPQKDWEVNDPTQLAQVLAALEDIQKTFNTTAHDKKQVSLADLIVLGGCAAVEEAARRAGYEASVSFHPGRTDATGEMTDIESFAVLEPKADGFRNYVAKHIDRPAEELLLDKADLLTLTAKEMTV

SEQ ID NO: 89895 - protein, 472 aa, Unknown
  Bacterial polypetide isolated from the Sargasso Sea
HYKLLFMSSELSKEPSKCPFTGAGTPSKHPTGRGTSNRDWWPNSLNLKILSQHSSLVDPMDKKFNYKKEFKKLNLKKLKKDLHKLMTDSQDWWPADYGHYGGLFIRLAWHAAGTYRTGDGRGGAGTGNQRFAPLNSWPDNVNLDKARLLLWPIKKKYGKKISWADLFILVGNVALESMGFKTFGFGGGREDIWEPEEDIYWGSEKEWLGVNRYSGKRDLENPLGASHMGLIYVNPQGPDANPDPLLAAHDIRETFGRMAMNDYETVALIAGGHTFGKSHGAAPESHKGPEPEGSKIQEQATGWNSNYKSGKGVDTISSGLEGAWTQNPKKWDMGYFDNLFGYEWELTKSPAGAHQWTPKQNGHDIKMVPDAHDKSKKHPPMMLTTDLSMRMDPSYGMISENFHKNPEEFADAFARAWFKLTHRDMGPRACYLGVEVPKEELIWQDPIPKAKYKLKNKDIKDLKTKILKSGLS

SEQ ID NO: 89896 - protein, 344 aa, Unknown
  Bacterial polypetide isolated from the Sargasso Sea
MIEELTKSPAGAHQWKPKRNGHDIEMTPDAHDKSKKNLPMMQTTDLSLKLDPKYGPISKHFHQNPNEFADAFARAWFKLTHRDMGPKANYLGSDVPKENLIWQDPIPKNKYKLKNKDIELLKKKISKSGLSVSQLVTTAWASASTFRGSDKRGGANGARIALEPQKDWKVNNPSKLSAVIRILSKIKKGFDTKNKSVSLADLIVLGGSVGIENAAKKSGKKIKVPFKAGRGDAKQDQTDKNSFNLLEPIADGFRNYIKLHAKGYTNGKGIPTNSAEEMLIDKAQLLGLTGPEMTVLIGGMRVLNTNYDGSDYGVFTKKPGSLSNDFFVNLLDMKTTWREVDKER

SEQ ID NO: 89897 - protein, 384 aa, Unknown
  Bacterial polypetide isolated from the Sargasso Sea
MDAESKCPVMHGAITKNMGEGTSNREWWPNQLNLNILHQHDRKSDPMEVGFNYREEFKKIDYAALKKDLNDLMTDSQDWWPADYGHYGGFFIRMTWHAAGTYRTGDGRGGGGTGAQRFAPLNSWPDNGNLDKARRLLWPIKKKYGNKISWADLFILTGNVAIESMGGKTFGFSGGRPDIWAPEEDIYWGVEEEWLQNKRYTGDRILDNPLAAVQMGLIYVNPEGPDGKADPLASAKDIRETFARMAMNDTETVALTAGGHTFGKAHGAGDPALVGAEPEGAPLEQMGLGWNNLHGSGVGRDATTSGIEGPWTANPTQWDNGYFDLLLGYEWKLVKSPAGAQIWHAIDQKEEHMAPQVDDPSIKVPTMMTTADMAMREDPEYRKV

SEQ ID NO: 89898 - protein, 347 aa, Unknown
  Bacterial polypetide isolated from the Sargasso Sea
EDDIYWGSEKEMLGVERYSGKRDLEQPLGASHMGLIYVNPQGPDANPNPLLAAHDIRETFGRMAMNDYETAALVAGGHTFGKSHGAASESYKGPDPEASKLQDQSTGWNSGYKSGKGVDTISSGIEGAWTQNPTKWDMGYLDCLYGHDWELTKSPAGAHQWTPKKNGQKIKMVPDAHQKGVLHPPMMQTTDISMKVDPSYGPITKHFHQNPKEFHDAFARAWFKLTHRDMGPRVCYLGSEVPKEQLIWQDPIDKPKYKLKSKDIKDLKNKISKSKISISDLVSTAWASASTFRGSDKRGGANGARIMLEPQKSWDVNNPKKLSTVVKALNKIKDQFDNKKKSVSMQI

SEQ ID NO: 89899 - protein, 480 aa, Unknown
  Bacterial polypetide isolated from the Sargasso Sea
MNDYEIVALVAGGHTFGKSHGAAPESHKGPEPEGSKIQDQATGWNSNYKSGLGADTISSGIEGAWTSNPIKWDMGYFDNLFGYDWGLSKSPAGAYQWKPKKNGHAISMTPDAHIKGRQNLPMMQTTDLSLKMDPKFSVISRHFHNNPDEFADAFARAWFKLTHRDMGPRVNYLGSEVPKEDLIWQDPIPKNKYKLKNQDIEVLKKKIAKAGLNISDLVSTAWASASTYRGSDKRGGANGSRIRLAPQKDWKVNNPKLVSKVINKYNKIQKNFNSKSKFVSIADLIVLGGNLGIEMAAKKAGKKVKVPFKPGRGDATQDQTDIFSFGLLEPVADGFRNYAKGDNSTIAEELLIDKAQLLNLSAPEMTVLVGGMRVLGTNFDNSKHGVLTKNVGKLSNDFFINLLDMNVKWKETSKKEVAFEGRDRKTNKVKWTGTRADLIFGSNSQLRALAEVYATDDSHDKFVNDFVVAWTKVMNLDRFY

SEQ ID NO: 89900 - protein, 523 aa, Unknown
  Bacterial polypetide isolated from the Sargasso Sea
MSSELVKEQSKCPFTGVGTPPKHSTGKGQSNRDWWPNSLNLKILSQHSSLVNPMGEKFNYKKEFKKLNFKALKKDLYKLMTDSQSWWPADYGHYGPFFIRLAWHAAGTYRTGDGRGGAGTGNQRFAPLNSWPDNVNLDKARLLLWPIKKKYGKKISWADLFILVGNISLESMGFKTFGFGAGREDIWEPEEDIYWGSEKEWLGVNRYSGKRELENPLGASHMGLIYVNPQGPDANPDPYLAAHDIRETFGRMAMNDYETVALVAGGHTFGKSHGAAPESHKGPEPEGSKIHEQATGWNSNYKTGLGVDTISSGIEGAWTSNPIKWDMGYFDNLFGYDWELTKSPAGAHQWKPKKNGHAIDLTPDAHDKTKKNLPMMQTTDLSLKLDPKYGPISRHFHKNPAEFADAFARAWFKLTHRDMGPRANYLGSDVPKEELIWQDPIPKNKYKLKNKDVEILKKKILTSGLSISQLVSTAWASASTFRGSDKRGGANGARIALYPQKNWKVNNPSKLSKVIKTLNKIKK

SEQ ID NO: 89901 - protein, 377 aa, Unknown
  Bacterial polypetide isolated from the Sargasso Sea
MSTESQEKCPVMHGALTSNQSSGTSTKDWWPEQLNLNILHQHDQKSNPMGEDFNYREEFAKIDYKALKKDLNDLMTDSQEWWPADYGHYGPFFIRLTWHAAGTYRSTDGRGGGGTGAQRFAPLNSWPDNGNLDKARRLLWPIKQKYGNQISWADLLILAGNVAIESMGGKTFGFSGGRDDIWGPEEDILWGAENEWLENNRYKGERELDSPLAAVQMGLIYVNPQGPDGNPDPLASAKDIRETFGRMAMNDEETVALVAGGHTFGKAHGAGDDSQVGVEPEGAPLEQLGLGWTNSQGNGVGSDTITSGLEGAWTSNPIKWDNGYFDLLFGYDWELGKSPAGALQWFAVDQKEEDMAPDAHDPSKKVPTMMATTDIAL

SEQ ID NO: 89902 - protein, 304 aa, Unknown
  Bacterial polypetide isolated from the Sargasso Sea
MENESKCPVSHGSESQHSQGSRSNNNWWPDNLNLDILHQHDVKSNPMNGFDYREEFKKLDYDALKKDLNDLMTDSQSWWPADYGHYGPFFIRMTWHAAGTYRTTDGRGGGGTGNQRFAPLNSWPDNGNLDKARRLLWPIKQKYGNKISWADLLILTGNVAIESMGGKTFGFGGGRPDIWAPEKDIFWGKETEWLGNDRYTGDRELDQPLGAVQMGLIYVNPQGPDGNPDPVASARDIRETFKRMAMNDYETVALTAGGHTFGKAHGAASEDFKGPEPEGASIEEMGFGWTSGHGTGVGRDTITS

SEQ ID NO: 89903 - protein, 424 aa, Unknown
  Bacterial polypetide isolated from the Sargasso Sea
MSNELIKEQSKCPFTGAGTPPKHPTGKGQTNKDWWPNSLNLKILSQHSSLVNPMGEKFNYKKEFKKLNFKALKKDLLKLMTDTQDWWPADYGHYGPFFIRLAWHAAGTYRTGDGRGGAGTGNQRFAPLNSWPDNVNLDKARLLLWPIKKKYGKKISWADLFILVGNISLESMGFKTFGFGAGREDIWEPEEDIYWGSEKEWLGVNRYSGKRELENPLGASHMGLIYVNPQGPDANPDPYLAAHDIRETFGRMAMNDYETVALVAGGHTFGKSHGAAPESHKGPEPEGSKIQDQATGWNSNYKSGLGVDTISSGIEGAWTSNPIKWDMGYFDNLFGYDWELTKSPAGAHQWKPKRNGHDIEMTPDAHDRSKKNLPMMQTTDLSLKLDPKYGPISKHFHQNPKEFADAFARAWFKLTHRDMGPKAN

SEQ ID NO: 89904 - protein, 391 aa, Unknown
  Bacterial polypetide isolated from the Sargasso Sea
TTFGFSGGRPDIWGPEEDIHWGVETGWLESNRYQGKRELDNPLAAVQMGLIYVNPQGPDGNPDPLASAHDIRETFGRMAMNDEETVALVAGGHTFGKAHGAATEDHVQAEPEGAPLEQMGFGWTSSYGSGVGSDTITSGIEGAWTANPTQWDNGYFDLLFGYEWELTKSPAGAHIWHAVDQKEEDMAPDAEDGSIKVPTMMTTADMAMREDPAYREVSKRFHENPDQFADAFARAWFKLLHRDMGPKVRYMGPEVPEEELIWQDPVPAGNADFDIAAAKSAILDSGLSIQTMIETAWASAATFRGSDMRGGANGARIRLEPQRSWEANNPAQLNEVLPIYEKIAAECGASVADIIVLAGNTAIEQAAGIEVPFTPGRGDASQDQTDMNHCR

SEQ ID NO: 89905 - protein, 321 aa, Unknown
  Bacterial polypetide isolated from the Sargasso Sea
MSKETQSSESKCPVMHGSLSSNSSTGTSNQDWWPNQLNLNILHQHDRKTNPMDEDFDYAEEFKKLDFHALKKDLNDLMTDSQEWWPADYGHYGPFFIRMTWHAAGTYRTGDGRGGGGTGAQRFAPLNSWPDNGNLDKARRLLWPIKQKYGKKISWADLLILAGNVAIESMGGKTFGFGGGRPDIWAPEEDINWGAETEWLSNERYSGVRDLANPLGAVQMGLIYVNPQGPDGDPDPIASGRDVRETFARMAMNDEETVALVAGGHTFGKGHGAGAEEHVQNEPEGAPLENMGFGWQSTHASGKGSDTITSGFEGAGRLIQL

SEQ ID NO: 89906 - protein, 385 aa, Unknown
  Bacterial polypetide isolated from the Sargasso Sea
IGSWMHTTPSKKVPPMMLTTDLSLRMDPKYGPISKNFHENLDEFADAFARAWFKLTHRDMGPRACYLGPEVPKEQLIWQDPISKVKYKLKNKDINILKAKILKSGLSISQLVSTAWASASTFRGSDKRGGANGARIRLEPQKDWKVNNPSQLSKVLKTLEKIQKGFNTKSKMVSMADLIVLGGCVGVENAAKKAGHKITVPFTPGRGDASQEQTDVYSFGLLEPKADGFRNYIVKTSNGSGKKPTVSAEEMLVDKAQLMKLTAPEMTVLVGGMRVLNTNFDKSKHGVFTTKPETLTNDFFVNLLDMGTKWKEVSKAEDLFEGKDRKTNKVKWIGTRADLIFGSNSQLRALAEVYACEDSKPKFIADFISAWTKVMNLDRFDLKKI

SEQ ID NO: 89907 - protein, 394 aa, Unknown
  Bacterial polypetide isolated from the Sargasso Sea
MSKCPFSGAAIKPTTLTSSNGAPVANDNQSRTAGPRGPVTFDNHYLFEKLAHFNRERIPERVVHARGSAAYGTFTLTKSLSDYTIADFLQKEGQKTDVFLRFSTVGGGQDSSDYARDPRGFSVKFYTEQGNWDMVENNTPVFFLRDGIKFPDFIHSQKKNPRTNLPDPQAVYEFWANNPQSLHQSTILMSDRGIPLSYRHVNGYSSHTLSFWNNAGQRYWVKWHFKTNQGIKTLTSEEAAKMPAYGAQQDLVESIDNGEFPSWTVNVQIMTEEEARNYHINPFDLTKVWPHSDFPLIEVGQLELNRNVDNYFAETEQAAFAPSNLVPGIGASPDRMLQARLIGYQDAHRYRIGANYNQIPVNAPRCPVHNYQRDGAFAGINPALAGSGANFYPN

SEQ ID NO: 89908 - protein, 713 aa, Unknown
  Bacterial polypetide isolated from the Sargasso Sea
MTDKVESKCPVMHGAMTTHSSSGTSNKDWWPNQLNLNILHQHDVKSNPMDDDYDYRKEFEKIDYDALKKDLNDLMTDSQDWWPADYGHYGPFFIRMTWHAAGTYRNTDGRGGGGTGAQRFAPLNSWPDNGNLDKARRLLWPIKQKYGKKISWADLLILAGNVAIESMGGTTFGYSGGRPDIWGPEEDIHWGVESEWLENKRYKGERELDNPLAAVQMGLIYVNPQGPDGNPDPLASAHDIRETFGRMAMNDEETVALVAGGHTFGKAHGAGAETHVQSEPEGAPLEEMGFGWTSTYGSGVGSDTITSGIEGAWTANPTQWDNGYFDLLFGYDWELTKSPAGAHIWHAVGQKEEDMAPDAEDSSKKVPTMMTTADMALREDPSYNKISKRFHENPEEFADAFARAWFKLLHRDMGPITRYMGPEVPEEELIWQDPVPAGNSDYDIKNVKKLITESGLSIQEMVETAWASASTFRGSDMRGGANGARIRLAPQKDWEANNPSRLSKILEIYESISNTTGASIADVIVLAGNVGIEMATGEEVAFIPGRGDASQEQTDIESFEVLEPKSDAFRNFHAKGVNTAPEEIMLDKAQLLGLTAPEMTVLVGGMRSLGISSNGYGLFSEDTNKLSNDYFKTLLDMSVQWKPNGTGNSYEAFDRKSGEKIRTASRSDLVFGSNSQLRAIVEVYAEDDSSEKFTKDFIKAWNKVMNADRFDVQ

SEQ ID NO: 89909 - protein, 418 aa, Unknown
  Bacterial polypetide isolated from the Sargasso Sea
NPTQWDMGYLDCLYDHEWELTKSPAGAHQWTPKKNGQKIKMVPDAHDKNVLHPPMMQTTDISMKVDPSYGPITKHFHRNPKEFHDAFARAWFKLTHRDMGPRVCYLGSDVPKEQLIWQDPIDKPKYKLKSKDINDLKSKISKSKLSVSDLVSTAWASASTFRGSDKRGGANGARVMLEPQKNWKVNNPSKLSKVISMLSKIKKQFDNKKKTVSMADLIVLAGGVGVEMAAKKAGHKVKVPFSPGRGDARQDQTDVNSFGLLEPQADGFRNYLNGGKSIVSAEEKLIDKAQLMGLTAPEMTVLIGGMRVLNTNFDNSTYGVFTKKPGVLTNDYFTNLLDMNTTWKETDKSEQTFAGADRKTKKTKWKGTRVDLIFGSNSQLRALAEVYACEDSQEKFVNDFISAWVKVMNADRFDLRLN

SEQ ID NO: 89910 - protein, 745 aa, Unknown
  Bacterial polypetide isolated from the Sargasso Sea
MSTENFKNKTFKSNELSKCPFTGAGTPAKFSAGRGQTVRDFWPNSLNLKILSQHSNLSNPMDKKFNYAKEFKKLNYKALKKDLKKLMTESQEWWPADYGHYGPLFIRLAWHAAGTYRTGDGRGGAGTGNQRFAPLNSWPDNVNLDKARLLLWPIKKKYGRKISWADLFILVGNVALDSMGFKTFGFGAGRTDIWEPEDDIYWGSEKEMLGVERYSGKRDLEQPLGASHMGLIYVNPQGPDANPDPLLAAHDIRETFGRMAMNDYETAALVAGGHTFGKSHGAASESYKGPDPEASKLQDQSTGWNSGYKSGKGVDTISSGIEGAWTQNPTKWDMGYLDCLYGHDWELTKSPAGAHQWTPKKNGQKIKMVPDAHQKGVLHPPMMQTTDISMKVDPSYGPITKHFHQNPKEFHDAFARAWFKLTHRDMGPRVCYLGNEVPKEQLIWQDPIDKPKYKLKSKDIKDLKNKISKSKISISDLVSTAWASASTFRGSDKRGGANGARIMLEPQKSWSVNNPKKLSTVVKALNKIKDQFDNKKKSVSMADLIVLAGGVGIEMAAKKAGHKVNVPFSAGRGDATQDQTDIHSFGLLEPQADGFRNYLNGGASNVSAEEKLVDKAQLMGLTAPEMTALIGGMRVLNTNYDGSNYGVFTNKPGSLTNDYFVNLLDMNTTWKEEDKSEQTFVGKDRKTQKTKWKATRVDLIFGSNSQLRALAEVYACEDSSEKFVKDFIAAWVKVMNSDRFDLKLN

SEQ ID NO: 89911 - protein, 347 aa, Unknown
  Bacterial polypetide isolated from the Sargasso Sea
MSIEEARTQSPNLQNGESRCPVAHGSSEQHTNSARSNRDWWPEQINLSILHQHDTKSDPMGEDFDYSQEFKKLDYAALKQDLNDLMTDSQDWWPADYGHYGPFFIRMTWHAAGTYRTADGRGGGGTGSQRFAPTNSWPDNTNLDKARRLLWPIKQKYGNKISWADLIILTGNVAIESMGGKTFGFGGGRADIWAPEDDIFWGKEIEWLGNERYTGDRVLDMPLGAVQMGLIYVNPQGPDGNPDPLASARDIRETFGRMAMNDYETVALTAGGHTFGKAHGAASEDFKGADPEGAPLEEMGFGWKSGHGKGLGRDSITSGIEGAWTPNPTQWDNGYFDMLFGYEWELV

SEQ ID NO: 89912 - protein, 482 aa, Unknown
  Bacterial polypetide isolated from the Sargasso Sea
MNDKTLHSANGAPVVDNNNSLTAGPRGPVLMQDIWLMEKLAHFDRERIPERVVHAKGSGAYGTFTVTHDISAFSKADLFNAVGKQTPVFLRFSTVAGEKGAADAERDVRGFALKFYTEQGNWDLVGNNTPVFFIRDPLKFPDFIHTQKRDPRTNLRSATAAWDFWSRHPESLHQVTILFSDRGIPKSLREMNGYGSHTFSFINDANERFWVKFHFKTEQGHSFYTDEEAATAVGQDRETSQADLFNAIERGDFPRWKVYVQVMPEAEAQTYKIHPFDLTKVWPHSDYPLIPVGVLELNQNPDNYFAHVEQAAFTPANVVPGIGFSPDRMLQGRLFSYGDTQRYRLGVNHGLLPVNAPRCPFHHGAHRDGAMRADSNGGASPNYQPNRFGTQQPSEQHEPALSLEGAALHYDFRDYDSDYYSQPGNLFRIMDEGQRSRLAANLARSLINVEDDAIVAAQLKHFEQADPEYAKRVELALAALQR

SEQ ID NO: 89913 - protein, 570 aa, Unknown
  Bacterial polypetide isolated from the Sargasso Sea
MDGVSKCPVMHGAVTSNNSERTTNKEWWPNQLRINILHQHDKRSNPLKIDHDYRKEFLNLDYFALKDDLKNLMTDSKTWWPADFGHYGPFFIRLTWHAAGTYRTGDGRGGAGTGAQRFAPLNSWPDNGNLDKARRLLWPIKQKYGKKISWADLLVLAGNVAIESMGGKTFGFSGGRADIWSPEEDIFWGVEKGWLDNNRYKGKRELDIPLAAVQMGLIYVNPEGPDGNPDPLASAHDIRETFARMAMNDEETVALVAGGHTFGKAHGAGNPDLVGAEPEGAPIEQMGLGWKNDHGTGVGRDATTSGIEGAWTANPTQWDNGYFDLLLGYDWKLTKSPAGAHIWHAVNQKEEHMAPDAENADIKVPTMMTTADMALKEDPSYRKISERYHKNPDELSDKFARAWFKLLHRDMGPKTRYLGPEAPSEDLIWQDPVKKGNSNYDLNKARELLNKLDLNSSEMIETAWASASTFRSSDMRGGANGARIKLDPQINWKVNKPDQLKTIISKYEAISISTGASIADIIVLGGCVGIEKASGKDVSFLPGRGDATEDNTDKDSFEVLEPLADGFRNF

SEQ ID NO: 89914 - protein, 414 aa, Unknown
  Bacterial polypetide isolated from the Sargasso Sea
PGHYPLHQGEAIRFVGQADPAVRAFSTVAGERGAADAERDIRGFAVKFYTEEGNWDVVGNNTPVFFFRDPMRFPDLNHAIKRDPRTGLRSADSNWDFWTLLPEALHQVTIVMSDRGIPRSLRHMHGFGSHTFSLINEANERVWVKFHFRSQQGIENLTDEQAAALIATDRESHGRDLLEAIERGDFPRWTLFIQVMTQAQAQAHKHNPFDLTKVWPKTDYPLIEVGVMELNRYPDNYFAEVEQVAFSPANVVPGIGFSPDRMLQGRLFSYGDAQRYRLGVNFNHIPVNAPRCPFHSYHRDGAMRTDGNLGPTASYWPNSKGTWIGDDPSLKEPPLELDGAADHWDHRRDDDYYEQPGNLFRLMTPAQRQVLFDNTARALGDARLEVKLRHVANCAKADPAYGAGVAQALGLPPA

SEQ ID NO: 89915 - protein, 488 aa, Unknown
  Bacterial polypetide isolated from the Sargasso Sea
QGPDGNPDPLASAKDIRETFSRMAMNDEETVALTAGGHTFGKAHGAADPDKFVGPEPEGASMEEMGLGWKNSYESGKGSHAITSGIEGAWTANPTKWDNGYFDLLFGYEWELVKSPAGAFQWHPINPKNEDMAPDAHDNSKKVTTMMTTADMAMREDPEYNKISKRFHENPDQFADAFARAWFKLLHRDMGPKSRYLGPEIPDEDLIWQDPVPKGKSDYDINLIKEKISNLNLSIQEMVETAWASASTFRCTDMRGGANGSRIRLAPQINWEANKPEQLTKVLNAYEKLSQETNVSIADIIVLAGCLAVEKASGQSVAFSPGRGDATNEHTDEDSFTVLEPLSDGFRNFLKEDYGVSPEEMMLDKSHLLGLTAPEMTVLVGGLRSLGVTNNGHGIFSKDINKLDNQFFVKLLDMSIDWKSTGHNSFEGYDKTDDMKYTASRYDLAFGSNSQLRALSEVYASIDGKEKFITDFISAWAKVMNNDRFDIS

SEQ ID NO: 89916 - protein, 486 aa, Unknown
  Bacterial polypetide isolated from the Sargasso Sea
MSQQYLTSQSGSPIADDQNSLSAGERGPLLLQDWHLIEKLAHFNRERIPERVVHAKGTGVYGTFTLTKDLSDYTIADHFNGVGKQTETFVRFSTVGGEMGSADAERDPRGFGLRFYTARGNHDIVGNNTPTFFLRDGIKFPDFIHTQKRNPLTNLKDPQAMWDFWSLNPEAMHQVTILMSDRGIPANYRQMHGYGSHTFSFWNAKGERFWVKFHFKSQQGVVNLTNEQADKLKGIDPDSSQRDMVVAITDGNFPRWTVNVQIMPEADANTYHINPFDLTKVWPHGDYPLIEIGVLELNRLPQNYFAEVEQVALAPSNLVPGVGASPDKMLQARLFAYADAQRYRIGANYNQLPVNCPHAAKANHHQRAGAMAGTQCPYHGSQTGSDASANYGPNSTAGALVEPANFAEPPLRLEGEAARYSRYNQDDYTQAGNLYRIFSEDEKARLVETISGSLRQASLDVQQRMLAHFHKADADYGLRIQTALGL

SEQ ID NO: 89917 - protein, 438 aa, Unknown
  Bacterial polypetide isolated from the Sargasso Sea
PESHKGPEPEGSKIQEQATGWNSNYKSGLGADTISSGIEGAWTSNPIKWDMGYFDNLFGYDWELTKSPAGAHQWKPKKNGHDIKMTPDAHLKSKNNLPMMQTTDLSLKMDPKYEPISRHFHNNPKEFEDAFARAWFKLTHRDMGPRACYMGPEVPKEELIWQDPIPKAKYRLQKKDINILRAKIIKSGLSVSQLVSTAWASASTFRGSDKRGGANGARIRLTPQKDWKVNNPSQLSKVIKTLEKIKKNFDNKNKTVSLADLIVLGGCVGIEKAAKKAGYNTKVPFTPGRGDASQDQTDPYSFSLLEPKADGFRNYIIKKSNGTSTKPTVSAEEMLVDKAQLMKLTAPEMTVLVGGMRVLNTNFDKSNYGIFTKKKETLTNDFFVNLLDMSTTWKEVDKDENLFKGSDRKSNKHKWTGTRVDLIFGSNSQLRAIAEVYA

SEQ ID NO: 89918 - protein, 390 aa, Unknown
  Bacterial polypetide isolated from the Sargasso Sea
MSTENFKNKSFKADQLSKCPFTGAGTPAKFSAGRGQSVRDFWPNSLNLKILSQHSNLSNPMNKKFNYSKEFKKLDYKALKKDLKKLMTDSQEWWPADYGHYGPLFIRLAWHAAGTYRTGDGRGGAGTGNQRFAPLNSWPDNVNLDKARLLLWPIKKKYGNKISWADLFILVGNVALDSMGFKTFGFGAGRTDIWEPEDDIYWGSEKEMLGVERYTDKRDLEQPLGASHMGLIYVNPQGPDANPDPKLAAHDIRETFGRMAMNDYETAALVAGGHTFGKSHGAAPESHKGPDPEASRIQDQSTGWNSGYRSGKGADTISSGIEGAWTQNPIQWDMGYLDCLYDHEWELTKSPAGAHQWTPKKNGQKIKMVPDAHDKNVLHPPMMQTTDISM

SEQ ID NO: 89919 - protein, 261 aa, Unknown
  Bacterial polypetide isolated from the Sargasso Sea
ANSDLTIQEMIETAWASASTFRGSDLRGGANGARISLAPQSGWEANKPEQLSRVLNVLEGIAKDTGASLADVIVLAGNVGVEKASGREVPFNPGRGDASQDNTDEHSFAVLEPVSDGFRNYHRKGFEINAEHMLIDKAQLLGLTAPEMTALVGGLRSLGISYDGHGVFTDDTNKLSNDFFVTLLDMNVEWNKKENNLYEATDRKTGDVVRTATSVDLVFGSNSQLRALAEVYASDDSQSKFLSDFVNAWNKVMNLDRFDLD

SEQ ID NO: 89920 - protein, 378 aa, Unknown
  Bacterial polypetide isolated from the Sargasso Sea
PQGPDANPDPKLAAHDIIETFGRMAMNDYETAALVAGGHTFGKSHGAASESFKGPDPEASKLQDQSTGWNSGYKSGKGVDTISSGIEGAWTQNPIRWDMGYLDCLYGHEWELTKSPAGAHQWTPKKNGQEIKMVPDAHKKGVLHPPMMQTTDISMKVDPSYGPITKHFHQNPKEFHDAFARAWFKLTHRDMGPRVCYLGSEVPKEQLIWQDPIDKPKYKLKSKDIKDLKNKISKSKISISDLVSTAWASASTFRGSDKRGGANGARIMLEPQKNWKVNNPKKLSSAIKALSKIKSKFDSNKKSVSMADLIVLAGGVGIEMAAKKAGYKVKVPFSAGRGDARQDQTDINSFGLLEPQADGFRNYLNGGASNVSAEEKLV

SEQ ID NO: 89921 - protein, 728 aa, Unknown
  Bacterial polypetide isolated from the Sargasso Sea
MDKTQSSQGKCPVMHGANSAVASNNMDWWPKALNLDILHQHDKKTDPMDPKFNYRDAFNSLDLAAVKRDLNALMTDSQDWWPADWGHYGGLMIRMAWHSAGTYRVADGRGGAGTGNQRFAPLNSWPDNANLDKARRLLWPIKKKYGNKLSWADLMILAGNVAYESMGLKTYGFAGGREDIWHPEKDIYWGSEKQWLAPTENPNSRYSGERDLENPLAAVMMGLIYVNPEGVDGKPDPLRTAQDVRVTFARMAMNDEETVALTAGGHTVGKCHGNGKAQDLGPEPEGEELEAQGLGWLNKKGPGTGANAVTSGLEGAWTTHPTQWDNGYFYLLLNYDWELKKSPAGASQWEPINIKEEDKVVSVGDPNRKFNPIMTDADMAMKMDPEYRKISEKFYQDPAYFSEVFARAWFKLTHRDLGPKSRYLGPEVPNEDLLWQDPIPSVDYRLDASEIVELKAKLLASGLSVSELVVTAWDSARTFRGSDFRGGANGARIRLAPQKDWQANEPERLQKVLKVLTELQASLSKKVSIADLIVLGGAAAIEKAAHAAGVKITVPFIPGRGDATQAMTDVESFAVLEPLHDAYRNWQKKDYVVQPEEMMLDRTQLMGLTAHEMTVLIGGMRVLGTNYGGTRHGVFTDKVGVLSNDFFVNLTDMAYNWKPAGSNLYEIVERKTGAVKWTATRVDLVFGSNSILRSYAEVYAQDDAKEKFVHDFVAAWTKVMNADRFDLA

SEQ ID NO: 89922 - protein, 312 aa, Unknown
  Bacterial polypetide isolated from the Sargasso Sea
MSSIEKCPVMHGAMTSNKDTGTSNRDWWPNQLNLSILHQHDQKSNPMNKDFDYREEFKSIDYTALKKDLTSLMTDSQDWWPADYGHYGPFFIRMTWHAAGTYRTGDGRGGGGTGAQRFAPLNSWPDNGNLDKARRLLWPIKQKYGNKISWADLLILAGNVAIESMGGKTFGYSGGRPDIWAPEEDIYWGVEKEWLENKRYKGERELDNPLAAVQMGLIYVNPEGPDGNPDPLASAKDIRETFGRMAMNDEETVALTAGGHTFGKAHGAGDPSLVGPEPEGAKIEEMGFGWISKHGSGKGSDSITSGIEGAWT

SEQ ID NO: 89923 - protein, 406 aa, Unknown
  Bacterial polypetide isolated from the Sargasso Sea
MTDKSEGKCPVMHGAMTTHSSSGTSNKDWWPNQLNLNILHQHDSKSNPMDDGFDYRKEFKNIDYNALKKDLNELMTDSQEWWPADYGHYGPFFIRMTWHAAGTYRNTDGRGGGGTGAQRFAPLNSWPDNGNLDKARRLLWPIKQKYGKKISWADLLILAGNVAIESMGGTTFGYSGGRPDIWGPEEDIHWGVESEWLENKRYKGERELDNPLAAVQMGLIYVNPQGPDGNPDPLASAHDIRETFGRMAMNDEETVALVAGGHTFGKAHGAGGEDHVQSEPEGAPLEEMGFGWTSTFGSGVGSDTITSGIEGAWTANPTQWDNGYFDLLFGYEWELTKSPAGAHIWHAVGQTEEDMAPDAEDASKKVPTMMTTADMALREDPSYNKISKRFHENPEEFADAFARAWL

SEQ ID NO: 89924 - protein, 234 aa, Unknown
  Bacterial polypetide isolated from the Sargasso Sea
MRSTMKTQINTTKTKLTLSALALAVALPASAVTTLTKDNGAAVGDNQNSMTAGERGSVLLEDVHLIQKLQRFARERIPERVVHARGTGAHGVFVASKELDDLTIAAPFAEAGKETDVFVRFSSVIHSKGSPETLRDPRGFATKFYTDQGNWDLVGNNLPVFFIRDAIKFPDMVHSLKPSPVDNIQDPNRLFEFFSYEPGSTHMLTWVYSDYGTPASLRKMDGWGVHAYKMINKS

SEQ ID NO: 89925 - protein, 386 aa, Unknown
  Bacterial polypetide isolated from the Sargasso Sea
MSDDSQNTSTAGKCPFHQGGHDQSAGAGTNNRDWWPNQLRVDLLNQHSNRSNPLGEDFDYRKEFSKLDYSALKGDLRALLSESQPWWPADWGTYAGLFIRMAWHGAGTYRSIDGRGGAGRGQQRFAPLNSWPDNVSLDKARRLLWPIKQKYGQKISWADLFILAGNVALENSGFRTFGFGAGREDVWEPDLDVNWGDEKAWLTHRHPEELAKAPLGATEMGLIYVNPEGPDHSGEPLSAAAAIRATFGNMGMNDEETVALIGGGHTLGKTHGAAPASHVGADPESAPIEAQGLGWASSYGSGAGADAITSGLEVVWTQTPTQWSNYFFENLFKYEWVQTRSPAGAIQFEAVDAPEIIPDPFDPSKKRKPTMLVTDLTLRFDPEFEK

SEQ ID NO: 89926 - protein, 500 aa, Unknown
  Bacterial polypetide isolated from the Sargasso Sea
MAKKPQLTTSAGAPVVSNETTKTAGERGPALLQDYQLIEKLAHQNRERIPERVVHAKGWGAQGTFTVTHDITDYTCADLFSEVGKQTEVLSRWSTVAGESGAADTERDVRGFSLKFYTQQGNWDMVGNNTPIFFIRDGYKFPDFIRTQKRHPKTNLRSPEAMFDFWAAQPESVHQVTILMSDRGIPVSPMHMNGYGSHTFSMWNKEGKRHWVKFHFKTQQGIKNYTNETSEKIIGSTREKYQEELYNAIEEGNFPKWTMYIQAMPEEEAGQQSYNPFDLTKVWPHDDYPLIEVGELEMNRNPENYFQMIENAAFSPSNVVPGIGFSPDKMLQARIFSYADAHRYRLGTHYEALPANAPKNSKVNHYHKDGAMRFFTNDFGNPDAYYEPNQYEGPVADFSVKEPPLRIDGDADRYHQGEADVDYVQPRKLYEMFSDDQKERLYKNYAAAMGPCSDNVKERWYAVLEKVHPDYAAGVRNAVESLDTDVNTVPITENTPIEDS

SEQ ID NO: 89927 - protein, 712 aa, Unknown
  Bacterial polypetide isolated from the Sargasso Sea
MSNATENESKCPVMHGAMTSNSSTGTANKDWWPDQLNLGILHQHDRKSNPLGEDFDYREEFKKLDYDALKKDLNDLMTDSQEWWPADYGHYGPFFIRLTWHAAGTYRSTDGRGGGGTGSMRFAPLNSWPDNGNLDKARRLLWPIKQKYGNKISWADLLILSGNVAIESMGGKTFGFSGGREDIWGPEEDILWGVEKEWLTNNRYQGERELDNPLAAVQMGLIYVNPQGPDGNPDPLASAKDIRETFGRMAMNDEETVALIAGGHTFGKAHGASLESNVGVEPEGAPIESMGFGWKNEHGSGVGGDAITSGLEGAWTADPIKWDNGYFDLLFGYDWELGKSPAGAHQWFAKDQKDEDMAPDAHDSSKKVPTMMATTDIALREDPIYKEISKRFHENPDEFADAFARAWFKLLHRDMGPITNYIGPEAPTEELIWQDPVPVGNKDYDVKSVKSKIEESSLSIQELVETAWASASTFRGSDLRGGANGARIRLEPQKNWEVNKPEQLEKVLSVYETISSETGASIADIIILGGNLGIEKASGKTLDFTPGRGDSSQDQTDIDSFAYLEPLSDGFRNYHRDGLDVKAEEMMLDRAQLLGLTAPEMTVLLGGLRSLGITHNGYGNFSENPNELTNDYLTKLLDMSVSWQTNGTGNSFESIDRTTGDKVSSASRVDLVFGSNSQLRAIAELYAQEDSKDKFVSDFISAWNKVMNSDLY

SEQ ID NO: 89928 - protein, 723 aa, Unknown
  Bacterial polypetide isolated from the Sargasso Sea
MSIEEARTQSPNLSNEGSGCPVAHGSSEQHTNSARSNRDWWPEQINLSILHQHDQKSDPMNEGFDYREEFKKLDYDALKKDLNDLMTDSQDWWPADYGHYGPFFIRMTWHAAGTYRTADGRGGGGTGSQRFAPTNSWPDNTNLDKARRLLWPIKQKYGNKISWADLIILTGNVAIESMGGKTFGFGGGRADIWAPEDDIFWGKEVEWLGNERYTGERVLDTPLGAVQMGLIYVNPQGPDGNPDPLASAKDIRETFGRMAMNDYETVALTAGGHTFGKAHGAASEDFKGADPEGAPLEEMGFGWKSGHGKGMGRDSITSGIEGAWTPNPTQWDNGYFDMLFGYEWELVKSPAGAHQWHPVSPKDEDMAPDVEDSSIKVTTIMTTADMAMREDPVYREISKHFHENPDEFADAFARAWFKLLHRDMGPKVRYLGPEVPQEELIWQDPVSAGSTSYDVEAVKSKIADSGLTIQEMVETAWASASTFRGSDLRGGANGARIRLAPQKNWEANKPEQLSRVLSVLEGIASDTGASVADVIVLAGNVGVEKASGSTVPFTPGRGDATQENTDEHSFEVLEPFSDGFRNYHKSDFEIGAEHMLLDKAQLLGLTAPEMTVLVGGMRSMGISANGHGLLTDSSNKLTNDWFSKLLDMSVEWKPTGRNSYEGTDRVSGEKVSTATRADLVFGSNSQLRALAEVYASSDSHDKFVSDFIAAWTKVMNLDRFDLS

SEQ ID NO: 89929 - protein, 713 aa, Unknown
  Bacterial polypetide isolated from the Sargasso Sea
MAEKTEGKCPVMHGAMTTNSSSGTSTKDWWPNQLNLNILHQHDRKSNPMDNDFDYREEFKKIDYEALKQDLYDLMTDSQEWWPADYGHYGPFFIRMTWHAAGTYRNTDGRGGGGTGAQRFAPLNSWPDNGNLDKARRLLWPIKQKYGKQISWADLLILAGNAAIESMGGTTFGFSGGRPDIWGPEEDIHWGVESEWLDNKRYKGERELDNPLAAVQMGLIYVNPQGPDGNPDPLASAHDIRETFGRMAMNDEETVALVAGGHTFGKSHGAGAETNVQTEPEGAPLEEMGFGWSSTFGSGVGSDTITSGIEGAWTANPTKWDNGYFDLLFGYEWELTKSPAGAHIWHAIGQTEEDMAPDAEDASKKVPTMMTTADMAMRVDPSYNKISKRFHENPDEFADAFARAWFKLLHRDMGPKTRYMGPEVPDEELIWQDPVPEGNSNYDIENVKKLISDSGLSIQEMVETAWASASTYRGSDMRGGANGSRIRLAPQKDWEVNKPNQLSKILEIYGNISKETGASVADIIILAGNLGIEMASGVEVPFVPGRGDASQEQTDVESFAVLEPKSDAFRNFHASGVNTPPEEILLDKAQLLGLTAPEMTVLVGGMRSLGISSNGYGLFSEDENNLSNDYFKTLLDMSVKWKPNGTGNSYEAFDRVSGEKVRTASRSDLVFGSNSQLRAIVEVYAEDDSNSKFINDFVFAWNKVMNADRFDVQ

SEQ ID NO: 89930 - protein, 183 aa, Unknown
  Bacterial polypetide isolated from the Sargasso Sea
MSKAPPLTNATGAPVPDNTNTMTAGPRGPALLQDIWLLEKLAHFDREVIPERRMHAKGAGAYGTFTVTHDISRYTRAKLFSQVGKKTDVFLRFSTVAGERGAADAERDIRGFAVKFYTEEGNWDIVGNNTPVFFFRDPMRFPDLNHAVKRDPRTGLRSAENNWDFWDLYRSSAQITIVMSDRG

SEQ ID NO: 89931 - protein, 728 aa, Unknown
  Bacterial polypetide isolated from the Sargasso Sea
MSNETKCPFNHTAGGGTTNKDWWPNQLNLNVLHRHSALSDPMDPDFDYAEAFKKLDLEAVKKDLHALMTASQDWWPADFGHYGGLFVRMAWHSAGTYRTADGRGGAGGGQQRFAPLNSWPDNVSLDKARRLLWPIKQKYGRNISWADLLILTGNVALESMGFKTFGYAGGRVDTWEPDDVYWGSEKIWLELSGGPNSRYSGKRELESPLAAVQMGLIYVNPEGPDGNPDPVAAAHDIRETFARMAMNDEETVALIAGGHTFGKTHGAGPASNVGPEPEAAGLEEQGLGWKSTFGTGKGKDAITSGLEVTWTSTPTQWSNDFFKHLFSYEWELTKSPAGAHQWVAKDAGEVIPDAFDASKKHRPTMLTTDLSLRFDPAYEKISRRFYENPAEFADAFARAWFKLTHRDMGPRSRYLGPDVPAEHLLWQDPIPAVDHPLIDAADVAALKAKVLASGLSVSQLVSTAWASAATFRGSDKRGGANGARIRLAPQKDWEVNRPAELAKVLETLEGVQKAFNDGQTGGKKVSLADLIVLAGAAGVEQAAKNAGIAVTVPFAPGRADASQEETDIEAMAVLEPVADGFRNYLKHAYKTPAEALLVDKAQLLTLTAPEMTVLVGGLRVLGANAGDAKHGVFTERPEALTNDFFVNLLDMGTEWKPVSAANDVFEGRDRATGAVKWTGTRVDLIFGSHSQLRALAEVYGSADAKEKFAHDFVAAWNKVMNLDRFDLA

SEQ ID NO: 89932 - protein, 425 aa, Unknown
  Bacterial polypetide isolated from the Sargasso Sea
RMGFGWISKHASGKGSDTITSGIEGAWTTNPTKWDNGYFDLLLGYDWKLTKSPAGANIWHAVDQKEEHMAPDAEDASKKVPTMMTTADMAMREDPEYRKISERFHKNPDQFQDAFARAWFKLLHRDMGPKTRYMGPEAPMEDLIWQDPIPAGKSDYDVNVVKSKIENSGLSIQEMVETAWASASTYRHTDMRGGANGARIRLEPQRSWGVNKPDQLNKVLGVLEGIASETGSSVADIIVLAGNVGIEKASGKTVPFTPGRGDATQEHTDVESFAVIEPEADGFRNYLKKNFSVTPEEFLLDRSHLLGLTAPEMTVLVGGMRALGISFDDRGVFSNSGKLDNSFFTTLLDMSVKWEATGSNSYQASDRKSGEKVRRASRADLVFGSNSQLRALAEVYAQSDNHDKFVNDFISAWNKVMNADRFDIN

SEQ ID NO: 89933 - protein, 709 aa, Unknown
  Bacterial polypetide isolated from the Sargasso Sea
MEESKCPVSHGSNSQHTLGSMSNNQWWPDALDLSILHQHDKKSNPMDEDFNYREEFKKIDYDALKQDLNDLMTDSQDWWPADYGHYGPFFIRMTWHAAGTYRTADGRGGGGTGNQRFAPLNSWPDNGNLDKARRLLWPVKQKYGNQISWADLLILAGNVAIESMGGKTFGFSGGRPDIWAPEEDIFWGKENEWLANNRYTGDRKLDKPLGAVQMGLIYVNPQGPDGNPDPLASAKDIRETFSRMAMNDEETVALTAGGHTFGKAHGAGSEDLVGVEPEGAPLEQMGFGWKSDHGSGQGRDSITSGIEGPWTANPTQWDNGYFDLLFGYEWELVKSPAGANQWHPINPKEEDLAPDPEDSSVKVTTMMTTADMAMREDPIYNKISKRFHENPDEFADAFARAWFKLLHRDMGPKTRYMGPESPDEELIWQDPVPAGNSDYDIETVKTKISESGLSIQELVETAWSSASTFRGSDLRGGANGARICLEPQKNWEANKPEQLSRVLTVLEDIAKDTGASVADVIVLAGNVGIEKASGVNVSFNPGRGDTTQEKTDVDSFAVLEPFSDGFRNYHNSDLEVTPEQMLLDKAQLLGLTAPEMTVLVGGLRSLGVSHDGHGVFTDDPNKLSNDFFVTLLDMSVEWKPKGKNLYEATDRSSGEVVRTATRADLVFGSNSQLRALAEVYACDDSQSKFVNDFVSAWNKVMNLDRFDLD

SEQ ID NO: 89934 - protein, 701 aa, Unknown
  Bacterial polypetide isolated from the Sargasso Sea
MTHSPSSGTTPPVQPQDSAKSRQLDEHRSRPDHEALRTNQGVRIADNQNTLRGGTRGPSLLEDFIMREKITHFDHERIPERVVHARGSAAHGVFRVYEPMADYTKAAFLQDPAAETPVYVRFSTVQGPRGSSDTVRDVRGFAVKFYTEEGNYDLVGNNMPVFFIQDAIKFPDFVHAVKPEAPNEMPTGASAHDTFWDFVSLVPETTHTVLWLMSDRALPASYRAMDGFGVHTFRFVNAAGAVRFVKFHWRPVSGAYSLLWDEAQRIAGHDPDFNRRDLWMAIERGDYPEFELGVQMIDPADADKFDFDLLDATKLVPEELVPVRPIGRMTLNRNPDNFFAETEQVAFHPGHVVPGIDFTNDPLLQGRLFSYTDTQLSRLGGPNFHEIPINRPVCPFANNQRDAMHRQTINVGQASYEPNSTSGGWPRETPPAPAGGGFETVHEPLEGDKVRVRSESFADHFSQPALFYQSMTDIEQRHIRDAYCFELGKVTQPHIRERVVNDMIARFDAGLAAQVAERLGLPAPHGGATPAVAQRSPALSLIGRSKPGIRSRKIALIATAGTSETLVQQVRDALQAAHAVPTIVAPTLAPIGSIVPQATLAGMPSVMFDAVFVCGGDGDGRDLAHSADARHFVREAFKHLKPIAAVGAGRQLLSAAHLPDPAEGVCVGEAVDLDAVLNDLSDHLGRHRVWAREQQAAELPA

SEQ ID NO: 89935 - protein, 435 aa, Unknown
  Bacterial polypetide isolated from the Sargasso Sea
MGLIYVNPQAPDGEPDPIASGKDVRETFSRMAMNDEETVALVAGGHTFGKGHGAGPEEHVSAEPEGASLENMGFGWMSDHKSGMGSDTITSGFEGAWTAKPTTWDNGYFDLLFGYEWEKVETPSGKIVWHAIDQKEEDMAPDAEDPSVRVPTMMTTADMSMREDPIYREISKRFHENPDEFADAFARAWFKLLHRDMGPRSRYLGPEVPDEELIWQDPVPQGNNDYDVDAIKAKLSDCGLSIQEMVETAWASASTFRGSDLRGGANGSRIRLAPQKDWEANKPEQLARVLGVYESIASESNASLADVIVLGGNVGIEKASGAQVPFTPGRGDASEEQTDADSFDALEPIADGFRNFQKEGSSLPSEEMMLDKAQLLGLTAPEMTVLIGGMRALGISSNNHGVFTETPGKLTNDFFVNLLDMGVEWKSTGENSYEA

SEQ ID NO: 89936 - protein, 498 aa, Unknown
  Bacterial polypetide isolated from the Sargasso Sea
MSNKNKCPVSSGPNKKTSVGAASNQDWWPNQLNLNILHQHDKKSDPMDEGFDYREEFKKLDYQALKKDLNALMTDSQDWWPADYGHYGPFFIRMTWHAAGTYRTGDGRGGGGTGAQRFAPLNSWPDNGNLDKARRLLWPIKQKYGNKISWADLLILAGNVAIESMGGKTFGFGGGRPDIWAPEEDIYWGIEEEWLGNERYTGERDLENPLAAVQMGLIYVNPEGPDGNPDPLASAKDIRETFGRMAMDDAETVALTAGGHTFGKAHGAGDANLVGVEPEGAEIEEMGFGWKNAHGSGKGSDTITSGIEGAWTTNPTKWDNGYFDLLLNNEWELVKSPAGANQWHIVNPKDEDLAPDAGDDTKRVPTMMTTADMAMREDPDYRKVSERFHKNPDEFADAFARAWFKLLHRDMGPKVRYLGPEVPEEDLIWQDPVPVGNSDFDVKEVKEKILASDLSIQEMIETAWSSASTFRGSDMRGGANGARVRLAPQKDWDANKPE

SEQ ID NO: 89937 - protein, 311 aa, Unknown
  Bacterial polypetide isolated from the Sargasso Sea
MSSIEKCPVMHGGMTSNKDKGTSNRDWWPSQLNLSILHQHDQKSNPMNKDFDYREEFKKLDYTALKKDLTNLMTDSQDWWPADYGHYGPFFIRMTWHAAGTYRTGDGRGGGGTGAQRFAPLNSWPDNGNLDKARRLLWPIKQKYGNKISWADLLILAGNVAIESMGGKTFGYSGGRPDIWAPEEDIYWGVEKEWLENKRYKGERELDNPLAAVQMGLIYVNPEGPDGNPDPLASAKDIRETFGRMAMNDEETVALTAGGHTFGKAHGAGDPSLVGPEPEGANIEEMGFGWISKHGSGKGSDAITSGIEGAW

SEQ ID NO: 89938 - protein, 632 aa, Unknown
  Bacterial polypetide isolated from the Sargasso Sea
MSEAKCPVAHGANSNMEKSSTDWWPKNLNLDILHQHDQKTKPFNGTYNYREEVKKLDFKALEADMHKLMKESQDWWPADWGTYAGLMVRLAWHSAGTYRTADGRGGGGTGDHRFAPLNSWPDNTNLDKARRLLWPIKKKYGNKISWADLMILAGNIGYESTGFKTFGFSYGREDIWHPNKDIYWGPETEALASDRHSDKEDASSLESPLAANHMALIYVNPEGFEGNPDPLKTAQHIRETFARMAMNDEETVALTAGGHTIGKTHGNGNADNLEAEPEGAAINEQGLGWMNNTSRGVGRDTVTSGIEGAWTTEPTKFDNGYFDMLFKYEWELKKSPAGAWQYEPVNIKEEDKPVDVEDPSIRYNPIMTDADMAMIKDPIYLEISKKFHNDHEYFCDAFARAWFKLTHRDMGPRSRYIGHDLPNEDLIWQDPVPAGTPSFDVEQLKEKIRNSELTVQELVSTAWDSARTFRGSDLRGGANGARIRFSPQKDWKGNEPQKLSKVLDILEPLAKEAGASIADTIVLAGNVGIEKAIEAAGFKVPVPFNPGRGDASEDMTDSESFSQLEPIHDGFRNWQKDNYEVRGEELLLDRAHLLGLTAVEMTVLVGGMRALGANYGENKHGVFTDQSRCSNN

SEQ ID NO: 89939 - protein, 320 aa, Unknown
  Bacterial polypetide isolated from the Sargasso Sea
MSQQYLTSQSGSPIADDQNSLSAGERGPLLLQDWHLIEKLAHFNRERIPERVVHAKGTGVYGTFTLTKDLSEYTIADHFNGVGKQTETFVRFSTVGGEMGSADAERDPRGFGLRFYTARGNHDIVGNNTPTFFLRDGIKFPDFIHTQKRNPLTNLKDPQAMWDFWSLNPEAMHQVTILMSDRGIPANYRQMHGYGSHTFSFWNAKGERFWVKFHFKSQQGVVNLTNEQADKLKGIDPDSSQRDMVVAVTDGNFPRWTVNVQIMPESDANTYHINPFDLTKVWPHGDYPLIEIGVLELNRLPQNYFAEVEQVALAPSNLEP

SEQ ID NO: 89940 - protein, 369 aa, Unknown
  Bacterial polypetide isolated from the Sargasso Sea
MSTENFKNKSFKANELSKCPFTGAGTPAKFSAGRGQTVRDFWPNSLNLKILSQHSNLSNPMDKKFSYEKEFKKLNYKALKKDLKKLMTDSQEWWPADYGHYGPLFIRLAWHAAGTYRTGDGRGGAGTGNQRFAPLNSWPDNVNLDKARLLLWPIKKKYGKKISWADLFILVGNVALDSMGFKTFGFGAGRTDIWEPEDDIYWGSEKEMLGVERYSGNRDLEQPLGASHMGLIYVNPQGPDANPDPLLAAHDIRETFGRMAMNDYETAALVAGGHTFGKSHGAASESYKGPDPEASKLQDQSTGWNSGYKTGKGVDAISSGIEGAWTQNPTKWDMGYLDCLYGHDWELTKSPAGAHQWTPKKNGQKIKMV

SEQ ID NO: 89941 - protein, 375 aa, Unknown
  Bacterial polypetide isolated from the Sargasso Sea
MSTENFKNKSFKADQLSKCPFTGAGTPAKFSAGRGQSVRDFWPNSLNLKILSQHSNLSNPMNKKFNYSKEFKKLNYKALKKDLKKLMTDSQEWWPADYGHYGPLFIRLAWHAAGTYRTGDGRGGAGTGNQRFAPLNSWPDNVNLDKARLLLWPIKKKYGNKISWADLFILVGNVALDSMGFKTFGFGAGRTDIWEPEDDIYWGSEKEMLGVERYTEKRDLEQPLGASHMGLIYVNPQGPDANPDPKLAAHDIRETFGRMAMNDYETAALVAGGHTFGKSHGAASESHKGPDPEASRIQDQSTGWNSGYKSGKGVDTISSGIEGAWTQNPIQWDMGYLDCLYEHEWELTKSPAGAHQWTPKKNGQKIKMVPDAHDK

SEQ ID NO: 89942 - protein, 379 aa, Unknown
  Bacterial polypetide isolated from the Sargasso Sea
MDDIGKCPVMHGSVTTNSGISTTNRDWWPNQLNLSILHQNDKRSNPMSLDFDYREEFKKLDYKALKKDLHDLMTDSQEWWPADYGHYGPFFIRMTWHAAGTYRTSDGRGGGGTGDQRFAPLNSWPDNGNLDKARRLLWPIKQKYGNKISWADLFILTGNVAIESMGGKTFGFSGGRADIWSPPEDIYWGQENEWLENKRYTGDRELEMPLGAVQMGLIYVNPQGPDGNPDPLASARDIRETFARMAMNDEETVALTAGGHTFGKAHGASDPDKYVGAEPEGAPIEQMGFGWQNSYGTGFGSDTITSGIEGAWTANPTKWDNGYFDLLFGYEWELVKSPAGAFQWHPINPKEEDMAPDAHDGSKKVTTMMTTADMAMKGR

SEQ ID NO: 89943 - protein, 386 aa, Unknown
  Bacterial polypetide isolated from the Sargasso Sea
AVDLAEKDHAPEVDGSEAKVPVMMTTADMAMRMDPEYEKISRRFHSNPDEFADTFARAWFKLTHRDMGPKIRYLGEEVPAEDLIWQDPIPAVNHVLINNAEVNSLKAKILDSGLTISECVQTAWASASTFRGSDMRGGANGARIALSPQKDWEVNQPKQLSKVLETLRSIQSEFNKKSNRTKVSLADLIVLAGNAGIEEAAKAGGNPVSVPFLPGRMDAAQEQTDVESFDLLEPIADGFRNYQKKQYSLSAEELLIDKAHLLTLTAPEMTALIGGLRVLGSNYDNSLLGVLTDRPGQLTNDFFVNLLDMQYSWNATNSEETEFEGKNRASDKVVWSASRVDLAFGSNSQLRALAEVYAQSDNQEKFIADFVSAWSKVMNADRFDIN

SEQ ID NO: 89944 - protein, 494 aa, Unknown
  Bacterial polypetide isolated from the Sargasso Sea
MSKLTTAFGAPVPDNQNIQTAGPRGPALLQDVWFLEKLAHFDREVIPERRMHAKGSGAFGTFTVTHDVTRYTRAKIFSRIGKTTEMFARFSTVAGERGAADAERDIRGFALKFYTEEGNWDLVGNNTPVFFLRDPLKFPDLNHAIKRDPRTGLRNAESNWDFWTQLPEALHQVTIVMSDRGIPRSYRHMHGFGSHTFSLINASNERFWVKFHMRSEQGIENLTDEEATRIMGSDRESHHRDLYESIEARQFPRWNLYFQVMPESEASAYKVNPFDLTKVWSKKDYPLIEVGYFELNRNAENWFADVEQAAFNPANVVPGISFSPDKMLQGRLFSYGDAQRYRLTVNHFQIPVNAPRASTHTNSYHRDGVLRVDGNQGGTTSYNPNTKGAWLDQPDFSEPPLSIEWAADHWNHRVDDDYYSQPGDLFRLMTAAQQQMLFDNTARAMYGVSRPVRDLHVEHCTKADPAYGAGVSAALAALDAYVSSAVRSEPEVTK

SEQ ID NO: 89945 - protein, 587 aa, Unknown
  Bacterial polypetide isolated from the Sargasso Sea
MDSDFDYREEFKTLDYDALKNDLHALMTDSQDWWPADYGHYGGLFIRMTWHAAGTYRIMDGRGGGNTGNQRFAPLNSWPDNGNLDKARRLLWPIKKKYGKKISWADLMILAGNVAIESMGGKTAGFGGGRPDIWSPEEEIDWGTEKEWLDNKRYTGKRDLANPLGAVQMGLIYVNPQGPDGNPDPLASAHDIRETFGRMAMNDEETVALVAGGHTFGKAHGAGPEESVGAEPEGASIQNQGLGWISSHGSGKGSDTITSGVEGAWTSNPTQWDNGYFDLLFGYEWELTKSPAGAHIWHAIDQKQEDLAPDAEDSSKKVPTMMTTADMALREDPEYHKISKRFHENPEEFADAFANAWFKLLHRDMGPKSRYLGPEVPSEDFIWQDPVPKGNANYDIDSAKQKISASGLSIQEMIETAWASASTYRGSDMRGGANGARIRLEPQKNWEVNKPEQLSGVLSTIEGIANEVGASVADMIVLAGCVAIEKASGSSVPFTPGRGDASQEETDIESFAVLEPIADAFRNYKKESVDVNIEEMMLDKSQLMGLTAPEMTVLIGGLRSLGLSTDNQGVFTDNQDKLSNDFFNNFT

SEQ ID NO: 89946 - protein, 419 aa, Unknown
  Bacterial polypetide isolated from the Sargasso Sea
MLKELSKCPFTGVGTPPKHSTGKGTSNRDWWPNSLNLKILSQHSRLVNPMDKKFNYAKEFKKLNFKSLKKDLKKLMTDSQDWWPADYGHYGGLFIRLAWHAAGTYRTGDGRGGAGTGNQRFAPLNSWPDNVNLDKARLLLWPIKKKYGKKISWADLFILVGNVALESMGFKTFGFGGGREDIWEPEEDIYWGSEKEWLGVNRYSGKRELENPLGASHMGLIYVNPQGPDANPDPILAANDIRETFGRMAMNDYETVALVAGGHTFGKSHGAAAESHKGPEPEGSRIQEQATGWNSSYKSGIGVDTISSGLEGAWTQNPKKWDMGYFDNLFGYQWELTKSPAGAHQWTPKKNGHAIKMVPDAHDKNKKHAPMMLTTDLSMRMDSKYGPISKHFHKNPKEFADAFARAWFKLTHRDMGPRA

SEQ ID NO: 89947 - protein, 492 aa, Unknown
  Bacterial polypetide isolated from the Sargasso Sea
MLKEQTKCPFTGSGTPSKYPTGKGTSNRDWWPNSLNLKILSQHSSLVNPMGEKFNYKKEFKKLNFKALKKDLHKLMTDTQDWWPADYGHYGPFFIRLAWHAAGTYRTGDGRGGAGTGNQRFAPLNSWPDNVNLDKARLLLWPIKKKYGKKISWADLFILVGNISLESMGFKTFGFGAGREDIWEPEEDIYWGSEKEWLGVNRYSGKRELENPLGASHMGLIYVNPQGPDANPDPYLAAHDIRETFGRMAMNDYETVALVAGGHTFGKSHGAAPESHKGPEPEGSKIQDQATGWNSNYKSGLGVDTISSGIEGAWTSNPIQWDMGYFDNLFGYDWELTKSPAGAHQWKPKRNGHDIEMTPDAHDRSKKNLPMMQTTDLSLKLDPKYGPISKHFHQNPNEFAEAFARAWFKLTHRDMGPKANYLGSDVPKENLIWQDPIPKNKYKLKNKDIELLKKKISKSGLSVSQLVTTAWASASTFRGSDKRGGANGARIA

SEQ ID NO: 89948 - protein, 543 aa, Unknown
  Bacterial polypetide isolated from the Sargasso Sea
DVRGFAVKFYTEEGNFDLVGNNMPVFFIQDAIKFPDFVHAVKPEPHNEIPTGASAHDTFWDFVSLTPESAHMVLWTMSDRAIPIAYRSMQGFGVHSFRLVNGEGQSKLVKFHWRPKAGVCSLVWDEAQKLAGKDPDFHRRGLWEDIERGLYPEWELGLQVMDEEDALSFGFDLLDPTKLVPEELVPVRVVGRMVLNRNPDNFFAETEQAAFHVGHVVPGIDFSNDPLLQGRLFSYTDTQLLRLGGPNFNEIPINRPLCPFHNNQRDAPHRQQINRGRASYEPNSIDGNWPRETPPAPSGGGYSSYPEPLQGHKVRVRSASFADHFSQATLFWRSMSEAEQQHIVDAYSFELSKVERLYIRERQVKEILAHIDPLLALRVAENLGIDLDSTSTSPMEGKLQDSPALSQMNLLPGDIRGRRVAILLTPGCKADEVGSLKKMLEAAGAVAKLLAPSAAALKDSDGQPMQPDGSFASEPSITVDAVFVPGGEYVLKTLQDDGVAKHYLLEAYKHLKPVALSGDAAQLAAMLGLEEDDGMLCGDSFDP

SEQ ID NO: 89949 - protein, 141 aa, Unknown
  Bacterial polypetide isolated from the Sargasso Sea
MFQKSALVVALGLSLAVQANTLTRDNGAPVGDNQNSTTAGANGSVLLQDVHLIQKLQRFARERIPERVVHARGTGAHGEFVATDDLSDLTIAAPFADQGKKTPVFVRFSTVIHGNHSPETLRDPRGFAVKFYSDQGNWDLV

SEQ ID NO: 89950 - protein, 495 aa, Unknown
  Bacterial polypetide isolated from the Sargasso Sea
FFIRMAWHSAGTYRTGDGRGGAGTGMQRFAPLNSWPDNGNLDKARRLLWPVKQKYGNKISWADLMILAGNCAMESMGFKTFGFAGGRADVWEPEEDVYWGTETEWLGDSRYTGDRELENPLAAVQMGLIYVNPEGPNGTPDPVASGRDIRETFARMAMNDEETVALVAGGHTFGKAHGAGDTELVGPEPEGSSVQDMGFGWINKYKSGKGIHTTTSGIEGPWTSNPTQWDMGYFDVLFGYDWKLTKSPSGANIWHAVDLADKDHAPEVDGSGAKVPVMMTTADMAMRMDPEYEKISRRFHSNPDEFADAFARAWFKLTHRDMGPKIRYLGDEVPVEDLIWQDPIPAVNHDLINSSEEESLKAKILNSGLSISECIQTAWASASTYRGSDMRGGANGARIALSPQKDWTVNQPKQLVKVLDILRTIQSEFNEKSEKTKVSLADLIVLAGNAGIEAAAKAGGNSVSVPFLAGRMDASQEHTDVESFDLLEPIADGFR

SEQ ID NO: 89951 - protein, 660 aa, Unknown
  Bacterial polypetide isolated from the Sargasso Sea
MSREINPEISKCPFTGAGTPPKFPTGRGTSNRDWWPNNLNLKILSQHSSLVDPMDKNFNYAKEFKKLNYKKLKKDLIKLMTDSQSWWPADYGHYGPFFIRLAWHAAGTYRTGDGRGGAGTGNQRFAPLNSWPDNVNLDKARLLLWPIKKKYGKKISWADLFILVGNVSLESMGFKTFGFGAGREDIWEPEEDIYWGSEKEWLGVNRYSGNRELENPLGASHMGLIYVNPQGPDANPDPLLAAHDIRETFGRMAMNDYETVALVAGGHTFGKSHGAAPESHKGPEPEGSKIQEQATGWNSNYKSGLGVDTISSGIEGAWTSNPIKWDMGYFDNLFGYDWELTKSPAGAHQWKPRKNGHAINTTPDAHLKSQKNMPMMQTTDLSLKLDPSYGPISKHFHNNPKEFADAFARAWFKLTHRDMGPRSCYLGPEVPKEELIWQDPISKPKYKLKKKDIDTLKKNLSKSGLSVSELVSTAWASASSFRGSDKRGGANGARVALEPQKNWEVNNPSRLSKVLNKLEKIKKNFDTKKRIVSLADLIVLGGNVGIEKAAKKAGYKINVPFISGRGDASQAQTDEFSFGLLEPKADGFRNYTLKKTNGSSKNSISDEEMLIDKAQLMKLTAPEMTVLVGGMRMLNTNFDGSNYGVFTKKTETLTNDFFVN

SEQ ID NO: 89952 - protein, 593 aa, Unknown
  Bacterial polypetide isolated from the Sargasso Sea
NPAEQTPVYVRFSTVQGPRGSADTVRDVRGFAVKFYTQEGNYDLVGNNMPVFFIQDAIKFPDFVHAVKPEAPNEMPTGASAHDTFWDFVSLVPESAHMVLWTMSDRAIPRSLRTMEGFGVHTFRFVNAQGKARFVKFHWRPVLGSYSLLWDEAQKLAGKDPDFHRRDLWEAIERGDFPEYELGVQIVEEEDEHSFGFDLLDPTKLIPEERVPVKIIGKMTLNRNPDNFFAETEQVAFHPGHIVPGIDFSNDPLLQGRLFSYTDTQISRLGGPNFHEIPINRPVCPFHNNQRDAMHRQTINVGQASYEPNSVSGGWPKETDPAPSDGGFESYQERVDGVKIRVRSESFADHFSQAALFYRSMSEVEQEHISAAYQFELGKVTKPEIRERVVNEILANFDAGLAAKVAEGLGLPAPKKGKAPPVSDPQTSPALSLLNRGKPGIKTRKIALLAAPGADGASIRKLQQALRGEGATPLLIAPSLAAIDGLQPDATIAGMPSIMFDAVIVCGGEAGAKTLAQSGDARHFVLEAFKHLKAIAALGAGRDVLAAAQLPDQADGVETGDDSQSAEVLKAFVAAAEQHRVWSRAALAQTVPA

SEQ ID NO: 89953 - protein, 402 aa, Unknown
  Bacterial polypetide isolated from the Sargasso Sea
GFGAGREDIWEPEEDIYWGSEKDWLGVNRYSGKRELENPLGASHMGLIYVNPQGPDANPDPLLAAHDIRETFGRMAMNDYETVALVAGGHTFGKSHGAAPESHKGPEPEGSKIQEQATGWNSNYKSGLGADTISSGIEGAWTSNPIKWDMGYFDNLFGYEWELSKSPAGAHQWNPIKNGKAIKMTPDAHIKSKENLPMMQTTDLSLKLDPSYAPISRHFHNNPEEFADAFARAWFKLTHRDMGPRACYLGPEVPKEKLIWQDPISKPNYKIKNKDIKFLKTKILKSGLSVSQLVSTAWASASTFRGSDKRGGANGARIILEPQKSWSVNNPSQLSKVIKILEKIKKRFDNKKKNVSMADLIVLGGSVGIEKAAKNAGYKINVPFTPGRGDATQDQTDSHSFG

SEQ ID NO: 89954 - protein, 744 aa, Unknown
  Bacterial polypetide isolated from the Sargasso Sea
MSNELIKEQSKCPFTGAGTPPKHPTGKGQTNKDWWPNSLNLKILSQHSSLVNPMGEKFNYKKEFKKLNFKALKKDLHKLMTDTQDWWPADYGHYGPFFIRLAWHAAGTYRTGDGRGGAGTGNQRFAPLNSWPDNVNLDKARLLLWPIKKKYGKKISWADLFILVGNISLESMGFKTFGFGAGREDIWEPEEDIYWGSEKEWLGVNRYSGKRELENPLGASHMGLIYVNPQGPDANPDPYLAAHDIRETFGRMAMNDYETVALVAGGHTFGKSHGAAPESHKGPEPEGSKIQDQATGWNSNYKSGLGVDTISSGIEGAWTSNPIKWDMGYFDNLFGYDWELTKSPAGAHQWKPKRNGHDIEMTPDAHDRSKKNLPMMQTTDLSLKLDPKYGPISKHFHKNPNEFADAFARAWFKLTHRDMGPKANYLGSDVPKENLIWQDPIPKNKYKLKNKDIELLKKKISKSGLSISQLVTTAWASASTFRGSDKRGGANGARIALEPQKDWEINNPSKLSAVIKILNKIKKGFDSKNKSVSLADLIVLGGSVGIENAAKKSGKKIKVPFKAGRSDAKQDQTDKNSFNLLEPIADGFRNYIKLHAKGYTNGKGIPTNSAEEMLIDKAQLLGLTGPEMTVLIGGMRVLNTNYDGSDYGVFTKKPGSLTNDFFVNLLDMKTTWREVDKEEQFFEGIDRKTKRVKWRATRADLIFGSNSQLRALSEVYATDDSNEKFLNDFISAWTKVMNLDRFDI

SEQ ID NO: 89955 - protein, 377 aa, Unknown
  Bacterial polypetide isolated from the Sargasso Sea
MAMNDYETAALVAGGHTFGKSHGAASESYKGPDPEASRLQDQSTGWNSGYKSGKGVDTISSGIEGAWTQNPIQWDMGYLDCLYGHEWELTKSPAGAHQWTPKKNGQEIKMVPDAHQKGVLHPPMMQTTDISMKVDPSYGPITKHFHQNPKEFHDAFARAWFKLTHRDMGPRVCYLGSEVPKEQLIWQDPIDKPKYKLKSNDIKDLKNKISKSKISISDLVSTAWASASTFRGSDKRGGANGARIMLEPQKNWKVNNPKKLSSVIKALEKIKSKFDSKKKSVSMADLIVLAGGVGIEMAAKKAGYKVQVPFLAGRGDARQDQTDINSFGLLEPQADGFRNYLNGGASNVSAEEKLVDKAQLMGLTAPEMTALVGGMRV

SEQ ID NO: 89956 - protein, 434 aa, Unknown
  Bacterial polypetide isolated from the Sargasso Sea
SMGGKTFGYSGGRPDIWGPEEDIHWGVETGWLENNRYKGDRELDNPLAAVQMGLIYVNPQGPDGNPDPLASARDIRETFGRMAMNDEETVALVAGGHTFGKAHGAGTEDHVQSEPEGAPLEQMGFGWTSSYGSGLGRDAITSGIEGAWTANPTQWDNGYFDLLFGYEWELTKSPAGAHIWHAVDQKEEDMAPDAEDGSKKVPTMMTTADMAMREDPSYKEISKRFHENPDEFADAFARAWFKLLHRDMGPKTRYMGPEVPEEELIWQDPVPAGDSSYDVELVKEKILASGLSIQEMVETAWSSASTYRGSDMRGGANGSRIRLEPQRSWEANNPDQLNKVLDIYEAISSETGVSVADIIVLAGNVAIEKASGVEVPFSPGRGDASQENTDIESFAVLEPQSDGFKNFHKSGLNVNPEEIMLDKAQLLGLTAPEM

SEQ ID NO: 89957 - protein, 233 aa, Unknown
  Bacterial polypetide isolated from the Sargasso Sea
MSKLTTAFGAPVPDNQNTQTAGPRGPALLQDVWFLEKLAHFDREVIPERRMHAKGSGAFGTFTVTHDVTQYTRAKIFSDIGKSTEMFARFSTVAGERGAADAERDIRGFALKFYTEEGNWDLVGNNTPVFFLRDPLKFPDLNHAIKRDPRTGLRSAESNWDFWTQLPEALHQVTIVMSDRGIPRTFRNMHGFGSHTFSLINAAGERFWVKFHMRTQQGIENMSDVEAVELVGS

SEQ ID NO: 89958 - protein, 403 aa, Unknown
  Bacterial polypetide isolated from the Sargasso Sea
MSTENFKDKSFKTEQLSKCPFTGKGTPAKFSAGRGQTNRDFWPNSLNLKILSQHSNLSNPMGKKFSYAKEFKKLNYKALKKDLKKLMTDSQEWWPADYGHYGPLFIRLAWHAAGTYRTGDGRGGAGTGNQRFAPLNSWPDNVNLDKARLLLWPIKKKYGRKISWADLFILVGNVALDSMGFKTFGFGAGRTDIWEPEDDIYWGSEKEMLGVERYSGKRDLEQPLGASHMGLIYVNPQGPDANPDPKLAAHDIRETFGRMAMNDYETAALVAGGHTFGKSHGAASESFKGPDPEASKLQDQSTGWNSGYKSGKGVDTISSGIEGAWTQNPIKWDMGYLDCLYGHEWELTKSPAGAHQWTPKKNGQEIKMVPDAHKKGVMHPPMMQTTDISMKIDPSYGPITKHF

SEQ ID NO: 89959 - protein, 546 aa, Unknown
  Bacterial polypetide isolated from the Sargasso Sea
GGKTFGFSGGRPDIWGPEEDIHWGVETGWLENNRYKGDRELDNPLAAVQMGLIYVNPQGPDGNPDPLASARDIRETFGRMAMNDEETVALVAGGHTFGKAHGASTEDHVQAEPEGAPLEEMGFGWTSSYGSGVGSDTITSGIEGAWTANPTQWDNGYFDLLFGYEWELTKSPAGAHIWHAVGQKEEDMAPDAEDASVKVPTMMTTADMAMREDPSYKEISKRFHENPDEFADAFARAWFKLLHRDMGPKTRYMGPEIPEEELIWQDPVPAGNSTYDVDAVKEKILNCGLSIQEMIETAWSSASTYRGSDMRGGANGARIRLEPQKNWEANNPDQLRKVLEIYEAIAEETGASVADVIVLAGNVAIEKASGIEVPFTPGRGDATQENTDVESFEVLEPQSDGFKNFHKAGLNVNPEEIMLDKAQLLGLTAPEMTVLVGGLRSLGISSSGYGLFTENKDELSNDYFRTLLDMSVKWRPNGTGNSYEAIDRVSGEKVRTASRTDLVFGSNSQLRALVEVYASDDSLDKFKGDFVHAWNKVMNADRFDLN

SEQ ID NO: 89960 - protein, 343 aa, Unknown
  Bacterial polypetide isolated from the Sargasso Sea
MLKEQSKCPFTGSGTPSKHPTGKGTMNRDWWPNSLNLKILSQHSSLVNPMDKKFDYSKEFKKLNFKALKKDLKKLMTDSQDWWPADYGHYGGLFIRLAWHAAGTYRTGDGRGGAGTGNQRFAPLNSWPDNVNLDKARLLLWPIKKKYGKKISWADLFILVGNVALETMGFKTFGFGAGREDIWEPEEDIYWGSEKEWLGVNRYSGKRDLENPLGASHMGLIYVNPQGPDANPDPILAAHDIRETFGRMAMNDYETVALVAGGHTFGKSHGAASESHKGPEPEGSKIQEQATGWNSNYRSGKGVDTISSGLEGAWTQNPKKWDMGYFDNLFGYDWELTKSPAGA

SEQ ID NO: 89961 - protein, 413 aa, Unknown
  Bacterial polypetide isolated from the Sargasso Sea
LLWPIKQKYGKKISWADLLILAGNVAIESMGGKTFGFSGGRPDIWGPEEDIHWGVETGWLENNRYKGDRELDNPLAAVQMGLIYVNPQGPDGNPDPLASARDIRETFGRMAMNDEETVALVAGGHTFGKAHGASTEDHVQAEPEAAPLEEMGFGWTSSYGSGVGSDTITSGIEGAWTANPTQWDNGYFDLLFGYEWELTKSPAGAHIWHAVGQKEEDMAPDAEDASVKVPTMMTTADMAMREDPSYKEISKRFHENPDEFADAFARAWFKLLHRDMGPKTRYMGPEVPEEELIWQDPVPAGDSTYDVSAVKEKILNCGLSIQEMIETAWSSASTYRGSDMRGGANGARIRLEPQKNWEANNPDQLSKVLEIYEAIAEETGASVADVIVLAGNVAIEKASGIESSFTPGRGDAT

SEQ ID NO: 89962 - protein, 693 aa, Unknown
  Bacterial polypetide isolated from the Sargasso Sea
SSGTSNKDWWPNQLNLNILHQHDNKSNPMDEDFDYREEFKKIDYEALKKDLNDLMTDSQDWWPADYGHYGPFFIRMTWHAAGTYRNTDGRGGGGTGAQRFAPLNSWPDNGNLDKARRLLWPIKQKYGKKISWADLLILAGNVAIESMGGTTFGYSGGRPDIWGPEEDIHWGVESEWLENKRYKGERELDNPLAAVQMGLIYVNPQGPDGNPDPLASAHDIRETFGRMAMNDEETVALVAGGHTFGKSHGAGAEENVQSEPEAAPLEEMGFGWSSTFGSGMGSDTITSGIEGAWTANPTKWDNGYFDLLLGYEWELTKSPAGAHIWHAVGQKEEDMAPDAEDSSKKVPTMMTTADMALREDPSYKEISKRFHENPDEFADAFARAWFKLLHRDMGPKTRYMGPEVPEEELIWQDPVPSGNSEYDEDSVKKMITDSGLSIQEMIETAWASASTYRGSDMRGGANGSRIRLAPQKDWEANNPSQLKKVLDIYENISNESGASIADIIVLAGNVGIEIASGVEVPFTSGRGDASQEQTDIESFEVLEPKSDAFRNFHAKGVNTAPEEIMLDKAQLLGLTAPEMTVLVGGMRSLGISSNGYGVFTEDSNKLSNDYFKTLLDMSVQWKPNGTGNSYEAFDRSSGEKLRTASRSDLVFGSNSQLRAIVEVYAEDDSSEKFVNDFIFAWNKVMNADRFDVQ

SEQ ID NO: 89963 - protein, 417 aa, Unknown
  Bacterial polypetide isolated from the Sargasso Sea
LKILSQHSSMVNPMDEKFNYKKEFKKLNFKALKKDLHKLMTESQSWWPADYGHYGPLFIRLAWHAAGTYRTGDGRGGAGTGNQRFAPINSWPDNVNLDKARLLLWPIKKKYGKRISWADLFILVGNVALESMGFKTFGFGGGREDIWEPEEDIYWGSEKEWLANERYDSKRELENPLGAVQMGLIYVNPQGPDGNPDPLLAARDIRETFGRMAMNDYEIVALVAGGHTFGKSHGAAPESHKGPEPEGSKIQDQSTGWNSNYKSGLGADTISSGIEGAWTSNPIKWDMGYFDNLFGYEWELTKSPAGAHQWKPVKNGHAPNMTPDAHIKGKKNLPMMQTTDLSMRFDPEFGRISKHFHNNPDEFADAFARAWFKLTHRDMGPKVNYLGNEVPKEELIWQDPVPKNKFKLKNKDIETLK

SEQ ID NO: 89964 - protein, 511 aa, Unknown
  Bacterial polypetide isolated from the Sargasso Sea
MSSSSHRVLRHAIAAICVALSASPHAAELTRDTGAPVGDNENSQTAGPAGPVLLQDSALIEKLQRFDRERIPERVVHARGTGAFGEFVPTADISNLTKAKVFTPGTRTPVFVRFSTVMGYRGSPEQARDPRGFAVKFYTQQGNWDMVGINWPVFFIRDGIKFPDFVHANKPSAVTGVQDPNLAFDFFAHTPEATHMLTMLYTNAGMPDSYRHMDGFAVHAFKFVNARGDVHYVKFHWKSQQGVHGLRPQEIDASIGRDWNMMTNDLYGALKQGDFPKWDLYVQVLTPQDLNRFDFDALDDTKVWAGVPERKIGTMTLNRVPDNYFQSTEESAFAPSRLVPGIEPSEDRMLQDRLFAYADTQMYRLGANYMDLPINRPVVPVANNNQDGKMNAGDRKGEVNYEPSTLHELAPDPQYKSVRTALNGTTQQEAIHKKLRFRQAGEYYRGLSQQDKDDLITALSGDLGKVTNAHNQYAMLSYFYKADADYGTRLAQAVHADVGQVQALAAKLSEN

SEQ ID NO: 89965 - protein, 740 aa, Unknown
  Bacterial polypetide isolated from the Sargasso Sea
MKINTLPTLSALTLAMSLALGAGTATAQEQVTGNQFWWPEKLNLSPLRQNAIESNPYGSDYHYAEAFKTLDLDAVKKDIKALMTESQDWWPADYGHYGPFFIRMAWHSAGVYRIFDGRGGAAGGQQRFEPLNSWPDNVSLDKARRLLWPIKQKYGSKLSWGDLMVLTGNVALESMGFKTFGFAGGREDDWEAEMVNWGSEKAWLDSKRRNEKGELAKPMGATQMGLIYVNPEGPNGVPDPLASAKEIRDTFGRMAMNDEETVALIAGGHTFGKAHGAHDPAKCVGADPAAAGIEEQGLGWKNKCGKGHSEDTVTSGLEGAWSSNPTKWTMEYLTWLYTFDWVQTKSPAGHIQWTPADDKAANLVPDAHLPDKRHAPIMFTSDIALKEDPIYREITTRFLKNPKEFELAFAKAWFKLTHRDMGPKARYLGADVPAETLIWQDPIPALDHPLIDNADIKALGNKILASGLTVPELVRTAWASASSFRDTDMRGGANGARIRLEPMMNWQANNPKELAKVLAKLEKVQKDFNGSLKGGKKVSLADVIVLGGSVAVEKAAKEAGVMISVPFTPGRMDATQAQTDVNSFAVLEPAADGFRNYYSKDNSLSPAEMLIERANMLNLTVPEMTVLVGGLRALDANSAGVKHGVFTDKPGVLSNDFFVNLLDMSTKWSKSAKQEGIYEGQDRKSGKLKWTATPVDLIFGSHSELRAVAEVYGAQDGQDRFVQDFVKAWNKVMNADRFDI

SEQ ID NO: 89966 - protein, 383 aa, Unknown
  Bacterial polypetide isolated from the Sargasso Sea
MNGESKCPVSHGASDQHTNRAQTNKEWWPDQVNLSILHQHDKKTNPMDENFDYKEEFQNLDYDALKKDLNDLMTDSQDWWPADYGHYGPFFIRMTWHAAGTYRTADGRGGGGTGSQRFAPTNSWPDNTNLDKARRLLWPIKQKYGNKISWADLIILTGNVAIESMGGKTFGFGGGRVDIWGPEDDIFWGKETEWLANERYTGDRVLDQPLGAVQMGLIYVNPQGPDGNPDPVASARDIRETFGRMAMNDYETVALTAGGHTFGKAHGAASEDHKAVEPEGADVDKMGFGWHSDHGKGMGRDTITSGIEGAWTPNPTQWDNGYFDMLFGYEWELVKSPAGAHQWHPIDPKDEDMAPDVENSSQKVTTIMTTADMAMREDPEYRK

SEQ ID NO: 89967 - protein, 516 aa, Unknown
  Bacterial polypetide isolated from the Sargasso Sea
QNKRYTGDRILDNPLAAVQMGLIYVNPEGPDGKADPLASAKDIRETFARMAMNDTETVALTAGGHTFGKAHGAGDPALVGAEPEGAPLEQMGLGWNNLHGSGVGRDATTSGIEGPWTANPTQWDNGYFDLLLGYEWKLVKSPAGAQIWHAIDQKEEHMAPQVDDPSIKVPTMMTTADMAMREDPEYRKVSEKFHKDPEYFADQFARAWFKLLHRDMGPKTRYIGPEVPEEELIWQDPVPKGHSNYDVEAVKAKIINSGLTTQEMVETAWASASTFRGSDMRGGANGARIRLAPQKDWEVNKPEQLKKVLGILEPIAKDTGASIADVIVLAGNVGVEQASGMEVPFTPGRGDTTQDKTDIDSFGVLEPEADAFRNYLKMNYDVTAEELMLDKAQLLGLTAPEMTVLVGGMRSMGISSDQRGLFTETGGKLTNDFFDKLLDMGVSWKPTGSNSYEATDKITGEKVRTASRVDLVFGSNSQLRAIAELYASDDSEEKMKKDFIKAWNKVMNADRFDLEQ

SEQ ID NO: 89968 - protein, 478 aa, Unknown
  Bacterial polypetide isolated from the Sargasso Sea
TFARMAMNDEETVALTAGGHTIGKTHGNGNADNLEAEPEGAAINEQGLGWMNNTSRGVGRDTVTSGIEGAWTTEPTKFDNGYFDMLFKYEWELKKSPAGAWQYEPINIKEEDKPLDVEDPSIRYNPIMTDADMAMIKDPIYLEISKKFHNDHEYFCDAFARAWFKLTHRDMGPRSRYIGHDLPNEDLIWQDPVPAGTPSFDVEQLKEKIRNSELTVQELVSTAWDSSRTFRGSDLRGGANGARIRFSPQKNWKGNEPQRLSKVLDILEPLAKEAGASIADTIVLAGNVGLEKAIESAGFNVPVPFNPGRGDASEDMTDSESFSQLEPIHDGFRNWQKDNYEVRGEELLLDRAHLLGLTAVEMTVLVGGMRALGANYGENKHGVFTDQVGALTTDFFVNLLDMSNKWKASNGHYEIIDRKTNNVKWTATSTDLVFGSNSILRSYAEVYAQDDNKEKFVIDFVKAWNKVMNADRFELNNN

SEQ ID NO: 89969 - protein, 766 aa, Unknown
  Bacterial polypetide isolated from the Sargasso Sea
MTINRFKKTTVSVLVALSLSATGAIANDQISKPAGAKGTGTAKAFQAKNNQFWWPDQLDLSPLRDHDNRSNPLGDDFSYAKAFAKLDLDEVKKDVNELLTTSQDWWPADFGNYGPFFIRLSWHSAGTYRTLDGRGGGDGGQMRFDPLNSWPDNGNLDKARRLLWPIKQKYGESLSWGDLMILAGTVGMENMGFDTYGFAGGRTDDWEPDMVYWGPEVEMLASDREERDGKLQRPLGATHMGLIYVNPEGPKGVPDPMGSAKNIRTAFGRMAMNDEETVALIAGGHTFGKMHGAHKPADCLEAEPGGAGLEEQGLGWKNNCGKGNAEDTVTSGLEGAWTQLPTKWTSLYLQNLLGFEWKQTRSPAGAIQWIPTDESLHKSVPDAHVEGKKNPPVMTTADLALKYDPEYRKIAERFLADPKEYQTAFAKAWFKLTHRDMGPKARYLGNDIPEENFIWQDPVPKADYKMISDKDVKKLKADILDSGLTVQQLVKTAWAAASSFRASDLRGGANGARIALEPQMSWEANEPETVKAVVSKLKEMQEDYNSRMFSKKKVSLADLIVIGGAAAIEKAAADAGVKVTVPVVPGRTDATQEQTDVNSFSLLEPTADAFRNYYNAEASYRSPTDMLVDKADQLNLTVPEMTVLLGGLRSLGANTGGTSHGVFTDNVGTLNNDFFVTLLDMGVKWRKTDNPSVYEGVNRSTGEVMYTGTPVDLVFGSNSELRAVAEVYAYDNAKSRFVKDFVDAWTKVMTLDRFDLRHDLNASLGK

SEQ ID NO: 89970 - protein, 390 aa, Unknown
  Bacterial polypetide isolated from the Sargasso Sea
HFNRERIPERVVHARGSAAYGTFTLTKSLSDYTIADFLQKEGQKTDVFLRFSTVGGGQDSSDYARDPRGFSVKFYTEQGNWDMVGNNTPVFFLRDGIKFPDFIHSQKKNPRTNLPDPQAVYEFWANNPQSLHQSTILMSDRGIPLSYRHVNGYSSHTLSFWNNAGERYWVKWHFKTNQGIKTLTSEEAAKMPAYGAQQDLVESIDNGEFPSWTVNVQIMNEEEARNYHINPFDLTKVWPHSDFPLIEVGQLELNRNVDNYFAETEQAAFAPSNLVPGIGASPDRMLQARLIGYQDAHRYRIGANYNQIPVNAPRCPVHNYQRDGAFAGINPALAGSGANFYPNNRARVGEPAEAPEVQEPPMPLEQDAWLDIYDNRDEDNYSQAGDLFRI

SEQ ID NO: 89971 - protein, 430 aa, Unknown
  Bacterial polypetide isolated from the Sargasso Sea
LFCCSDIRETFGRMAMNDYETVALVAGGHTFGKSHGAAPESHKGPEPEGSRIQEQATGWNSNYKSGLGVDTISSGIEGAWTSNPIKWDMGYFDNLFNYDWELTKSPAGAHQWKPKQNGHDIEMTPDAHLREKRNLPMMQTTDLSLKMDPKYGPISRHFHNNPKEFADAFAKAWFKLTHRDMGPRTCYLGKEVPKEELIWQDPIPKAKYKLKNKDIKFLKTRILKSELSISQLVSTAWASASTFRGSDKRGGANGARIRLEPQKNWEVNNPIQLSKVIKNLEKIKKDFDKKNKTVSISDLIVLGGCVGIEKAAKKGGYKVNVPFTSGRGDATQDQTDIYSFGLLEPKADGFRNYIINKTNGSSKKLTVSSEEMLVDRAQLMKLTAPEMTVLVGGMRVLNTNFDRSNYGIFTKRPETLSNDFFVNLLDMETT

SEQ ID NO: 89972 - protein, 709 aa, Unknown
  Bacterial polypetide isolated from the Sargasso Sea
MSKDNESKCPVMHGALTTNSASGTSNKDWWPNQLDLSILHQHDQKSDPMDDGFDYREEFKKLDFDALKKDLNDLMTDSQDWWPADYGHYGPFFIRMTWHAAGTYRIGDGRGGGGTGNQRFAPLNSWPDNGNLDKARRLLWPVKKKYGNKISWADLLILAGNVAIESMGGKTFGFGGGRPDIWAPEEDIDWGAEREWLANERYSGERDLANPLGAVQMGLIYVNPQGPDGEPDPIASGKDVRETFSRMAMNDEETVALVAGGHTFGKGHGAGPEEHVSAEPEGASLENMGFGWMSDHKSGMGSDTITSGFEGAWTAKPTTWDNGYFDLLFGYEWEKVETPSGKIVWHAIDQKDEDMAPDAEDPSVKVPTMMTTADMSMREDPIYREISKRFHENPDEFADAFARAWFKLLHRDMGPRSRYLGPEVPDEELIWQDPVPQGNNDYDVDAIKAKLSNCGLSIQEMVETAWASASTFRGSDLRGGANGSRIRLAPQKDWEANKPEQLARVLGVYESIASESNASLADVIVLGGNVGIEKASGAQVPFTPGRGDASEEQTDADSFDALEPIADGFRNFQKEGSSLPSEEMMLDKAQLLGLTAPEMTVLIGGMRALGISSNNHGVFTETPGKLTNDFFVNLLDMGVEWKSTGENSYEAIDRQSGDKVRTATRVDLVFGSNSQLRAIAEVYASDDSKEKFVSDFVSAWTKVMNADLT

SEQ ID NO: 89973 - protein, 712 aa, Unknown
  Bacterial polypetide isolated from the Sargasso Sea
MSNATENENKCPVMHGAMTSNSSTGTANKDWWPDQLNLGILHQHDRKSNPLGEDFDYREEFKKLDYDSLKKDLNDLMTDSQEWWPADYGHYGPFFIRLTWHAAGTYRSTDGRGGGGTGSMRFAPLNSWPDNGNLDKARRLLWPIKQKYGNKISWADLLILSGNVAIESMGGKTFGFSGGREDIWGPEEDILWGAEKEWLTNSRYKGERELDNPLAAVQMGLIYVNPQGPDGNPDPLASAKDIRETFGRMAMNDEETVALIAGGHTFGKAHGASLESNVGVEPEGAPLESMGFGWKNEHGSGVGGDAITSGLEGAWTADPIKWDNGYFDLLFGYEWELGKSPAGAHQWFAKDQKEEDMAPEAHDSSKKVPTMMATTDIALREDPIYKEISKRFHENPDEFADAFARAWFKLLHRDMGPITNYIGPEAPTEELIWQDPVPVGNKDYDINSVKSKIDEAGLSIQELVETAWASASTFRGSDLRGGANGARIRLEPQKNWEVNKPEQLEKVLSAYENISSETGVSVADIIILGGNLGIEKASGKSVDFTPGRGDSSQDQTDIDSFSYLEPLSDGFRNYHRDGLDVRAEEMMLDRAQLLGLTAPEMTVLLGGLRSLGITHNGYGNFTEDPNELTNDHLVKLLDMSVSWQPNGTGNSFESVDRESGEKVSSASRVDLVFGSNSQLRAITELYAQEDSKEKFVSDFISAWNKVMNSDLY

SEQ ID NO: 89974 - protein, 601 aa, Unknown
  Bacterial polypetide isolated from the Sargasso Sea
MSAESKCPFTGVGTPPKFPTGRGTSNRDWWPNSLNLKILSQHSSLVNPMDKKFNYQKEFKKLNYKALKKDLHKLMIDSQDWWPADYGHYGPLFIRLSWHAAGTYRTGDGRGGAGTGNQRFAPLNSWPDNVNLDKARLLLWPIKKKYGNKISWADLFILVGNVALESMGFKTFGFGAGREDIWEPEDDIYWGSEKEWLGVNRYSGKRELENPLGASHMGLIYVNPQGPDANPDPLLAAHDIRETFGRMAMNDYETVALVAGGHTFGKSHGAAPESHKGPEPEGSKIQDQATGWNSNYKSGLGADTISSGIEGAWTSNPIKWDMGYFDNLFGYDWELTKSPAGAHQWKPKQNGHDVNMTPDAHIKSKKNLPMMQTTDLSLKMDPSYGPISKKFHNNPKEFADAFARAWFKLTHRDMGPKACYLGPEVPKEQLIWQDPIPKAKYKIKNNDIKGLKAKILKSGLSISDLVSTAWASASTFRGSDKRGGSNGARIRLEPQKNWEVNNPIQLSKVIKTLEKIKNKFDTKKKNVSLADLIVLGGCAAIEKAAKKSGNNINVPFTPGRGDALQDQTDTYSFGLLEPKADGFRNYIVNKSNGSSTKQTVS

SEQ ID NO: 89975 - protein, 334 aa, Unknown
  Bacterial polypetide isolated from the Sargasso Sea
MSNELIKEQSKCPFTGVGTPPKHPTGKGQTNKDWWPNSLNLKILSQHSSLVNPMGEKFNYKKEFKKLNFKALKKDLHKLMTDTQAWWPADYGHYGPFFIRLAWHAAGTYRTGDGRGGAGTGNQRFAPLNSWPDNVNLDKARLLLWPIKKKYGKKISWADLFILVGNISLESMGFKTFGFGAGREDIWEPEEDIYWGSEKEWLGVNRYSGKRELENPLGASHMGLIYVNPQGPDANPDPYLAAYDIRETFGRMAMNDYETVALVAGGHTFGKSHGAAAESHKGPEPEGSKIQDQATGWNSNYKSGLGVDTISSGIEGAWTSNPIKWDMGYFDNLL

SEQ ID NO: 89976 - protein, 307 aa, Unknown
  Bacterial polypetide isolated from the Sargasso Sea
IWQDPIPKAKYKIKNKDIKALKAKILKSGLSISELVSTAWASASTFRGSDKRGGANGARIRLEPQKNWEVNNPTQLSKVIKTLEKIKNKFDNKKKNVSLADLIVLGGCAAIEKAAKKSGSNINVPFVPGRGDASQAQTDIYSFSLLEPKADGFRNYIVNKSNGSSTKPTVSAEEMLVDKAQLMKLTAPEMVVLLGGMRVLNTNFDKSNNGIFTKKPETLTNDFFLNLLDMNTTWKETDKNESLFEGKDRKTNKVKWNGTRVDLIFGSNSQLRAIAEVYATEDSKSKFINDFVAAWSKVMNLDRFDLK

SEQ ID NO: 89977 - protein, 390 aa, Unknown
  Bacterial polypetide isolated from the Sargasso Sea
KKNGHTIEMVPDAHDKNKKHLPMMLTTDLSMRMDPKYGPISKHFYNNPKEFADAFARAWFKLTHRDMGPRACYLGPEVPKEKLIWQDPISKPKYKLKNKDIKILKMKILKSGLSISQLVSTAWASASTFRGSDKRGGANGARIRLEPQKNWEVNNPPQILKVIKTLQKIKKKFDNKIKSVSLADLIVLGGNTAIEKAAKKAGHNIKVPFRAGRGDASQDQTDINSFGLLEPKADGFRNYMTTKTNGSSIKPTVSAEEMLVDKAQLLRLTAPEMTVLVGGMRVLNTNFDKSNHGVLTKKTEILTNDFFVNLLDMGTTWKEVDSSEQLFKGRDRKSNKVKWLASRVDLIFGSNSQLRAISEVYAQEDSKSKFVNDFASAWTKVMNLDRFDFN

SEQ ID NO: 89978 - protein, 371 aa, Unknown
  Bacterial polypetide isolated from the Sargasso Sea
EGTTNRDWWPNQLDISILHQHDEKSNPMEKDFNYREHFKKIDYDGLKKDLNELMTNSQDWWPADYGHYGPFFIRMTWHAAGTYRTADGRGGGGTGAQRFAPLNSWPDNGNLDKARRLLWPIKQKYGNQISWADLIILAGNIAIESMGGKTFGFSGGRPDIWAPEQDIYWGLETEWLTNKRYSGDRVLENPLAAVQMGLIYVNPEGPDGNPDPLASARDIRETFGRMAMNDEETVALTAGGHTFGKAHGAGDAGLVGPEPEGAPLEEMGFGWISKHASGKGSDSITSGIEGAWTTNPTKWDNGYFDLLLGYDWKLTKSPAGANIWHAVDQKEEHMAPDAEDASKKVPTMMTTADMAMREDPEYRKISEHFHK

SEQ ID NO: 89979 - protein, 539 aa, Unknown
  Bacterial polypetide isolated from the Sargasso Sea
MTSNNSTGQSNKDWWPDQLNLNILHQHDRKSNPLGEDFDYKEEFKKLDYFALKQDLNDLMTDSQDWWPADYGHYGPFFVRLTWHAAGTYRSTDGRGGGGTGAMRFAPLNSWPDNGNLDKARRLLWPIKQKFGNKISWADLLILAGNVAIESMGGKTYGFSGGRDDIWGPEEDILWGVEEEWLENQRYKGERELDNPLAAVQMGLIYVNPQGPDANPDPLASAHDIRETFGRMAMNDYETVALVAGGHTFGKCHGAGDAELVEAEPEGAPIEQMGLGWTNKHGSGLGADSITSGLEGAWTTNPIKWDNGYFDLLFKYEWKLGKSPAGAHQWYAVDQAEEDMAPSAHDPSIKEPTIMATTDIALREDPEYNKISKHFHENPDEFADAFAKAWFKLLHRDMGPKANYIGPEVPEEDLIWQDPVPAGNSDYDVSAVKSKIDDLGLSIQEMAETAWASAFTYRGSDLRGGANGARLRLAPQKDWEVNKPDQLSKVLSAYEGVSKDTGVSMADIIVLGGNLAIEKASGSEVPFSPGRGDASQDQT

SEQ ID NO: 89980 - protein, 395 aa, Unknown
  Bacterial polypetide isolated from the Sargasso Sea
QGNWDLVGNNFPVFFIRDAIKFPDMVHAFKPSPVTNKQEPKRIFDFFSHVPESTHTLTMLFSDYGTPASYLNMDGSGVHAFKFVDDEGNYKYVKFTWKSNQPIKNFTNEEAMKVQGMDMQPHTTDIYTRIGEKGETASWDLYLQELEPEQLDDFEFNPLDTTKIWPESLVPAKKIGRLVLNRVPDNFFEETEQAAFAPSNLIPGIEPSEDRMLQGRLFSYADTQRYRLGVNAYRIPVNSPKNAVINNHEQHGQLRTTSTARDVNYQPSRRLDLNEDPAFRYSSKPLAGMTQQIPFYKEQNFKQAGEFFRKLTKEGQQNLINNLGGALASVPEEEIRVIISAYMYNADKDYGKGVAKLAKAPIAKVRQTAKDLMEQQAARAAKAKQVAESLTALMQ

SEQ ID NO: 89981 - protein, 710 aa, Unknown
  Bacterial polypetide isolated from the Sargasso Sea
MSDDNKCPVSSGPNKKTSVGAASNQDWWPNQLNLSMLHQHDTKSDPMNEDFDYREEFKKLDYEALKKDLNILMTDSQAWWPADYGHYGPFFIRMTWHAAGTYRTGDGRGGGGTGAQRFAPLNSWPDNGNLDKARRLLWPVKQKYGNKISWADLLILAGNVAIESMGGKTFGFGGGRPDIWAPEEDIYWGIEKEWLGNERYTGERDLENPLAAVQMGLIYVNPEGPDGNPDPLASAKDIRETFGRMAMDDAETVALTAGGHTFGKAHGAGDANLVGVEPEGAEIEEMGFGWKSTHGSGKGSDTITSGIEGAWTTNPTKWDNGYFDLLLNNEWELVKSPAGANQWHIVNPKDEDLAPDAGDDKKRVPTMMTTADMAMREDPNYRKVSERFHKNPDEFADAFARAWFKLLHRDMGPKVRYLGPEVPEEDLIWQDPIPTGNSDFDVELVKEKILASDLSIQEMIETAWASASTFRGSDMRGGANGARLRLAPQKDWEANKPEQLANVLGVLENIASEAGASVADVIVLAGNVAIEKASGVEVPFMGGRGDAINEHTDAESFEVLEPHADGFRNYQKTEFSVTPEEMLIDKAQLLGLTAPEMTVLVGGLRSLGVSANGHGIFTDDINTLSNDFFTTLLDMNVEWKPSGKNSYEAKDRVSGEKVRTASRVDLVFGSNSQLRAIAEVYAEDNSKDKFVNDFISAWNKVMNADRFDLD

SEQ ID NO: 89982 - protein, 193 aa, Unknown
  Bacterial polypetide isolated from the Sargasso Sea
MKDLTGKCPVMHGAATTGITGTTNSDWWPNQLNLNILRQHDRKSNPLGDDFDYRDEFLKLDYKSLKNDLNALMTDSQSWWPADYGHYGPFFIRMTWHAAGTYRTGDGRGGGGTGAQRFAPLNSWPDNGNLDKARRLLWPIKQKYGNQISWADLLILAGNVAIESMGGKTFGFAGGRPDIWHPEEDIYWGAENE

SEQ ID NO: 89983 - protein, 343 aa, Unknown
  Bacterial polypetide isolated from the Sargasso Sea
MDVESKCPVMHGANTKNTGEGTTNRDWWPNQLDISILHQHDEKSNPMEKDFNYREHFKKIDYDGLKKDLNELMTNSQDWWPADYGHYGPFFIRMTWHAAGTYRTADGRGGGGTGAQRFAPLNSWPDNGNLDKARRLLWPIKQKYGNQISWADLIILAGNIAIESMGGKTFGFSGGRPDIWAPEQDIYWGLETEWLTNKRYSGDRVLENPLAAVQMGLIYVNPEGPDGNPDPLASARDIRETFGRMAMNDEETVALTAGGHTFGKAHGAGDAGLVGPEPEGAPLEEMGFGWISKHASGKGSDSITSGIEGAWTTNPTKWDNGYFDLLLGYDWKLTKSPAGANIW

SEQ ID NO: 89984 - protein, 484 aa, Unknown
  Bacterial polypetide isolated from the Sargasso Sea
CWTYRTGDGRGGAGTGNQRFAPLNSWPDNVNLDKARLLLWPIKKKYGKKISWADLFVLIGNVALESMGFKTFGFGAGREDIWEPEEDIYWGSEKEWLGVNRYSGKRELENPLGASHMGLIYVNPQGPDANPNPLLAAHDIRETFGRMAMNDYETVALVAGGHTFGKSHGAAPESHKGPEPEGSKIQEQATGWNSNYKSGLGADTISSGIEGAWTSNPIKWDMGYFDNLFGYEWELSKSPAGAHQWKPIKNGKAINMTPDAHIKSKQNLPMMQTTDLSLKLDPSYGPISRHFHNNPKEFADAFARAWFKLTHRDMGPRACYLGPEVPKEKLIWQDPISKPNYKIKNKDIKFLKKKILKSRLSVSQLISTAWASASTFRGSDKRGGANGARIRLEPQKSWSVNNPSQLSKVIKILEKIKKSFDNKNKNVSMADLIVLGGSVGIEKAVKNAGYKINVPFTPGRGDATQDQTDTHSFDLLEPKADGFR

SEQ ID NO: 89985 - protein, 494 aa, Unknown
  Bacterial polypetide isolated from the Sargasso Sea
MLAQPAYAVDMTQDSGSPVGDNQNSQTAGPEGPVLLQDSHLIEKLQRFDRERIPERVVHARGTGIFGEFVPTTNISALTTAQVFKPGSKTPVFVRFSTVMGYRGSPEQARDPRGFAIKFYTQQGNWDMVGINWPIFFIRDAIKFPDFVHANKPSAVTGVQDPNLAFDFFAHTPEATNMLTHLYTDEGMPDSYRHMDGYGVHAFKFVNAKGEVHYVKFHWKSRQGIQGIRPQDIPHSIGADWNLMTNDLYNSVKAHSYPQWDLYIQVLSPKDLDKFDFDPLDDTKVWPTSIPEQKVGTMTLNRVPDNYFESTEESAFAPSRLVPGIEPSEDRMLQGRLFAYADTQMYRLGPNYNQLPINRPIVPVYNNNQDGLMNEGDRKGEVNYEPSGIAEIAQQDKYKSVQTPLQGTTQQKAIHKTLDFRQAGEYYRTLSEADKADLITSLSGDLGRVTNDANKYAMLSYFYKADTDYGTRLARATHADVARVQDAAAHLSDN

SEQ ID NO: 89986 - protein, 728 aa, Unknown
  Bacterial polypetide isolated from the Sargasso Sea
MDKTQHSQGKCPVMHGANSAVASNNMDWWPKALNLDILHQHDKKTDPMDPNFNYREAFKTLDLAAVKQDLHSLMTDSQDWWPADWGHYGGLMIRMAWHSAGTYRIADGRGGAGTGNQRFAPLNSWPDNANLDKARRLLWPIKKKYGNKLSWADLMILAGNVAYESMGLKTYGFAGGREDIWHPEKDIYWGSEKQWLAPSDNPNSRYSGARDLENPLAAVMMGLIYVNPEGVDGKPDPLRTAQDVRVTFARMAMNDEETVALTAGGHTVGKCHGNGKAQDLGPEPEGEELEAQGLGWLNKKGPGTGANAVTSGLEGAWTTHPTQWDNGYFHLLLNYDWELKKSPAGASQWEPINIKEEDKVVSVGDPNRKFNPIMTDADMAMKMDPEYRKISEKFYQDPAYFSEVFARAWFKLTHRDLGPKSRYLGPEVPNEDLLWQDPIPSVDYRLDASEIVDLKAKLLASGLSVSELVATAWDSARTFRGSDFRGGANGARIRLAPQKDWQANEPERLQKVLQVLSALQASLSKKVSIADLIVLGGAAAIEKAAHAAGVNITVPFMPGRGDATQEMTDVESFAVLEPLHDAYRNWQKKDYVVQPEEMMLDRTQLMGLTAHEMTVLVGGMRVLGTNYGGTRHGVFTDKVGVLTNDFFVNLTDMANNWKPAGTNLYEIVERKTGAVKWTATRVDLVFGSNSILRSYAEVYAQDDAKEKFVHDFVAAWTKVMNADRFDLA

SEQ ID NO: 89987 - protein, 281 aa, Unknown
  Bacterial polypetide isolated from the Sargasso Sea
MTGKCPVMHGALTKSAAGGTSNRDWWPNQLNLNILHQHSSLSDPMDQPFNYAEAFQKLDLAAVKQDLYALITDSQDWWPADYGHYGPLFIRMAWHSAGTYRTSDGRGGASSGSQRFAPLNSWPDNGNLDKARRLLWPVKQKYGNQLSWADLMILAGNCALESMGFKTFGFAGGREDIWAPEEDIYWGVETEWLGDKRYAGDRQLENPLAAVQMGLIYVNPEGPNGNPDPVASARDIRETFARMAMDDEETVALVAGGHTFGKCHGAGDPTLVGAEPEAAPL

SEQ ID NO: 89988 - protein, 353 aa, Unknown
  Bacterial polypetide isolated from the Sargasso Sea
LAAVQMGLIYVNPQGPDGNPDPLASARDIRETFGRMAMNDEETVALVAGGHTFGKAHGASTEDHVQSEPEGAPLEEMGFGWTSSYGSGVGSDTITSGIEGAWTANPTQWDNGYFDLLFGYEWELTKSPAGAHIWHAVGQKEEDMAPDAEDASAKVPTMMTTADMAMREDPSYKEISKRFHENPDEFADAFARAWFKLLHRDMGPKTRYMGPEVPEEELIWQDPVPAGDSTYDVSAVKEKILNCGLSIQEMIETAWSSASTYRGSDMRGGANGARIRLEPQKNWEANNPDQLSKVLEIYEAIAEETGASVADVIVLAGNVAIEKASGIEVPFTPGRGDATQENTDIESFEVLEP

SEQ ID NO: 89989 - protein, 713 aa, Unknown
  Bacterial polypetide isolated from the Sargasso Sea
MTDKVEGKCPVMHGAMTTHSSSGTSNKDWWPNQLNLNILHQHDVKSNPMDDDYDYRKEFEKIDYDALKKDLTDLMTDSQDWWPADYGHYGPFFIRMTWHAAGTYRNTDGRGGGGTGAQRFAPLNSWPDNGNLDKARRLLWPIKQKYGKKISWADLLILAGNVAIESMGGTTFGYSGGRPDIWGPEEDIHWGIESEWLENKRYKGERELDNPLAAVQMGLIYVNPQGPDGNPDPLASAHDIRETFGRMAMNDEETVALVAGGHTFGKAHGAGAEDHVQSEPEGAPLEEMGFGWSSTYASGVGSDTITSGIEGAWTANPTQWDNGYFDLLFGYDWELTKSPAGAHIWHAVGQTEEDMAPDAEDSSKKVPTMMTTADMALREDPIYNKISKRFHENPDEFADAFARAWFKLLHRDMGPKTRYMGPEVPQEELIWQDPIPVGSSEYDIEAVKQLIVDSGLSIQEMVETAWASASTFRGSDMRGGANGARIRLAPQKDWEVNNPSQLNKVLEVYQEISNKSGASIADIIVLAGNVGIEIASGVNVPFTPGRGDASQDQTDVESFEVLESKSDAFRNFHAKGINTPPEEIMLDKAQLLGLTAPEMTVLVGGMRSLGISSNGYGLFTEDSNKLSNDYFKTLLDMSVQWKPNGTGNSYEAFDRSSGEKVRTASRSDLVFGSNSQLRAIVEVYAEDDSSEKFVKDFVHAWNKVMNADRFDVQ

SEQ ID NO: 89990 - protein, 486 aa, Unknown
  Bacterial polypetide isolated from the Sargasso Sea
MSQQYLTSQSGSPIADDQNSLSAGERGPLLLQDWHLIEKLAHFNRERIPERVVHAKGTGVYGTFTLTKDLSEYTIADHFNGVGKQTETFVRFSTVGGEMGSADAERDPRGFGLRFYTARGNHDIVGNNTPTFFLRDGIKFPDFIHTQKRNPLTNLKDPQAMWDFWSLNPEAMHQVTILMSDRGIPANYRQMHGYGSHTFSFWNAKGERFWVKFHFKSQQGVVNLTNEQADKLKGIDPDSSQRDMVVAVTDGNFPRWTVNVQIMPESDANTYHINPFDLTKVWPHGDYPLIEIGVLELNRLPQNYFAEVEQVALAPSNLVPGVGASPDKMLQARLFAYADAQRYRIGANYNQLPVNCPHATKANHHQRAGAMAGTQCPYHGSQTGGDAAANYGPNSTAGALVEPANFAEPPLRLDGEAARYSRYNQDDYTQAGNLYRIFSEAEKARLVETISGSLRQASLDVQQRMLAHFHKADADYGQRIQTALGL

SEQ ID NO: 89991 - protein, 435 aa, Unknown
  Bacterial polypetide isolated from the Sargasso Sea
TYRTGDGRGGAGTGNQRFAPIGSWPDNVNLDKARLLLWPVKKKYGKRISWADLFILVGNVALESMGFKTFGFGAGREDIWEPEEDIYWGSEKEWLGNNRYNSKRELENPLGAVQMGLIYVNPQGPDGNPDPLLAARDIRETFGRMAMNDYEIVALVAGGHTFGKSHGAAPESHKGPEPEGSKIQEQATGWNSNYKSGLGADTISSGIEGAWTSNPIKWDLGYFDNLFGYEWELSKSPAGAHQWKPKQNGQAINMTPDAHIKGKKNLPMMQTTDLSMRFDPEFGRISKHFHENPDEFADAFARAWFKLTHRDMGPKVNYLGGEVPKEDLIWQDPVPKNKIKLKNKDIESLKSKISKSGLSTSQLVSTAWASASTFRGSDKRGGANGSRIRLAPQKNWKVNNPSQLSKSIKVYEKIQKGFNSKKKYVSLADLIVLGG

SEQ ID NO: 89992 - protein, 693 aa, Unknown
  Bacterial polypetide isolated from the Sargasso Sea
MSDNDNKCPVIHGSLTSNSSSGTSNRDWWPDQLDLNILHQHDKKSDPMDQDFDYSEEFKKLDYDSLKKDLNDLMTDSQDWWPADYGHYGPFFIRMTWHAAGTYRIGDGRGGGGTGAQRFAPLNSWPDNGNLDKARRLLWPIKQKYGKQISWADLLILAGNVAIESMGGKTFGFGGGRPDIWAPEEDIHWGAETEWLTNERYSGERDLANPLGAVQMGLIYVNPQGPDGNPDPKASAVDIRETFGRMAMNDEETVALVAGGHTFGKGHGAGPDDNVGPEPEGASMEEMGFGWTSSYGSGKGSDTITSGHEGAWTANPTQWDNGYFDLLFKYEWEQVTTPAGAIVWHAIDPAEEDLAPDAEDPSKKVPTMMTTADMALREDPDYNKISKRFHENPDEFADAFARAWFKLLHRDMGPKSRYLGPEVPQEELIWQDPVPAGNSDYDISAVKAKISESDLTIQEMVETAWASASTFRGSDIRGGANGARIRLSPQKDWEVNKPEQLSKVLGVLENIASETGASIADTIILAGNVGLEKATGAEVPFTPGRGDASQDQTDVESFAVLEPISDAFRNFHKSDCPVNSEQMMLDKAQLLGLTAPELTVLVGGMRSLGISSSGDGVFTSNSDELGNDFFMNLLDMNTEWKPSGDNSYEGSNRSTGDKVNTASRADLVFGSNSQLRAIAEVYASDDSKEKICI

SEQ ID NO: 89993 - protein, 387 aa, Unknown
  Bacterial polypetide isolated from the Sargasso Sea
MDDIGKCPVMHGSATTNSGVSTSNRDWWPNQLNLSILHQNDKRSNPMSLDFDYREEFKKLDYQALKKDLNDLMTDSQEWWPADYGHYGPFFIRMTWHAAGTYRTSDGRGGGGTGDQRFAPLNSWPDNGNLDKARRLLWPIKQKYGNKISWADLFILTGNVAIESMGGKTFGFSGGRADIWSPPEDIYWGQENEWLENKRYSGDRELEMPLGAVQMGLIYVNPQGPDGNPDPLKSARDIRETFARMAMNDEETVALTAGGHTFGKAHGASDPDKYVGAEPEGAPIEQMGFGWQNSFGSGVGRDTITSGIEGAWTANPTQWDNGYFDLLLGYEWELVKSPAGAYQWHPINPKQEDLAPDAQDGSIKVTTMMTTADMAMREDPSYKVISK

SEQ ID NO: 89994 - protein, 445 aa, Unknown
  Bacterial polypetide isolated from the Sargasso Sea
MTDKSEGKCPVMHGAMTTNSSSGTSTRDWWPNQLNLNILHQHDKKSNPMDEDFDYREEFKKIDYEALKKDLNELMTDSQDWWPADYGHYGPFFIRMTWHAAGTYRNTDGRGGGGTGAQRFAPLNSWPDNGNLDKARRLLWPIKQKYGKQISWADLLILAGNVAIESMGGTTFGFSGGRADIWGPEEDIHWGVESEWLENKRYKGERELDNPLAAVQMGLIYVNPQGPDGNPDPLASAHDIRETFGRMAMNDEETVALVAGGHTFGKAHGAGAEDHVQSEPEGAPLEEMGFGWTSTYASGVGSDTITSGIEGAWTANPTQWDNGYFDLLFGYEWELTKSPAGAHIWHAVGQTEEDMAPDAEDASKKVPTMMTTADMALREDPSYKKISKRFHENPDEFADAFARAWFKLLHRDMGPKSRYMGPEIPVEELIWQDPVPLGNSDYNIE

SEQ ID NO: 89995 - protein, 426 aa, Unknown
  Bacterial polypetide isolated from the Sargasso Sea
MNGDAKCPVSHGSSDQHTNSARTNKEWWPEQVNLNILHQHDTKTNPMNEDFDYSKEFKQLDYEALKNDLNNLMTDSQEWWPADYGHYGPFFIRMTWHAAGTYRITDGRGGGGTGSQRFAPTNSWPDNTNLDKARRLLWPIKQKYGNKISWADLIILTGNVAIESMGGRTFGFGGGRVDIWGPEEDIFWGKETEWLANERYTGDRVLDQPLGAVQMGLIYVNPQGPDGNPDPLASAKDIRETFGRMAMNDYETVALTAGGHTFGKAHGAASEDFKGPEPEGASVDEMGFGWKSGHGKGMGRDSITSGIEGPWTPNPTKWDNGYFDMLLNYEWELVKSPAGAHQWHPVNPKDEDLAPDVEDSTQKVTTIMTTADMAMREDPSYKEISKHFHANPDEFADAFAKAWFKLLHRDMGPKVRYLGPEVPNED

SEQ ID NO: 89996 - protein, 432 aa, Unknown
  Bacterial polypetide isolated from the Sargasso Sea
MSGELIKEQSKCPFTGAGTPPKHPTGKGTSNRDWWPNSLNLKILSQHSSLVNPMDKKFDYAREFKKLNFKALKKDLYKLMTDSQDWWPADYGHYGPLFIRLAWHAAGTYRTGDGRGGAGTGNQRFAPLNSWPDNVNLDKARLLLWPIKKKYGKKISWADLFILVGNISLESMGFKTFGFGAGREDIWEPEEDIYWGSEKEWLGVNRYSGKRDLEQPLGASHMGLIYVNPQGPDANPDPLLAAHDIRETFGRMAMNDYETVALVAGGHTFGKSHGAAPESHKGPEPEGSKIQEQATGWNSNYKSGLGVDTISSGIEGAWTSNPTKWDMGYFDNLFGYDWELTKSPAGAHQWKPKRNGHDIEMTPDAHEKSKKNLPMMQTTDLSLKMDPNYGPISRHFHNNPKEFADAFGRAWFKLTHRDMGPRACYLGPDVPK

SEQ ID NO: 89997 - protein, 719 aa, Unknown
  Bacterial polypetide isolated from the Sargasso Sea
PAKFSAGRGQTVRDFWPNSLNLKILSQHSNLSNPMDKKFNYAKEFKKLNYKALKKDLKKLMTDSQEWWPADYGHYGPLFIRLAWHAAGTYRTGDGRGGAGTGNQRFAPLNSWPDNVNLDKARLLLWPIKKKYGRKISWADLFILVGNVALDSMGFKTFGFGAGRTDIWEPEDDIYWGSEKEMLGVERYSGKRDLEQPLGASHMGLIYVNPQGPDANPDPKLAAHDIRETFGRMAMNDYETAALVAGGHTFGKSHGAASESYKGPDPEASRLQDQSTGWNSGYKSGKGVDTISSGIEGAWTQNPIQWDMGYLDCLYGHEWELTKSPAGAHQWTPKKNGQEIKMVPDAHQKGVLHPPMMQTTDISMKVDPSYGPITKHFHQNPKEFHDAFARAWFKLTHRDMGPRVCYLGSEVPKEQLIWQDPIDKPKYKLKSKDVKDLKSKISKSKISISDLVSTAWASASTFRGSDKRGGANGARIMLEPQKNWKVNNPKKLSAVIKALEKIKSKFDSKKKSVTMADLIVLAGGVGIEMAAKKAGYKVQVPFSAGRGDARQDQTDINSFGLLEPQADGFRNYQNGGASNVSAEEKLVDKAQLMGLTAPEMTALVGGMRVLNTNFDGSKHGVFTNRPGSLTNDYFINLLDMNTTWKEEDKSEQTFIGKDRKTQKTKWKATRVDLIFGSNSQLRALAEVYACEDSGDKFVKDFIAAWVKVMNSDRFDLKLN

SEQ ID NO: 89998 - protein, 710 aa, Unknown
  Bacterial polypetide isolated from the Sargasso Sea
MTEESKCPVSHGSNSQHTLGSMSNNQWWPDALNLNILHQHDRKSNPMGEDFNYREEFKKIDYDALKNDLNNVMTDSQDWWPADYGHYGPFFIRMTWHAAGTYRIADGRGGGGTGNQRFAPLNSWPDNGNLDKARRLLWPIKQKYGNQISWADLLILAGNVAIESMGGKTFGFSGGRPDIWAPEEDIFWGKENEWLGNNRYTGDRELDKPLGAVQMGLIYVNPQGPDGNPDPLASAKDIRETFSRMAMNDEETVALTAGGHTFGKAHGAGSEDLVGVEPEGAPIEQMGFGWKSDHGSGQGRDSITSGIEGPWTANPTQWDNGYFDLLFGYEWELVKSPAGAHQWHPKNPKDEDLAPDPEDSSVKVTTMMTTADMAMREDPAYREISKRFHENPDQFADAFARAWFKLLHRDMGPRTRYMGPESPNEELIWQDPVPDGNSNYDVEAVKSKISETDLSIQEMVETAWASASTFRGSDLRGGANGARISLEPQNSWEANKPEQLSRVLDVLEDIAKDTGASLADVIVLAGNVGVEKASGVNVPFNPGRGDTTQEKTDVDSFAVLEPFSDGFRNYHNNDLEVTPEQMMLDKAQLLGLTAPEMTVLVGGMRSLGISFDGHGIFTDDTSKLSNDFFVTLLDMNVEWKPKGSNLYEAADRSSGEVLRTATRADLVFGSNSQLRALAEVYSCDDSKSKFVNDFVKAWNKVMNLDRFDLD

SEQ ID NO: 89999 - protein, 499 aa, Unknown
  Bacterial polypetide isolated from the Sargasso Sea
MENEGKCPVMHGAMTSNSSSGTSNKDWWPEQLNLNILHQHDKKSDPMDEGFNYRKEFEDIDYDALKQDLNDLMTDSQEWWPADYGHYGPFFIRMTWHAAGTYRSTDGRGGGGTGAQRFAPLNSWPDNGNLDKARRLLWPIKQKYGKKISWADLLILAGNVAIESMGGKTFGFSGGRPDIWGPEEDIHWGVETGWLENNRYKGDRELDNPLAAVQMGLIYVNPQGPDGNPDPLASARDIRETFGRMAMNDEETVALVAGGHTFGKAHGASTEDHVQAEPEGAPLEEMGFGWTSSYGSGVGSDTITSGIEGAWTANPTQWDNGYFDLLFGYEWELTKSPAGAHIWHAVGQKEEDMAPDAEDASVKVPTMMTTADMAMREDPSYKEISKRFHENPDEFADAFARAWFKLLHRDMGPKTRYMGPEVPEEELIWQDPVPAGDSTYDVSAAKEKILNCGLSIQEMIETAWSSASSYRGSDMRGGANGARIRLEPQKIGKLIILIN

SEQ ID NO: 90000 - protein, 445 aa, Unknown
  Bacterial polypetide isolated from the Sargasso Sea
PLNSWPDNGNLDKARRLLWPIKQKYGNQISWADLLILTGNVAIESMGGKTFGFSGGRPDIWAPEEDIYWGLETEWLTNKRYSGDRVLENPLAAVQMGLIYVNPEGPDGNPDPLASARDIRETFGRMAMNDEETVALTAGGHTFGKAHGAGDASLVGPEPEGAPIEEMGFGWISKHASGKGSDTITSGIEGAWTTNPTKWDNGYFDLLLGYDWKLTKSPAGANIWHAVGQKEEHMAPDAEDSSKKVPTMMTTADMAMREDPEYRKISEHFHKNPDQFQDAFARAWFKLLHRDMGPKTRYMGPEAPEEDLIWQDPIPAGNANYDVDAVKSKIENSELSIQEMVETAWASASTYRHTDMRGGANGARIRLEPQRSWEVNKPEQLNKVLGVLEGIASETEASVADVIVLAGNVGIEKASGITVPFTPGRGDATQEHTDVESFAVIEPEA

SEQ ID NO: 90001 - protein, 365 aa, Unknown
  Bacterial polypetide isolated from the Sargasso Sea
TTDLSLKMDPKYGPISKHFHKNPKEFADAFARAWFKLTHRDMGPKACYLGPEVPKENLIWQDPIPKAKYKINKKDIKNLKSRILKSGLSISQLVSTAWASASTFRGSDKRGGANGGRIRLSPQKDWKVNNPNQLSKVIKVLEKIKKSFDTKKKNVSIADLIVLGGCAAIEKAAKKGGYKINVPFTGGRGDASQDQTDEYSFGLLEPKADGFRNYIIKRSNGKSEKATVSAEEMLVDKAQLMKLTAPEMTVLIGGMRVLNTNFDNSNTGVFTKKLETLTNDFFINLLDMGITWKEIDESEEMFNGRDRKTNKIKWTASRVDLIFGSNSQLRALAEVYACEDSKTKFIDDFVSAWTKVMNADRFDLK

SEQ ID NO: 90002 - protein, 709 aa, Unknown
  Bacterial polypetide isolated from the Sargasso Sea
MSKGNESKCPVMHGALTTNSASGTSNKDWWPNQLDLSILHQHDQKSDPMDDGFDYREEFKKLDFDALKKDLNDLMTDSQDWWPADYGHYGPFFIRMTWHAAGTYRIGDGRGGGGTGNQRFAPLNSWPDNGNLDKARRLLWPIKKKYGNKISWADLLILAGNVAIESMGGRTFGFGGGRPDIWAPEEDIDWGAEREWLANERYSGERDLANPLGAVQMGLIYVNPQGPDGEPDPIASGKDVRETFSRMAMNDEETVALVAGGHTFGKGHGAGPEEDVAVEPEGASLENMGFGWMSSHKSGMGSDTITSGFEGAWTAKPTTWDNGYFDLLFGYEWEKVETPSGKIVWHAIDQKEEDMAPDAEDPSVRVPTMMTTADMSMREDPIYKKISKRFHENPEEFADAFARAWFKLLHRDMGPRSRYLGPEVPEEELIWQDPVPKGNNDYDVTAVKAMLSDCGLSIQEMVETAWASASTFRGSDLRGGANGSRIRLSPQKDWEANKPEQLAKVLGIYESIASESNASLADVIVLGGNVGIEKASGVEVPFTAGRGDATEEQTDAESFDALEPIADGFRNFQKDDSTLPSEEMLLDKAQLLGLTAPEMTVLTGGMRALGISSNDHGVFTESPGKLTNDFFVNLLDMGVEWKSTGKNTYEAIDRQSGDKVRTATRVDLAFGSNSQLRAIAEVYASDDSKDKFVSDFIAAWNKVMNADLT

SEQ ID NO: 90003 - protein, 446 aa, Unknown
  Bacterial polypetide isolated from the Sargasso Sea
MTDKSEGKCPVMHGAMTTNSSSGTSTRDWWPNQLNLNILHQHDKKSNPMDEDFDYREEFKKIDYEALKKDLNELMTDSQDWWPADYGHYGPFFIRMTWHAAGTYRNTDGRGGGGTGAQRFAPLNSWPDNGNLDKARRLLWPIKQKYGKQISWADLLILAGNVAIESMGGTTFGFSGGRADIWGPEEDIHWGVESEWLENKRYKGERELDNPLAAVQMGLIYVNPQGPDGNPDPLASAHDIRETFGRMAMNDEETVALVAGGHTFGKAHGAGAEDHVQSEPEGAPLEEMGFGWTSTYASGVGSDTITSGIEGAWTANPTQWDNGYFDLLFGYEWELTKSPAGAHIWHAVGQTEEDMAPDAEDASKKVPTMMTTADMALREDPSYKKISKRFHENPDEFADAFARAWFKLLHRDMGPKSRYMGPEVPGEELIWQDPVPLGNSDYDMKK

SEQ ID NO: 90004 - protein, 343 aa, Unknown
  Bacterial polypetide isolated from the Sargasso Sea
MSNELIKEQSKCPFTGVGTPPKHPTGKGQTNKDWWPNSLNLKILSQHSSLVNPMGEKFNYKKEFKKLKFKALKKDLHKLMTDTQDWWPADYGHYGPFFIRLAWHAAGTYRTGDGRGGAGTGNQRFAPLNSWPDNVNLDKARLLLWPIKKKYGKKISWADLFILVGNISLESMGFKTFGFGAGREDIWEPEEDIYWGSEKEWLAVNRYSGKRELENPLGASHMGLIYVNPQGPDANPDPYLAAHDIRETFGRMAMNDYETVALVAGGHTFGKSHGAAPESHKGPEPEGSKIQEQATGWNSNYKTGLGVDTISSGIEGAWTSNPIKWDMGYFDNLFGYNWELTKS

SEQ ID NO: 90005 - protein, 711 aa, Unknown
  Bacterial polypetide isolated from the Sargasso Sea
MDAESKCPVMHGAITKNMGEGTSNREWWPNQLNLNILHQHDRKSDPMEAGFNYREEFKKLDYAALKKDLHNLMTDSQDWWPADYGHYGGFFIRMTWHAAGTYRTGDGRGGGGTGAQRFAPLNSWPDNGNLDKARRLLWPIKKKYGNKISWADLFILTGNVAIESMGGKTFGFSGGRPDIWAPEEDIYWGVEEEWLQNKRYTGDRILDNPLAAVQMGLIYVNPEGPDGKADPLASAKDIRETFARMAMNDTETVALTAGGHTFGKAHGAGDPSLVGAEPEGAPLEQMGLGWNNLHGSGVGRDTTTSGIEGPWTSNPTQWDNGYFDLLLGYEWKLVKSPAGAQIWHAIDQKEEHMAPQVDDPSIKVPTMMTTADMAMREDPEYRKVSEKFHKDPEYFADQFARAWFKLLHRDMGPKTRYMGPEVPEEELICQDPVPQGHSNYDVEAVKAKILKSGLTTQEMVETAWASASTFRGSDMRGGANGARIRLAPQKDWEVNKPKQLKKVLGILEPIAKETGASVADVIVLAGNVGVEQATGMEVPFTPGRGDTTQEKTDIDSFGVLEPEADAFRNYLKMNYDVTAEELMLDKAQLLGLTAPEMTVLVGGMRSMGISSDQRGLFVDTKGKLTNSFFDKLLDMGVSWKPTGSNSYEATDKITGEKVRTASRVDLVFGSNSQLRAIAELYASDDSEEKMKKDFITAWNKVMNADRFDLEQ

SEQ ID NO: 90006 - protein, 583 aa, Unknown
  Bacterial polypetide isolated from the Sargasso Sea
SKCPFTGAGTPAKFSAGRGQTVRDFWPNSLNLKILSQHSNLSNPMDKKFNYAKEFKKLNYKSLKKDLKKLMTDSQEWWPADYGHYGPLFIRLAWHAAGTYRTGDGRGGAGTGNQRFAPLNSWPDNVNLDKARLLLWPIKKKYGRKISWADLFILVGNVALDSMGFKTFGFGAGRTDIWEPEDDIYWGSEKEMLGVERYSGKRDLEQPLGASHMGLIYVNPQGPDANPDPLLAAHDIRETFGRMAMNDYETAALVAGGHTFGKSHGAASESYKGPDPEASKLQDQSTGWNSGYKSGKGVDTISSGIEGAWTQNPTKWDMGYLDCLYGHDWELTKSPAGAHQWTPKKNGQKIKMVPDAHQKGVLHPPMMQTTDISMKVDPSYGPITKHFHQNPKEFHDAFARAWFKLTHRDMGPRVCYLGSEVPKEHLIWQDPIDKPKYKLKSKDIKDLKKKISKSKISISDLVSTAWASASTFRGSDKRGGANGARIMLEPQKSWAVNNPKKLSTVVKALNKIKDQFDNKKKSVSMADLIVLAGGVGIEMAAKKAGHKVNVPFSAGRGDARQDQTDIHSFGLLEPQADGFRNYL

SEQ ID NO: 90007 - protein, 321 aa, Unknown
  Bacterial polypetide isolated from the Sargasso Sea
AWTSNPIKWDMGYFDNLFGYEWELSKSPAGAYQWKPIKNGKAVNMTPDAHIKSKQNLPMMQTTDLSLKLDPSYGPISRHFHNNPIEFADAFARAWFKLTHRDMGPRACYLGPEVPKEKLIWQDPIPKPNYKIKNKDIKFLKSKILKSGLSVSQLVSTAWASASTFRGSDKRGGANGARIRLEPQKSWSVNNPSQLSKVIKIFEKIKKSFDNKKKNVSMADLIVLGGSVGIEKAAKNAGYNINVPFTPGRGDASQDQTDIHSFGLLEPKADGFRNYITKITNGSTKKPTISAEEMLVDKAQLMKLSAPEMTVLIGGNEGFKY

SEQ ID NO: 90008 - protein, 403 aa, Unknown
  Bacterial polypetide isolated from the Sargasso Sea
ANPLGAVQMGLIYVNPQGPDGEPDPIASGKDVRETFSRMAMNDEETVALVAGGHTFGKGHGAGPEENVQVEPEGASLENMGFGWMSNHASGQGSDTITSGFEGAWTADPIKWDNGYFDLLFGYEWEKVETPAGKIVWHAIDQKEEDMAPDAEDSSVRVPTMMTTADMSMREDPAYKKISKRFHENPDEFADAFARAWFKLLHRDMGPRSRYLGPEVPQEELIWQDPIPEGNADYDVGSVKSKINESGLTIQQMVETAWASASTFRGSDLRGGANGARIRLAPQKDWEANKPKELSEVLNVLEGIANDTGASIADVIVLAGNVGIEKASGVEVPFTPGRGDASIEQTDEESFAVLEPVSDAFRNYHQSGINMPSEELMLDKAQLLGLTAPEMTVLVGGMRTLGV

SEQ ID NO: 90009 - protein, 585 aa, Unknown
  Bacterial polypetide isolated from the Sargasso Sea
MRNFLTEEQSKCPFTGAGTPPKHGTGKGTTNRDWWPNGLNLKILSQHSSLVDPMDKKFNYAKEFKKLNFKALKKDLHKLMTQSQSWWPADYGHYGPLFIRLAWHAAGTYRTGDGRGGAGTGNQRFAPLNSWPDNVNLDKARLLLWPIKKKYGKRISWADLFILVGNISLESMGFKTFGFGAGREDIWEPEEDIYWGSEKEWLGVNRYSGKRDLEQPLGASHMGLIYVNPQGPDANPDPLLAAHDIRETFGRMAMNDYETVALVAGGHTFGKSHGAAPESHKGPEPEGSKIQDQATGWNSNFKSGKGVDTISSGIEGAWTSNPIKWDMGYFDNLFGYDWELTKSPAGAHQWKPKRNGHDIEMTPDAHEKNKKNLPMMQTTDLSLKMDPKYGPISKNFHNNPKEFADAFARAWFKLTHRDMGPKSCYLGPDVPKENLIWQDPIPKQKYKLKNKDIKFLKSKILKSGLSVSELVFTAWASASTFRGSDKRGGANGARIRLEPQRNWEVNNPKKLSKVLHKLEKIKKNFDKKNKTVSLADIIVLGGSVGIEKAAKKAGYKVNVPFTQGRGDALQNETDEFSFGLLEPKA

SEQ ID NO: 90010 - protein, 354 aa, Unknown
  Bacterial polypetide isolated from the Sargasso Sea
KTFGFGGGRPDIWAPEEDIDWGAEKEWLANERYSGERDLANPLGAVQMGLIYVNPQGPDGDPDPIASGKDVRETFGRMAMNDEETVALVAGGHTFGKGHGAGPEENVQVEPEGASLENMGFGWMSNHASGKGTDTITSGFEGAWTADPTKWDNGYFDLLFGYEWEKVETPAGKIVWHAKDQKEEDMAPDAGDPSVRVPTMMTTADMSMREDPAYNKISKRFHENPDEFADAFARAWFKLLHRDMGPKSRYLGPEVPDEELIWQDPIPEGNANYDVESVKSKISESGLTIQQMVETAWASASTFRGSDLRGGANGARIRLAPQKDWEANKPKELSEILNVYQGIATDTGASIADV

SEQ ID NO: 90011 - protein, 675 aa, Unknown
  Bacterial polypetide isolated from the Sargasso Sea
MHQHDRKSDPMDEGFDYRKEFEDIDYDALKKDLNDLMTDSQEWWPADYGHYGPFFIRMTWHAAGTYRSTDGRGGGGTGAQRFAPLNSWPDNGNLDKARRLLWPIKQKYGKKISWADLLILAGNVAIESMGGKTFGFSGGRPDIWGPEEDIHWGVETGWLENNRYKGDRELDNPLAAVQMGLIYVNPQGPDGNPDPLASARDIRETFGRMAMNDEETVALVAGGHTFGKAHGASTEDHVQAEPEGAPLEEMGFGWTSSYGSGVGSDTITSGIEGAWTANPTQWDNGYFDLLFGYEWELTKSPAGAHIWHAVGQKEEDMAPDAEDASVKVPTMMTTADMAMREDPSYKEISKRFHENPDEFADAFARAWFKLLHRDMGPKTRYMGPEVPEEELIWQDPVPAGDSTYDVSAVKEKILNCGLSIQEMIETAWSSASTYRGSDMRGGANGARIRLEPQKNWEANNPDQLSKVLEIYEAIAEETGASVADVIVLAGNVAIEKASGIEVPFTPGRGDATQENTDVESFEVLEPQSDGFKNFHKSGLNVNPEEIMLDKAQLLGLTAPEMTVLVGGLRSLGISSSGYGLFTENKDELSNDYFRTLLDMSVKWRPNGTGNSYEAIDRVSGEKVRTASRTDLVFGSNSQLRALVEVYASDDSLDKFKGDFVHAWNKVMNADRFDLN

SEQ ID NO: 90012 - protein, 713 aa, Unknown
  Bacterial polypetide isolated from the Sargasso Sea
MTDKVEGKCPVMHGAMTTHSSSGTSNKDWWPNQLNLNILHQHDVKSNPMDDDYDYRKEFEKIDYDALKKDLNVLMTDSQDWWPADYGHYGPFFIRMTWHAAGTYRNTDGRGGGGTGAQRFAPLNSWPDNGNLDKARRLLWPIKQKYGKKISWADLLILAGNVAIESMGGTTFGYSGGRPDIWGPEEDIHWGVESEWLENKRYKGERELDNPLAAVQMGLIYVNPQGPDGNPDPLASAHDIRETFGRMAMNDEETVALVAGGHTFGKAHGAGAETHVQSEPEGAPLEEMGFGWTSTYGSGVGSDTITSGIEGAWTANPTQWDNGYFDLLFGYEWELTKSPAGAYIWHAVGQKEEDMAPDAEDSSKKVPTMMTTADIALKEDPSYNEISKRFHENPEEFADAFARAWFKLLHRDMGPKTRYMGPEVPEEELIWQDPVPAGNADYDIQNVKKLITESGLSIQEMVETAWASASTFRGSDMRGGANGARIRLAPQKDWEANNPSKLSKILEIYESISNTTGASIADIIVLAGNVGIEMATGEEVSFIPGRGDASQEQTDIESFEVLEPKSDAFRNFHAKGVNTAPEEIMLDKAQLLGLTAPEMTVLVGGMRSLGISSNGYGLFSEDSNKLSNDYFKTLLDMSVQWKPNGTGNSYEAFDRNSGEKIRTASRSDLVFGSNSQLRAIVEVYAEDDSSEKFTKDFIRAWNKVMNADRFDVQ

SEQ ID NO: 90013 - protein, 739 aa, Unknown
  Bacterial polypetide isolated from the Sargasso Sea
MKKSTIPSLSALTLAMSLAFGGTAIAQEQVTGNQFWWPEQLNLSPLRQNAVESNPYGSDYHYAEAFKSLDLDAVKKDIKALMTESQDWWPSDYGHYGPFFIRMAWHSAGVYRIFDGRGGAAGGQQRFEPLNSWPDNVNLDKARRLLWPIKQKYGSKISWGDLMVLTGNVALESMGFKTFGFAGGRVDDWEAEQVNWGSEKAWLDSKRRNEKGELAKPMGATQMGLIYVNPEGPNGVPDPLASAKEIRDTFGRMAMNDEETVALIAGGHTFGKAHGAHDPSKCVGADPAASGVEAQGLGWKNKCGKGHSEDTVTSGLEGAWSVNPTAWTMQYLENLYGFDWVQTKSPAGHIQWIPKDGKGANLVPDAHDKSKRHAPIMFTSDIALKEDPSYREITTRFLKNPKEFELAFAKAWFKLTHRDMGPKARYLGADVPAEMLIWQDPIPALDHPVIDNADIKALGNKILASGLTVPELVRTAWASASSFRGTDMRGGANGARIRLEPMMNWQANNPKELAKVLAKLEKVQKDFNGSLKGGKKVSLADVIVLGGSVAVEKAAKEAGVTVSVPFTPGRMDATQAQTDVSSFAVLEPTADGFRNYYSKDSSHSPAEMLIERANMLNLTVPEMTVLVGGLRALDANSAGVKHGVFTDKPGTLSNDFFVNLLDMSTKWSKSEKQEGIYEGQDRKSGKLKWTATPVDLVFGSHSELRAVSEVYGAQDGQDRFVQDFIKAWNKVMNADRFDI

SEQ ID NO: 90014 - protein, 475 aa, Unknown
  Bacterial polypetide isolated from the Sargasso Sea
AHDIRETFGRMAMNDYETVALIAGGHTFGKCHGAGDDGLVGVGPEDAPMEQQQFGWKSGFGKGMGRDAITSGLEGPWTKNPAQWDNGYFENLFKYEYELVKSPAGAYQWHPIDLEEENHAPDVEDPNLKVTTIMLTSDLALREDPEYRKVSLHFKDNPDEFADAFARAWFKLLHRDMGPKNRYLGPEVPKEDLIWQDPVPAGNADYDIAKAKELISGCDLSIQEMVEVAWASASTFRNSDLRGGANGARIRFEPMKSWQSNDKDLLDKALDLYTNIAEQVNASVADIIVLAGNVAIENASGVEVPFLAGRGDATEEQTDAESFKVLEPLADGFRNYQKTEYSVSPEEMLVDKSQLLGLTAPEMTVLVGGMRSLGITKDNLGNFSEDNSKLDNEFFKKLLDMNVSWRPNGNNAYEGVDKTSGEVVRTASRVDLVFGSNSQLRSLAEVYASDDANNKFVKDFIAAWNKVMNADRFDV

SEQ ID NO: 90015 - protein, 567 aa, Unknown
  Bacterial polypetide isolated from the Sargasso Sea
METKISWADLIILAGNIAIESMGGKTFGFSGGRPDIWAPEQDIYWGLETEWLTNKRYSGDRVLENPLAAVQMGLIYVNPEGPDGNPDPLASARDIRETFGRMAMNDEETVALTAGGHTFGKAHGAGDAGLVGPEPEGAPLEEMGFGWISKHASGKGSDSITSGIEGAWTTNPTKWDNGYFDLLLGYDWKLTKSPAGANIWHAVDQKEEHMAPDAEDASKKVPTMMTTADMAMREDPEYRKISEHFHKNPDQFQDAFARAWFKLLHRDMGPKTRYMGPEAPAEDLIWQDPIPAGSSNYDVDGAKSKIANSGLTIQEMVETAWASASTYRHTDMRGGANGARIRLEPQRSWEVNKPDQLNKVLSILEGIASETGASIADIIVLAGNVGIEKASGKNVPFTPGRGDATQEHTDVESFAVLEPEADGFRNYLKKNFTVTPEEFLLDRAHLLELTAPEMTVLIGGMRALGISSDDRGIFSENQERLDNNFFTTLLDMSVKWEATGSNSYQATDRKSGKKVRRASRADLVFGSNSQLRALAEVYAQSDNHDKFVNDFISAWNKVMNADRFDVN

SEQ ID NO: 90016 - protein, 285 aa, Unknown
  Bacterial polypetide isolated from the Sargasso Sea
DIKNLKSKVLKSKITVSGLVSTAWASASTYRGSDKRGGANGARILLEPQKSWKVNNPKQLRKVIKSLQKIKKSFDTKNKSVSMADLIVLGGNVGIEIAAKRAGHKVNVPFLPGRGDARQNQTDIHSFGLLEPQADGFRNYQKNVKSNVSAEEKLVDKAQLMQLTAPEMTVLIGGMRVLDTNYDKSKNGVFTKNPGTLSTDYFVNLLDMNTTWKETDKSEQYFIGKDRKSNKNIWKGSRVDLIFGSNSQLRALAEVYACKDSSQKFVKDFVSAWTKVMNLDRFDLN

SEQ ID NO: 90017 - protein, 556 aa, Unknown
  Bacterial polypetide isolated from the Sargasso Sea
KISWADLFILVGNVALESMGFKTFGFGAGRDDIWEPEEDIYWGSEKEWLGVNRYSGNRELENPLGASHMGLIYVNPQGPDANPDPLLAAHDIRETFGRMAMNDYETVALVAGGHTFGKSHGAAPESHKGPEPEGSKIQYQSTGWNSDYGSGKAEDTISSGIEGAWTSNPIKWDMGYFENLFNYDWELTKSPAGAHQWKPKQNGHAISTTPDAHVKSKKNLPMMQTTDLSLKLDPKYGPISRHFHNNPKEFADAFARAWFKLTHRDMGPKVNYLGSEVPKEDLIWQDPIPKNKFKIKNKDIDLLKNKIAKSGLSVSQLVTTAWASAASFRGSDKRGGANGARIRLAPQKDWKVNNPSQLSKVIKVLEKIKKSFDSKKKQVSLADLIVLAGGVGIEKAAKDVGKKIKVPFSQGRGDASQDQTDIHSFGLLEPKADAFRNYTDADHSEIAEEMLIDKAQLMNLTGPEMTVLIGGMRVLGANYDNSKHGVFTKKVGKLSNDFFVNLLDMDTEWKEVSPKEDLFEGKDRKTGKVKWTATRSDLIFGSNSQLRAFAEVYAAK

SEQ ID NO: 90018 - protein, 629 aa, Unknown
  Bacterial polypetide isolated from the Sargasso Sea
RTGDGRGGAGTGNQRFAPLNAWPDNVNLDKARLLLWPIKQKYGKRISWADLFILVGNVALESMGFKTFGFGAGRTDIWEPEDDIYWGSEKEMLGVKRYSGKRDLEQPLGASHMGLIYVNPQGPDFNPDPLKAAHDIRETFGRMAMNDYETVALVAGGHTFGKSHGAAPESHKGPDPEASRIQDQATGWNSNYKSGKGVHAISSGIEGAWTQTPTQWDMGYFDCLFNHEWELTKGPAGAFQWTPKKNGQRIKMVPDAHDKSKMHPPMMQTTDLSLRMDKSYGPISKHFYQNPDEFADAFARAWFKLTHRDMGPRACYLGSEVPKEQLIWQDPIDKPKYKLKSKDIRDLKSKLSKSKISVSDLVSTAWASASTYRGSDKRGGANGARIMLEPQRSWKVNNPKKLSKVIKALQKIKKKFDKNKKSVSMADLIVLGGNVGIEMAAKKAGHKIQVPFTPGRGDARQDQTDVNSFGLLEPQADGFRNYMKKGKSNVSAEEKLIDKAQLMGLTAPEMTVLVGGMRVLDTNYDSSKNGVFTKKPGTLSTDYFVNLLDMSTTWKETDKSEQYFVGKDRKSKKTKWKGSRVDLIFGSNSQLRALAEVYACKDSSDKFIKDFVSTWVKVMNADRFDLRLN

SEQ ID NO: 90019 - protein, 526 aa, Unknown
  Bacterial polypetide isolated from the Sargasso Sea
GRGTSNRDWWPNSLNLKILSQHSNLVNPMGEKFNYSKEFKKLNFKALKKDLLKLMTDSQDWWPADYGHYGPLFIRLAWHAAGTYRTGDGRGGAGTGNQRFAPLNSWPDNVNLDKARLLLWPIKKKYGKRISWADLFILVGNVALESMGFKTFGFGGGREDIWEPEEDIYWGSEKEWLGVNRYSGKRELENPLGASHMGLIYVNPQGPDANPDPLLAAHDIRETFGRMAMNDYETVALVAGGHTFGKSHGAAPESHKGPEPEGSKIQEQATGWNSKYKSGLGVDTISSGIEGAWTTNPIKWDMGYFENLFGYEWELSKSPAGAHQWKPKQNGHDIEMTPDAHDKSKKNLPMMQTTDLSLKLDPKYGPISRHFHKNPKEFADAFARAWFKLTHRDMGPRACYLGPDVPKEKLIWQDPITKPKYKIKKKDIKSLKAKILNSGLTISQLVATAWASASTFRASDKRGGANGARIRLEPQKNWEVNSPTNLSKVLKILEKNKKEFDNKKKIVSLADLIVLGGNAAIEKLQK

SEQ ID NO: 90020 - protein, 434 aa, Unknown
  Bacterial polypetide isolated from the Sargasso Sea
DWWPADYGHYGPFFIRMTWHAAGTYRNTDGRGGGGTGAQRFAPLNSWPDNGNLDKARRLLWPIKQKYGKQISWADLIILAGNVAIESMGGTTFGYSGGRPDIWGPEEDIHWGVESEWLENKRYKGERELDNPLAAVQMGLIYVNPQGPDGNPDPLASAHDIRETFGRMAMNDEETVALVAGGHTFGKSHGAGAEDNVQSEPEGAPIEEMGFGWSSNYGSGMGSDTITSGIEGAWTANPTQWDNGYFDLLLGYEWELTKSPAGAHIWHAIGQTEEDMAPDAEDASKKVPTMMTTADMALREDPSYKEISKRFHENPDEFADAFARAWFKLLHRDMGPKTRYIGPEIPEEELIWQDPVPAGNSEYNVEEVKKMIAESGLSIQEMVETAWASASTFRASDMRGGANGARIRLAPQKDWEANNPTKLSKILDVYQTIQ

SEQ ID NO: 90021 - protein, 320 aa, Unknown
  Bacterial polypetide isolated from the Sargasso Sea
AIIRMMGQIPLTSKQIHNRLIDLGFDISERTVLRDMQSLPEQFPERIYVIDRMKPYGYKLPKGVAKDSAMSPTEAVCLQLAKDYLNPILPPGALDPIAPYLKEAEIILQQKQTDARLKNWKKKVLTLNEGFNLEPANIREGILEKIQASLWQGKVIKALYKSKTKTEASSYVLHPCGLVYRGRVSYLICSFENRTEKFTYLPLHRFESVELTTEKSIHKDTDVKEVAGNIMGFAMSDEKISITLKFSSFAGGHLIETPISKSQKIKKTKDNYYLVSDEVIDDSELRWWIRAFGDEVEVIKPKSLRDEFKLMAKRMEKKYE

SEQ ID NO: 90022 - protein, 254 aa, Unknown
  Bacterial polypetide isolated from the Sargasso Sea
EKQGFDIGLGFKYYDYRNRFGYRFTSSKTTTDESFTGTSISGEEGIEVETSLLNYSISSNDTDSFLNPTEGVKKSLKMSVAGIGGDSKFLKTEASFKEYIPFNYGDYVFSYGTKLGTISSLDDEKVTSSNRFYFNSNSVRGFDTNGIGPRDNGNDNGVGGNNFYSGQVEVKSTKLIPGDLGIDISIFSDIGSLWDTDYPINVKGVNDSSPRASAGVAVYWNTAVGPLTFIWGWPITEENYDKDNNFKFSIGTSF

SEQ ID NO: 90023 - protein, 243 aa, Unknown
  Bacterial polypetide isolated from the Sargasso Sea
SPPVIIGKSADVQQAARSIMAGKTLNAGQICLAPDYVFVPEGQTDVFVEAARDSVTRMYANLKDNPDYTSIVNERHYDRLADYIDEARSSGAEVVELNPADDDFSQQQHHRIPPTLILNPEDDLQVMQEEIFGPILPVKTYSDVEDPIRFINERDRPLGLYYFGKDSNEEETVLNNTTSGGVTVNDVIMHIAQEELPFGGVGSSGMGAYHGHDGFKTFSHGKAVYRQSKLIARLAALIGPPYR

SEQ ID NO: 90024 - protein, 226 aa, Unknown
  Bacterial polypetide isolated from the Sargasso Sea
MIIEDDTAIATNLYDYLESGGYEVDLASDGVMGLHLAVTQHWDAILLDLSLPGMDGLTICRKLREEARRDTPILMLTARDTLDDKLQGFGQGADDYLIKPFSLKEVGARLGALIKRYKGNVTQATVSCADIRFDPATLAVDRGGRPVKLPPKCLHLLRILMQAPNRVFGRAELETEVWGEQLPDSDTLRAHIYTLRRALTANGEDDLIETVHGLGYRLVVSDATTP

SEQ ID NO: 90025 - protein, 70 aa, Unknown
  Bacterial polypetide isolated from the Sargasso Sea
MSDYIQTALVTGAGNGIGRATAIALAKSGRKVSCADIKMDDAQRTADAIMQQGGTAHAVSADVGSISEIE

SEQ ID NO: 90026 - protein, 161 aa, Unknown
  Bacterial polypetide isolated from the Sargasso Sea
MTSTIYSHSANDIQGNPTALAQYQGKVILIVNTASECGFTPQYKGLEALYQKYKAQGLVVLGFPCNQFGAQEKADEKGIQSFCELNFGVSFPLFSKIEVNGEHTHPLYQYLKKAAPGVLGTERIKWNFTKFLINRQGEVVARFAPTTKPEAISDKIEALLK

SEQ ID NO: 90027 - protein, 162 aa, Unknown
  Bacterial polypetide isolated from the Sargasso Sea
MSTSIYDFEALQMNGQAVPLSQYRGKVLLIVNTASACGFTPQFGGLEELHKEYADQGLVVLGFPCNQFGAQDPGSNDEIASFCQLNYGVSFPMMAKIDVNGANASPLYQWLTAEAPGLLGSKAIKWNFTKFLVGKDGQVIRRYAPQDAPKKLAGDIEAALAT

SEQ ID NO: 90028 - protein, 161 aa, Unknown
  Bacterial polypetide isolated from the Sargasso Sea
MSNALFDIPVTTIKGEQKTLADFGGKAVLVVNTASKCGFTPQYKGLESIWQQYKDKGLVVLGFPCNQFGKQEPGDEGAISEFCELNFGVSFPLFKKVDVNGSDAHPLFVQLKKRAPGLLGSQGIKWNFTKFLIGEDGQVVKRFAPTTKPEELGSEIEALLQ

SEQ ID NO: 90029 - protein, 160 aa, Unknown
  Bacterial polypetide isolated from the Sargasso Sea
MSTFHQLTATSLNGQLISMADYAGKLVLVVNTASHCGFTPQYAGLEALYKKYDTQGLVVLGFPCNQFGKQEPGGADEIAQTCYVNYGVSFPMFEKVEVNGAATHPVFRYLKDELPGILGGRIKWNFTKFLVGRDGKPLKRFAPFTTPEKIETVILDALKI

SEQ ID NO: 90030 - protein, 164 aa, Unknown
  Bacterial polypetide isolated from the Sargasso Sea
GGCPPSEKNIVGTLMYFIMFGKLPALDMFNRPKWAYGARVHDNCERRGRFDAGEFVEEFGDHGAKEGYCLYKVGCKGPYTYNNCPTERFNHHTSWPVLAGHGCMGCSEPNFWDDMADFEKPLGRQLLHGLDATADTVGAVILGATVVGIGAHAVASIFAKPLEE

SEQ ID NO: 90031 - protein, 163 aa, Unknown
  Bacterial polypetide isolated from the Sargasso Sea
GCPPSEKNIVGTLMYFIMFGKLPALDMFNRPKWAYGARVHDNCERRGRFDAGEFVEEFGDHGAKEGYCLYKVGCKGPYTYNNCPTERFNHHTSWPVLAGHGCMGCSEPNFWDDMADFEKPLGRQLLHGLDATADTVGAVILGATVVGIGAHAVASIFAKPLEE

SEQ ID NO: 90032 - protein, 378 aa, Unknown
  Bacterial polypetide isolated from the Sargasso Sea
MDTHAALYEQGKARLDALRQLAPRQQLSLVEKMQQHGITRRDFMKWSAMVTGMLALPLPFSNLVAEAAELADRVPLIWLHMAECTGCSESLVRADTPNLDSLIFDHISLEYHETLMAAAGWQAEENLEHALETYKGRYLLAVEGAVPTANNGSFLTVGCKGHTGLEIIKHAADGAAAIISVGTCASFGGVQAAYPNPTGAKGVHEVVSKPVINLGGCPPSEKNIVGTLMYFIMFGKLPALDMFNRPKWAYGARVHDNCERRGRFDAGEFVEEFGDHGAKEGYCLYKVGCKGPYTYNNCPTERFNHHTSWPVLAGHGCMGCSEPNFWDDMADFEKPLGRQLLHGLDATADTVGAVILGATVVGIGAHAVASIFAKPLEE

SEQ ID NO: 90033 - protein, 195 aa, Unknown
  Bacterial polypetide isolated from the Sargasso Sea
KGHAMEVGPLARVLMMYAKKDAAAQDIVNRSLSILDLETSALFSTLGRTLARAVETKIVVNQLQSWYDQLLDNIAKGDTDTFNPLYFDPTNWPIKGQGVGVMEAPRGALGHWLVMQNGKIENYQCVVPTTWNAGPRDPNSQAGAYEAALQDKHTLHDPDQPLEILRTLHSFDPCLACAVHVMDETGEERLRLKVR

SEQ ID NO: 90034 - protein, 216 aa, Unknown
  Bacterial polypetide isolated from the Sargasso Sea
MAIPQNAQVIRNIMIATQYVHDHVMHFYHLHALDWVDVVSALDADPTRTATLAGQLSDYPRSSPGYFKDVKQKVKTLVESGQLGIFSNAYWGHPGYKLPPEVNLMALAHYLDALTWQREVVKVHTIFGGKNPHPNFVVGGVPSPINLNASTGINTSRLVQLQDAITQMKSFVDQVYYPDIVAIAGYYKEWGTRGEGLGNFLTYGDLPMTSMDDPDS

SEQ ID NO: 90035 - protein, 300 aa, Unknown
  Bacterial polypetide isolated from the Sargasso Sea
IRNIMLATLWCHDHLVHFYQLAGMDWIDVLNALKADPRATSQLAQSLSAWPKSSPGYFFDVQNRLKKFVDGGQLGIFRNGYWGHPQYKLSPEANLMGFAHYLEALDFQREIIKIHTVFGGKNPHPNWIVGGMPCAINIDQRGAVGAVDMERLNLVQSIITRTADFINNVMVPDALAIGQFNKSWSQIGTGLSDKCVLSYGAFPDIANDFSAKSLLMPGGAVINGDFKNVLPVDLADQQQIQEFVDHAWYRYPDDQLGRHPFEGITEPWYNPGDVKGSDIDIKQLNEQERYSWIKAPRWRG

SEQ ID NO: 90036 - protein, 377 aa, Unknown
  Bacterial polypetide isolated from the Sargasso Sea
MVEDTFLSAHGINRRDFMKLCAGMAATLGLSQHAVAKMATALTSPERPPVIWIGAQECTGCTESLLRATHPTIENLILNTISLEYHEVLSAAFGHQAEENKHNAIERYKGKYVLVVDGSIPLKDGGIYCMVAGEPIVDHIRRAAADAAAVIAIGSCAAWGGVPASGGNPTGAVSLEEALGNIGTPIINIPGCPPNPHNFLTTVAYYITYGKLPALDAKKRPLFAYERLIHENCERRPHFDAGRFAKEFGDEGHRQGWCLYHLGCKGPETYGNCSTLEFCDVGGGIWPVGIGHPCYGCNEQGVGFSKGIFQLAKVENPTPRVNKPDVAIQEGGHMSPTATGLIGGALGVLVGVSLMTVRELGRQQKRHEAGQHSSREE

SEQ ID NO: 90037 - protein, 242 aa, Unknown
  Bacterial polypetide isolated from the Sargasso Sea
MNTNNEETFYQAMRRKGVSRRSFLKYCSLAATSLGLGAGMTPRIAWALENKPRIPVVWIHGLECTCCTESFIRSSHPLAKDVILSLISLDYDDTLMAAAGTQAEEVFEDILSRYHGRYILAVEGNPPLGEQGMFCISGGRPFIEKLKRAAAGASAIIAWGTCASWGCVQAARPNPTQATPIDKVITDKPIVKVPGCPPIPDVMSAIITYMVTFGRLPELDRLGRPLMFYGQRIHDKCYRRAH

SEQ ID NO: 90038 - protein, 308 aa, Unknown
  Bacterial polypetide isolated from the Sargasso Sea
MPIITAPQCGFQPVAFRGLETGNRESVSYVLNQDRINLVITSPLEKNTEIGAHIDRHGDGMKDVAFTVNDAESAWKTSIQRGAESAFEPQEIKDDNGEAVISAIHTFGDTIHSFVERENYKGAFLPGFETNDFGVITQSTGLVHIDHIVGNQPDGEMKSVCDFYEKVFGWHRFWSVDDKDINTEYSALRSIVMANDNEIVKMPINEPADGLKKSQIQEFIDYYETGGIQHIALSTKDIIATVRMMRNNGVDFLPTPKSYYENLTNRIGKIEEDISVLAELGILVDKDENGYMLQIFTQPLQDRPTMFF

SEQ ID NO: 90039 - protein, 271 aa, Unknown
  Bacterial polypetide isolated from the Sargasso Sea
MNNYKIKAFDHCELYVGNAKQSAHYYEHALGFEPISYKGLETGSREKVSYVMRQNQVYFVLSSPLIPGTEIGQHIDKHGDGVKDVSFLVDNAEKAWEETTNRGAESVSKPKLVEDDKGGAVIATIKTYGDTTHTFVQRNDYNGNFLPGFEDLKIKNSGKNTGLVHIDHVVGNQPDGIMQPVCDFYEKVFGWHRFWSIDDNDLSTKYSSLRSIVMANDNEKIKMPINEPAKGLKKSQIQEFVDYYNGAGIQHVAMSTKDIIKTVKKLRSNGV

SEQ ID NO: 90040 - protein, 214 aa, Unknown
  Bacterial polypetide isolated from the Sargasso Sea
FEDIKLKNSGKNTGLVHIDHVVGNQPDGIMQPVCDFYEKVFGWHRFWSVDDNDLSTKYSSLRSIVMANDNEKIKMPINEPAKGLKKSQIQEFVDYYNGAGIQHVAMSTKDIIKTVKKLRSNGVEFLPTPQSYYDTLLDRVGDLKEDINLLSELGILVDSDENGYMLQIFTKPIQDRPTLFYEIIQRKGSNSFGKGNFKALFESIEREQMLRGNL

SEQ ID NO: 90041 - protein, 250 aa, Unknown
  Bacterial polypetide isolated from the Sargasso Sea
GAESIKKPELLSDDKGETIISTIKAFGDTNHTFVQRNNYNGVFLPEFIVFENNLNADPTGLVHIDHVVGNQPNGEMKSVCDFYEKVFGWHRFWTVDDKDISTKFSALRSIVMANDNEKIKIPINEPADGLRKSQIQEFIDYYNSSGIQHIAMSTKDIINTVSKLRDKGVEFLETPKSYYESLTDRIGEIDEDLDRIKDLGILVDKDENGYMLQIFTKPIQDRPTLFYEIIQRKGSNSFGKGNFKALFESI

SEQ ID NO: 90042 - protein, 229 aa, Unknown
  Bacterial polypetide isolated from the Sargasso Sea
MKTNSYSIEGFNHVELYVSNAKQTAYFYQKTMGFKPIAYRGLETGSRDRVSYVLNQNHITLVITSPLTQSTEIGAHIDLHGDGVKDVAFTVDNSESAWETSVERGAISVLEPQKIEDSHGEAIISSIETFGDTVHSFIEKKDYNGLFLPGFKSYVGNLNSTSTGLIHIDHIVGNQPDGEMNTVCEFYKNIFGWHRFWSVDDKDINTKYSALRSIVMANQNEVVKMPITS

SEQ ID NO: 90043 - protein, 206 aa, Unknown
  Bacterial polypetide isolated from the Sargasso Sea
MADPTGIVHIDHVVGNQPEGEMNSVCNFYEKVFGWHRFWSVDDKDVSTKYSALKSIVMANDNEKIKMPINEPAKGLKKSQIQEFIEFYDGPGIQHIAMSTKNIIETVKKLKANGVEFLPTPKSYYDDLKKRIKGLDEDIDTLSELGILMDSDDNGYMLQIFTRPIQDRPTLFYEIIQRKGSQSFGKGNFKALFESIERDQLKRGNL

SEQ ID NO: 90044 - protein, 226 aa, Unknown
  Bacterial polypetide isolated from the Sargasso Sea
MSEDPVPLKAVHHVEFYVGNAKQAAYYYRKAFGYDQIAYSGLETGDREKASYVLGQGRIRMVFSTPLNGNNELAEHIRKHGDGVKDIAFHVDDAKACYEACVARGAKSARTPETFSDKNGSITKASIFTYGETVHSFISYDDYDGPFLPGFIDSKIEGDNVGLKFIDHIVGNVELGKMEHWVNFYADIMGFSQIQEFSDDDISTEYSALMSKVMESDNGRIKFPIN

SEQ ID NO: 90045 - protein, 269 aa, Unknown
  Bacterial polypetide isolated from the Sargasso Sea
MKNIPYSIKGFDHCELYVGNAKQTAYYYQSTMGFKPVAYRGLETGIRDKVSYVLNQGHINLVITSPLEKNTEIGQHIDRHGDGIKDVAFTVNDSDKAWKTSIERGAESAMEPKEIKDENGETVLSAIKTFGDTIHTFVERKNYNGSFLPGFKAIDYKENLNKIGLVHIDHIVGNQPDGEMNSVCDFYEKVFGWHRFWTVDDKDISTEYSALRSIVMANDNEIVKMPINEPAEGLKKSQIQEFIDYYETAGVQHIALSTKDIISTVKDNA

SEQ ID NO: 90046 - protein, 228 aa, Unknown
  Bacterial polypetide isolated from the Sargasso Sea
LCSRNDYNGNFLPGFEDFKIKNSGKNTGLVHIDHVVGNQPDGIMQPVCDFYEKVFGWHRFWSIDDNDLSTKYSSLRSIVMANDNEKIKMPINEPAKGLKKSQIQEFVDYYNGAGIQHVAMSTKDIIKTVKKLRSNGVEFLPTPPSYYDTLLDRVGDLKEDINLLSELGILVDSDENGYMLQIFTKPIQDRPTLFYEIIQRKGSNSFGKGNFKALFESIEREQMLRGNL

SEQ ID NO: 90047 - protein, 278 aa, Unknown
  Bacterial polypetide isolated from the Sargasso Sea
VAFTVNDSDKAWKTSLERGAESAMNPKEVKDENGETVLSAIKTFGDTIHTFVERKNYSGSFLPGFKAIDYKENLNKTGLVHIDHIVGNQPDGEMNSVCDFYEKVFGWHRFWTVDDKDISTEYSALRSIVMANDNEIVKMPINEPAEGLKKSQIQEFIDYYETAGIQHIALSTKDIISTVKEMRKKGVDFLPTPRSYYENLSDRIGNIDENIEILADLGILVDADENGYMLQIFTKPLQDRPTLFFEIIQRKGSSSFGKGNFKALFQSIESEQQKRGNL

SEQ ID NO: 90048 - protein, 361 aa, Unknown
  Bacterial polypetide isolated from the Sargasso Sea
MTYSIKGFDHCELYVGNAKQTAYYYQNTMGFKPVAYRGLETGDRDRVSYVLNQDHINLVITSPLGKNTDIGQHIDRHGDGIRDVAFTVDDSEKAWKESLERGAKSAMEPKEIKDSNGESIISAIKTFGDTIHTFVERHNYSGSFLPGYENIDSEWDSKSTGLVHIDHIVGNQPDGEMNSVCDFYEKVFGWHRFWTVDDKDISTEYSALRSIVMANDNEIVKMPINEPAEGLKKSQIQEFIDYYETAGVQHLALSTRDIIHTVKQMRNNGVDFLPTPLSYYENLHERIGEIDEDIETLAELGILVDTDENGYMLQIFTKPLQDRPTLFFEIIQRKGSNSFGKGNFRALFESIESEQNKRGNL

SEQ ID NO: 90049 - protein, 362 aa, Unknown
  Bacterial polypetide isolated from the Sargasso Sea
MNTYNINGFDYCELYVSNAKQAAHFYRTALGFFPIAYCGLETGSRDRVSYVLKQNQIRFVLTSPLKNNSEISEHISNHGDGVKDVSFTVNDAEAAWKESTERGAKSIRKPQLLSDDRGETIIATIKAFGDTNHTFVQRDNYKGVFLPGYVVFENNLIADPTGLIHIDHVVGNQPNGEMQTVCNFYEKVFGWHRFWSADDKDISTDYSALRSIVMANENEKIKMPINEPAKGLRKSQIQEFIDYYNSPGIQHIAMSTKDIIETVTKLRDKGVQFLNTPNSYYENLSERVGDIDENLDVIKDLGILIDKDENGYMLQIFTQPLQDRPTLFYEIIQRKGSNSFGKGNFKALFESIENEQKKRGNL

SEQ ID NO: 90050 - protein, 372 aa, Unknown
  Bacterial polypetide isolated from the Sargasso Sea
MSKEVKSVNYGLEKIFEGAQDFLPLLGTDYVEFYVGNAKQAAHFYKTAFGFQSHAYAGLETGVKDRASYVLKQDKIRIVLTTALKSDSPIGEHVKKHGDGVKIVALWVEDARSAYEETMKRGAKSYMEPTVEKDENGEVVRAGIYTYGETVHMFVERKNYKGEFLPGYEKWVSDYNPKPTGLKYIDHMVGNVGWNEMNTWVKWYEDVMGFVNFLSFDDKQITTEYSALMSKVMSNGNGRIKFPINEPAEGKKKSQIEEYLDFYEGPGVQHIAVATDDILTTVAEMRSRGIEFLSTPPQAYYDAVPMRLQAHNHELQEDINQLMSLGIMIDADEEGYLLQIFTKPIEDRPTLFFEIIQRMGARGFGAGNFKAL

SEQ ID NO: 90051 - protein, 34 aa, Unknown
  Bacterial polypetide isolated from the Sargasso Sea
NEFATEALPGALPHGRNSPQRAPYGLYAEQLSGT

SEQ ID NO: 90052 - protein, 202 aa, Unknown
  Bacterial polypetide isolated from the Sargasso Sea
RGVIGSDGLVNARDFKIPTAAFEDSQKKTELICKFGGAFFTAEIEHHPLDVVAWAGNSVPASYDLTLFNTLGSVSYDHPDPSINTVLTSPSNTRGVANMDFVVFGSRWLVSDHTFRPPWFHRNVMAEFMGLIFGQYDGKKNGFTPGGMSLHNSLVPHGPDGEVTAQASSQELHPQRLEQTLAFMFETRFPLAVTDWALKSPF

SEQ ID NO: 90053 - protein, 249 aa, Unknown
  Bacterial polypetide isolated from the Sargasso Sea
LLQDEICRGFVCENYGQKFILPNRGPIGANCLANSRDFKVPQAYFEDKEENSNLTVKWCGSFHSCRLLRSPLDIVAWHGNYAPWKYDLRNFSPVSAVLFDHPDPSIYTVLTSPSGIEGTANIDFILFRDRWNVAENTFRPPWYHKNVMSELMGNIVGKYDAKPTGFIPGGISLHNMMLPHGPDKDAFEGASNADLKPQKLENTMTFMFESRFPQHLTEFAAKEAPLQEDYAECWTGLEKKFNGTPEGNW

SEQ ID NO: 90054 - protein, 178 aa, Unknown
  Bacterial polypetide isolated from the Sargasso Sea
MDIVAWHGNYAPCKYDLRNFSPVSAVLFDHPDPSIYTVLTSPSGIEGTANIDFILFRDRWNVAENTFRPPWYHKNVMSELMGNIVGKYDAKPTGFMPGGISLHNMMLPHGPDKDAFEGAAKSDLKPQKLENTMTFMFESRFPQHLTEFAAKEAPLQSDYTECWKGLEKKFDGTPEGNW

SEQ ID NO: 90055 - protein, 291 aa, Unknown
  Bacterial polypetide isolated from the Sargasso Sea
SADSELLVVPQLGGLVFKTELGLIDIAPGEVALIPRGLVFSVLLQDEICRGFVCENYGQKFILPNRGPIGANCLANSRDFKVPHAYFEDKEEEGNLIVKWCGSFHSCRLFRSPLDIVAWHGNYAPWKYDLRNFSPVSAVLFDHPDPSIYTVLTSPSGIEGTANIDFILFRDRWNVAENTFRPPWYHKNVMSELMGNIVGKYDAKPSGFMPGGISLHNMMLPHGPDKDAFEGASNASLKPQKLENTMTFMFESRFPQHLTEFAAKEAPLQDDYAECWAGLEKNFNGTPEGNW

SEQ ID NO: 90056 - protein, 297 aa, Unknown
  Bacterial polypetide isolated from the Sargasso Sea
FNKSFDNIVFTNADAEMLFIPEKESILLFTEMGKMFVSPGEIAVLPRGMMVKVSCEKPSRGYICENYGAKFTLPDRGPIGANCLANPRDFKTPVASFEDIDKKHISIIKWCGSFYKTELDHSPLDVVAWHGNYIPYCYNLKYFSPVGAISFDHPDPSIYTVLTAPTETDGTANVDLVIFPERWAVAENTFRPPWYHRNIMSEFMGLVYGQYDAKPEGFVPGGISLHNMMLPHGPDAEAFEKASNAKLEPVKITNTLAFMFETKYPQHLTNFASEAKELSDDYIECWSDIKKKFTGKI

SEQ ID NO: 90057 - protein, 302 aa, Unknown
  Bacterial polypetide isolated from the Sargasso Sea
NDFPLGQYRWDPFPIPSEKTNFLDGVRTITTSGDVNTHTGMGASIYAFNEAMGNIVFTNADAEMLFVPEDESILLFTEMGKILVSPGEIAIVPRGMMVKISNEKPCRGYLCENYGAKFTLPDRGPIGANCLANPRDFKTPVACFEDSNERHLSVIKWCGSFYKTEINHSPLDVVAWHGNYIPYCYDLRHFAPVGAISFDHPDPSIYTVLTAPTETTGTANVDLVIFPERWAVTENTFRPPWYHRNIMSEFMGLIYGLYDAKPEGFVPGGISLHNMMLPHGPDAEAFEKLAMQTLNLLKSQIH

SEQ ID NO: 90058 - protein, 101 aa, Unknown
  Bacterial polypetide isolated from the Sargasso Sea
MIVSRFRLQVEFTVVAKFQGALFEAKQPHSPFDVVAWHGNYAPYKYDLARFMVINAVAFDHADPSIFTVLTSQSNEPGTALVDFVIFPPRWGVAEKTFRPP

SEQ ID NO: 90059 - protein, 255 aa, Unknown
  Bacterial polypetide isolated from the Sargasso Sea
RWDPFPLPKNETGFIDGIRTITTSGDVNTHAGMAASIYAFNKSIDNIVFTNADAEMLFVPEKESILLFTEMGKMFVSPGEIAVLPRGMMVKVSCEKPSRGYICENYGAKFTLPDRGPIGANCLANPRDFKTPVASFEDIDKKHVSIIKWCGSFYKTELDHSPLDVVAWHGNYIPYCYNLKYFSPVGAISFDHPDPSIYTVLTAPTETDGTANVDLVIFPERWAVAENTFRPPWYHRNIMSEFMGLVYGQYDAKPE

SEQ ID NO: 90060 - protein, 207 aa, Unknown
  Bacterial polypetide isolated from the Sargasso Sea
KTPVACFEDTNEQHLSIIKWCGSFYKTEIDHSPLDVVAWHGNYIPYCYDLRHFSPVGAISFDHPDPSIYTVLTAPTESAGTANVDLVIFPERWAVTENTFRPPWYHRNIMSEFMGLIYGQYDAKPEGFIPGGISLHNMMLPHGPDADAFEKASNANLEPIKITNTLAFMFETKYPQHLTEFASQASQLQDDYIDCWKDIRKNFNGKK

SEQ ID NO: 90061 - protein, 112 aa, Unknown
  Bacterial polypetide isolated from the Sargasso Sea
MSTPAPAGYQSGFANEFATEALPGALPHGRNSPQRAPYGLYAEQLSGTAFTAPRGHNRRSWLYRIRPAAVHRPFEPYAGAQRLVSEFGDSADVPPTPPNQLRWDPLPMPVEP

SEQ ID NO: 90062 - protein, 124 aa, Unknown
  Bacterial polypetide isolated from the Sargasso Sea
MSTPAPAGYQSGFANEFATEALPGALPHGRNSPQRAPYGLYAEQLSGTAFTAPRGHNRRSWLYRIRPAAVHRPFEPYAGAQRLVSEFGDSADVPPTPPNQLRWDPLPMPVEPTDFVDGLVTMAG

SEQ ID NO: 90063 - protein, 98 aa, Unknown
  Bacterial polypetide isolated from the Sargasso Sea
MTLDLSTPAPAGYQSGFANEFATEALPGALPHGRNSPQRAPYGLYAEQLSGTAFTAPRGHNRRSWLYRIRPAAVHRPFEPYAGAQRLVSEFGDSADVP

SEQ ID NO: 90064 - protein, 112 aa, Unknown; identical to SEQ ID NO: 90061
  Bacterial polypetide isolated from the Sargasso Sea

SEQ ID NO: 90065 - protein, 94 aa, Unknown
  Bacterial polypetide isolated from the Sargasso Sea
MSTPAPAGYQSGFANEFATEALPGALPHGRNSPQRAPYGLYAEQLSGTAFTAPRGHNRRSWLYRIRPAAVHRPFEPYAGAQRLVSEFGDSADVP

SEQ ID NO: 90066 - protein, 317 aa, Unknown
  Bacterial polypetide isolated from the Sargasso Sea
GASRRRAARSDSPQKCAYGLYAEQLSGSPFTAPRSTNERSWLYRIRPSVRHGGRYAKIDVPLWKTAPDGDPNDLPLGQYRWNPLPVPSAPTDFIDGMRTMTSTGDARQHVGMATHIYAVTSSMTNRVLVNADAEMLIVPQDGEIEIFTEMGRMRVAPGHIAVVPRGMMAKYSLAGDHARGYVCENYGAKFTLPDRGPIGANCLANPRDFKTPVAAFEDSDTPHDLVIKWCGGFHVTRIGHSPLDVVAWHGNYTPYCYDLSTFSPVGAIAFDHPDPSIFTVLTAPSETAGTANIDFVIFPPRWMVAENTFRPPWYHRN

SEQ ID NO: 90067 - protein, 91 aa, Unknown
  Bacterial polypetide isolated from the Sargasso Sea
MSTPAPAGYQSGFANEFATEALPGALPHGRNSPQRAPYGLYAEQLSGTAFTAPRGHNRRSWLYRIRPAAVHRPFEPNAGAQRLVSEFGDSA

SEQ ID NO: 90068 - protein, 134 aa, Unknown
  Bacterial polypetide isolated from the Sargasso Sea
MSTPAPAGYQSGFANEFATEALPGALPHGRNSPQRAPYGLYAEQLSGTAFTAPRGHNRRSWLYRIRPAAVHRPFEPYAGAQRLVSEFGDSADVPPTPPNQLRWDPLPMPVEPTDFVDGLVTMAGNGSAAAMNGC

SEQ ID NO: 90069 - protein, 95 aa, Unknown
  Bacterial polypetide isolated from the Sargasso Sea
MTLDLSTPAPAGYQSGFANEFATEALPGALPHGRNSPQRAPYGLYAEQLSGTAFTAPRGHNRRSWLYRIRPAAVHRPFEPYAGAQRLVSEFGDSA

SEQ ID NO: 90070 - protein, 181 aa, Unknown
  Bacterial polypetide isolated from the Sargasso Sea
MTGFGNDFQTEALPGALPQGQNSPQICPYKLYAEQLSGSPFTAPRNINERSWLYRIRPSVKHTGKYEKESFPFWKTAPSHDPENMSLGQFRWDPFPFPKEQTDFISGVRTLTTAGDVNTHNGMAASIYSFNKSMTSTVFTNSDAEMLFVPETGSIVLFTEMGKMHISPGEIAVLPRGMMVK

SEQ ID NO: 90071 - protein, 287 aa, Unknown
  Bacterial polypetide isolated from the Sargasso Sea
NPLDIPSEPTDFIDGLVGMVANSGSEKPSGISIYNYRANRSMERVFFNADGELLIVPEQGRLRIATELGVLDVEPLEIVVLPRGLKFRIELLDAQARGYVAENHGAPLRLPDLGPIGSNGLANPRDFLTPVARYEDLKQPTTLVQKFLGELWACELDHSPLNVVAWHGNNVPYKYDLRRFNTIGTVSFDHPDPSIFTVLTSPTSVHGLANLDFVIFPPRWMVAENTFRPPWFHRNLMNEYMGLIQGAYDAKAEGFLPGGASLHSCMSAHGPDGETCTKAINVTGAAQ

SEQ ID NO: 90072 - protein, 822 aa, Unknown
  Bacterial polypetide isolated from the Sargasso Sea
METSTRTPNTASSRLEIEPGYQSGFANEFASEALPGALPEGRNSPQRAAYGLYAEQLSGTAFTAPRGHNRRSWLYRIRPAAVHKPFTQLPSERLVANFAEVPPTPPNQLRWDALPMPTEPTDFIDGWVTMAGNGSAEAMNGCAIHLYAANRSMQDRFFYNADGELLIVPQEGRLHIATEMGQLDVEPFEIAVIPRGVRFAVSLPDGAARGYICENFGALLRLPDLGPIGSNGLANPRDFLTPHAAYEDREGDFELVAKMNGNLWRADIGHSPLDVVAWHGNYAPYKYDLRRFNTIGSISFDHPDPSIFLVLQSQSDTPGVDTIDFVIFPPRWLAAEDTFRPPWFHRNVASEFMGLVHGVYDAKAEGFVPGGASLHNCMSGHGPDADTFEKASHSDTSTPKKVGDTMAFMFETRTPDQADPFRARNGATAGALLRVLARSQETLQPGATMNALSDLQATLDPSRKSWVESANDPTNDFSIQNLPFGIFSDKANPARRVGVAIGDQIVDLSVLKSAGLLKLPITSADQFIALKDRAFEQDTLNDFISLGRDAWRNVRIQLSSLLARDTATLRDDAALRSKALVPQADAQLHLPVQIPGYTDFYSSKEHATNVGSMFRDPKNALLPNWSEMPIAYNGRASSVVVSGTPVRRPNGQLKLPDQERPVFGACRKLDIELETGFVIGSGNTLGEPIACADAEAHIFGMVLLNDWSARDIQQWEYVPLGPFNSKTFATTISPWIVTLDALEPFRVEQPLQEPQPLAYLRHDGKHAFDISLEVTLRPQTAKQATTISRTNFKHMYWTMAQQLAHHTVSGCNTRVGDLMGSG

SEQ ID NO: 90073 - protein, 440 aa, Unknown
  Bacterial polypetide isolated from the Sargasso Sea
MSTPAPAGYQSGFANEFATEALPGALPHGRNSPQRAPYGLYAEQLSGTAFTAPRGHNRRSWLYRIRPAAVHRPFEPYAGAQRLVSEFGDSADVPPTPPNQLRWDPLPMPVEPTDFVDGLVTMAGNGSAAAMNGCAIHLYAANRSMQDRFFYSADGELLIVPQQGRLFIATEFGRVDVEPFEIAVIPRGVRFTVTLPDGDARGYICENFGAQLRLPDLGPIGSNGLANPRDFLTPQAAYEDREGAFELIAKLNGRLWRADIGHSPLDVVAWHGNYAPYKYDLRLFNTIGSISYDHPDPSIFLVLQSQSDTPGVDTIDFVIFPPRWLAAEDTFRPPWFHRNVASEFMGLVHGAYDAKAEGFVPGGASLHNCMSGHGPDADTFEKASASDTTKPHKVDATMAFMFETRTLIRPTCYALDTAQLQADYFECWQGIKKHFNPEQK

SEQ ID NO: 90074 - protein, 304 aa, Unknown
  Bacterial polypetide isolated from the Sargasso Sea
IHIYAANSSMEGKYFYNADGEMLLVPQQGALQLYTEMGLLEVNPNEIAVIPRGVKFQVKLPDGPSRGYVLENYGSAMRLPDLGPIGSNGLANPRDFLYPVARYEDKEGDFKLISKFGGNIWQAEINHIPLDVVAWHGNFAPYKYDLANFNAVGSISFDHIDPSVYTVLTSQSNTMGVANADFVIFPPRWIVANNTYRPPWYHRNIMSEFMGLIRGEYDGRKEGFVPGGSSLHNCMSPHGNDADVFEAASVADLEPVYIDGSMAFMFETRYVYRLTEFAMQTPCLQADYFECWQGLKKHFNESRE

SEQ ID NO: 90075 - protein, 426 aa, Unknown
  Bacterial polypetide isolated from the Sargasso Sea
MTGFGNDFQTEALPNALPEGRNSPQKCAYGLYAEQLSGSPFTAPRSINERSWLYRIRPSVKHTGKYIKTEYPFWKTAPNINANSFPLGQYRWDPFPLPKNETGFIDGIRTITTSGDVNTHAGMAASIYAFNKSIDNIVFTNADAEMLFVPEKESILLFTEMGKMFVSPGEIAVLPRGMMVKVFCEKPSRGYICENYGAKFTLPDRGPIGANCLANPRDFKTPVASFEDIDKKHISIIKWCGSFYKTELDHSPLDVVAWHGNYIPYCYNLKYFSPVGAISFDHPDPSIYTVLTAPTETDGTANVDLVIFPERWAVAENTFRPPWYHRNIMSEFMGLVYGQYDAKPEGFVPGGISLHNMMLPHGPDAEAFEKASNAELEPVKIINTLAFMFETKYPQHLTKFASEAKELQDDYIECWSDIKKNFTGKI

SEQ ID NO: 90076 - protein, 431 aa, Unknown
  Bacterial polypetide isolated from the Sargasso Sea
MDYLTGFGNNFESEALPGALPKGRNSPQKCAYKLYAEQLSGSPFTAPRNLNERTWLYRIRPSVKHSGKFKKIDFPFWKSAPDKKDHNLPLGQYRWDPFSNDKNTNQSFLDGIKTITTTGDVNTHLGMATSIYIFKKPMSYSVFVNADAEMVFVPYLGDIKIFTEMGTIKIKPGEIAVIPRGVSFKVFTDGNISKGYICENYGSKFVLPERGPIGANCLANPRDFKTPIANFEDLEEKHDLIVKWCGSFYITEIGHSPLDVVAWHGNYVPYIYDLRDFSPVGAVSFDHPDPSIFTVLTSHSETPGTANIDLVIFPERWSVAENTFRPPWYHKNIMSEFMGLIYGKYDSRPEGFLPGGISLHNMMLPHGPDYETFEKSSNENLKPVKISNSLAFMFETRFPQHITKFAAECSELQANYIDCWKDIEKKFDGKK

SEQ ID NO: 90077 - protein, 285 aa, Unknown
  Bacterial polypetide isolated from the Sargasso Sea
MRPRRIAVGGQAKSRRRWPLRPFRRMKSLDHGGVGAPVRRREDHRLLRGAGYYSDDIDLPDQLFAVMVRSPHAHARLDHIDIRTASKLPGVHAVLTGADYVADGIADIGHVANPAGAVDWQKPAFVNRDGSAPFDVPQPTVVREKVRHVGEVVAVVVADTDAIARDAADLVVVAYDTLPVVTDALKALEHDAPSVWDDCPGNVPLDAELGDSAATQAAFSDAAHVVNARFFNNRVINCQMEPRSAVGDWDAAAGRMTLYAGGQGVHRHKMILGTMFGLEPDYVRV

SEQ ID NO: 90078 - protein, 467 aa, Unknown
  Bacterial polypetide isolated from the Sargasso Sea
MSLTSNAIKNPGLRTLPPGVERYHIQGGGINILEIFPEDKIEIINDEGKQLCEVLVFNSKGKEDLSILSLKKNSSGDYLKKNINQDEKISKLLKRKKLELNKSNSSIIFSEDCPMGEKIILKSKDKCIVMLASPGNEMNVHNQNPPTSLTIFIHRSKFDIKEEQFILPEPLYDPITETFVKRMSSETYEVKAGEYIQVIDPGGRQCSDFLAFDKKKLDQGIESIIDPTATRTFMGGAYPMPGLFSKFFDANHDPVIEVVRDTVGRHDTFNYACTSKYYEDMGYLGHINCSENFNNSLKKYDVKPRKGWIAINLFFNTAIDANNVATFDEPWSRPGDYVLFRALKDLTCASSACPCDVDAANGWNPTDIFVRTYPKDKKISKGVAFRVNTNSEPKITKETGFHSKTSKLTKNFVNYNGYWLANNYTNYGAVKEYTSCRESAILTDLSPLRKFEILGPDAENLMQYTLT

SEQ ID NO: 90079 - protein, 234 aa, Unknown
  Bacterial polypetide isolated from the Sargasso Sea
AESLEIASFVLTPVDGKAVKDFVPGQYLSIKAQHPKLAFDEIRQYSLSDAPNGRSYRITVKRELNGQVSNLLHDVLQVGDILSVMPPAGDFTLAVQAETPVVLISAGVGQTPMKSMLNQLLKLRHPSTVTWLHACEHGGVHGFKSAIKNKLGQHANLASHVWYREPTKADVLGQDYDFEGTMDLTSVADKIVANAHYYFCGPIGFMASIKQQLLAFGVPSEQMHYEVFGPHAEL

SEQ ID NO: 90080 - protein, 234 aa, Unknown
  Bacterial polypetide isolated from the Sargasso Sea
MLCAEQTALIKATVPLLESGGEALTTHFYNLLLSEHPEVRPLFNQAHQASGEQPRALANGVLMYAKHIDRLDALGPLVAQIINKHVALQVLPEHYPLVGSCLLRAIREVLGDEIATDAVIDAWGAAYQQLANILIGQEENLYQIKAEADGGWRGARRFRIARKTVESAEITSFHLQPEDGGALMDFLPGQYIGLRLEVDGQEVRRNYSLSAASNGSEYRISVKREPGGVASNAL

SEQ ID NO: 90081 - protein, 285 aa, Unknown
  Bacterial polypetide isolated from the Sargasso Sea
PIVGTCLLRAIREVLGAEIATDEVIAAWGAAYQQLADILIGAERQAYDRTAAAEGGWRGERAFVVEDKVAESAEITSFYLVPADGSPVIAHQPGQYIGLRLVVDGQEQRRNYSLSAPADGRSLRISVKREAGGKVSNFLHDRVRVGDTLQLFPPAGHFTLQLGERPLVLISGGVGITPTLPMLDAALPSKRPVVFIHCARERGVHAFRERVDALAAEHPQLSRYYCYDRVEEGDEADAQGLLTARQLGQWLPSVDADVYFLGPRPFMRSVKESLRVLGVPEGQVR

SEQ ID NO: 90082 - protein, 119 aa, Unknown
  Bacterial polypetide isolated from the Sargasso Sea
MGSLARHEHQAQVNWFHAAENGLRHAFADHVNNTGGQLRHFTQQVWYSKPGPADITGTGSIKAGHMDLTPYISSLNDSQMTWWLCGPVGFMQFIARQLVDNGVNAERIRYECFGPHKVL

SEQ ID NO: 90083 - protein, 226 aa, Unknown
  Bacterial polypetide isolated from the Sargasso Sea
MKKNLLIVDDDQRLRGLLKNYLSKKNLDVYLCDDFKKAKNIIKFFIFDLIILDRMMPTGDGINLVNDIKKISHTPVIILTAMGEDFDKIDGLKIGADDYISKPFEPEELFLRIKNLFNFYNDKSNINMHVKFGDYIFNMSNQELKKNNHLVYLTEGENNLLTKLVKKKNDFVLREELAEKEFDETELRKVDVQITRLRQKIEKNPKQPQFIKTIRGKGYKLICSEI

SEQ ID NO: 90084 - protein, 401 aa, Unknown
  Bacterial polypetide isolated from the Sargasso Sea
MLSDKSKPYIDASVPVLREHGLTITQTFYRNMFASHPELTNVFNMGNQANGSQQQSLASAVFAYAANHGNNAALAPVVNRIVHKHAAVGIKPSHYPIVARHLLGAIAEVLGDAATPDLLAAWDEAYWLLAAELIAAEARLYQHTGSGPDHRQPVRIVSRRQQAEDVVSLTLEAVGDAPLADFLPGQYISVQVELAPGALQQRQYSLSDAPNGRTWRISVKRDAGDADRPAGTVSSWLHANAREGDVLLVSQPYGDFVPQLATSNPIVLMSAGVGITPMISALNTLAQQNSARKIVFSHASRAASHVAHADDLERAAQALPAFEAHVFLESGEDAEFAQRPAHPGRMTVDTFVRDHGAEADFYLCGPLPFMQAQRAALLASGVPSERIHREVFGPDLLDDIL

SEQ ID NO: 90085 - protein, 312 aa, Unknown
  Bacterial polypetide isolated from the Sargasso Sea
MTVLTADQIARVKATVPVLAEHGTTITKHFYKRMFAHHPELKNVFNQTHQQSGNQPETLAKAVYAYAANIDNLGALGPTVSRIAHKHASLNIRPEQYPIVGRHLLGAFVDVLGDAVDQETLGAWEVAYGQLADIFIGAEAKLYEGAAWSGFRPFKVVRKEVESDEITSFYLTPADGSPACGFEPGQYLSVKRFVDELGVDQPRQYSLSDAPNGKWLRISVKREAGRADQAPGHVSNLLHDGVEVGEVVHASAPMGDFTLARKKTTPVVLMSGGVGVTPMTSMLSTLLADHSERSVTFVHACRNGRVHAFRQW

SEQ ID NO: 90086 - protein, 253 aa, Unknown
  Bacterial polypetide isolated from the Sargasso Sea
MLTNAQRDLIKATVPLLESGGEALTTHFYRMMLSEHPEVRPLFNQAHQASGDQPRALANGVLMYARHIDRLEALGPLVRQVVNKHVALQILPEHYPIVGGCLLRAIREVLGAEIATDAVIEAWAVAYQQLADIFIGAEEQLYTENAAAPGGWRGARSFRVARKVVESAEITSFHLVPVDGGALLDHQPGQYIGMRLLLDGEEVRRNYSLSALANGREYRISVKREVGGRVSNHLHDKVQVGNELELFPPSGEF

SEQ ID NO: 90087 - protein, 292 aa, Unknown
  Bacterial polypetide isolated from the Sargasso Sea
EALGGLVGQIVNKHVALQVLPEHYPIVGRCLLRAIREVLGAEIATDAVIDAWAAAYGQLADLLIGAEQARYDAAALAQGGWRGARRFVIARKVQESAEITSLYLEPADGGPVMDFQPGQYIGLRLQIDGEEVRRNYSLSAPSNGRSYRISVKREAGGLVSNALHAMSEGEALELFAPAGEFTLQPGDRPLVLISGGVGITPTLPMLEQALAQSRPIRFIHCARNAEVHAFREHVDSLAEQHGALERFYCYEEAASTTASPDAVGRLTEAQLADWLPERDEDVYFLGPKPFMT

SEQ ID NO: 90088 - protein, 294 aa, Unknown
  Bacterial polypetide isolated from the Sargasso Sea
EVLGIDESSEIIDACSAAYGALADIFIGREGALYQHQQDTFGWQGFKPFVVARREQESENIVSLYLARQDGEALQPHQPGQYITVRVTPPGGLPVMRNYSLSCAPGESHYRISVKRERALADEAPDGVCSGYIHEHLQEGDVVEVAPPCGEFTLADANAEGVPLVLVAGGVGVTPLLSMLHGALAHQQGREVIFIQCALNGAVRPFAAELQQLADNHDNLHCHVRYSEPSAQDQEKGDFDSTGFLDCALLDQLVGDRRAEYYFCGPVPMLKAVYGLLQDKGVDDADIHYEFFGP

SEQ ID NO: 90089 - protein, 402 aa, Unknown
  Bacterial polypetide isolated from the Sargasso Sea
MTHITADQMARVKATAPVLAVHGATITKHFYQRMFARHPELKNLFNQTHQKTGSQPETLAKAVYAYAANIDNLGALGGAVTRIAHKHASLNIRPEHYPIVGENLLASIVEVLGDAVDAETLEAWRVAYGQLAQILIGVEADLYAGAAWSGFRPFKVERKVRESDEITSFYLTPADGGAAPTFEPGQYITVKRFVGDLGVDQPRQYSLSDAPHRKWLRISVKREAGKPEVIPAGKVSTLMHDGVEEGAIVEVTAPMGEFSLKRGVETPVVLISGGVGITPMMSMASTLVAEGSQRDVRFVHACRSGAVHAFRDWLNDTVREHADVKRTVLYERVGPNDRAGIDHDLEGRLTPERVQQYALVPDADYYICGPIGFMKAQRDALVALGVAPERVNTEIFGSGALE

SEQ ID NO: 90090 - protein, 397 aa, Unknown
  Bacterial polypetide isolated from the Sargasso Sea
MLDSRTIQVIKSTIPLLESAGPALTQHFYERMFKHNPELKDVFNLAHQHSGGQPVALFNAVAAYAKNIDNLGALGSAVERIAHKHTGFLIQPEQYAIVGSHLLATLKELGGEAVTEEVLTAWADAYGFLANIFINREAQIYQESAQQDGGWSGVREFIISEKKAESLEIASFVLTPVDGKAVKDFVPGQYLSIKAQHPKLAFDEIRQYSLSDAPNGRSYRITVKRELNGQVSNLLHDVLQVGDTLSVMPPAGDFTLAVQAETPVVLISAGVGQTPMKSMLNQLLKLKHPSTVTWLHACEHGGVHGFKSAIKNKLGQHANLASHVWYREPTKVDVLGQDYDFEGTMDLTSVADKIVANAHYYFCGPIGFMASIKQQLLAFGVPSEQMHYEVFGPHAEL

SEQ ID NO: 90091 - protein, 132 aa, Unknown
  Bacterial polypetide isolated from the Sargasso Sea
MLSAGVGVTPMMSMLNQLLANGHQADITWLHACEQGAVHAFREDIQQKSRQNANLLSRVWYREPQASDVQGEGYDFAGTMDLSAVKERITLQAHYYFCGPVGFMQAVKQQLIAAGIPAGQLHYEVFGPHQDL

SEQ ID NO: 90092 - protein, 397 aa, Unknown
  Bacterial polypetide isolated from the Sargasso Sea
MLSAQTIAIVKSTVPLLEGAGVAITNHFYQRMFQVNPELKDIFNMTNQHSGRQQFALFSAIAAYAKNIDNLSVLTETVERVAHKHTSLFIQPEHYDIVGHHLIETLRELAPDAFTPEVEQAWTEAYGVLAKIFIGRERTLYNQTEQKPGGWYGPRRFKIEQKIRESELVSSFVLVPKDGEAVVDYLPGQYLGVKVKPAFCDYYEVRQYSLSDKANGQSYRISVKRELGDKPGLVSNYLHDHMQAGDELDILPPAGDFFLQSAHLPTVLISAGVGLTPMLSMLESIVALKQQTPVFFLHACENAEQHSFAQRISQLEQDYPLLHNFTWYNKAEQNTAANQFAGLMDLKAVAAQLPLQSANFYLCGPTGFMKFAKDQLLALGVASAQIHYEVFGPHSDL

SEQ ID NO: 90093 - protein, 396 aa, Unknown
  Bacterial polypetide isolated from the Sargasso Sea
MLDAQTIATVKATIPLLVETGPKLTAHFYDRMFTHNPELKEIFNMSNQRNGDQREALFNAIAAYASNIENLAALLPAVEKIAQKHTSFQIKPEQYNIVGGHLLATLDEMFSPGQEVLDAWGKAYGVLANVFINREAQIYSENANKNGGWEGTRPFRIVAKTPRSALITSFEFEPVDGGAVAEYHPGQYLGVWLKPEGFPHQEIRQYSLTRKPDGKGYRIAVKREDGGQVSTWLHNHANVGDVVHLAAPAGDFFMDVATDTPVSLISAGVGQTPMLAMLDTLAKAKHTAQVNWFHAAENGDVHAFADEVNELGKTLPRFSAHTWYREPTETDRAKGAFDSVGLMDLNKLESAISDPAMQFYLCGPVGFMQFAAKQLVGLGVKNENIHYECFGPHKVL

SEQ ID NO: 90094 - protein, 390 aa, Unknown
  Bacterial polypetide isolated from the Sargasso Sea
MLSAQTIAIVKSTLPLLESAGVAITNHFYQRMFRLNPELKDIFNMTNQHSGRQQFALFSAIAAYAKNIDNLAVLTETVERVAHKHTSFFIQPEHYGIVGHHLIETLRELAPDAFTPEVEQAWTEAYGALATIFTGRERQLYNQTEQKPGGWYGPRRFKVKEKLSESELVSSFVLVPTDGEAVVDYQPGQYLGVKVKPAYSDYYEIRQYSLSDKPNGQSYRISVKRELGEVAGLVSNYLHNHIQVGDELDILPPAGDFFLQSAHLPTVLISAGVGLTPMLSMLESIVALKQQTPVFFLHACENQQQHSFAQRISQLQQDYSLLHNFTWYNKAEQNTAATQFTGLMDLKAVAAQLPLQSANFYLCGPTGFMKFAKDQLLALGVASAQIHYEV

SEQ ID NO: 90095 - protein, 391 aa, Unknown
  Bacterial polypetide isolated from the Sargasso Sea
MRTQVGIIGAGPAGLLLSHLLSQKGIDSVIIECRSRFYVEGRVRAGVLEQGTVNLLVDAGLGQRLMKEGLHHHGIEIRAGGESHRIDLDSLTGGRGITVYGQQEVVKDLISVRDQQNGKMIFEAQNVEILGIHTEKPKVRFSQAGDQHELECDWIAGCDGFYGVSRNSIPDSEIRSFSREYPFAWLGILVEAPPSSDELIYANHENGFALHSMRSKERTRNYIQCDPHDKIEDWSEDRIWDELHSRLETISGWKLLEGKILEKGITPMRSYVCETMSFGRLFLAGDAAHIVPPTGAKGMNLAISDVRYLSAALFAWYESKSEGLLAQYAENCLRHIWRGEHFSWYMTKLLHKFPDGSLFDERLQKSELEYLFRSEAASKSLAENYVGFSFE

SEQ ID NO: 90096 - protein, 410 aa, Unknown
  Bacterial polypetide isolated from the Sargasso Sea
MRTQVAIIGAGPSGLLLSHLLRLQGIDSILVEARSREYCENRIRAGVLEQGTVDTLNEAGLGDRMRREGLEHHGIELLFSGQRHRIDLSELTGGRAITVYSQHEVVRDLIAAGVEHGHAMHFEVSDVALHDVEGEHPFVTFKHADGREDRIDCDYIAGCDGFHGIARQTIPAERLNTFERVYPFAWLGILADAAPSLDELVYAHHDNGFALFSMRSPTVTRLYLQCKPDEDLTEWSDTRIWDELHTRFSNDTGWTPTEGRITQKSVTPMRSFVSETMQHGRLFLAGDAAHIVPPTGAKGMNLAVADVRALSRALGARYRNGDATLLDTYSATCLERVWRAEHFSYFMTNMLHSSPEDSPFVNRLKFAELKYVTRSRAAAQALAENYVGLPFDDATPPEATRLDNALCATL

SEQ ID NO: 90097 - protein, 317 aa, Unknown
  Bacterial polypetide isolated from the Sargasso Sea
MKVKRTQVGIIGAGPAGLTLARLLFESGISTVILEAKDREYVENRIRAGVLEQGSVELLGRAKSDARLQSNAQIHKGIEISLNGDRCRINLEKLSGGKHVTVYGQTEITIDLIEVHTKLGGEIIFEASNVMPRDFETKTPVIQYESNGDLTELQCDFIAGCDGFHGISRSSIPPSKLKFFERLYPYSWLGILAEAPPPSKELIYASHERGFALYSMRPPTRSRLYLQCENNTTLDNWPDEVIWNELRCRLGVKDANLIQEGEIIEKGVTPMRSFVTEPMQYGNLFLAGDAAHIVPPTGAKGLNLALYDIFYLSNAFT

SEQ ID NO: 90098 - protein, 184 aa, Unknown
  Bacterial polypetide isolated from the Sargasso Sea
EIYNNIKFVKNNFFGPCGAVKTGLISSSADAMVVYPADDLINGNILDEMYRFYLEGYDIVAPSRFMKGGSMKNCPLIKEILVRFASFSLFKLSSIPVEDASNGFRLFSKKIINRFEIESELGFAYSLELLVKAERHGYKIKQIPSQWLERKLGSSNFKILKWLRQYLKWYFYGLATNFVLNKKK

SEQ ID NO: 90099 - protein, 136 aa, Unknown
  Bacterial polypetide isolated from the Sargasso Sea
RYFLNNLPLTSKLWSRFFLLAVFATMYARDLGIKKDFYSSLGLDARDYDQFVINKTNETAARVFPVVMDVYDKSFYGRLDKIVENNEVLSDIANSDGNKVSKTFKKLPKYLSNGYQLLRLYLLKPLDSKDFQPSIR

SEQ ID NO: 90100 - protein, 78 aa, Unknown
  Bacterial polypetide isolated from the Sargasso Sea
MAQSTVESKNKKDINNGKIPAKETILSPRFYTTDFEAMENMDLSINEEELEAICEEFRKDYNRHHFVRNSEFEGAAEK

SEQ ID NO: 90101 - protein, 137 aa, Unknown
  Bacterial polypetide isolated from the Sargasso Sea
FRYFLNNLPLTSKLWSRFFLLAVFATMYARDLGIKKDFYSSLGLDARDYDQFVINKTNETAARVFPVVMDVNNKSFYGRLDKIVENNKILSDIASGTGNKVSKTFRKVPKYLSNGYQLLRLYLLKPLDSKDYQPSIR

SEQ ID NO: 90102 - protein, 155 aa, Unknown
  Bacterial polypetide isolated from the Sargasso Sea
ITIGGSTFTHPLFDYFHRFRYFLNNLPLTSKLWSRFFLLAVFATMYARDLGIKKDFYSSLGLDARDYDQFVINKTNETAARVFPVVMDVYDKSFYGRLDKIVENNKVLYDIANSDGNKVSKTFKKLPKYLSNGYQLLRLYLLKPLDSKDFQPSIR

SEQ ID NO: 90103 - protein, 73 aa, Unknown
  Bacterial polypetide isolated from the Sargasso Sea
MAQSTVESKNKKDINNGKIPAKETILSPRFYTTDFEAMENMDLSINEEELEAICEEFRKDYNRHHFVRNSEFE

SEQ ID NO: 90104 - protein, 88 aa, Unknown
  Bacterial polypetide isolated from the Sargasso Sea
MAQSTVESKNKKDINNGKIPAKETILSPRFYTTDFEAMENMDLSINEEELEAICEEFRKDYNRHHFVRNSEFEGAAEKLDPETRELFV

SEQ ID NO: 90105 - protein, 198 aa, Unknown
  Bacterial polypetide isolated from the Sargasso Sea
PDSKIFPLFNYFENWCQDENRHGDFFDALMKAQPRTVKSLSQKITIGGSTFTHPLFDYFHRFRYFLNNLPLTSKLWSRFFLLAVFATMYARDLGIKKDFYSSLGLDARDYDQFVINKTNETAARVFPVVMDVYDKSFYGRLDKIVENNKVLSDIANSDGNKVSKTFKKLPKYLSNGYQLLRLYLLKPLDSKDFQPSIR

SEQ ID NO: 90106 - protein, 254 aa, Unknown
  Bacterial polypetide isolated from the Sargasso Sea
EFIDFLISSCTAEFSGCVLYKEMKRRGSNEDITQLFQLMARDEARHAGFINDALREAGVAVNLGFLTQKKKYTYFRPKFIYYATYLSEKIGYARYITIYRHLEKNPEHRFHPIFKWFQEWCNDEFAHGEAFALLMKTDPKLTSGINVFWIKFFLTAVYATMYIRDHQRPAFHKALGVDPDWYAEEVFTKTSELSKQIFPITLDIDNPKWFEKLRRLQKVNADLAEAKKNKNKLKQLWCSSRAALIFLSLLAVPA

SEQ ID NO: 90107 - protein, 188 aa, Unknown
  Bacterial polypetide isolated from the Sargasso Sea
MQYTFFKPKFIIYATYLSEKIGYWRYISIYRHLQANPDDQLYPIFQYFENWCQDENRHGDFFTACLKARPEFINDFEAKLWARFFCLSVYVTMYLNDHSRTEFYESIGLNTTQFNMHVIHQTNKTTASIFPQVIDTYNPKFKEHLDELVVVNQKLAKAESPVEKAPLIASFAFHLLSIALRSPSIRAP

SEQ ID NO: 90108 - protein, 211 aa, Unknown
  Bacterial polypetide isolated from the Sargasso Sea
GRYIAIYRHLEKNPDNKIFPLFNYFENWCQDENRHGDFFDALMKAQPRTVKSLSQKITIGGSTFTHPLFDYFHRFRYFLNNLPLTSKLWSRFFLLAVFATMYARDLGIKKDFYSSLGLDARDYDQFVINKTNETAARVFPVVMDVYDKSFYGRLDKIVENNKFLSDIANSDENKVSQTFKKLPKYLSNGYQLLRLYLLKPLDSKDFQPSIR

SEQ ID NO: 90109 - protein, 217 aa, Unknown
  Bacterial polypetide isolated from the Sargasso Sea
SRKIGYWRYIAIYRHLEKNPDSKIFPLFNYFENWCQDENRHGDFFDALMKAQPRTVKSLSQKITIGGSTFTHPLFDYFHRFRYFLNNLPLTSKLWSRFFLLAVFATMYARDLGIKKDFYSSLGLDARDYDQFVINKTNETAARVFPVVMDVYDKSFYGRLDKIVENNKVLSDIANSDTNKVSKTFKKLPKYISNGYQLLRLYLLKPLDSKDFQPLIR

SEQ ID NO: 90110 - protein, 199 aa, Unknown
  Bacterial polypetide isolated from the Sargasso Sea
MNKHSADATTAEEAIAIQSALDSDMATEVAMQDTLLTPRFYTTDFDKLDAIDVSQISEEWEPLIERMLSDPNKGHFKKNDDWDKVDWDGMDPELKKEFIDFLISSCTAEFSGCVLYKEMKRRGSNEDITQLFQLMARDEARHAGFINDALREAGVAVNLGFLTQKKKYTYFRPKFIYYATYLSEKIGYARLYYQYIGTP

SEQ ID NO: 90111 - protein, 221 aa, Unknown
  Bacterial polypetide isolated from the Sargasso Sea
MKDLIDDNTTDMAMEETLISPRFYTTNYKELDKIDVSRVRSEWDPLVEEMRSDPNKTHFKKTSDWDDFDFENLEPGLRKEFIDFLVSSLTSEFSGCVLYKEMKRQGTNEDVCELFSLMARDEARHAGFINDALREANIAVNLGFLTRKKKYTYFSPKFIYYATYLSEKIGYARYITIYRHLEKNPDSRFHPIFKWFEKWCNDEFRHGEAFALLMRTDPKLT

SEQ ID NO: 90112 - protein, 214 aa, Unknown
  Bacterial polypetide isolated from the Sargasso Sea
IGYWRYIAIYRHLEKNPDSKIFPLFNYFENWCQDENRHGDFFDALMKAQPRTVKSLSQKITIGGSTFTHPLFDYFHRFRYFLNNLPLTSKLWSRFFLLAVFATMYARDLGIKKDFYSSLGLDARDYDQYVINKTNETAARVFPVVMDVYDKSFYGRLDKIVENNKVLSDIANSDGNKVSKTFKKLPKYLSNGYQLLRLYLLKPLDSKDFQPSIR

SEQ ID NO: 90113 - protein, 306 aa, Unknown
  Bacterial polypetide isolated from the Sargasso Sea
EWEPLIERMLSDPNKGHFKKNDDWDKVDWDGMDPELKKEFIDFLISSCTAEFSGCVLYKEMKRRGSNEDITQLFQLMARDEARHAGFINDALREAGVAVNLGFLTQKKKYTYFRPKFIYYATYLSEKIGYARYITIYRHLEKNPQHRFHPIFKWFQEWCNDEFAHGEAFALLMKTDPKLTSGINVFWIKFFLTAVYATMYIRDHQRPAFHKALGVDPDWYAEEVFTKTSELSKQIFPITLDIENPKWFEKLRRLQKVNADLADAKRNKNKVKQLWCSIRAALIFLSLLAVPAKSNKVPNVTKMEPA

SEQ ID NO: 90114 - protein, 335 aa, Unknown
  Bacterial polypetide isolated from the Sargasso Sea
MQDTLLTPRFYTTDFDELDAIDVSQISEEWEPLIERMLSDPNKGHFKKNDDWDKVDWDGMDPELKKEFIDFLISSCTAEFSGCVLYKEMKRRGSNQDITQLFQLMARDEARHAGFINDALREAGVAVNLGFLTQKKKYTYFRPKFIYYATYLSEKIGYARYITIYRHLEKNPQHRFHPIFKWFQEWCNDEFAHGEAFALLMKTDPKLTSGINVFWIKFFLTAVYATMYIRDHQRPAFHKALGVDPDWYAEEVFTKTSELSKQIFPITLDIDNPKWFEKLRRLQKVNANLAEAKRNKNKLKQLWCSTRAALIFLSLLAVPAKSNKVPNVTRMEPAY

SEQ ID NO: 90115 - protein, 293 aa, Unknown
  Bacterial polypetide isolated from the Sargasso Sea
MVPPTAVAEANAVATKDPVKDTILTPRFYTTDFDAMAAMDLRPNEAELEAICEEFRKDYNRHHFVRNDDFDGAADKLDPGTRQVFVEFLEQSCTSEFSGFLLYKELSRRIKQQNPLLAECFAHMARDEARHAGFLNKAMSDFGMQLDLGFLTANKDYTFFQPKFIFYATYLSEKIGYWRYIAIYRHLEKNPESKIFPIFNFFENWCQDENRHGDFFDALMKSQPNTVRGPIAKLWCRFFLLAVFATMYVRDVARKEFYEALGLDARTYDKMVIEKTNETTARVFPVVLDVNNP

SEQ ID NO: 90116 - protein, 237 aa, Unknown
  Bacterial polypetide isolated from the Sargasso Sea
TANKEYTYFPPRSIFYATYLSEKIGYWRYIAIYRHLEKNPDSKIFPLFNYFENWCQDENRHGDFFDALMKAQPRNVKSLSQKITIGGSTFTHPLFDYFHRFRYFLNNLPLTSKLWSRFFLLAVFATMYARDLGIKKDFYSSLGLDARDYDQFVINKTNETAARVFPVVMDVYDKSFYGRLDKIVENNKVLSEIAKSDENKVSQTFKKLPKYLSNGYQLLRLYLLKPLDSKDFQPSIR

SEQ ID NO: 90117 - protein, 235 aa, Unknown
  Bacterial polypetide isolated from the Sargasso Sea
MSQSTIESTNKKEINRGKAPAKETILSPRFYTTDFEAMENMDLSINEEELEAICEEFRKDYNRHHFVRNSEFEGAAEKLDPETRELFVDFLEGSCTSEFSGFLLYKELSKRIKDKNPLLAECFAHMARDEARHAGFLNKSMSDFGLQLDLGFLTANKDYTYFPPRSIFYATYLSEKIGYWRYIAIYRHLEKNPDSKIFPLFNYFENWCQDENRHGDFFDALMKAQPRSVKSLSQK

SEQ ID NO: 90118 - protein, 289 aa, Unknown
  Bacterial polypetide isolated from the Sargasso Sea
TDFEAMENMDLSINEEELEAICEEFRKDYNRHHFVRNSEFEGAAEKLDPETRELFVDFLEGSCTSEFSGFLLYKELSKRIKDKNPLLAECFAHMARDEARHAGFLNKSMSDFGLQLDLGFLTANKDYTYFPPRSIFYATYLSEKIGYWRYIAIYRHLEKNPGSKIFPLFNYFENWCQDENRHGDFFDALMKAQPRTVKSLSQKITIGGSTFTHPLFDYFHRFRYFLNNLPLTSKLWSRFFLLAVFATMYARDLGIKKDFYSSLGLDAKDYDQFVINKTNETAARVFPVV

SEQ ID NO: 90119 - protein, 272 aa, Unknown
  Bacterial polypetide isolated from the Sargasso Sea
MVPPTAVAEQAESNVATKDPARDTILTPRFYTTDFEAMASMDLRPNEAELEAICEEFRKDYNRHHFVRNEEFEGAADKLDPETRRVFIEFLEQSCTSEFSGFLLYKELSRRIKQKNPLLAECFAHMARDEARHAGFLNKSMSDFGVQLDLGFLTANKKYTFFKPKFIFYATYLSEKIGYWRYIAIYRHLENNPDSKIFPIFNFFENWCQDENRHGDFFDALMKAQPDTVRGPIAKLWCRFFLLAVFATMYVRDVARKEFYESLGLDARDYDR

SEQ ID NO: 90120 - protein, 232 aa, Unknown
  Bacterial polypetide isolated from the Sargasso Sea
MVPPTAVAEGSAVAIKDPVKDTILTPRFYTTDFEAMAAMDLQPNEAELEAICEEFRKDYNRHHFVRNEEFEGAADKLDPETRKVFIEFLEQSCTSEFSGFLLYKELSRRIKAKNPLLAECFAHMARDEARHAGFLNKSMSDFGMQLDLGFLTANKDYTFFKPKFIFYATYLSEKIGYWRYIAIYRHLEKNPDSKIFPIFNFFENWCQDENRHGDFFDALMKAQPDTVRGPIA

SEQ ID NO: 90121 - protein, 286 aa, Unknown
  Bacterial polypetide isolated from the Sargasso Sea
MVPPSAIAEAPRSGGEPAIKDPVKDTILTPRFYTTDFEAMAAMDLRPNQDELEAICEEFRKDYNRHHFVRNEAFDGAADKLDPETRRVFVEFLEQSCTSEFSGFLLYKELSRRIKQKNPLLAECFAHMARDEARHAGFLNKAMGDFGVQLDLGFLTANKAYTFFKPKFIFYATYLSEKIGYWRYIAIYRHLEQNPDSKIFPIFNFFENWCQDENRHGDFFDALMKAQPSSVRGLQARLWCRFFLLAVFATMYVRDVARKEFYEALGLDAREYDKYVIAKTNETSAR

SEQ ID NO: 90122 - protein, 296 aa, Unknown
  Bacterial polypetide isolated from the Sargasso Sea
MRQGELFVDFLEGSCTSEFSGFLLYKELSKRIKAKNPLLAECFAHMARDEARHAGFLNKSMSDFGLQLDLGFLTASKDYTYFPPRSIFYATYLSEKIGYWRYIAIYRHLEKNPDNKIFPLFNYFENWCQDENRHGDFFDALMKAQPRTVKSLSQKITIGGSTFTHPLFDYFHRFRYFLNNLPLTSKLWSRFFLLAVFATMYARDLGIKKDFYSSLGLDARDYDQYVINKTNETSARVFPVVLDVYDKSFYGRLDKIVENNKILSDIANSDENNVSKTLKKLPTYISNGYQLLRLYL

SEQ ID NO: 90123 - protein, 238 aa, Unknown
  Bacterial polypetide isolated from the Sargasso Sea
ECFAHMARDEARHAGFLNKAMSDFGMQLDLGFLTAYKDYTFFKPKFIFYATYLSEKIGYWRYIAIYRHLEKNPESKIFPIFNFFENWCQDENRHGDFFDALMKSQPDTVRGPIAKLWCRFFLLAVFATMYVRDVARKEFYEALGLDARTYDKMVIEKTNETTARVFPVVLDVNNPKFWTRLERLVENNAALEAAERSSSPAPMKLLKKLPRWISNGSEMAKLFLMSPIDSAKFQPAVR

SEQ ID NO: 90124 - protein, 236 aa, Unknown
  Bacterial polypetide isolated from the Sargasso Sea
MTQSTVESKNKKDINNGKIPAKETILSPRFYTTDFEAMENMDLSINEEELEAICEEFRKDYNRHHFVRNTEFEGAAEKLDPETRDLFVDFLEGSCTSEFSGFLLYKELSKRIKDKNPLLAECFAHMARDEARHAGFLNKSMSDFGLQLDLGFLTANKDYTYFPPRSIFYATYLSEKIGYWRYIAIYKHLEKNPGSKIFPLFNYFENWCQDENRHGDFFDALMKAQPRTVKSLSQKI

SEQ ID NO: 90125 - protein, 151 aa, Unknown
  Bacterial polypetide isolated from the Sargasso Sea
MAQSTVESKNKKDINNGKIPAKETILSPRFYTTDFEAMENMDLSINEEELEAICEEFRKDYNRHHFVRNSEFEGAADKLDPETRELFVDFLEGSCTSEFSGFLLYKELSKRIKVKNPLLAECFAHMARDEARHAGFLNKSMSDFGLQLDLG

SEQ ID NO: 90126 - protein, 157 aa, Unknown
  Bacterial polypetide isolated from the Sargasso Sea
MREGIKEAASENLLTPRFYTTDFDEMERLFSTEINPNLDIVEINAILNEFREDFNQKHFVRNDEFKAAADDIKGEPRRIFIEFLERSCTAEFSGFLLYKELGRRLKKTAPEVAEIFVLMSRDEARHAGFLNKAMSDFNLALDLGFLTKNRQYTFFQP

SEQ ID NO: 90127 - protein, 131 aa, Unknown
  Bacterial polypetide isolated from the Sargasso Sea
CFAHMARDEARHAGFLNKAMGDFGVQLDLGFLTANKAYTFFKPKFIFYATYLSEKIGYWRYIAIYRHLEKNPDSKIFPIFNFFENWCQDENRHGDFFDALMRAQPSSVRGLQARLWCRFFLLAVFATMICA

SEQ ID NO: 90128 - protein, 244 aa, Unknown
  Bacterial polypetide isolated from the Sargasso Sea
MAQSTVESKNKKEVNNGKMPAKETILSPRFYTTDFEAMENMDLSINEEELEAICEEFRKDYNRHHFVRNSEFEGAAEKLDPETRELFVDFLEGSCTSEFSGFLLYKELSKRIKDKNPLLAECFAHMARDEARHAGFLNKSMSDFGLQLDLGFLTANKDYTYFPPRSIFYATYLSEKIGYWRYIAIYRHLEKNPDSKIFPLFNYFENWCQDENRHGDFFDALMKAQPRTVKSLSQKITIGGSTFT

SEQ ID NO: 90129 - protein, 309 aa, Unknown
  Bacterial polypetide isolated from the Sargasso Sea
NEEELEAICEEFRKDYNRHHFVRNSEFEGAAEKLDPETRELFVDFLEGSCTSEFSGFLLYKELSKRIKVKNPLLAECFAHMARDEARHAGFLNKSMSDFGLQLDLGFLTANKDYTYFPPRSIFYATYLSEKIGYWRYIAIYRHLEKNPDSKIFPLFNYFENWCQDENRHGDFFDALMKAQPRTVKSLSQKITIGGSTFTHPLFDYFHRFRYFLNNLPLTSKLWSRFFLLAVFATMYARDLGIKKDFYSSLGLDARDYDQFVINKTNETAARVFPVVMDVYDKSFYGRLDKIVENNKVLSDIATVREIQY

SEQ ID NO: 90130 - protein, 259 aa, Unknown
  Bacterial polypetide isolated from the Sargasso Sea
TAVAEANAVATKDPAKDTILTPRFYTTDFDAMAAMDLRPNEAELEAICEEFRKDYNRHHFVRNDDFDGAADKLDPETRRVFVEFLEQSCTSEFSGFLLYKELSRSIKQQNPLLAECFAHMARDEARHAGFLNKSMSDFGMQLDLGFLTANKDYTFFQPKFIFYATYLSEKIGYWRYIAIYRHLEKNPESKIYPIFNFFENWCQDENRHGDFFDALMKSQPDTVRGPIAKLWCRFFLLAVFATMYVRDVARQGILRSTRT

SEQ ID NO: 90131 - protein, 148 aa, Unknown
  Bacterial polypetide isolated from the Sargasso Sea
MSQSTIESTNKKEVNRGKAPAKETILSPRFYTTDFEAMENMDLSINEEELEAICEEFRKDYNRHHFVRNSEFEGAAEKLDPETRELFVDFLEGSCTSEFSGFLLYKELSKRIKDKNPLLAECFAHMARDEARHAGFLNKSMSDFGLQL

SEQ ID NO: 90132 - protein, 245 aa, Unknown
  Bacterial polypetide isolated from the Sargasso Sea
MVPPTAVAEGSAVAIKDPVKDTILTPRFYTTDFEAMAAMDLQPNEAELEAICEEFRKDYNRHHFVRNEEFEGAADKLDPETRKVFIEFLEQSCTSEFSGFLLYKELSRRIKAKNPLLAECFAHMARDEARHAGFLNKSMGDFGMQLDLGFLTANKDYTFFKPKFIFYATYLSEKIGYWRYIAIYRHLEKNPDSKIFPIFNFFENWCQDENRHGDFFDALMKAQPDTVRGPIAKLWCRFFLLAGSP

SEQ ID NO: 90133 - protein, 238 aa, Unknown
  Bacterial polypetide isolated from the Sargasso Sea
LPANKDYTYFPPRSIFYATYLSEKIGYWRYIAIYRHLEKNPDSKIFPLFNYFENWCQDENRHGDFFDALMKAQPRTVKSLSQKITIGGSTFTHPLFDYFHRFRYFLNNLPLTSKLWSRFFLLAVFATMYARDLGIKKDFYSSLGLDARDYDQFVINKTNETAARVFPVVMDVYDKSFYGRLDKIVENNKILSDIANSDGNKVSKTFKKLPKYLSNGYQLLRLYLLKPLDSKDFQPSIR

SEQ ID NO: 90134 - protein, 295 aa, Unknown
  Bacterial polypetide isolated from the Sargasso Sea
GSLDRLQELPQKAKETYESYLVRSVISEFSGFLLFKEISNRLKKEGNRDLGKLFQFLARDEARHAGFLSRALVAEGIEVDLPHLGGKRAATWFPISWVIYSVYLSEKIGYWRYILMDRHLKANPDQAFAPLFDFFEPWCQDENRHGDCFTVMMRCWPGITKGFRGKLLSRFFLWSVFLTHTLTVCERGEFYELLGIDPKEFDEEVIKRTNHTSKNAFPWVFNLDDNKFWDLRNKIIESFRAFVGAKGLTKPVKFVKFATLIFKQFALPMEKTNALRYDKNVNFTGQDILNFWTDK

SEQ ID NO: 90135 - protein, 361 aa, Unknown
  Bacterial polypetide isolated from the Sargasso Sea
MKSEITEEKLSRGKPVNETTKMAHETTLLNPRFYTTDFDELDKVRVDRVRSDWDKLIAELKSDPNRSHFKKTSDWDEIDFDALEPELRKELIDFLVSSLTAEFSGCVLYKEMKRRGNNPDICELFGYMSRDEARHAGFINDALREVGMDVNLGFLTRTKKYTYFKPKFIFYATYLSEKIGYARYITIYRHLEKHPDSRFHPIFKWFEKWCNDEFRHGEAFALLMKTDPKLTSGLNVWWIRFFLVAVFATMVVRDHARPAFHRALNVDIEWYDREVLRITSEISRQVFPIEIDLNHPRWELGLKKLRRAFERMDEGRRQGGLLGNFKKIVAASRAAFIFISLYSIPVKKNIVPDNSCLQPTY

SEQ ID NO: 90136 - protein, 356 aa, Unknown
  Bacterial polypetide isolated from the Sargasso Sea
MVPPTAVAEANAVETKDPVKDTILTPRFYTTDFDAMAAMDLRPNEAELEAICEEFRRDYNRHHFVRNDDFDGAADKLDPETRRVFVEFLEQSCTSEFSGFLLYKELSRRIKQQNPLLAECFAHMARDEARHAGFLNKAMSDFGMQLDLGFLTANKDYTFFQPKFIFYATYLSEKIGYWRYIAIYRHLEKNPEIKIFPIFNFFENWCQDENRHGDFFDALMKSQPDTVRGPIAKLWCRFFLLAVFATMYVRDVARKEFYEALGLDARTYDKMVIEKTNETTARVFPVVLDVNNPKFWTRLERLVENNAALEAADRSSSPAPLKLFKKLPRWISNGAEMAKLFLMSPIDSAKFQPAVR

SEQ ID NO: 90137 - protein, 390 aa, Unknown
  Bacterial polypetide isolated from the Sargasso Sea
MAQSTVESKNKKDINNGKIPAKETILSPRFYTTDFEAMENMDLSINEEELEAICEEFRKDYNRHHFVRNSEFEGAAEKLDPETRELFVDFLEGSCTSEFSGFLLYKELSKRIKVKNPLLAECFAHMARDEARHAGFLNKSMSDFGLQLDLGFLTANKDYTYFPPRSIFYATYLSEKIGYWRYIAIYRHLEKNPDSKIFPLFNYFENWCQDENRHGDFFDALMKAQPRTVKSLSQKITIGGSTFTHPLFDYFHRFRYFLNNLPLTSKLWSRFFLLAVFATMYARDLGIKKDFYSSLGLDARDYDQFVINKTNETAARVFPVVMDVYDKSFYGRLDKIVENNKVLSDIANSDGNKVSKTFKKLPKYLSNGYQLLRLYLLKPLDSKDFQPSIR

SEQ ID NO: 90138 - protein, 234 aa, Unknown
  Bacterial polypetide isolated from the Sargasso Sea
KDYTYFPPRSIFYATYLSEKIGYWRYIAIYRHLEKNPDSKIFPLFNYFENWCQDENRHGDFFDALMKAQPRTVKSLSQKITIGGSTFTHPLFDYFHRFRYFLNNLPLTSKLWSRFFLLAVFATMYARDLGIKKDFYSSLGLDARDYDQYVINKTNETSARVFPVVLNVYDKSFYGRLDKIVENNKVLFDIANSDGNKVSKTLKKLPTYLSNGYQLLRLYLLKPLNSKDFQPAIR

SEQ ID NO: 90139 - protein, 64 aa, Unknown
  Bacterial polypetide isolated from the Sargasso Sea
MFKKLAKLRYLPNKFEVISEGDHVICAISQKKITLENLTYWSVENQEAYFSYFEAYKKREMNKK

SEQ ID NO: 90140 - protein, 135 aa, Unknown
  Bacterial polypetide isolated from the Sargasso Sea
MGGEVEGLSVAWFGRPEGDPQGIGPHVDALGRDGDSKSGVTIWFALDPVNIKNGCLRYLPGSHREEYANDMPIPNIDRESADVIAAELAPGDAVVHSAHTVHWSGGNHSDEPRDAVSFFYSCPSDSAVRQASGFH

SEQ ID NO: 90141 - protein, 262 aa, Unknown
  Bacterial polypetide isolated from the Sargasso Sea
MQIGIDLGATKIESVLLKENGLELHRDRIQSPKNYKKTISDITNIVNNIEKKFKKNLNVGICHPGSTNLETGFIQNAFNSPWLNNQTFAKDISKSLNRNVYCENDANCFALSEAFDGSAKNFKTVFGIILGSGCGGGLVIDKKIIIGPNSFTGEWGHIPIGKPDSETNIEEYISGKGLERKFTARFNKNLSAHEIFKNAKDNSQDEIEIIDEFKKKLARSLSLIINVIDPDAIVFGGGVSNEIESLDEIKKTTEKYLSNFNN

SEQ ID NO: 90142 - protein, 86 aa, Unknown
  Bacterial polypetide isolated from the Sargasso Sea
MSKIAPYSDDDLKTHDFKDRKELCDAMYDTMKKYGGIGLSANQVGLPYRMFVMGGHPQIDLGRTRYCFNPKVLDMSKEMVMMKEGC

SEQ ID NO: 90143 - protein, 65 aa, Unknown
  Bacterial polypetide isolated from the Sargasso Sea
MNKKLAKLRYLPNNFQIIEKGDYVVCAISGKKINLDNLNYWNVELQEPYFSYVEASKKKEKLDKK

SEQ ID NO: 90144 - protein, 285 aa, Unknown
  Bacterial polypetide isolated from the Sargasso Sea
MPICTGQELTDRLMEQIAPFDPVFHYGQMAEALEKLDDGSWMLTTSDGVKLNAPVVVIAAGGGSFVPKRPPLSDLDDFEASGAVQYAVRKRDTLVGKQLVIAGGGDSALDWTVNLVDIAESVTLVHRRDDFRAAPDTVAKMRALVAEGRVTLHIGQLKGLEGTGGQLDNVLVQAAGAEAPDALAADVLLPFYGLTMKLGPIAEFGLNLEENLIPVDTERFETSEPSIFAVGDINDYPGKLKLILSGFHEAALMSHAAYSIIHPDKKIRFQYTTSSSSLQKKLGVA

SEQ ID NO: 90145 - protein, 326 aa, Unknown
  Bacterial polypetide isolated from the Sargasso Sea
NDYIKRADYFGMGKTNTGDLKRMLRYLPNDYQLLYTARQLLMSRSYGVDNAISKVPNKMKNDPGLNYDRLKWRRKRGRVDSSLEILLNIKNTKDYMVRPDKWWKERAIIARSLIYKKRYETAYKISSRHGLTEGPEFAEAEWMSGWISLSFLDDPIRAEEHFKKFYNNVSYPISLSRGAYWLGRTYEKQGNLEKSREWFVVGSKYLTTYYGQLSHMKVYPNQDFELNKLMEIEKKYAEKFYKNELVKIVYLLNELNKDKYTKYILRHLANIDIDKGSEILAAKLATDISRYDFAIQISKIASYEKRFHNKFNYPINSTPKRINGRK

SEQ ID NO: 90146 - protein, 288 aa, Unknown
  Bacterial polypetide isolated from the Sargasso Sea
KGNYIHIDTAAMYRNEKFIGKVLDEDEELFARGKLFITSKVPPKHLTSAAAVKKCVEKSLIDLFGAGMMLPPDPKDAYLDMVLIHYPSDFSDDPKGARLAAWGALEELVREGRVRAIGVSNYQVRHLDELVERKKGGAVQNALLPAVNQIEMHPGRLGREKGVVEFCAEHGILIEAYCPMMQGDKRLLANEVVSGIAKGHGVTGAQVCLRWCLEKGFIVLPKSETESRIVGENAPRFIEGFSLSGEEVRKLDALGDWALGKNDADGSDSEDGEDTPFPKVCWSSNDVP

SEQ ID NO: 90147 - protein, 146 aa, Unknown
  Bacterial polypetide isolated from the Sargasso Sea
MIDFKNKKIIITGATGGIGGALVKKFISLGGTVLATGTKTEKLDLIKKNYPTVKVKKFNISEHSAIEEFINSCNSELGGLDILINNAGVNADNLSLRMKDEEWKRVIDINLTSTFLLSKYAIKVMLKNKFGRVVNVTSIVGHTGNL

SEQ ID NO: 90148 - protein, 146 aa, Unknown
  Bacterial polypetide isolated from the Sargasso Sea
MSDAEVSELRGRALPLAERMTSQDHGAGKYKNVIKSLHHYDSYLDAQLKSGKHVQFLEQLLGGEVEGLSVAWFGRPEGDPQGIDPHVDVLGRDGDSKSGVTIWFALDPVNIKNGCLRYLPGSHREEYANVMPIPILIGSLRTLLLQ

SEQ ID NO: 90149 - protein, 360 aa, Unknown
  Bacterial polypetide isolated from the Sargasso Sea
MQAKENLLGYSLESLESFFSKINEPKFRAKQLLKWIHQKGVLDFNLMTDLNKDLRAKLNSIAYIKPPIIHEEHVSKEGTIKYLIALESGSMIEMVEIPEKNRRTLCVSSQAGCALQCTFCATGAQGFDQNLDSHEIIGQLWLSNFHRKYNQPITNIVFMGMGEPLLNFDAVIESAKIMKHQLAYGLSRKRITISTSGIVPNIKKLYDEIDVSLAISLHAPDDKLRDEIVPINNKYPIDSLIDACKDYLNKYQNKRSITVEYILIDGINDSILHAKKLTRLLSTMSCKINLIPFNSFKGSNYKRPTLKKINLFKDYLMNKGYITTLRITRGDEIDGACGQLVGNLAHSIKGKHLISHKLIS

SEQ ID NO: 90150 - protein, 379 aa, Unknown
  Bacterial polypetide isolated from the Sargasso Sea
VIIKEGWIKAEMSTSELRYFRSKFKSFLSSDDYINRAEYLAWERKYWDLKRLLRYLPNDEKALYNARQILMSNSYGVDNAISKVPAHLKNDIGLQYDRLRWRARRGRLEPSLEILYKNSNKSEDELVRGDLWWKQRESVVRSLLYKKRFKTAYKVASEHSLSSGPEFAEAEWLSGWIAHSFLKSPEYSVNHFLNFYDNVSYPISLARGAYWLGKSYQALGDQKNSQKYFSEGAEFLTTYYGQLSFNEINKGGEFKLDDDSSFSKEYEKEFSKNKLIKIVKILRELDQTKYSKDIIKFLATLDIERGSEVLAARLATEVGRFDYAIQISKQASYKKRFFLKYNYPIISTPRQINNKSMPSSDVILAIIRQESEFDSKANS

SEQ ID NO: 90151 - protein, 65 aa, Unknown
  Bacterial polypetide isolated from the Sargasso Sea
MHKKLAKLRYLPNNFEIVEEGDHVVCAISGKKINLNNLNYWNVDLQEAYFSFKEAHLKNEEIKKK

SEQ ID NO: 90152 - protein, 373 aa, Unknown
  Bacterial polypetide isolated from the Sargasso Sea
MNNNSNSKFPSEAEVIIVGVGGIVGSMLAYWLAELGQENIVGLEKSTIIPSDIASTAHASDFVYNTTHDKLGCWTTAFSRKFYEDNGFFLKKGGLEICRKNDDERWEELKRKVASGKAFGTNVKLISAAEAVEKFPLLEEESLRGAMWDPDAGLVVPRSQEVVNFAVESAKEKGSLKTFTNTPATGFETENGKIVAVKTDKGIIKTNKVVIASGIWGPLMGDMVGVSVPLMPLEHPLLFFGPYEDIQETNELLVYPLLRDQGNSAYVRDTGKLHGGMLEWGFYEDKNPRLVDPKDIGNPDKTMLSDSMRYLELEEIAEPLEKAFETTPILSELGWDEKSSFNGLLSVTADAGSLIGESPEVRGFWLCEAVWVK

SEQ ID NO: 90153 - protein, 452 aa, Unknown
  Bacterial polypetide isolated from the Sargasso Sea
GSELIKEGWINASLSSKDLRYLNKKYKKFLNSSDHIKRADYMAWEYKYWDLKRILRYLPNDYRALYNARQILMSNSYGVDNAIAKVPDNFKSDIGLRYDRLKWRRRRGRIESSLEIINKAPNNESELIRADLWWKERHIVSRSLIYKKKYQLAYEVAKNHSMREGPEFAEAEWISGWIALSFLNNPNKALGHFKSFYENVGYPISLARGAYWIGTTYEKLGKKKLSEDYFKEGAKYLTTYYGQLSFKKINPFGDFELKDQSKYSKDYEKEFNKNPLVRHVILLKELNKTKYTKDILKHLAANDIDKGSEVLAAKLATEVGRYDFAIQISKKASYEKRFYNKFNYPIITTPRVINGKAMPSQEIILAITRQESEFDPKANSYAGAKGMMQLMTYTAKLVAKQMKVPYSKSKLTSDPEYNIKLGSYYFNSLLNDYREVYPFAIAAYNAGPKRVR

SEQ ID NO: 90154 - protein, 65 aa, Unknown
  Bacterial polypetide isolated from the Sargasso Sea
MKGVKAKLRYLPNTFEILEKGDYVECAVTKKKIPLENLHYWNVDLQEAYFSPTEVKLRHEKISSK

SEQ ID NO: 90155 - protein, 117 aa, Unknown
  Bacterial polypetide isolated from the Sargasso Sea
MTASYLRGGFRFYNRLQRPTEFAAVFASNNKSSDEVFLFLARKNGTDIARLGVTVPKRHITKAVDRNRAKRIIRESFRLQKKKLKGMDVVVLVKKEINKNKSKYADALNRHWEKVTE

SEQ ID NO: 90156 - protein, 271 aa, Unknown
  Bacterial polypetide isolated from the Sargasso Sea
MKYSNDTLFFVAAPFGNYLKFKKKANVLPVTGTWTLKYRGGILKKIYKIATTLRYKRKKEGWVNKMGLPNVGLNVGLRRTNNNEILSIAELEKGDFEKMSFLIPKDQSIEINLSCPNVKGGEKLPWNDVRFFNKENSQLRKYCIAKISPYTTEKELEFLIDDQGFNYIHCCNTLPVEEGGLSGKKLKPYVEDLIKMITSKWGKKVEIIAGGGISNKDDALHYLELGAKHLSLGTVCFTPWKIKKILSLILNIVKSIIFFLILFLISCTNSP

SEQ ID NO: 90157 - protein, 485 aa, Unknown
  Bacterial polypetide isolated from the Sargasso Sea
MNEVALSFYRKINKGKLAIIDIGSNSIRLVIYPQNGKYPFPLFNERVNCKLGEGLSLSKNISSQSISKALSAIKRFAYIIKTMSVKHRLIVATAAVRKAKNAKEFLRPAEKLLNHNIKILSAKEEADYACLGVLSNIKVDKGLIADLGGGSLELILIQHGKKIKSTSIDIGHLSQISSEEIRKEINKVEWLNKSKGLTLYGTGGSFRALGSAYIKNYNYPLSLLHGLKFDIERGIILLDQMSDENKEVLGIPPGRTDTISTAAKIITHLILSSNVKNIMISGTSIRDGLIAELNKENRINPDKVAYYNVLAKNQRFNGMQTKIKKIFSPIVQKIADKDLERVFKISTNLSDISWDEQPDMRGNIAANKILSLPVRDLTHIERVWMAKVVYHRYVGTKDKQQIDKRIINLLSEKQKISSYAIGLGLRFLYNFSAGLPKNLDNIKFKIKKNKLTCKIKPEAKALMDKENERRLKNFSNACNLNYEII

SEQ ID NO: 90158 - protein, 274 aa, Unknown
  Bacterial polypetide isolated from the Sargasso Sea
EVQRTVIKSCRRFTYEEVDVFLADQNTKEIDMKTSVRELLGRMQRLASILRDRRLTRGALELNMPEVKIDLDRSGRVAGAHVVENTESHQIVEEFMLAANEAVAEKIAGAKGKFLRRVHPSPDLRKLRQLTEFVLELGFEVESLESRFELQRLLGLARHQPEEHAVHYAVLRSLSRAMYAPLDQGHYALASECYCHFTSPIRRYPDLTIHRALDFLEAGKRPPDDHLEQLGEHCSELERRAEAAERELIKLKLLHFLSSRVGMELEGVVTGVAR

SEQ ID NO: 90159 - protein, 185 aa, Unknown
  Bacterial polypetide isolated from the Sargasso Sea
DVYLMWPETREELAARMATVNECAAAHGRTLDYGLRVHMVVRETEAEAREYAAELVSRLHDEVGREIRERALDSTSFGVAKQARSRELADMDGFIEPRLWTGVGRARSGCGAALVGSADQILSEIEAYQKMGMRSFIFSGYPHLEECDHIGKLVLPELKTCSLPHEYGRVPAATPATPLGVGDRH

SEQ ID NO: 90160 - protein, 56 aa, Unknown
  Bacterial polypetide isolated from the Sargasso Sea
RLHVIVRETVEVAWRDAARLISRLDEVSIARVQKPFADMDSEGQRRMAGLLGGKRG

SEQ ID NO: 90161 - protein, 222 aa, Unknown
  Bacterial polypetide isolated from the Sargasso Sea
NFSGLTTEPSKPFQIGGPLLYFGGYSPPALELCGQHCDVYLMWPEPKEQITGRMKSVNEVAEKYDRTLDYGLRVHMIVRDTEIEAKEYADYIVSRLEDDFGKKIRERAQDSSSLGVSHQAKNRQISDEFGYVEPHLWTGVGRARSGCGAAIVGSTDQVMSELEQYQKLGIRSFILSGYPHLEECKHFGSKVLPNIKTCSLPHVYGRVPNNIPLTPLGLGERN

SEQ ID NO: 90162 - protein, 71 aa, Unknown
  Bacterial polypetide isolated from the Sargasso Sea
QVAALMNEYAALGIDTFILSGYPHLEESYRFAELVFPLLPGRQLKTAGGPLSGPFGEIVGNNYLPKAASSS

SEQ ID NO: 90163 - protein, 260 aa, Unknown
  Bacterial polypetide isolated from the Sargasso Sea
RLKFLVAIRPGISSPGLAARMAATFDRLSNGRLLINVVTGGDSAELEGDGVFVDHDTRYEITDEFLHIWRKLLSAAHTNDAIDFEGKHLTSKGGKALYPPVQNPHPPLWFGGSSAAAHDIAGDHIDTYLTWGEPPAAVAKKIADIRARAEARGRTIKFGIRLHVIVRETEEEAWAAADKLISKLDDETISRAQASFSKMDSEGQRRMAALHGGKRGGRAELEVYPHLWAGVGLVRGGAGTALVGNPEQVAALMNEYAALG

SEQ ID NO: 90164 - protein, 239 aa, Unknown
  Bacterial polypetide isolated from the Sargasso Sea
VLEGETVDYDGKHIQVKGAKLLYPPIQQPRPPLYFGGSSDAAQDLAAEQVELYLTWGEPPAAVAEKIAQVREKAAAQGREVRFGIRLHVIVRETNEEAWAAADRLISHLDQDTIDRAQASLARFDSVGQQRMAALHGGKTDNLEVSPNLWAGVGLVRGGAGTALVGDGPTVAARVKEYAELGIDTFIFSGYPHLEESYRVAELLFPHLDVAAPARPESRGYVSPFGEMISSDILPKAAA

SEQ ID NO: 90165 - protein, 172 aa, Unknown
  Bacterial polypetide isolated from the Sargasso Sea
MSLNIFWFLPTHGDGHYLGTAEGARAVDHGYLQQVAQAADRLGFGGVLIPTGRSCEDSWLVAASLIPVTQRLKFLVALRPGIISPTVAARQAATLDRLSGGRALFNLVTGGDPEELAGDGLFLSHEERYQASVEFTRIWRRVLEGETVDYDGEHISVKGAKLLYPPIQQPRP

SEQ ID NO: 90166 - protein, 147 aa, Unknown
  Bacterial polypetide isolated from the Sargasso Sea
MSLNIFWFLPTHGDGKYLGTAEGARAVDHGYLAQVAQAADRLGYGGVLIPTGRSCEDSWLVAASLIPLTQNLKFLVALRPGIISPTVAARQAATLDRLSNGRALFNLVTGGDPDELAGDGLHLSHAERYEASVEFTRIWRRVLEGET

SEQ ID NO: 90167 - protein, 411 aa, Unknown
  Bacterial polypetide isolated from the Sargasso Sea
MRRASATRAGRCFFQIPARTVKQEQQMNVFWFIPTHGDSRYLGTAEGARAADYDYFKQVAVAADTLGYEGVLLPTGRSCEDAWVVASSLISATQRLKFLVAIRPGIASPGLSARMAATFDRLSGGRLLINVVTGGDAAELEGDGLFADHDTRYEITDDFLNIWRGLLSASHDNGGFDYIGKHLQSKGGKALYPPVQRPHPPLWFGGSSPAAHEIAADHIDTYLTWGEPPEAVAKKIADIRARAEARGRKIKFGIRLHVIVRETEDEAWRDAERLISRLDDETIARAQKAFANMDSEGQRRMAALHGGKRGGREALEVYPNLWAGVGLVRGGAGTALVGNPEQVAERMREYADLGIETFILSGYPHLEESYRFAELVFPLIKGTGATKATGPLSGPFGEIVGNSYLPKAAQS

SEQ ID NO: 90168 - protein, 241 aa, Unknown
  Bacterial polypetide isolated from the Sargasso Sea
MQIFWFIPTHGDSRYLGTAQGARQLSHDYLQQVAVAADSLGYEGVLIPTGRSCEDPWVVASSLIAVTKKLKFLVAVRPGLHQPALAARMAATFDRLSGGRLLINLVTGGDQTELEGDGVFLDHATRYEQSAEFIRIWREILARSHSGESLDYDGQHLSVKGAKLLFPPLQQPHPPVYFGGSSDAAHDLAAEQVETYLTWGEPPAEVAKKVADVRARAATHGRTVKFGIRLHVIVRETEDQA

SEQ ID NO: 90169 - protein, 206 aa, Unknown
  Bacterial polypetide isolated from the Sargasso Sea
MPLDHPLLFKSLCYVDGHWLHSDDGASIAVHNPADQSVIGHVPMLGQTQIIAAVDAAQRAFANWREQSLETRAALLRRWAELILQHQEDLARILSQEQGKPLAEARGEIRYAASFIPWFAEEARRLYGQTIPSHIPGAQLGTLKEPVGVCALLTPWNFPCAMITRKAAAALATGCTVVVKPAHETPYSAFALAQLAEEAGLPAGVV

SEQ ID NO: 90170 - protein, 427 aa, Unknown
  Bacterial polypetide isolated from the Sargasso Sea
SIGSIAVANDDPNVIYVGGGEVTIRGNVSSGYGVFKSVDAGKTWTFSGLPNSKHIPRIVIDPNNNDIVYAAVLGNLYKPTNDRGVYKSSNGGATWRKVLFANNLSGAFEIVMDPNNSRILYASTWRVQRTPSSLSSGGDGSDLWKSEDNGESWRKISTNSGFPKGILGVIGVTVSPVDSERVWAIVENEEKGGVYRSDNGGKEWKYTNSDRSLRQRAWYYSKIYADTQDIDGVYVMNVAYHYSDDGGETFKSSYAPHGDHHDLWIAPEDNNRMIIGDDGGAQVSYDKGKTWSTYYNQPTAQYYRVTTDNSFPYRIYVAQQDNSTQRVSHRSLGYNIGEDDWESTAGGESGHIAIDPNNNEIVYGGSYLGFLERRNHEKKTSRKINVWPITTLGEGAEGMKYRFNWNFPISFSKHDSSKLYAFSNHVH

SEQ ID NO: 90171 - protein, 804 aa, Unknown
  Bacterial polypetide isolated from the Sargasso Sea
DVSDLWKSEDNGESWRKISTNSGFPKGILGVIGVTVSPVDSERVWAIVENEEKGGVYRSDNGGKEWKYTNSDRSLRQRAWYYSKIYADTQDIDGVYVMNVAYHYSDDGGETFKSSYAPHGDHHDLWIAPEDNNRMIIGDDGGAQVSYDKGKTWSTYYNQPTAQYYRVTTDNSFPYRIYVAQQDNSTQRVSHRSLGYNIGEDDWESTAGGESGHIAIDPNNNEIVYGGSYLGFLERRNHEKKTSRKINVWPITTLGEGAEAMKYRFNWNFPISFSKHDSSKLYAFSNHVHVSTNEGKSWEIISPDLTRNDKSKLVSSGGPITQDNTGVEYYATIFAIDESNIEEGLMWVGSDDGLVHITRDSGKTWENVTPKKMPEWMMINSIDASSFDAGTAYIAGTRYKLGDFTPYLYVTEDYGQTWKLITTGIDKEHFTRVLRSDKVNKNILYAGTETGMYISYDMGRSWNKFQKNLPIVPITDLTIKDNSLIVATQGRSIWILDDLTVMHQLSPSIDQEKLYKPKDAYRIRGAGGMESLTAGTNLPNGVIVHYFLPNFDEEKDDVSLSFHSKDGTLIKEFSNKSKENLLKVKKGGNSFVWDMKYPGAKRINNMVLWSADFSGAKAVPNNYEVRLKVNGSELSQKFMILKNPNSEGTIDDIESQFNFVNEINGIVDKAHKAIINIRKIKEDLKKFQGDFTNNELAKDLIEKSKSIYESIDKVENELYQTKNQSNQDPLNYGVKLTNNLGNLNSGFRGGDFGPTAQDIEVKNELVEKVNTQLKEYDLIISNDIPNFNESFKKLELNYLNVSLE

SEQ ID NO: 90172 - protein, 263 aa, Unknown
  Bacterial polypetide isolated from the Sargasso Sea
MIIESPSVAHQKVRVAIVGSGLAGLSAAVDLVDAGHEVNLYEARPFMGGKVGSWVDDGGNHIEMGLHVFFFNYANLFALMRKVGAFENLLPKQHTHLFVNEGGDLRELDFRFPIGAPFNGLKAFFTTPQLSWIDKLRNALALGTSPIVRGLVDYEGAMRTIRALDSVSFQDWFVGHGGSPESILRMWNPIAYALGFIDCEAISARCMLTIFMMFAAKTEASKLNLLKGSPHRWLTGPILEYIQQRGGRLHLRHRVKQVEFSDG

SEQ ID NO: 90173 - protein, 477 aa, Unknown
  Bacterial polypetide isolated from the Sargasso Sea
MPKSDTLQSENAKRPSAEQFIPVKNIQADDKPAHKSSGQIHFREQKGYFQRLRTTMNSLLVLLFFALPFISFDGRQAILLDVSQQQFFFFGLTLWPQDFTLLAWVFIAAAFGLFFITVFWGRVWCGYLCPQTAWTFMFVWLESRIEGNSNKRKLLDKAPWSANKLGKRSLKHGLWGFAALITGCGFIGYFIPARELYLDIFTGNASFWTTCWVWFFAICTYLNAGWMREQMCLHCCPYARFQAVMFDANTKTVTYDAARGEARGPRKRKQQTELGDCVDCNLCVEVCPTGIDIRQGLQYECINCGACVDACNETMQKFDYKQNLISYVSENELKGIAHSNWRSPRFLGYGAAVVIMLVVIGLDLSSRSEIQLNVIRDRQSLYRETADNKVENTYQLKIRNKTQQTKQYQLAVNSEMPFSLIADPVITLAPGEQSDYPVTVLADKDAIPAGRKIIEFSVTDVSKPEQSVSQETGFFSP

SEQ ID NO: 90174 - protein, 256 aa, Unknown
  Bacterial polypetide isolated from the Sargasso Sea
YITKKGAKIHLNHKVEEIIYEKESSSYSVNQLKISSPEGIKAVFADKFLAACDVPGIKKIIPKEWYQFKEFEGLKKLRAVAVATIQLRYDGWVTELQKDNTGNEPIGLDNLLYSADASFSCFADLALASPADYRKKDMGSLLQCVLTPGDRWMGRSTERITKEIDKEVRRLFPSSKNLKLLWSNVVQIPQSLYREAPGMEPFRPDQKTSISNFFMAGSYTKQDYIDSMEGATMSGHLAAAAILEKKAELAKNLAVS

SEQ ID NO: 90175 - protein, 273 aa, Unknown
  Bacterial polypetide isolated from the Sargasso Sea
LNLLKGSPHRWLTGPILEYIQARGGTLHLRHRVTQVHEGERDGTTCVSALTMGTPEGDVEVKADAYLAACDVPGIQRLLPESWRRFEQFDNIYKLEAVPVATVQLRYDGWVTELGQSSEAAAARGDVHHPAGLNNLLYTADADFSCFADLALASPEDYRKEGQGSLLQCVLTPGDPWIPRKSEEIVAHTDAQVRKLFPSSEGLKLTWSNVVKLAQSLYREAPGMEPYRPDQRTPVGNFFLAGSYTRQDYIDSMEGATMSGRMAASAILSAAGA

SEQ ID NO: 90176 - protein, 238 aa, Unknown
  Bacterial polypetide isolated from the Sargasso Sea
TEASKLNLLKGSPHRWLTGPILEYIQARGAQLHLRHRVTAVHHQDDNGTTRVTGLTMGTPDGDVEVQADTYLAACDVPGIQRLLPEEWRRFEQFDKIYKLKAVPVATVQLRYDGWVTELGDQPQAIAARTDVAKPSGLNNLLYTADADFSCFADLALASPEDYRKEGQGSLLQCVLTPGDPWIPRKAEEIVAHTDAQVRKLFPSSSGLKLVWSNVVKLAQSLYREAPGMEPFRPEQRT

SEQ ID NO: 90177 - protein, 159 aa, Unknown
  Bacterial polypetide isolated from the Sargasso Sea
QRRDVATPTGLNNLLYTADADFSCFADLALASPEDYRKEGEGSLLQCVLTPGDPWIPKSVDEIVAHTDRQVRALFPSARNLKLTWSNVVKLAQSLYREAPGMEPYRPEQRTPIRNFFLAGSYTRQDYIDSMEGATMSGHLAAAAILDQPVKLATNAAVA

SEQ ID NO: 90178 - protein, 239 aa, Unknown
  Bacterial polypetide isolated from the Sargasso Sea
DGESPEVTGLQLGTPDGDIRVEADAYLAACDVPGIQKLLPEDWRRFPQFDAIHQLEAVPVATVQLRYDGWVTELGESQDAQRRDVATPTGLNNLLYTADADFSCFADLALASPEDYRKEGEGSLLQCVLTPGDPWIPKSVDDIVAHTDRQVRALFPSARDLKLTWSNVVKLAQSLYREAPGMEPYRPDQRTPIQNFFLAGSYTRQDYIDSMEGATMSGHLAAAAILDQPVRLAMNAAVA

SEQ ID NO: 90179 - protein, 116 aa, Unknown
  Bacterial polypetide isolated from the Sargasso Sea
MINLELPDLPYSKDALAPYMSAETLELHHDKHHMAYVTNGNKFIKENNISEDSIEDIVKNTHNKNAPVFNNVSQHLNHIHFWEIMKNNPNGKIPSELENKINEDFGSVDTMKELFI

SEQ ID NO: 90180 - protein, 64 aa, Unknown
  Bacterial polypetide isolated from the Sargasso Sea
MINLELPDLPYSKDALMPYMSAETLELHHDKHHMAYITNGNKFIKEQNISDDNVNDIVINSYQK

SEQ ID NO: 90181 - protein, 168 aa, Unknown
  Bacterial polypetide isolated from the Sargasso Sea
MIKLELPDLPYSKDALQPYMSAETLELHHDKHHQAYVTNGNKFIEEQNLSESSINEIVINSYKNNNAPVFNNVSQHINHIHFWEIMSNNPEGKIPGELESKITNDFGSVDQMKNDFINAGITQFGSGWCWLVLNNGKLEVTKTPNAENPIVHGHIPLLGCDVWDIHIT

SEQ ID NO: 90182 - protein, 235 aa, Unknown
  Bacterial polypetide isolated from the Sargasso Sea
MAGGWSRFALRFSEYYDSLSPDSIWTPPRLRNREWMFIPWGGAPPDRHRAFPDKTSLHSYLRTRAPHSCFHSTAYYEDPSKGKMAEKGWLGADLIFDLDGDHLPGVSDNDFPAMIDVIQGHAWRLWNEFLEPEFGFKQKYAQFTFSGHRGFHIHLRDPSLLHLDSNARREMVNYIRGEGIDIQSTINADSGWGKRAIEGIDSTLGQLSQISSGKEGKPHTLNQLHEIIKTRSKSP

SEQ ID NO: 90183 - protein, 114 aa, Unknown
  Bacterial polypetide isolated from the Sargasso Sea
MINLELPDLPYSKDALMPYMSAETLELHHDKHHMAYVTNGNKFIKENNIEETSIEEIVKNSFQKNAPVFNNVSQHLNHIHFWEIMKNNPDGSNNIPFELENMIIQDFGSMKKET

SEQ ID NO: 90184 - protein, 29 aa, Unknown
  Bacterial polypetide isolated from the Sargasso Sea
MAYTLPPLPYSFDALEPSFDARTMEIHHD

SEQ ID NO: 90185 - protein, 148 aa, Unknown
  Bacterial polypetide isolated from the Sargasso Sea
RKKPLVELVKDIKNYNDKVKDNAGGAYNHQLFFNMMTPGGSNFEGEIADRIKKRFGTYAKFKKEFISNASDQFGSGWGWLVEKDGKLDLIRTPNQDNPLMFNLGKPILGVDVWEHSYYLMYGPDRKEWLSNFFEIVNWNFCSALLHTS

SEQ ID NO: 90186 - protein, 128 aa, Unknown
  Bacterial polypetide isolated from the Sargasso Sea
MNNVFSQNVTENGIDRLVDSNGNFIQKSLPYNKTFLEPHMDEETLHLHFEFHHGGAVKGANTDLIKIKEHLKSGDLDQVDLWTRKLAYHFSSHVLHSIFWTNLTNKKTEPKTELLKQIEKDFGSFDKL

SEQ ID NO: 90187 - protein, 165 aa, Unknown
  Bacterial polypetide isolated from the Sargasso Sea
AYVDNGNKLIEGTEWANKSLEDIIVGTYQAGSVAQNGIFNNASQHWNHVQFWEMMGPGGNNMPSELSSALNENFGSVDKFKEDFCAAGAGQFGAGWCWLVKDKDGSLKVTKTENGVNPLCFGQIALLGCDVWEHSYYIDFRNKRPAYLTNFLDKLVNWENVSSRM

SEQ ID NO: 90188 - protein, 159 aa, Unknown
  Bacterial polypetide isolated from the Sargasso Sea
MSSDAHANHSAVADLAPTQGNAVKGNVTFSVIDGKVHVKGEVSGLKPNSEHGFHIHETGDCSAPDGASAGGHFNPGKEDHGSVAATPHHGGDMPNIKADAQGNAVVDADVSTNVNIGKGDGFDIIGRGLIVHADADDYKTQPTGNAGARLACAVIKAAP

SEQ ID NO: 90189 - protein, 135 aa, Unknown
  Bacterial polypetide isolated from the Sargasso Sea
MKQWIIAALAGCTAVAVQADTLNVKVNAVTAQGVGESVGSVKIENSEYGLVFRPELSGLQPGAHGFHVHAKGSCEPAEIDGKQTPAGAAGGHWDPKNSGKHGEPWGDGHMGDLPALYVDSEGKASQPVLAPRLKS

SEQ ID NO: 90190 - protein, 90 aa, Unknown
  Bacterial polypetide isolated from the Sargasso Sea
MSFTLPDLPYSHDSLDKLGMSKETLQFHHDLHHKAYVDNGNKLIAGTEWENKSVEDIISGTYNNNSVAQNGIFNNASQHWNHCQFWEMMG

SEQ ID NO: 90191 - protein, 256 aa, Unknown
  Bacterial polypetide isolated from the Sargasso Sea
LLEDRGIAWFRNELKANYFSRPLKGLRNEAKPKLLDYLGWHRQKAGLWFVGLPLLCGRLKGTMKQGLRAIVDTYQLEIRLTANQDLLLCNIGTAQRATIKAELAALGFDLPDAPPPLARHAIACPALPTCGLAITESERILPSVLERLDAQLRRLEIDKSVLIRMTGCPNGCARPYMAELALVGSGVNQYQLWLGGSANLQRLAQPFLQRMPLEELEQTIEPLLISWKQAGGRRSLGDHVEKLGDQAVSELLGAAA

SEQ ID NO: 90192 - protein, 143 aa, Unknown
  Bacterial polypetide isolated from the Sargasso Sea
MINLELPELPYSKDALAPYMSAETLELHHDKHHMAYVTNGNKFIKENNLNEESIEEVVKKSYNSIAPVFNNVSQHLNHMHFWEIMQNNPNGKIPSELESKINEDFESVDAMKQEFINAGIGQFGSGWCWLVLNNGKLEITKTP

SEQ ID NO: 90193 - protein, 69 aa, Unknown
  Bacterial polypetide isolated from the Sargasso Sea
MAHTLPELTYNYNQLEPHIDAKTMEIHHAKHHQTYINNLNIALENYPELFDKTVEDLLINLENIPESIR

SEQ ID NO: 90194 - protein, 121 aa, Unknown
  Bacterial polypetide isolated from the Sargasso Sea
MSLSDPIGDMIARVKNAQARNHKKVELPSSNFKTKIADILKNEGFIKDFKVAEEGKKPILSLELKYHSGSPVISNFERVSKPGRRIFSSADSLPKINNGLGIAIVSTPKGVMTDMDARKQK

SEQ ID NO: 90195 - protein, 59 aa, Unknown
  Bacterial polypetide isolated from the Sargasso Sea
MINLELPDLPYSKDALMPYMSAETLELHHDKHHMAYITNGNKFIKEQNITDDNVNDIVI

SEQ ID NO: 90196 - protein, 157 aa, Unknown
  Bacterial polypetide isolated from the Sargasso Sea
MINLELPELPYSKDALAPYMSAETLELHHDKHHMAYVTNGNKFIKENNLNEESIEEVVKKSYNSIAPVFNNVSQHLNHMHFWEIMQNNPNGKIPSELESKINEDFESVDAMKQEFINAGIGQFGSGWCWLVLNNGKLEITKTPNAENPIVHGHIPLL

SEQ ID NO: 90197 - protein, 130 aa, Unknown
  Bacterial polypetide isolated from the Sargasso Sea
AYDQGVLIESDLTGLSPGIHGFHLHENPDCSPVEKDGKTTPAGAAGGHYDPENTGKHKGPFDKSGHLGDLPRLHVGQEGENAQTNIAPRLQLSDFKGRALVIHGGGDNYSDSPQPLGGGGARVACGVVAG

SEQ ID NO: 90198 - protein, 198 aa, Unknown
  Bacterial polypetide isolated from the Sargasso Sea
MINLELPNLPYSKDALMPYMSAETLELHHDKHHMAYITNGNKFIKENNMNEKSAEELVINSFQKNAPIFNNVSQHINHVHFWEVMSNNPDGKIPSELEKKIISDLGSIDKMKEDFINAGIGQFGSGWCWLVLNKGKLEITKTPNAENPIVYGQTPLLGCDVWEHSYYVDYRNKRPDYLKAFINNLVNWEKVTENLSNS

SEQ ID NO: 90199 - protein, 178 aa, Unknown
  Bacterial polypetide isolated from the Sargasso Sea
AETLEYHHDLHHNAYVVNGNNLIAGTEWEGKALEDIITGTYDKNAVAQNGIFNNASQHWNHMKFWEMMGPKGRAMPSELEAALSDSFGSTDAFKDAFKAAGAGQFGSGWCWLVKNSDGRLAVTKTENGVNPLCFGQTALLGCDVWEHSYYIDFRNKRPDYLTNFLENLVNWDYVAAQL

SEQ ID NO: 90200 - protein, 285 aa, Unknown
  Bacterial polypetide isolated from the Sargasso Sea
AFKIFNKFMCLINDFPEFKFAFKLQYRDLDSFIRPDMKGRLDIKHIKRFEDTRLSENHYIKMVNKIKELGFISMCTPFDEKSVDTILDHKIEILKIASCSFSDWPLLEKAASAGLPIIASTAGASLDTIDQVILFFKNRNINFAIQHCVGEYPTETSRMNLNQLDFLKNRYPNVRFGFSTHEDPNNVDIAKIAIAKGASLLEKHVGIGSEKYPLNAYSSSLAQTILWLNSAKSTMEACGVIGKRHEASQSEISSLLSLRRGVFAKKHLKIGQKLKESDYFLAFPP

SEQ ID NO: 90201 - protein, 116 aa, Unknown
  Bacterial polypetide isolated from the Sargasso Sea
MINLELPDLPYSKDALMPYMSAETLELHHDKHHMAYITNGNKFIKEQNIADDNVNDIVINSYQKNAPVFNNVAQHINHVHFWEVMKNNPDGKIPSELENKIVSDIGSIEKMKEDFI

SEQ ID NO: 90202 - protein, 95 aa, Unknown
  Bacterial polypetide isolated from the Sargasso Sea
MINLELPDLPYSKDALAPYMSAETLELHHDKHHMAYVTNGNKFIKENNFNEDSVEEIVKNSYNNNAPVFNNVSQHLNHMHFWDVMKNNPNEKYHQ

SEQ ID NO: 90203 - protein, 280 aa, Unknown
  Bacterial polypetide isolated from the Sargasso Sea
MDQAPQYAIDHVANSKKNIFEFEFLNSLSEKISNFFGISSDSLFYIDLGISKHVFLLFFVSFIVVSTIVTLIQGYISHKKNIPNKFMSIIEMFVIYLRDDVLKNFIGDKEYRSWAPLVYTIFFFVLFGNVLGLIPIFDLTGLIGKIGYKAEMLGKDNILYLLSKGGHTVTANVNVTFAIATITFVAFIAAGIQKYGFVQHWKNLAPSGLPWPLYFVVVPIEFMGLFIRPLALTLRLAGNMMGGHIALIIFITFIFSATAELGGLAGFEIAPFSISLALGL

SEQ ID NO: 90204 - protein, 60 aa, Unknown
  Bacterial polypetide isolated from the Sargasso Sea
GRIVSDSISLESGDCSIIGRSVIIHEDKDDLGKGGHTESLRTGNAGRRLACGVIGLAKGS

SEQ ID NO: 90205 - protein, 116 aa, Unknown
  Bacterial polypetide isolated from the Sargasso Sea
MSFELPKLDYLKSALSPIMSEETLDLHHGKHHQTYITNLNNLIKDTEMSKMSLEEIIINSSKDKSKIGIFNNASQHWNHILFWKCMKPGGGGSMPEKLKNRIEADFGSTNEFKKQI

SEQ ID NO: 90206 - protein, 97 aa, Unknown
  Bacterial polypetide isolated from the Sargasso Sea
KIVEDFGSVEKFKDQFKQAGITQFGSGWCWLSLNNDKLVVTKTANAANPLIDNLKPILGCDVWEHSYYIDYRNRRPEYLDKFVDNLIDWEFVESLLI

SEQ ID NO: 90207 - protein, 164 aa, Unknown
  Bacterial polypetide isolated from the Sargasso Sea
YVDNGNKLIAGTKWETETLESIVTGTYDANAVAQNGIFNNASQHWNHMQFWEMMGPSKTGMPSELESLINESFGNVDAFKEAFSAAGAGQFGSGWCWLVKEADGSLKVTKTENGVNPLCFGQTALLGCDVWEHSYYIDFRNKRPAYLSNFLENLVNWENVASRL

SEQ ID NO: 90208 - protein, 320 aa, Unknown
  Bacterial polypetide isolated from the Sargasso Sea
RYTSVRFGNPGRPAVAGGCPGAVRCTATIGTDHIDQAWLQEQGIGFAAAPGCNAVSVAEYVLSVLSLYAEKRGIEDWSSLTVGIVGVGNVGGELARMLERLDFTVKLCDPPRQEAEEEHAEEFVPLAEALECDVVTLHTPLTRTGDHPTNRMIAGSELAALGQDQLLINAGRGEVIDGEALLARLQQADAPTVVLDVWEHEPRINPDLLDRVWLATPHIAGYSLEGKMQGTEMIYQALCRYLGLPVRKKAGQFLPEPALSKVSFTSSADEDEAVQVALRACYDPRRDDARLRLTMRGNPEERAQAFDRLRRDYPVRRECS

SEQ ID NO: 90209 - protein, 86 aa, Unknown
  Bacterial polypetide isolated from the Sargasso Sea
MFELPKLDYNNSALSPIMSEQTLDLHHGKHHQTYITNLNNFIKSSEYEKLSLEDIIKKSLNEKKAGIFNNASQHWNHNLFWKCMKP

SEQ ID NO: 90210 - protein, 140 aa, Unknown
  Bacterial polypetide isolated from the Sargasso Sea
MAFELRDLPYSHDALESSGMSRETLEFHHDLHHKAYVDNGNKLISGTEFESMTLEEIIMKSFKKDEVAQSGIFNNASQHWNHMQFWDMMGPNQDDLPSELSKEINKNFGSVDNFKDEFCKAGIGQFGSGRVWLVKNQDGS

SEQ ID NO: 90211 - protein, 54 aa, Unknown
  Bacterial polypetide isolated from the Sargasso Sea
MINLELPDLPYSKDALAPFMSAETLELHHDKHHMAYVTNGNKFIKENNINDDSI

SEQ ID NO: 90212 - protein, 404 aa, Unknown
  Bacterial polypetide isolated from the Sargasso Sea
MAGGWSRFALRFSEYYDSISPDSIWTPPRLRNREWMFIPWGGAPPDRHRAFPDKTSLHSYLRTRAPHSCFHSTAYYEDPSKGKMVEKGWLGADLIFDLDGDHLPGVSDNDFPAMIDVIQGQAWRLWNEFLEPEFGFKQKYAQFTFSGHRGFHIHLRDPSLLHLDSNARREIVNYIRGEGIDIQSTINADSGWGKRAIDGIDSTLGQLSQISSGKEGKKHTLDQLHEIIKTRSKSPNVNLKSSSKASIEELAQLSDGRDEYGLDRISRLKDDPSLEVFGKLTPLFWELVKGDSSVVIGTAGETDEVVTVDTKRVIRWVGSLHGKSGLKVTELPLNRLDPDSSNCFDPLEEAVVFTGGSVKVRILADDVCARISGEQIEPSLGDELVVRESMAMFLCLKGWAEICK

SEQ ID NO: 90213 - protein, 600 aa, Unknown
  Bacterial polypetide isolated from the Sargasso Sea
MEAVSLRSNQEILFRVGEGSLAVAETGTQSLSKAEQRKLDSDHLRDPLLSELSNDDVRFTEDAVQLLKFHGSYQQHHRELRKTDKVRSWQMMLRLRSPGGRIPARLFLALDDLSNRLGDGTLRATTRQAFQMHGIAKADLKEVIGTIVRNMGSTLAACGDINRNVMAPPAPFEKGGYPVARRLADEIADLLSPEAAEGAYLDLWVDGDLSYRFKPSRAVQKTRKRQSEGDVFSGSTEEPLYGDTYLPRKFKVAVTVPGDNSVDLLTQDIGLVAFTDPSGELRGCNVYVGGGMGRTHNKEETFARTADHLGYVDAADVLDVVQAILALQRDHGDREVRKHARMKYLLHDKGIQWFRDTLCATYFKGSLKGLRNEPKAKLLDYLGWHRQKAGMWFVGLPLLCGRLNGDLKAGLRELVETYQLEIRLTANQDLLLCNIGTSQRASVRTHLGALGFAVPEAPAPLARHAIACPALPTCGLAITESERILPDVLDRLDAQLRRLEIEKSLLVRMTGCPNGCARPYMAELGLVGNGVNQYQLWLGGTPNLQRLARPYMEKLPLDDLEKTLEPLLLSWKAAGGRRSFGDHIEKLGDQEVSALLTASA

SEQ ID NO: 90214 - protein, 199 aa, Unknown
  Bacterial polypetide isolated from the Sargasso Sea
MAFELPDLPYSHDALADLGMSKETLEYHHDLHHKAYVDNGNKLISGTEWDGKSMEDIITGTYDSSSVAQNGIFNNISQLWNHNQFWEMMGPSGREMPSELTSAIADSFGSVEQFKADFSAAGAGQFGAGWCWLVKDADGGLKVTKTENGVNPLCFGQTALLGCDVWEHSYYIDFRNKRPAYLANFLDNLVNWENVASRL

SEQ ID NO: 90215 - protein, 194 aa, Unknown
  Bacterial polypetide isolated from the Sargasso Sea
MFELPKLDYSNSALSPIMSEQTLDLHHGKHHQTYITNLNNFIKGSDYEKLSLEDIIKKSSNEKKVGIFNNASQHWNHNLFWKCMKPNGGGNVPSKLEKKIKQDFGDFEKFRKEFINAGVTQFGSGWSWLSLKEDKLVVTKTPNAENPIIHNMKPILGCDLWEHSYYLDYRNKRPAYLENFFDKLINWEYVDSLL

SEQ ID NO: 90216 - protein, 129 aa, Unknown
  Bacterial polypetide isolated from the Sargasso Sea
MINLELPDLPYSKDALMPYMSAETLELHHDKHHMAYITNGNKFIKEQNITDDSVNDIVINSYQKNAPVFNNVAQHINHVHFWEVMKNNPDGKIPSELENKIVSDIGSVEKMKEDFINAGIGQFGSGWCW

SEQ ID NO: 90217 - protein, 118 aa, Unknown
  Bacterial polypetide isolated from the Sargasso Sea
MINLELPDLPYSKDALAPYMSVETLELHHDKHHMAYVTNGNKFIKENNFNEESIEDIVINSYNKNAPVFNNVSQHLNHMHFWEIMKNNPNGKIPSELENKINEDLGSVDNMKEAFINA

SEQ ID NO: 90218 - protein, 196 aa, Unknown
  Bacterial polypetide isolated from the Sargasso Sea
MYKIDKILIGTHNKGKFKEISDLLPAKIYKISPNSLNIESPDETGKTFAANSLLKAKYFYERSKLITLSDDSGLEVECLNNQPGIYSARWARDFGSFDKAMSEILKKVKKANKGTKARFISSLTIYWENKKFITEVGKIEGNISEKKGLNGFGYDPIFVPNGYSKTFAEMDYKKKLLIDHRYIAYKKLEGKIKNYI

SEQ ID NO: 90219 - protein, 820 aa, Unknown
  Bacterial polypetide isolated from the Sargasso Sea
MCTFVKNTTRDKAPSAYMLKSSIVRLVAYSVRHPLRIIALSVVLAILSSIYVAHNFKINTDISRLIETDKQWSSLENAMDKAFPDRGDTVLVVVEARAPEFADAAANALTAALKADSKEFVAVSQPAGGPFFEHNGLLFPSTDEVLSTTSQLVQSRPLVNALAHDPSLTGLAGTLTTSLLLPLQLGQVKLADMSHLLSQSATTLDRVLAGQPAAFSWRALVDKGVATDPARAFVTVQPVVNYDALEPGASASKAIRATAASLHLDTRYGATVRLTGQQPLADEEFASVQDGAVLNGIGTFIVVLVILWLALRSGRMILAVFITLFVGLAITAALGLLMVGALNMISVAFMVLFVGLGVDFGVQFGVKYREERNRDDRLSAALMHTAHSIGVPLTLAAVAVALSFFSFLPTAYRGVSELGEIAGVGMFVAYFTNMTLLPALLKVFNPPGEAASPGFKQLAPVDDFLDHHRKPVLIGTLLVVIGATPLLTHLRFDFNPLHLKDPHTESMATLLSLKDSPEAAVNNVHVLAPTLADADQKAAHLRTLPEVGRVTTLDTFVPAEQQQKLMLIASAAQQLLPALQQQPAPQATDAVRVAALKRASNQLSLAADDHPGPGAAEAKHLSATLQKLAAADAATRDRAETAMSEPLRIALKQLADLLQPTEITRDNLPKEISKDWVSKDGHALVDIAPKVKPGVDPNDDAMLARFAHAVKKAEPGAIGGPISILHSADTIIKAFLQAACWALLSIAILLWIALRRLSDMLRTLVPLLVSALVTLELCVVFGMPLNFANIIALPLMLGVGVAFKIYFVMAWRHGQTSLLQ

SEQ ID NO: 90220 - protein, 109 aa, Unknown
  Bacterial polypetide isolated from the Sargasso Sea
MINLELPDLPYSKDALMPYMSAETLELHHDKHHMAYITNGNKFIKEQNIADDNANDIVINTYQKNAPVFNNVAQHINHVHFWEIMKNNPDGKIPSELENKIISDIGSVK

SEQ ID NO: 90221 - protein, 166 aa, Unknown
  Bacterial polypetide isolated from the Sargasso Sea
MLSASSFAGHHDSDGKEVIMNNLETGMSMGSVVVSSYDDDGVVFTPNLSGLTPGIHGFHVHQNGDCSPAMTDGKKVLGGAAGGHFDPEDTGKHRAPWSEKGHEGDLPVLYVDENGNATQPIFAPELELDDIEGRALMIHAGGDNYSDSPKKLGGGGDRVACGVIGK

SEQ ID NO: 90222 - protein, 199 aa, Unknown; identical to SEQ ID NO: 90214
  Bacterial polypetide isolated from the Sargasso Sea

SEQ ID NO: 90223 - protein, 143 aa, Unknown
  Bacterial polypetide isolated from the Sargasso Sea
MAFELPKLNYAFDALEPNIDTKTMEIHYGKHHNGYTNNLNNIISGTDNEGKSIEDICKSLDLENKGLRNNGGGYYNHNLFWEIMGPNGGGDPSGEISESINSNFGSFENFKDEFSKAAATRFGSGWAWLCAHPDGKLRNLFNC

SEQ ID NO: 90224 - protein, 133 aa, Unknown
  Bacterial polypetide isolated from the Sargasso Sea
EKKAGIFNNASQHWNHNLFWKCMKPNGGGNVPSKLENKIKKDFGGFEKFREEFINAGVTQFGSGWCWLSLKEDKLVVTKSPNAENPIIHNMKPILGCDVWEHSYYLDYRNKRPAYLENFFDKLINWEYVDSLL

SEQ ID NO: 90225 - protein, 73 aa, Unknown
  Bacterial polypetide isolated from the Sargasso Sea
FGSGWCWLSLKEDKLVVTKSPNAENPIIHSMKPILGCDVWEHSYYIDYRNKRPAYLENFFDKLINWEYVNSLL

SEQ ID NO: 90226 - protein, 106 aa, Unknown
  Bacterial polypetide isolated from the Sargasso Sea
MINLELPDLPYSKDALAPYMSAETLDLHHDKHHMAYVTNGNKFIKENNLSEDSIEDIVKNTYNKNAPVFNNVSQHLNHIHFWEIMKNNPDGKIPSELENKINEDLG

SEQ ID NO: 90227 - protein, 311 aa, Unknown
  Bacterial polypetide isolated from the Sargasso Sea
MDQAPQYAIDHVANSKKNIFEFEFLNSLSEKISNFFGISSESLFYIDLGISKHVFLLFFVSFIVVSTIVTLIQGYISHKKNIPNKFMSIIEMFVIYLRDDVLKNFIGDKEYRSWAPLVYTIFFFVLFGNVLGLIPIFDLTGLVGKIGYKAEMLGKDNILYLLSKGGHTVTANVNVTFAIATITFVAFIAAGIQKYGFVQHWKNLAPSGLPWPLYFVVVPIEFMGLFIRPLALTLRLAGNMMGGHIALIIFITFIFSATAELGGLAGFGIAPFSISLALGLTMLELLVAVIQAYVFALLTAVFIGMAIHVDH

SEQ ID NO: 90228 - protein, 103 aa, Unknown
  Bacterial polypetide isolated from the Sargasso Sea
MINLELPELPYSKDALAPYMSAETLELHHDKHHMAYVTNGNKFIKENNLNEESIEEIVKNSYNNIAPVFNNVSQHLNHMHFWEIMQNNPNGKIPSELENKINE

SEQ ID NO: 90229 - protein, 311 aa, Unknown
  Bacterial polypetide isolated from the Sargasso Sea
MDQAPQYAIDHVANSKKNIFEFDFLNSLSAKISNFFGISSESLFYIDLGISKHVFLLFFVSFIVVSTIVTLIQGYISHKKNIPNKFMSIIEMFVIYLRDDVLKNFIGVKEYRSWAPLVYTIFFFVLFGNVLGLIPIFDLTGLIGKIGYNAEMLGKDNILYLLSKGGHTVTANVNVTFAIATITFVAFIAAGIQKYGFVQHWKNLAPSGLPWPLYFVVVPIEFMGLFIRPLALTLRLAGNMMGGHIALIIFITFIFSATAELGGLAGFGIAPFSISLALGLTMLELLVALIQAYVFALLTAVFIGMAIHVDH

SEQ ID NO: 90230 - protein, 207 aa, Unknown
  Bacterial polypetide isolated from the Sargasso Sea
MVNADGNYAAAPLPFAYDALEPVIDAHTVELHYNFHHKPAAAAANKAEEGLARARETGDFALVKFHEKELAFQLSSHILHTIYWTSISGKVGEPGGELARTIDRHFGSYAKFKAQLVAATIATEASGWGVVGYLPATGKLMILQCENHQKLTAWGIQPILVLDVFEHAYYLKYQNRRNEYVNQLFSILNWDNAALRLQAAMQSHALA

SEQ ID NO: 90231 - protein, 194 aa, Unknown
  Bacterial polypetide isolated from the Sargasso Sea
MFELPKLDYSNSALSPIMSEQTLDLHHGKHHQTYIANLNNFIKSSEYEQLSLEDIIKKSSNEKKAGIFNNASQHWNHNLFWKCMKPNGGGNVPSKLENKIKQDFGSFEKFREEFINAGVTQFGSGWCWLSLKEDKLVVTKSPNAENPIIHNMKPILGCDVWEHSYYLDYRNKRPAYLENFFDKLINWEYVNSLL

SEQ ID NO: 90232 - protein, 197 aa, Unknown
  Bacterial polypetide isolated from the Sargasso Sea
MAFQLPTLDYSKSSLSPHMSEETLDLHHGKHHQTYITNLNNLIKNSGLENSSLEEIVKKTSADPSKIGIFNNAGQHWNHILFWKCMKPKGGGALPGKLEKRINSDFGSVDKFKEQFIQAGVTQFGSGWAWLAIDKGKLVVTKTANASNPLVNNMKPILGCDVWEHSYYVDYRNRRPDYLKSFIENLVNWEFVESQLD

SEQ ID NO: 90233 - protein, 54 aa, Unknown
  Bacterial polypetide isolated from the Sargasso Sea
TNPLPTIEAKRVDLLGDRSIVGRGLVVHADEDDLGRGGNAESLKTGNAGDRLAC

SEQ ID NO: 90234 - protein, 195 aa, Unknown
  Bacterial polypetide isolated from the Sargasso Sea
MFELPKLDYSKDALSPIMSEQTLDLHHGKHHQTYITNLNNFIKDTEFEKLPLEEIIKKSFSDKTKSGIFNNASQHWNHNLFWKCMKANGGGNIPKKLKEKINYDFGSFEKFREEFINAGITQFGSGWCWLSIKEGKLVVTKTPNAENPIIHNMKPILACDVWEHSYYLDYKNKRPIYLENFFDKLINWEFVQSNL

SEQ ID NO: 90235 - protein, 94 aa, Unknown
  Bacterial polypetide isolated from the Sargasso Sea
MAFELPKLKYSYDSLEPHIDSKTMEIHHGKHHAGYTNNLNNAISGSELENHSIEEILKNLNMENSALRNNAGGYYNHNLFWDILSPSGGGKPNG

SEQ ID NO: 90236 - protein, 77 aa, Unknown
  Bacterial polypetide isolated from the Sargasso Sea
VGVFGSGWCWLVQNDSSLEILGTPNGENPLAHGKHALMGIDVWEHAYYLDYKNVRPDYVKAILDNSINWSFVSDQLK

SEQ ID NO: 90237 - protein, 93 aa, Unknown
  Bacterial polypetide isolated from the Sargasso Sea
YKSRRCGSWRPKTRSCWDLENVVADDNGVATFSITAPRVDLLGDRSVIGRGLVIHADEDDLGKGGDAESLKTGNAGDRLACGIIVIRSDTVNK

SEQ ID NO: 90238 - protein, 194 aa, Unknown
  Bacterial polypetide isolated from the Sargasso Sea
MFELPKLDYSNSALSPIMSEQTLDLHHGKHHQTYITNLNNFIKGSEYEKLSLEDIIKKSSNEKKAGIFNNASQHWNHNLFWKCMKPNGGGNVPTKLENKIKEDFGGFEKFREEFINAGVTQFGSGWCWLSLKEDKLIVTKSPNAENPIIHNMKPILGCDVWEHSYYLDYRNKRPAYLENFFDKLINWEYVDSLL

SEQ ID NO: 90239 - protein, 199 aa, Unknown
  Bacterial polypetide isolated from the Sargasso Sea
MAFELNDLPYSHDALEAAGMSKETLEFHHDLHHKAYVDNGNKLISGTEYENMTLEEIITKSYDSSAIAQSGIFNNASQHWNHMQFWEMMGPNQTGIPSELASAIDESFGSFEKFKEDFCALGVGQFGSGWVWLVKSNDGGLKISKTENGVNPLCHNETALLGCDVWEHSYYIDFRNKRPAYLENFIDKLVNWENVASRM

SEQ ID NO: 90240 - protein, 268 aa, Unknown
  Bacterial polypetide isolated from the Sargasso Sea
MKTTTTRVTCLLIVNLFIFSMFSQVQVLPKLRTTYSDYDPLIDSTTMITHHSVFHKNYIDCLNKSLKGTKKMNEALNDILLNISYYKNKSIRYNAGGHFNHSLYWEILKPNSSNNISEALSNQIIKDFISLDLLKQEMKSAVKSQIGSGWVWLIISPKGKLMVTSTQNEDNPIMDVVKERGVPVIGIDNWEHAYYLKHKQNKEDYFNAIWKLIDWEIVSEKFVKAIGSDVFESIKTDNWPELKVYKDIMSHTYHAAENGDLNALRSLS

SEQ ID NO: 90241 - protein, 70 aa, Unknown
  Bacterial polypetide isolated from the Sargasso Sea
MSTGPHFNPAGKDHGAPTDDNRHAGDLGNITAGADGVAKVDITDSQIPIGGPNSIVGRAVVCHELVRPSS

SEQ ID NO: 90242 - protein, 33 aa, Unknown
  Bacterial polypetide isolated from the Sargasso Sea
MAFTLPSLPYSNDALEPHIDTKTMEIHHGKHHN

SEQ ID NO: 90243 - protein, 37 aa, Unknown
  Bacterial polypetide isolated from the Sargasso Sea
MAHILPDLPYAHDALAPYIGADTMEIHHGKHHNAYVT

SEQ ID NO: 90244 - protein, 197 aa, Unknown
  Bacterial polypetide isolated from the Sargasso Sea
MAFELPKLDYSNEALSPIMSQETLELHHGKHHQTYITNLNNFIKNTDMAEMSLEDIIVKSSKDNLKAGIFNNASQHWNHNLFWKCMKPKGGGNIPSKLEKKIIEDFGSVEKFKDEFKQAGITQFGSGWCWLSLNNDKLVVTKTANAANPLIDNLKPILGCDVWEHSYYIDYRNRRPEYLDKFVDNLIDWEFVESLLG

SEQ ID NO: 90245 - protein, 197 aa, Unknown
  Bacterial polypetide isolated from the Sargasso Sea
MSFELPKLDYSKNALAPIMSEQTLDLHHGKHHQTYITNLNNFIKDTEMSKMSLEEIIITSSKDKSKAGIFNNASQHWNHIMFWKCMKPNGGGAIPEKLKKRIEADFGSLDEFKKQFIQAGITQFGSGWCWLSIKDGKLVVSKTPNAENTLIQNMKPILGCDVWEHSYYVDYKNRRPEYLENFYEKLINWEFVESNLD

SEQ ID NO: 90246 - protein, 142 aa, Unknown
  Bacterial polypetide isolated from the Sargasso Sea
MLLLKVFKDKEQKIFNNAGQAWNHILYWDQMKPGGESQPSGKLHTMIEDSFVDFNSFKDQFVQQSVGVFGSGWCWLVQNDSSLEILGTPNGENPLAHGKHALMGIDVWEHAYYLDYKNVRPDYVKAILDNSINWSFVSDQLK

SEQ ID NO: 90247 - protein, 163 aa, Unknown
  Bacterial polypetide isolated from the Sargasso Sea
ETVTVTLEQATENGTGAPVGSVTISQSPYGLVFTPDLQGLEPGVHGFHVHTEANCNAAEVDGKLTPAGAAGGHWDPQNAGRHGFPWEDNAHLGDLPALLVTEDGSASQPVLAPRLKSLQDLHNRSLMIHAGGDNHADHPQPLGGGGARVACGLIKVPTSTTPI

SEQ ID NO: 90248 - protein, 194 aa, Unknown
  Bacterial polypetide isolated from the Sargasso Sea
MFELPKLDYANSALSPIMSEQTLDLHHGKHHQTYITNLNNFIKGSEYEKLTLEDIIKKSSTEKKSGIFNNASQHWNHNLFWRCMKPNGGGNVPSKLENKIKQDFGSFEKFREEFINAGITQFGSGWCWLSLKEDKLVVTKSPNAENPIIHNMKPILGCDVWEHSYYLDYKNKRPVYLENFFDKLINWEFVESLL

SEQ ID NO: 90249 - protein, 179 aa, Unknown
  Bacterial polypetide isolated from the Sargasso Sea
MNDAKKFNLPPLPFGENDLSPVISSDTIQLHYGKHHQAYFNMLNTLAEGTKYNDMSLEDVVVESFKDKEQKIFNNAGQAWNHILYWDQMKPGGETVPSGTLHTMIKNSFGDFNSFKDQFIQQSVGVFGSGWCWLVQNDSSLEILGTPNGENPLAHGKHALMGIDVWEHAYYLDYKNVRH

SEQ ID NO: 90250 - protein, 196 aa, Unknown
  Bacterial polypetide isolated from the Sargasso Sea
MFELPKLDYTKSALAPIMSEETLDLHHGKHHQTYITNLNNFIKDTEMSKMSLEEIIVSSSKDKSKSGIFNNASQHWNHIMFWKCMKPNGGGTMPEKLKKRIEADFGSADEFKKQFIQAGITQFGSGWCWLSINNGKLVVRKTPNAENTLIQNMKPILGCDVWEHSYYVDYKNRRPEYLENFYEKLINWEFVESQLD

SEQ ID NO: 90251 - protein, 166 aa, Unknown
  Bacterial polypetide isolated from the Sargasso Sea
MFELPKLDYANSALSPIMSEQTLDLHHGKHHQTYITNLNNFIKGSEYEKLSLEDIIKKSSNEKKSGIFNNASQHWNHNLFWKCMKPNGGGNVPLKLENKIKQDFGGFEQFREEFINAGVTQFGSGWCWLSLKEDKLVVTKSPNAENPIIHNMKPILGCDVWEHLIT

SEQ ID NO: 90252 - protein, 125 aa, Unknown
  Bacterial polypetide isolated from the Sargasso Sea
MNNIYGIIKFYSHNSNKIKITYDITGLTDGLHGFHIHKCGDMSDSCTSACSHFNPTNSEHGGLNSKIRHAGDLGNIKSHNNKCKGTLYAPTLSIDPTSLYSIIGRAIIVHEDEDDLGLGSNEESK

SEQ ID NO: 90253 - protein, 170 aa, Unknown
  Bacterial polypetide isolated from the Sargasso Sea
MVGLNYQYNDLEPFIDAKTMEIHYSKHHLGYANKLNTAIKDTEYKTKTIEEILNTLDINNSFLRNNAGGYYNHNLFFEIISPKKDTKPSTLFLEAINRDFGSLNTMISKLSETATNLFGSGWVWLIVDKDGKLKISQTSNQDNPLMSNAVEKGTPIIAIDVWEHAYYLNI

SEQ ID NO: 90254 - protein, 197 aa, Unknown
  Bacterial polypetide isolated from the Sargasso Sea
MSFELPKLDYSKTALSPIMSEETLDLHHGKHHQTYITNLNNLIKDTDMSKMSLEEIIINSSKDESKIGIFNNASQHWNHILFWKCMKPNGGGSMPDKLKKRIETDFGSTNEFKKKFTQAGITQFGSGWCWLSINSGKLVISKTPNAENTLIQNMKPILACDVWEHSYYVDYKNKRPEYLENFYEKLINWEFVESQLD

SEQ ID NO: 90255 - protein, 189 aa, Unknown
  Bacterial polypetide isolated from the Sargasso Sea
DYSNDALSPIMSQETLELHHGKHHQTYITNLNNFIKDTDMAEMSLEDIIVKSSKDNSKAGIFNNASQHWNHNLFWKCMKPKGGGNIPSKLEKKIIEDFGSVEKFKDQFKQAGITQFGSGWCWLSLNNDKLVVTKTANAANPLIENMKPLLGCDVWEHSYYIDYRNRRPEYLDKFIDNLVNWEFVESLLD

SEQ ID NO: 90256 - protein, 177 aa, Unknown
  Bacterial polypetide isolated from the Sargasso Sea
MSEQTLNLHHGKHHQTYITNLNNFIKGSEYEKLTLEDIIKKSSTEKKSGIFNNASQHWNHNLFWRCIKPNGGGNVPSKLENKIKQDFGSFEKFREEFINAGVTQFGSGWCWLSLKEDKLVVTKSPNAENPLIHNMKPILGCDVWEHSYYLDYKNKRPIYLENFFDKLINWEFVESLL

SEQ ID NO: 90257 - protein, 197 aa, Unknown
  Bacterial polypetide isolated from the Sargasso Sea
MTFELPKLDYDKNALAPIMSEETLDLHHGKHHQTYITNLNNFIKDTDMAGMSLEEIVHNSSKDKSKAGIFNNASQHWNHELFWKCMKPNGGGSMPKKLEDRIKSDLGSIEEFKKQFIQAGITQFGSGWCWLSISNGKLVVSKTPNAENPLIHNMKPILGCDVWEHSYYVDYRNRRPEYLENFFEKLVNWEFVESQLD

SEQ ID NO: 90258 - protein, 197 aa, Unknown
  Bacterial polypetide isolated from the Sargasso Sea
MTFELPKLDYSNEALSPIMSQETLELHHGKHHQTYITNLNNFIKDTDMAKMSLEDIIVKSSKDNSKAGIFNNASQHWNHNLFWKCMKPKGGGNIPSKLEKKIVEDFESVEKFKDEFKQAGITQFGSGWCWLSLNNDKLVVTKTANAANPLIDNLKPILGCDVWEHSYYIDYRNRRPEYLDKFVDNLIDWEFVESLLI

SEQ ID NO: 90259 - protein, 100 aa, Unknown
  Bacterial polypetide isolated from the Sargasso Sea
MHTMIEDSFGDFNSFKDQFVQQSVGVFGSGWCWLVQNDSSLEILGTPNGENPLAHGKHALMGIDVWEHAYYLDYKNVRPDYVKAILDNSINWSFVSDQLK

SEQ ID NO: 90260 - protein, 194 aa, Unknown
  Bacterial polypetide isolated from the Sargasso Sea
MFELPKLDYANSALSPIMSEQTLDLHHGKHHQTYITNLNNFIKGSEYEKLSLEDIIKKSSTEKKAGIFNNASQHWNHNLFWRCMKPNGGGNVPSKLKNKIKQDFGSFEKFREEFINAGITQFGSGWCWLSLKENKLVVTKSPNAENPIIHNMKPILGCDVWEHSYYLDYKNKRPIYLENFFDKLINWEFVESNL

SEQ ID NO: 90261 - protein, 197 aa, Unknown
  Bacterial polypetide isolated from the Sargasso Sea
MTFELPKLDYSNEALSPIMSQETLELHHGKHHQTYITNLNNFIKDTDMAEMSLEDIIVKSSKDNSKAGIFNNASQHWNHNLFWKCMKPKGGGNIPSKLEKKIIEDFGSIEKFKDEFKQAGITQFGSGWCWLSLNNDKLVVTKTANAANPLVDNMKPILGCDVWEHSYYIDYRNRRPEYLDKFVENLIDWEFVDSLLG

SEQ ID NO: 90262 - protein, 198 aa, Unknown
  Bacterial polypetide isolated from the Sargasso Sea
MINLELPDLPYSKDALMPYMSAETLELHHDKHHMAYITNGNKFIKEQNIADDNVNDIVINSYQKNAPVFNNVAQHINHVHFWEVMKNNPNGKIPSELENKIVSDIGSVEKMKEDFINAGIGQFGSGWCWLVLNNGKLEITKTPNGENPIVHGHTPLLGCDVWEHSYYVDYRNRRPDYLKAFIDNLVNWEKVTENLNNA

SEQ ID NO: 90263 - protein, 240 aa, Unknown
  Bacterial polypetide isolated from the Sargasso Sea
MDRKKFLKTSAILAGTTILPSNSIFANNINKNGIEKITDDKGNFIQQALPYNIDYLEPFMDSETLDLHHSFHHGGAVKGANKDIEMIKRSIKQNDLNMVDHWTKKLSFHLSSHILHSIFWTNLTKRSSTPSGALLKKIEKDFGSLDKMQGLLSKLSKSIEGSGWGVLAYQPQSDTLVILQCENHHKLTIWGAVPLLVIDVWEHAYYLKYKNRRGDFVDALMNIINWDNIAERYEIAKKLN

SEQ ID NO: 90264 - protein, 197 aa, Unknown
  Bacterial polypetide isolated from the Sargasso Sea
MSFTLPKLDYTNDALSPIMSEETLDLHHGKHHQTYITNLNNFIKDTDMANMSLEEIILKSSKDKSMAGIFNNASQHWNHNLFWKCMKPNGGGKIPPKLEKRIISDFGSIDQFKKNFKQAGVTQFGSGWCWLSISNDKLVVTKTSNAQNPVIDNMKPILGCDVWEHSYYIDYRNRRPEYLDKFIENLINWEFVESLLD

SEQ ID NO: 90265 - protein, 192 aa, Unknown
  Bacterial polypetide isolated from the Sargasso Sea
MINLELPELPYSKDALAPYMSAETLELHHDKHHMAYVTNGNKFIKENNLNEESIEEVVKKSYNSIAPVFNNVSQHLNHMHFWEIMQNNPNGKIPSELETKINQDFESVDAMKQEFINAGIGQFGSGWCWLVLNNGKLEITKTPNAENPIVHGHIPLLGCDVWEHSYYVDYRNRRPDYLRAFVDNLVNGKKYQ

SEQ ID NO: 90266 - protein, 194 aa, Unknown
  Bacterial polypetide isolated from the Sargasso Sea
MFELPKLDYSNSALSPIMSEQTLDLHHGKHHQTYITNLNNFIKGSDYEKLSLEDIIKKSSNEKKAGIFNNASQHWNHNLFWKCMKPNGGGNVPSKLESKIKEDFGGFEKFREEFINAGVTQFGSGWCWLSLKEDKLVVTKSPNAENPIIHNMKPILGCDVWEHSYYLDYRNKRPAYLENFFDKLINWEYVNSLL

SEQ ID NO: 90267 - protein, 150 aa, Unknown
  Bacterial polypetide isolated from the Sargasso Sea
MRAIELTKEQSCPRTRAKECTCESIKTITESSEPVIAQSELMHSDKVKGTVLFMQAPGTATLIKGTITGLEPGLHGFHIHEFGDMSDGCKSMGGHYNPDGVDHGDLKKGHVGDLENVLANDKGVAKFTITAPRVDLIGERSVIGSRHCYP

SEQ ID NO: 90268 - protein, 140 aa, Unknown
  Bacterial polypetide isolated from the Sargasso Sea
MKSSNDNSKAGIFNNASQHWNHNLFWKCMKPKGGGNIPSKLEKKIIEDFESVEKFKDQFKQAGITQFGSGWCWLSLNNDKLVVTKTANAANPSIENMKPLLGCDVWEHSYYIDYRNRRPEYLDKFVDNLIDWEFVESLLI

SEQ ID NO: 90269 - protein, 179 aa, Unknown
  Bacterial polypetide isolated from the Sargasso Sea
MYKITMEKGMKNIVLLLASMSAASAFADVSVPMNLVNEKGVGESVGQVTVSESQYGVVFTPSLKGLMPGLHGFHLHENGSCDPKEKDGKIVPAGAAGGHYDPTATKAHGTPWGEGHLGDLPPLFVDADGAASQAVLAPRLKMSDLKGHAIMIHAGGDNHSDHPAPLGGGGARVACGIIN

SEQ ID NO: 90270 - protein, 167 aa, Unknown
  Bacterial polypetide isolated from the Sargasso Sea
MKAVCVLTNNINKKIKGFIEFIENNNFMIINIHIQGLKPGYHAIHIHEYGDLREGCSSLCSHFNPYKTNHGSPLNNQNNRHIGDLGNIFANKSGIVRETFTDKLIKLRGKSNIIGRSVVIHEDIDDLGLGGIDTNSGIIVNKKIHEESLKTGNAGKRIACGVIGWAK

SEQ ID NO: 90271 - protein, 165 aa, Unknown
  Bacterial polypetide isolated from the Sargasso Sea
SKVQSITESKETVIAQCDLQHSDTVKGTILFIQAPGTPTMIKGTVTGLEPGDHGFHIHEFGDMSKGCESMGGHYNPDGDDHGNEDNGHVGDLGNINADENGTATVNIIAKRVDLIGERSVVGRGIVVHKEQDDLGQGNDAESLKTGNAGDRLACGVIVLRDSNED

SEQ ID NO: 90272 - protein, 128 aa, Unknown
  Bacterial polypetide isolated from the Sargasso Sea
MAFSLPPLPYEMNALEPHISSETLEFHYGKHHQTYVNNLNGLVEGTDNASKSLEEIIMSSDGGLFNNAAQVWNHTFYWNCMGPNGGGNPTGSAADAIKQAYGSFDNFKDQFSKSAATNFGSGWTWLVK

SEQ ID NO: 90273 - protein, 130 aa, Unknown
  Bacterial polypetide isolated from the Sargasso Sea
MTYELPDMPYDYDALEPHIDALTMEIHHTKHHNAYTNNLNAAIESNGIPEMPINDLLRNHSDIAAIRNNGGGWWNHCQFWESMSPDGGGKPSGDLADAIDSVFGSFEDFQADFQKAAMTRFGSGWAWLGV

SEQ ID NO: 90274 - protein, 82 aa, Unknown
  Bacterial polypetide isolated from the Sargasso Sea
MGKYTLPEMPYAYDALEPHIDAQTMEIHHTKHHQKYTDTMNGALEKLSPELQSKDITEILSNINDVPEDIRGAINFNGGGYD

SEQ ID NO: 90275 - protein, 264 aa, Unknown
  Bacterial polypetide isolated from the Sargasso Sea
LLVFITISICYTAQIHVLPKLGYEYAAYEPFIDSHTMKIHHLKHHQGYINKLNKALKGTKKEKETLSSILMNISLYNTTVRNNAGGHYNHSLFWRILKPKPNKQPSEDLMRGIGKSFESISKLKEEMNLEAAKRFGSGWVWLILQSNGELKVTSTANQDNPLMDLIKDRGIPIIAIDVWEHAYYLKYQNKRNDYLGAIWNLIDWGVVSDNYIKAFSSPIFQELKTHNWPELNVFRNDLSHIYYSAEIENYAPLKTMTKELMLKS

SEQ ID NO: 90276 - protein, 59 aa, Unknown
  Bacterial polypetide isolated from the Sargasso Sea
MAHSLPELGYAYNALEPHIDAKTMEIHHSKHHQTYITNLNAALENYPEFFDKSVEELLI

SEQ ID NO: 90277 - protein, 60 aa, Unknown
  Bacterial polypetide isolated from the Sargasso Sea
TANQDNPLMDKGCGGTPILGLDVWEHAYYLNYQNRRPDYINAFFNVINWDVVSDKFNSAK

SEQ ID NO: 90278 - protein, 200 aa, Unknown
  Bacterial polypetide isolated from the Sargasso Sea
MSNSQKFTLPALPYGASDLSPTISSDTVDLHHGKHHQAYFNMLNNFADGTKFMDMELDEVVVESYKEGNVKVFNNAGQAWNHILYWEQMAPGGSNAPQGKLLEKIDEAFGDFDTFKTDFTQQAVGVFGSGWAWLIEKDGKLEMRGLPNAENPLAHGEHALMGIDVWEHAYYLDYKNVRPDYVKAVLDNLINWDYVSDRLQ

SEQ ID NO: 90279 - protein, 192 aa, Unknown
  Bacterial polypetide isolated from the Sargasso Sea
MAFKVPDLPYDYNALEPYIDEETMHFHHDKHHAAYVNMLNGAVEAAGLEGKTVEELITNLDSVPEEQRGAVRNHGGGHYNHTMFWEIMGPVNGEMSADLNTALLDAFGSLDDFKAEFHKAGMTRFGSGWAWLCSDNGKLSVCSTANQDNPIMESKYGGCGKTPILGCDVWEHAYYLNYQNLRGDYLTAFFDV

SEQ ID NO: 90280 - protein, 203 aa, Unknown
  Bacterial polypetide isolated from the Sargasso Sea
MPYQLPPLAYAYDALEPHIDAQTMEIHHTKHHQTYINNLNAALQGTAYAEQDVEQLLRQVSELPQNLQGAVINQGGGHANHSLFWQVMSPSGGGVPEGELALAIDTELGGFAAFKEAFTQAALSRFGSGWAWLSVTPQRRLLVESSANQDSPLMHGNTPILGLDVWEHAYYLRYQNRRPEYIGAFYNVIDWAEVASRFRRASS

SEQ ID NO: 90281 - protein, 121 aa, Unknown
  Bacterial polypetide isolated from the Sargasso Sea
SGVPFPPGGGLPQGELAAAIDSAFGNFDSFKEAFAKAAMTRFGSGWAWLVKRADGSLSVTSTPNQDSPLMEGVADETGRPIVGLDVWEHAYYLNYQNRRPDYVSAFWSVVDWNQALELFKS

SEQ ID NO: 90282 - protein, 81 aa, Unknown
  Bacterial polypetide isolated from the Sargasso Sea
MAFELPALPYEQNALEPHISAETLEYHYGKHHATYVTKLNGLVEGTDMENKSLEEIIKSSDGGVFNNAAQVWNHTFYWHCL

SEQ ID NO: 90283 - protein, 193 aa, Unknown
  Bacterial polypetide isolated from the Sargasso Sea
MAFSLPPLPYEMNALEPHISSETLEFHYGKHHQTYVNNLNGLVEGTDKASKSLEEIIMSSDGGLFNNAAQVWNHTFYWNCMGPNGGGNPNGSAADAINRAFGSFDNFKDQFSKSAATNFGSGWTWLVKNSSGGVEIQNTSNAGCPMTSGKKAVLTIDVWEHAYYVDKRNARPAYIESWWNLVNWDFVNSQLEG

SEQ ID NO: 90284 - protein, 190 aa, Unknown
  Bacterial polypetide isolated from the Sargasso Sea
MAFSLPPLPYKMNALEPHISSETLEFHYGKHHQTYVNNLNGLVEGTDNASKSLEEIIMSSDGGLFNNAAQVWNHTFYWNCMGPNGGGNPTGSVADAINQAFGSFDNFKDQFSKSAATNFGSGWTWLVKNSSGGVEIQNTSNAGCPMTSGNKAVLTIDVWEHAYYVDKRNARPAYIESWWNLVNWNYVNSQ

SEQ ID NO: 90285 - protein, 98 aa, Unknown
  Bacterial polypetide isolated from the Sargasso Sea
MAYMLPPLPYSFDALEPHIDARTMEIHHDKHHAAYVANVNKALEGSSLAELPIEKLISDLEQVPEAIRTAVRNNGGGHANHSLFWESLGGGKGGEPSG

SEQ ID NO: 90286 - protein, 161 aa, Unknown
  Bacterial polypetide isolated from the Sargasso Sea
NLGSQSIDELVKTISSVDSSIQGAIRNNGGGHANHSLFWSILSPNGGGAPTGALASMIESTFGSIDSFKEAFNQAAATRFGSGWAWLGVKSGGTLCISSTPNQDNPLMKGLVDCECTPILGLDVWEHAYYLNYQNRRPDYIAAFWNVVNWDVVNQNYEKSL

SEQ ID NO: 90287 - protein, 110 aa, Unknown
  Bacterial polypetide isolated from the Sargasso Sea
EPSGEISESINSNFGSFENFKDEFSKAAATRFGSGWAWVCAHPDGKLEICSTANQDNPLMPNGCGGNPILCLDVWEHAYYLNYQNRRPDYINAFFNVINWDEVNNRFTNK

SEQ ID NO: 90288 - protein, 90 aa, Unknown
  Bacterial polypetide isolated from the Sargasso Sea
FKEQFTNAAVSRFGSGWAWLCVDENNQLVVESSLNQDSPLMQNHTPILGLDVWEHAYYLKYQNRRPEYIAAFYEVINWPEVERRYLAAIK

SEQ ID NO: 90289 - protein, 169 aa, Unknown
  Bacterial polypetide isolated from the Sargasso Sea
MAFELPKLNYAFDALEPNIDAKTMEIHYGKHHNGYTNNLNNIISGTDNEGKSIEDILNSLDLENKGLRNNSGGYYNHNLFWEIMGPNGGGEPTGEIGESINLNFGSFENFKDEFSKAAATRFGSGWTWLCAHNDGKLEICSTANQDNPLMPNGCGGVPVLCLDVWEHAY

SEQ ID NO: 90290 - protein, 83 aa, Unknown
  Bacterial polypetide isolated from the Sargasso Sea
KTAPIQGSGWGWLVYNPNSGKVEYKAMPNQTSPRTEGLVPLLGLDVWEHAYYLKYQNKRPDYIAAWWNVINWDEVNDRFSKAK

SEQ ID NO: 90291 - protein, 146 aa, Unknown
  Bacterial polypetide isolated from the Sargasso Sea
MAFELPALPYEKNALEPHISAETLEYHYGKHHNTYVVNLNNMVPGTEYEGKSLEEIIKTSSGGVFNNAAQIWNHTFYWNCLSPNGGGEPTGELAEAINKAFGSFAAFKEEFSKVSIGTFGSGWGWLVKKGDGSLALASTIGAGCPL

SEQ ID NO: 90292 - protein, 81 aa, Unknown
  Bacterial polypetide isolated from the Sargasso Sea
MAHTLPELPYAYDALEPNIDAMTMEIHHSRHHNTYVTNLNGALEGTGLEDVPVEELVANLDRVPEEKRQAVINNGGGHANH

SEQ ID NO: 90293 - protein, 200 aa, Unknown
  Bacterial polypetide isolated from the Sargasso Sea
MAFKLPELNYGYNDLEPFIDAKTMEIHYSKHHQGYTNNLNNAIEGTNFQGMGIIDLLKSMDMNNTALRNNGGGFYNHSLFWSIIGPNKGGTPNGEISNKINSDFGSFDSFKELFSKAAASRFGSGWAWLCVKKDGGLEVCSTANQDNPLMPSIECGGTPILCIDVWEHAYYLNYQNRRPEYISAFFNIIDWESVSEIYKK

SEQ ID NO: 90294 - protein, 172 aa, Unknown
  Bacterial polypetide isolated from the Sargasso Sea
HQTYVNNLNALVEGTEYADLPIDELLRKVKTLPESLQQGVRNQGGGHGNHSLFWDVIGPNAGGTPGGALGKAIDEQLGGFDKFKEAFTKAALTQFGSGWAWLSVTADKKLVVEKTGNQESPLMEGRTPVLTIDVWEHAYYLKFQNRRAEFIETFYSLINWKEVERRYEEAVA

SEQ ID NO: 90295 - protein, 192 aa, Unknown
  Bacterial polypetide isolated from the Sargasso Sea
MTFTLPELEYDYSALGPYIDSETMKTHHTKHHAGYVAKLNAAVEGTDLAKKSLMELLSSLSTLPTDKQAAVRNNGGGHANHSLFWASMSPSPKTSPEGELKTAIDQTFGDLDTFKTAFSTAAITQFGSGWAWLVTDKTGKLAVYSLPNQDSPIMQGDIPLIGLDVWEHAYYLKYKNRRPDYVDAFWNVLDWA

SEQ ID NO: 90296 - protein, 83 aa, Unknown
  Bacterial polypetide isolated from the Sargasso Sea
MTISLPKLPYDNKALEPYISENTLNYHYGKHHNTYVVNLNKLITGTKFEGQSLEEIIKNSDGGIFNNAAQVWNHTFYWNSHEA

SEQ ID NO: 90297 - protein, 200 aa, Unknown
  Bacterial polypetide isolated from the Sargasso Sea
MNDAKKFNLPPLPFGENELSPVISSDTIQLHYGKHHLAYFNMLNTLAEGTKYNDMSLEDVVVESFKNKDQKIFNNAGQAWNHILYWDQMKPGGESAPSGKLHAMIEESFGDFDSFKDQFVQQSIGVFGSGWCWLVQNDSSLEILGTPNGENPLAHGKHALMGIDVWEHAYYLDYKNVRPDYVKAILDNSINWSFVSDQLK

SEQ ID NO: 90298 - protein, 206 aa, Unknown
  Bacterial polypetide isolated from the Sargasso Sea
MSYTLPSLPYAYDALEPHFDKQTMEIHHTKHHQAYVNNANAALESLPEFASLSAEELITKLDQLPADKKTVLRNNAGGHANHSLFWKGLKTGTTLQGDLKAAIERDFGSVDNFKAEFEKAAATRFGSGWAWLVLKGDKLAVVSTANQDSPLMGEAISGASGFPIVGLDVWEHAYYLKFQNRRPDYIKEFWNVVNWDEAAARFAAKK

SEQ ID NO: 90299 - protein, 118 aa, Unknown
  Bacterial polypetide isolated from the Sargasso Sea
MAFELPPLPYAKNALEPHISAETLEYHHDKHHNTYVVNLNNLVPGTEFEGKSLEDIVKTSSGGIFNNAAQVWNHTFYWNCLSPNGGGQPTGALADAINAAFGSFDKFKEEFSKTSIGT

SEQ ID NO: 90300 - protein, 123 aa, Unknown
  Bacterial polypetide isolated from the Sargasso Sea
MSFELPKLDYAFDALEPHIDARTMEIHHDKHHAGYTSKLNDAIKGTDLEGKTIENILINLDMSNMAVRNNGGGFYNHSLFWKVMSPDGGGKPTGALLDAITDAFGSFEAFKSEFFNAAGSRFG

SEQ ID NO: 90301 - protein, 117 aa, Unknown
  Bacterial polypetide isolated from the Sargasso Sea
LPQNALAAAIDKDLGGFENFKTEFTKAAISRFGSGWAWLSVDRSGKLHVESSANQDNPLMLGIGSGNTPILGLDVWEHAYYLKYQNRRPEYIAAFYNVVDWNEVARRFAAATQAVRS

SEQ ID NO: 90302 - protein, 42 aa, Unknown
  Bacterial polypetide isolated from the Sargasso Sea
MGKYTLPEMPYAYDALEPHIDAQTMEIHHSKHHQKYTDGMNG

SEQ ID NO: 90303 - protein, 197 aa, Unknown
  Bacterial polypetide isolated from the Sargasso Sea
MTFELPSLPYANDALAPYMSSETLDFHHGKHHQTYVTNLNNLVKDTDMKDSSLEEIVVKSSKDSSMAGIFNNAGQHWNHILFWQCMKPNGGGSMPSELESRITSDLGGIDQFKEAFIQAGTTQFGSGWAWLAIDNGKLVVTKSPNASNPLVDGMKPILGCDVWEHSYYIDYRNKRPDYLKAFLDSLVNWEFVASQLD

SEQ ID NO: 90304 - protein, 206 aa, Unknown
  Bacterial polypetide isolated from the Sargasso Sea
MSFQLPDLSYNHDALEPYIDSRTMQIHHGKHHAGYTSKLNAAIEGTDLSGKSIDDILKNLDMNNSAVRNNGGGYYNHCLFWEIMSPNGGGSPSGALSAAIEKSFDSFDEFKSKFSSAAGTRFGSGWAWLCAHSNGDLEICSSANQDNPLMPGIGCGGTPILGLDVWEHAYYLNYQNRRPDYINAFFNIINWGKSKRKVLSCLLNGN

SEQ ID NO: 90305 - protein, 193 aa, Unknown
  Bacterial polypetide isolated from the Sargasso Sea
MAFELPALPYEKNALEPHISAETLDYHHGKHHNTYVVNLNNMVPGTEYEGKSLEEIIKTSSGGVFNNAAQIWNHTFYWNCLSPNGGGEPTGELAEAINKAFGSFAAFKEEFSKVSIGTFGSGWGWLVKKADGSLALASTIGAGCPLTSGDTPLLTCDVWEHAYYIDYRNARPKYVEAFWNLVNWDFVAKNYAA

SEQ ID NO: 90306 - protein, 199 aa, Unknown
  Bacterial polypetide isolated from the Sargasso Sea
MPHTLPALPYELDALEPHISRQTLEFHHGKHHAAYVNNLNKLVDGTDLDGKSIEDTITAVAGNSEKAGVFNNAAQVWNHSFYWQCIKPGGGGQPTGALAEKINADFGSFEKFVEAFKAAGATQFGSGWAWLVLDNGSLKVTKTANADLPLAHGQEALLTMDVWEHAYYLDYQNRRPDYITTYLEKLVNWDFVAANFAAA

SEQ ID NO: 90307 - protein, 247 aa, Unknown
  Bacterial polypetide isolated from the Sargasso Sea
MTTATTVKPSSNATRSFVNAKLPDLDYDFSALEPVICAEIMEIHHQKHHNTYVTNFNVAQEKYAEAEAKGDHATMIAMQPAIKFNGGGHVNHTLFWKCLTAPKDYALPEGELLKMIERDFGSLSAMQDKFTAATVAVQGSGWGWLGFDKASGKLAVTTTANQDPCVTTGLTPILGVDVWEHAYYLQYKNLRPDYVKSVWKIINWKVSVIFVVTREKTDELDFFPYRMLLITLRMPCNAHSNLYNNFL

SEQ ID NO: 90308 - protein, 67 aa, Unknown
  Bacterial polypetide isolated from the Sargasso Sea
MVNLEICSTANQDNPLMPNGCGGNPILCLDVWEHAYYLNYQNRRPDYINAFFNVINWVEVNKRFLQA

SEQ ID NO: 90309 - protein, 172 aa, Unknown
  Bacterial polypetide isolated from the Sargasso Sea
MAFELPALPYEQNALEPHISAETLEYHYGKHHATYVTKLNGLVEGTDMENKSLEEIIKSSDGGVFNNAAQVWNHTFYWHCLSPNGGGEPTGALAEAINAKWGSFADFQAAFNDKAVNNFGSSWTWLVKTADGSLDIVNTSNAQTPISGDDLTPVLTVDLWEHAYYIDYRNAR

SEQ ID NO: 90310 - protein, 160 aa, Unknown
  Bacterial polypetide isolated from the Sargasso Sea
MGKYTLPEMPYAYDALEPHIDAQTMEIHHSKHHQKYTDGMNGALEKLSPELQDKDIEEILSNINQVPDDVKGAINFNGGGYDNHKLFWNSMKQNGGGEPTGAIADAINDSFGSFAEFKELFSSKTAPIQGSGWGWLVYNPNSGKVEYKAMPNQTSPRTEG

SEQ ID NO: 90311 - protein, 206 aa, Unknown
  Bacterial polypetide isolated from the Sargasso Sea
MGKYTLPEMPYAYDALEPHIDAQTMEIHHSKHHQKYTDGMNGALEKLSPELQDKDIEEILSNINQVPDDVKGAINFNGGGYDNHKLFWNSMKQNGGGEPTGAIADAINDSFGSFAEFKELFSSKTAPIQGSGWGWLVYNPNSGKVEYKAMPNQTSPRTEGLVPLLGLDVWEHAYYLKYQNKRPDYIAAWWNVINWDEVNDRFSKAK

SEQ ID NO: 90312 - protein, 197 aa, Unknown
  Bacterial polypetide isolated from the Sargasso Sea
MTFELPSLPYASDALAPYMSSETLDFHHGKHHQTYVTNLNNLVKDTDMQDSSLEEIVVKSSKDPSMAGIFNNAGQHWNHILFWQCMKPNGGGSMPSELESRITSDLGGIDQFKEAFIQAGITQFGSGWAWLAIDNGKLVVTKSPNASNPLVDGMKPILGCDVWEHSYYIDYRNKRPDYLKAFLDSMVNWEFVASQLD

SEQ ID NO: 90313 - protein, 204 aa, Unknown
  Bacterial polypetide isolated from the Sargasso Sea
KYTLPEMPYAYDALEPHIDAQTMEIHHSKHHQKYTDGMNGALEKLSPELQEKDIEEILSNINQVPDDVKGAINFNGGGYDNHKLFWNSMKQNGGGEPTGAIADAINDSFGSFAEFKELFSSKTAPIQGSGWGWLVYNPTSGKVEYKAMPNQTSPRTEGLVPLLGLDVWEHAYYLKYQNKRPDYIAAWWNVINWDEVNDRFSKAK

SEQ ID NO: 90314 - protein, 192 aa, Unknown
  Bacterial polypetide isolated from the Sargasso Sea
MAHTLPPLPYAEDALAPTISLETIQYHYGKHHQAYVTNLNNLIPGTEFENLSLEEIVKKSSGGIFNNAAQIWNHTFFWNSLSPNGGGAPTGALGDAINAKWGSYDAFKEAFTKAAVGTFGSGWAWLVKKADGSLDIVSTSNAATPLTTADKALLTIDVWEHAYYIDYRNARPKFVEAFWNIVNWDFAAKNFA

SEQ ID NO: 90315 - protein, 194 aa, Unknown
  Bacterial polypetide isolated from the Sargasso Sea
MAFELPALPYAINALEPHISQETLEYHHGKHHNTYVVNLNNLVPGTEFEGKSLEEIIKTSTGGIFNNAAQIWNHTFYWHCLSPNGGGEPTGALADAITKAFGSFAEFKDAFTKSAIGNFGSSWTWLVKKADGSLAIVNTSNAGCPLTEAGTTPLLTVDLWEHAYYIDFRNLRPKYMETFWTLVNWEFVAKNLAA

SEQ ID NO: 90316 - protein, 194 aa, Unknown
  Bacterial polypetide isolated from the Sargasso Sea
MAFELPALPYAKNALEPHISQETIEYHYGKHHNTYVVKLNGLIEGTDFAGKSLEEIIKTSTGGVFNNAAQVWNHTFYWNCLAPNAGGEPTGPVADAINAAFGSFDAFKAQFTDSAVNNFGSAWTWLVKKADGTVAIVNTSNAATPLTDSTVTPILTVDVWEHAYYIDYRNVRPDYLAHFWQLVNWDFVNQNFAG

SEQ ID NO: 90317 - protein, 201 aa, Unknown
  Bacterial polypetide isolated from the Sargasso Sea
MAFELPKLNYSFDALEPYIDAKTMEIHYGKHHNGYINNLNNAISGTELESKTIEEILKNLDLDNMALRNNSGGYFNHNLFWEIMGPNCGGNPSGEISEAINSNFNSFENFKEEFKKAAATRFGSGWAWLCVLGDGKLEICSTPNQDNPLMENSCGGNPILCLDVWEHAYYLNYQNRRPDYIEAFFSLINWDEVNSKYLNFK

SEQ ID NO: 90318 - protein, 200 aa, Unknown
  Bacterial polypetide isolated from the Sargasso Sea
MAFELHKLNYAFDALEPNIDAKTMEIHYGKHHNGYTNNLNNIISGTDNEGKSIEDILKTLDLENKGLRNNGGGFYNHNLFWKIMGPNGGGEPSGEISESINSNFGSFENFKDEFSKSATTRFGSGWAWLCAHPDGKLEICSTANQDNPLMPNGCGGNPILCLDVWEHAYYLNYQNRRPDYINAFFNVINWDEVNNRFTNK

SEQ ID NO: 90319 - protein, 204 aa, Unknown
  Bacterial polypetide isolated from the Sargasso Sea
MSHTLPALPYAYDALEPHIDALTMEIHHSRHHQTYINNLNAALTDLPELAALPVEELLARFDSLPGKVQGAVRNHGGGHANHSLFWQVMSPQGGGEPGGELAAAILRDLGGLEAFKQAFTQAALSRFGSGWAWLVVDQSSKLQVVSSANQDSPLQDGLVPILGLDVWEHAYYLKYQNKRPDYIAAFYKVIDWNEVARRYVAALA

SEQ ID NO: 90320 - protein, 117 aa, Unknown
  Bacterial polypetide isolated from the Sargasso Sea
MEHTLPPLPFARNALVPHMSEETLDYHYGKHHQTYVTNLNNLIKGTEFENLSLEEIVKKASGGIFNNAAQVWNHTFFWNSLSPQGGGAPTGALADAINAKWGSFDKFKEEFAKTAVG

SEQ ID NO: 90321 - protein, 196 aa, Unknown
  Bacterial polypetide isolated from the Sargasso Sea
MLNLPELPYAYDSLAPYMSKETLEFHHDKHHNTYVVNANKIIEDNNINYDNLESLVKNSHSSNQGLFNNAAQHWNHIEFWQWMKPNGGGNIPSELESKIVEDFGSFDKFRADFIAAGATQFGSGWCWLVKGADGKLSVTKTPNGENPIVHGQKALLGCDVWEHSYYIDYRNARPKYLEAFIDNLVNWERVAELFGS

SEQ ID NO: 90322 - protein, 206 aa, Unknown
  Bacterial polypetide isolated from the Sargasso Sea
MGKYTLPEMPYAYDALEPHIDAQTMEIHHSKHHQKYTDGMNGALEKLSPELQEKDIEEILSNINQVPDDVKGAINFNGGGYDNHKLFWNSMKQNGGGEPTGAIADAINDSFGSFAEFKELFSSKTAPIQGSGWGWLVYNPNSGKVEYKAMPNQTSPRTEGLVPLLGLDVWEHAYYLKYQNKRPDYIAAWWNVINWDEVNDRFSKAK

SEQ ID NO: 90323 - protein, 197 aa, Unknown
  Bacterial polypetide isolated from the Sargasso Sea
MGFELLELEYAYDSLEPHIDAETMELHHSKHHAGYTAKLNAAIEGTEMDSLGIEDLMINHMDNAAVRNNGGGFWNHGIFWETMSPDGGGEPEGDLANAISDSFGSFQSMKDQFSDAAMTRFGSGWAWLCVSDGQLSICSTPNQDNPLMLGEGIPILGLDVWEHAYYKNYGPGRGDYIAAWWNVVNWSAVSDNYHAAI

SEQ ID NO: 90324 - protein, 195 aa, Unknown
  Bacterial polypetide isolated from the Sargasso Sea
MQELNEVGLSVAGMTCPSCTKHVEDALLAVPGVIRASVDYPANRAQVTGNRLDVSALVTAVGALGYRAKPADEVESKRRSAERPGLLGRAAQWLSGDRAVEELAGQLHVAVIGSGGAAVAAALKAAENGARVTLIERGTIGGTCVNVGCVPSKIMIRAAHIAHLRRESPFDVGLTATPPVVSRDRLLVQQQARVD

SEQ ID NO: 90325 - protein, 140 aa, Unknown
  Bacterial polypetide isolated from the Sargasso Sea
MTLKIDGMTCASCAEHVRQALEKVPGVRSAAVSYSKALADLTVDEGVSHDTLTAAVTTAGYHARVADVPPHSAGLPGKTPGSAETGGKRSGGDSALRVAVIGSGGAAMAAALKAAENGAQVTLIERGTIGGTCVNVGCVP

SEQ ID NO: 90326 - protein, 178 aa, Unknown
  Bacterial polypetide isolated from the Sargasso Sea
MKTENIKLDIAGMTCDHCATGIEKMLTKNEGVTEVKVSYQNGSCECSFDPSKTSKEEIINTINSTKNYKVAHTAETKCCNTNANHFDLIIIGGGSAAFSAAIKAESLGLSTLMVNGGLDFGGTCVNVGCVPSKTLIRAAETAYHATHSNFSGIKPKGVAIDFAQVIKDKKQLVATLQK

SEQ ID NO: 90327 - protein, 259 aa, Unknown
  Bacterial polypetide isolated from the Sargasso Sea
MQELNEVGLSVAGMTCPSCTRHVEDALLAVPGVTRAAVDYPSNKAQVTGNRLDVSALVAAVGALGYGATPTDEFESKERSVEQPGLLGKAAQWLSGERAVEKPAGQLHVAIIGTGGAAVAAALKAAENGARVTLIERGTIGGTCVNVGCVPSKIMIRAAHIAHLRRESPFDVGLSATPPVVLRDRLLAQQQARVDELRHAKYESILESNPSINLVRGSARFKDGQTLIVEAAEGDTREVGFDRCLICTGCSAAIPPLPG

SEQ ID NO: 90328 - protein, 295 aa, Unknown
  Bacterial polypetide isolated from the Sargasso Sea
EAIPKRLAVIGASVVALELAQAFARLGSEVTVLARRTLFASDDPAIGEAVTAAFRAEGITVLTQTQASAVTYCDRQFILTTAQGELKVDQLLVATGRTPNTASLNLERAGVTFDSQHRILIDQGMRTSASNIYAAGDCTDQPQYVYVAAAAGTRAGINMTGGDVKLDLDAMPAVVFTDPQVATVGYSEAEAQRIGLQTESRTLTLDNVPRALANFDTRGFIKLVAEAGSGRILGVQAVTPEAGEIIQTAAIAIRARMTVQDLANQLFPYLTMVEGLKLVAQTFSKDVTQLSCCAG

SEQ ID NO: 90329 - protein, 256 aa, Unknown
  Bacterial polypetide isolated from the Sargasso Sea
YQASFEVASLQLRPGQLDKALGWLRSDTEVGKNGDALHIAVIGSGGAAMAAALKAVEAGARVTLIERGTIGGTCVNVGCVPSKIMIRAAHVAHLRRESPFDDGMPATPPTVLRERLLAQQQGLVDELRHAKYEGILESTPAITVLRGTARFQDGHTLSVELVEGGGREVAFDRCLIATGAGAAVPPIRGLQDTPYWTSEEALASASIPQRLAVIGSSVVALELAQAFARLGSRVTILARNSLFFREDPAIGEALTA

SEQ ID NO: 90330 - protein, 204 aa, Unknown
  Bacterial polypetide isolated from the Sargasso Sea
MTSDQCSTSCCSLSESDQLHVAIIGSGSGAFACAIKAAENGARVTIIEGSDVIGGCCVNVGCVPSKILIRAAQLAHQQRRNPFDGLENNNPQISRALLAHQQKSRVEELREAKYESILKKNPALSLIKGYARFKNESTLIIQKSDGTNEELLADRILIATGSTPSIPPIKGLEDTPYWTSTEALFETELPGSLIVIGSSVVALE

SEQ ID NO: 90331 - protein, 206 aa, Unknown
  Bacterial polypetide isolated from the Sargasso Sea
KLLISTGRFANTGKLGLESIGVETEMNGAIKVNERMETSIANIYAAGDCSNMPQFVYVAAAAGSRAGINMTGGDAILDLSTMPVVVFTDPQVATVGLSEEQAISKGLDVVSRVLDMENVPRALANFETDGFIKLVAESKSERIIGAQILSHEGGELIQSAALAISNQMTVTDLANQLFPYLTMVEGLKLCAQTFNKDVTELSCCAG

SEQ ID NO: 90332 - protein, 208 aa, Unknown
  Bacterial polypetide isolated from the Sargasso Sea
MTLKIDGMTCASCAEHVRQALEKVPGVRSAAVSYSKALADLTVDEGVSHDTLTAAVTTAGYHARVADVPPHSAGLPGKTPGSAETGGKRSGGDSALRVAVIGSGGAAMAAALKAAENGAQVTLIERGTIGGTCVNVGCVPSKIMIRAAHIAYLRQTSPFDAGITATAPAIDRPRMLAQQQARVDELRHEKYENILDTSPNINVLHGEA

SEQ ID NO: 90333 - protein, 173 aa, Unknown
  Bacterial polypetide isolated from the Sargasso Sea
MTHLTITGMTCGSCAAHVKKALEDVPGVQSAFVSHPEGTAQLVTLPGTLPDALTAAVARLGYKAMLADVPPKHNHAGSLDQVRQWTGGADKRRGNERPLQIAVIGSGGAAMAAALKAVEQGAHVTLVERGTIGGTCVNIGCVPSKIMIRAAHIAHLRRESPFDGGMSPTPPTI

SEQ ID NO: 90334 - protein, 216 aa, Unknown
  Bacterial polypetide isolated from the Sargasso Sea
MSTNSCCSSNDIQPEQLHVAIIGSGSGAFASAIKAAEGGARVTIIEGADVIGGCCVNVGCVPSKILIRAAQLAHQQRTNPFDGLENIQPQLSRSLLAHQQNARVEELRDAKYQRILESNPALSLLKGYARFKNQNTLLVHKSDGSEEELVADRILIATGSTPSIPPIKGLVDTPYWTSTEALFAEELPSSLVVIGSSVVALEIAQAYARLGSRVTI

SEQ ID NO: 90335 - protein, 251 aa, Unknown
  Bacterial polypetide isolated from the Sargasso Sea
PAVGEAVEAAFRREGIEVLKQTQASEITHNGRVFTLQTNAGTLEAEQLLVASGRTPNTENLNLEAVGVATERGAIRIDNHLQTTASGIYAAGDCTDQPQFVYVAAAGGSRAAINMTGGDASLDLSAMPEVIFTDPQVATVGLSEAEAQAQGYDTDSRTLTLDNVPRALVNFDAGGFIKMVAERGSGRLLGVQSVAGEAGELIQTAVMALRARMTVNDIADELFPYLTMVEGLKLCAQTFTKDVKQLSCCAG

SEQ ID NO: 90336 - protein, 407 aa, Unknown
  Bacterial polypetide isolated from the Sargasso Sea
MTLKIDGMTCASCAEHVRQALEKVPGVRSAAVSWPEALADVTVDEGVSDDTLAAALMTAGYHAKVADVPDQSAGLLDRALGWAGAGGKRRGDDGALRVAVIGSGGAAMAAALKAAENGAQVTLIERGTIGGTCVNVGCVPSKIMIRAAQIAHLRQVSPFDAGISAVAPVIDRPRLLAQQQARVDELRHAKYENILDTSPNINVLHGEARFTGSHTLTVTLTVGGERMVSFDRCLIATGATAAVPPIPGLKDTPYWTSTEALASETIPARLAVIGSSVVAVELAQAFARLGSHVIVLARHTLLYQEDPAIGETVTAAFRAEGIEVLEQTQASHVSYADGKFVLTTNHGEVRADQLLVATGRAPNTGSLSLASAGVQLDGHGAVVIDAGMRTSAPDIYAAGDCTNQPQF

SEQ ID NO: 90337 - protein, 171 aa, Unknown
  Bacterial polypetide isolated from the Sargasso Sea
MRSSAVDIYAAGDCTNQPQFVYVAAAAGTRAAINMTGGEATLNLDAMPAVVFTDPQVATVGYSEAEAQRAGLETDSRTLSLDNVPRALANFDTRGFIKLVAEAGSGRLLGVQAVAPEAGELIQTAVLAIRNRMTVQELADQLFPYLTMVEGLKLAAQTFTKDVKQLSCCAG

SEQ ID NO: 90338 - protein, 208 aa, Unknown
  Bacterial polypetide isolated from the Sargasso Sea
ADQLLVATGRAPNTRSLALEAAGVAANAQGAIVIDKGMRTSTPHIYAAGDCTDQPQFVYVAAAAGTRAAINMTGGDAALDLTAMPAVVFTDPQVATVGYSEAEAHHDGIETDSRTLTLDNVPRALANFDTRGFIKLVIEEGNGRLIGVQAVAPEAGELIQTAVLAIRNRMTVQELADQLFPYLTMVEGLKLAAQTFSKDVKQLSCCAG

SEQ ID NO: 90339 - protein, 294 aa, Unknown
  Bacterial polypetide isolated from the Sargasso Sea
MYLNITGMTCDSCATHVKDALEKVPGVLSALVSYPKGSAQLATDPGTSPEALTAAVAGLGYKATPADAPSTSARGRLLGKALGWLGGGDKAGGDGDGLHVAVIGSGGAAMAAALKAVEQGANVTLIERGTIGGTCVNVGCVPSKIMIRAAHIAHLRRESPFDSGIAATVPAIDRSKLLAQQQARVDELRHAKYEGILDSNPAITVLHGEARFKDDQSLAVRLNDGGERVVAFDRCLVATGASPAVPPIPGLKESPYWTSTEALVSDTIPERLAVIGSSVVALELAQAFARLGSK

SEQ ID NO: 90340 - protein, 546 aa, Unknown
  Bacterial polypetide isolated from the Sargasso Sea
MIKLSIQGMTCPSCAPKVHNKIIKLEGVLDVSVSYEESLVSITPSEDFNVQSAIDALESEGYQSHAQEDSCCASDQFVSNKKHLHVAIIGSGSGAFACATKAAEGGAKVTIIEGADVIGGCCVNVGCVPSKILIRAAQLAEQQRNNPFAGLENHQPQLNRALLSQQQSARVEELRHAKYQNILDTNPSLNLIKGYARFKNANTLIIDKPDGDQQEISADKILIATGSTPTIPAINGLSGTPYWTSTEALFATDLPEHLVVIGSSVVALEIAQAYRRLGSEVTVLARHTLLYREDPLLGEELEKCFKKEGINVLTYTSAKNIAHDGKQFIIDSNNGQITSDRLLVSTGRHANTEKLNLKAVGVQVTERGEVMVDEKMQTNVEGIYAAGDCSNMPQFVYVAAAAGSRAGTNMTGGDVNLDLTTMPAVIFTDPQVATVGLTETQANQQGISTISRVLPMENVPRALANFETDGFIKLVAEESTGKLIGAQILAHEGGELVQSVAIAIINNMTVEELAGQLFPYLTMVEGLKLCAQTFNKDVSELSCCAA

SEQ ID NO: 90341 - protein, 558 aa, Unknown
  Bacterial polypetide isolated from the Sargasso Sea
MTLKIDGMTCASCAEHVRQALEKVPGVRSAAVSYSKALADLTVDEGVSHDTLTAAVTTAGYHARVADVPPHSAGLPGKTPGSAETGGKRSGGDSALRVAVIGSGGAAMAAALKAAENGAQVTLIERGTIGGTCVNVGCVPSKIMIRAAHIAYLRQTSPFDAGITATAPAIDRPRMLAQQQARVDELRHAKYENILDTSPNINVLHGEARFTGSHSLTITLTAGGERTVSFDRCLIATGATAAVPPIPGLKDTPYWTSTEALVNDAIPERLAVIGSSVVALELAQAFARLGSHVTVLARHTLLYQEDPAIGEAVTAAFRAEGIEVLEQTQATHVSHADGKFVVTTNHGELRADQLLVATGRAPNTGSLNVAGAGVQLDERGAIVIDGGMRTSAPDIYAAGDCTNQPQFVYVAAAAGTRAAINMTGGDVRLNLDTMPTVVFTEPQVATVGYSEAQAHRAGIETDNRTLTLDNVPRALVNFDTHGFIKLVAEAGTGRLIGVQAVAPEAGELIQTAAIAIRARMTVQDLADQLFPYLTMVEGLKLAAQTFSKDVKQLSCCAG

SEQ ID NO: 90342 - protein, 561 aa, Unknown
  Bacterial polypetide isolated from the Sargasso Sea
MTHLKITGMTCDSCAAHVKEALEKVPGVQSALVSYPKGTAQLAIVPGTSPDALTAAVAGLGYKATLADAPLADNRVGLLDKVRGWMAAAEKHSGNEPPVQVAVIGSGGAAMAAALKAVEQGAQVTLIERGTIGGTCVNVGCVPSKIMIRAAHIAHLRRESPFDGGIAATVPTIDRSKLLAQQQARVDELRHAKYEGILGGNPAITVVHGEARFKDDQSLTVRLNEGGERVVMFDRCLVAAGASPAVPPIPGLKESPYWTSTEALASDTIPERLAVIGSSVVALELAQAFARLGSKVTVLARNTLFFREDPAIGEAVTAAFRAEGIEVLEHTQASQVAHMDGEFVLTTTHGELRADKLLVATGRTPNTRSLALDAAGVTVNAQGAIVIDQGMRTSNPNIYAAGDCTDQPQFVYVAAAAGTRAAINMTGGDAALDLTAMPAVVFTDPQVATVGYSEAEAHHDGIETDSRTLTLDNVPRALANFDTRGFIKLVIEEGSHRLIGVQAVAPEAGELIQTAALAIRNRMTVQELADQLFPYLTMVEGLKLAAQTFNKDVKQLSCCAG

SEQ ID NO: 90343 - protein, 561 aa, Unknown
  Bacterial polypetide isolated from the Sargasso Sea
MTELRIDGMTCASCADHIRDALKQVPGVVSVSLSWPLGTATLKTESGTSVEALTSAVARLGYRAALADAPSPPKPAAPFDQTLGRPGGSAKADSGAGRLRIAVIGSGGAAMAAALKAADSGAQVTLIERGTLGGTCVNIGCVPSKIMIRAAHIAHLRQTSPFDEGISAVVPGIDRPRLLARQQARVDELRHAKYEDILALNPNINVLHGEARFADGRTLTVTLTAGGERTVAFDRCLIATGASAAVPPVPGLQDTPYWTSTEALVCAAIPPRLAVIGSSVVAVELAQAFARLGSRVTILARHALLSGEEPAIGEAVTAAFRAEGIEVVEQTQASQVSHVTDEFVLTTNHGELRADRLLVATGRSLNTGRLNLASVGVQLDERGAIVIDGGMRTSAPDIYAAGDCTSQPQFVYVAAAAGTRAAINMMGGDAQLDLGTMPAVTFTDPQVATVGYSEAQARHAGIETDTRTLTLDNVPRALVNFDTRGFIKLVAESGSGRLIGVQAVTPEAGEIIQTAALAIRAGMTVQDLADQLFPYLTMVEGLKLAAQTFSKDVTQLSCCAG

SEQ ID NO: 90344 - protein, 555 aa, Unknown
  Bacterial polypetide isolated from the Sargasso Sea
MILLSIEGMTCPSCVAHVKEALDAIEGVNKVEISYENASATITTNGGVSVTDLIGAIEALGYTAKENPLAENTAPNAYCDNENTSNTESNRTQHVAIIGTGSGAFACAIKAAEGGAKVTLIEGADVIGGCCVNVGCVPSKILIRAAQLAQQQRNNPFAGLENHAPQLSRALLAQQQTARVEELRAAKYQNILETNPALSLLKGWAQFKNANTLIVRKNDGTEQEIFADKILIATGSTPTIPPIEGLAETPYWTSTEALFAEELPQHLVVIGSSVVALEIAQAYRRLGSEVTVLARHSLLYSEDPIIGEKLAGCFEKEGIRVLNNTQATQVTHDGNQFTLNTNAGELSCDRLLVSTGRHANTSQLNLDAVGVTTNKKGEIVVNERMETNVAGIYAAGDCSNMPQFVYVAAAAGSRAGINMTGGDAKLDLSTMPAVIFTDPQVATVGLTEEQARAQDIETDSRVLGMENVPRALANFETDGFIKLVTEKETGLLLGAQILAHEGGELIQSAALAIRNRMTVTELADQLFPYLTMVEGLKLCAQTFNKDVKELSCCAG

SEQ ID NO: 90345 - protein, 551 aa, Unknown
  Bacterial polypetide isolated from the Sargasso Sea
MITLSISGMTCASCTHHVQEALLAVAGVSSAMVSYDEANAVIETDTDIHEKTLLDAVATLGYKAKVVALGNNSRLTKDEDTEELHVAIIGSGSAAFACAIKAAEGGAKVTLIEGADVIGGCCVNVGCVPSKILIRVAQLAEQQRHNPFAGLENHSPQLSRSLLLAQQTARVEELRAAKYQNILDANPALSLIKGWARFKDANTLIVSQNDGTQQQVHADKVLIATGSTPTIPPIEGLSGTPYWTSNEALFAEEMPQHLVVIGSSVVALEIAQAYRRLGSEVTVLARHTLLYREEPLLGEQLSGCFEKEGIRVLNHTQASSVSYDGQQFTLEILSSEAGAGTLHCDKLLISTGRHANTGKLNLDAVGVKTEQNGVIIVNERMETSVPGVYAAGDCANMPQFVYVAAAAGSRAAINMTGGETKLDLSAMPAVIFTDPQVATVGLTEDQAKAQYIETDSRVLSMENVPRALANFDTDGFIKLVVEKVSGRLIGAQILAHEGGELIQSAALAIRNRMTVTELSEQLFPYLTMVEGLKLCAQTFNKDVKELSCCAG

SEQ ID NO: 90346 - protein, 146 aa, Unknown
  Bacterial polypetide isolated from the Sargasso Sea
SGRPRAAINMTGGDAALDLTAMPAVVFTDPQVATVGYSEAEAHHDGIETDSRTLTLDNVPRALANFDTRGFIKLVIEEGSGRLIGVQAVAPEAGELIQTAVLAIRNRMTVQELADQLFPYLTMVEGLKLAAQTFSKDVKQLSCCAG

SEQ ID NO: 90347 - protein, 274 aa, Unknown
  Bacterial polypetide isolated from the Sargasso Sea
SLYIWEQVRQNYHAFETDFKGGSSDVYLHQMPGGQFTNLKEQARSLGITTDKWGMVANKYAEVNQLFGDIVKVTPSSKIVGDMALYMIANDLSKEDVLDPKKEISFPASVIEFFKGEIGIPHGGFPKELQKKVLGDLQPLTKRPGEVLESVDLDKEIKKLEDDIGTKVNQKHLASYLMYPKVFKDYVEHFKEFSDTSILSTELFFYGPQQDKEYIIEIDKGKSLILRYLAKSEINSTGQCSVFFEINGQPRTIDIENKEFSKNIVQRAKADDNN

SEQ ID NO: 90348 - protein, 308 aa, Unknown
  Bacterial polypetide isolated from the Sargasso Sea
LAAIEEKVDIVDLQFDSMSGLTSQPALGSIVSIMKQNHKDPKLDEEAIRTLSLYWEQVRQNYHAFETDFKGGSSDVYLHQMPGGQFTNLKEQARSLGITTDKWGMVANKYAEVNQLFGDIVKVTPSSKIVGDMALYMIANDLSKEDVLDPKKEISFPASVIEFFKGEIGIPQGGFPKELQKKVLGDTKPLTKRPGEILESIDLDKEAKNLGDEIGMKINQTHLASYLMYPKVFKDYVDHFKEFSDTSILSTELFFYGPQQDKEYTIEIDKGKNLILRYLAKSEVNSNGKCSVFFEINGQPRTIDIENK

SEQ ID NO: 90349 - protein, 281 aa, Unknown
  Bacterial polypetide isolated from the Sargasso Sea
GANIIAIKDMAGLAKPNAIKKLVKEIKQTTDLPIHFHTHDTSGTSSASVLAAIEEKVDIVDLAIDSMSGLTSQPALGSIVSIMKQNHQDPQLDEDVIRTLSLYWEQVRQNYHAFETDFKGGSSDVYLHQMPGGQFTNLKEQARSLGITTDKWGLVANKYAEVNQLFGDIVKVTPSSKIVGDMALYMIANDLSKEDVLDPKKEISFPASVIEFFRGEIGIPHGGFPKELQKKVLGDKKPLIKRPGEVLESIDLDKEAKNLEDEIGMKVNQTHLASYLMYPKV

SEQ ID NO: 90350 - protein, 178 aa, Unknown
  Bacterial polypetide isolated from the Sargasso Sea
MLSATMIEKLNEQINMEFFSSNLYLQMSAWCEDQGFEGAAKFMREHADEEMGHMRRLFTYVSETGGLPLLGAIAAPQSQFDSLLALFELTYEHEQLITRQINALAHTAFSNQDYSTFNFLQWYVAEQHEEEKLFKSIVDKIRLVGEDGKALFFIDKDLAKLASKGGESIMNAQSQPQA

SEQ ID NO: 90351 - protein, 178 aa, Unknown
  Bacterial polypetide isolated from the Sargasso Sea
MLSATMIEKLNEQINMEFFSSNLYLQMSAWCEDQGFEGAAKFMREHADEEMGHMRRLFTYVSETGGLPLLGAIEAPQSQFDSLLALFELTYEHEQLITSKINALAHAAFSNQDYSTFNFLQWYVAEQHEEEKLFKSIVDKIRLVGEDGKALFFIDKDLAKLASKGGESIMNPQSQPQA

SEQ ID NO: 90352 - protein, 664 aa, Unknown
  Bacterial polypetide isolated from the Sargasso Sea
MIYSGRVSNNSTVEVQIPISNTKSEKNNYVKDLQTLGPEKFAKKIKETPYTLITDTTMRDAHQSLLATRMRTDDLVNIAEYYSENLSTLFSLECWGGATFDTSMRFLKEDPWDRLARLNKRAPNLLKQMLFRGSNAVGYKNYPDNVVKHFIQQSAQAGIDVFRVFDSLNLIDNMRVAIDEVRNQNKICEGTICYTNDVTDPNEKKYTLKYYIDLVKDLEKAGAHIIAIKDMAGLAKPNAIKKLVNEIKQTTDLPIHFHTHDTSGTSSASVLAAIEEKVDIVDLAIDSMSGLTSQPALGSIVSIMKQNHQDPKLDEEAIRTLSLYWEQVRQNYHAFETDFKGGSSDVYLHQMPGGQFTNLKEQARSLGITTDKWGMVANKYSEVNRLFGDIVKVTPSSKIVGDMALYMIANDLSKEDVLNPKKEISFPASVIEFFKGEIGIPQGGFPKELQKKVLGDTKPLTKRPGEILESVDLDKEAKNLEDEIGMKINQTHLASYLMYPKVFKDYVDHFKEFSDTSILSTELFFYGPQQDKEYTIEIDKGKNLILRYLAKSEVNSNGKCSVFFEINGQPRTIDIENKEFSKNITQRAKADDNNLDHVGSPLPGQVAKIFVQSGSKVIKGDKLLVIEAMKMETTINADKSGTIKSINVASGDNVETKDLLVEIS

SEQ ID NO: 90353 - protein, 359 aa, Unknown
  Bacterial polypetide isolated from the Sargasso Sea
MRDAHQSLLATRMRTDDLINIAEYYSENLSNLFSLECWGGATFDTSMRFLKEDPWDRLARLNKKAPNLLKQMLFRGSNAVGYKNYADNVVKHFIQQSAEAGIDVFRVFDSLNLIDNMRVAIEEVRNQNKICEGTICYTNDVTDPNEKKYTLKYYIDLIKDLEKAGAHIIAIKDMAGLAKPNAIKKLVNEIKQTTDLPIHFHTHDTSGTSSASVLAAIEEKVDIVDLAIDSMSGLTSQPALGSIVSIMKQNHQDPKLDEEAIRTLSLYWEQVRQNYHAFETDFKGGSSDVYLHQMPGGQFTNLKEQARSLGITTDKWGMVANKYAEVNQLFGDIVKVTPSSKIVGDMALYMIANDLSKED

SEQ ID NO: 90354 - protein, 761 aa, Unknown
  Bacterial polypetide isolated from the Sargasso Sea
EDPLNNFMPDYGKIMTYRSAAGFGVRLDAANASSGSIITPYYDSLLVKVTTWAKHQDDCIKRMDRALREFRIRGVKTNLVFLESLINNNDFLKGNYNTNFVDTKKELYTYKPQKDRASKIVSYLGNIIVNGHSDISGRPNNSSTVEVQIPISNNKNGKNNFVEDLKKLGSEKFAKKIKEIPYTLITDTTMRDAHQSLLATRMRTDDIVNIAEYYSKSLSNLFSLECWGGATFDTSMRFLKEDPWDRLERLNNRAPNLLKQMLFRGSNAVGYKNYPDNVVKHFIQQSAEAGIDVFRVFDSLNLIDNMRVAIDEVRNQNKICEGTICYTNDVTDPNEKKYTLKYYIDLVKDLEKAGANIIAIKDMAGLAKPNAIKKLVNEIKQITDLPIHFHTHDTSGTSSASVLAAIEEKVDIVDLAIDSMSGLTSQPAFGSIVSIMKQNHQDPKLDEEAIRTLSLYWEQVRQNYHAFETDFKGGSSDVYLHQMPGGQFTNLKEQARSLGITTDKWGMVANKYAEVNQLFGDIVKVTPSSKIVGDMALYMIANDLSKEDILDPKKEISFPSSVIEFFKGEIGIPHGGFPKELQKKVLGDVKPLTKRPGEVLESVDLDKEVKNLENEIGMKVDQMHLASYLMYPKVFKDYVDHFKEFSDTSILSTELFFYGPQQDKEYTIEIDKGKNLILRYLAKSEVNNNGKCSVFFEINGQPRTIDIENREFSKNIIQRAKADDSNNNHVGSPLPGQVAKIFVKPGNKVIKGDKLLVIEAM

SEQ ID NO: 90355 - protein, 174 aa, Unknown
  Bacterial polypetide isolated from the Sargasso Sea
MLAKAMIEKLNEQINLEFYSSNLYLQMSAWCEDKGFEGAANFLRQHAVEERQHMERLFTYVSETGAMPLLGAIDAPPHEFKSLGDIFRTTLEHEYHITKCINGLAHVAFTTQDYSTFNFLQWYVAEQHEEEKLFKSIVDRLSLVGEDGKGLYFIDKELAELAKGAPASIMDGNA

SEQ ID NO: 90356 - protein, 663 aa, Unknown
  Bacterial polypetide isolated from the Sargasso Sea
DISGRVSNNSTVEVQVPISNIKSEKNNYVKDLQTLGPEKFAKKIKETPHTLITDTTMRDAHQSLLATRMRTDDLVNIAEYYSENLSTLFSLECWGGATFDTSMRFLKEDPWDRLARLNKRAPNLLKQMLFRGSNAVGYKNYPDNVVKHFIQQSAQAGIDVFRVFDSLNLIDNMRVAINEVRNQNKICEGTICYTNDVTDPNEKKYTLKYYIDLVKDLEKAGAHIITIKDMAGLAKPNAIKKLVNEIKQTTDLPIHFHTHDTSGTSSASVLAAIEEKVDIVDLAIDSMSGLTSQPALGSIVSIMKQNHQDPKLDEEAIRTLSLYWEQVRQNYHAFETDFKGGSSDVYLHQMPGGQFTNLKEQARSLGITTDKWGMVANKYAEVNQLFGDIVKVTPSSKIVGDMALYMIANDLSKENVLDPKKEISFPASVIEFFKGEIGIPQGGFPKELQKKVLGDTKPLTKRPGEILEPIDLDKAAKNLEDEIGMKINQTHLASYLMYPKVFKDYVDHFKEFSDTSILSTELFFYGPQQDKEYTIEIDKGKNLILRYLAKSEVNSNGKCSVFFEINGQPRTIDIENKEFSKNITQRAKADDNNLDHVGSPLPGQVAKIFIQSGSKVIKGDKLLVIEAMKMETTINADKSGTIKSINVASGDNVETKDLLVEIS

SEQ ID NO: 90357 - protein, 508 aa, Unknown
  Bacterial polypetide isolated from the Sargasso Sea
SAQAGIDVFRVFDSLNLIDNMRVAIDEVCNQNKICEGTICYTNDVTDPNEKKYTLKYYIDLVKDLEKAGAHIIAIKDMAGLAKPNAIKKLVNEIKQTTDLPIHFHTHDTSGTSSASVLAAIEEKVDIVDLAIDSMSGLTSQPALGSIVTIMKQNHQDPKLDEESIRTLSLYWEQVRQNYHAFETDFKGGSSDVYLHQMPGGQFTNLKEQARSLGITTDKWGMVANKYAEVNQLFGDIVKVTPSSKIVGDMALYMIANDLSKEDVLDPKKEISFPASVIEFFKGDIGIPHGGFPKELQKKVLGDTKPLTKRPGEVLESVDLDKEVKILEDEIGMKVNQTHLASYLMYPKVFKDYVDHFKEFSDTSILSTELFFYGPQQDKEYTIEIDKGKNLILRYLAKSEVNSNGKCSVFFEINGQPRTIDIENKEFSKNITQRAKADDNNVDHVGSPLPGQVAKIFVQSGSKVIKGDKLLVIEAMKMETTINADKSGTIKSINVASGDNVETKRLAC

SEQ ID NO: 90358 - protein, 178 aa, Unknown
  Bacterial polypetide isolated from the Sargasso Sea
DFSFARSGFSNECERALNAQINVEYNVSYIYHSMWAYFSRDNVALKGFADHFKNESLEERAHAEQLMEYMNLRGGRVELQQLLPPQTEYEHSDKGCALYALELSLSLEKLNNDKLCELHGVADAAGDAHMCDFIEGQMLEPQVRSVREASEMVATLLRMGPPGDGMAAWHFDQTLQQP

SEQ ID NO: 90359 - protein, 64 aa, Unknown
  Bacterial polypetide isolated from the Sargasso Sea
MKKELKIFLASPRGFCAGVDRAIEIVKKALNKYGSPVYVRHEIVHNKNVVESLKELGAIFVEEI

SEQ ID NO: 90360 - protein, 214 aa, Unknown
  Bacterial polypetide isolated from the Sargasso Sea
TCPLVSKVHREAENLDKKDIQVLLIGHKNHPEVIGTMGQVPDGKIDLIETIDDAKNYERGENKKLAYITQTTLSIDDTKDIINVLKERFPDINEPKKDDICFATTNRQAAIKKIAKECDNLFVIGSRNSSNSVRLVEVAKNNGCEHAELIHSESTFPLEKISKCKTIGISSGASAPEVLVNEFIENIKKNFTIDIEEVEIVKENVTFKIPGKLN

SEQ ID NO: 90361 - protein, 147 aa, Unknown
  Bacterial polypetide isolated from the Sargasso Sea
MKIILAKDAGYCFGVRDAVNSAYEMSKKYGEVYMLGDIVHNESVVSDLEKEGVKVVEKLDQIPKDKPVLFRAHGTAKEVWKKAEDKKMNIIDATCPLVHEIHHEVKALHKEGRKIIIIGDHGHDEVIGIASQIPDPVIVASVEKLNT

SEQ ID NO: 90362 - protein, 118 aa, Unknown
  Bacterial polypetide isolated from the Sargasso Sea
MDTQAFRRSLHHSDRYNRRGFDSPTKRAQALEEAYQSDLISSIRDNGFTYTQGRLNIKLAQAFGFCWGVERAVAMAYETRRHYPNENIWITNEIIHNPSVNDHLRKMNVKFISAKNGI

SEQ ID NO: 90363 - protein, 170 aa, Unknown
  Bacterial polypetide isolated from the Sargasso Sea
MKILVAKDAGYCFGVRDAVNLAKKSGTDFDEVYMLGDIVHNEKVVADLNKKGSKVVNRLEDIPKDKPVLFRAHGTDPETWKAAQKKKLNIIDATCPLVTEIHEEIKILESENRRTIIIGDHNHDEVAGIASQVKRPIIISNVEEAKSLGKMKRAGVVSQSTQMIENVQEI

SEQ ID NO: 90364 - protein, 118 aa, Unknown
  Bacterial polypetide isolated from the Sargasso Sea
MDTQAFRRSLHHSDRYNRRGFDSPTKRAQALEEAYQSDLISSIRDNNFTYTKGRLNIKLAQAFGFCWGVERAVAMAYETRRHYPNENIWITNEIIHNPSVNNHLRKMNVRFISAKNES

SEQ ID NO: 90365 - protein, 131 aa, Unknown
  Bacterial polypetide isolated from the Sargasso Sea
TDFEEVYMLGDIVHNEKVVEDLNKKGSKVVRNLEDIPKDKPVLFRAHGTDPETWKAAQKKKLNIIDATCPLVTEIHEEIKILESENRRTIIIGDHNHDEVVGIAAQVKRPIIISNVEEAKSLGKMKRAGVV

SEQ ID NO: 90366 - protein, 305 aa, Unknown
  Bacterial polypetide isolated from the Sargasso Sea
DDYVVGIMPGSDTGALEASLWSLLGKRGVDILAWENFGKDWIQDVVKQLQISNLTVHDVDYGQFPDVTKVNFENDVVFTWNGTTSGVRVPNADWIPDNREGLTICDATSAIFAMPIDYKKCDVLTWSWQKVLGGEAAHGMIAMSPRALNRLENFKPSWPIPKVFRIANNNKIIKGIFEGSTINTPSMICVEDALDGLNWAEKNGGLNFLLDTSMHSFNLIYNWVQKNDWVTFLSENKSKEYLSNTGITFKICEEWYLSKNEDEQRSIVKQICKILSEEDVAHDINGYAKAPPSFRVWAGGTVESL

SEQ ID NO: 90367 - protein, 83 aa, Unknown
  Bacterial polypetide isolated from the Sargasso Sea
MKQKIKIFLAAPRGFCAGVDRAIEIVKKTLNKYGSPVYVRHEIVHNKNVVENLKNLGAIFVEEISEIKDKSRPVIFQRMVSLN

SEQ ID NO: 90368 - protein, 48 aa, Unknown
  Bacterial polypetide isolated from the Sargasso Sea
MKTQKISIHIAGPRGFCAGVDRAISMVEEAIKKYGGPIYVRHEIVHNK

SEQ ID NO: 90369 - protein, 123 aa, Unknown
  Bacterial polypetide isolated from the Sargasso Sea
MKIILAKDAGYCFGVRDAVNSAYEMSKKYGEVYMLGDIVHNESVVSDLEKEGVKVVEKLDQIPKDKPVLFRAHGTAKEVWKKAEDKKMNIIDATCPLVHEIHHEVKALHKEGRKIIIIGDPWS

SEQ ID NO: 90370 - protein, 130 aa, Unknown
  Bacterial polypetide isolated from the Sargasso Sea
LKKKFPEIKEPKKEDICYATTNRQAAVKKIAEKCDMFFVIGSRNSSNSLRLVEVAKNSGCANSRLIHSESAVPLDEIENYKTIGISSGASAPEILVDNFINNLKKQFTVSIEEIEIVKENITFKIPGKLN

SEQ ID NO: 90371 - protein, 120 aa, Unknown
  Bacterial polypetide isolated from the Sargasso Sea
CYATQSRQDAVKQLALECDLVLVVGSTTSSNSNRLREIAERSGVESYLIDGSKDIKLEWFEGKHSIGLTSGASAPEHLVQEVMSFIGSHFDLEKDVDSEREDEGVYFNLPKKIKAFGTSQ

SEQ ID NO: 90372 - protein, 233 aa, Unknown
  Bacterial polypetide isolated from the Sargasso Sea
MKILVAKDAGYCFGVRDAVNLAKKTGTDFEEVYMLGDIVHNERVVADLNKKGSKVVNRLEDIPKDKPVLFRAHGTDPETWKAAQKKKLNIIDATCPLVTEIHEEIKILESENRRTIIIGDHNHDEVVGIAAQVKRPIVISNVEEAKSLGKMKRAGVVSQSTQMIENVQEILNVLSEKVYDLRFINTICFPTRRNHEQIKELAGICDLMIVIGSFTSANSKRLTQLSFDRNKNS

SEQ ID NO: 90373 - protein, 91 aa, Unknown
  Bacterial polypetide isolated from the Sargasso Sea
VIGSKNSSNSNRLKELAEKCGATSILIDGANEIDFEKLSQFKSIGITAGASAPESIVQKVVKVVSNKFNVIPEELGENKENIYFRLPPELR

SEQ ID NO: 90374 - protein, 72 aa, Unknown
  Bacterial polypetide isolated from the Sargasso Sea
MDTHAFKRSLHHSERYNRRGFGRAEEVAESLEQAYQSGLIGTIRDNGYKLIHGRLNVRLAEAFGFCWGVERA

SEQ ID NO: 90375 - protein, 70 aa, Unknown
  Bacterial polypetide isolated from the Sargasso Sea
MKNDLKIFLAAPRGFCAGVDRAIEIVKKTLKKYGSPVYVRHEIVHNKNVVGSLKKLGAIFVEEISEISDP

SEQ ID NO: 90376 - protein, 108 aa, Unknown
  Bacterial polypetide isolated from the Sargasso Sea
RQDAVRAIAGRCDVVFVVGSVTSSNSNRLRELAEQTGARAYLIDGAEDIDQKVLEGVNHVGVTAGASAPEILVDAVVKKLKALGGSPKGAPSPLDEGVSFSLPSELRD

SEQ ID NO: 90377 - protein, 142 aa, Unknown
  Bacterial polypetide isolated from the Sargasso Sea
LSVDDTKEIIDALKLKFPDIKGPIKEDICYATTNRQAAVKKIAANCEMFFVIGSKNSSNSARLVEVAKKSGCKDSELIFYNKKVPIEKIKNCKTIGLSSGASAPEELVQNFISEIKKNMQVSIEEVITANEKVAFRLPKELN

SEQ ID NO: 90378 - protein, 178 aa, Unknown
  Bacterial polypetide isolated from the Sargasso Sea
MKILVAKDAGYCFGVRDAVNLAKKSGGEYDSVYMLGDIVHNERVVSDLEKSGSVVVNNLDEIPEDKPVLFRAHGTDPKVWKQAQKKKLNIIDATCPLVTDIHEEIKILESENRKTIIIGDHGHDEVMGIAAQVKNPIIISNVEEAQLLRKMKRAGVVSQSTQMIENVQDIINVLMGKV

SEQ ID NO: 90379 - protein, 178 aa, Unknown
  Bacterial polypetide isolated from the Sargasso Sea
MKIILAKDAGYCFGVRDAVNSAYEMSKKYGEVYMLGDIVHNESVVSDLEKEGVKVVEKLDQIPKDKPVLFRAHGTAKEVWKKAEDKKMNIIDATCPLVHEIHHEVKALHEEGRKIIIIGDHGHDEVIGIASQIPDPVIVASVEEAEALRKTKKAGVVTQSTQTIENVQDIINILMTKS

SEQ ID NO: 90380 - protein, 90 aa, Unknown
  Bacterial polypetide isolated from the Sargasso Sea
HRETKQLFKRGFDIVLIGHKNHPEVIGTMGQLPEGSIKLIETVQDVKNLSFSKPVAYVTQTTLSVDDTKKIIEVLKKKYPDIKGPIKEDI

SEQ ID NO: 90381 - protein, 279 aa, Unknown
  Bacterial polypetide isolated from the Sargasso Sea
SHRSTEGKEKLKYVIDKSKELLGLPDDYILGILPGSDTGALECALWSLLGNNGVDILAWENFGKDWVKDVLDELKIKDLNIYETDYGDIPDLSKVNFDRDVIFTWNGTTSGVKVPDGSWIKKDRAGLTICDATSAIFAMPIDYKKCDVITWSWQKVLGGEAAHGMLALSPKAIKRLENYKPNWPIPKIFRLTNNNKIISGIFEGSTINTPSMICVEDAIDALNWVDKNGGLNNLLDISNKSFEIISKWIEKNHCFEFLANSLDKKFISNTSITFKIAEK

SEQ ID NO: 90382 - protein, 310 aa, Unknown
  Bacterial polypetide isolated from the Sargasso Sea
SRAICFAKRTLEIWDRLGVGQRMVDKGVSWNLGKVFLKDEQLYEFNLLPEEGHERPAFINLQQYYAEAYLVERALQLPGIDIRWHNKVTAVQSRSDGALLSIDTPEGAYQIDAQWLVACDGARSPTRQMLGLESKGRIFQDRFLIADVKLADEANFPTERWFWFDPPFHPNQSVLLHRQPDNVWRIDFQLGWDADPEEEKKPENIIPRVQALLGTEAQFELDWASVYTFACLRMDQFVHGRVVFAGDSAHGVSPFGARGANSGVQDAENLAWKLDWVLQGRASPALVSTYGPEREYAADENLCNSTRATD

SEQ ID NO: 90383 - protein, 49 aa, Unknown
  Bacterial polypetide isolated from the Sargasso Sea
MKKELKIYLASPRGFCAGVKRAIEIVEKSINRFGAPVYVRHEIVHNKQV

SEQ ID NO: 90384 - protein, 112 aa, Unknown
  Bacterial polypetide isolated from the Sargasso Sea
ATTNRQSAVKEIASKCDIFFVVGSRNSSNSVRLVEVAKKAGCNNSHLMHSEKEIPYNEIENSETIGISSGASAPEKLVQNLLDNIRKDRKVSIEEVIVAEEKVIFKLPKELN

SEQ ID NO: 90385 - protein, 117 aa, Unknown
  Bacterial polypetide isolated from the Sargasso Sea
MKILVAKDAGYCFGVRDAVNLATKTGAEYDSVYMLGDIVHNERVVSDLEKSGSRVVNDLSDIPEDKPVLFRAHGTDPKVWKDAQKKKLNIIDATCPLVNEIHDEIKLLESENRKNIS

SEQ ID NO: 90386 - protein, 66 aa, Unknown
  Bacterial polypetide isolated from the Sargasso Sea
MTKEIKLANPRGFCAGVDRAIDIVNKALDIYGAPVYVKHEVVHNKVVVDDLRNRGAVFVEEIDEIP

SEQ ID NO: 90387 - protein, 245 aa, Unknown
  Bacterial polypetide isolated from the Sargasso Sea
GTTSGVKVPNADWIPDTREGLTICDATSAIFAMPIDYKKCDVLTWSWQKVLGGEAAHGMIAMSPRALNRLENFKPLWPIPKVFRIANNNKIIKGIFEGSTINTPSMICVEDALDGLNWAEKNGGLNFLFDTSMNSFDLIHEWIQNNDWVTFLSENKNTEYLSNTGITFKICENWYLAKSADDQRLIVKEICKLLSDENVAFDINGYAKAPPSFRVWAGGTVETNNIKLLLPWLEWAYFVVKESHA

SEQ ID NO: 90388 - protein, 77 aa, Unknown
  Bacterial polypetide isolated from the Sargasso Sea
MRKELKIYLASPRGFCAGVKRAIEIVEKSISKFGAPVYVRHEIVHNKQVVEELKEKGAIFVDELSDIGDASRPVIFS

SEQ ID NO: 90389 - protein, 131 aa, Unknown
  Bacterial polypetide isolated from the Sargasso Sea
SFKEKFPEIKEPKKEDICYATTNRQAAVKKIAKECDMFFVIGSRNSSNSLRLVEVAKNSGCTNSRLIHSESTVPLDEIEKHQTIGISSGASAPEILVDNFINNLKKQFTVAIEEIEIVKENITFKIPGKLN

SEQ ID NO: 90390 - protein, 61 aa, Unknown
  Bacterial polypetide isolated from the Sargasso Sea
MKKIINIYLASPRGFCAGVKRAIEIVELALQKYGPPIYVRHEIVHNKRVVQELSKKGAVFV

SEQ ID NO: 90391 - protein, 566 aa, Unknown
  Bacterial polypetide isolated from the Sargasso Sea
MSINYQTLSFEYRPCREQSGAEQARYPVIVVGAGPVGLATAIDIAQQGVPVVLVDDDCSLSTGSRAICFSKRSLDIFDRLGCGQRMVDKGISWNVGKVFLKDELVYTFNLQPEAGHHRPAFINLQQYYVEGFLLERAQEMPNLEIRWKSKVVGVQQSGTPGTQDASVTLTIDTPDGQYPLCGRYVVAADGSRSPMRNLMGLDSKGVTFKDRFLIADVKMEAEFPTERWFWFDPPFHPNQSVLLHRQPDNVWRIDFQLGWDADPVLEKTPERVIPRVRALLGPDAKFELEWVSVYTFSCLRMDRFRHGNVLFAGDSAHGVSPFGARGANSGVQDAENLAWKLAMVLDGKASDTLLDTYASEREFAADENIRNSTRSTDFITPKSPVSRVFRDAVLKLARHHPFARQLTNSGRLSVPAVLRDSPLNTPDSESFEGAMVPGASCVDAPVHADGQPVWLLQQLGQQFTGVLFCGPQGMDQSTQAALDALRSGPVPLKLVVVTSGDAQVALASDVKVVHDVDGLVAARYDGQPGTFYLIRPDQHVCARCRQLDVSFVHGALKRALCVEGTA

SEQ ID NO: 90392 - protein, 550 aa, Unknown
  Bacterial polypetide isolated from the Sargasso Sea
MSIDYQTLKFEYHPRAQDTTVHPVIVVGAGPVGLAAAIDLAQQGVSVVLLDDDDTLSTGSRAICFAKRTLEIFDRLGCGERFVDKGVSWHVGKVFLQDEQLYAFDLLPEEGHARPAFINLQQYYVEGYLADRAFELPNIDIRWKHKVTGIDQSAEHAVLTIETPDGVATLRAQYVIAADGSRSPMRTMMGLESHGRTFKDRFLIADVKMKAEFPTERWFWFDPPFHPNQSVLLHRQPDNVWRIDFQLGWDADPVAEKQPERVIPRVRALLGPDVEFELEWVSVYTFRCQRMESFRHGRVLFAGDSAHGVSPFGARGANSGVQDADNLAWKLKLVLDGRSADSLLDTYASEREFAADENIRNSTRSTDFITPKSPVSRVFRDATLKLARDCEFARKLVNSGRLSVPAVLADSPLNTPDRNGDAFAGAMPPGAAAADAPVRTQGASGWLLQHLGSGFTGVLFGLPGDAAALAQALDGLALPVRPVLVVPAGHAQPVAGVDVVEDVDGLAARRYDGKPGTFYLLRPDQHVCARMRTLERQALADALARATCAC

SEQ ID NO: 90393 - protein, 136 aa, Unknown
  Bacterial polypetide isolated from the Sargasso Sea
MDTQAFRRSLHHSDRYNRRGFDSPTKRAQALEEAYQSDLISSIRDNGFTYTKGRLNIKLAQAFGFCWGVERAVAMAYETRRHYPNENIWITNEIIHNPSVNDHLRKMNVKFISAKNGIKDFSLVSNGDVVILPAFG

SEQ ID NO: 90394 - protein, 88 aa, Unknown
  Bacterial polypetide isolated from the Sargasso Sea
MSEVTDLMIIIGSFTSANSKRLAELSSERNENTFQVTSATEIDSSWFKDDVNSVGISAGASTPDWIIESVIKKVKEVTNTQEKEIIHE

SEQ ID NO: 90395 - protein, 300 aa, Unknown
  Bacterial polypetide isolated from the Sargasso Sea
RGVDILAWENFGKDWIQDVVKQLQISNLTVHDVDYGQFPDITKVNFKNDVVFTWNGTTSGVKVPNADWIPDSREGLTICDATSAIFAMPIDYKKCDVLTWSWQKVLGGEAAHGMIAMSPRAINRLESFKPSWPIPKVFRIANNNKVIKSIFEGSTINTPSMICVEDALDGLNWAEKNGGLNFLLDTSMNSFNLIYNWVQKNDWVTFLSENKSKEYLSNTGITFKICDDWYLSISEDEQRSIVKQICKILSDENVAHDINGYAKAPPSFRVWAGGTVESLNIELLLPWLDWAYSEVRKSYA

SEQ ID NO: 90396 - protein, 265 aa, Unknown
  Bacterial polypetide isolated from the Sargasso Sea
AYDTAKRHGDVYMLGDIVHNENVVADLNKAGARVVKSLDEVPDGKPILFRAHGTLLETWDDAKSKDMNIVDATCPLVKEIHDEVLKLSKEGRKIIIIGDHGHDEVVGIASQVNDAIVVSNEKEAMKLRKMKRAGVVSQSTQTIENVQKIINIIMTKVYDLNFVNTICFPTKRNQDQIKDLAKECDVMIVIGSFTSANSKRLTMLAEEINKKSYQVTDADDINIEWFAGAKTVGLSAGASTPDNIINNVLDKIKTISENHEEMIYG

SEQ ID NO: 90397 - protein, 1009 aa, Unknown
  Bacterial polypetide isolated from the Sargasso Sea
TLLIRPIETELADIDGLKKMTATAAENYAGVAIEFEFGWDKAKTMADVRDAMNAAEAFFPEGAEKYSINELNFSEFPIIIVNLTGDVPERTMTRVAKKLQEEIEAMDAVLEAVISGDREEMVEVIIDPLRLESYNVTAGELINVVQNNNQLIAAGEVDSKQGTFSVKIPSSFNETQDIYDLPVKTNGDRIITLGDLAQIKLTFVDRSGTARFNGKNTVALQVVKRKGFNLIGTAKEVRLLVEKESQSWPSNLKAAVDVGTSNDQSRVVDSMVRQLEGSVLTAIALVMIVVLTSLGTRAALLVGFSIPTSFLLCFVLLGLMGVTISNIVMFGLILAVGMLVDGAIVVVEYADKRISQGTGPMKAYVEAAKRMFWPVVSSTATTLCAFLPMLFWPGVPGQFMGMLPVTLIFVLSASLIVALIYLPILGGVSGRLSRFFENSSNLLRDILPWFIRLPLVPLIICLLCLSILQVVNPGLLLNIDPKEAGPMANLPGVLMFILSAFMASIVLGSVEIKKRQKNVQAGYRRTPFGYFIKFIAGNPIMPLIAIGGVIGFTSFIFTTFGENNYGVEFFVEGEPEQAIVYVKARGNLSLTEKDTLVRQAELIVNAHPGVESVFSFAGTGGLNQNTAGASAPKDTIGQIQLETVPWENRRGNPDLDGNKIIAELSNALTILPGIEIEILELERGPASPKPVHLRLKGENWNDLLSTTAEMRGIFDQTEGLVQVEDTRPLPGIDWQIDVDVEKAGRYGADVATVGAMVQLVTRGILLDTMRVDSSDEEIEIRVRLPEEDRFLSTLDNLKVRTADGLVPLSNFISRKPVTKLAEINRIDQKRYFDIKAGVQPDLKRTIVSDEGVESEIFINANERIAYLTEYLEKKPLAPGISWEWTGDQADQAESQAFLSSAFAAALVLMFIILLAQFNSFYNAFVVLIAVVLSTVGVLIGMLVMQQPFSIIMTGTGIVALAGIVVNNNIVLIDTYQELSRYLPKVEAIIRTAEQRIRPVLLTTITTMAG

SEQ ID NO: 90398 - protein, 287 aa, Unknown
  Bacterial polypetide isolated from the Sargasso Sea
MKILLAKDAGYCFGVRDAVSLAYETAEKEGEVFMLGDIVHNENVVEELEEAGVKVVNSLDKVPDNKPILFRAHGTVPDVWKESKMREMEVVDATCPLVTEIHEEVKKLHSENRKIIIIGDHGHDEVNGIKEQVENAIVVANPEEAMQLRKIKKAGVVSQSTQMIENVQEIINILMTKVFDLRFVNTICFPTRRNHEQIKNLSEICDIMIVIGSFTSANSKRLTELAKMRNERTFQVTSAEDLEIDWFQNSDTVGISAGASTPDNIINQVLDKIKSIGKVTEEELVYE

SEQ ID NO: 90399 - protein, 70 aa, Unknown
  Bacterial polypetide isolated from the Sargasso Sea
MKNKNLKIYLASPRGFCAGVDRAIEIVKKSINKYGAPVYVRHEIVHNKNVVENLKKIGAIFVEELNEIED

SEQ ID NO: 90400 - protein, 167 aa, Unknown
  Bacterial polypetide isolated from the Sargasso Sea
IENIEDAKKYENKSKKKLAFITQTTLSVDDTKGIINILKNKFPNIREPKNEDICYATTNRQMAVKKIANKCDMFFIIGSRNSSNSLRLVEVASHAGCKKSELIHSKSIVPIEKIKDCKTIGISSGASAPELLVKNFIEEIKKNFTVNIEEIKIIDEKITFKIPGKLN

SEQ ID NO: 90401 - protein, 179 aa, Unknown
  Bacterial polypetide isolated from the Sargasso Sea
MEILVSSPRGFCAGVVRAIDMVELALKKYGAPVYIKHQIVHNPHVVEDLESKGAITVETVEEIPEGSHVVFSAHGSPPEDFNKAIERNLNVIDAVCPLVTKVHNEAKKYASLGKKIILVGHEGHQEVKGTMGQTPMTLVNDNDLESIPDWDTNSDIAVLTQTTLSVNDTQNITDKIASE

SEQ ID NO: 90402 - protein, 154 aa, Unknown
  Bacterial polypetide isolated from the Sargasso Sea
MKNEVKIFLASPRGFCAGVERAIDIVEKTIVKFGTPVYVRHEIVHNKQVVENLKKKGTIFVEELSEVKDLSRPVIFSAHGVPKKVPEEAKIKNLFYIDATCPLVSKVHRESEQLHKQGYDIVLIGHKNHPEVIGTMGQLPPGSIKLIETVNEVQ

SEQ ID NO: 90403 - protein, 220 aa, Unknown
  Bacterial polypetide isolated from the Sargasso Sea
MLFRAHGTSPELWDKASEKNLNLIDATCPLVTEIHHEIKKLDQEGRKTIIIGDHGHDEVVAIAAQVERSIVIANVEEAKKLRKMKRAGVVSQSTQMIENVQEIINVLMEKVFDLRFVNTICFPTRRNHEQIKELAEKCNVMIIIGSYTSANSKRLTQLSLERNQKSYQVTSSDELDVSWFKNCETVGISAGASTPDETISEVVSKIKMIGSVKTKELVYE

SEQ ID NO: 90404 - protein, 79 aa, Unknown
  Bacterial polypetide isolated from the Sargasso Sea
MTKEIKLANPRGFCAGVDRAIDIVNKALDIYGAPVYVKHEVVHNKVVVDDLRNRGAVFVEEIDEIPDDSLVIFSAHGVS

SEQ ID NO: 90405 - protein, 40 aa, Unknown
  Bacterial polypetide isolated from the Sargasso Sea
MVLKKNFIPEGEIKVGITSGASTPDKIVADVIEKLIAITK

SEQ ID NO: 90406 - protein, 115 aa, Unknown
  Bacterial polypetide isolated from the Sargasso Sea
MKNKEIKVLLASPRGFCAGVDRAIEIVKKSIDKYGAPVYVRHEIVHNKNVVESLKNIGAIFVEELSEIKDKTRPVIFSAHGVPKSVPSEAENLNMEYVDATCPLVSKVHREAENL

SEQ ID NO: 90407 - protein, 109 aa, Unknown
  Bacterial polypetide isolated from the Sargasso Sea
MKKELKIYLASPRGFCAGVKRAIEIVEKSIKKFGAPVYVRHEIVHNKQVVEELKEKGAIFVDELSDVNETSRPVIFSAHGVPKSVPKEAKLKNLSFVDATCPLVSKVHR

SEQ ID NO: 90408 - protein, 69 aa, Unknown
  Bacterial polypetide isolated from the Sargasso Sea
MSKQIKLANPRGFCAGVDRAIDIVNKALEIYGAPVYVKHEVVHNKVVVDDLKERGAIFIEEIEEIPDIL

SEQ ID NO: 90409 - protein, 73 aa, Unknown
  Bacterial polypetide isolated from the Sargasso Sea
MKLDPTSPSLNILLANPRGFCAGVDRAISIVERALELFSPPIYVRHEVVHNRYVVQNLKDRGAVFVEELDQVP

SEQ ID NO: 90410 - protein, 88 aa, Unknown
  Bacterial polypetide isolated from the Sargasso Sea
MKKELKIFLASPRGFCAGVDRAIEIVNKALDKFGSPVYVRHEIVHNKQVVEDLKKRGAIFVEELSEIKDSSRPVIFSAHGVPKSVPID

SEQ ID NO: 90411 - protein, 148 aa, Unknown
  Bacterial polypetide isolated from the Sargasso Sea
YVTQTTLSVDDTKEIIDALKKRFPKIRGPIKEDICYATTNRQSAVKKIASDCEMFFVIGSRNSSNSARLVEVARKSGCEKSELIFYGKKAPIDKIINCKTIGLSSGASAPEELVQNFISEIRESMNVSIEEIVTANEKVVFKLPKELN

SEQ ID NO: 90412 - protein, 194 aa, Unknown
  Bacterial polypetide isolated from the Sargasso Sea
TGYFIGHRNHPEVIGTMGQTKSSIFLVEKVEDVKKVPIDVNNEIAYVTQTTLSVDDTKDIIQEIKNRYKKVIEPKKNDICYATTNRQEAVKRIASNCDYFLVIGASNSSNSLRLVEVAKNYGSKKAILVEDVDSINLNIFENIKNIGITASASSPEILVKKLIDKLKINFDLSINEAHYQKENVYFKVPQKLKN

SEQ ID NO: 90413 - protein, 172 aa, Unknown
  Bacterial polypetide isolated from the Sargasso Sea
PRGSIKLIETVGDVKNLSFSKPVAYVTQTTLSVDDTKEIIDALKQKFPEIKGPIKEDICYATTNRQSAVKKIAPNCEMFFVLGSRNSSNSARLVEVAKKSGCENSELIFYGKKAPIDKIKNCKTIGLSSGASAPEELVQNFISEIKESMNVSIEEIVTANEKVVFKLPKEVS

SEQ ID NO: 90414 - protein, 94 aa, Unknown
  Bacterial polypetide isolated from the Sargasso Sea
MKNKELKILLSAPRGFCAGVERAIEIVEKSIQKFGAPVYVRHEIVHNKHVVDDLKNKGAIFVEELEEINDKTRPVIFSAHGVPKKIPLDAKNYK

SEQ ID NO: 90415 - protein, 132 aa, Unknown
  Bacterial polypetide isolated from the Sargasso Sea
NVLRERFPDIHEPKKDDICYATTNRQAAVKKIAKDCDNLFVIGSRNSSNSVRLVEVAKNNGCENAELIHSESTFPLEKISKCKTIGISSGASAPEVLVNEFIENIKKKFTVEIEEVEIVKEDVTFKIPGKLN

SEQ ID NO: 90416 - protein, 242 aa, Unknown
  Bacterial polypetide isolated from the Sargasso Sea
MVNNLYVVTPRGFCAGVEMAIKALTWMLKIYDEPVYCYHEIVHNDWIVQKFKDKNVIFIEDPKDLPKGSIVMLSAHGTAPLIEMEFKNISMTSVNSVCPLVTKVHHEAKRFSEDGKKIIYVGHKNHDEAIGALGVAPDNMVLVESVEDIDQTNLHNDKVALLAQTTLAMSEWEPILNKAKSEYQNIELPRKSDLCYATTNRQKALINISNKVDKVLVVGSSTSSNTNALVTTINNLGKEAHR

SEQ ID NO: 90417 - protein, 168 aa, Unknown
  Bacterial polypetide isolated from the Sargasso Sea
MDTQAFRRSLHHSDRYNRRGFDSPTKRAQALEEAYQSDLISSIRDNDFTYTKGRLNIKLAQAFGFCWGVERAVAMAYETRRHYPNENIWITNEIIHNPSVNDHLRKMNVKFISAKNGIKDFSLVSNGDVVILPAFGATVQEMKLLHEKGCHIIDTTCPWVSKVWHTVE

SEQ ID NO: 90418 - protein, 216 aa, Unknown
  Bacterial polypetide isolated from the Sargasso Sea
DATCPLVSKIHKEVEQFDKKNLPVILIGHRNHPEVIGTMGQTNRRIHLVENKNDVANLQIDKNEKIAYVTQTTLSIDDTKEIVQAIKSKYLNVIEPKKNDICYATTNRQEAVKKIAGHCDYFLVIGASNSSNSLRLVEVAKNYGSKKAILVEDVDSLNLNIFHDSKNIGITASASSPEILVKRLLDKLKDNFKIKLNEENYHKENIYFKVPQSLKY

SEQ ID NO: 90419 - protein, 173 aa, Unknown
  Bacterial polypetide isolated from the Sargasso Sea
LPKGSIKLIETVDEIKDLKFSKPLAYVTQTTLSVDDTKEIIEGLKEKFPEIKGPIKEDICYATTNRQAAVKKIAPNCEMFFVIGSRNSSNSARLVEVAKKSGCKDSELIFYGKKAPLEKIKNCKTIGLSSGASAPEELVQNFILEIKNDMNVSIEEVVTANEKVVFKLPKELN

SEQ ID NO: 90420 - protein, 216 aa, Unknown
  Bacterial polypetide isolated from the Sargasso Sea
PLVTKVHREAERHNKNGYKIILIGHKDHPEVIGTMGQISKENITLIETAEDAQKIEIDGPVAYVTQTTLSIDDTKDIIDILEKKFPDIKAPIKEDICYATTNRQNAVREIADSCDMFFVIGSDNSSNSKRLVEVAKKAGCKNAELVDFKKELPIKEIISCNKIGLTSGASAPEKLVQSFILEIKKHARVSIEEHISSVENVIFKLPSSLQEQNSKE

SEQ ID NO: 90421 - protein, 119 aa, Unknown
  Bacterial polypetide isolated from the Sargasso Sea
MKQKIKILLAAPRGFCAGVDRAIEIVKKTLNKYGSPVYVRHEIVHNKNVVEDLKNLGAIFVEEISEIKDKSRPVIFSAHGVPKEVPEEANLKKIFYIDATCPLVSKVHRETEQLHKRGF

SEQ ID NO: 90422 - protein, 131 aa, Unknown
  Bacterial polypetide isolated from the Sargasso Sea
LRNKFPNIESSPKEDICYATSNRQNAIKEYANKCDAFIVVGSKNSSNSNRLVEVAKNAGCLNSYLLENAESLNISNYSSYNTIGISSGASVPEVLVENVISKFQENYSLDIEDVSLGEENVQFKLPKEVRN

SEQ ID NO: 90423 - protein, 60 aa, Unknown
  Bacterial polypetide isolated from the Sargasso Sea
MKNKELKILLSAPRGFCAGVERAIEIVEKSIQKFGSPVYVRHEIVHNKYVVDDLKNKGAI

SEQ ID NO: 90424 - protein, 96 aa, Unknown
  Bacterial polypetide isolated from the Sargasso Sea
MIKNKNLKILLASPRGFCAGVDRAIEIVKKSIDKYGSPIYVRHEIVHNKHVVDSLKKIGAIFVESLEEINDKTRPVIFSAHGVPKSVPKEASSLNM

SEQ ID NO: 90425 - protein, 70 aa, Unknown
  Bacterial polypetide isolated from the Sargasso Sea
MKVKNNHLKILLAAPRGFCAGVDRAIEIVKKSIEKYGAPVYVRHEIVHNKHVVDGLKKIGAIFVEEIDGN

SEQ ID NO: 90426 - protein, 127 aa, Unknown
  Bacterial polypetide isolated from the Sargasso Sea
MKNKLKIFLASPRGFCAGVDRAIEIVKKTLDKYGSPVYVRHEIVHNKNVVESLKKLGAIFVEEISEISDSSRPVIFSAHGVPKKVPEEAKLKKIFYVDATCPLVSKVHRETEQLYKKGFDIVLIGHR

SEQ ID NO: 90427 - protein, 157 aa, Unknown
  Bacterial polypetide isolated from the Sargasso Sea
NLNFSKPLAYVTQTTLSVDDTKEIIDALKIKFPEIKGPVKEDICYATTNRQAAVKKIAPNCEMFFIIGSRNSSNSARLVEVAKKSGCKNSELIFYGKNAPLDKIKSCKTIGLSSGASAPEELVQNFISEIKNDMDVSIEEVVTANEKVVFKLPKELN

SEQ ID NO: 90428 - protein, 119 aa, Unknown
  Bacterial polypetide isolated from the Sargasso Sea
MKEDICYATTNRQLAVKNIAKKCDLFFVIGSRNSSNSVRLVEVAKKSGCSNSLLIHSQSEIPFDLIKDSNIIGISSGASAPEILVNNFIDELKNKFTVSIDEVEIIKENVVFKAPKKLN

SEQ ID NO: 90429 - protein, 253 aa, Unknown
  Bacterial polypetide isolated from the Sargasso Sea
MVNNLYVVTPRGFCAGVEMAIKALTWMLKIYDETIYCYHEIVHNDWIVKKFKENNVKFVDNPHELPDNAIVMLSAHGTAPNIEKEFKSISLTNVNSVCPLVTKVHHEAKRFSEEGHEIIYVGHKDHDEAVGAMGVAPESMNLIENVDEIEEIDLKSDNVALLAQTTLSMSDWEPIMLKAKDKYPNLKMPRKNDLCYATTNRQEAIINIAGEVDLVIVVGSSTSSNTNALVTSINNIGKEAYRVETTSDLKILI

SEQ ID NO: 90430 - protein, 170 aa, Unknown
  Bacterial polypetide isolated from the Sargasso Sea
EIDLIENIEDVKNYKNKKDKLAFVTQTTLSVDDTKEIISALKNKFPEIREPKKEDICYATTNRQSAVKKIANKCDMFFVIGSRNSSNSMRLVEVAKNSGCLNSRLIHSDSSIPFGEIEKFKTIGISSGASAPEILVDNFIKSLKKQFTVVIEEVEIVKENITFKIPGKLN

SEQ ID NO: 90431 - protein, 127 aa, Unknown
  Bacterial polypetide isolated from the Sargasso Sea
MKNKIKIYLAAPRGFCAGVDRAIEIVKKTLDKYGSPVYVRHEIVHNKNVVESLKNLGAIFVEEISEIKDTSRPVIFSAHGVPKKIPEEAKLKKIFYVDATCPLVSKVHRETEQLFKRGFDIVLIGHK

SEQ ID NO: 90432 - protein, 114 aa, Unknown
  Bacterial polypetide isolated from the Sargasso Sea
YATQNRQDAVKQLALETDYIIVVGSKASSNSNRLKELANKCGVNSVLIDEFSDLDLNELKDCKNIGLTAGASAPESKVQEIISNLSIFLDAEIEEKGGVKENISFKLPPELRAS

SEQ ID NO: 90433 - protein, 152 aa, Unknown
  Bacterial polypetide isolated from the Sargasso Sea
NKLAYITQTTLSIDDTREIINVLKKKFPEINEPKKEDICYATTNRQLAVKKIAKNCDMFFVIGSRNSSNSVRLVEVAKNNGCDKSELIHSESKVPIDKIANCKTIGISSGASAPEILVEEFIQELKKEFIIKIEEIEIIKEDITFKIPGKLN

SEQ ID NO: 90434 - protein, 175 aa, Unknown
  Bacterial polypetide isolated from the Sargasso Sea
MKKELKIYLASPRGFCAGVKRAIEIVEKAIDKFGSPVYVRHEIVHNKQVVEELKKKGAIFVDELSDIKDSSRPVIFSAHGVPKSVPEEANSKNLSFVDATCPLVSKVHRESEQLNKKGYKIFLIGHKNHPEVVGTMGQLPAGSIKLIETKNDVKNLKIGDFNKPLAYITQNNAFH

SEQ ID NO: 90435 - protein, 275 aa, Unknown
  Bacterial polypetide isolated from the Sargasso Sea
MVNKLYIVTPRGFCAGVEMAIKALTWMLKIYDEPVYCYHEIVHNDWIVEKFKKKNVIFIEDTDELPKDSIVMLSAHGTAPDIEKEFKNISLTSVNSVCPLVTKVHHEAKKFSESGKQIIYVGHKNHDEAIGALGVAPENMHLVESVDDIKNINFQDKEVALLAQTTLAMSEWEPILNKVKEDFDNLDLPRKSDLCYATTNRQKALINISSNVDVVLVVGSSTSSNTKALVTTIKNLGKEAYRIETLNDLEDINLESKDVAITAGASAPEHIVNEI

SEQ ID NO: 90436 - protein, 238 aa, Unknown
  Bacterial polypetide isolated from the Sargasso Sea
DAGAKVVNSLDEVPHDKPLLFRAHGTSPKVWEDAKKRNLKLIDATCPLVTEIHQDIKKLNDEGRKTIIIGDHGHDEVVAIAAQVDNPMIISNVEEAKALRKMKKAGVVSQSTQMLENVQEIMNVLMEKVFDLRFINTICFPTRRNHQQIKDLALNSDVMIIIGSYTSANSKRLTQLSLERNKKSFQVTSADELDPIWFKDCDNVGISAGASTPDETIEEVINKIKEIGQVTEKEEIYE

SEQ ID NO: 90437 - protein, 97 aa, Unknown
  Bacterial polypetide isolated from the Sargasso Sea
MKNKELKILLSAPRGFCAGVERAIEIVEKSIQKFGAPVYVRHEIVHNKYVVDDLKNKGAIFVEELEEIKDKSRPVIFSAHGVPKKIPEDAKNYKMTY

SEQ ID NO: 90438 - protein, 97 aa, Unknown
  Bacterial polypetide isolated from the Sargasso Sea
MINKNLKIYLASPRGFCAGVDRAIEIVKKSIDKFGAPVYVRHEIVHNKHVVESLKKIGAIFVEELNEIKDKSRPVIFSAHGVPKSVPEEASNLNMMF

SEQ ID NO: 90439 - protein, 127 aa, Unknown
  Bacterial polypetide isolated from the Sargasso Sea
RFPNIYEPKKEDICYATTNRQEAVKKIAPKCEMFFVIGSRNSSNSVRLVEVAKKNGSKSAELIHSESIIPFDKINECKTIGISSGASAPEILVSEFIEDLKKQFTIDIEEIEITKENITFKVPGKLN

SEQ ID NO: 90440 - protein, 111 aa, Unknown
  Bacterial polypetide isolated from the Sargasso Sea
MVNNLYIVTPRGFCAGVEMAIKALTWMLKIYDEPVYCYHEIVHNDWIVQRFKDKNVIFIEDPIDLPKDSIVMLSAHGTAPMVEMEFQNTSMTSVHSVCPLVTKVHHEAKRF

SEQ ID NO: 90441 - protein, 299 aa, Unknown
  Bacterial polypetide isolated from the Sargasso Sea
CLLKIYDETIYCYHEIVHNKWIVKEFEKNNVVFVEDTKEIPEGAIVMLSAHGTAPEIELRFNNISSLTINSVCPLVTKVHHEAKKFSKENTQIIYVGHKNHDEAKGAIGVSPDNMHLVENIEDVKALEIGNDVALLAQTTLALSEWEPIMKYSQERFNSLKMPRKSDLCYATTNRQEAILEILPEVNTVLVVGSENSSNTKALVSMVNNQGVEAHRVDNVDDIETLNLNGNIAITAGASAPDHLVYEIIDKINPDNLETFRLKEEDEYFPLPQQLRSNIKNISDFLSILNISETNPKSE

SEQ ID NO: 90442 - protein, 164 aa, Unknown
  Bacterial polypetide isolated from the Sargasso Sea
KSKQKKIKLKDTKKIAYVTQTTLSLNDTSEIIKILKNKYPNIIGPDLDDICYATQNRQVAVSKLADLCDLVFVVGGENSSNTKRLAEIVRKKNISVFRISGKEDINQSWFNEINTLGITSGASSPEVLIEEILEFLRVIYDEVEIKDLEGIKENITFKPLTNFS

SEQ ID NO: 90443 - protein, 85 aa, Unknown
  Bacterial polypetide isolated from the Sargasso Sea
MPNNKILNVYLIGPRGFCAGVDRAILMVEEALKKYGKPVYVRHEIVHNKYVVEDLKTKGAIFVDELKEIKDKNRPVIFSAHGVPK

SEQ ID NO: 90444 - protein, 172 aa, Unknown
  Bacterial polypetide isolated from the Sargasso Sea
KSIDLIETLDDVKNFTKKNDKKVAYVTQTTLSVDDTKNIVEALKIKFPEIKEPVKEDICYATTNRQAAVKNIAKNCEMFFVIGSRNSSNSQRLVEVAKQSGCDRSELIHSESNLPIEKIINCKTIGISSGASAPEVLVENFINKIKEKINLEIEEVEIIKENIIFKTPGKLN

SEQ ID NO: 90445 - protein, 108 aa, Unknown
  Bacterial polypetide isolated from the Sargasso Sea
PVIFSAHGVPKKIPEDAKNYKMTYVDATCPLVSKVHREAENLNKAGYHIILIGHENHPEVIGTMGQLDEGSIDLIQNEEEATNYQKITNKNLAYITQTTLSVDDTKEI

SEQ ID NO: 90446 - protein, 231 aa, Unknown
  Bacterial polypetide isolated from the Sargasso Sea
MVNNLYVVTPRGFCAGVEMAIKALTWMLKIYDEPVYCYHEIVHNDWIVQKFKEKNVIFIEDPKDLPKDSIVMLSAHGTAPLIEMEFKNISMTSVNSVCPLVTKVHHEAKRFSEDGKKIIYVGHKNHDEAIGALGVAPDNMVLVESVEDIDQTNLHNDKVALLAQTTLAMSEWEPILNKAKSEYQNIELPRKSDLCYATTNRQKALINISNKVDKVLVVGSSTSSNTNALVT

SEQ ID NO: 90447 - protein, 91 aa, Unknown
  Bacterial polypetide isolated from the Sargasso Sea
MKNKEIKILLAAPRGFCAGVDRAIEIVKKSIEKYGAPVYVRHEIVHNKHVVESLKKIGAIFVEELNEIEDKTRPVIFSAHGVPKVVPAEAK

SEQ ID NO: 90448 - protein, 169 aa, Unknown
  Bacterial polypetide isolated from the Sargasso Sea
MTKKLNIFLAGPRGFCAGVDRAIEMVKGALKKYGAPVYVRHEIVHNKFVVENLKSQGAIFVEELNEIEDKSRPVIFSAHGVPKAVPEEALSLNLIYYDATCPLVSKIHKEVENFDKKNLPVILIGHRNHPEVIGTMGQTNKEIYLVEKVEDVKKLPFDQNDKIAYVTQT

SEQ ID NO: 90449 - protein, 50 aa, Unknown
  Bacterial polypetide isolated from the Sargasso Sea
SIFHKPLRSDLELKNNFLPSGNINVGITSGASTPDKVVADVIEKLIDIAS

SEQ ID NO: 90450 - protein, 201 aa, Unknown
  Bacterial polypetide isolated from the Sargasso Sea
YFMVNNLYVVTPRGFCAGVEMAIKALTWMLKIYDETIYCYHEIVHNDWIVKKFKENNVKFVDNPHELPDNAIVMLSAHGTAPNIEKEFKSISLTNVNSVCPLVTKVHHEAKRFSEEGHEIIYVGHKDHDEAVGAMGVAPESMNLIESVDEIEKIDLKSDNVALLAQTTLSMSDWEPIMLKAKDKYPNLKKPRKNDLCYATT

SEQ ID NO: 90451 - protein, 88 aa, Unknown
  Bacterial polypetide isolated from the Sargasso Sea
RDAPEGSRVIFSAHGIPISVINEAKNREMPFIDATCPLVIKVHNEAKRLHKDGAHIFLIGHEGHPEVIGTTGSNPARCHYIDTKKRRY

SEQ ID NO: 90452 - protein, 100 aa, Unknown
  Bacterial polypetide isolated from the Sargasso Sea
MKNKQIKIYLASPRGFCAGVDRAIEIVKKSLKKYGSPVYVRHEIVHNKHVVESLKKIGAIFVEELDEIKDKSRPVIFSAHGVPKSIPEQANTLKMDYIDA

SEQ ID NO: 90453 - protein, 182 aa, Unknown
  Bacterial polypetide isolated from the Sargasso Sea
MELLGQIDSKIYLIEKEEDVENLEIPSNQKIAYVTQTTLSVDDTKSIINKIKSKYKKILEPKKNDICYATTNRQYAVKEIAEKCDLFLVIGANNSSNSLRLVEVAKQYGAQKSKLIENIDNFNFLEINDIKVLGITASASAPEVLVQSFIKKLKQKFDVILHEPDYRKEDVNFKIPQKLKAH

SEQ ID NO: 90454 - protein, 267 aa, Unknown
  Bacterial polypetide isolated from the Sargasso Sea
WLLKIYDETIYCYHEIVHNKWIVKEFEKNNVVFVEDPEEIPDGAIVMLSAHGTAPEIELQFNNVSSLTINSVCPLVTKVHHEAKKFTKENTQIIYVGHKNHDEAKGAIGVSPDNMHLVESIEDVKSLEIGDDVALLAQTTLALSEWEPIMKYSQDKFNGLKMPRKSDLCYATTNRQEAILEILPEVNTVLVVGSENSSNTKALVSMVNNQGVDAYRVDNVNDIENLNLNGNIAITAGASAPDHLVYEIINKINPINLEQFRLKEEDE

SEQ ID NO: 90455 - protein, 103 aa, Unknown
  Bacterial polypetide isolated from the Sargasso Sea
VKQLALESDYIIVVGSKNSSNSNRLKELAEKCGCKSILIDEFSDLDLEDLQKFENIAITAGASAPESRVMEIAKSLENYFDARLTEDGEDTENVYFKMPPGLR

SEQ ID NO: 90456 - protein, 275 aa, Unknown
  Bacterial polypetide isolated from the Sargasso Sea
MVNKLYVVTPRGFCAGVEMAIKALTWMLKIYDEPVYCYHEIVHNDWIVEKFKKKNVIFIEDTDELPKDSIVMLSAHGTAPDIEKEFKNISLTSVNSVCPLVTKVHHEAKKFSENGKQIIYVGHKNHDEAIGALGVAPEHMHLVESVDDIKNINFQDKEVALLAQTTLAMSEWEPILNKVKEDFDNLDLPRKSDLCYATTNRQKALINISSNVDVVLVVGSSTSSNTKALVTTIKNLGKEAYRIETLNDLEDINLENKDVAITAGASAPEHIVNEI

SEQ ID NO: 90457 - protein, 158 aa, Unknown
  Bacterial polypetide isolated from the Sargasso Sea
MKIKDNKNLAFVTQTTLSVDDTKEIISALKKKFPKIKEPKKEDICYATTNRQAAVKKIAEKCDMIFIIGSRNSSNSLRLVEVAKNSGCKNSRLIHSESTIPLNEIENYKTIGISSGASAPEILVNNFINNLKKKFTIAIEEVEIVKENITFKIPGKLN

SEQ ID NO: 90458 - protein, 132 aa, Unknown
  Bacterial polypetide isolated from the Sargasso Sea
MEKRFPKIQGPPKNDISFATQNRQNAVKALSKKVDLVLVVGAPNSSNSVRLLEVAMATGVKARRIESEEELNPEWFEGIESIGVTAGASAPEDILQGVVSGLKKMFSSSKLKDLKIVQENVTFALPAVLRND

SEQ ID NO: 90459 - protein, 79 aa, Unknown
  Bacterial polypetide isolated from the Sargasso Sea
MKTKVLLANPRGFCAGVDRAIDIVNQALKKFGPPIYVRHEVVHNKTVVDELKSKGVIFVDELSEVPQSSHVIFSAHGVS

SEQ ID NO: 90460 - protein, 99 aa, Unknown
  Bacterial polypetide isolated from the Sargasso Sea
MNKEIKLANPRGFCAGVDRAIDIVNKALDIYGAPVYVKHEVVHNKVVVNDLKKKGAIFVENIDEIPDNSLVIFSAHGVSSEVEETTKSRNLNYFDATCP

SEQ ID NO: 90461 - protein, 89 aa, Unknown
  Bacterial polypetide isolated from the Sargasso Sea
NSNRLKDIGSESGVNTHLIETADDMSLSWFENVDSVGITSGASTPDELVKEVIDRISTFTSIEIEKQAGKEENVVFKLPKELLNYEMAN

SEQ ID NO: 90462 - protein, 52 aa, Unknown
  Bacterial polypetide isolated from the Sargasso Sea
AGPRGFCAGVNMAIETLETAIRLYGTPIYVFHEIVHNKHVVERFVKEGAVFH

SEQ ID NO: 90463 - protein, 211 aa, Unknown
  Bacterial polypetide isolated from the Sargasso Sea
LVTKVHLEAIKLHSSGYHILLVGHDGHPEIEGTRGQVPKESITLIQNLKEAKTFRSKEKKLAWLSQTTLSVDDTSEIVKTLTKRFPNIIGPKKGDICYATTNRQMAVKEIASNVEVMLIVGSENSSNSQRLVEVAKNEGCVNSYLISDVNFINWNEINNIKNIGLSSGASAPESLIEEIRAEFSKRYNVTEIQNLETTEDIYFKLPKALEN

SEQ ID NO: 90464 - protein, 159 aa, Unknown
  Bacterial polypetide isolated from the Sargasso Sea
GLPPSSRIAYLTQTTLSLDDTADIIKVLRRRFPEIEGPAKDDICYATQNRQNAVKQISKEVDLVLVVGAENSSNTLRLVEVAESLGTRAIRIQSSSELQPDLLDECNKIGITAGASAPEDIVQGIVDKLRGWNPGCRVRELKLTEEQVSFGLPPQLKTP

SEQ ID NO: 90465 - protein, 159 aa, Unknown
  Bacterial polypetide isolated from the Sargasso Sea
NYQNKSKKKLAFVTQTTLSVDDTKEIISALKKKFPEIKEPKKEDICYATTNRQAAVKKIAKECDMFFVIGSRNSSNSLRLVEVAKNSGCENSRLIHSESQVPLEEIEKYKTIGISSGASAPEILVDNFINNLKKQFTVIIEEVEIVKENITFKIPGKLN

SEQ ID NO: 90466 - protein, 173 aa, Unknown
  Bacterial polypetide isolated from the Sargasso Sea
MKNKEIKILLSAPRGFCAGVERAIEIVEKALIKYGAPVYVRHEIVHNKFVVDDLRKKGAIFVEELEEIKDKSRPVIFSAHGVPKKIPADAEKYKMTYVDATCPLVSKVHREAENLYKSGYHLILIGHQNHPEVVGTMGQLPEGSIDLIQNEKEAKSYNYNKNKNLAFVTQTNF

SEQ ID NO: 90467 - protein, 96 aa, Unknown
  Bacterial polypetide isolated from the Sargasso Sea
MNKKIDIYLAGPRGFCAGVERAILMVKEAIKKYGKPVYVRHEIVHNKYVVNSLTKEGAIFIEELDEIKNKNRPVIFSAHGVPKSVPREAKNLNLLY

SEQ ID NO: 90468 - protein, 165 aa, Unknown
  Bacterial polypetide isolated from the Sargasso Sea
IEDVNHIKLSKDKIAYITQTTLSIDDTKEIIVALCKKFPKIKAPLKSDICYATTNRQMAVKNIAAKCDVFFVVGSRQSSNSQRLVEVAKKSGSKESFLVHQGFELSKKIIENAKCIGVSSGASAPEVLVDQLLDQIKEIRNIEVEEVEIVKENVEFKLPKELRVN

SEQ ID NO: 90469 - protein, 125 aa, Unknown
  Bacterial polypetide isolated from the Sargasso Sea
MKKKIKIFLASPRGFCAGVDRAIEIVNKALDKYGAPVYVRHEIVHNKQVVEDLKNRGAIFIEELVEIKDSTRPVIFSAHGVPKSVPAEAINKKLKYVDATCPLVSKVHRESEQLYKKGFDIILIG

SEQ ID NO: 90470 - protein, 169 aa, Unknown
  Bacterial polypetide isolated from the Sargasso Sea
MKTSKKIYLISPRGFCAGVTRAIEIVELAIKKYGPPVYVNHEIVHNKYVIDELSDKGAVFLDNINDAPPDRPLIFSAHGVSKDVELHANKKNKIVINATCPLVTKVHVQAMKFFELGYRIILIGHKNHPEVIGTMGQLPSGSIELVETVSDVMKLSINDNDNFAYLTQN

SEQ ID NO: 90471 - protein, 109 aa, Unknown
  Bacterial polypetide isolated from the Sargasso Sea
MQIHLANPRGFCAGVDRAITIVERALEMFEPPIYVRHEVVHNKFVVDGLRERGALFVDELHEVPDDSIVIFSAHGVSQAVRKEAENRGLKVFDATLPLVTKVHMGSNPC

SEQ ID NO: 90472 - protein, 158 aa, Unknown
  Bacterial polypetide isolated from the Sargasso Sea
MEIYLASPRGFCAGVVLAIDLVEIALEKYGAPVYVKHQIVHNPVVVSEVESKGAITVENVSDVPDNSVVVFSAHGSPPRDYKLAEEKNLRVIDATCPLVTKVHNEAKKYSKEGKNIILVGHKGHQEVIGTSGQANMKIIDDRDEFNLENNDSVKDEDV

SEQ ID NO: 90473 - protein, 270 aa, Unknown
  Bacterial polypetide isolated from the Sargasso Sea
MDTQAVKHKIQHSGRYNRKGFESPTKRAKALGESYQSDLIASIRENDFTFEKGRLKIKLAKSFGFCWGVERAVAMAYETRRHYPNEVIWMTNEIIHNPSVNNHLSRMNVKIISAKNGIKDFSSVSTGDVVILPAFGATVQEMQLLHEKECQIIDTTCPWVSKVWHTVEKHKKHTFTSIIHGKYKHEETLATRSFAGNYLVVSDLREAEYVSDYIKGNGDKKKFINKFAKACSNGFDPDIHLERIGVANQTTMLKSETEEIGKIFEKTMIA

SEQ ID NO: 90474 - protein, 67 aa, Unknown
  Bacterial polypetide isolated from the Sargasso Sea
NKEAVKELQTPKNQQVAYVTQTTLSVDETKDIVKEIKSYFKFVGEPKKNDICYATTNRQEAVKNIAQ

SEQ ID NO: 90475 - protein, 90 aa, Unknown
  Bacterial polypetide isolated from the Sargasso Sea
MKNKEIKILLAAPRGFCAGVERAIEIVKKSINKYGAPVYVRHEIVHNKHVVDSLKEIGAIFVEELNEIKDKTRPVIFSAHGVPKKSLLKQ

SEQ ID NO: 90476 - protein, 114 aa, Unknown
  Bacterial polypetide isolated from the Sargasso Sea
MKNKELKILLSAPRGFCAGVERAIEIVEKSIRKYGSPVYVRHEIVHNKFVVDDLKSKGAIFVEELEEIKDKSRPVIFSAHGVPKKIPKDAKNYNMTYVDATCPLVSKVHREAEN

SEQ ID NO: 90477 - protein, 160 aa, Unknown
  Bacterial polypetide isolated from the Sargasso Sea
MSDINNDDFQIHLAHTQGFCAGVSSAIEIVELCIRKYGTPLYVRHEIVHNTAIIKDLETRGVIFIEELKDVPDDNPVVFSAHGTAPDVFEAARQRGIHVIDATCPLVTKVHRQAERYSKRGVHTILIGHRGHQELIGTSGYVSSDLLHIVEDLDDVESIS

SEQ ID NO: 90478 - protein, 140 aa, Unknown
  Bacterial polypetide isolated from the Sargasso Sea
MDTQAFRRSLHHSDRYNRRGFDSPTKRAQALEEAYQSDLISSIRDNGFSYTKGRLNIKLAQAFGFCWGVERAVAMAYETRRHYPNENIWITNEIIHNPSVNDHLRKMNVKFISAKNGIKDFSLVSNGDVVILPAFGATVQ

SEQ ID NO: 90479 - protein, 97 aa, Unknown
  Bacterial polypetide isolated from the Sargasso Sea
MKLLLANPRGFCAGVDRAIEIVKKVLEEKGSPIYVKHEVVHNKIVVKELENLGAVFVEEISDIPKGETVIYSAHGVSKTVVTDSNTKDLDIFDATCP

SEQ ID NO: 90480 - protein, 107 aa, Unknown
  Bacterial polypetide isolated from the Sargasso Sea
MKKQKINLYLASPRGFCAGVDRAVKIVEESIKKFGAPVYVRHEIVHNKDVVNSLIRIGAVFVEEVNEAPVDRPIIFSAHGVAKSVVNEAAQRKMISIDATCPLVTKV

SEQ ID NO: 90481 - protein, 207 aa, Unknown
  Bacterial polypetide isolated from the Sargasso Sea
EKLKIFERKNLPVILIGHQNHPEVIGTMGQTSQDIYLVENKKEVKNLPIPKNKHIAYVTQTTLSVDDTKEIVEEIKSHFDNVLEPKKKDICYATTNRQEAVKEIAKKCDYFFILGSKNSSNSLRLVEVAKNYGSRYSILVDDIKNFDPRIIKNCSKIGITASASSPEILVTKILKKIDEHFTINIIESIFEKEDIHFKIPQKLKEAI

SEQ ID NO: 90482 - protein, 137 aa, Unknown
  Bacterial polypetide isolated from the Sargasso Sea
TAGIIEALKNKFPKIKGPIKEDICYATTNRQSAVKEIASKCDMFFIVGSRNSSNSVRLVEVAKKAGCNNSHLMHSEKEIPFNEIENSETIGISSGASAPEKLVQSLLDNIKKDRKISIEEVVVAEEKVVFKLPKELN

SEQ ID NO: 90483 - protein, 288 aa, Unknown
  Bacterial polypetide isolated from the Sargasso Sea
MKIILAKDAGYCFGVRDAVNSAYEMSKKYGEVYMLGDIVHNESVVSDLEKEGVKVVEKLDQIPKDKPVLFRAHGTAKEVWKKAEDKKMNIIDATCPLVHEIHHEVKALHEEGRKIIIIGDHGHDEVIGIASQIPDPIIVATVEEAEELRKTKKAGIVTQSTQTIENVQDIINILMTKVFDLRFVNTICFPTKRNQEQIKELSEVTDLMIIIGSFTSANSKRLAELSSERNENTFQVTCASEIDSSWFKDDVNSVGISAGASTPDWIIESVIKKVKEITNTQEKEIIHE

SEQ ID NO: 90484 - protein, 114 aa, Unknown
  Bacterial polypetide isolated from the Sargasso Sea
MNKKLNIFLAGPRGFCAGVDRAIEMVKEALKKYGKPVYVRHEIVHNKFVVENLKSEGAIFVEELDEIKDKSRPVIFSAHGVPKSVPAEASNLNLIYYDATCPLVSKIHKEVNIR

SEQ ID NO: 90485 - protein, 145 aa, Unknown
  Bacterial polypetide isolated from the Sargasso Sea
TTLSVDDTKEIIDELKCIFPNIIQPPKEDICYATTNRQLAIKSIASKCDLIYVIGANNSSNSLRLVEVGKRSGCEETHLISDKSEVNWKLVEKKQKIGLTAGASAPDILIQEFINELNQLYNVEIKKISVADENITFKIPRELNE

SEQ ID NO: 90486 - protein, 202 aa, Unknown
  Bacterial polypetide isolated from the Sargasso Sea
ENLNKNGFQILLIGHKNHPEVIGTMGQIPEGEIDLIENVDDANNYENKSKKKLAFVTQTTLSVDDTKEIISALKKKFPEIREPKKEDICYATTNRQAAVKKIAEKCDMFFVIGSRNSSNSLRLVEVAKNSGCTNSRLIHSESDVPFEEIEKYKTIGISSGASAPEILVDNFINNLKKEFMVAIEEIEIVKENITFKIPGKLN

SEQ ID NO: 90487 - protein, 119 aa, Unknown
  Bacterial polypetide isolated from the Sargasso Sea
MKEDICYATTNRQMAVKNIAKKCDLFFVIGSRNSSNSVRLVEVAKKSGCSNSQLIHSQSEIPYSLIEKSNTIGISSGASAPEILVNDFINNLKKRFSVNINEVEAIKENVVFKIPKKLN

SEQ ID NO: 90488 - protein, 56 aa, Unknown
  Bacterial polypetide isolated from the Sargasso Sea
MRDKQIKIYLASPRGFCAGVDRAIEIVKKSLEKYGSPVYVRHEIVHNKHVVESLKK

SEQ ID NO: 90489 - protein, 170 aa, Unknown
  Bacterial polypetide isolated from the Sargasso Sea
ITLIQNLKEAKNFITKEKKLAWLSQTTLSVDDTSEIVKTLTKRFPNIIGPKKGDICYATTNRQMAVKKIASNVEVMLIVGSENSSNSQRLVEVAKNEGCVNSYLVSDVNFINWDEINNIKNIGLSSGASAPESLIEEIRAEFSKRYNIKEIQNLETTEDIYFKLPKALEN

SEQ ID NO: 90490 - protein, 180 aa, Unknown
  Bacterial polypetide isolated from the Sargasso Sea
MGQTSNEIYLVENKEDVKKLPIQPDIKIAYVTQTTLSVDDTRDIIDEIKLHFKNVVEPKKKDICYATTNRQEAVKNIAKFSDYFFVIGSKNSSNSLRLVEVAQNYGSQNAILIDNIDNFDATILNESSKIGITASASSPEILVSKMLTKIGEQFELNIIEPKYHKENTHFKIPQKLKEVI

SEQ ID NO: 90491 - protein, 89 aa, Unknown
  Bacterial polypetide isolated from the Sargasso Sea
MKSKKIKILLAAPRGFCAGVERAIEIVKKSINKYGAPVYVRHEIVHNKHVVDGLKKIGAIFVEELDEIKDKTRPVIFSAHGVPKKVPIE

SEQ ID NO: 90492 - protein, 154 aa, Unknown
  Bacterial polypetide isolated from the Sargasso Sea
MKQKIKIFLAAPRGFCAGVDRAIEIVKKTLNKYGSPVYVRHEIVHNKNVVENLKNLGAIFVEEISEIKDKSRPVIFSAHGVPKSVPEEANLEKIFYIDATCPLVSKVHRESEQLYKRGFDIVLIGHKNHPEVIGTMGQLPNGSIKLIEKKDEIK

SEQ ID NO: 90493 - protein, 171 aa, Unknown
  Bacterial polypetide isolated from the Sargasso Sea
MKVKNNHLKILLAAPRGFCAGVDRAIEIVKKSIEKYGAPVYVRHEIVHNKHVVDGLKKIGAIFVEEIDEIEDKTRPVIFSAHGVPKSVPQEAESLNMIFVDATCPLVSKVHREAENLNKKDVQVLLIGHKNHPEVIGTMGQVANGKIDLIETLDDAKNYQRGKNDKLAYIT

SEQ ID NO: 90494 - protein, 343 aa, Unknown
  Bacterial polypetide isolated from the Sargasso Sea
MVNNLYVVTPRGFCAGVEMAIKALTWMLKIYDEPVYCYHEIVHNDWIVQRFKDKNVIFIEDPKNLPKDSIIMLSAHGTAPMVEMEFKNTSMTSVNSVCPLVTKVHHEARRFSEDGKKIIYVGHKNHDEAIGALGVAPDNMILVESVEDIDQTNLHNDKVALLAQTTLAMSEWEPILNKAKSEYKNIELPRKSDLCYATTNRQKALINISNKVDKVLVVGSSTSSNTNALVTTINNLGKEAHRIETLDDLDNISLDNVDVAITAGASAPDHIVKEISEYLNPNNLEFFIDTTEEEYFPLPKELRGNITALSKLLKNMFPTNSKEAVNGISNDKSWSATEALSSL

SEQ ID NO: 90495 - protein, 288 aa, Unknown
  Bacterial polypetide isolated from the Sargasso Sea
MKIILAKDAGYCFGVRDAVNSAYEMSKKYGEVYMLGDIVHNESVVSDLEKEGVKVVEKLDQIPKNKPVLFRAHGTAKEVWKKAEDKKMNIIDATCPLVHEIHHEVKALHEEGRKIIIIGDHGHDEVIGIASQIPDPIIVATVEEAEDLRKTKKAGIVTQSTQTIENVQDIINILMTKVFDLRFVNTICFPTKRNQEQIKELSEVTDLMIIIGSFTSANSKRLAELSSERNENTFQVTCASEIDSSWFKDDVNSVGISAGASTPDWIIESVIKKVKEITNTQEKEIIHE

SEQ ID NO: 90496 - protein, 343 aa, Unknown
  Bacterial polypetide isolated from the Sargasso Sea
MVDNLYVVTPRGFCAGVEMAIKALTWMLKIYDEPVYCYHEIVHNDWIVQKFKEKNVIFIEDPKELPTNSIVMLSAHGTAPKVEMEFKNISMTSVNSVCPLVTKVHHEAKKFSENGKKIIYVGHKNHDEAIGALGVAPNNMILIETVEDLDNNSLQNENVALLAQTTLAMSEWEPILNKAKSEYENIELPRKSDLCYATTNRQKALINISNKVDKVLVVGSSTSSNTNALVTTINNLGKDAYRIETLADLRNLDLDGTDVAITAGASAPDHIVKEITEHLNPNNLEFYIDTTEEEYFPLPKELRRNITGLSKLLKNMFPKNDKDALNGISKDKSWSATEALSSL

SEQ ID NO: 90497 - protein, 274 aa, Unknown
  Bacterial polypetide isolated from the Sargasso Sea
MVNKVYLVTPRGFCAGVEMAIKALSWMLKIYDETIYCYHEIVHNKWIVNKFEGHNVVFVEDPSEIPEGAIVMLSAHGTSPSVENRFNEKATLTINSVCPLVTKVHHEAKKYTDQGAQIIYVGHKGHDEALGAIGVSPDNMHLVENIDDVENLNLQGETALLAQTTLAISEWEPIMNHSKKKYPNLSMPRKSDLCYATTNRQSAIVEILNEVNSVLVVGSENSSNTKALVEMVKSNGCDAHRIENVDDLTDLNLNGNIAITAGASAPDHLVFENN

SEQ ID NO: 90498 - protein, 288 aa, Unknown
  Bacterial polypetide isolated from the Sargasso Sea
MKIILAKDAGYCFGVRDAVNSAYEMSKKYGEVYMLGDIVHNESVVSDLEKEGVKVVEKLDQIPKDKPVLFRAHGTAKEVWKKAEDKKMNIIDATCPLVHEIHHEVKALHEEGRKIIIIGDHGHDEVIGIASQIPDPIIVATVEEAEELRKTKKAGIVTQSTQTIENVQDIINILMTKVFDLRFVNTICFPTKRNQEQIKELSEVTDLMIIIGSFTSANSKRLAELSSERNENTFQVTCAAEIDSSWFKDDVNSVGISAGASTPDWIIESVIKKVKEITNTQEKEIIHE

SEQ ID NO: 90499 - protein, 79 aa, Unknown
  Bacterial polypetide isolated from the Sargasso Sea
MYLSKSGTNAYLINSYDEIEKKWLEGIEKVGITSGASTPDKLVYEIVKKLEPKKVIRFHDIDEEIKFEIPRKVKKLLDE

SEQ ID NO: 90500 - protein, 176 aa, Unknown
  Bacterial polypetide isolated from the Sargasso Sea
SKNIYLVEKKNDVKNLPIPKTKQIAYVTQTTLSVDDTKDIIDEIKLHYENVLEPKKKDICYATTNRQEAVKNIAALSDYFFVIGSKNSSNSLRLVEVAKNYGSKNAILIDDINNFNPSLINTASKIGITASASSPEILISKMIAKIGEQFDLNIIESNYEKENTHFKIPQKLKEAI

SEQ ID NO: 90501 - protein, 169 aa, Unknown
  Bacterial polypetide isolated from the Sargasso Sea
FIKLIETVDEVNDLKFSKPLAYVTQTTLSVDDTKEIIDALKFKFPEIKGPIKEDICYATTNRQAAVKKIAPNCEMFFVIGSRNSSNSARLVEVAKKSGCKKSELIFYGKKAPLEKIKNCKTIGLSSGASAPEELVQNFIKEIKKNMNVSIEEVVTANERVVFKLPKELN

SEQ ID NO: 90502 - protein, 127 aa, Unknown
  Bacterial polypetide isolated from the Sargasso Sea
KFPDIKEPMKEDICYATTNRQMAVKNIAKNCDMFFVIGSRNSSNSVRLVEVAKKSGCENSQLIHSESSIPYDQIENCNTIGISSGASAPEILVENFINDLKNKFSISIDEIEIIKEDVVFKVPNKLN

SEQ ID NO: 90503 - protein, 210 aa, Unknown
  Bacterial polypetide isolated from the Sargasso Sea
VTKVHREAENLHKDGSHILLIGHKNHPEVIGTMGQIPSEGIDLIQSLGDAIKYNKKNNKNLAFITQTTLSVDDTKDIVDELKKRFPGIKEPKKEDICYATTNRQSAVKKIANKCEMFFVIGSRNSSNSLRLVEVAKNSGCKNSILLHSESGVPFDQIDKCKTIGISSGASAPEILVEQFLDEIKSKYNISVEEVEIIKEDVTFKIPGKLN

SEQ ID NO: 90504 - protein, 158 aa, Unknown
  Bacterial polypetide isolated from the Sargasso Sea
KLYFPSSQKLAYITQTTLSVFDTQDIVDALEKKYPSILAPKKSDICYATSNRQLSVQEMSKNVDAFFVIGAHNSSNSIRLVETAKRFGCKNSELIENINDFDYSTLAEFNTIGLTASASAPEEQLNMFIDQIKKVYAIEVLNFKEDENITFKIPNFLN

SEQ ID NO: 90505 - protein, 198 aa, Unknown
  Bacterial polypetide isolated from the Sargasso Sea
KKELPLILIGHRNHPEVIGTMGQTKGKIYLVEKKEDVIKLPLDAEKEIAYVTQTTLSIDDTKDIVKEIKKKFKNVLEPKKNDICYATTNRQEAVKNIAGNCDYFLVIGASNSSNSLRLVEVAKNYGSKKSILVEDVDSLNLSIFENIKNIGITASASSPEILVKKLLDKLKNNFDIKINEENYKREDVYFKVPQKLKN

SEQ ID NO: 90506 - protein, 110 aa, Unknown
  Bacterial polypetide isolated from the Sargasso Sea
MKNKNLKILLASPRGFCAGVDRAIEIVKKSIDKYGAPVYVRHEIVHNKHVVDSLKKIGAVFVEELEEIKDKTRPVIFSAHGVPKSVPKEASNLNMTYVDATCPLVSKVHR

SEQ ID NO: 90507 - protein, 156 aa, Unknown
  Bacterial polypetide isolated from the Sargasso Sea
KNSNKDIAYVTHTTLSVDDTKDIIDKLKIKFPHIKEPKKDDICYATTNRQSAVKNIAKLCEMFFVIGSRNSSNSVRLVEVAKNSGCEKSTLIHSESTTPFEEIDKCDTIGISSGASAPEILVNNFINNLKEKYEVEIEEVEIIKENIIFKIPKKLN

SEQ ID NO: 90508 - protein, 116 aa, Unknown
  Bacterial polypetide isolated from the Sargasso Sea
MKKELKIYLASPRGFCAGVKRAIDIVEKSINKFGSPVYVRHEIVHNKQVVEELKKKGAIFVDELSDIKDEKRPVIFSAHGVPKSVPQEAKSKNLSFVDATCPLVSKVHRESEQLHK

SEQ ID NO: 90509 - protein, 140 aa, Unknown
  Bacterial polypetide isolated from the Sargasso Sea
VDDTKEIIDLLKKKFPKIKGPVKEDICYATTNRQKAVKEIAKNCDLFFVIGSRNSSNSVRLVEVAKKAGCKNSFLMHHGRELPIEEIKSSTTIGISSGASAPERLVQNLINEIKLNFNVSIKEIKVAEEKVVFKLPKELN

SEQ ID NO: 90510 - protein, 110 aa, Unknown
  Bacterial polypetide isolated from the Sargasso Sea
MQNRNLKILLAAPRGFCAGVDRAIEIVKKSIDKYGSPVYVRHEIVHNKHVVDNLKKIGAIFVEELEEIKDKTRPVIFSAHGVPKSVPEEASNLNMTFVDATCSSCFKSHR

SEQ ID NO: 90511 - protein, 177 aa, Unknown
  Bacterial polypetide isolated from the Sargasso Sea
GQIPKDGIDLIENINDAKNYKKKDKKQLAYVTQTTLSVDDTEDIIKELKIKFPEIKEPKKEDICYATTNRQAAVKKIADKCDMFFVIGSRNSSNSLRLVEVAKKSGCKESLLIHSESNIPYEKLKNCKTIGISSGASAPEILVENFINSVKKKYEIKIEEVEIIKEDVTFKIPGKLN

SEQ ID NO: 90512 - protein, 119 aa, Unknown
  Bacterial polypetide isolated from the Sargasso Sea
MKEDICYATTNRQMAVKNIAQSCDMFFVIGSRNSSNSVRLVEVAKKSGCKNSQLIHSESSIPFDQIENCNTIGISSGASAPEILVENFINDLKNKFSISIDEVEIIKEDVVFKVPNKLN

SEQ ID NO: 90513 - protein, 156 aa, Unknown
  Bacterial polypetide isolated from the Sargasso Sea
MEIRLANTRGFCAGVDRAIEIVKKVIEMHGAPVYVKHEVVHNKTVVEELKRLGAIFVEDIKEIPEGEVVVYSAHGISKAVEFESEVRKLDVFDATCPLVSKVHAEVNTYAKMGFDCLLIGHKNHPEVEGTMGQFDTSFGGTITLIEDISDAKKLNL

SEQ ID NO: 90514 - protein, 219 aa, Unknown
  Bacterial polypetide isolated from the Sargasso Sea
MTYIDATCPLVSKVHREAENLHKAGNHILLIGHKNHPEVIGTIGQLPKGSIDLIESIEDVKNYNNKKKNIAYVTQTTLSVDDTREIIEKLRTKFPEIKEPKKEDICYATTNRQSAVKNIAKLCEMFFVIGSRNSSNSVRLVEVAKNSGCKKSSLIHSESTTPFEEIDKCNTIGISSGASAPEILVNNFINNLKEKYEVEIEEVEIIKENIIFKIPKKLN

SEQ ID NO: 90515 - protein, 209 aa, Unknown
  Bacterial polypetide isolated from the Sargasso Sea
HIEAERHHKNGFQIVMIGHRGHPETIGTMGQLPEGEVLLVEDELDVQNLEVRDNQNLAYVTQTTLSIDDTFSVVQALQKKFPAIQGPHKEDICYATTNRQLAVKEIANKIDALLVVGAPNSSNSKRLVEVGKRAGCEYSQLVQRASEIDFRALEGIKNLGITAGASAPEVLIDEVIDSFREKHLIDVEIVETAVENVNFKVPRVLREPA

SEQ ID NO: 90516 - protein, 252 aa, Unknown
  Bacterial polypetide isolated from the Sargasso Sea
SKNIGAPVYVNHEIVHNKYVIDELSDKGAVFLENINDAPTDRPFIFSAHGVSKDVEQHANKNNKIVINATCPLVTKVHVQAMKFFEMGYRIILIGHKNHPEVIGTMGQLPKNTIELVETVSDVMKLSVNDNDKFAYLTQTTLSLDDTKKIIEALKIRLPKISSSPKEDICYATSNRQKAIKEYAHLCDAFIVVGSSNSSNSNRLVEVAKNAGCENTILLENELNLNVNDYELMTSIGISSGASVPDVLVKNV

SEQ ID NO: 90517 - protein, 122 aa, Unknown
  Bacterial polypetide isolated from the Sargasso Sea
IEVPKKDDICYATQNRQDAVKQLALESDYIIVVGSKNSSNSNRLKELAEKCGCKSTLIDEFSDLNLEDIKKCKNIAITAGASAPESRVMEIAKSLEDYFGAKLIEDGEDTENVYFKMPPGLR

SEQ ID NO: 90518 - protein, 297 aa, Unknown
  Bacterial polypetide isolated from the Sargasso Sea
MDTRAFKRSLHHSERYNRRGFGRAEEVAGSLEEAYKSDLIQSIRDNGYVLEEGRVTIRLAEAFGFCWGVERAVAIAYETRRHYPTERIWITNEIIHNPSVNAHLREMDVLFIAVDEGVKDFSEVERGDVVILPAFGATVQEMQLLNERGCHIVDTTCPWVSKVWNSVERHKKQSFTSVIHGKVKHEETLATSSFAGTYLVVLDLEEAQLVCDYILGNGDRDTFVRRFAGATSPGFDPDRDLVRIGVANQTTMLKSETEEIGRLFERTLLRRYGPDEINDHFLAFNTICDATQERQDA

SEQ ID NO: 90519 - protein, 255 aa, Unknown
  Bacterial polypetide isolated from the Sargasso Sea
FVDELSDVKDENRPVIFSAHGVPKSVPKEAKLKNLSYVDATCPLVSKVHRESEQLNKKGYEILLIGHKNHPEVIGTMGQLPDGSIKLIETIDDAEALEVGNFTKPLAYITQTTLSVDDTAEIINCLKEKFPKIKGPIKEDICYATTNRQSAVKKIASKCDMFFVVGSRNSSNSVRLVEVARKAGCKNSQLMHSEKEIPFAEIDNSQTIGISSGASAPEKLVQTLINNIKKNRKVSIEEVVVAEEKVIFKLPKELN

SEQ ID NO: 90520 - protein, 254 aa, Unknown
  Bacterial polypetide isolated from the Sargasso Sea
VEEIDEIPDDSLVIFSAHGVSSEVEETTKARNLNFFDATCPLVTKVHMEVRKHAKANRDIILIGHEGHPEVEGTMGRHINSENSSIYLVQDENDALNINVNNSESLALVTQTTLSVDETISIIDILRKRFPNIEVPKKDDICYATQNRQDAVKQLALESDYIIVVGSKNSSNSNRLKELAEKCGCKSTLIDEFSDLNLEDIKKCKNIAITAGASAPESRVMEIAKSLEDYFGAKLIEDGVDNENVYFKMPPGLR

SEQ ID NO: 90521 - protein, 191 aa, Unknown
  Bacterial polypetide isolated from the Sargasso Sea
MKNKDLKIYLAAPRGFCAGVDRAIEIVKKSINKFGSPVYVRHEIVHNKHVVDNLKKIGAIFVEELSEIKDKTRPVIFSAHGVPKKVPKEAQDLKMEYIDATCPLVSKVHREAENLNKAGFHIFLIGHENHPEVVGTMGQIPEGSIELVETIDDVEDIDIPSNEKLAFVTQTTLSVDDTKDIINALKKKFPQ

SEQ ID NO: 90522 - protein, 291 aa, Unknown
  Bacterial polypetide isolated from the Sargasso Sea
MKNKELKILLSAPRGFCAGVERAIEIVEKSIQKFGAPVYVRHEIVHNKHVVDDLKNKGAIFVDELEEIKDKSRPVIFSAHGVPKKIPEDAKSYKMTYVDATCPLVSKVHREAENLNKAGYQIILIGHQNHPEVIGTMGQLPDGAIRLIQNEDEAQNYHAEKNDKIAYITQTTLSVDDTKEIIKILKNKYPSMKEPMKEDICYATTNRQAAVKNIAKQCDMFFVIGSRNSSNSVRLVEVAKKSGCGNAQLIHSESEIPYNEIEKFNTIGISSGASAPEVLVENFINALKNKF

SEQ ID NO: 90523 - protein, 239 aa, Unknown
  Bacterial polypetide isolated from the Sargasso Sea
FSAHGIPKSVLIEAKAKEMPFIDATCPLVIKVHNEAKRLYRDGAHIFLIGHEGHPEVIGTMGQIPLDAITLIQDKQDVKELKKINYKKVALITQTTLSVDDTKEIIDELKCIFPNIIQPPKEDICYATTNRQLAIKSIASKCDLIYVIGANNSSNSLRLVEVGKRSGCDETHLISDISEVNWKLVEKKQKIGLTAGASAPDILIQEFINELNQLYNVEIKKISVADENITFKIPRELNE

SEQ ID NO: 90524 - protein, 257 aa, Unknown
  Bacterial polypetide isolated from the Sargasso Sea
GQFFVENVTEIPLGSLAIYSAHGVSPVVRKIAEGRKLKVLDATCPLVTKVHGEAQRYAQKDYTIILIGHHKHVEVKGTVGEAPDRIIVVGNLKEVEKLVVQDENKVGYITQTTLSLDDTAEIISALKKRFPKIQGPAKNDICYATQNRQNAVKALSKEVDLVLVVGAPNSSNSVRLVEVARATGVKARRIESKEELNPEWFKGIRRIGVTAGASAPEDILQGIVSGLKKMFSSSKVRDLNLVQEDVTFALPAVLRSD

SEQ ID NO: 90525 - protein, 222 aa, Unknown
  Bacterial polypetide isolated from the Sargasso Sea
MTMTPLTIRLCGPRGFCAGVDRAIQIVVLALKRYGAPVYVRHEIVHNRYVVEGLEARGAVFVEELDEIPAEHREQPVVFSAHGVPKSVPADAESRNLFYLDATCPLVSKVHKQAMRHERLGRHVVLIGHAGHPEVIGTMGQLPEGAVSLVETVEDAERYEPADPENLGYVTQTTLSVQDTAAVIAKLTERFPNLTAPSADSICYATTNPQESVSAAAPGCDL

SEQ ID NO: 90526 - protein, 249 aa, Unknown
  Bacterial polypetide isolated from the Sargasso Sea
MNKKLNIYLAGPRGFCAGVDRAIEMVKEALKKYGKPVYVRHEIVHNKYVVENLKSEGAVFVEELDEIKDTSRPVIFSAHGVPKSVPEEALKLNLIYYDATCPLVSKIHKEVEHFDKKKLPVILIGHRNHPEVIGTMGQTNSEIHLVEKVADVRNLPLNFDEEIAYVTQTTLSVDDTKDIVDEIKNYFNNVIEPKKNDICYATTNRQEAVKKVASNCDYFLVIGASNSSNSLRLVEVAKNYGSKKAILVE

SEQ ID NO: 90527 - protein, 232 aa, Unknown
  Bacterial polypetide isolated from the Sargasso Sea
MKNKINIYLAAPRGFCAGVDRAIEMVELALEKWGAPVYVRHEIVHNRFVVDGLKKKGAIFVEEVSECPTDRPIIFSAHGVAKSVVSEANNRKMIFLDATCPLVSKVHLEAERHHKQGNQMIMIGHEGHPETIGTIGQLPAGEIILVETESDVAAVKPRNPEKLAYITQTTLSVDDTATIVKALKKRFPKIIGPHKEDICYATTNRQNAVKKIAQNIDALLVVGSPNSSNSRR

SEQ ID NO: 90528 - protein, 278 aa, Unknown
  Bacterial polypetide isolated from the Sargasso Sea
PIYVRHEIVHNKHVVENLKKIGAIFIEELSEIEDKTRPVIFSAHGVPKTVPKEAKNLNMEYIDATCPLVSKVHREAENLHKSGSHIILIGHKNHPEVVGTMGQIPKGGIDLIESVEDVNLYENKDNKDLAFVTQTTLSVDDTKEIINKLKKKFPNIKEPKKEDICYATTNRQAAVKKIAKECEMFFIIGSRNSSNSVRLVEVAKNSGCSKAELIHSESVIPYEKIANCSTIGISSGASAPEILVDEFIKNLKKKFVLKMEEIEIIKEEVTFKIPAKLS

SEQ ID NO: 90529 - protein, 292 aa, Unknown
  Bacterial polypetide isolated from the Sargasso Sea
MDTQAFRRSLHHSDRYNRRGFDSPTKRAQALEEAYQSDLISTIRDNGFSYTKGRLNIKLAQAFGFCWGVERAVAMAYETRRHYPNENIWITNEIIHNPSVNDHLRKMNVKFISAKNGIKDFSLVSNGDVVILPAFGATVQEMKLLHEKGCHIIDTTCPWVSKVWHTVEKHKKHVFTSIIHGKFKHEETLATSSFAGKYLVVLDLEEANYVSEYILGRGNRNEFMNKFAKACSSGFDPDKDLERVGVANQTTMLKSETEEIGKVFEKTMLKKFGPENLNGHFLAFNTICDATE

SEQ ID NO: 90530 - protein, 216 aa, Unknown
  Bacterial polypetide isolated from the Sargasso Sea
MKNKNLKIYLAAPRGFCAGVDRAIEIVKKSINKFGSPVYVRHEIVHNKHVVENLKKIGAIFVEELSEIKDKTRPVIFSAHGVPKKVPKEAQDLKMEYIDATCPLVSKVHREAENLNKAGFHIFLIGHKNHPEVVGTMGQIPEGSIELVETIDDVEDIDIQSNKKLAFVTQTTLSVDDTKDIIGALKKKFPQIKEPNKEDICYATTNRQAAVKRLLQ

SEQ ID NO: 90531 - protein, 210 aa, Unknown
  Bacterial polypetide isolated from the Sargasso Sea
VSKVHREAENLNKAGYQIILIGHKNHPEVIGTMGQLPDGAVRLVQNEDEAQNYHAEKNDKIAYITQTTLSVDDTKEIIKILKNKYPSMKEPMKEDICYATTNRQAAVKNIAKQCDMFFVIGSRNSSNSVRLVEVAKKSGCENVHLIHSESEIPYNEIEKFNTIGISSGASAPEVLVENFINALKNKFAIKINEVEIIKENVVFKIPNRLN

SEQ ID NO: 90532 - protein, 230 aa, Unknown
  Bacterial polypetide isolated from the Sargasso Sea
MEIRLANTRGFCAGVDRAIEIVKKVIEMHGAPVYVKHEVVHNKTVVEELKRLGAIFVEDIKEIPEGEVVVYSAHGISKAVEFESEVRKLDVFDATCPLVSKVHAEVNTYAKMGFDCLLIGHKNHPEVEGTMGQFDTSFGGTITLIEDILDAKKLNFKDSSRLAFVTQTTLSVDDTKEIKDFLTDRFPDIKGPKKDDICYATQNRQDAIKQLALESDLVLVIGSENSSNSN

SEQ ID NO: 90533 - protein, 171 aa, Unknown
  Bacterial polypetide isolated from the Sargasso Sea
MKNKELKVLLASPRGFCAGVDRAIEIVKKSIEKYGSPVYVRHEIVHNKHVVESLKKIGAIFVEELNEIDDKSRPVIFSAHGVPKSVPKEAANLKMEYVDATCPLVSKVHREAENLYKTGAHIILIGHKNHPEVIGTMGQIPKESIDLIENIKDVEKFENKENKDLAFITQT

SEQ ID NO: 90534 - protein, 235 aa, Unknown
  Bacterial polypetide isolated from the Sargasso Sea
MKNKELKILLSAPRGFCAGVERAIEIVEKSIQKFGAPVYVRHEIVHNKYVVDDLKNKGAIFVEELEEIKDKSRPVIFSAHGVPKKIPENAKSYKMTYVDATCPLVSKVHREAENLNKAGYHIILIGHENHPEVIGTMGQLNEGSIDLIQNEEDALNYQNKLDKKLAYITQTTLSVDDTKEIIKILKTNFPNIKEPMKEDICYATTNRQMAVKNIAKNCDMFFVIGSRNSSNSVRL

SEQ ID NO: 90535 - protein, 128 aa, Unknown
  Bacterial polypetide isolated from the Sargasso Sea
MGEFTIELANPRGFCAGVDRAIEIVERALELYGAPIYVRHEVVHNRYVVRNLKEKGAVFVEELEEIPDDSTVIFSAHGVARVVQNAAAGRELRVLDATCPLVTKVHTEVSRYGREGRTVILVGHAGHP

SEQ ID NO: 90536 - protein, 256 aa, Unknown
  Bacterial polypetide isolated from the Sargasso Sea
RSNFLVEELKDIKDASRPVIFSAHGVPKTVPEEATNKNMFYVDATCPLVTKVHKEAERHNKNGYKIILVGHKNHPEVIGTMGQLPNNNIVLIENVNQAKNVNLSGPVAYVTQTTLSVDDTRDIINVLKNKFPNIKGPIKEDICYATTNRQAAVKKIAPLCDIFFVIGSTNSSNSKRLVEVAKKAGCKKSELIHDNKKFPIKDILECKNIGLTSGASAPEILVQNFISEVKKYCTVSIKEISITKENVSFKLPSSVN

SEQ ID NO: 90537 - protein, 225 aa, Unknown
  Bacterial polypetide isolated from the Sargasso Sea
MKNKNLKILLASPRGFCAGVDRAIEIVKKSIDKYGSPVYVRHEIVHNKHVVDSLKKIGAVFVEELDEIKDKTRPVIFSAHGVPKSVPEEASNLNMTYIDATCPLVSKVHREAENLNKNNIHILLIGHKNHPEVIGTMGQLPKESIDLIESKDDAKKYSKKNEKKLAYITQTTLSVDDTKEIINILKSKFPEISEPKKEDICYATTNRQTAVKKIAKNCDMFFCYW

SEQ ID NO: 90538 - protein, 159 aa, Unknown
  Bacterial polypetide isolated from the Sargasso Sea
RSLTVSQPENLAYVTQTTLSLDDTIAIVKILYEQFPKILKPKSDDICYATQNRQDAVKQLALESEFIVVIGSRNSSNSNRLKELAEKCGATSVLIDGPEELDLKSLSKYNNIGITAGASAPESIVQSVVQAISLELNTVAKELGENKENIYFRLPPELR

SEQ ID NO: 90539 - protein, 190 aa, Unknown
  Bacterial polypetide isolated from the Sargasso Sea
MKNEVKIFLASPRGFCAGVERAIDIVEKTILKYGTPVYVRHEIVHNKQVVENLKKKGTIFVEELSEVRDLSRPVIFSAHGVPKTVPEEAKIKNLFYIDATCPLVSKVHRESEQLYKNGYDIILIGHKNHPEVVGTMGQLPSGSIRLIEQVGEVEDLNPESFKKPLAYITQTTLSVDDTAEIITKLKDKFP

SEQ ID NO: 90540 - protein, 281 aa, Unknown
  Bacterial polypetide isolated from the Sargasso Sea
MKNKHLKIMLAAPRGFCAGVDRAIEIVKKSIEKYGAPVYVRHEIVHNKHVVDSLKKIGAIFVEEIEEISDKTRPVIFSAHGVPKSVPKEAKNLKMIFVDATCPLVSKVHREAENLDKKDIHILLIGHKNHPEVIGTMGQLPDGKIDLIETIEDAQKFENEQNLKLAYITQTTLSVDDTRDIINVLKERFPDIHEPKKDDICYATTNRQAAVKKIAKDCDNFFVIGSRNSSNSVRLVEVAKNNGCSEAELIHSESIFPIEKISKCKTIGISSGASAPEVLVK

SEQ ID NO: 90541 - protein, 210 aa, Unknown
  Bacterial polypetide isolated from the Sargasso Sea
FKVHRESEQLNKNGFEILLIGHKNHPEVIGTMGQLPKGSIKLIETKNDVDLLKENDFKKPLAYITQTTLSVDDTAEIIEALKNKFPKIKGPIKEDICYATTNRQSAVKEIASKCDMFFVVGSRNSSNSVRLVEVAKKAGCNNSHLMHSEKEIPFNEIDNSEIIGISSGASAPEKLVQNLLDNLRKDRKVSIEEVIVAKEKVVFKLPKELN

SEQ ID NO: 90542 - protein, 251 aa, Unknown
  Bacterial polypetide isolated from the Sargasso Sea
VYVRHEIVHNKHVVDSLKKIGAIFVEELDEIKDKTRPVIFSAHGVPKSVPKEASNLNMTFVDATCPLVSKVHREAENLHKNGSHILLIGHRNHPEVVGTMGQLPKESIELIESVEDAEKYSKKNGNRIAYITQTTLSVDDTREIINVLKRKFPEINEPKKEDICYATTNRQSAVKKIAKNCDMFFVIGSRNSSNSVRLVEVAKNNGCDKSELIHSESKVPIDKISNCKTIGISSGASAPEILVEEFIDELK

SEQ ID NO: 90543 - protein, 246 aa, Unknown
  Bacterial polypetide isolated from the Sargasso Sea
KDKSRPVIFSAHGVPKKIPEDAKNYKMTYVDATCPLVSKVHREAENLNKAGYHIILIGHENHPEVIGTMGQLNEGSIDLIQNEEEATNYQNKLNKNLAYITQTTLSVDDTKEIIKILKNNFPNIKEPMKEDICYATTNRQMAVKNIAKNCDMFFVIGSRNSSNSVRLVEVAKKSGCENSQLIHSESSIPYDQIENCNTIGISSGASAPEILVENFINDLKNKFSISIDEVEIIKEDVVFKVPKKLN

SEQ ID NO: 90544 - protein, 219 aa, Unknown
  Bacterial polypetide isolated from the Sargasso Sea
MTYIDATCPLVSKVHREAENLHKAGNHILLIGHKNHPEVVGTIGQLPKGSIDLIESIEDVENYKNIKKNIAYVTQTTLSVDDTKEIIEKLRIKFPKIKEPKKEDICYATTNRQSAVKNIAKMCEMFFVIGSRNSSNSVRLVEVAKNSGCEKSTLIHSESTTPFEEIDKCNTIGISSGASAPEILVNNFISNLKEKYEVEIEEVEIIKENIIFKIPKKLN

SEQ ID NO: 90545 - protein, 191 aa, Unknown
  Bacterial polypetide isolated from the Sargasso Sea
VPEEATNLNMIFVDATCPLVSKVHREAENLHKRDIHILLIGHKNHPEVIGTMGQLPDGKIDLIETIEDAQKFQRGQSEKLAYITQTTLSVDDTRDIINVLKERFPDIYEPKKDDICYATTNRQAVVKKIAKDCDNFFVIGSRNSSNSVRLVEVAKNNGCSDAELIHSESIFPIEKISKCKTIGISSERISS

SEQ ID NO: 90546 - protein, 256 aa, Unknown
  Bacterial polypetide isolated from the Sargasso Sea
LDVYLAGPRGFCAGVERAILMVQEAIKKYGAPVYVRHEIVHNKYVVDNLKQEGAIFVEELDEIDQLDRPVIFSAHGVPKSVPKEAANMKLLYFDATCPLVSKIHREVENFERKNLPVILIGHRNHPEVIGTMGQTSKDIYLVENKADVRKLSIPQNQEIAYVTQTTLSVDDTKDIIDEIKLHFENVVEPKKKDICYATTNRQEAVKNIAELSDYFFVIGSKNSSNSLRLVEVAKIYGSSKAILIDEIDTFDPMMLK

SEQ ID NO: 90547 - protein, 230 aa, Unknown
  Bacterial polypetide isolated from the Sargasso Sea
FATKQNRRELKVFDATCPLVTKVHMEVTRASKKGIECVLIGHHGHPEVEGTMGQYDNEAGGIYLVETPEDVEKLSVKNPENLFYCSQTTLSVDDTADVIDALRAKFPAIDGPRKDDICYATQNRQDAVRDLADKVDVLLVVGAKNSSNSNRLRELADKMGTKAHLIDDASNVEADWFDNVNAVGVTAGASAPEVLVQQVIARLKELGGNQVVENPGEEENIVFAVPVELR

SEQ ID NO: 90548 - protein, 230 aa, Unknown
  Bacterial polypetide isolated from the Sargasso Sea
KSVPNSAKLKKIFFIDATCPLVSKVHREAEQLNKNGYKILLIGHSNHPEVIGTMGQLPEGSVKLIETKNDAENFENLSGKKKLAYITQTTLSVDDTYEIIKILKKKFPDIVSPKKDDICYATTNRQLAVKKIAPLCEVIFVIGSKNSSNSVRLVEVAKKSGCEKTFLIDSKKDSEINDILKYKNIGITSGASAPEKLLFDFINEIKKKTEVEVKIIEAAKEKVSFKLPKL

SEQ ID NO: 90549 - protein, 237 aa, Unknown
  Bacterial polypetide isolated from the Sargasso Sea
HGVSSEVEEKTKARNLSFFDATCPLVTKVHMEVRKHANANKDIILIGHEGHPEVEGTMGRHINSENSSIFLVQNERDAKNINILKKDNLALVTQTTLSVDETKSIIKILKDRFPKIEVPKKDDICYATQNRQDAVKQLALESDYMIVVGSKNSSNSNRLKELGEKCGCDSVLIDEFSDLNLEDLKNCKTISITAGASAPESRVMEIAKSLENYFDARLIESGHDNEDVYFKLPPGLR

SEQ ID NO: 90550 - protein, 201 aa, Unknown
  Bacterial polypetide isolated from the Sargasso Sea
MKNKELKILLSAPRGFCAGVERAIEIVEKSIQKYGAPVYVRHEIVHNKYVVDDLKNKGAIFVEELEEIEDKTRPVIFSAHGVPKKIPEDAKNYNMTYVDATCPLVSKVHREAENLNKAGYHLILIGHQNHPEVIGTMGQLPKGSIDLIQNEDEAKNYKIQNNKKISYVTQTTLSVDDTKDIIQILKERFPDIKEPLKEDIC

SEQ ID NO: 90551 - protein, 153 aa, Unknown
  Bacterial polypetide isolated from the Sargasso Sea
AYITQTTLSVDDTLEIVQALHARFPDIIGPHKEDICYATTNRQEAVKAVAPKVDALLVIGAPNSSNSRRLVEVGARAGCAYSQLVQRAVEIDWRALDGITALGITAGASAPQVLIDEVIDAFRARYDVTVEVVETAQENVEFKVPRVLRESAA

SEQ ID NO: 90552 - protein, 234 aa, Unknown
  Bacterial polypetide isolated from the Sargasso Sea
MKNKDLKILLSAPRGFCAGVERAIEIVEKSIKKYGSPVYVRHEIVHNKYVVDDLKSKGAIFVEELEEIEDKTRPVIFSAHGVPKKIPEDAKKYNMTYVDATCPLVSKVHREAENLNKAGYHLILIGHQNHPEVIGTMGQLPKGSIDLIQNEEEAKKYKIKNNKKISYVTQTTLSVDDTKDIIQILKDKFPDIKEPLKEDICYATTNRQMAVKNIAKKCDLFFVIGSRNSSNSVR

SEQ ID NO: 90553 - protein, 182 aa, Unknown
  Bacterial polypetide isolated from the Sargasso Sea
MKNKHLKIYLAAPRGFCAGVDRAIEIVKKSINKFGSPVYVRHEIVHNKHVVENLKKIGAIFVEEISEIKDKTRPVIFSAHGVPKKVPKEAQDLKMEYIDATCPLVSKVHREAENLNKAGFHIFLIGHENHPEVVGTMGQIPEGSIELVETIDDVKNLNIPSSKKLAFVTQTTLSVDDTKRYN

SEQ ID NO: 90554 - protein, 229 aa, Unknown
  Bacterial polypetide isolated from the Sargasso Sea
TKKRLKVFDATCPLVTKVHFEIHKFASQNIDVVLVGHSGHPEVEGTMGQYISEKGNIHLVETNDDIDKLKIENKNIAYVTQTTLSVDDTKSIVSCLKNKFPNIIGPRKDDICYATQNRQEAVKKILEFCDSLIVVGSQNSSNSQRLKEIGVQYGIKSYLIDDINQIDIDDLSSDKIIGITAGASAPEDTVASLVKFLLSKGARMSDKNLSFKSENITFSIPRELRPPNS

SEQ ID NO: 90555 - protein, 245 aa, Unknown
  Bacterial polypetide isolated from the Sargasso Sea
DKTRPVIFSAHGVPKSVPEEATNLKMIFVDATCPLVSKVHREAENLDKKNIHILLIGHKNHPEVIGTMGQLQDGKIDLIETIEDARKFEKGQNENLAYITQTTLSVDDTKDIINILKERFPDIHEPKKDDICYATTNRQAAVKKIAKNCDNFFVIGSRNSSNSVRLVEVAKNNGCSNAELIHSESIFPIEKISKCKTIGISSGASAPEVLVKEFIDNIKKEFTVQIEEVEIIKEDVTFKIPGKLN

SEQ ID NO: 90556 - protein, 203 aa, Unknown
  Bacterial polypetide isolated from the Sargasso Sea
MKNKELKILLSSPRGFCAGVERAIEIVEKSIKKYGAPVYVRHEIVHNKFVVDDLKNKGAIFVEELEEIKDKSRPVIFSAHGVPKKIPEDAKNYNMTYIDATCPLVSKVHREAENLYKAGYHLILIGHKNHPEVIGTMGQLPKGSINLIQNEEEAQKYNLKKTKKIAFVTQTTLSIDDTKNIIKVLKDRFPNIKEPFKEDICYA

SEQ ID NO: 90557 - protein, 187 aa, Unknown
  Bacterial polypetide isolated from the Sargasso Sea
MNKKLNVYLAGPRGFCAGVDRAIEMVKGALKKYGKPVYVRHEIVHNKYVVDSLKSEGAIFVEDLNEIDNKSRPVIFSAHGVPKSVPEEASKLNLLFFDATCPLVSKIHKEVEQFDKKKLPVILIGHRNHPEVIGTMGQTNNKIYLVENVSDVKKVPVNEYEKISYVTQTTLSVDDTKDIVKEIKSRF

SEQ ID NO: 90558 - protein, 160 aa, Unknown
  Bacterial polypetide isolated from the Sargasso Sea
GAPIYVRHEVVHNRPVVEDLQRKGAIFTDYIEDIPRGATVIYSAHGVSQEVRRIAKQRCLRVFDATCPLVTKVHMEVARLAKNGVECVLIGHNKHPEVEGTMGQYDNEDAGIHLVEAIECVHELQLKDASRCAYVTQTTLSVDDTQDIIKALRTRFPAIC

SEQ ID NO: 90559 - protein, 178 aa, Unknown
  Bacterial polypetide isolated from the Sargasso Sea
MIKQLTLAAPRGFCAGVDRAVRIVEVSLEKFGQPVYVRHEIVHNKTVVDGLAAKGAIFVSELDEVPAGAPVVFSAHGVSRAVVAAADERRMIAVDATCPLVTKVHIEARRHADNNRHLLLIGHAGHPEIEGTMGQVNADQVTLIETVEDARTVQPPEGSNLAFATQTTLSVDDTAEII

SEQ ID NO: 90560 - protein, 189 aa, Unknown
  Bacterial polypetide isolated from the Sargasso Sea
MKTNHLKILLAAPRGFCAGVDRAIEIVKKSVEKYGAPVYVRHEIVHNKHVVDNLKKIGAIFVEEIDEIEDKSRPVIFSAHGVPKSVPQEAENLNMIFVDATCPLVSKVHREAENLDKKDVHVLLIGHKNHPEVVGTMGQVPDGKIDLIETIDDAKNYQRNNINKLAYITQTTLSVDDTKDIINVLKERF

SEQ ID NO: 90561 - protein, 238 aa, Unknown
  Bacterial polypetide isolated from the Sargasso Sea
SAHGVPKSVPEEARLKKLSFVDATCPLVSKVHRESEQLNKNGYDILLIGHKDHPEVIGTMGQLPNGSIKLIETKDDVEILNTKDFKKPLAYITQTTLSVDDTAEIIQVLKNKFPKIKGPIKEDICYATTNRQTAVKEIASKCDMFFVVGSRNSSNSVRLVEVAKKAGCNNSHLMHSEKEIPYNEIENSKTIGISSGASAPEKLVQSLLDNIRKDRKVSIEEVIVAEEKVVFKLPKELN

SEQ ID NO: 90562 - protein, 159 aa, Unknown
  Bacterial polypetide isolated from the Sargasso Sea
VRDSQNLAFVTQTTLSIDDTLSVVQALQKRFPAIQGPHKEDICYATTNRQLAVKEIAKKIDALLVVGAPNSSNSKRLVEVGRRAGCKYSQLVQRADEIDFRALKGIETLGVTAGASAPEILINEVIDSFRENHRVDVEIVETAVENVNFKVPRVLREPA

SEQ ID NO: 90563 - protein, 114 aa, Unknown
  Bacterial polypetide isolated from the Sargasso Sea
MKNKEIKILLSAPRGFCAGVERAIEIVEKSIQKYGAPVYVRHEIVHNKYVVDDLKNKGAIFVEELEEIEDKSRPVIFSAHGVPKKIPDDAKNYNMTYVDATCPLVSKVHREAEN

SEQ ID NO: 90564 - protein, 281 aa, Unknown
  Bacterial polypetide isolated from the Sargasso Sea
RGFRAGVERAIGIVNRAIEMFDEEIYVKHEVVHNKNVIEELTKKGVVFIESLTEVPDKSILIYSAHGVSKEVADIAQKKNLTIFDATCPLVTKVHFEIHKYARENIDVILIGHNGHPEVEGTMGQYKSREGKIYLVESKADVETLEIKNKKISYVTQTTLSVDDTQDIVDALKEKYPNIEGPKKSDICYATQNRQEAVKKILDLCDALIVVGSQNSSNSQRLKEIAIQYGKDAYLIDHESQLDINKLGTSKVIGITAGASAPEHTVQSLIRFLINNGAKMS

SEQ ID NO: 90565 - protein, 311 aa, Unknown
  Bacterial polypetide isolated from the Sargasso Sea
KELKILLSAPRGFCAGVERAIEIVEKSIKKFGAPVYVRHEIVHNKHVVDDLKNKGAIFVEELEEIKDKSRPVIFSAHGVPKKIPEDANNYKMVYVDATCPLVSKVHREAENLNKAGYHILLIGHKNHPEVIGTMGQLTEGSIDLIQSEEDASNYKNNLDKKIAYITQTTLSVDDTKEIIKILKNKFPDIKEPMKEDICYATTNRQMAVKNIAKNCDMFFVIGSRNSSNSVRLVEVAKKSGCKNSQLIHSESSIPFDQIENCNTIGISSGASAPEILVENFINDLKNKFSISIDEVEIIKEDVVFKVPNKLN

SEQ ID NO: 90566 - protein, 235 aa, Unknown
  Bacterial polypetide isolated from the Sargasso Sea
GVSEKVEKNAYKKNLSVIDATCPLVKKVHIEALRYHDKGYKIILVGHNGHPEVEGTAGRIPGGVQVVETIDQIDQLDYKPNDRLAYVTQTTLSVDDTREIIKSLKIRFPKIQGPDVKDICYATQNRQKAVRDLANCSDIVLILRNKNSSNSVRLAEISSLTGVPTYRISDKNEVKFEWFDNAFTIGITAGASTPEILVEELVGFLKEKYGKNIDVEILDGTKEKVNFNLPKELID

SEQ ID NO: 90567 - protein, 255 aa, Unknown
  Bacterial polypetide isolated from the Sargasso Sea
MKNISEVPDNSIIIFSAHGVSSKIEEAVKARNLKFFDATCPLVTKVHMEVIRHGRANRDIILIGHEGHPEVEGTMGRYFSQNGKIYLVQDLEEAMEVSVNQPKNVAYVTQTTLSVDETKDIICELTRKFPHIIGPKKDDICYATQNRQDAVKQLALETDFIIVVGSRASSNSNRLKELANKCGVNSILIDEFSDLDLDELKGCKNIGLTAGASAPESKVQEIILNLSTFLDAEIEEKGGVKENISFKLPPELRAS

SEQ ID NO: 90568 - protein, 126 aa, Unknown
  Bacterial polypetide isolated from the Sargasso Sea
MKVKNNHLKILLAAPRGFCAGVDRAIEIVKKSIEKYGAPVYVRHEIVHNKHVVDGLKKIGAIFVEEIDEIEDKTRPVIFSAHGVPKSVPEEATNLNMIFIDATCPLVSKVHREAENLHKRDIHILL

SEQ ID NO: 90569 - protein, 219 aa, Unknown
  Bacterial polypetide isolated from the Sargasso Sea
MKNEIKIYLAAPRGFCAGVDRAIEIVKKALDKYGSPVYVRHEIVHNKNVVESLKKLGAVFVEELSEIKDVSRPVIFSAHGVPKKIPEEAKSKKIFYVDATCPLVSKVHRETEQLFKKGFDIVLIGHKNHPEVIGTMGQLPTGSIKLIETVGDVKNLSFSKPVAYVTQTTLSVDDTKEIIDALKQKFPEIKGPIKEDICYATTNRQSAVKKNAPNCEMFF

SEQ ID NO: 90570 - protein, 216 aa, Unknown
  Bacterial polypetide isolated from the Sargasso Sea
MKSKEIKILLAAPRGFCAGVERAIEIVKKSINKYGAPVYVRHEIVHNKHVVDGLKKIGAIFVEELDEIKDKTRPVIFSAHGVPKKVPIEAENFKMEYVDATCPLVSKVHREAENLNKNGLQILLIGHKNHPEVIGTMGQIPEGEIDLIENVDDANNYENKSKKKLAFVTQTTLSVDDTKEIILALKKKFPEIREPKKEDICYATTNRQAAVKKIAE

SEQ ID NO: 90571 - protein, 203 aa, Unknown
  Bacterial polypetide isolated from the Sargasso Sea
EAERHNKNGYKIILIGHKGHPEVIGTMGQIQKENIVLIETIDDAKKLKIDGQVAYVTQTTLSVDDTKDIIKVLEKKFPGINAPVKEDICYATTNRQNAVKKVASQCDMFLVIGSDNSSNSKRLVEVAKKAGCNKAKLIDFKRQLPLKEISECNTIGLTSGASAPEKLVQDFISEIKKHTKVSIDEYITSKENVTFKLPSSLTS

SEQ ID NO: 90572 - protein, 293 aa, Unknown
  Bacterial polypetide isolated from the Sargasso Sea
MNSIKNLTKPNKNLYLASPRGFCAGVERAIKIVEQAIKLHGKPVYVKHEIVHNKHVVKRLSNDGAIFVEDLDDIPENANVIFSAHGVAKKISEEAINNKLNVFDATCPLVTKVHLEAIKLNNNGYHIFLIGHDGHPEIEGTRGQVPEDSITLIQTVEEAETVTAPKKRLAWLSQTTLSVDDTKEIVTTLTARFNDILGPKKGDICYATTNRQQAVKEIAPLVEIMLVVGSENSSNSQRLVEVAQKAGCKKSFLISDVNFIDWNEVDQIQNIGLSSGASAPETLIEEIRNKFSE

SEQ ID NO: 90573 - protein, 225 aa, Unknown
  Bacterial polypetide isolated from the Sargasso Sea
MKNKKIKILLSAPRGFCAGVERAIEIVEKSIQKYGAPVYVRHEIVHNKYVVDDLKNKGAIFVEELEEIEDKTRPVIFSAHGVPKKIPEDAKNYNMTYVDATCPLVSKVHREAENLNKAGYHLILIGHQNHPEVIGTMGQLPKGSIDLIQNENEAKNYKPQNNKKISYVTQTTLSVDDTKDIIQILKNKFPDIKDPLKEDICYATTNRQMADKNIANKCGLILCNW

SEQ ID NO: 90574 - protein, 207 aa, Unknown
  Bacterial polypetide isolated from the Sargasso Sea
MSKKIKEIVLANPRGFCAGVDRAIDIVEKSLEKYNEPVYVRHQVVHNKRVVEGLEKKGVKFVKEVSEIPDNAVAIFSAHGVSSEVENEAKSRDFMYFDATCPLVTKVHLEVQKHAKKGRDIILIGHRGHPEVIGTLGRHPKNSGTNIYLIETRKDIDKLKVNSDSLAYVTQTTLSVDETKELIDVLKKKFPKIIGPSADDICYATQK

SEQ ID NO: 90575 - protein, 156 aa, Unknown
  Bacterial polypetide isolated from the Sargasso Sea
ENFAYTTQTTLSVDDTRGIIDALRERFPAMQGPKNDDICYATQNRQDAVRDLAKRCDLVLVVGSPNSSNSNRLSELARREGVESYLIDGAHEIDPAWVVGKQHIGVTAGASAPQVLVDGVLARLAELGASGVGELDGEPESMVFALPKELRLRLVD

SEQ ID NO: 90576 - protein, 249 aa, Unknown
  Bacterial polypetide isolated from the Sargasso Sea
MKKELKIYLASPRGFCAGVKRAIEIVEKSIKKFGAPVYVRHEIVHNKQVVEELKEKGAIFVDELSDVNDISRPVIFSAHGVPKSVPKEAKLKNLSFVDATCPLVSKVHRESEQLNKNGFDILLIGHKNHPEVIGTMGQLPKGSITLIETKNDVELIKKDKFKKPLAYITQTTLSVDDTAEIIEALKNKFPKIKGPIKEDICYATTNRQSAVKEIASKCDMFFVVGSRNSSNSVRLVEVAKKAGCNNSHL

SEQ ID NO: 90577 - protein, 188 aa, Unknown
  Bacterial polypetide isolated from the Sargasso Sea
HKNHPEVIGTMGQVANGKIDLIETIDDAKNYQKGKNDKLAYITQTTLSVDDTKDIINILKKRFPDIHEPKKDDICYATTNRQAAVKKIAKECDNLFVIGSRNSSNSVRLVEVAKNNGCEHAELIHSESTFPLEKISKCKTIGISSGASAPEVLVNEFIENIKKKFTVEIEEVEIVKEDVTFKIPGKLN

SEQ ID NO: 90578 - protein, 155 aa, Unknown
  Bacterial polypetide isolated from the Sargasso Sea
ISNKQLSFITQTTLSVDDTKDIIAALKSKFPDIKEPKKDDICYATTNRQSAVKEIADKCDMFFVIGSRNSSNSVRLVEVAKNSGCGSAELIHSESPVPIDKIKGCNTIGISSGASAPEILVEKFIAELKNQFKVNIEEVEIVKENITFKIPGKLN

SEQ ID NO: 90579 - protein, 193 aa, Unknown
  Bacterial polypetide isolated from the Sargasso Sea
MLIGHAGHPEVIGTMGQLPPGSMTLIETEEDAEKLEVTNPENLAFVTQTTLSLDDTAKIIEILQRRFPSISVPKKEDICYATTNRQHAVKMIAEKADAILVLGAPNSSNSNRLVEVAKREGCTRSVLVERARDIDWTKLEGIETLGITAGASAPEVLVEEVIDACRERYDVTVETITLTEENVTFKLPRQLAS

SEQ ID NO: 90580 - protein, 252 aa, Unknown
  Bacterial polypetide isolated from the Sargasso Sea
MQKLTGKKLVLADPRGFCAGVQRAIDIVDKAIELFGNPIYVKHEVVHNKFVIEKLKDKGVIFIEDIGSVPENSIIIFSAHGVSSKVKEESKKRNLKIFDATCPLVTKVHLEVHKYASENKDVILIGHRGHPEIEGTMGQFNSESGKIHLIEDEDSVEKIDITNKDVAYVTQTTLSVDDTRSIIDKIKIKFPNIVSPAKDDICYATQNRQDAVKSILKFCDCLIVVGSVNSSNSKRLTELAGKQNIVAYLVDN

SEQ ID NO: 90581 - protein, 237 aa, Unknown
  Bacterial polypetide isolated from the Sargasso Sea
MDILLANPRGFCAGVDRAISIVERALDIFEKPIYVRHEVVHNKYVVDGLKNRGAVFVEELHQVPDDSIVIFSAHGVSQAVRSEAKRRELKVFDATCPLVTKVHMEVTRASRKGIECILIGHHGHPEVEGTMGQYDNDAGGIYLVETVDDVIALNVKDAKNLFYCSQTTLSVDDTADVIDALREKFPAIDGPRKDDICYATQNRQDAVRDLADKVDVLLVVGAKNSSNSNRLRELADK

SEQ ID NO: 90582 - protein, 210 aa, Unknown
  Bacterial polypetide isolated from the Sargasso Sea
MKNKEIRILLSAPRGFCAGVERAIEIVEKSIQKYGAPVYVRHEIVHNKYVVDDLKNKGAVFVEELEEIEDKSRPVIFSAHGVPKKIPEDAKNYNMTYVDATCPLVSKVHREAENLHKAGYHLILIGHQNHPEVIGTMGQLPNGSIDLIQNEDEAKKYKINNQDKISYVTQTTLSVDDTKDIIKILKKRFPNIKEPQKEDICYATTIDKWQ

SEQ ID NO: 90583 - protein, 269 aa, Unknown
  Bacterial polypetide isolated from the Sargasso Sea
MGSPVYVRHEIVHNTQVVENLKKLGAIFVEELSEIEDSSRPVIFSAHGVPKSVPEEASFKKMFYIDATCPLVTKVHREAESLHKNGYDVILIGHKNHPEVLGTMGQLPKGAIKLIETVKQAQNLNINEIKKPVAYVTQTTLSVDDTKDIIEVIKGKFPEIKSPTKEDICYATTNRQEAVKKIAPLCDMFFVVGSKNSSNSQRLVEVAKKSGCFSSELITFNEKIPIDSIIKCNKIGITSGASAPEKLVQNLIFEIKKHCNVSMEEVVLT

SEQ ID NO: 90584 - protein, 246 aa, Unknown
  Bacterial polypetide isolated from the Sargasso Sea
TDKTRPVIFSAHGVPKSVPEEATNLKMIFVDATCPLVSKVHREAENLDKKNIHILLIGHKNHPEVIGTMGQLPMGKIDLIETIKDAQKFEKGKNEKLAYITQTTLSVDDTKDIINVLKKRFPDIHEPKKDDICYATTNRQAAVKKIAKDCDNFFVIGSRNSSNSVRLVEVAKNNGCSDAELIHSESIFPIDKISRCKTIGISSGASAPEVLVKEFIDNIKKEFTVQIEEVEIVKEDITFKIPGKLN

SEQ ID NO: 90585 - protein, 223 aa, Unknown
  Bacterial polypetide isolated from the Sargasso Sea
MKNKEIKILLSAPRGFCAGVERAIEIVEKSIRKYGAPVYVRHEIVHNKYVVDDLKNKGAIFVEELEEIEDKSRPVIFSAHGVPKKIPEDAKSYNMTYVDATCPLVSKVHREAENLHKAGYHLILIGHQNHPEVIGTMGQLPNGSIDLIQNEDEAKKYKTRNPDKISYVTQTTLSVDDTKEIIKILKERFPNIKEPQKEDICYANTNRQMAVKISQKNVTCFLL

SEQ ID NO: 90586 - protein, 227 aa, Unknown
  Bacterial polypetide isolated from the Sargasso Sea
KDAKSYNMTYVDATCPLVSKVHREAENLNKAGYHLILIGHQNHPEVIGTMGQLPKGSIDLIQNEDEAKKYKLQKNKKISYVTQTTLSVDDTKDIIQILKNRFPDIKEPLKEDICYATTNRQMAVKNIAKKCDLFFVIGSRNSSNSVRLVEVAKKSGCSNSILIHSQSEIPFDLIKNSNTIGISSGASAPEILVNNFIKELKNRFTVSIDEVEIIKENVVFKAPKKLN

SEQ ID NO: 90587 - protein, 254 aa, Unknown
  Bacterial polypetide isolated from the Sargasso Sea
MIEDNKNLNLNKNLYLASPRGFCAGVERAIKIVEQAIKIHGKPVYVKHEIVHNKHVVKRLSEDGAIFVESFQNVPKNSIVIFSAHGVAKKVVNEAKDYDLNIFDATCPLVTKVHLEAIKLHNNGYHILLVGHDGHPEIEGTRGQVPKESITLIQNLKEAKTFRSKEKKLAWLSQTTLSVDDTSEIVKTLTKRFPKIIGPKKGDICYATTNRQMAVKKIASNVEIMLIVGSENSSNSQRLVEVAKNEGCVNSYLV

SEQ ID NO: 90588 - protein, 237 aa, Unknown
  Bacterial polypetide isolated from the Sargasso Sea
MKKQNINLYLASPRGFCAGVDRAVKIVEKAIKKFGSPVYVRHEIVHNKEVVNSLSKKGAVFINEVYEAPKNSTIIFSAHGVPKSVFTEAKNRNMISIDATCPLVTKVHNETHKNFVEGRHILLIGHRNHPEVVGTMGQVSEGFVTLVETEKDAKNVVVRDPCNLAYATQTTLSVDETEKILKILKNRFPKIKGPSSNDICYATTNRQLAVKSMTKICDCILVIGAENSSNSKRLVEV

SEQ ID NO: 90589 - protein, 270 aa, Unknown
  Bacterial polypetide isolated from the Sargasso Sea
MKVLVTNPRGFCAGVVRAIDIVELAIKKFGEPVYVKHQIVHNPNVVNDVEQQGAITVEEIHEIPDGSVVVFSAHGSAPEDYKLANEKKLKIIDATCPLVTKVHNEAKKYSNENKSIVLVGHEGHQEVKGTMGQTDMILIDERKEFPVDKIKDLKNVAVISQTTLSVNDTAKAIENIKEIIPDVTVRNDICYATTNRQDATELLADQCDLVLVIGANNSSNCQRLKDVAIRKGVPSYLILGPEEINFDWLKNVKTVGITSGASTPEKMVKK

SEQ ID NO: 90590 - protein, 220 aa, Unknown
  Bacterial polypetide isolated from the Sargasso Sea
MTYVDATCPLVSKVHREAENLCKAGYHIILIGHENHPEVIGTMGQLKEGSIDLIQNEEEAKNYQNKLDKKLAYITQTTLSVDDTKEIIKILKTNFPNIKEPMKEDICYATTNRQMAVKNIAKNCDMFFVIGSRNSSNSVRLVEVAKKSGCENSQLIHSKSSIPFDLIENCNTIGISSGASAPEILVENFINDLKNKFSISIDEVEIIKEDVVFKAPKKLN

SEQ ID NO: 90591 - protein, 188 aa, Unknown
  Bacterial polypetide isolated from the Sargasso Sea
MKNKNLKILLASPRGFCAGVDRAIEIVKKSIDKYGAPVYVRHEIVHNKHVVDSLKKIGAVFVEELEEIKDKTRPVIFSAHGVPKSVPKEASNLNMTYVDATCPLVSKVHREAENLHKNGSHILLIGHKNHPEVVGTMGQLPSDCIDLIENVNDAEKYSKKNGSKLAYITQTTLSVDDTREIINVLKNK

SEQ ID NO: 90592 - protein, 204 aa, Unknown
  Bacterial polypetide isolated from the Sargasso Sea
GRKKMSNKNLKIYLAAPRGFCAGVDRAIEIVKKSIDKFGAPVYVRHEIVHNKHVVESLKKIGAIFVEELDEIKDKSRPVIFSAHGVPKSVPEEASNLNMMFVDATCPLVSKVHREAENLNKQGHHILLIGHKNHPEVIGTMGQLPEGSIDLIENIEDANKYENVKKKHLSFITQTTLSVDDTKDIIAALKSKLPDIKEPKKDDI

SEQ ID NO: 90593 - protein, 264 aa, Unknown
  Bacterial polypetide isolated from the Sargasso Sea
SVNDHLRKMNVKFISAKNGIKDFSLVSNGDVVILPAFGATVQEMKLLHEKGCHIIDTTCPWVSKVWHTVEKHKKHVFTSIIHGKFKHEETLATSSFAGKYLVLLDLEEANYVSEYILGRGNRNEFMNKFAKACSNGFDPDKDLNRVGVANQTTMLKSETEEIGKVFERTMLKKFGPENLNSHFLAFNTICDATEERQDAMFSLVDEDLDILVVIGGFNSSNTTHLQEIAITKNISSFHIDTPERISVKENSIFHKPLGSDLELK

SEQ ID NO: 90594 - protein, 282 aa, Unknown
  Bacterial polypetide isolated from the Sargasso Sea
MKNKELKILLSAPRGFCAGVERAIEIVEKSIQKFGAPVYVRHEIVHNKYVVDDLKNKGAIFVEELEEIKDKSRPVIFSAHGVPKKIPEDAKNYKMTYVDATCPLVSKVHREAENLSKAGYHIILIGHENHPEVIGTMGQLNEGSIDLIQNEEDALNYDNKLDKKLAYITQTTLSVDDTKEIIKILKTNFPNIKEPMKEDICYATTNRQMAVKNIAKNCDMFFVIGSRNSSNSVRLVEVAKKSGCENSQLIHSESSVPYDQIENCNTIGISSGASAPEILVKI

SEQ ID NO: 90595 - protein, 246 aa, Unknown
  Bacterial polypetide isolated from the Sargasso Sea
MKRIKLANPRGFCAGVDRAIDIVSKALEIYDDPVYVRHEVVHNRKVVDDLKSRGAVFVEELSEIPDDGITIFSAHGISASVENEAEDRKLKFFDATCPLVSKVHKEVIRFASVGKDIIMIGHKNHPEVEGTLGRFPEHSQGKMYLVENLEQAKTIKVNQSDNLCLVTQTTLSVSDTEEIVEELKTRFPLMQEPKSEDICYATQNRQDAVKQLALESDLIIVVGSQNSSNSTRLKELAENWESSLCS

SEQ ID NO: 90596 - protein, 234 aa, Unknown
  Bacterial polypetide isolated from the Sargasso Sea
VSQAVRQEAKARGLRVFDATCPLVTKVHLQVTRASRKGIECILIGHEGHPEVEGTMGQYDNPNGGVYLIESPADVEALEVRDPNNLCFVTQTTLSVDDTLDIIVALQKRFPSIEGPRKDDICYATQNRQDAVRNLSADVDLLIVVGSKNSSNSNRLRELALKTGTQSYLVDTADDVESSWFDNVTRVAVTAGASAPEVLVQQVVQAIATLAPSVVTEVEGRKEDTVFAVPAELR

SEQ ID NO: 90597 - protein, 163 aa, Unknown
  Bacterial polypetide isolated from the Sargasso Sea
MKLKYYHAERIDKIAYITQTTLSVDDTKEIIKILKKKYPKIKEPMKEDICYATTNRQAAVKNIAKQCEMFFVIGSRNSSNSVRLVEVAKKSGCENAHLIHSESEIPYNEIEKFNTIGISSGASAPEVLVENFINSLKNKFTLKINEVEIIKENVVFKVPNKLN

SEQ ID NO: 90598 - protein, 228 aa, Unknown
  Bacterial polypetide isolated from the Sargasso Sea
MKLLVAAPRGFCAGVDRAIEIVEKCLQKYGKPVYVRHQIVHNKYVVEDLERKGAIFVKELFECPKDRPVVFSAHGVARSIFSDAKERNLQYVDATCPLVTKVHIEVNRYHKLGYQIIMIGHKNHPETIGTMGQLPSGEVLLVENSKDVDAINPRDENKLAYVTQTTLSIDDTLEIGNALKNRFPGIVAPHKEDICYATTNRQNAVKKISPLIDGFIVVGSINSRTQKG

SEQ ID NO: 90599 - protein, 240 aa, Unknown
  Bacterial polypetide isolated from the Sargasso Sea
MKEKEIRILLAAPRGFCAGVDRAIEIVKKSIDKFGAPVYVRHEIVHNKHVVESLKKIGAVFVEELSEVKDKSRPIIFSAHGVPKSVPKEAENLKMEYIDATCPLVSKVHREAENLNKNGSHILLIGHKNHPEVIGTMGQIPVDGIDLIESVEDAKNYNKKVSKNIAYVTQTTLSVDDTKEIIRELKNKFPEIQEPKKEDICYATTNRQAAVKKIAEKCDMFFVIGSRNSSNSVRLVEVAK

SEQ ID NO: 90600 - protein, 162 aa, Unknown
  Bacterial polypetide isolated from the Sargasso Sea
KTQKNISITKKNNLAVVTQTTLSVDETRSIIDILKDRFPNISIPKKDDICYATQNRQDAVKQLALESDFMIVVGSKNSSNSNRLRELGEKCGCKSVLIDEFNDLDLNELMNYSNISITAGASAPESRVMEIAKSLESHIGAEIVQHGEDNENIYFKLPPGLR

SEQ ID NO: 90601 - protein, 113 aa, Unknown
  Bacterial polypetide isolated from the Sargasso Sea
QNRQDAVKQLASECDVLLVVGSPNSSNSNRLRELAERMGTPAYLIDGAEDLKREWFDGVSGIGITAGASAPEVLVRGVVDQLRAWGAEGETELDGRPENITFSMPKELRVKAL

SEQ ID NO: 90602 - protein, 133 aa, Unknown
  Bacterial polypetide isolated from the Sargasso Sea
MNKTIDVYLAGPRGFCAGVDRAILMVQEAIKKYGAPVYVRHEIVHNKYVVDSLIAEGAIFIEELNEINQIDRPVIFSAHGVPKSVPKEAEELKLLYFDATCPLVSKIHREVENFERKKLPVILIGHKNHPEVV

SEQ ID NO: 90603 - protein, 148 aa, Unknown
  Bacterial polypetide isolated from the Sargasso Sea
MDQQIETQNKINSGNLLEVILASPRGFCAGVDRAITIVEKALEKFGPPIYVRHEIVHNRHVVSRLREKGVIFVDELDQVPEGAHAIFSAHGVSPQVREQALERNLEVLDATCPLVTKVHVEAKRYAQKEFIILLIGHREHVEVEGTFG

SEQ ID NO: 90604 - protein, 140 aa, Unknown
  Bacterial polypetide isolated from the Sargasso Sea
MKNKELKILLSAPRGFCAGVERAIEIVEKSIEKYGSPVYVRHEIVHNKYVVDDLKNKGAIFVEELNEIKDKTRPVIFSAHGVPKKIPKDAENLNMTYVDATCPLVSKVHREAENLHKAGYHLILIGHQNHPRVIGTMGQL

SEQ ID NO: 90605 - protein, 239 aa, Unknown
  Bacterial polypetide isolated from the Sargasso Sea
FSAHGVPKTVPEEAENKKMFYIDATCPLVTKVHKESERHFKNGYQIILVGHKGHPEVIGTMGQLPKGSIKLIETEEDATNLKKDEFDRPVAYVTQTTLSIDDTKNIIEILKKKFPNIKSSIKEDICYATTNRQNAVKQIAGNCDMFFVIGSENSSNSKRLVEVAKKSGCKRAELFDFSKKLPISEIINNKKIGLTSGASAPEKLIQDFITEVKKHCKVSIEEVVTTEEKVTFKLPRSLS

SEQ ID NO: 90606 - protein, 255 aa, Unknown
  Bacterial polypetide isolated from the Sargasso Sea
MENKEIKILLAAPRGFCAGVVRAIEIVEKTLKKYGSPVYVRHEIVHNKYVVENLKQKGAIFVEELSDIKDATRPVIFSAHGVPKKVPEEAIKKKMFYVDATCPLVTKVHKEAERHNKNGYKIILIGHKDHPEVIGTMGQIPKDKMILVENVEDAKKVNLTGPVAYVTQTTLSVDDTKDIIEILKNKFPDIRGPIKEDICYATTNRQEAVKKIAPLCDMFFVIGSSNSSNSKRLVEVAKKAGCKNAELINFEKKYL

SEQ ID NO: 90607 - protein, 282 aa, Unknown
  Bacterial polypetide isolated from the Sargasso Sea
MNKKLDVYLAGPRGFCAGVERAILMVQEAIKKYGAPVYVRHEIVHNKYVVDNLKNEGAIFVEELNEIDQLDRPVIFSAHGVPKSVPEEAANMNLLYFDATCPLVSKIHREVENFERKNLPVILIGHQNHPEVIGTMGQTSKDIYLVEKKKEVSKLPIPKNQEIAYVTQTTLSIDDTKDIIDEIKIHFKNVLEPKKKDICYATTNRQEAVKNIAKLSDYFFVIGSKNSSNSLRLVEVAKTYGSQKAILIDDIDNFDPSIINKSSKIGITASASSPEILVSKML

SEQ ID NO: 90608 - protein, 290 aa, Unknown
  Bacterial polypetide isolated from the Sargasso Sea
IELLKINSKFGAPVYVRYEIVHNKHVVDDLKNKGAIFVEELEEIKDKTRPVIFSAHGVPKKIPEDAKNYKMTYIDATCPLVSKVHREAENLNKAGYHIILIGHENHPEVVGTMGQLPDGAVKLIQNEYEAKNYHTEKFDKIAYITQTTLSVDDTKEIIKILKNKYPSMKEPMKEDICYATTNRQAAVKNIAKKCEMFFVIGSRNSSNSVRLVEVAKKSGCENAHLIHSESEIPYDEIEKFNTIGISSGASAPEILVENFISALKNKFTININEVEIIKENVIFKVPNRLN

SEQ ID NO: 90609 - protein, 214 aa, Unknown
  Bacterial polypetide isolated from the Sargasso Sea
CPLVSKVHRESEQLNKNGYEILLIGHKNHPEVIGTMGQLSKGSIKLIETKNDVQNLNINDFKKPLAYITQTTLSVDDTTEIIEALKKKFPKIKGPVKEDICYATTNRQSAVKEIASKCDLFFVVGSRNSSNSVRLVEVAKKAGCNNSQLMHSEKEIPYNEIDSSNIIGISSGASAPEKLVKTLLDNIKKNRNVSIEEVVVAEEKVVFKLPKELN

SEQ ID NO: 90610 - protein, 174 aa, Unknown
  Bacterial polypetide isolated from the Sargasso Sea
MKQTLKPLKVFLAQPRGFCAGVERAIEIVERALKIYGPPVYVRHEIVHNKRVVNNLSSKGAVFVQELDQIPAGAVTIFSAHGVAQRIEDTAKDRKLPILDATCPLVAKVHKEGQRYSSKGYEVILIGHEGHPEVEGTMGRISGDVYLVSNTEDVFKLQVKNPQKLSYISQTTLS

SEQ ID NO: 90611 - protein, 281 aa, Unknown
  Bacterial polypetide isolated from the Sargasso Sea
YGSPVYVRHEIVHNKHVVESLKKIGAIFVEELDEIKDKSRPVIFSAHGVPKSIPAQASDLKMEYIDATCPLVTKVHREAENLNRKGDHILLIGHRNHPEVIGTMGQIDNGGIDLIESVDDAKNYQNISNKELAYVTQTTLSVDDTKEIISELKRRFPGIKEPKKDDICYATTNRQSAVKKIASFCDMFFVIGSRNSSNSVRLVEVAKKSGCENSLLIHSESEIPFDKIDACKTIGISSGASAPEILVEEFIKNLKKKYQIEIANTEVIKEDVTFKIPGKLN

SEQ ID NO: 90612 - protein, 193 aa, Unknown
  Bacterial polypetide isolated from the Sargasso Sea
IILIGHENHPEVIGTMGQLNQGSIDLVQNEEDATNYQNKLDKKLAYITQTTLSVDDTKEIIKILKTNFPNLKEPMKEDICYATTNRQMAVKNIAKNCDMFFVIGSRNSSNSVRLVEVAKKSGCENSQLIHSESSIPFDQIENCNTIGISSGASAPEILVENFINDLKNKFSISIDEVEIIKEDVVFKSPKKLN

SEQ ID NO: 90613 - protein, 262 aa, Unknown
  Bacterial polypetide isolated from the Sargasso Sea
ATVQEMKLFHEKGCHIIDTTCPWVSKVWHTVEKHKKHIFTSIIHGKFKHEETLATSSFAGKYLVVLDLEEANYVSEYIHGRGNRNEFMNKFAKACSDGFDPDKDLDRVGVANQTTMLKSETEEIGKVFERTMLKKFGPENLNSHFLAFNTICDATEERQDAMFSLVDEDLDILVVIGGFNSSNTTHLQEIAITKNISSFHIDTPERISVEENSILHKPLGSDLELKNNFLPSGNINVGITSGASTPDRVVADVIEKLIDIAS

SEQ ID NO: 90614 - protein, 283 aa, Unknown
  Bacterial polypetide isolated from the Sargasso Sea
AKYGSPIYVQHEIVHNKHVVQRLRERGAIFVENINEIPLGSRAIYSAHGVSPVVRKLAGKRKLKVLDATCPLVTKVHGEAQRYAQKDFTIILIGHHKHVEVQGTVGEAPDKIIVVGSLEEVDKLNVQDENKVGYITQTTLSLDDTAEIISALKKRFPKIQGPAKNDICYATQNRQNAVKALSKEVDLVIVVGAPNSSNSVRLLEVAKATGVKARRIESEQELNPSWFKGVKSIGVTAGASAPEDILQGVVSGLKKMFSSSQVRDLNIVKENVTFALPAVLRSD

SEQ ID NO: 90615 - protein, 238 aa, Unknown
  Bacterial polypetide isolated from the Sargasso Sea
MRLLVAAPRGFCAGVDRAIEIVEKCLKKFGKPVYVRHEIVHNQYVVNDLTEKGAIFVDELDECPDDRPVVFSAHGVPKGIFKQAQRRNMHYIDATCPLVTKVHLEAKRYFNLGYQLVMIGHKNHPETVGTMGQLPPGEVLLVENIDDVFSIEPKNSEKLAFITQTTLSVDDTSEIAEALKGRFPKIEAPHKEDICYATTNRQNAVKTISPMIEGLLVVGSTNSSNSKRLVEVGKKAWV

SEQ ID NO: 90616 - protein, 267 aa, Unknown
  Bacterial polypetide isolated from the Sargasso Sea
KHVVDSLKKIGAIFIEELDEIKDKTRPVIFSAHGVPKSVPKEASNLNMTYVDATCPLVSKVHREAENLYKNGSHILLIGHKNHPEVIGTMGQLPKESIELIESVEDAEMYKKKNGNKLAYITQTTLSVDDTKEIINVLKRKFPEINQPKKEDICYATTNRQSAVKKIAKNCDMFFVIGSRNSSNSVRLVEVAKNNGCDKSELIHSESKVPIDKITNCKTIGISSGASAPEVLVEEFINELKKEFVIEIEEVEIIKENIIFKIPGKLN

SEQ ID NO: 90617 - protein, 201 aa, Unknown
  Bacterial polypetide isolated from the Sargasso Sea
NLNKAGYHIILIGHENHPEVIGTMGQLNKGSIDLIQNEEDATNYQNKLDKKLAYITQTTLSVDDTKEIIKILKTNFPNLKEPMKEDICYATTNRQMAVKNIAKNCDMFFVIGSRNSSNSVRLVEVAKKSGCENSQLIHSESSIPFDQIENCNTIGISSGASAPEILVENFINDLKNKFSISIDEVEIIKEDVVFKAPKKLN

SEQ ID NO: 90618 - protein, 317 aa, Unknown
  Bacterial polypetide isolated from the Sargasso Sea
MKLDPTSPSLNIMLANPRGFCAGVDRAISIVERALELFSPPIYVRHEVVHNRYVVQNLKDRGAVFVEELDQVPDNNIVIFSAHGVSQAVRAEAKARGLRVFDATCPLVTKVHLQVTRASRKGIECILIGHAGHPEVEGTMGQYDNPNGGVYLIESPADVETLEVRDPNNLCFVTQTTLSVDDTLDIISALLKRFPSIEGPRKDDICYATQNRQDAVRNLSADVDLLIVVGSKNSSNSNRLRELALKTGTQSYLVDTADDIDSSWFENVTKVAVTAGASAPEVLVQQVVQAIAKLAPSAVTEVEGRKEDTVFAVPAEL

SEQ ID NO: 90619 - protein, 270 aa, Unknown
  Bacterial polypetide isolated from the Sargasso Sea
EVAGSLEQAYQSELIQSIRENGYELREGRVTIRLAEAFGFCWGVERAVAIAYETRRHYPTERIWITNEIIHNPSVNAHLREMDVLFISVEQGVKDFSGVESGDVVILPAFGATVQEMQLLNERGCHIVDTTCPWVSKVWNSVERHKKNSFTSVIHGKVKHEETLATSSFAGTYLVVLDLEEAQLVCDYILGNGNREAFLQRFAGATSPGFDPDCDLVRIGVANQTTMLKSETEDIGRLFERTLLRRYGPAELNDHFLAFNTICDATPGAS

SEQ ID NO: 90620 - protein, 230 aa, Unknown
  Bacterial polypetide isolated from the Sargasso Sea
VPEEAKLKNLSFVDATCPLVSKVHRESEQLYRNGYEILLIGHKNHPEVIGTMGQLPKGSIKLIETIKDVELLNARDFKKHLAYITQTTLSVDDTAEIIETLKKKFPKIKGPIKEDICYATTNRQSAVKEIASKCDMFFVVGSRNSSNSVRLVEVAKKAGCNNSQLMHSEKEIPYNEINNSETIGISSGASAPEKLVQKLLDIIKKDRKVSIQEVVVAEEKVVFKLPKELN

SEQ ID NO: 90621 - protein, 193 aa, Unknown
  Bacterial polypetide isolated from the Sargasso Sea
GHAGHPEVVGTMGRIKGDVYLVSNTDDVKRLKVRNPKKLSYISQTTLSVDDTKVVIEALKDRFPSIEGPDVKDICYATQNRQSAVRDLVNHVDLMLVVGAKNSSNSNRLRDLGEESGVGTFLIETADDLDRAWFDDVNSVGISSGASTPDELVNEVIDRISTFREIKIEKRPGIEENVVFKLPNQLVENQLGK

SEQ ID NO: 90622 - protein, 107 aa, Unknown
  Bacterial polypetide isolated from the Sargasso Sea
MKNKELKILLSAPRGFCAGVERAIEIVEKSIHKFGAPVYVRHEIVHNKHVVDDLKNKGAIFVEELEEIKDKSRPVIFSAHGVPKKIPEDAKNYKMTYVDATCPLVSK

SEQ ID NO: 90623 - protein, 189 aa, Unknown
  Bacterial polypetide isolated from the Sargasso Sea
MNILIANPRGFCAGVDRAIEITEKALSIFGAPIYVKHEIVHNNYVVKNLEAKGAKFIENIENLKEGSILIFSAHGVSNDIENKAQEKNLKVFDATCPLVTKVHMEVQKYSDDKINTILIGHKGHPEVEGTIGRYKSTDQARIFLVENINDVNALTLKNDEPVAYVTQTTLSLDDTEKIIDHLKKRFKNL

SEQ ID NO: 90624 - protein, 141 aa, Unknown
  Bacterial polypetide isolated from the Sargasso Sea
MHIKLANPRGFCAGVDRAIEIVNRALEVFGPPIYVRHEVVHNKFVVEDLRARGAVFVEELDQVPDDVIVIFSAHGVSKAVRDEAANRGLKVFDATCPLVTKVHMEVVRYSREGRECILIGHEGHPEVEGTMGQYDASNGGS

SEQ ID NO: 90625 - protein, 218 aa, Unknown
  Bacterial polypetide isolated from the Sargasso Sea
FYVDATCPLVTKVHREAERHYKNGYKIILIGHKGHPEVIGTMGQIPKGNIVLVETLEDAKNVKINGLVAYVTQTTLSVDDTKEIIKVLEKKFPKIKPPVKEDICYATTNRQNAVKQIASSCDMFFVIGSDNSSNSKRLVEVAKKAGCGKSYLINFKNDLPIKEIINCKKIGLTSGASAPEELVQSFISEIKKYTDISIDESINSKESVIFKLPPSLIN

SEQ ID NO: 90626 - protein, 141 aa, Unknown
  Bacterial polypetide isolated from the Sargasso Sea
MKQKTKLSLANPRGFCAGVDRAIEIVNRALDMFGSPIYVKHEVVHNEAVVNDLKERGAIFIEEISDVPDNSIIIFSAHGVSRKIEQSVKARNLQFFDATCPLVTKVHMEVIRHGRANRDIILIGHEGHPEVEGTMGRYFSQ

SEQ ID NO: 90627 - protein, 59 aa, Unknown
  Bacterial polypetide isolated from the Sargasso Sea
MGEFTIELANPRGFCAGVDRAIEIVERALDRYGAPIYVRHEVVHNRYVVNDLKKKGAVS

SEQ ID NO: 90628 - protein, 210 aa, Unknown
  Bacterial polypetide isolated from the Sargasso Sea
MKNKELKILLSAPRGFCAGVERAIEIVEKSIQKFGAPVYVRHEIVHNKHVVDDLKNKGAIFVEELEEIKDKSRPVIFSAHGVPKKIPENAKNYKMTYIDATCPLVSKVHREAENLNKAGYHILLIGHRNHPEVIGTMGQLSEGSIDLIQSEEDASNYHNNLDKKIAYITQTTLSVDDTKEIIKILKNKFPNIKEPMKEDICYATTNRQMA

SEQ ID NO: 90629 - protein, 173 aa, Unknown
  Bacterial polypetide isolated from the Sargasso Sea
EVIGTMGQLPDGKIDLIETIEDAQKFQRGQSEKLAYITQTTLSVDDTKDIIHVLKERFPDIHEPKKDDICYATTNRQAAVKKIAKDCDNFFVIGSRNSSNSVRLVEVAKNNGCSDAELIHSESIFPIEKISKCKIIGISSGASAPEVLVKEFIDNIKKEFTVQIEEVEIEKED

SEQ ID NO: 90630 - protein, 255 aa, Unknown
  Bacterial polypetide isolated from the Sargasso Sea
YRRISDVPDDSIIIFSAHGVSRKIEESVKERNLQFFDATCPLVTKVHMEVIRHGRTNRDIILIGHEGHPEVEGTMGRYFSQNGKIYLVQDLEEAKEVSVNQPENVAYVSQTTLSVDETKDIISELTEKFPSIVGPKKDDICYATQNRQDAVKQLALETDYIIVVGSKASSNSNRLKELANKCGVNSVLIDEFSDLDLNELKDFKNIGLTAGASAPESKVQEIISNLSIFLDAEIEEKGGVKENISFKLPPELRAS

SEQ ID NO: 90631 - protein, 240 aa, Unknown
  Bacterial polypetide isolated from the Sargasso Sea
LFFQHMGVPKSIPAQASDLKMEYIDATCPLVSKVHREAENLNRKGDHILLIGHRNHPEVIGTMGQIENGGIDLIESVDDAKNYQNISNKELAYVTQTTLSVDDTKEIITVLKKRFPRIKEPKKDDICYATTNRQSAVKKIASFCDMFFVIGSRNSSNSVRLVEVAKKSGCENSLLIHSESEIPFDKIDACKTIGISSGASAPEILVEEFIKNLKKKYQIEIENTEVIREDVTFKIPGKLN

SEQ ID NO: 90632 - protein, 301 aa, Unknown
  Bacterial polypetide isolated from the Sargasso Sea
WGVERAVAMAYETRRHYPNENIWITNEIIHNPSVNDHLRKMNVKFISAKNGIKDFSLVSNGDVVILPAFGATVQEMKLLHEKGCHIIDTTCPWVSKVWHTVEKHKKHVFTSIIHGKFKHEETLATSSFAGKYLVVLDLEEANYVSEYILGRGNRNEFINKFSKAFSNGFDPDKDLDRVGVANQTTMLKSETEEIGKVFERTMLKKFGPENLNSHFLAFNTICDATEERQDAMFSLVDEDLDILVVIGGFNSSNTTHLQEIAITKNIASFHIDTPERISVEENSILHKPLGSDLKIKNNFLP

SEQ ID NO: 90633 - protein, 173 aa, Unknown
  Bacterial polypetide isolated from the Sargasso Sea
MLKNSEILLTEPRGFCAGVERAIEIVNRAVEIFDETIFVKHEVVHNKHVIEQLVEKGVVFVESLETVPDQSILIYSAHGVSKEISELAIKKRLKVFDATCPLVTKVHFEIHKFASQNIDVVLVGHSGHPEVEGTMGQYISEKGKIHLVETNDDIKKLKIENKNIAYVTQTTLS

SEQ ID NO: 90634 - protein, 182 aa, Unknown
  Bacterial polypetide isolated from the Sargasso Sea
MKKELKIYLASPRGFCAGVKRAIEIVEKSIDKYGSPVYVRHEIVHNKQVVDELRTKGAIFVDELSDVKDSSRPVIFSAHGVPKSVPEEAKFKNLSFVDATCPLVSKVHRESEQLYKNGYEILLIGHKNHPEVIGTMGQLPKGSIKLIETKHDAEKLNTSNFKKPLDYITQTTLSVDDTSENN

SEQ ID NO: 90635 - protein, 211 aa, Unknown
  Bacterial polypetide isolated from the Sargasso Sea
MRKNELKIYLASPRGFCAGVDRAIEIVKKSIDKFGSPVYVRHEIVHNKHVVESLKKIGAIFVEEISEIKDRSRPVIFSAHGVPKKVPKEAEELNMKYVDATCPLVSKVHREAENMYKSGYHIILIGHKGHPEVIGTMGQIPENGITLVETIEDVKKIIFKKDEKLSFITQTTLSVDDTKEIIECLKKRFPQINEPKKEDICYATTNRQAAV

SEQ ID NO: 90636 - protein, 279 aa, Unknown
  Bacterial polypetide isolated from the Sargasso Sea
AAPRGFCAGVDRAIEIVKKSIEKYGAPVYVRHEIVHNKHVVDSLKKIGAIFVEEIEEITDKTRPVIFSAHGVPKSVPEEATNLKMIFVDATCPLVSKVHREAENLDKRDIHILLIGHKNHPEVIGTMGQLQDGKIDLIETIEDAQKFERVQNEKLAYITQTTLSVDDTKDIINVLKERFPDIHEPKKDDICYATTNRQAAVKKIAKDCDDFFIIGSRNSSNSVRLVEVAKNNGCSDAELIHSESIFPIEKISKCKTIGISSGASAPEVLVKEFIDNIKK

SEQ ID NO: 90637 - protein, 206 aa, Unknown
  Bacterial polypetide isolated from the Sargasso Sea
KVHRETEQLHKRGFDIILIGHKNHPEVVGTMGQLPEGSIKLIETVDEVKNLKFSKPLAYVTQTTLSVDDTKEIIDALKRKFPDIKGPIKEDICYATTNRQAAVKKIAPDCEMFFVIGSRNSSNSARLVEVAKKSGCEDSELIFYGKKAPLDKIKNCKTIGLSSGASAPEELVQNFISEIKKSMNVSIEEVVTAKEKVVFKLPKELN

SEQ ID NO: 90638 - protein, 199 aa, Unknown
  Bacterial polypetide isolated from the Sargasso Sea
MKNKELKILLSAPRGFCAGVERAIEIVEKSIQKFGAPVYVRHEIVHNKYVVDDLKNKGAIFVEELEEIKDKSRPVIFSAHGVPKKIPEDAKNYKMTYVDATCPLVSKVHREAENLNKAGYHIILIGHENHPEVIGTMGQLNDGSIDLIQNEEDATNYQNKLDKKLAYITQTTLSVDDTKEIIKILKTNFPNIKEPMKED

SEQ ID NO: 90639 - protein, 163 aa, Unknown
  Bacterial polypetide isolated from the Sargasso Sea
DDAKNYQRGKNDKLAYITQTTLSVDDTKDIIDVLRERFPDIFEPKKDDICYATTNRQAAVKKIAKECDNLFVIGSRNSSNSVRLVEVARNNGCENAELIHSESSFPIEKISKCKTIGISSGASAPEVLVNEFIENIKKKFTVEIEEVEIVKEDVTFKIPGKLN

SEQ ID NO: 90640 - protein, 240 aa, Unknown
  Bacterial polypetide isolated from the Sargasso Sea
MKNKHLKIMLAAPRGFCAGVDRAIEIVKKSIEKYGSPVYVRHEIVHNKHVVDSLKKIGAIFVEEIDEISDKTRPVIFSAHGVPKSVPEEATNLNMIFVDATCPLVSKVHREAENLNKRDIHILLIGHKNHPEVIGTMGQLPDGKIDLIETIEDAQKFEKGQIEKLAYITQTTLSVDDTKDIISVLKERFPDIHEPKKDDICYATTNRQAAVKKIAKDCDNFFVIGSRNSSNSVRLVEVAK

SEQ ID NO: 90641 - protein, 233 aa, Unknown
  Bacterial polypetide isolated from the Sargasso Sea
AKSVPEEAKLKNLSFVDATCPLVSKVHRESEQLNKNGFEILLIGHKNHPEVIGTMGQLPKGSIKLIETKNDVDLLKENDFKKPLAYITQTTLSVDDTAEIIEALKKKFPKIKGPIKEDICYATTNRQSAVKKIASKCDMFFVVGSRNSSNSVRLVEVAKKAGCNNSHLMHSEKEIPFNEIENSETIGISSGASAPEKLVQTLLNSLKKDRNVSIEEVIVAEEKVVFKLPKELN

SEQ ID NO: 90642 - protein, 190 aa, Unknown
  Bacterial polypetide isolated from the Sargasso Sea
MKIKHLKIMLAAPRGFCAGVDRAIEIVKKSIEKYGAPVYVRHEIVHNKHVVDSLKKIGAIFVEEIGEISDKTRPVIFSAHGVPKSVPEEATNLNMVFVDATCPLVSKVHREAENLNKRDIHILLIGHKNHPEVIGTMGQLPHGKIDLIETIEDAQKFEKGQSKKLAYITQTTLSVDDTKDIINVLKERFP

SEQ ID NO: 90643 - protein, 213 aa, Unknown
  Bacterial polypetide isolated from the Sargasso Sea
PFVSKVHRESEQLHKNGYEIFLIGHKNHPEVVGTMGQLPIGSIKLIETKNDVEKLQTDNFKKPLAYITQTTLSVDDTAEIINALKNKFPKIKSPIKEDICYATTNRQSAVKEIASKCDLFFVVGSRNSSNSVRLVEVAKKAGCKNSQLMHSEKEIPFNEIKNSNTIGISSGASAPEKLVQALLNNIKKDRKVHIEEVVVAEEKVVFKLPKELN

SEQ ID NO: 90644 - protein, 146 aa, Unknown
  Bacterial polypetide isolated from the Sargasso Sea
MKNKNLKILLASPRGFCAGVDRAIEIVKKSIDKYGSPVYVRHEIVHNKHVVDSLKKIGAIFVEELEEIKDKTRPVIFSAHGVPKSVPKEASDLNMTYVDATCPLVSKVHREAENLYKNGSHILLIGHKNHPEVVEPWDNYPRKHRP

SEQ ID NO: 90645 - protein, 223 aa, Unknown
  Bacterial polypetide isolated from the Sargasso Sea
IKNGEYVDATCPLVSKVHREAENLNKNGIQILLIGHKNHPEVIGTMGQIPRGEIDLIENINDVNNYQNKSNKKLAFVTQTTLSVDDTKEIILALKKKFPEIKEPKKEDICYATTNRQAAVKKIAEKCDMFFVIGSRNSSNSLRLVEVAKNSGCENSRLIHSESTVPLDEIEKHQTIGISSGASAPEILVDNFINNLKKQFTVAIEEIEIVKENITFKIPGKLN

SEQ ID NO: 90646 - protein, 221 aa, Unknown
  Bacterial polypetide isolated from the Sargasso Sea
RRGFDSPTKRAQALEEAYQSDLISSIRDNGFTYTKGRLNIKLAKAFGFCWGVERAVAMAYETRRHYPNENIWITNEIIHNPSVNDHLRKMNVKFISAKNGIKDFSLVSDGDVVILPAFGATVQEMKLLHEKGCHIIDTTCPWVSKVWHTVEKHKKHVFTSIIHGKFKHEETLATSSFAGKYLVVLDLEEANYVSDYILGRGNRNEFMNKFAKACSNGFDPD

SEQ ID NO: 90647 - protein, 121 aa, Unknown
  Bacterial polypetide isolated from the Sargasso Sea
MNKKLDVYLAGPRGFCAGVDRAILMVQEAIKKYGAPVYVRHEIVHNKYVVDNLKNEGAIFIEELSEIDKVDRPVIFSAHGVPKSVPKEADRLKLLYFDATCPLVSKIHREVEHFEREKFPV

SEQ ID NO: 90648 - protein, 157 aa, Unknown
  Bacterial polypetide isolated from the Sargasso Sea
QNYKKEYTLIVTQTTLSVDDTKDIINKLKTKFPEIKEPKKEDICYATTNRQSAVKNIAKLCEMFFVIGSRNSSNSVRLVEVAKNSGCENSSLIHSESTTPFEQIDKCNTIGISSGASAPEILVNNFISNLKEKYEVEIEEVEIIKEDIVFKIPKKLN

SEQ ID NO: 90649 - protein, 275 aa, Unknown
  Bacterial polypetide isolated from the Sargasso Sea
MKNEIKIYLAAPRGFCAGVDRAIEIVKKALDKYGSPVYVRHEIVHNKNVVESLKKLGAVFVEELSEIKDVSRPVIFSAHGVPKEVPEEAKSKKIFYVDATCPLVSKVHRETEQLFKKGFDIVLIGHKNHPEVIGTMGQLPKDSIKLVETVGDVKNLSFSKPVAYVTQTTLSVDDTKEIIDALKQKFPDIKGPIKEDICYATTNRQSAVKKIAPNCEMFFVLGSRNSSNSARLVEVAKKSGCENSELIFYGKKAPIDKIKNCKTIGLSSGASAPED

SEQ ID NO: 90650 - protein, 182 aa, Unknown
  Bacterial polypetide isolated from the Sargasso Sea
MKNKELKILLAAPRGFCAGVERAIEIVKKSITKYGAPVYVRHEIVHNKHVVDSLKKIGAIFVEEIEEIKDKSRPVVFSAHGVPKSVPAEAISNKMEYVDATCPLVSKVHREAENLNKNGYHIILIGHKNHPEVIGTMGQLPKGSIDLIQSEKDVQNYSYNGEKKIAYITQTTLSVDDTKNII

SEQ ID NO: 90651 - protein, 224 aa, Unknown
  Bacterial polypetide isolated from the Sargasso Sea
MKNNKIKVFLAAPRGFCAGVDRAIEIVKKSLNKYGSPVYVRHEIVHNKHVVESLKKIGAIFVEELDEIEDKTRPVIFSAHGVPKSVSENASNLKMTYVDATCPLVSKVHREAENINKQGMHILLIGHKNHPEVIGTMGQLPKGSIDLIESTEDANNYINNSDKKLAYITQTTLSVDDTKDIIEVLKFKFPDIYEPKKEDICYATTNRQDAVKKIAPKCEMFFVI

SEQ ID NO: 90652 - protein, 251 aa, Unknown
  Bacterial polypetide isolated from the Sargasso Sea
EELSEIDDKTRPVIFSAHGVPKSVPTEAEDLKMTYIDATCPLVSKVHREAENLHKAGNHILLIGHKNHPEVIGTLGQLPRGSIDLIESIEDVEKFGKKKKNLAYVTQTTLSVDDTKEIIKKLRIKFPEIKEPKKEDICYATTNRQSAVKKIAKLCEMFFVIGSRNSSNSVRLVEVAKNSGCEKSSLIHSESTTPFNEIDKCNTIGISSGASAPEILVNNFISNLKEKYEVEIEEVEIIKENIIFKIPKKLN

SEQ ID NO: 90653 - protein, 217 aa, Unknown
  Bacterial polypetide isolated from the Sargasso Sea
MKLKNNHLKILLAAPRGFCAGVDRAIEIVKKSIEKYGAPVYVRHEIVHNKHVVDSLKKIGAIFVEEIDEIEDKTRPVIFSAHGVPKSVPQEAESLNMIFVDATCPLVSKVHREAENLNKKDVQVLLIGHKNHPEVIGTMGQVPDGEIDLIETIEDAKNYQRRKNNKLAYITQTTLSVDDTKDIINVLKERFPDIHEPKKDDICYATTNRQAAIKKIA

SEQ ID NO: 90654 - protein, 222 aa, Unknown
  Bacterial polypetide isolated from the Sargasso Sea
MKEKKDLDIYLAAPRGFCAGVDRAIKMVELALEKWGSPIYVRHEIVHNRHVVEDLKSKGAIFVDEVDDCPADRPIIFSAHGVAKSVVKEAQRKNMLFIDATCPLVSKVHIEAERHYKNGLQIIMIGHRGHPETIGTIGQLPEGSVLLVENSEDISKLKTRNKNKLAYITQTTLSVDDTAEMVTALKKRFPTILGPHKEDICYATTNRQGAVKDISRLIEALL

SEQ ID NO: 90655 - protein, 258 aa, Unknown
  Bacterial polypetide isolated from the Sargasso Sea
GAIFVDELSDVDDTSRPVIFSAHGVPKSVPEEAKLKNLSFVDATCPLVSKVHRESEQLNKNGFDILLIGHKNHPEVIGTMGQLPKGSIRLVETKSDVDLLKENDFKKPLAYITQTTLSVDDTAEIIEALKNKFPKIKGPVKEDICYATTNRQSAVKEIASKCDMFFVVGSRNSSNSVRLVEVAKKAGCNNSHLMHSEKKIPFNEIKNSKTIGISSGASAPEKLVQTLLKSLKKDRNVSIKEVIVAEEKVVFKLPKELN

SEQ ID NO: 90656 - protein, 195 aa, Unknown
  Bacterial polypetide isolated from the Sargasso Sea
MKNKELKILLSAPRGFCAGVERAIEIVEKSIKKYGAPVYVRHEIVHNKYVVDDLKNKGAIFVEELEEIKDKTRPVIFSAHGVPKKIPEDAKNYNMTYVDATCPLVSKVHREAENLNKAGYHLILIGHQNHPEVIGTMGQLPKGSIDLIQNEDEAKKYKPKNNKKISYVTQTTLSVDDTKDIIQILKDKFPDIREP

SEQ ID NO: 90657 - protein, 119 aa, Unknown
  Bacterial polypetide isolated from the Sargasso Sea
MNKQNINLYLASPRGFCAGVDRAVKIVEQTIKQFGAPVYVRHEIVHNKDVVNSLAKIGAIFVDDVSEAPTSRPIIFSAHGVAKSVFQEAEERNMISIDATCPLVTKVHNETIKHYNLGR

SEQ ID NO: 90658 - protein, 107 aa, Unknown
  Bacterial polypetide isolated from the Sargasso Sea
MKQKTKLSLANPRGFCAGVDRAIEIVNRALDMFGSPIYVKHEVVHNKAVVNDLNERGAIFIEEISDVPDDSIIIFSAHGVSRKIEESVKERNLQFFDATCPLVTKVH

SEQ ID NO: 90659 - protein, 198 aa, Unknown
  Bacterial polypetide isolated from the Sargasso Sea
MKNKELKILLSAPRGFCAGVERAIEIVEKSIKKFGAPVYVRHEIVHNKYVVDDLKNKGAIFVEELEEIEDKSRPVIFSAHGVPKKIPEDAKNYNMTFVDATCPLVSKVHREAENLNKSGYHLILIGHESHPEVIGTMGQLPKGSIDLIQDEEEAKNYKFDKKKQIAFVTQTTLSVDDTKDIIKILKERFPKYTRTVKE

SEQ ID NO: 90660 - protein, 171 aa, Unknown
  Bacterial polypetide isolated from the Sargasso Sea
MKNKKLKILLAKPRGFCAGVDRAIEIVKKSIEKYGAPVYVRHEIVHNKEVVQSLKKIGAIFVEELSEISDKSRPVIFSAHGVPKSVTKEAENYKMEFIDATCPLVSKVHREAENHYKAGNHILLIGHKNHPEVIGTMGQIPSGKIDLIETIDDAKKYEIKNSKKIAYVTQT

SEQ ID NO: 90661 - protein, 272 aa, Unknown
  Bacterial polypetide isolated from the Sargasso Sea
MTKKLNIFLAGPRGFCAGVDRAIEMVKGALKKYGAPVYVRHEIVHNKFVVENLKSQGAIFVEELNEIEDKSRPVIFSAHGVPKAVPEEALSLNLIYYDATCPLVSKIHKEVENFDKKNLPVILIGHRNHPEVIGTMGQTNKEIHLVEKVEDVKKLPFNHNDQIAYVTQTTLSVDDTKDIIKEIKLHFSNVIEPKKNDICYATTNRQEAVKKIANQCDYFLVIGASNSSNSLRLVEVAKNYGSKKAILVEDVDSLNLNIFEEAKNIGITASAS

SEQ ID NO: 90662 - protein, 119 aa, Unknown
  Bacterial polypetide isolated from the Sargasso Sea
MNKKLDIYLAGPRGFCAGVERAILMVKEAIKKYGSPVYVRHEIVHNKYVVDNLRAEGAIFIEELNEIDQKDRPVIFSAHGVPKSVPAEAEKLNLLYYDATCPLVSKIHREVENLKEKIY

SEQ ID NO: 90663 - protein, 164 aa, Unknown
  Bacterial polypetide isolated from the Sargasso Sea
TDDAKNYQRGKNDKLAYITQTTLSVDDTKDIINVLKERFPDIQEPKKDDICYATTNRQAAVKKIAKECDNFFVIGSRNSSNSVRLVEVAKNNGCEHAELIHSESTFPLEKISKCKTIGISSGASAPEVLVNEFIENIKKKFTVEIEEVEIVKEDVTFKIPGKLN

SEQ ID NO: 90664 - protein, 307 aa, Unknown
  Bacterial polypetide isolated from the Sargasso Sea
MQNNKIKIYLAAPRGFCAGVDRAIEIVKKSIKKYGSPVYVRHEIVHNKYVVDSLKKIGAIFVEELNEIEDKTRPVIFSAHGVPKSVPKEANNLNMNYVDATCPLVSKVHREAENLNKQGAHVLLIGHKNHPEVIGTMGQLPKNSVELIESVEDAKKYINKNNNKLAYITQTTLSVDDTKDIINVLKKKFPKIYEPKKEDICYATTNRQSAVKKIAKKCDMFFVIGSRNSSNSVRLVEVAKNNGCGNSELIHSESTIPIEKIANCKTIGVSSGASAPEILVEKFINKLKKEFITDIEEVEIYKENIVF

SEQ ID NO: 90665 - protein, 240 aa, Unknown
  Bacterial polypetide isolated from the Sargasso Sea
VIFSAHGVPKSVPKEASNLNMTYVDATCPLVSKVHREAENLYKNGSHILLIGHKNHPEVIGTMGQLPNESIDLIESVEDAEKYLKKNENKLAYITQTTLSVDDTREIINVLKKKFPEINEPKKEDICYATTNRQSAVKKIAKNCDMFFVIGSRNSSNSVRLVEVAKNNGCDKSELIHSESKVPLDKIANCTTIGISSGASAPEILVEEFINELKKEFTLEIEEVEIIKENITFKIPGKLN

SEQ ID NO: 90666 - protein, 289 aa, Unknown
  Bacterial polypetide isolated from the Sargasso Sea
MKDKQIKIYLASPRGFCAGVDRAIEIVKKSLEKYGSPVYVRHEIVHNKHVVEGLKKIGAIFVEELEEIEDKSRPVIFSAHGVPKSVPEQANNLKMNYIDATCPLVSKVHREAENLNKNGLQILLIGHKNHPEVIGTMGQIPRGQIDLIENIDDAINYKNKSNKKLAFVTQTTLSVDDTKEIISALKKRFPEIRGPKNEDICYATTNRQAAVKKIAKKCEIFFIIGSRNSSNSLRLVEVAKNSGCSNSRLIHSESEIPFEEIEKYKTIGISSGASAPEILVDNFISNLKK

SEQ ID NO: 90667 - protein, 193 aa, Unknown
  Bacterial polypetide isolated from the Sargasso Sea
MKKENINLYLAAPRGFCAGVDRAVKIVEEAIKKYGPPIYVRHEIVHNKEVVNSLSNLGAIFVEEVREAPENSTIIFSAHGVPKQVYSDAKKRNMIYIDATCPLVSKVHNEAQKHYAMGRHIILIGHKNHPEVIGTMGQVPKDAVTLVENEIDAKSINVPNKDKLAYTTQTTLSVDDTEIILKILKDRFPNIKG

SEQ ID NO: 90668 - protein, 193 aa, Unknown
  Bacterial polypetide isolated from the Sargasso Sea
ILLIGHKNHPEVIGTMGQLPEGSIDLIENIEDVNKYENISNKQLSFITQTTLSVDDTKDIIAALKSKFPDIKEPKKDDICYATTNRQSAVKVIADKCDMFFVIGSRNSSNSVRLVEVAKNSGCNSAELIHSESPVPIDKIKECNTIGISSGASAPEILVEKFIAELKDQFNVNIEEVEIVKENITFKIPGKLN

SEQ ID NO: 90669 - protein, 218 aa, Unknown
  Bacterial polypetide isolated from the Sargasso Sea
MKNKEIKILLSAPRGFCAGVERAIEIVEKSIEKYGAPVYVRHEIVHNKYVVDDLKNKGAIFVEELEEIKDKSRPVIFSAHGVPKKIPEDAKNYNMTYVDATCPLVSKVHREAENLYKAGYHLILIGHQNHPEVIGTMGQLPNGTIDLIQNESEAKTYQLKNQERVAYVTQTTLSVDDTKDIIKILKEKFPNIKEPSKEDICYATTNRQMAVKNIAKKC

SEQ ID NO: 90670 - protein, 114 aa, Unknown
  Bacterial polypetide isolated from the Sargasso Sea
MKKIKVLLASPRGFCAGVKRAIDMVDLALQNSNSPIYVRHEIVHNKRVVNDLKRKGAIFVKELEEVPKGAKVIFSAHGVSKKVKQDAKNYKQLSIDATCPLVSKVHQQIKLYEK

SEQ ID NO: 90671 - protein, 218 aa, Unknown
  Bacterial polypetide isolated from the Sargasso Sea
MKNKELKILLSAPRGFCAGVERAIEIVEKSIHKFGAPVYVRHEIVHNKHVVDDLKNKGAIFVEELEEIKDKSRPVIFSAHGVPKKIPEDAKNYKMTYVDATCPLVSKVHREAENLNKAGYQIILIGHENHPEVIGTMGQLPDGAVRLVQNEDEAQNYHAEKNDKIAYITQTTLSVDDTKEIIKILKNKYPSMKEPMKEDICYATTNRQAAVKNIAKLM

SEQ ID NO: 90672 - protein, 293 aa, Unknown
  Bacterial polypetide isolated from the Sargasso Sea
FCAGVDRAVKIVEESIKRFGSPVYVRHEIVHNKDVVNSLARIGAVFVDEVNEAPTDRPIIFSAHGVAKSVLDEAKKRKMIYIDATCPLVTKVHNETIRHYNLGRHVLLIGHKNHVEVIGTMGQVPKNNITLIETEEDAYEVKVDNPDNLAFATQTTLSIDDTSKILSILKSRFPNIKGPSSEDICYATTNRQMAVKSMSKICDCILVIGAENSSNSVRLVEVALSHGVKKAILIPNENKLDLFLKKFDPLKSPNIGLTAGASAPETLVQMLISKLKKDFEVNLIDHEVIKEDV

SEQ ID NO: 90673 - protein, 239 aa, Unknown
  Bacterial polypetide isolated from the Sargasso Sea
MLKVDPTSPELSILLANPRGFCAGVDRAISIVERALELFEPPIYVRHEVVHNRYVVENLKQRGAIFVDELEQVPDSSIVIFSAHGVSQAVRKEAKVRGLKVFDATCPLVTKVHLQVTRASRKGIECILIGHEGHPEVEGTMGQYDNPKGGVYLIESPEDVEKLQVNNPNNLCFVTQTTLSVDDTLDIIAALQKRFPSIEGPRKDDICYATQNRQDAVRSMSAEVDLLIVVGSKNSSNSN

SEQ ID NO: 90674 - protein, 239 aa, Unknown
  Bacterial polypetide isolated from the Sargasso Sea
MKSKEIKILLAAPRGFCAGVERAIEIVKKSISKYGAPVYVRHEIVHNKHVVDGLKKIGAIFVEELDEIKDKTRPVIFSAHGVPKKVPIEAENFKMEYVDATCPLVSKVHREAENLNKNGLQILLIGHKNHPEVIGTMGQIPEGEIDLIENVDDANSYENKSKKKLAFVTQTTLSVDDTKEIISALKKKFPEIKEPKKEDICYATTNRQAAVKKIAEKCDMFFVIGSRNSSNSLRLVEVA

SEQ ID NO: 90675 - protein, 274 aa, Unknown
  Bacterial polypetide isolated from the Sargasso Sea
MKNPKLTVYMAAPRGFCAGVDRAIKIVEMALEKWGEPVYVRHEIVHNKYVVDELKSKGAIFIKEVSDAPVDRPIIFSAHGVPKSVPLEAKSRKMIYVDATCPLVSKVHIEADRHFENGLQIIMIGHEGHPETIGTMGQLPEGGVLLVESTKDVENLIVRDPSKLAYVTQTTLSIDDTAEVVEALKTRFPTIVGPHKEDICYATSNRQAAVKEIAPEVDALLVIGAPNSSNSQRLVEVAKKAGCENSQMVQRAAEINWNSLMNIKSVGITAGASA

SEQ ID NO: 90676 - protein, 200 aa, Unknown
  Bacterial polypetide isolated from the Sargasso Sea
LVKLGYHIILIGHENHPEVIGTMGQLNERSIDLIQNEEDALNYQNKLNKKLAYITQTTLSVDDTKEIIKILKNNFPNIKEPMKEDICYATTNRQMAVKNIAKNCDMFFVIGSRNSSNSVRLVEVAKKSGCENSQLIHSESSIPYDQIENCNTIGISSGASAPEILVENFINDLKNKFSISIDEVEIIKEDVVFKVPKKLN

SEQ ID NO: 90677 - protein, 190 aa, Unknown
  Bacterial polypetide isolated from the Sargasso Sea
MNKHKLKILLAGPRGFCAGVDRAIEIVKKSIDKFGAPVYVRHEIVHNKHVVESLKKIGAIFVEELSEIKDKTRPVIFSAHGVPKSIPAEAISLNMNYIDATCPLVSKVHREAENLYKSGNHILLIGHKNHPEVIGTLGQLPKGSIDLIESIEDVENYTSTKKKIAYVTQTTLSVDDTKDIIKKLKYKFPE

SEQ ID NO: 90678 - protein, 196 aa, Unknown
  Bacterial polypetide isolated from the Sargasso Sea
MTKEIKLANPRGFCAGVDRAIDIVNKALDIYGAPVYVKHEVVHNKVVVDDLRNRGAVFVEEIDEIPDDSLVIFSAHGVSSEVEETTKARNLNFFDATCPLVTKVHMEVRKHAKANRDIILIGHEGHPEVEGTMGRHINSQNSSIYLVQDENDALNINVNNSESLALVTQTTLSVDETIAIIDILRKRFPNMKSKKR

SEQ ID NO: 90679 - protein, 151 aa, Unknown
  Bacterial polypetide isolated from the Sargasso Sea
MSNKNLKIYLAAPRGFCAGVDRAIEIVKKSIDKFGAPVYVRHEIVHNKHVVESLKKIGAIFVEELDEIKDKSRPVIFSAHGVPKSVPEEASNLNMMFVDATCPLVSKVHREAENLNKQGHHILLIGHKNHPEVIGTMGQLPKGSIDLIENT

SEQ ID NO: 90680 - protein, 262 aa, Unknown
  Bacterial polypetide isolated from the Sargasso Sea
EQSSVEEVEQAPINSIIIFSAHGVPKAVFKEAKKRKMISIDATCPLVTKVHNETKKHSNKDRHILLIGHKYHPEVIGTMGQVDESKVTLIQNAEDANNVIVKNPDKLAYATQTTLSVDDTEEILRILKIRFPKIHGPSTNDICYATTNRQLAVKSMAKICNCILVIGSNNSSNSKRLVEVAKINGAKNSLLISNEKDLNNFLKYFNPKTEPNIGLTSGASAPETLVQILISKLKESFKVNKIDHEVIKEDIHFNLPKSLRSR

SEQ ID NO: 90681 - protein, 128 aa, Unknown
  Bacterial polypetide isolated from the Sargasso Sea
MNKKLDVYLAGPRGFCAGVERAILMVQEAIKKYGAPVYVRHEIVHNKYVVDNLREEGAIFVEELNEIDQLDRPVIFSAHGVPKSVPEEASNLNLLYFDATCPLVSKSHREVENFERKNLPVISIGHQN

SEQ ID NO: 90682 - protein, 178 aa, Unknown
  Bacterial polypetide isolated from the Sargasso Sea
MSNNKLKILLAAPRGFCAGVDRAIEIVKKTIKKFGAPVYVRHEIVHNKYVVDNLKKIGAIFVEELNEIEDRTRPVIFSAHGVPKSVPKKADDYKIEYIDATCPLVSKVHKEAENLHKNNYHILLIGHLNHPEVIGTMGQLPKDSIDLIETVEDVEKYVRKNNKKIAYITQTTLSVDDT

SEQ ID NO: 90683 - protein, 244 aa, Unknown
  Bacterial polypetide isolated from the Sargasso Sea
VDRPVIFSAHGVPKKVPEEAEKRQMIYVDATCPLVTKVHNEIKRYYENGYKIIMIGHRGHPETIGTMGQLPEGEVLLVENTTDVEKMDPSEYPKLAYVTQTTLSVDDTKEIALALNKKFPSIENPKKEDICYATTNRQEEVKRLVKHVDLMLVVGSENSSNSQRLVDVAKDSGCTKAYLIEDYRKIDWVKVTKANSIGITSGASAPDHLVKDVISSIQEKFDTSLVYDTTRKETIEFKVPPVLR

SEQ ID NO: 90684 - protein, 252 aa, Unknown
  Bacterial polypetide isolated from the Sargasso Sea
YVRHEIVHNKHVVDSLKKIGAIFVEELHEIKDKTRPVIFSAHGVPKKVPAEAESFKMEYVDATCPLVSKVHREAENLNKNGLQILLIGHKNHPEVIGTMGQIPKDGIDLIENIEDVNNYQNKSQKKLAFVTQTTLSVDDTKEIISALKQKFPDIKEPKKEDICYATTNRQAAVKKIAKKCDMFFVIGSSNSSNSLRLVEVAKNSGCINSRLIHSESVIPLEEIEKYKTIGISSGASAPEVLVDNFINDLKKK

SEQ ID NO: 90685 - protein, 120 aa, Unknown
  Bacterial polypetide isolated from the Sargasso Sea
PKKDDICYATQNRQDAVKQLALESDLVLVIGSINSSNSNRLREIAERSGVDSYLIDSISDLEGSWLEGKQNIGVTSGASAPEHLVKELVDSLEQDYGYSLQGSREITDEGIAFRLPKGLR

SEQ ID NO: 90686 - protein, 195 aa, Unknown
  Bacterial polypetide isolated from the Sargasso Sea
LEEANYVSEYILGRGNRNEFMNKFAKACSNGFDPDKDLDRVGVANQTTMLKSETEEIGKVFERTMLKKFGPENLNSHFLAFNTICDATEERQDAMFSLVDEELDILVVIGGFNSSNTTHLQEIAITKNISSFHIDTPERISVKENSILHKPLGSDLELKNNFLPDGNINVGITSGASTPDKVVADVIEKLIVIAS

SEQ ID NO: 90687 - protein, 216 aa, Unknown
  Bacterial polypetide isolated from the Sargasso Sea
DATCPLVSKVHREAENLDKKDIKVLLIGHKNHPEVIGTMGQVSDGKIDLIETIDDAKNYERAENKKLAYITQTTLSVDDTKDIINVLRERFPDIHEPKKDDICYATTNRQAAVKKIAKECDNLFVIGSRNSSNSVRLVEVAQNNGCENAELIHSESSFPLEKISKCKTIGISSGASAPEVLVNEFIENIKKKFTVEIEEVEIVKEDVTFKIPGKLN

SEQ ID NO: 90688 - protein, 234 aa, Unknown
  Bacterial polypetide isolated from the Sargasso Sea
GVPKKIPEDAKNYKMTYVDATCPLVSKVHREAENLNKAGYQIILIGHENHPEVIGTMGQLPDGAVRLVQNEDEAQNYHAKKNDKIAYITQTTLSVDDTKEIIKILKNKYPSMKEPIKEDICYATTNRQAAVKNIAKQCDMFFVIGSRNSSNSVRLVEVAKKSGCENAHLIHSESEIPYNEIEKFNTIGISSGASAPEILVENFINALKNKFTIKINEVEIIKENVVFKVPNKLN

SEQ ID NO: 90689 - protein, 140 aa, Unknown
  Bacterial polypetide isolated from the Sargasso Sea
SLDDTIAIVKILYEQFPKILKPKSDDICYATQNRQDAVKQLALESEFIVVIGSRNSSNSNRLKELAEKCGATSVLIDGPEELDLKSLSKYSNIGITAGASAPESIVQNVVQAISLELNTVAKELGENKENIYFRLPPELR

SEQ ID NO: 90690 - protein, 293 aa, Unknown
  Bacterial polypetide isolated from the Sargasso Sea
FCAGVDRAIEIVKKTLNKYGSPVYVRHEIVHNKNVVESLKKLGAVFVEEISEITDVSRPVIFSAHGVPKKVPEEAKLKKIFYVDATCPLVSKVHRETEQLYRRGFDIVLVGHKNHPEVIGTMGQLPKGSIKLIENIEEVKNLKFSKPLAYVTQTTLSVDDTKEIIDALKEKFPKIKGPIKEDICYATTNRQAAVKKIAPNCEMFFVIGSRNSSNSARLVEVAKKSGCKNSELIFYGKKAPLEKIKNCKIIGLSSGASAPEELVQNFISEIQKNMIVSIEEVITANEKVVFKLP

SEQ ID NO: 90691 - protein, 88 aa, Unknown
  Bacterial polypetide isolated from the Sargasso Sea
MKQKTKLSLANPRGFCAGVDRAIEIVNRALDMFGSPIYVKHEVVHNEAVVNDLKERGAIFIEEISDVPDDSIIIFSAHGVSRKIEESV

SEQ ID NO: 90692 - protein, 263 aa, Unknown
  Bacterial polypetide isolated from the Sargasso Sea
MDKKLNIYLAGPRGFCAGVDRAIEMVKEALKKYGKPVYVRHEIVHNKYVVENLKEEGAIFVEELDEIKDKSRPVIFSAHGVPKSVPKEALKLNLIYFDATCPLVSKIHKEVENFDKKKLPVILIGHRNHPEVIGTMGQVNSEIYLVEKVADVKNLPIDKNIEIAYVTQTTLSVDDTKDIIKEIKNQFINVIEPKKNDICYATTNRQEAVKQIAQNCDYFLVIGASNSSNSLRLVEVAKNYGSKKAILVEDVDSLNLNIFDNIK

SEQ ID NO: 90693 - protein, 240 aa, Unknown
  Bacterial polypetide isolated from the Sargasso Sea
FSAHGVPKSVPDEAKNLNLLYFDATCPLVSKIHREVENFEKQNLPIILIGHRNHPEVIGTMGQIKSSIYLVENEKDVELLKLDNNKKIAYVTQTTLSVDETKEIIKAIKKKFNDVIEPRKNDICYATTNRQEAVKKIASNCEVFFVIGAYNSSNSIRLVEVARKYGAKKSILLENIEQIDDKIFKNINSIGLTASASAPEILVQNFIDLLEKKFDIELIQDDFIKEDVNFKIPQKLKEAI

SEQ ID NO: 90694 - protein, 140 aa, Unknown
  Bacterial polypetide isolated from the Sargasso Sea
MDNSKKIILVSPRGFCAGVTRAIDVVLEAIKKYGKPVYVNHEIVHNKHVIEDLTTKGAIFLKNIVDAPKDRPIIFSAHGVSKKITNYAKSNNETIIDATCPLVTKVHVQADKFYKLGFKIILIGHKNHPEVEGTMGQLPG

SEQ ID NO: 90695 - protein, 201 aa, Unknown
  Bacterial polypetide isolated from the Sargasso Sea
MKVKNNHLKILLAAPRGFCAGVDRAIEIVKKSIEKYGAPVYVRHEIVHNKHVVDGLKKIGAIFVEEIDEIKDKTRPVVFSAHGVPKSVPQEAESLNMIFVDATCPLVSKVHREAENLDKKDIKVLLIGHKNHPEVIGTMGQVASGKIDLIETTDDAKNYQRGKNDKLAYITQTTLSVDDTKDIINVLRERFPDIHEPKKDD

SEQ ID NO: 90696 - protein, 196 aa, Unknown
  Bacterial polypetide isolated from the Sargasso Sea
MKNKELKIMLSAPRGFCAGVERAIEIVEKSIQKFGAPVYVRHEIVHNKHVVDDLKNKGAIFVEELEEIKDKTRPVIFSAHGVPKKIPEDAKNYKMTYVDATCPLVSKVHREAENLNKAGYQIILIGHKNHPEVIGTMGQLPDGAVRLVQNEDEAQNYHAEKNDKIAYITQTTLSVDDTKEIIKILKNKYPSMKEPM

SEQ ID NO: 90697 - protein, 187 aa, Unknown
  Bacterial polypetide isolated from the Sargasso Sea
MKKELKIYLASPRGFCAGVKRAIEIVEKSINKFGAPVYVRHEIVHNKQVVEELKEKGAIFVDELSDIDDANRPVIFSAHGVPKSVPEEAKLKNLSFVDATCPLVSKVHRESEQLNKNGFDILLIGHKNHPEVIGTMGQLPKGSIKLIETINDVELLRENDFKKPLAYITQTTLSVDDTAEIIEALKK

SEQ ID NO: 90698 - protein, 249 aa, Unknown
  Bacterial polypetide isolated from the Sargasso Sea
CHIIDTTCPWVSKVWHTVEKHKKHVFTSIIHGKFKHEETLATSSFAGKYLVVLDLEEANYVSDYILGRGNRNEFINKFAKACSNGFDPDKDLDRVGVANQTTMLKSETEEIGKVFEQTMLRKFGPQNLNSHFLAFNTICDATEERQDAMFSLVDEDLDILVVIGGFNSSNTTHLQEIAITKNIASFHIDTPERISVKENSILHKPLGSDLKLKTNFLPSGNINVGITSGASTPDKVVADVIEKLIDIAA

SEQ ID NO: 90699 - protein, 261 aa, Unknown
  Bacterial polypetide isolated from the Sargasso Sea
KSLKVFLAAPRGFCAGVDRAIEIVKKSLDKYGSPVYVRHEIVHNKHVVDGLKKLGAIFVEELNEIEDKTRPVIFSAHGVPKSVPKEATNLNMTFVDATCPLVSKVHREAEILNKKGIHVLLIGHKNHPEVIGTMGQLPVGDIDLIESIDDAKKFKNSENKKLAYITQTTLSVDDTMDIINELKNKFSDIYEPKKEDICYATTNRQAAVKKIAKNCDMFFVVGSRNSSNSLRLVEVAINNGCEKSELIHSESTVPLDKIANC

SEQ ID NO: 90700 - protein, 239 aa, Unknown
  Bacterial polypetide isolated from the Sargasso Sea
MKNKEIRILLSAPRGFCAGVERAIEIVEKTLIKFGSPVYVRHEIVHNKFVVDDLKKKGAIFVEELEEIEDKTRPVIFSAHGVPKKIPLDAEKYKMTYIDATCPLVSKVHREAENLHKSNYHLILIGHENHPEVIGTMGQLPKGTIDLIQNEDEAKNYKFDSKKNLAFVTQTTLSVDDTKDIINILKERFPNIKEPHKEDICYATTNRQMAVKNIAKDCDLFLVIGSRNSSNSVRLVEVA

SEQ ID NO: 90701 - protein, 138 aa, Unknown
  Bacterial polypetide isolated from the Sargasso Sea
GKVFERTMLKKFGPENLNSHFLAFNTICDATEERQDAMFSLVDEDLDILVVIGGFNSSNTTHLQEIAITKNISSFHIDTPERISVKENSIFHKPLGSDLEIKNNFLPSGKINVGITSGASTPDKVVADVIEKLIDIAS

SEQ ID NO: 90702 - protein, 255 aa, Unknown
  Bacterial polypetide isolated from the Sargasso Sea
MNENKKLKILLAAPRGFCAGVDRAIEIVKKSIKKYGAPVYVRHEIVHNKHVVDSLKKIGAIFVDELEEIKDKTRPVIFSAHGVPKSVPKKAAEYKMEYIDATCPLVSKVHKEAENLHKNNYHILLIGHQNHPEVIGTMGQLPDKSIDLIETLDDVKNFTKRNDKKVAYVTQTTLSVDDTKNIVDALKIKFPEIKEPVKEDICYATTNRQAAVKNIAKNCEMFFVIGSRNSSNSQRLVEVAKQSGCNRSELIHSEK

SEQ ID NO: 90703 - protein, 148 aa, Unknown
  Bacterial polypetide isolated from the Sargasso Sea
YITQTTLSVDDTAEIIKALKSKFPKIKGPIKEDICYATTNRQSAVKEIASKCDMFFVVGSRNSSNSVRLVEVAKKAGCNNSHLMHSEKEIPFNEIDNSETIGISSGASAPEKLVQTLLDSLRKDRNVSIEEVVVAEEKVVFKLPKELN

SEQ ID NO: 90704 - protein, 167 aa, Unknown
  Bacterial polypetide isolated from the Sargasso Sea
RRVDTLQFKEEDKLAYLTQTTLSVDDASRIINRLKERFPQIVGPPKDDICYATQNRQEAVRQLAEHADIVLVLGSQNSSNSQRLAELASESEISAYLIDDANEIDPSWFSGDETVLITAGASAPESVVQDCVTWLTSRYNATVEEKTIREEQVYFPLPKQLRTALRN

SEQ ID NO: 90705 - protein, 252 aa, Unknown
  Bacterial polypetide isolated from the Sargasso Sea
EEINEIEDKTRPVIFSAHGVPKSVPQEAESLNMIFVDATCPLVSKVHREAENLNKKDVQVLLIGHKNHPEVIGTMGQVAKGKIDLIETIDDAKNYQRSKNDKLAYITQTTLSVDDTKDIINVLKERFPDIHEPKKDDICYATTNRQEAIKRIAKECDNLFVIGSRNSSNSVRLVEVAKNNGCENAELIHSESSFPLDKISKCKTIGISSGASAPEVLVKEFIENIKKKFTVEIEEVEIVKEDVTFKIPGKLN

SEQ ID NO: 90706 - protein, 243 aa, Unknown
  Bacterial polypetide isolated from the Sargasso Sea
KSIDKFGAPVYVRHEIVHNKHVVESLKKIGAIFVEELSEIKDKKRPVIFSAHGVPKSVPEEAQSLNMNYVDATCPLVSKVHREAENLYKSGNHILLIGHKNHPEVIGTLGQLPEGSIDLIESVEDVEKYKNVKKNIAYVTQTTLSVDDTKDIINRLKNKFPEIKEPKKEDICYATTNRQSAVKNIAKMCEMFFVIGSRNSSNSVRLVEVAKNSGCKKSTLIHSDSVAPFEEIDKCNTIGVSSG

SEQ ID NO: 90707 - protein, 239 aa, Unknown
  Bacterial polypetide isolated from the Sargasso Sea
FCTRSSKSVPKEAKKLNLLYYDATCPLVSKIHREVENFERRNLPVILIGHRNHPEVIGTMGQSSKIIYLVENKEDVNNLPIPRDQQIAYVTQTTLSVDDTKEIIDEIKLLYKNYLEPKKKDICYATTNRQEAVKNIAKNCDYFFVIGSKNSSNSLRLVEVAKNYGSRHSILVDDIENFDPSIIGSNSKIGITASASSPEILVKKILKKIEESYELNIIESKYEQEDTRFKIPQKLKEAV

SEQ ID NO: 90708 - protein, 231 aa, Unknown
  Bacterial polypetide isolated from the Sargasso Sea
KSVPEKAKNLNIEYVDATCPLVSKVHKEAEKLYKNNYHILLIGHFNHPEVIGTMGQLPKNSIDLIERVEDANKYVKKNDKKIAYITQTTLSVDDTKKIVEVLKNKFPEIKEPVKEDICYATTNRQAAVKKIAKECEMFFIIGSKNSSNSLRLVEVAQQAGCKQSELIHTENEIPIKKIINCSTIGISSGASAPEVLVKNFIDKIKKEVKVNIEEVEIIKENVIFKTPGKLN

SEQ ID NO: 90709 - protein, 135 aa, Unknown
  Bacterial polypetide isolated from the Sargasso Sea
MSNKNLKIYLAAPRGFCAGVDRAIEIVKKSIDKFGAPVYVRHEIVHNKHVVESLKKIGAIFVEELDEIKDKSRPVIFSAHGVPKSVPEEASNLNMMFVDATCPLVSKVHREAENLNKQGHHILLIGHKNHPEVIG

SEQ ID NO: 90710 - protein, 267 aa, Unknown
  Bacterial polypetide isolated from the Sargasso Sea
KHVVESLKKIGAIFVEELDEIKDKSRPVIFSAHGVPKKIPDQAKELHMEYIDATCPLVTKVHREAENLYKNGSHVLLIGHKNHPEVVGTMGQIPSDGIDLIQSLDDVNKYIKKNDKKLAFITQTTLSVDDTKDIVDGLKKKFPEIKEPKKEDICYATTNRQAAVKKIANKCDMFFVIGSRNSSNSLRLVEVAKNSGCENSILLHSESKVPFDKIDKCKSIGVSSGASAPEILVEQFLDKIKKKYSISVEEVEIVKEDVTFKIPGKLN

SEQ ID NO: 90711 - protein, 164 aa, Unknown
  Bacterial polypetide isolated from the Sargasso Sea
VSKVHREAENLNKQGHHILLIGHKNHPEVIGTMGQLPRGSIDLIENIEDANKYENISNKQLSFITQTTLSVDDTKDIIAALKSKFPDIKEPKKDDICYATTNRQSADKEIAYKCDMFFVIGSRNSSNSVRLVEVAKNSGCNSSELIHSESAVPIDKIKECNTIG

SEQ ID NO: 90712 - protein, 134 aa, Unknown
  Bacterial polypetide isolated from the Sargasso Sea
ERTMLKKFGPENLNSHFLAFNTICDATEERQDAMFSLVDEDLDILVVIGGFNSSNTTHLQEIAINKNISSFHIDTPERISVKENSIFHKPLGSDLELKNNFLPSGKINVGITSGASTPDKVVADVIEKLIDIAS

SEQ ID NO: 90713 - protein, 184 aa, Unknown
  Bacterial polypetide isolated from the Sargasso Sea
MKKELKIYLASPRGFCAGVKRAIEIVEKSISKFGAPVYVRHEIVHNKQVVEELKEKGAIFIDELSGVDDASRPVIFSAHGVPKSVPEEAKLKNLSFVDATCPLVSKVHRESEQLNKNGFDILLIGHKNHPEVIGTMGQLPKGSIRLIETKNDVDLLKEKNFKKPLAYITQTTLSVDDTAEIIEA

SEQ ID NO: 90714 - protein, 247 aa, Unknown
  Bacterial polypetide isolated from the Sargasso Sea
MKTKTRPVIFSAHGVPKSVPQEAESLNMIFVDATCPLVSKVHREAENLNRKDIQVLLIGHKNHPEVIGTMGQVPDGKIHLIETIDDAKNYQRDKNNKLAYITQTTLSVDDTKDIINVLKKRFPDIREPKKDDICYATTNRQSAIKKIAKECDNLFVIGSRNSSNSVRLVEVAKNNGCENAELIHSESTFPLEKISKCKTIGISSGASAPEVLVNEFIENIKKKFTVEIEEVEIVKEDVTFKIPGKLN

SEQ ID NO: 90715 - protein, 242 aa, Unknown
  Bacterial polypetide isolated from the Sargasso Sea
MNKKLDVYLAGPRGFCAGVERAILMVQEAIKKYGAPIYVRHEIVHNKYVVDSLKEEGAIFVEELNEIDQRDRPVIFSAHGVPKSVPEEAKNLNLLYFDATCPLVSKIHREVENFERMNLPVILIGHQNHPEVIGTMGQTAKEIFLVENKEEVKHLPIPKNQQIAYVTQTTLSVNDTKEIIDEIKLHFKNVLEPKKKDICYATTNRQEAVKNIAKLSNYFFVIGSRNSSNSLRLVEVAKNYVT

SEQ ID NO: 90716 - protein, 226 aa, Unknown
  Bacterial polypetide isolated from the Sargasso Sea
MKKELKIYLASPRGFCAGVKRAIEIVDKSINKYGSPVYVRHEIVHNKQVVEDLKKKGAIFVNELSDIKDNTRPVVFSAHGVPKTVPEEAKIKKLSYVDATCPLVSKVHRESEQLYKNGYEIILIGHNNHPEVIGTMGQLPKGAITLVETIDDAKSLNEKNFSKPTAYITQTTLSIDDTAEIINFLKKKFPNIKGPVKEDICYATTNRQIAVKKIASKCDMFFIIGS

SEQ ID NO: 90717 - protein, 261 aa, Unknown
  Bacterial polypetide isolated from the Sargasso Sea
KEKGAIFVDELSDIKDSSRPVIFSAHGVPKSVPEEAKFKNLFYVDATCPLVSKVHRESEQLNKNGFDILLIGHKDHPEVIGTMGQLPKGSIKLIETKNDTDNLNATDFNKPLAYITQTTLSVDDTAEIIDALKIKFPKIKGPIKEDICYATTNRQSAVKEIASKCDMFFVVGSRNSSNSVRLVEVAKKAGCNNSHLMHSGKKIPFNEIEDSNTIGISSGASAPEKLVQGLLNDLKKERKVSIEEVVVAEEKVIFKLPKELN

SEQ ID NO: 90718 - protein, 246 aa, Unknown
  Bacterial polypetide isolated from the Sargasso Sea
KDKTRPVIFSAHGVPKSVPKEASSLNMTYVDATCPLVSKVHREAENLYKNGSHILLIGHKNHPEVVGTMGQLPSDCIDLIENVNDAEKYSKKNGSKLAYITQTTLSVDDTREIINVLKNKFPEINEPKKEDICYATTNRQSAVKKIAKNCDMFFVIGSRNSSNSVRLVEVAKNNGCDKSELIHSESKVPIDKIANCKTIGISSGASAPEILVEEFIQELKKQFVLEIEEVEIIKEDITFKIPGKLN

SEQ ID NO: 90719 - protein, 205 aa, Unknown
  Bacterial polypetide isolated from the Sargasso Sea
MLATPRGFCAGVERAVDIVNKAVDVFGAPIYVKHEVVHNKFVIEDLEKKGVIFIEDITDVPDNSIIIYSAHGVSLKVKEDADRKNLKIFDATCPLVTKVHIEVHKYSKDGVDVILIGHKGHPEIEGTMGQYNSSFGDIHLIENKEDIDKLKIKNDKVAYVTQTTLSTDDTKHIIDCLCNRFPNILSPIKSDICYATQNRQDAVKS

SEQ ID NO: 90720 - protein, 196 aa, Unknown
  Bacterial polypetide isolated from the Sargasso Sea
MKNEVKIFLASPRGFCAGVERAIDIVEKTILKYGTPVYVRHEIVHNKQVVENLKKKGTIFVEELSEVRDLSRPVIFSAHGVPKTVPEEAKIKNLFYIDATCPLVSKVHRESEQLHKNGYDIILIGHKNHPEVIGTMGQLPSGSIRLIEQVGEVKDLNPESFKKPLAYITQTTLSVDDTAEIITKLKDKFPKIKSQL

SEQ ID NO: 90721 - protein, 273 aa, Unknown
  Bacterial polypetide isolated from the Sargasso Sea
MLKNSEILLTEPRGFCAGVERAIEIVNRAVEIFDETIFVKHEVVHNKHVIEQLVEKGVVFVESLETVPDQSILIYSAHGVSKEISELATKKRLKVFNATCPLVTKVHFEIHKFASQNIDVVLVGHSGHPEVEGTMGQYISENGKIHLVETNDDIDKLKIENKNIAYVTQTTLSVDDTKSIVSCLKNKFPNIIGPRKDDICYATQNRQEAVKKILEFCDSLIVIGSQNSSNSQRLKEIGVQYGIKSYLIDDINQINIEDLSGDEVIGITAGASA

SEQ ID NO: 90722 - protein, 238 aa, Unknown
  Bacterial polypetide isolated from the Sargasso Sea
MNKKLNIFLAGPRGFCAGVDRAIEMVKEALNKYGQPVYVRHEIVHNKYVVENLKSEGAIFVEELNEIKDKSRPVIFSAHGVPKSVPKEALELKLLYFDATCPLVSKIHKEVEHFDKKNLPVILIGHRNHPEVIGTMGQSNKEIYLVEKKEDVKNLQLNQNGFVAYVTQTTLSVDDTKDIITEIKRKFKNVIEPKKNDICYATTNRQEAVKKIAKNCDYFLVINASNSSNSLRLVKGKK

SEQ ID NO: 90723 - protein, 225 aa, Unknown
  Bacterial polypetide isolated from the Sargasso Sea
MGDVVILPAFGATVQEMKLLHEKGCHIIDTTCPWVSKVWHTVEKHKKHIFTSIIHGKFKHEETLATSSFAGKYLVVLDLEEANYVSEYILGRGNRNDFINKFAKACSNGFDPDKDLDRVGVANQTTMLKSETEEIGKVFEKTMLKKFGPENLNNHFLAFNTICDATEERQDAMFSLVDEDLDILVVIGGFNSSNTTHLQEIAITKNISSFHIDTPDRISVEENSI

SEQ ID NO: 90724 - protein, 319 aa, Unknown
  Bacterial polypetide isolated from the Sargasso Sea
MSITDTTLAEAEILLAQPRGFCAGVDRAIEIVERAIKLHGSPIYVRHEIVHNAYVVEDLRKKGAIFIEQLEEVPAGNTVIFSAHGVSKAVRAEAESRGLRVYDATCPLVTKVHIEVAKMRQDGFDIVMIGHKGHPEVEGTMGQAGEGMHLVEDIKDVQALQLADPERIAFVTQTTLSVDDAAEIIGALKSKYPAIREPKKQDICYATQNRQDAVKFMAPQCDVVIVVGSPNSSNSNRLRELAEKLGVPSYMVDSPDQIDPVWVEGKRRIGVTAGASAPEALAQAVIGRLHELGVRNVRALEGIEENIAFPLPRGLGLPA

SEQ ID NO: 90725 - protein, 318 aa, Unknown
  Bacterial polypetide isolated from the Sargasso Sea
MKFDPTSPSLNIMLANPRGFCAGVDRAISIVERALELFSPPIYVRHEVVHNRYVVQNLKDRGAVFVEELDQVPDNNIVIFSAHGVSQAVRAEAKARGLRVFDATCPLVTKVHLQVTRASRKGIECILIGHAGHPEVEGTMGQYDNPNGGVYLIESPADVETLQVRDPNNLCFVTQTTLSVDDTLDIISALLKRFPSIEGPRKDDICYATQNRQDAVRNLSADVDLLIVVGSKNSSNSNRLRELALKTGTESYLVDTADDIDSSWFEGVTKVAVTAGASAPEVLVQQVVQAIAKLAPSVVTEVEGRKEDTVFAVPAELR

SEQ ID NO: 90726 - protein, 221 aa, Unknown
  Bacterial polypetide isolated from the Sargasso Sea
MKNKELKILLSAPRGFCAGVERAIEIVEKSIQKFGAPVYVRHEIVHNKYVVDDLKNKGAIFVEELEEIKDKSRPVIFSAHGVPKKIPEDAKNYKMTYVDATCPLVSKVHREAENLNKAGYHIILIGHENHPEVIGTMGQLNEGSIDLIQNEEDALNYQNKLDKKLAYITQTTLSVEDTKEIIKILKTNFPNIKEPMKEDICYATTNRQMAVKNIAKNCDMF

SEQ ID NO: 90727 - protein, 246 aa, Unknown
  Bacterial polypetide isolated from the Sargasso Sea
GEVVVYSAHGISKAVEFESEVRKLDVFDATCPLVSKVHAEVNTYAKMGFDCLLIGHKNHPEVEGTMGQFDTSFGGTITLIEDISDAKKLNFKDSSRLAFVTQTTLSVDDTKEIKDFLIDRFPDIKGPKKDDICYATQNRQDAIKQLALESDLVLVIGSENSSNSNRLREIAERSGVEAYLIDTIGDLPSDCLKGKSKIGLTSGASAPEHLVSEVIDKLTSSYGFNLVGNKKRTDEGISFRLPKGLR

SEQ ID NO: 90728 - protein, 314 aa, Unknown
  Bacterial polypetide isolated from the Sargasso Sea
MKKELKIYLASPRGFCAGVKRAIEIVDRSIDKYGSPVYVRHEIVHNKQVVEDLKKKGAVFVNELSDIKDNTRPVVFSAHGVPKTVPEEAKFKKLSYVDATCPLVSKVHRESEQLFKKGYDIILVGHNNHPEVIGTMGQLPKGSITLVETIDDAKSLNDKKFTKPMAYITQTTLSIDDTAEIIEHLKKKFPNIKGPIKEDICYATTNRQKAVKKIASKCDMFFIIGSRNSSNSARLVEVAKKAGCKNSLLMHSEKEIPFLDIANSKIIGISSGASAPEELVQNLIKKIKKDYLVTIEEITVAEEKVVFKLPKELN

SEQ ID NO: 90729 - protein, 234 aa, Unknown
  Bacterial polypetide isolated from the Sargasso Sea
VPKTVPEEAKIKKLSYVDATCPLVSKVHRESEQLYKNGYDIILVGHNNHPEVIGTMGQLPKGAITLVETINDAKSLKIENFTKPMAYITQTTLSVDDTAEIINFLKKKFPKIKGPIKEDICYATTNRQTAVKKIASKCDMFFIIGSRNSSNSARLVEVAKKAGCKNSLLMHSEKEIPFADIANSKIIGISSGASAPEQLVQNLIREIEKDYLVSIEEVSVAEEKVIFKLPKELN

SEQ ID NO: 90730 - protein, 188 aa, Unknown
  Bacterial polypetide isolated from the Sargasso Sea
MRKTAKYLRLAAPRGFCAGVDRAVKIVEAALDKFGAPVYVRHEIVHNKTVVDELADKGAVFVEELYEVPSGAPVVFSAHGVSRAVIDEANDRKMIAVDATCPLVSKVHIEAKRHAAHRRHILLIGHAGHPEVEGTMGQVDDDAITLIETADDAHNVTPPEDCDLAFATQTTLSVDDTAEIISILQFRF

SEQ ID NO: 90731 - protein, 314 aa, Unknown
  Bacterial polypetide isolated from the Sargasso Sea
MKNKELKILLSAPRGFCAGVERAIEIVEKSIKKFGAPVYVRHEIVHNKYVVDDLKNKGAIFVEELEEIEDKSRPVIFSAHGVPKKIPEDAKSYNMTFVDATCPLVSKVHREAENLNKSGYHLILIGHESHPEVVGTMGQLPKGSIDLIQDEEEAKNYKFDKKKQIAFVTQTTLSVDDTKDIIKILKERFPNIREPLKEDICYATTNRQMAVKNIAKKCDMFFVIGSRNSSNSVRLVEVAKKSGCLKSHLIHSQSEIPYDLIENSNTIGISSGASAPEVLVENFIKELKKRFIVTIDEVEIIKENVTFKVPKKLN

SEQ ID NO: 90732 - protein, 258 aa, Unknown
  Bacterial polypetide isolated from the Sargasso Sea
KGAIFVEELEEIEDKTRPVIFSAHGVPKKIPEDAKNYNMTYIDATCPLVSKVHREAENLHRAGYHLILIGHQNHPEVIGTMGQLPEGSIDLVQNEDEAKKYKPQNNKKISYVTQTTLSVDDTKDIIQILKDRFPTIKEPIKEDICYATTNRQLAVKNIAKKCDLFFVIGSRNSSNSVRLVEVAKKSGCSNSLLIHSQSKIPFDLIKNSNIIGISSGASAPEILVNNFIDELKNKFTVSIDEIEIIKENVVFKAPKKLN

SEQ ID NO: 90733 - protein, 160 aa, Unknown
  Bacterial polypetide isolated from the Sargasso Sea
MKNKKLKILLAKPRGFCAGVDRAIEIVKKSIEKYGAPVYVRHEIVHNKEVVQSLRKIGAIFVEELSEISDKSRPVIFSAHGVPKSVTKEAENYKMEFIDATCPLVSKVHREAENHYKAGNHILLIGHKNHPEVIGTMGQIPSGKIDLIETIDDAKKYEIK

SEQ ID NO: 90734 - protein, 258 aa, Unknown
  Bacterial polypetide isolated from the Sargasso Sea
MKRIILAQPRGFCAGVQRAVDIVEKSIDKFGSPVYVRHEIVHNKHVVDSLTEKGAIFVDEISDIPDKSNTIFSAHGVSDKVETDAKIKSLSIVDATCPLVKKVHVEALKYYEQGYKIILVGHKGHPEVEGTAGRVPGGVKVIETVDHVNKLKFSKSDLLAYVTQTTLSVDDTKKIIDALKEKYPNIKGPDTRDICYATQNRQKAVRDLAKFSDVVLVLGNKNSSNSVRLAEISALTGIPTYRISDKNELNLELIKIIM

SEQ ID NO: 90735 - protein, 231 aa, Unknown
  Bacterial polypetide isolated from the Sargasso Sea
SIIHGKYSHEETVATASFATRYLIVKDMKEATYVREYILNGGDKAEFMEKFKNAVSQGFDPDDDLEGVGIANQTTMLKGETEAIGKLFEKTMMEKHGVENIADHFIVMDTICDATQERQDAMYKLVDEEPDIMLVIGGFNSSNTSHLQEISEDKSIPSYWVDTCDRMNADTNSITHKLAHGELVQTDDWLPRSDVVIGVTSGASTPDKVVEDVIDVVFATKRALTSEVSSR

SEQ ID NO: 90736 - protein, 275 aa, Unknown
  Bacterial polypetide isolated from the Sargasso Sea
MKKELKIYLASPRGFCAGVKRAIEIVEKSISKFGAPVYVRHEIVHNKQVVEELKEKGAIFVDELSDVDDTSRPVIFSAHGVPKSVPEEAKLKNLSFVDATCPLVSKVHRESEQLNKNGFDILLIGHKNHPEVIGTMGQLPKGSIKLIETKNDAKLLRENDFKKPLAYITQTTLSVDDTVEIIETLKDKFPKIKGPIKEDICYATTNRQSAVKEIASKCDMFFVVGSRNSSNSVRLVEVAKKAGCNNSHLMHSEKEIPFNEIENSETIGISSGASA

SEQ ID NO: 90737 - protein, 312 aa, Unknown
  Bacterial polypetide isolated from the Sargasso Sea
MTKEIKLANPRGFCAGVDRAIDIVNKALDIYGAPVYVKHEVVHNKVVVDDLRNRGAVFVEEIDEIPDDSLVIFSAHGVSSEVEETTKARNLNFFDATCPLVTKVHMEVRKHAKANRDIILIGHEGHPEVEGTMGRHINSENSSIYLVQDENDALNINVNNSESLALVTQTTLSVDETISIIDILRNRFPNIEVPKKDDICYATQNRQDAVKQLALESDYIIVVGSKNSSNSNRLKELAEKCGCKSTLIDEFSDLDLEDIKKFKNIAITAGASAPESRVMEIAKSLEDYFGAKLIEDGEDTENVYFKMPPGLR

SEQ ID NO: 90738 - protein, 213 aa, Unknown
  Bacterial polypetide isolated from the Sargasso Sea
MSKSKLILASPRGFCAGVERAVEILQRAIDLLGAPVYVKHEVVHNKYIIEDFEKKGVMFIEDINSIPDEAVLIYSAHGVSNKIKEIAKKKNLKIFDATCPLVTKVHLQVHKYASQNIDVVLIGHIGHPEIEGTMGRYESEKGKLHLVQFEDDVDSLDIDNPNLAYVTQTTLSVDDTKIIIDRLKKKFPNIVGPVKDDICYATQNRQDAVKSIL

SEQ ID NO: 90739 - protein, 316 aa, Unknown
  Bacterial polypetide isolated from the Sargasso Sea
MKKELHKEIVLANPRGFCAGVDRAIDIVEKSLDKFKEPVYVRHQVVHNKKVVEDLEKKGVKFVKEVSEIPDNAVAIFSAHGVSQKVEDEAKNRNFMYFDATCPLVTKVHLEVQKHAQKGRDIILIGHKGHPEVIGTLGRHPSNSNTKIYLVENNDDIKKLEISSPEVAYVTQTTLSVDETRELINSLKEKFPGIIGPSADDICYATQNRQDAVKQLSLECQIVLVIGSQTSSNSNRLKELAEKCGTKSFLIDDKTDIDLNSLKDATSVGITAGASAPEEIVQEVISFLVPLGFKTVRNLSENNENMTFKLPKELTS

SEQ ID NO: 90740 - protein, 398 aa, Unknown
  Bacterial polypetide isolated from the Sargasso Sea
MDTQAFRRSLHHSDRYNRRGFDSPTKRAQALEEAYQSELISSIRDNNFTYTKGRLNIKLAQAFGFCWGVERAVAMAYETRRHYPNENIWITNEIIHNPSVNDHLRKMNVKFISAKNGIKDFSLVSNGDVVILPAFGATVQEMKLLHEKGCHIIDTTCPWVSKVWHTVEKHKKHIFTSIIHGKFKHEETLATSSFAGKYLVVLDLEEANYVSEYIQGRGNRNEFMNKFAKACSNGFDPDKDLDRVGVANQTTMLKSETEEIGKVFERTMLKKFGPENLNSHFLAFNTICDATEERQDAMFSLVDEDLDILVVIGGFNSSNTTHLQEIAITKNISSFHIDTPERISVKENSIFHKPLGSELELKNNFLPSGKINVGITSGASTPDKVVADVIEKLIDIAS

SEQ ID NO: 90741 - protein, 256 aa, Unknown
  Bacterial polypetide isolated from the Sargasso Sea
KLLHEKGCHIIDTTCPWVSKVWHTVEKHKKHVFTSIIHGKFKHEETLATSSFAGKYLVVLDLEEANYVSEYILGRGNRNEFINKFAKACSDGFDPDKDLDRVGVANQTTMLKSETEEIGKVFERTMLKKFGPENLNSHFLAFNTICDATEERQDAMFSLVDEDLDILVVIGGFNSSNTTHLQEIAITKNISSFHIDTPERISVEENSILHKPLGSDLELKNNFLPNGKINVGITSGASTPDKVVADVIEKLIDIAS

SEQ ID NO: 90742 - protein, 223 aa, Unknown
  Bacterial polypetide isolated from the Sargasso Sea
MKNKNLKILLASPRGFCAGVDRAIEIVKKSIDKYGSPVYVRHEIVHNKHVVDSLKKIGAVFVEELEEIKDKSRPVIFSAHGVPKSVPKEASELNMTYVDATCPLVSKVHREAENLHKNGSHILLIGHKNHPEVVGTMGQLPNESIDLIENIEDAEKYSKKNGNKLAYITQTTLSVDDTREIINILKRKFPEINEPKKEDICYATTNRQSAVKKIAKKCDMFFV

SEQ ID NO: 90743 - protein, 314 aa, Unknown
  Bacterial polypetide isolated from the Sargasso Sea
MKKELKIYLASPRGFCAGVKRAIEIVEKSISKFGAPVYVRHEIVHNKQVVEELKEKGAIFVDELSDVDDASRPVIFSAHGVPKSVPEEAKLKNLSYVDATCPLVSKVHRESEQLNKNGFEIFLIGHKNHPEVIGTMGQLPNGSIKLIETINDVELLKENDFKKPLAYITQTTLSVDDTAEIIKALKSKFPKIKGPIKEDICYATTNRQSAVKEIASKCDMFFVVGSRNSSNSVRLVEVAKKAGCNNSHLMHSEKEIPFNEIDNSETIGISSGASAPEKLVQTLLDSLRKDRNVSIEEVVVAEEKVVFKLPKELN

SEQ ID NO: 90744 - protein, 246 aa, Unknown
  Bacterial polypetide isolated from the Sargasso Sea
EISDVSRPVIFSAHGVPKEVPEEAKLKKIFYIDATCPLVSKVHRETEHLYKNGFDIILIGHRNHPEVIGTMGQLPKNSIKLIENVEEVKNLKFNKPLAYVTQTTLSVDDTKEIIDALKFKFPDIKGPIKEDICYATTNRQAAVKKIAPNCEMFFVIGSRNSSNSARLVEVAKKSGCKNSELIFFGKKAPLEKIKNCKTIGLSSGASAPEELVQNFISEIKKDMNVSIEEVVTANEKVVFKLPKELN

SEQ ID NO: 90745 - protein, 187 aa, Unknown
  Bacterial polypetide isolated from the Sargasso Sea
MKNKELKILLSAPRGFCAGVERAIEIVEKSIQKFGAPVYVRHEIVHNKYVVDDLKNKGAIFVEELEEIKDKSRPVIFSAHGVPKKIPEDAKNYKMTYVDATCPLVSKVHREAENLSKAGYHIILIGHENHPEVIGTMGQLNKGSIDLIQNEEDATNYQNKLNKKLAYITQTTLSVDDTKEIIKILKT

SEQ ID NO: 90746 - protein, 314 aa, Unknown
  Bacterial polypetide isolated from the Sargasso Sea
MSNKNLKIYLAAPRGFCAGVDRAIEIVKKSIDKFGAPVYVRHEIVHNKHVVEGLKKIGAIFVEELDEIKDKSRPVIFSAHGVPKSVPEEASNLNMMFVDATCPLVSKVHREAENLNKQGHHILLIGHKNHPEVIGTMGQLPKGSIDLIENIEDANKYENISNKQLSFITQTTLSVDDTKDIIAALKSKFPDIKEPKKDDICYATTNRQSAVKEIADKCDMFFVIGSRNSSNSVRLVEVAKNSGCNSAELIHSESPVPIDKIKGCNTIGISSGASAPEILVEKFIAELKNQFTVNIEEVEIVKENITFKIPGKLN

SEQ ID NO: 90747 - protein, 305 aa, Unknown
  Bacterial polypetide isolated from the Sargasso Sea
MASPRGFCAGVDRAITIVEKALEKFGPPIYVRHEIVHNRHVVSRLREKGVIFVDELDQVPEGAHAIFSAHGVSPQVREQALERNLEVLDATCPLVTKVHVEAKRYAQKGFIILLIGHREHVEVEGTFGEAPDRIIIVGTVEEAENLELPPFSRIAYLTQTTLSLDDTADIIKVLRRRFPEIEGPAKDDICYATQNRQNAVKQISKEVDLVLVVGAENSSNTLRLVEVAESLGTRAVRIQSSSELQPDWLEECNKIGITAGASAPEDIVQGIVDKLQGWNPGCRVRELKLTEEQVSFGLPPQLKTP

SEQ ID NO: 90748 - protein, 256 aa, Unknown
  Bacterial polypetide isolated from the Sargasso Sea
AIFVNELSEINDKSRPVIFSAHGVSKKVIEEAKIEKLFFVDATCPLVSKVHREAEMLYKKEYKILLIGHKGHPEVIGTMGQLPVGSVELIEKKEDILNLRISNKDKVAYITQTTLSIDDTSEIVNALKTRFPKIKEPIKSDICYATTNRQNAVKQIANKCDLFIVIGSRSSSNSKRLVEVAKKSGCKESLLLHSEEILPREKIMKAENLGISSGASAPEILVEKMIEEIKNLRSVKIEEFKTVDENVSFKLPSELR

SEQ ID NO: 90749 - protein, 323 aa, Unknown
  Bacterial polypetide isolated from the Sargasso Sea
MTNNNNPIDVFLAQPRGFCAGVDRAIAIVEEALRIHGAPVYVRHEIVHNKRVISMLEDKGAIFVEEVEDIPDGAITIFSAHGISSKVEKDAIARSLPVIDATCPLVSKVHAEGRKHTENGCEVILIGHKGHPEVEGTMGRINGTVYLVSNVTDAKTIMVENPNKLAYVTQTTLSVDDTRDIILELERRFPKITGPNVKDICYATQNRQSAVKELTQQVDLLIVLGASNSSNSNRLKEIGIELGVPSYLIDEADQMEPSWLNGVSKIGITAGASAPEELVEELIENLRAIREINLKTFGDTIEDVIFKLPKELTEISSQTQEIF

SEQ ID NO: 90750 - protein, 292 aa, Unknown
  Bacterial polypetide isolated from the Sargasso Sea
MDKKLDLYLAGPRGFCAGVERAILMVKEAIKKYGKPVYVRHEIVHNKFVVENLKKEGAIFIEELDEMKDSKRPVIFSAHGVPKKIPNKARDLNLIFFDATCPLVSKIHREVENFEKNKLPIILIGHRNHPEVIGTMGQVKSKIYLVEKIEDIKSLPFNKNDKVAYVTQTTLSIDDTKDIIFEIKKKFPKAIEPKKNDICYATTNRQEAVKHIAKKCDYFLVIGSNNSSNSLRLVEVAKNYGAKKCILVENINELDSSIFQNVDSIGITASASSPEILVKNLIKLLSKKYELN

SEQ ID NO: 90751 - protein, 274 aa, Unknown
  Bacterial polypetide isolated from the Sargasso Sea
MEIRLANTRGFCAGVDRAIEIVKKVIELHGAPVYVKHEVVHNKTVVEELKNLGAIFVEDIEEIPVGEVVVYSAHGISKAVEVQSGERNLDVFDATCPLVSKVHAEVHTYAKMGFDCLLIGHKNHPEVEGTMGQFDTSYGGTITLVEDIEDAKKLSFKDSSNLAYVTQTTLSVDDTKEIKDYLLRRFPNIKGPKKDDICYATQNRQDAIKQLALESDLVIVIGSENSSNSNRLREIAERSGVEAYLIDSIDDLSLDCLESKSKIGLTSGASAPRT

SEQ ID NO: 90752 - protein, 399 aa, Unknown
  Bacterial polypetide isolated from the Sargasso Sea
MDTHAFKRSLHHSERYNRRGFGRAEEVAESLEQAYQSGLIGTIRDNGYKLSHGRLTVRLAEAFGFCWGVERAVAMAYETRKHYPAERLWITNEIIHNPSVNDHLREMDVQFIPVEQGVKDFSGVTSGDVVILPAFGATVQEMQLLNERGCHIVDTTCPWVSKVWTTVEKHKKHTITSIIHGKVKHEETLATSSFAGTYLVVLDMEEAQIVADYILGKGDRDAFMQRFSAACSPGFDPDRDLSRLGVANQTTMLKSETEEIGRLFERTMLSKYGPAELNDHFVAFNTICDATQERQDAMFSLVDEPLDLMVVIGGFNSSNTTHLQEIAVSRGIRSFHIDTPDRLDAQANAIEHKPLNENLRLESNFLPAGPVTVGITSGASTPDRAVEEVIEKLMLLSES

SEQ ID NO: 90753 - protein, 313 aa, Unknown
  Bacterial polypetide isolated from the Sargasso Sea
MNKRKLKILLAAPRGFCAGVDRAIEIVKKSIEKFGAPVYVRHEIVHNKHVVESLKKIGAIFVEELSEIKDKNRPVVFSAHGVPKSVPAEAEDLKMTYVDATCPLVSKVHREAENLHKAGNHILLIGHKNHPEVIGTIGQLPIGSIDLIESIDDVEKYENSKKDIAYVTQTTLSVDDTKDIIDKLKIKFPNIKEPKKEDICYATTNRQSAVKNIAKSCEMFFVIGSRNSSNSVRLVEVAKNSGCEKSTLIHSESTTPFDEIDKCNTIGISSGASAPEILVNNFINNLKEKYEVEIEEVEIIKEDIVFKIPKKLN

SEQ ID NO: 90754 - protein, 309 aa, Unknown
  Bacterial polypetide isolated from the Sargasso Sea
MDILLANPRGFCAGVDRAISIVSRALEIYEPPIYVRHEVVHNKFVVDGLRRAGAVFVDELDEVPDDAIVIFSAHGVSQAVRENAKQRGLKVFDATCPLVTKVHMEVTRASRKGIECILIGHAGHPEVEGTMGQYDNAEGGIYLVESVEDVEQLQVKNPAALCFSSQTTLSVDDTADVIDALRQRFPDIEGPRKDDICYATQNRQDAVRELSAKTELLLVVGAKNSSNSNRLRELAEKMGCRSYLIDTAADIQQDWLKDVKSVGVTAGASAPEVLVQQVVQRLTEWGGKQVIEHPGREENVIFAVPAELR

SEQ ID NO: 90755 - protein, 313 aa, Unknown
  Bacterial polypetide isolated from the Sargasso Sea
MTKKLNIFLAGPRGFCAGVDRAIEMVKGALKKYGAPVYVRHEIVHNKFVVENLKSQGAIFVEELNEIEDRSRPVIFSAHGVPKAVPEEALSLNLVYYDATCPLVSKIHKEVENFDKKNLPVILIGHRNHPEVIGTMGQTDKKIHLVEKVEDVKKLPLNQNDEIAYVTQTTLSVDDTKDIIKEIKLHFSNVIEPKKNDICYATTNRQEAVKKIANQCDYFLVIGASNSSNSLRLVEVAKNYGSKKAILVEDVDSLNLNIFQESENIGITASASSPEVLVKKLLDNLKRNFEIHINEGSYQKEDVFFKVPQKLNV

SEQ ID NO: 90756 - protein, 311 aa, Unknown
  Bacterial polypetide isolated from the Sargasso Sea
MKIRLADTRGFCAGVDRAIEIVKKVLELNGAPVYVKHEVVHNKTVVNELKSLGVVFVEEVDEVPNGEIVIYSAHGVSKAVETDSHAKDLEVFDATCPLVSKVHAEVNTYAKLGYDCLLIGHLNHPEVEGTMGQFDTSHGGSITLIETLEDVKSLKFKNGKNLAFVTQTTLSVDDTEEIIELLVSRFPAITGPKKDDICYATQNRQDAVKQLALESDLVLVIGSINSSNSNRLREIAERSGVDSYLLDSVENLEESWLEGKKNIGVTSGASAPEHLVKELIDSLEKNYGYSLHGSNEIIDEGIAFRLPKGLR

SEQ ID NO: 90757 - protein, 252 aa, Unknown
  Bacterial polypetide isolated from the Sargasso Sea
MKTKILLANPRGFCAGVDRAIDIVNQALTKFGPPIYVRHEVVHNKTVVEELKSKGVIFVDDLSQVPESSYIIFSAHGVSEKVEKEPEIYNLVSFDATCPLVTKVHSEVKRHVRAGRDIILIGHEGHPEVEGTLGRHNPVNSKSNIYLVQDKKEAELLEVSQPENLTYVTQTTLSLDDTISIIEVLCKKFPKILKPKGDDICYATQNRQDAVKQLALESEFIIVIGSRNSSNSNRLKELAEKCGATSILIDGA

SEQ ID NO: 90758 - protein, 315 aa, Unknown
  Bacterial polypetide isolated from the Sargasso Sea
MNLKLKKILYLPHPRGFCAGVDRAINIVELSLEKYGPPIFVRHEIVHNPWVIKDLESKGVIFIENLKDAPKGSRIIFSAHGIPKSVLIEAKAKEMPFIDATCPLVIKVHNEAKRLYRDGAHIFLIGHEGHPEVIGTMGQIPLDAITLIQDKQDVKELKKTNYKKVALITQTTLSVDDTKEIIDELKCIFPNIIQPPKEDICYATTNRQLAIKSIASKCDLIYVIGANNSSNSLRLVEVGKRSGCEETHLISDKSEVNWKLVEKKQKIGLTAGASAPDILIQEFINELNQLYNVEIKKISVADENITFKIPRELNE

SEQ ID NO: 90759 - protein, 255 aa, Unknown
  Bacterial polypetide isolated from the Sargasso Sea
MKQKTKLSLANPRGFCAGVDRAIEIVNRALDMFGSPIYVKHEVVHNEAVVNDLKERGAIFIEEISDVPDDSIIIFSAHGVSRKIEESVKERNLQFFDATCPLVTKVHMEVIRHGRANRDIILIGHEGHPEVEGTMGRYFSQNGKIYLVQDLEEAKEVSVNQPENVAYVSQTTLSVDETKDIISELTEKFPSIVGPKKDDICYATQNRQDAVKQLALETDYIIVVGSKASSNSNRLKELANKCGVNSVLIDEFSDL

SEQ ID NO: 90760 - protein, 312 aa, Unknown
  Bacterial polypetide isolated from the Sargasso Sea
MNKEIKLANPRGFCAGVDRAIDIVNKALDIYGAPVYVKHEVVHNKVVVNDLKKKGAIFVENIDEIPDNSLVIFSAHGVSSEVEETTKSRNLNYFDATCPLVTKVHMEVIKHAKANRDIILIGHEGHPEVEGTMGRHVNSKNSNIYLVQDEKDARNLQIENTREIALVTQTTLSVDETVAIIDILKSKFPNINLPKKDDICYATQNRQDAVKQLALESDYIIVVGSKNSSNSNRLKELAEKCGCKSALIDEFADLDLEELSSCSNISITAGASAPESRVVEIAKSLEAHIGAKIMEHGEDKENIYFKLPAELR

SEQ ID NO: 90761 - protein, 312 aa, Unknown
  Bacterial polypetide isolated from the Sargasso Sea
MTKQIKLANPRGFCAGVDRAIDIVNKALDIYGAPVYVKHEVVHNKVVVADLRDRGAIFVEEIDEIPDDSLVIFSAHGVSSAVEEETKSRNLNFFDATCPLVTKVHMEVRKHAKASKDIILVGHEGHPEVEGTMGRHINSDNSSIYLVQNELDAENIEINNPTKLALVTQTTLSVDETKSIIDILKNRFPSIDIPKKDDICYATQNRQDAVKQLALESDFMIVVGSKNSSNSNRLSELAEKCGCRSILIDEFTDIDLDDLKNYSKISITAGASAPESKVMEIAKSLELHTDAKIIEHGEDNEDIYFKLPPGLR

SEQ ID NO: 90762 - protein, 313 aa, Unknown
  Bacterial polypetide isolated from the Sargasso Sea
MNKHKLKILLAGPRGFCAGVDRAIEIVKKSIDKFGAPVYVRHEIVHNKHVVESLKKIGAIFVEELSEIKDKTRPVIFSAHGVPKSVPAEAEGLNMNYVDATCPLVSKVHREAENLYKSGNHILLIGHKNHPEVIGTLGQLPDGAIDLIESIEDVEKYNNENKNIAYVTQTTLSVDDTKEIINKLKNKFPEIKEPRKEDICYATTNRQSAVKNIAKLCEMFFVIGSRNSSNSVRLVEVAKNSGCKKSTLIHSESFTPFEEIDKCSTIGISSGASAPEILVDNFISNLKEKYEVEVEEVEIIKENITFKIPKKLN

SEQ ID NO: 90763 - protein, 319 aa, Unknown
  Bacterial polypetide isolated from the Sargasso Sea
MQLKKKSLKIILAQPRGFCAGVERAIEIVERALKIYGPPVYVRHEIVHNKRVVNNLSSKGAVFVKELDQIPQGAVTVFSAHGVSQKVEDTAGVRKLPVLDATCPLVAKVHKEGQRYSNDGFEVILIGHEGHPEVEGTMGRIPGPVYLVSNTNDVKRLKVKNPDKLSYVSQTTLSVDDTRDVINALQERFPKIVGPDVKDICYATQNRQSAVRDLVKSVDLVLVVGARNSSNSNRLKDIGSESGVNTHLIETADDMSLSWFENVDSVGITSGASTPDELVKEVIDRISTFTSIEIEKQSGKEENVVFKLPKELLNYEMAN

SEQ ID NO: 90764 - protein, 314 aa, Unknown
  Bacterial polypetide isolated from the Sargasso Sea
MKSKEIKILLAAPRGFCAGVERAIEIVKKSINKYGAPVYVRHEIVHNKHVVDSLKEIGAIFVEELHEIKDKTRPVIFSAHGVPKKVPIEAENFKMEYVDATCPLVSKVHREAENLNKNGVQILLIGHKNHPEVIGTMGQIPEGEIDLIENIDDANNYENKSKKKLAFVTQTTLSVDDTKEIISALKKKFPEIREPKKEDICYATTNRQAAVKKIAEKCDMFFVIGSRNSSNSLRLVEVAKNSGCINSRLIHSESTVPFEEIEKYKIIGISSGASAPEILVDNFINNLKKQFTVAIEEIEIVKENITFKIPGKLN

SEQ ID NO: 90765 - protein, 314 aa, Unknown
  Bacterial polypetide isolated from the Sargasso Sea
MRVILAQPRGFCAGVVRAIEIVDRALQQHGAPVYVRHEIVHNRHVVDNLRQKGARFVEELDEVPHGAVAIFSAHGVAQTVERDAEQRGLDVLDATCPLVTKVHVQGRQYVAAGRTLILIGHAGHPEVEGTIGQIPGKVLLVQSEAEVAQLDLPLDTPLAYVTQTTLSVDDTRGIIDALLRRFTDIVGPDTRDICYATQNRQAAVRELSKEVDVLLVVGATNSSNSNRLREIGSETGVASYLVADGSEVKPEWFANVQTVGITAGASAPEEMVKNVIDALRALGPVDVTTMAGREEKVEFKLPSKLMQPLAAREV

SEQ ID NO: 90766 - protein, 313 aa, Unknown
  Bacterial polypetide isolated from the Sargasso Sea
MKKKILLANPRGFCAGVDRAIDIVNQALDKFGPPIYVRHEVVHNQTVVDELKSKGVIFVDELSQVPESSYVIFSAHGVSEKVEKEPEIYNLVSFDATCPLVTKVHNEVKRHARAGRDIILIGHEGHPEVEGTLGRHNPINFKSNIYLVQDEKEAELLEVSQPENLTYVTQTTLSLDDTISIVEILFQKFPKILKPKSDDICYATQNRQDAVKQLALESEFIIVIGSKNSSNSNRLKELAEKCGATSILIDGANEIDFEKLSQFKSIGITAGASAPESIVQKVVKVVSNKFNAIPEELGENKENIYFRLPPELR

SEQ ID NO: 90767 - protein, 301 aa, Unknown
  Bacterial polypetide isolated from the Sargasso Sea
MKNKQIKILLSAPRGFCAGVERAIEIVEKSIQKYGSPVYVRHEIVHNKHVVDNLINKGAIFVEELEEINDKSRPVIFSAHGVPKKIPEDAENYKMTYVDATCPLVSKVHREAENLNKAGYHIVLIGHENHPEVIGTMGQLPKGSIDLVQNEAEAMEYKTNHKEKLAYITQTTLSVDDTKEIIKILKDRYTNIKEPAKEDICYATTNRQMAVKNIAKNCDMFFVIGSRNSSNSVRLVEVAKKSGCQNSQLFHSESEIPFDQIQNSNTIGISSGASAPEILVEDFINELNKKFSIIVEEVEII

SEQ ID NO: 90768 - protein, 220 aa, Unknown
  Bacterial polypetide isolated from the Sargasso Sea
PFVDATCPLVSKVHRESEQLYKNGFDIFLIGHKNHPEVIGTMGQLPKGSIKLIETKNDVDLIKQENFKKPLAYITQTTLSVDDTAEIIAALKNKFPKIKAPIKEDICYATTNRQSAVKEIASKCDMFFVVGSRNSSNSVRLVEVAKKAGCNNSHLMHSEKEIPYHEINDSSTIGISSGASAPEKLVQTLLDNIKKNRKVSIEEVVVAEEKVVFKLPKELY

SEQ ID NO: 90769 - protein, 255 aa, Unknown
  Bacterial polypetide isolated from the Sargasso Sea
MDQQIEAQKAINPGNSLEVILASPRGFCAGVDRAITIVEKALEKFGPPIYVRHEIVHNRHVVSRLREKGVIFVDELDQVPEGAHAIFSAHGVSPQVREQAMERNLEVLDATCPLVTKVHVEAKRYAQKEFIILLIGHREHVEVEGTFGEAPDRIIIVGTVEEAENLELPPSSRIAYLTQTTLSLDDTADIIKVLCRRFPEIEGPAKDDICYATQNRQNAVKQISKEVDLVLVVGAENSSNTLRLVEVAESLGTRA

SEQ ID NO: 90770 - protein, 308 aa, Unknown
  Bacterial polypetide isolated from the Sargasso Sea
MKREIKLANPRGFCAGVDRAIEIVNQALLKFGPPVYVRHEVVHNRNVVEDLKSKGAIFVEQIDEIPEGAITIFSAHGVSKKVVDDAEVKNLNYFDATCPLVTKVHMEVIRYARQGLDIILVGHDNHPEVEGTLGRFPHDSKGKIYLVESEIDAKNIEIDQPSNLAMVTQTTLSVDDTKSIVDILKKRFPRLISPSSDDICYATQNRQDAVKQLALETELIIIVGSNNSSNSNRLKELSENCGVKSILVDDPDEIAPEQLDGIFKLGISAGASAPESLVQSIVSKCQKLGFEMSQELDGLKESVNFKLP

SEQ ID NO: 90771 - protein, 298 aa, Unknown
  Bacterial polypetide isolated from the Sargasso Sea
GVDRAIEIVKKVLEMNGAPVYVKHEVVHNKTVVNELKSLGAIFVEEIEDVPDGEIVIYSAHGVSKVVESDSKEKSLDVFDATCPLVSKVHAEVNTYAKLGYDCLLVGHLNHPEVEGTMGQFDTSYGGTITLIETLDDVNKLKFADGKNLAFVTQTTLSVDDTLEITNLLVTKFPDITGPKKDDICYATQNRQDAVKQLALESDLVLVIGSINSSNSNRLREIAERSGVDSYLIDSSDDLQDSWLKGKENIGVTSGASAPEHLVRELINSLEKDYGYSLQGSNEITDEGIAFRLPKGLR

SEQ ID NO: 90772 - protein, 311 aa, Unknown
  Bacterial polypetide isolated from the Sargasso Sea
MNILLANPRGFCAGVDRAISIVESALEKFGAPIYVRHEVVHNRYVVNKLKEAGAVFVEELDEVPDDSIVIFSAHGVSKAVREMAKSRALKVFDATCPLVTKVHMEVHRASRKGSEAVLIGHAGHPEVIGTMGQYENREGGMYLVETPEDVAKLKVKNPDDLCFVTQTTLSVDETSDVIDALRAHFPKIQGPRKDDICYATQNRQDAVREMAGLVDAMLVVGSRNSSNSNRLRELAEKVGAKAYLIDDASMIEADWLAGVEAIGVTAGASAPEVLVQSVITRLRELGGKVVAEHPGREENVVFEVPPELRIL

SEQ ID NO: 90773 - protein, 314 aa, Unknown
  Bacterial polypetide isolated from the Sargasso Sea
MRNIWITNEIIHNPSVNDHLRKMNVKFISSKNGIKDFSLVSNGDVVILPAFGATVQEMKLLHEKGCHIIDTTCPWVSKVWHTVEKHKKHVFTSIIHGKFKHEETLATSSFAGKYLVVLDLEEANYVSEYILGRGNRNEFMNKFAKACSNGFDPDKDLDRVGVANQTTMLKSETEEIGKVFERTMLKKFGPENLNSHFLAFNTICDATEERQDAMFSLVDEDLDILVVIGGFNSSNTTHLQEIAINKNISSFHIDTPERISVKENSIFHKPLGSELELKNNFLPNGKINVGITSGASTPDKVVADVIEKLIDIAS

SEQ ID NO: 90774 - protein, 121 aa, Unknown
  Bacterial polypetide isolated from the Sargasso Sea
MIEDNKNLNLNKNLYLASPRGFCAGVERAIKIVEQAIKIHGKPVYVKHEIVHNKHVVKRLSEDGAIFVESFQDVPKNSIIIFSAHGVAKKVVNKAKEHDLNIFDATCPLVTKVHLEAIKLH

SEQ ID NO: 90775 - protein, 234 aa, Unknown
  Bacterial polypetide isolated from the Sargasso Sea
MNKEIKLANPRGFCAGVDRAIDIVNKALDIYGAPVYVKHEVVHNKVVVDDLKKRGAIFVEEINEIPDDSLVIFSAHGVSREVEESTKSRNLNYFDATCPLVTKVHMEVRKHANANKDIILVGHEGHPEVEGTMGRHENSENSSIYLVENENDAKNIRITKKNNLAVVTQTTLSVDETKSIIDILKDRFPNISIPKKDDICYATQNRQDAGKQLALEIRFMIVCRDQKIVQTLID

SEQ ID NO: 90776 - protein, 157 aa, Unknown
  Bacterial polypetide isolated from the Sargasso Sea
MNIILANPRGFCAGVDRAIEITNKALDIFGAPIYVKHEIVHNKYVVDELKEKGVIFIEDVKKIPHHSILIYSAHGVSEKIIQESNERNLQVFNATCPLVTKVHMEVARLSKKRINTILIGHKGHPEVEGTIGRYKPSSKSKIILVENEDDVEILNLI

SEQ ID NO: 90777 - protein, 398 aa, Unknown
  Bacterial polypetide isolated from the Sargasso Sea
MDTQAFRRSLHHSDRYNRRGFDSPTKRAQALEQAYQSDLISSIRDNGFNYTKGRLNIKLAKAFGFCWGVERAVAMAYETRRHYSNENIWITNEIIHNPSVNDHLRKMNVKFISAKNGIKDFSLVSKGDVVILPAFGATVQEMKLLHEKGCHIIDTTCPWVSKVWHTVEKHKKHVFTSIIHGKFKHEETLATSSFAGKYLVVLDLEEANYVSEYILGRGNRNEFMNKFAKACSNGFDPDKDLDRVGVANQTTMLKSETEEIGKVFEKTMLKKFGPENLNSHFLAFNTICDATEERQDAMFSLVDEDLDILVVIGGFNSSNTTHLQEIAITKNIASFHIDTPERISVEENSIFHKPLGLDLELKNNFLPSGNINVGITSGASTPDKVVADVIEKLISIAS

SEQ ID NO: 90778 - protein, 315 aa, Unknown
  Bacterial polypetide isolated from the Sargasso Sea
MNHKTKLSLANPRGFCAGVDRAIEIVNRALDMFGSPIYVKHEVVHNEAVVSDLKKRGAIFIEEISDVPDDSIIIFSAHGVSSKIEESVKARNLQFFDATCPLVTKVHMEVMRHGRANRDIILIGHEGHPEVEGTMGRYFSKDGKIYLVQDLEEAMQVSVSQPENLAYVTQTTLSVDETKDIINVLTRKFPNITAPKKDDICYATQNRQDAVKQLALETDFIIVVGSKASSNSNRLKELANKCGVNSVLIDEFSDLDLDELKDCKNIGLTAGASAPESKVQEIISNLSIFLDAEIEEKGGVKENIAFKLPPELRAS

SEQ ID NO: 90779 - protein, 309 aa, Unknown
  Bacterial polypetide isolated from the Sargasso Sea
MDILLANPRGFCAGVDRAISIVERALELYEPPIYVRHEVVHNKFVVDGLRRRGAVFVDELNEVPDGNIVIFSAHGVSQAVRENARQRGLKVFDATCPLVTKVHMEVTRASRKGIECILIGHAGHPEVEGTMGQYDNPEGGIYLVESAEDVATLSVKNPAQLCFSSQTTLSVDDTADVIDALRSRFPDIEGPRKDDICYATQNRQDAVRDLAAKADLLLVVGAKNSSNSNRLRELADKMGCTAYLIDTAADIQQAWLEGVRAVGVTAGASAPEVLVQQVVKQLQQWGGKTVSENPGREENVVFAIPAELR

SEQ ID NO: 90780 - protein, 315 aa, Unknown
  Bacterial polypetide isolated from the Sargasso Sea
MSKKIKEIVLANPRGFCAGVDRAIDIVEKSLEKYDEPVFVRHQVVHNKRVVESLEKKGVKFVKEVSEIPDNAVAIFSAHGVSSEVENEAKSRDFMYFDATCPLVTKVHLEVQKHAKKGRDIILIGHKGHPEVVGTLGRHPKDSGTNIYLIETREDIDELEVNSDSLAYVTQTTLSVDETTELIEILKSKFPNIIGPSADDICYATQNRQDAVKQLSLECEVVLVIGSKTSSNSNRLKELAEKCGTKSFLIDDKADIEIDELKSVASVGITAGASAPEDIVQEVISYLVPLGYNHVRNLSENKESMTFKLPRELAD

SEQ ID NO: 90781 - protein, 314 aa, Unknown
  Bacterial polypetide isolated from the Sargasso Sea
MKNKPLKILLSAPRGFCAGVERAIEIVEKSIKKYGAPVYVRHEIVHNKYVVDDLKNKGAIFVEELEEITDRTRPVIFSAHGVPKKIPEDAKNYNMTYIDATCPLVSKVHREAENLHKAGYHLILIGHENHPEVIGTMGQLPKGSIDLVQNEDEAKKYKPQNNKKISYVTQTTLSVDDTKDIIQILKDRFPDIKEPMKEDICYATTNRQMAVKNIAKKCDLFFVIGSRNSSNSVRLVEVARKSGCSNSLLIHSQSEIPFDLIQNSNTIGISSGASAPEILVNNFINKLKNKFTVSIDEVEIIKENVVFKAPKKLN

SEQ ID NO: 90782 - protein, 314 aa, Unknown
  Bacterial polypetide isolated from the Sargasso Sea
MKNKNLKILLASPRGFCAGVDRAIEIVKKSIDKYGSPVYVRHEIVHNKHVVDGLKKIGAIFVEELEEIKDKTRPVIFSAHGVPKSVPKEASNLNMTYVDATCPLVSKVHREAENLYKSGSHILLIGHKNHPEVIGTMGQLPNESIDLIESVEDAEKYLKKNRNKLAYITQTTLSVDDTREIINVLKKKFPEINEPKKEDICYATTNRQSAVKKIAKNCDMFFVIGSRNSSNSVRLVEVAKNNGCDKSELIHSESKVPLDKIANCKTIGISSGASAPEILVEEFINELKKEFILEIEEVEIIKENITFKIPGKLN

SEQ ID NO: 90783 - protein, 314 aa, Unknown
  Bacterial polypetide isolated from the Sargasso Sea
MKKELKIYLASPRGFCAGVKRAIEIVEKSISKFGAPVYVRHEIVHNKQVVEELKEKGAIFVDELSDVDDASRPVIFSAHGVPKSVPEEAKLKNLSFVDATCPLVSKVHRESEQLNKNGFDILLIGHKNHPEVIGTMGQLPKGSIRLIETKNDVDLLKENDFKKPIAYITQTTLSVDDTAEIIEALKNKFPKIKGPIKEDICYATTNRQSAVKEIAPKCDMFFVVGSRNSSNSVRLVEVAKKAGCNNSHLMHSEKEIPLNEIENSETIGISSGASAPEKLVQTLLDSLRKDRNVSIEEVIVAEEKVVFKLPKELN

SEQ ID NO: 90784 - protein, 312 aa, Unknown
  Bacterial polypetide isolated from the Sargasso Sea
MTKQIKLANPRGFCAGVDRAIDIVNKALDIYGAPVYVKHEVVHNKVVVSDLRDRGAIFVEEIDEIPDDSLVIFSAHGVSSAVEEETKSRNLNFFDATCPLVTKVHMEVRKHAKASKDIILVGHEGHPEVEGTMGRHINSDNSSIYLVQNESDAKNIKINNPTKLALVTQTTLSVDETKSIIDILKYRFPDIDIPKKDDICYATQNRQDAVKQLALESDFMIVVGSKNSSNSNRLSELAEKCGCRSILIDEFTDIDLDDLNKYSKISITAGASAPESKVMEIAKSLELYTDAEIIEHGEDNEDIYFKLPPGLR

SEQ ID NO: 90785 - protein, 312 aa, Unknown
  Bacterial polypetide isolated from the Sargasso Sea
MTKQIKLANPRGFCAGVDRAIDIVNKALDIYGAPVYVKHEVVHNKVVVEDLKSRGAIFVEEINEIPDDSLVIFSAHGVSSKVEEETKSRNLNFFDATCPLVTKVHMEVIKHAKAGRDIILIGHEGHPEVEGTMGRHINNDNSSIYLVQNENDANSIKLNKKNELAVVTQTTLSVDETKSIISILRDRFPKIITPKKDDICYATQNRQDAVKQLALESDFMIVVGSKNSSNSNRLKELGENCGCKSVLIDEFNDLDLDVIKKFSRISITAGASAPESKVMEIAQSLESYIGAEILEYGEDNEDIFFKLPPGLR

SEQ ID NO: 90786 - protein, 172 aa, Unknown
  Bacterial polypetide isolated from the Sargasso Sea
ITLIQKKEDIKKIDNNNYGRVALITQTTLSVDDTKEIIEDLKNIFPEIIQPPKEDICYATTNRQLAIKSIANDCDLIYVIGANNSSNSLRLVEVGKKSGCNQTHLISDVSEVDWQEIEKEQKIGLTAGASAPDILIQDFIDKMNQLYDVEIKNISVADENITFKIPRELNER

SEQ ID NO: 90787 - protein, 314 aa, Unknown
  Bacterial polypetide isolated from the Sargasso Sea
MKNKEIKILLAAPRGFCAGVERAIEIVKKSINKYGAPVYVRHEIVHNKHVVDGLKKIGAIFVEELHEIKDKTRPVIFSAHGVPKKVPIEAENFKMEYVDATCPLVSKVHREAENLNKNGLQILLIGHKNHPEVIGTMGQIPEGEIDLIENVDDANNYENKSKKKLAFVTQTTLSVDDTKEIISALKKKFPEIKEPKKEDICYATTNRQAAVKKIAEKCDMFFVIGSRNSSNSLRLVEVAKNSGCTNSRLIHSESGVPFEEIEKYKTIGISSGASAPEILVDNFINNLKKQFTVAIEEIEIVKENITFKIPGKLN

SEQ ID NO: 90788 - protein, 135 aa, Unknown
  Bacterial polypetide isolated from the Sargasso Sea
DHLKKRFKNLVGPKKEDICYATQNRQNAVKKLSKKCDIILVVGSKNSSNSNRLKEIGIKAGVSTKLVDSENDLKVEWFNNKNNIGLTAGASAPEILIQSIVSKLKEFGALEVTETEGVVEKTTFKIPKELSTLHR

SEQ ID NO: 90789 - protein, 314 aa, Unknown
  Bacterial polypetide isolated from the Sargasso Sea
MKNKDLKIYLAAPRGFCAGVDRAIEIVKKSINKFGSPVYVRHEIVHNKHVVENLKKIGAIFVEEISEIKDKTRPVIFSAHGVPKKVPKEAQDLKMEYIDATCPLVSKVHREAENLNKAGFHIFLIGHKNHPEVVGTMGQIPEGSIELVETIDDVKDIDIPSNKKLAFVTQTTLSVDDTKDIIDALKKKFPQIKEPNKEDICYATTNRQAAVKHIASKCDMFFVIGSRNSSNSKRLVEVANKAGCNYSELIHSESSVPLEKISQCNTIGISSGASAPEVLVQDFIKKIKEKFNVEIQEVEIVKENVIFKVPGKLN

SEQ ID NO: 90790 - protein, 314 aa, Unknown
  Bacterial polypetide isolated from the Sargasso Sea
MKNKEIKILLAAPRGFCAGVDRAIEIVKKSIEKYGAPVYVRHEIVHNKHVVESLKKIGAVFVEELNEIKDKTRPVIFSAHGVPKVVPAEAKELKMDYIDATCPLVSKVHREAENLNKSGFHVLLIGHKNHPEVIGTMGQIPNGSIDLIENIEDVNKFEIKGNGKLAYVTQTTLSVDDTKDIINALKEKFSNIKEPKKEDICYATTNRQAAVKKIAKLCDMFFVIGSRNSSNSLRLVEVANNSGCSEAVLIHSESSIPLEKITKCKTIGISSGASAPEILVENFIKKLKEQFSVNIEEVGIIKENITFKIPGRLN

SEQ ID NO: 90791 - protein, 176 aa, Unknown
  Bacterial polypetide isolated from the Sargasso Sea
QLPEGSIDLIENIEDANKYENVSKKHLSFITQTTLSVDDTKDIIAALKSKFPDIKEPKKDDICYATTNRQSAVKEIADKCDMFFVIGSRNSSNSVRLVEVAKNSGCSSAELIHSESPVPIDKIKGCNTIGISSGASAPEILVEKFIAELKDQFTVNIEEVEIVKENITFKIPGKLN

SEQ ID NO: 90792 - protein, 314 aa, Unknown
  Bacterial polypetide isolated from the Sargasso Sea
MKNKELKILLSAPRGFCAGVERAIEIVEKSIQKYGTPVYVRHEIVHNKYVVDDLKNKGAIFVEELEEIEDKTRPVIFSAHGVPKKIPEDAKNYNMTYVDATCPLVSKVHREAENLNKAGYHLILIGHQNHPEVIGTMGQLPKGSIDLIQNEDEAKNYKIQNNKKISYVTQTTLSVDDTKDIIQILKDRFPNIKEPLKEDICYATTNRQMAVKNIAKKCDLFFVIGSRNSSNSVRLVEVAKKSGCSNSILIHSQSEIPFDLIKNANTIGVSSGASAPEILVDNFINELKNRFTVSIDEVEIIKENVVFKAPKKLN

SEQ ID NO: 90793 - protein, 303 aa, Unknown
  Bacterial polypetide isolated from the Sargasso Sea
MDIYLASPRGFCAGVVLAIDLVEIALEKYGAPVYVKHQIVHNPVVVSEVESKGAITVEKVSEIPDNSVVVFSAHGSPPEDYKLAKEKNITVIDATCPLVTKVHNEAKKYSKEGKKIILVGHKGHQEVIGTSGQADMKIIDDREKFDLDKSNDDDVIVLSQTTLSVRDTQDTISKIKNVHPKAIVRNDICYATTNRQEVTVKLAKKVDLILVVGASNSSNCNRLKDVSIQSGTKAYLINSFDEIKDEWLKDVNKLGLTSGASTPDKLVFEIIKRLDPSNVFKFDDIEEDIKFEIPRKVKELLNE

SEQ ID NO: 90794 - protein, 174 aa, Unknown
  Bacterial polypetide isolated from the Sargasso Sea
MKKEIHLISPRGFCAGVTRAIDVVNIALEKYGPPVYVKHEIVHNKSVIEELKLKGAVFIEDIKDMPQGAPLIFSAHGVSKLVVNEANEKKAITIDATCPLVTKVHVQAKKFSSQGYHIFLIGHRNHPEVEGTLGQLDSSEITLIENTNDVSLLKTNFEKVAFVTQTTLSVDDTK

SEQ ID NO: 90795 - protein, 312 aa, Unknown
  Bacterial polypetide isolated from the Sargasso Sea
MTKEIKLANPRGFCAGVDRAIDIVNKALDIYGAPVYVKHEVVHNKVVVDDLRNRGAVFVEEIDEIPDDSLVIFSAHGVSSEVEETTKARNLNFFDATCPLVTKVHMEVRKHAKANKDIILIGHEGHPEVEGTMGRHINSQNSSIYLVQDENDALNIDVNNSESLALVTQTTLSVDETISIIDILRKRFPNIEVPKKDDICYATQNRQDAVKQLALESDYIIVVGSKNSSNSNRLKELAEKCGCKSTLIDEFSDLNLEDIKKCKNIAITAGASAPESRVMEIAKSLEDYFGAKLIEDGEDTENVYFKMPPGLR

SEQ ID NO: 90796 - protein, 343 aa, Unknown
  Bacterial polypetide isolated from the Sargasso Sea
MVNNLYVVTPRGFCAGVEMAIKALTWMLKIYDETIYCYHEIVHNDWIVKKFKENNVKFVDNPDELPDNAIVMLSAHGTAPNIEKEFKSISLTNVNSVCPLVTKVHHEAKRFSEEGHEIIYVGHKDHDEAVGAMGVAPESMKLVENVDEIEEIDLKSDNVALLAQTTLSMSDWEPIMLKAKEKYPNLKMPRKNDLCYATTNRQEAIINIAGEVDLVIVVGSSTSSNTNALVTSINNIGKEAYRIETTEDLNNINLINKNVAITAGASAPDHMVQNIVDYIEPKNIEFYIDTDETEYFPLPVELRTNIKNLSNFISSMFPENTIKSENGIKNDKSWSATKALASL

SEQ ID NO: 90797 - protein, 309 aa, Unknown
  Bacterial polypetide isolated from the Sargasso Sea
MEVILASPRGFCAGVDRAITIVEKALEKFGPPIYVRHEIVHNRHVVSRLREKGVIFVDELDQVPEGAHAIFSAHGVSPQVREQALERNLEVLDATCPLVTKVHVEAKRYAQKEFIILLIGHREHVEVEGTFGEAPDRIIIVGTAKEAENLELPPSSRIAYLTQTTLSLDDTADIIKVLRRRFPEIEGPAKDDICYATQNRQNAVKQISKEVDLVLVVGAENSSNTLRLVEVAESLGTRAIRIQSSSELQPDLLDECNKIGITAGASAPEDIVQGIVDKLRGWNPGCRVRELKLTEEQVSFGLPPQLKTP

SEQ ID NO: 90798 - protein, 315 aa, Unknown
  Bacterial polypetide isolated from the Sargasso Sea
MSQKTKLSLANPRGFCAGVDRAIEIVNRALDMFGSPIYVKHEVVHNKAVVDDLKERGAIFIEEISDVPDDSIIIFSAHGVSSKIEESVKSRNLKFFDATCPLVTKVHMEVMRHGRANRDIILIGHEGHPEVEGTMGRYFSQNGKIYLVQDLEEAKEVSVNQPENLAYVTQTTLSVDETKDIINELMKRFPKIAAPKKDDICYATQNRQDAVKQLALETDFIIVVGSKASSNSNRLKELANKCGVNSILIDEFADLDLNELKDCRNIGLTAGASAPESKVQEIISNLSIFLDAEIEEKGGVKEDISFKLPPELRAS

SEQ ID NO: 90799 - protein, 178 aa, Unknown
  Bacterial polypetide isolated from the Sargasso Sea
MGQVPDGKIDLIETIDDAKNYQRGKNDKLAYITQTTLSVDDTKDIIDVLRERFPDILEPKKDDICYATTNRQAAVKKIAKKCDNLFVIGSRNSSNSVRLVEVAQNNGCENAELIHSESNFPIEKISKCKTIGISSGASAPEVLVNEFIENIKKKFTVEIEEVEIVKEDVTFKIPGKLN

SEQ ID NO: 90800 - protein, 227 aa, Unknown
  Bacterial polypetide isolated from the Sargasso Sea
MANPRGFCAGVDRAIEMVELALKKWGSPIYVRHEIVHNKHVVHDLKKKGAVFVEELKECPVDRPVIFSAHGVPKAIPEEAEKRHMLFVDATCPLVTKVHNEIKKYYEKGYKIIMIGHRGHPETIGTMGQLPEGAVLLVENTADVEKMDLSKYPKLAYVTQTTLSVDDTKEIALALNKKFPSIENPKKEDICYATTNRQEEVKRLVKYVDLMLVVGSENSSNLRDWLM

SEQ ID NO: 90801 - protein, 174 aa, Unknown
  Bacterial polypetide isolated from the Sargasso Sea
PKNGIDLIENVEDVKKYENKNNKKLAFVTQTTLSVDDTKEIIDELKKKFPSIREPKKEDICYATTNRQAAVKKIAKQCDMFFIIGSRNSSNSVRLVEVANNSGCKNAVLIHSESDIPFDKISNCNTIGISSGASAPEILLENFINNLKEKFVVKIKEVEIIKEDVTFKIPGKLN

SEQ ID NO: 90802 - protein, 314 aa, Unknown
  Bacterial polypetide isolated from the Sargasso Sea
MKNKELKILLSAPRGFCAGVERAIEIVEKSIQKFGSPVYVRHEIVHNKYVVDDLKNKGAIFVEELEEIKDKSRPVIFSAHGVPKKIPEDAKNYKMTYVDATCPLVSKVHREAENLNKAGYHIILIGHENHPEVIGTMGQLNRGSIDLIQNEEDAINYENKVDKKLAYITQTTLSVDDTKEIIKILKTSFPNIKEPMKEDICYATTNRQMAVKNIAKNCDMFFVIGSRNSSNSVRLVEVAKKSGCENSQLIHSESSIPYDQIENCNTIGISSGASAPEILVENFINDLKKKFSISIDEVEIIKEDVVFKVPKKLN

SEQ ID NO: 90803 - protein, 314 aa, Unknown
  Bacterial polypetide isolated from the Sargasso Sea
MKNKELKILLSAPRGFCAGVERAIEIVEKSIQKYGSPVYVRHEIVHNKFVVDDLKNKGAIFVEELEEIEDKTRPVIFSAHGVPKKIPQDAKNYNMTYVDATCPLVSKVHREAENLHKAGYHLILIGHKNHPEVIGTMGQLPKGSIDLIQNEDEANNYDPKNFEKIAYVTQTTLSVDDTKEIISILKEKFSNIREPAKEDICYATTNRQMAVKNIAKKCDIFFVIGSRNSSNSVRLVEVAKKSGCENSILIHSQSEIPFNLIENSNIIGISSGASAPEILVENFIKELKNKFTVTIEEVEIIKENVVFRVPKKLN

SEQ ID NO: 90804 - protein, 208 aa, Unknown
  Bacterial polypetide isolated from the Sargasso Sea
MTKEIKLANPRGFCAGVDRAIDIVNKALDIYGAPVYVKHEVVHNKVVVDDLRNRGAVFVEEIDEIPDDSLVIFSAHGVSSEVEESTKARNLNFFDATCPLVTKVHMEVRKHAKANRDIILIGHEGHPEVEGTMGRHINSQNSSIYLVQDENDALNINVNNCESLALVTQTTLSVDETIEIIDILRKRFPNIEVPKKDDICYATQNRQD

SEQ ID NO: 90805 - protein, 316 aa, Unknown
  Bacterial polypetide isolated from the Sargasso Sea
MNTHQIKIYLAGPRGFCAGVDRAILMVEEALKKYGNPVYVRHEIVHNKYVVEDLKEKGAIFIDELNEIKDLSRPVIFSAHGVPKSVPDEAKNLNLLYFDATCPLVSKIHREVENFEKQNLPIILIGHHNHPEVIGTMGQIKSSIHLVENEKDVELLKLDNNKKIAYVTQTTLSVDETKEIIKAIKKKFNDVIEPRKNDICYATTNRQDAVKKIASNCEVFFVIGAYNSSNSIRLVEVAKKYGARKSILLENIEQFDEKIFKNINSIGLTASASAPEILVQKFIELLEKKFDIELIQDDFIKEDVNFKIPQKLKEAI

SEQ ID NO: 90806 - protein, 495 aa, Unknown
  Bacterial polypetide isolated from the Sargasso Sea
MRRAFRPYRAPTERVIHEPHRSIRSEARFPRHIALPAGTRRRRRYRQHLHRQAGHAAARRGATGAVAGTDSDRPQGRRPFDFSANPRTGVRSPQSRHAPARDAVDAARERDGRRRFHAGRTDRVQRAGRRPVRGGAEGSQRNLGTVRLQSSARGPSAHVRSENHRNPVIMSTTDTLSGQTVAADAEILLAQPRGFCAGVDRAIEIVERAIAMHGAPIYVRHEIVHNKYVVEDLKKKGAIFVEELEEVPAGNTVIFSAHGVSKAVRDEADVRGLRIYDATCPLVTKVHVEVAKMRQDGVDIVMIGHKGHPEVEGTMGQVERGMHLVESVEDVQKLELADPERIALVTQTTLSVDDAAEIIAALKAKYPKIREPKKQDICYATQNRQDAVKFMAPQCDVVIVVGSPNSSNSSRLREVAEKRGVDAYMVDAPDQIDPAWVAGKRRIGVTAGASAPEVLAQAVIARLRELGVRNVRALDGIEENVSFPLPRGLNLPPAA

SEQ ID NO: 90807 - protein, 311 aa, Unknown
  Bacterial polypetide isolated from the Sargasso Sea
MKNEIKIYLAAPRGFCAGVDRAIEIVKKALDKYGSPVYVRHEIVHNKNVVESLKKLGAVFVEELSEIKDASRPVIFSAHGVPKEVPEEAKSKKIFYVDATCPLVSKVHRETEQLFKKGFDIVLVGHKNHPEVIGTMGQLPKGSIKLIETIGDVKNLSFSKPVAYVTQTTLSVDDTKEIIDVLKQKFPGIKGPIKEDICYATTNRQSAVKKIAPNCEMFFVLGSRNSSNSARLVEVAKKSGCENSELIFYGKKAPIDKIKNCKTIGLSSGASAPEELVQNFISEIKKSMKVSIEEIVTANEKVVFKLPKEVN

SEQ ID NO: 90808 - protein, 315 aa, Unknown
  Bacterial polypetide isolated from the Sargasso Sea
MSKKIKEIVLANPRGFCAGVDRAIDIVEKSLEKYDEPVFVRHQVVHNKRVVESLEKKGVKFVKEVSEIPDNAVAIFSAHGVSSEVEDEAKSRDFMYFDATCPLVTKVHLEVQKHARKGRDIVLIGHKGHPEVVGTLGRHPKDSGTDIYLIETKEDIEKLEINSDSLAYVTQTTLSVDETTEIIEVLKNRFPNIIGPSADDICYATQNRQDAVKQLSLECEVVLVIGSKTSSNSNRLKELAEKCGTKSFLIDDKKDIKIDELKYATSVGITAGASAPEDIVQEVISYLIPLGYSHVRNLSENKENMTFKLPRELSD

SEQ ID NO: 90809 - protein, 313 aa, Unknown
  Bacterial polypetide isolated from the Sargasso Sea
MNIKENKQILLISPRGFCAGVTRAIDTVVEVLEKFGPPVYVKHEIVHNKHVIEDLKAKGAIFIEDINDAPIDKPLVFSAHGVAKNILDTAKQINKYVVDATCPLVTKVHVQAIKFYNLNYKIILIGHKNHPEVEGTIGQLPAGEIVLIENLDDIQNLMFENEDKLAYVTQTTLSVDDTKEIIDALKTKFPSIKSSPKEDICYATTNRQNAIKDYAHECDSFIVVGSKNSSNSNRLVEVAKKSGCDLSVLLENANNLNIDNYKNHQTIGLSSGASVPDILVQDVISKFREAFEINVKEVGAGEENISFKLPRGI

SEQ ID NO: 90810 - protein, 313 aa, Unknown
  Bacterial polypetide isolated from the Sargasso Sea
MKNKELKILLSSPRGFCAGVERAIEIVEKSIQKYGAPVYVRHEIVHNKYVVDDLKSKGAIFVEELEEINDKSRPVIFSAHGVPKKIPEDAKSYNMTYVDATCPLVSKVHREAENLYKAGYHLILIGHQNHPEVIGTMGQLPKGSIDLIQNEDDAKKYNSQNKKIAYVTQTTLSVDDTKDIIQILKNRFPDVREPLKEDICYATTNRQMAVKNIAKKCDLFFIIGSRNSSNSVRLVEVAKKSGCSNAILIHSQSEIPYDLIEKSNTIGISSGASAPEILVNDFINKLKKRFEINIDEVEIIKEDVVFKIPKKLN

SEQ ID NO: 90811 - protein, 266 aa, Unknown
  Bacterial polypetide isolated from the Sargasso Sea
MNKEIKLANPRGFCAGVDRAIDIVNKALDIYGAPVYVKHEVVHNKVVVDDLKKRGAIFVEEINEIPDDSLVIFSAHGVSREVEESTKSRNLNYFDATCPLVTKVHMEVRKHANANKDIILVGHEGHPEVEGTMGRHENSENSSIYLVENENDAKNITITKKNNLAVVTQTTLSVDETKSIIDILKDRFPNISIPKKDDICYATQNRQDAVKQLALESDFMIVVGSKNSSNSNRLRELSEKCGCKSVLIDEFNDLDLNELKNYSNIS

SEQ ID NO: 90812 - protein, 318 aa, Unknown
  Bacterial polypetide isolated from the Sargasso Sea
MKLDPTSPSLNIMLANPRGFCAGVDRAISIVERALELFSPPIYVRHEVVHNRYVVQNLKDRGAVFVEELDQVPDNNIVIFSAHGVSQAVRAEAKARGLRVFDATCPLVTKVHLQVTRASRKGIECILIGHAGHPEVEGTMGQYDNPNGGVYLIESPADVETLEVRDPNNLCFVTQTTLSVDDTLDIISALLKRFPSIEGPRKDDICYATQNRQDAVRNLSADVDLLIVVGSKNSSNSNRLRELALKTGTQSYLVDTADDIDSSWFENVTKVAVTAGASAPEVLVQQVVQAIAKLAPSVVTEVEGRKEDTVFAVPAELR

SEQ ID NO: 90813 - protein, 288 aa, Unknown
  Bacterial polypetide isolated from the Sargasso Sea
MKNKELKILLSAPRGFCAGVERAIEIVEKSIQKFGAPVYVRHEIVHNKYVVDDLKNKGAIFVEELEEIKDKSRPVIFSAHGVPKKIPEDAKHYKMTYVDATCPLVSKVHREAENLSKDGYHIILIGHENHPEVIGTMGQLKEGSIDLIQNEEEAKNYQNKPDKKLAYITQTTLSVDDTKEIIKILKNNFPYIKEPMREDICYATTNRQMAVKNIAKNCDMFFVIGSRNSSNSVRLVEVAKKSGCENSQLIHSESLIPYDQIENCNTIGISSGASAPEILVENFINDLK

SEQ ID NO: 90814 - protein, 315 aa, Unknown
  Bacterial polypetide isolated from the Sargasso Sea
MKQKTKLSLANPRGFCAGVDRAIEIVNRALDMFGSPIYVKHEVVHNEAVVNDLKERGAIFIEEISDVPDNSIIIFSAHGVSRKIEESVKARNLQFFDATCPLVTKVHMEVIRHGRANRDIILIGHEGHPEVEGTMGRYFSQNGKIYLVQDLDEAKEVSINQPENVAYVSQTTLSVDETKDIINELTEKFPSIVGPKKDDICYATQNRQDAVKQLALETDFIIVVGSKASSNSNRLKELANKCGVNSVLIDEFSDLDLDELKDCKNIGLTAGASAPESKVQEIISNLSIFLDAEIEEKGGVKENISFKLPPELRAS

SEQ ID NO: 90815 - protein, 314 aa, Unknown
  Bacterial polypetide isolated from the Sargasso Sea
MKTSKKIYLISPRGFCAGVTRAIEIVELAIKKYGPPVYVNHEIVHNKYVIDELSDKGAVFLDNINDAPPDRPFIFSAHGVSKDVELHANKKNKIVINATCPLVTKVHVQAMKFFELGYRIILIGHKNHPEVIGTMGQLPSGSIELVETVSDVMKLSINDNDNFAYLTQTTLSLDDTKKIIEALKVRLPKIISSPKEDICYATSNRQKAIKEYAQMCDAFIVVGSSNSSNSNRLVEVAKNAGCENSILLENEVNLNIKDYELMTSIGISSGASVPDILVKNVINKFAEFYQVTIEELSLGNENVTFKLPKELRVG

SEQ ID NO: 90816 - protein, 313 aa, Unknown
  Bacterial polypetide isolated from the Sargasso Sea
MTKKLNIFLAGPRGFCAGVDRAIEMVKGALKKYGAPVYVRHEIVHNKFVVENLKSQGAIFVEELNEIEDKSRPVIFSAHGVPKAVPEEALSLNLIYYDATCPLVSKIHKEVENFDKKNLPVILIGHRNHPEVIGTMGQTNKEIYLVEKVEDVKKLPFEQNDKIAYVTQTTLSVDDTKDIIKEIKSHFKNVIEPKKNDICYATTNRQEAVKKIANQCDYFLVIGASNSSNSLRLVEVAKNYGSKKAILVEDVDSLNLNIFQESENIGITASASSPEILVRKLLDNLKKNFELHVNEGHYQKEDVFFKVPQKLNI

SEQ ID NO: 90817 - protein, 269 aa, Unknown
  Bacterial polypetide isolated from the Sargasso Sea
MNLKLKKILYLPHPRGFCAGVDRAINIVKLSLDKYGPPIYVRHEIVHNPWVIRDLESKGVIFIENLRDAPEGSRVIFSAHGIPISVLNEAKNREMPFIDATCPLVIKVHNEAKRLYKDGAHIFLIGHEGHPEVIGTMGQIPQDAITLIQKKEDIKKIDNNNYGKVALITQTTLSVDDTKEIIEDLKNIFPEIIQPPKEDICYATTNRQLAIKSIANDCDLIYVIGANNSSNSLRLVEVGKKSGCNQTHLISDVSEVDWLEIEKRQKIGL

SEQ ID NO: 90818 - protein, 286 aa, Unknown
  Bacterial polypetide isolated from the Sargasso Sea
ESIEKYGAPVYVRHEIVHNKHVVDGLKKIGAVFVEEIDEIEDKTRPVIFSAHGVPKSVPKEAESLNMIFVDATCPLVSKVHREAENLDKKDVQVLLIGHKNHPEVIGTMGQVASGKIDLIETIDDAKNYQRGENKKLAYITQTTLSVDDTKDIINVLKERFPDILEPKKDDICYATTNRQAAVKKIAKECDNLFVIGSRNSSNSVRLVEVAKNNGCEHAELIHSESSFPLEKISKCKTIGISSGASAPEVLVNEFIENIKKKFTVEIEEVEIVKEDVTFKIPGKLN

SEQ ID NO: 90819 - protein, 223 aa, Unknown
  Bacterial polypetide isolated from the Sargasso Sea
MKNKNLKVLLAAPRGFCAGVDRAIEIVKKSIDKYGSPVYVRHEIVHNKHVVESLKNIGAIFVEELSEIKDKSRPVIFSAHGVPKSVPEEASKLNMEFVDATCPLVSKVHREAENLNKRDVHVLLIGHKNHPEVIGTMGQLPEDKIDLIENIEDAKNYTKKNNNKLAYVTQTTLSVDDTKEIVETLKKRFPEIQEPKKEDICYATTNRQAAVKKRAPQCDMFFV

SEQ ID NO: 90820 - protein, 227 aa, Unknown
  Bacterial polypetide isolated from the Sargasso Sea
EAKIKKLSYVDATCPLVSKVHRESEQLYKKGYDIILIGHNNHPEVIGTMGQLPRGAIKLVETIKDAKSLSEKNFSKPTAYITQTTLSVDDTAEIIDLLKKKFPDIKGPIKEDICYATTNRQIAVKKIAPKCDMFFIIGSRNSSNSSRLVEVAKKAGCQNSLLMHSEKEIPFEDIANSKVIGISSGASAPEQLVQNLIKEIEKDYLVSIEEVTVAEEKVVFKLPKELN

SEQ ID NO: 90821 - protein, 203 aa, Unknown
  Bacterial polypetide isolated from the Sargasso Sea
MDTQAFRRSLHHSDRYNRRGFDSPTKRAQALEEAYQSDLINSIRNNSFTYKKGRLKIKLAQAFGFCWGVERAVAMAYETRRHYPNENIWITNEIIHNPSVNDHLRKMNVKFISAKNGIKDFSLVSDGDVVILPAFGATVQEMKLLHEKGCHIIDTTCPWVSKVWHTVEKHKKHTFTSIIHGKFKHEETLATSSFADKYLVVLN

SEQ ID NO: 90822 - protein, 236 aa, Unknown
  Bacterial polypetide isolated from the Sargasso Sea
MQIHLANPRGFCAGVDRAITIVERALEMFEPPIYVRHEVVHNKFVVDGLRERGALFVDELHEVPDDSIVIFSAHGVSQAVRKEAENRGLKVFDATCPLVTKVHMEVTRASKTGTECILIGHAGHPEVEGTMGQYSNEDGGIYLVESEADVATLEVKDPTNLYYCSQTTLSVDDTADVIDALRAKFPKINGPRKDDICYATQNRQDAVRDLAQDCQVLLVVGAQNSSNSNRLRELAE

SEQ ID NO: 90823 - protein, 314 aa, Unknown
  Bacterial polypetide isolated from the Sargasso Sea
MENNKLKIYLAAPRGFCAGVDRAIEIVKKSLDKYGAPVYVRHEIVHNKHVVESLKEIGAVFVEELEEIHDKSRPVIFSAHGVPKSVIKEASNLNMIFIDATCPLVSKVHREAENLYRHGMHIILIGHENHPEVIGTMGQLPDGAIDLIQSVTDAENYDPKTDKNLAYITQTTLSIDDTSEIISCLSKRFPKIHSPKKEDICYATTNRQIAVKQIADKCDMFFVIGSRNSSNSVRLVEVAQKTGCPDSQLINSESKFPIDRIRNCSTIGISSGASAPEILVELFISKLKKEFDLDIEEVEAVKEDVTFRVPGSLS

SEQ ID NO: 90824 - protein, 130 aa, Unknown
  Bacterial polypetide isolated from the Sargasso Sea
MTKEIKLANPRGFCAGVDRAIDIVSKALDIYGAPVYVKHEVVHNKVVVEDLRNRGAIFIEEIDEIPDDSLVIFSAHGVSSEVEETTKARNLNFFDATCPLVTKVHMEVRKHAKANRDIILIGHEGHPEVE

SEQ ID NO: 90825 - protein, 315 aa, Unknown
  Bacterial polypetide isolated from the Sargasso Sea
MSKKLDLYLAGPRGFCAGVERAILMVKEAIKKYGAPVYVRHEIVHNKFVVENLKKEGAIFIDELDEMKDRKRPVIFSAHGVPKKIPDQAKNLNLIFYDATCPLVSKIHREVENFEKNKLPIILIGHHNHPEVIGTMGQVKSKIYLVEKIEDIKSLPFSKKDKIAYVTQTTLSIDDTKEMILEIKKKFPKVIEPKKNDICYATTNRQEAVKRIASNCDFFLIIGSSNSSNSLRLVEVAKNYGAKKCILVENIYELDNEIFQNAKSIGITASASSPEILVKKLIEKLSKKYALNIIESSYKKEDVYFKIPQMLKEAI

SEQ ID NO: 90826 - protein, 193 aa, Unknown
  Bacterial polypetide isolated from the Sargasso Sea
ILLIGHRNHPEVIGTMGQLENGGIDLIENIEDAKNYQNKSNKELAYVTQTTLSVDDTKDIIAELKRKFPEIKEPKKDDICYATTNRQSAVKKIASFCDMFFVIGSRNSSNSVRLVEVAKKSGCENSLLIHSESEIPFDKIDKCKTIGISSGASAPEILVEEFINNLKKKFNIKIENTEVIKEDVTFKVPGKLN

SEQ ID NO: 90827 - protein, 314 aa, Unknown
  Bacterial polypetide isolated from the Sargasso Sea
MKINDLKIYLASPRGFCAGVDRAIEIVKKSISKYGAPVYVRHEIVHNKHVVESLKKIGAIFVEELNEIEDKSRPVIFSAHGVPKKIPNEAKELNMEYVDATCPLVTKVHREAENLYKNGSHVLLIGHKNHPEVIGTMGQIPSDGIDLIQSLDDVVKYTKKNDKKLAFITQTTLSVDDTKDIIDGLKKKFPEIREPKKEDICYATTNRQAAVKKIANKCDMFFVIGSRNSSNSLRLVEVAKNSGCENSMLLHSESEVPFDKIDKCKSIGVSSGASAPEVLVEQFLDQIKKKYNTSVEEVEIVKEDVTFKIPGKLN

SEQ ID NO: 90828 - protein, 106 aa, Unknown
  Bacterial polypetide isolated from the Sargasso Sea
MKNKNLKILLASPRGFCAGVDRAIEIVKKSIDKYGSPVYVRHEIVHNKHVVDSLKKIGAVFVEELDEIKDKTRPVIFSAHGVPKSVPEEASNLNMTYIDATCPLVS

SEQ ID NO: 90829 - protein, 312 aa, Unknown
  Bacterial polypetide isolated from the Sargasso Sea
MTKQIKLANPRGFCAGVDRAIDIVNKALDIYGAPVYVKHEVVHNKVVVADLRDRGAIFVEEIDEIPDDSLVIFSAHGVSSAVEEETKSRNLNFFDATCPLVTKVHMEVRKHAKASKDIILVGHEGHPEVEGTMGRHINSDNSSIYLVQNESDAKNIKINNPTKLALVTQTTLSVDETKSIIDILKYRFPDIDTPKKDDICYATQNRQDAVKQLALESDFMIVVGSKNSSNSNRLSELAEKCGCRSILIDEFTDIDLDDLKNYSKISITAGASAPESKVMEIAKSLELHTDAEIIEHGEDNEDIYFKLPPGLR

SEQ ID NO: 90830 - protein, 201 aa, Unknown
  Bacterial polypetide isolated from the Sargasso Sea
NLNKKDVQVLLIGHKNHPEVIGTMGQVASGKIDLIETLDDAKNYQRGKNDKLAYITQTTLSVDDTKDIINVLKERFPDIHEPKKDDICYATTNRQAAVKKIAKECDNLFVIGSRNSSNSVRLVEVAKNNGCKNAELIHSESTFPLEKISKCKTIGISSGASAPEVLVNEFIENIKKKFTVEIEEVEIVKEDVTFKIPGKLN

SEQ ID NO: 90831 - protein, 167 aa, Unknown
  Bacterial polypetide isolated from the Sargasso Sea
MGKQLNVLLASPRGFCAGVERAIEIVERALDLYGPPVYVRHEIVHNKHVVESLREKGAIFVDEVDDIPEGAHAIFSAHGVSATVVDAAAYRGLEIIDATCPLVSKVHKEGQNHVGKGRQVILIGHAGHPEVEGTQGQIPGGVLLVTHPDEVWKLRVDDPDQLAYVTQ

SEQ ID NO: 90832 - protein, 201 aa, Unknown
  Bacterial polypetide isolated from the Sargasso Sea
MKSKEIKILLAAPRGFCAGVERAIEIVKKSINKYGAPVYVRHEIVHNKHVVDGLKKIGAIFVEELHEIKDKTRPVIFSAHGVPKKVPVEAENFKMEYVDATCPLVSKVHREAENLNKNGVQILLIGHKNHPEVIGTMGQIPEGEIDLIETIEDANNYQNKSKKKLAFVTQTTLSVDDTKEIISALKKKFPEIKEPKKEDIC

SEQ ID NO: 90833 - protein, 313 aa, Unknown
  Bacterial polypetide isolated from the Sargasso Sea
MRVILAQPRGFCAGVVRAIEIVDRALQQHGAPVYVRHEIVHNRHVVENLRNKGARFVEELDEVPHGAVAIFSAHGVAQTVERDAETRGLDVLDATCPLVTKVHVQGRQYVAAGRRLILIGHAGHPEVEGTIGQIPAEVILVQSEAEVDTLTLPVDTPVAYITQTTLSVDDTRGIIEALQRRFTDLVGPDTRDICYATQNRQAAVRELSEQVDVLLVVGATNSSNSNRLREIGTESGVPSYLVADGSEVKAEWFANAKTVGLTAGASAPEEMVEDVIGALRALGPVDVTTMAGREEKVEFKLPAKLTQAVAREV

SEQ ID NO: 90834 - protein, 189 aa, Unknown
  Bacterial polypetide isolated from the Sargasso Sea
GHKNHPEVIGTMGQVANGKIDLIETIDDAKNYQRGKNDKLAYITQTTLSVDDTKDIINVLKERFPDIHEPKKDDICYATTNRQAAIKKIAKKCDNLFVIGSRNSSNSVRLVEVAKNNGCKHAELIHSESTFPLEKISKCKTIGISSGASAPEVLVNEFIENIKKKFTVEIEEVEIVKEDVTFKIPGKLN

SEQ ID NO: 90835 - protein, 294 aa, Unknown
  Bacterial polypetide isolated from the Sargasso Sea
RLGVWWEQPDTWNEYFGALERYKEGPGNGDPNCLRAYVDPETGLRLGAWLATQRQLKRRTRNPLEPARVERLERLGVRWEQPDTHTWDEYFGALERYKEGPGNGDPNCAQSYVDPDTGLRLGVWLSHQRQLKRRTRNPLEPERVERLERLGVWWEQPDTWDEYFGALERYKEGPGNGDANCPRDYVDPETGVKLGSWLTYQRKIKKRKKNPLDPERVERLERLGVWWEQPDTWNEYFGALERYKEGPGNGDPNCPRAYVDPETGLRLGAWLATQRQLKRRTRNPLDPARVERLE

SEQ ID NO: 90836 - protein, 299 aa, Unknown
  Bacterial polypetide isolated from the Sargasso Sea
GSYIKGTNGKSQGVVPFLKVVNDTAVAVNQGGKRKGAVCAYLETWHLDIEEFIELRKNTGDDRRRTHDMNTANWIPDLFMKRVFDDGKWTLFSPSEVPDLHDLTGKAFEERYEYYEALTEYNKIKVFKTVQAKDLWRKMLSMLFETGHPWLTFKDPCNLRSPQQHVGVVHSSNLCTEITLNTNKDEIAVCNLGSINLPNHIVDGKLDTAKLQRTVNTAVRMLDNVIDINYYSVPQARNSNFKHRPVGLGIMGFQDALYLQHIPYGSDAAVEFADKSMEAVSYYAIQASCDLADERGAYE

SEQ ID NO: 90837 - protein, 293 aa, Unknown
  Bacterial polypetide isolated from the Sargasso Sea
VAVTRGGKRKGAVCAYLETWHMDIEEFLELRKNTGDDRRRTHDMNTANWIPDLFMKRVFEDGKWTLFSPSEVPDLHDLTGKAFEERYEYYEALIEYGKIKLYKTIQAKDLWRKMLSMLFETGHPWLTFKDPCNLRSPQQHVGVVHSSNLCTEITLNTNKDEIAVCNLGSVNLVNHIVDGKLDIEKLGRTVKTAVRMLDNVIDINYYSVDQARNSNFKHRPVGLGLMGFQDALYLQHIAYGSDAAVDFADKSMEAISYYAIQASCDLAEERGATAPSKVRCGARASCRWIRSRS

SEQ ID NO: 90838 - protein, 189 aa, Unknown
  Bacterial polypetide isolated from the Sargasso Sea
LISRLKAVVAGDEYLDDDFDELGYPSEDELNDINNFKQNPKNANTLANSNPFDFMNNNRSSKVVGMPGITNSSSEVSLMEPRSFDEMPQAIQALRERKTVILNLTMMDPDQAQRAVDFIAGGTYAIDGHQERVGESIFLFAPSCVNVTSSSPEEASPSSVSTENTPQYSLGKNTTPEPAWGNSKLSAYS

SEQ ID NO: 90839 - protein, 179 aa, Unknown
  Bacterial polypetide isolated from the Sargasso Sea
MCDGSVITYPQIFIDGRRIGTYFDFQDYIEEEYEPILAPTLNRFTVFPLKYPELWELYKKAQMSNWTAEEVDLSKDLDDWKTLNDNEQKFIKYILAFFAGSDGIVFENINNNFADEVQISEARSFYAYQSHNEMVHGETYSKLIDKYIKDGAEKKQLFEAIQTVPCIERKANWALKWFN

SEQ ID NO: 90840 - protein, 108 aa, Unknown
  Bacterial polypetide isolated from the Sargasso Sea
GLSDMYGDDFEKLYTKYENEMKHLEKIKARDLMSKIIEAQIETGQPYMLYKDAINNKSNQKNIGVIKSSNLCAEIVEYSDKNETSVCNLASIALPKFVKKSEKKIIYD

SEQ ID NO: 90841 - protein, 83 aa, Unknown
  Bacterial polypetide isolated from the Sargasso Sea
MRNSTLSALMPSETSSQISNATNGIEPPRGFISIKSSKDGVLKQVVPEYETLRDQYELLWDIPSNDGYLQLVGIMQKFIDQTI

SEQ ID NO: 90842 - protein, 178 aa, Unknown
  Bacterial polypetide isolated from the Sargasso Sea
MNSNMTVTKRCGARETIDLDKIHRVITWAAKGLKNVSVSEVELRTHLQFFDGIPTEAIHETIIKSAADLISPESPDYQFLAARLAVFHLRKKAFGQFEPPKLYDHVTKLVELGKYDMHILQDYTREELDIMDSYIDHWRDMNFSYAAVKQLEGKYLVQNRVTHEIYESAQFLYILVAA

SEQ ID NO: 90843 - protein, 233 aa, Unknown
  Bacterial polypetide isolated from the Sargasso Sea
MAVTKRDGNKEDISLEKITNRISILSNGLEIDSITIAQKAIQGLYDGITTNEIDTYLAETAAALTVEHPDYSYLAGRIKANALHKETPGFIIATKNLYEDGLLRDEYYEKVKANAEEIEKIIDYDRDYYFDYFALTTLFRAYLLQSNNKTAERPQDLWMRVALCVSGDKFDFYQVKKTYDSLSQGFYTHATPTLFNSGLKMQQLSSCFLIGMEDDSIEGIFNTVKDCALISKT

SEQ ID NO: 90844 - protein, 225 aa, Unknown
  Bacterial polypetide isolated from the Sargasso Sea
SKLATKNLDQVIDINFYPTNKTESSNSKHRPIGLGIQGLADVYFKLNLPYDGDKASEINKLIFETIYFGALEASCELAKEKGTYSSFKGSPLSKGKFQFDLWNIKPSNMWDWDTLREKIKKYGVRNSLTTACMPTASTGIILGNTETFQIQTSNIYKRQTLSGEFLLVNRFLVKELSKRNLWNKAMRDNIILENGSVQNIPNFPEDLKEVYKTVWETSQRTVIDM

SEQ ID NO: 90845 - protein, 133 aa, Unknown
  Bacterial polypetide isolated from the Sargasso Sea
MNDNLFVTKRNGEKESIDLEKIHKVVTWAAKGLSNVSVSQVEIKAQIQFFDGINTSEIHETLIKSAADLISTDAPDYQYLAARLAIFHLRKKAYGQFEPPALIDQVKQMVEMGKYDSHLLEDYSAEEFAEMET

SEQ ID NO: 90846 - protein, 270 aa, Unknown
  Bacterial polypetide isolated from the Sargasso Sea
DKITNRVSVLSTGLHIDPIVVAQKAIPGLYPDITSTEIDNYLSETAAALTVEHPDYSYLAARIKANSLHKETPGFVIATKNLYEDGLLKKDYYDKVMANAEAIETIIDYDKDYNFDYFAFTTLIRAYLLKFENKTIERPQDLWMRVALTVSCDNFEFNKVKETYDSLSNGLYTHATPTLFNSGLKMQQLSSCFLIAMEDDSIEGIFNTIKDCALISKTAGGIGMHAHNIRSSGSRIKSTNGKSNGLIPFLKIFNETAKSVIKEEANEKVH

SEQ ID NO: 90847 - protein, 234 aa, Unknown
  Bacterial polypetide isolated from the Sargasso Sea
IAKEKGAYSSYEGSPLSEGKLQFDLWNVKPSDLWDWDTLREKVKKYGVRNSLTTACMPTASTGIILGNTETFQIQTSNIYKRQTLSGEFLLVNRYLVKELTKRNLWNKTMRDNIILENGSVQNIPNFPPDLKEIYKTVWETSQRTVIDMAADRAPFIDQTQSMNLWLSNPTFGKVNSMHMYAWKKGLKTGMYYLRSRSAVDAVKVTVSSEKKAKEEFLNNNNEDNPEECLTCSA

SEQ ID NO: 90848 - protein, 174 aa, Unknown
  Bacterial polypetide isolated from the Sargasso Sea
DDDFDDLDYASEDELNDINNFKQNPKNANALANSNPFDFMNNNRSSKVVGMPGITNSSSEVSLMEPRSFDEMPQAIQALRERKTVILNLTMMDPDQAQRAVDFIAGGTYAIDGHQERVGESIFLFAPSCVNVTSSSPEEASPSSVSTENTPQYSLGKNTTPEPAWGNSKLSAYS

SEQ ID NO: 90849 - protein, 310 aa, Unknown
  Bacterial polypetide isolated from the Sargasso Sea
GNLYDGVSVADMRSSLIMTARTKVEKEPNYSFVTARILMDQIRNEALEFLGIAEDATYGDMQEYYPKALLSYIDKGIELDILNPELKTFDLKKIGQAIDHTRDNQFTYLGLQTLYDRYFIHSDDTTYELPQVFFMRVAMGLAMEEENREERAIEFYNLISSFDYMSSTPTLFNSGTVRPQLSSCYLSTVPDDLKGIFTAYQDMALLSKWAGGLGYDWTPVRSLGSYIKGTNGKSQGVVPFLKVANDTAVAVNQGGKRKGAMCSYLETWHMDIEEFLELRKNTGDDRRRTHDMNTANWVPDLFMKRVQNDE

SEQ ID NO: 90850 - protein, 214 aa, Unknown
  Bacterial polypetide isolated from the Sargasso Sea
MEYEYVIKRNGSTEKVYFDKINNRLEKLCSNLSINSTRVTRNITQKMYNGILTRELDELGAQIAASLSTEHPDYGILASRIIISNHHKNTSPSFSETMRTLYENKDVQGNQSPLISKELFETVEANKSKLNDTIKYERDFFFDYFGFKTLERSYLMRVKSENTSKHNLKGDIVERPQHMFMRVALGIHGKAIKDAINTYNLMSNKYFIHATPTL

SEQ ID NO: 90851 - protein, 38 aa, Unknown
  Bacterial polypetide isolated from the Sargasso Sea
ISLQGKTNFFEKRVSEYQKAGVLNKESEETKISFDADF

SEQ ID NO: 90852 - protein, 263 aa, Unknown
  Bacterial polypetide isolated from the Sargasso Sea
DQVIDINFYPTSKTDTSNNLHRPIGLGIQGLSDVFFKLSIPHDGEEAGKINKLIFETIYFGALEASMELAKEKGSYSSFKGSPLSEGKFQFDLWDVKPSEMWNWDALREKVIKHGVRNSLTTACMPTASTGIILGNTETFQIQTSNIYKRQTLSGEFLLVNRHLVKELSKRNLWNKEMRDNIILENGSVQNISKFPEDLKEIYKTVWETSQRTVIDMAADRAPFIDQTQSMNLWLSNPTFGKVNSMHMYAWKKGLKTGMYYLR

SEQ ID NO: 90853 - protein, 43 aa, Unknown
  Bacterial polypetide isolated from the Sargasso Sea
MELISLQGKTNFFEKRVGEYQKAGVMNSIGGGGVNAFSLDEDF

SEQ ID NO: 90854 - protein, 248 aa, Unknown
  Bacterial polypetide isolated from the Sargasso Sea
MLGMIFETGHPWMTFKDPCNLRSPQQHCGVVHSSNLCTEITLNTNAEEIAVCNLGSVNLPQHIEDGELNLDKLRSTVRTAIRMLDNVIDINYYSVPQAETSNFRHRPIGLGLMGFQDALYKIDASYGSDDAVTFADRSMEAISYFAIEASSELASERGNYSSYEGSLWSRGIFPMDSLDILIEQRGEQYIDVNRDKTLDWDALKAKVAAAGMRNSNVMAIAPTATIANITGVSQSIEPTYQNLYVKSN

SEQ ID NO: 90855 - protein, 259 aa, Unknown
  Bacterial polypetide isolated from the Sargasso Sea
MVTKRDGATEPVSLDKITNRISVLSTGLSIDPITVAQKAIPGLFNEITSTEIDNYLAETAAALTVEHPDYSYLAARIKANALHKETPGFVIASKNLYEDGLLKKEYYDKVLENAEEIESIIDYDRDYHFDYFALTTLIRAYLLRCENKTIERPQDLWMRVALTVSCHNFDFDKVKNTYIALSNGMYTHATPTLFNSGLKMQQLSSCFLIGMEDDSIEGIFNTIKECALISKTAGGIGLHAHNIRASGSRIKSTNGKSNG

SEQ ID NO: 90856 - protein, 304 aa, Unknown
  Bacterial polypetide isolated from the Sargasso Sea
MCRIVEYSDKNETAVCNLASIALPSFINKKTNEFDYNKLYQTAKLATKNLDQVIDINFYPTSKTDTSNNLHRPIGLGIQGLSDVFFKLSIPHDGEEARKINKLIFETIYFGALEASMELAKEKGSYSSFKGSPLSEGKFQFDLWDAKPSDMWNWDVLREKVKKHGVRNSLTTACMPTASTGIILGNTETFQIQTSNIYKRQTLSGEFLLVNRHLVKELSKRNLWNKEMRDNIILENGSVQNITKFPEDLKEIYKTVWETSQRTVIDMAADRAPFIDQTQSMNLWLSNPTFGKVNSMHMYAWKKD

SEQ ID NO: 90857 - protein, 269 aa, Unknown
  Bacterial polypetide isolated from the Sargasso Sea
LKTLEKSYLYKVNGKIIERPQDMIMRVALSIHRNDLGRAFETYHLMSHHYFTHATPTLFNAGSNREQFASCFLLAMKDDSIKGIYETLADCATISQHAGGIGLHIHNIRATNSFIAGTNGKSNGIVPMLRVFNDTARYVDQCVLPETYIYTTDGPKQIQDCELGVTSIFTSRGPEVIQNVLEHTYEGDLLEIDTMHSIEPLQITPEHPVYCIRNQKSGLNYNIIKNRLDKKLIEFEWTDAKELTKDDLCLFKIPEYEKDYPELTQDDCY

SEQ ID NO: 90858 - protein, 301 aa, Unknown
  Bacterial polypetide isolated from the Sargasso Sea
QVAKLATKNLDQVIDINFYPTDKTENSNSRHRPIGLGIQGLADVYFKMNIAYDSVQAQIINKQIFETVYFGALEASMELATDKGPYSTFKGSPLSEGQFQFDLWGVKPSSMWDWKGLMEKIQKHGVRNSLTTACMPTASTGIILGNTETFQVQTSNIYKRQTLSGEFLLVNRHLVKELMKRNLWSKELRDQIILENGSVQNIEGFPEDLKDVYKTVWETSQKTVIDMAADRAPFIDQTQSMNLWLATPTFGKVNSMHMYAWKKGLKTGMYYLRSRSAVDAVKVTVSSEKKAKESYVKEAQS

SEQ ID NO: 90859 - protein, 221 aa, Unknown
  Bacterial polypetide isolated from the Sargasso Sea
PVRGMGAHIKGTNGRSQGVVPFLKVVNDTAVAVNQGGKRKGAVCAYLETWHLDIEEFLELRKNTGDDRRRTHDMNTANWIPDLFMERVMNKESWTLFSPNEAKDLHDLTGNEFKEQYEKYEEEAKKGNIKAYKEVDAEELWRKIISMLFETGHPWLTFKDACNLRSPQQHTGVIHSSNLCTEITLNTSQDEIAVCNLGSVNLKNHLDKDNNLDKEKLQKTI

SEQ ID NO: 90860 - protein, 127 aa, Unknown
  Bacterial polypetide isolated from the Sargasso Sea
EALHTEFAIYLYNKIVGRDTNLKMSCEDIHAMMRDAYDIECEFITEALPCKLIGINQESMKQYIQFCIDRLLVQLKYDKMYDVTNPFKFMEMLSIEGKTNFFEKRVGEYSLSDYSREEAFDIENVDF

SEQ ID NO: 90861 - protein, 235 aa, Unknown
  Bacterial polypetide isolated from the Sargasso Sea
MAVTKRDGNKEDISLEKITNRISILSNGLEIDPITIAQKAIQGLYDGITTNEIDTYLAETAAALTVEHPDYSYLAGRIKANALHKETPGFIIATKNLYEDGLLRDEYYEKVKANAEEIEKIIDYDRDYYFDYFALTTLFRAYLLQSNNKTAERPQDLWMRVALCVSGDKFDFYQVKKTYDSLSQGFYTHATPTLFNSGLKMQQLSSCFLIGMEDDSIEGIFNTVKDCALISKTAG

SEQ ID NO: 90862 - protein, 249 aa, Unknown
  Bacterial polypetide isolated from the Sargasso Sea
MVTKRDGSKEPISLDKITNRVSVLSTGLNIDPIVVVQKAVPGLYSDISSVEIDTYLAETAAALTVEHPDYSYLAARIKVNSLHKETPGFIIATKNLYDDGLLREDYYKKVMENADLIESVIDYDKDYTFDYFALTTLIRAYLLKFDNKTIERPQDLWMRVTLTVTGSEFNFDKIKETYKSLSTGMYTHATPTLFNSGLKMQQLSSCFLIGMEDDSIEGIFNTIKDCALISKTAGGIGMHAHNIRGREVE

SEQ ID NO: 90863 - protein, 239 aa, Unknown
  Bacterial polypetide isolated from the Sargasso Sea
VFENLMKKQLSFFWRPEEVDVSKDRADWQTLSEAEKHIFISNLKYQTLLDSIAARSVSAAFLPLVSIPELETWIETWAFSETIHSRSYTHILRNLFTDPSEVFDDIVINPAIIKRAVSISKYFDELIQITQVYNIHGEGVHEIDGKKIEVTERKVKEKLYLAVCSTNALEAIRFYVSFACSFAFAERSLLEGNSKLIKLISRDESVHLSSTQAILNLWSSGKDDSEMKEVSDELKEEGR

SEQ ID NO: 90864 - protein, 293 aa, Unknown
  Bacterial polypetide isolated from the Sargasso Sea
LMAEEPQYSYLAARLLSTFIDKEVSNQEIHAFSQSVRLGFEKGLINGNTFEFIQANKRKLNDAIENGRTDLFQYFGLRTLYDRYLLKDPESRKVLETPQYFFMRVACGLSTTPTEAIEFYKVLSSFSYMPSSPTLFNSGTRHPQMSSCYLLDSPNDDLEAIYGRYTEIAKLSKHAGGIGIAYHRIRGEGSLIRGTNGQSSGIIPFLNTLNASVGAVNQGGRRKGACCVYLETWHSDIESFLELRDNTGDHSRRTHNLNLANWVPDLFMKRVESDEQWSLFDPKAVPEFCDLFG

SEQ ID NO: 90865 - protein, 242 aa, Unknown
  Bacterial polypetide isolated from the Sargasso Sea
DIFEAIYVGALEASIELAKKHGPHDSYAGSPASRGELQPDLWGLNAKELDAKSRWDWAQLRADLARYGLRNSLLTAPMPTASTAQIMGCNECFEPYTSNLYARRVKAGEFVVANRHLVKDLCELGLWDENLRRDLLRAQGSVQGLAIPDDLKALYKTAWELSQKSLLDLSAGRGPFVDQSQSLNCFIAAPDYGKLTTFHFRGWEAGLKTGMYYLRTRPAADAIQFTLEASAPGAAAAAAPTT

SEQ ID NO: 90866 - protein, 44 aa, Unknown
  Bacterial polypetide isolated from the Sargasso Sea
MLVIKRDGRKESVKFDKITARIEKLSYGLNTKYVKTIEIAKKVI

SEQ ID NO: 90867 - protein, 221 aa, Unknown
  Bacterial polypetide isolated from the Sargasso Sea
NYIPDIKEREQAFAAIENIPSIKQKGDFCFKWMGTMEDLEEVRTEEDQRTFLLNLICFAACIEGLFFFAAFAYVYFLRSKGLLNGLAAGTNWVFRDESCHMNFAFEVVNTARKQQPELWTPELMEDIRNMLQEAVECEMKFAEDVLGGGVNGMSLKDTREYLQFVADQRLMQLGLEPIYRSKNPFDFMALQDVQELTNFFEKTVTSYQVGVEGDVAFDEDF

SEQ ID NO: 90868 - protein, 289 aa, Unknown
  Bacterial polypetide isolated from the Sargasso Sea
DSIQGRGPGMAFIPYCSLPELEACMEVWGFMEMIHSRSYTYIIKNIYSDPSEVFDKIVTDNRILERASSVTQGYDDFIQSAHQYDGSTMWELATEGHIGGQYDRREVKRKLYRAVANVNILEGIRFYVSFACSFAFGELKLMEGSAKIISLIARDENQHLAITQNILNKWKQGDDPEMKQIMKEEEEWTLKAFDNAVNEEKRWADYLFKDGSMIGLNDKLLQQYVEWIANRRLKAIGLKPQYDIAASNNPLPWTQHWISSKGLQVAPQETEVESYVVGGIKQDVKKDTF

SEQ ID NO: 90869 - protein, 318 aa, Unknown
  Bacterial polypetide isolated from the Sargasso Sea
KKLYQTAKLATKNLDQVIDINFYPTSKTDTSNNLHRPIGLGIQGLSDVFFKLSIPHDGEEARKINKSIFETIYFGALEASMELAKEKGPYSSFTGSPLSEGKFQFDLWDVNPSDMWNWDALREKVKKHGVRNSLTTACMPTASTGIILGNTETFQIQTSNIYKRQTLSGEFLLVNRHLVKELSKRNLWNKEMRDNIILENGSVQNISNFPEDLKEIYKTVWETSQRTVIDMAADRAPFIDQTQSMNLWLSNPTFGKVNSMHMYAWKKGLKTGMYYLRSRSAVDAVKVTVSSEKMARENIINSQTNDSNDTEECLTCSA

SEQ ID NO: 90870 - protein, 272 aa, Unknown
  Bacterial polypetide isolated from the Sargasso Sea
AQIETGQPYMLYKDSVNEKSNQKNIGVIKSSNLCAEIVEYSEKDETAVCNLASIALPKFVTDESKFDYQNLYQVAKLATKNLDQVIDINFYPTDKTENSNSRHRPIGLGIQGLADVYFKMNIAYDSVQAQIINKQIFETVYFGALEASMELATDKGPYSTFKGSPLSEGQFQFDLWGVKPSSMWDWKGLMEKIQKHGVRNSLTTACMPTASTGIILGNTETFQVQTSNIYKRQTLSGEFLLVNRHLVKELMKRNLWSKELRDQIILENGSVQ

SEQ ID NO: 90871 - protein, 164 aa, Unknown
  Bacterial polypetide isolated from the Sargasso Sea
PSWSTLKEDEQKLTIRVFTGLTLLDTIQNTVGAITLMPDAVTQHEEAVLTNIAFMEAVHARSYSSIFSTLCSMPEVDDAYRWSEENAFLQEKSQLILQEYRATDPLRKKVASVFLESFLFYSGFYLPMYWSSRAKLTNTADLIRLIIRDEAVHGYYIGYKFQQG

SEQ ID NO: 90872 - protein, 260 aa, Unknown
  Bacterial polypetide isolated from the Sargasso Sea
VPDLFMKRVEQDKNWTLFSPGEAPDLHDLIGKEFEEKYEEYEEKAKNGEINQHKSIPAKELWRKMLTMLFETGHPWITFKDSCNLRSPQQHTGVIHSSNLCTEITLNTSADKEIAVCNLGSVNLANHMENGTLNEEKVKQTVSTAIRMLDNVININYYSVDTAKNSNYKHRPIGLGLMGFQDALYLQNIPYCSEEAIEFADKSMELISYNAILASTELAKERGSYESFDGSLWSKGILPKDSIDILEKNRGEEYIKVDKS

SEQ ID NO: 90873 - protein, 109 aa, Unknown
  Bacterial polypetide isolated from the Sargasso Sea
MKVETPVSGVGLGLRRALMGPLSQARDYAPESIPFDFMEVAPENWIPMGGRQGKEFRAFTERYPFVAHGLSLSLGGPEPLDFELLKSVKSFLKQHNIRRYTEHLSYCSD

SEQ ID NO: 90874 - protein, 262 aa, Unknown
  Bacterial polypetide isolated from the Sargasso Sea
MIHSKSYTYIIKNVYSDPGEVFDKIVTDERILERASSVTESYDDFINSAQVWGTGNMWRSDFKDSPTSQWEIRDVKRKLYRAIANVNILEGIRFYVSFACSFAFGELKLMEGSAKIISLIARDENQHLAITQNILNKWKQGDDPEMKEIMQEEQDWTYKMFDRAVNEEKRWAEYLFKDGSMIGLNDKLLQKYVEWVANRRLKAIGLKPQYDIAAKNNPLPWTQHWISSKGLQVAPQETEVESYVVGGIKQDVSKDTFSGFKL

SEQ ID NO: 90875 - protein, 51 aa, Unknown
  Bacterial polypetide isolated from the Sargasso Sea
SDIKSNPLPWMKSYLTSDNVQVAPQEAEISSYLVGQIDSNVEAGEFDDYEL

SEQ ID NO: 90876 - protein, 39 aa, Unknown
  Bacterial polypetide isolated from the Sargasso Sea
MCRPDLDRFLIFPIRQPALWTKYKQHVASFWTAEEIDLS

SEQ ID NO: 90877 - protein, 65 aa, Unknown
  Bacterial polypetide isolated from the Sargasso Sea
MTEYLLTEENKRFVVFPIQNDKVYEMYKKAVASFWTPEEIDLEKDLTDFNALNDEKRHFIENVLA

SEQ ID NO: 90878 - protein, 267 aa, Unknown
  Bacterial polypetide isolated from the Sargasso Sea
MTDKPEELAKAKEEISSKYGGEFKSFPQIVIDFHGRKGDKYVGGYSEFEEFTRPYYDFNKLAHITKVVTNNLNEVIDMNRYPVPETELSNKRHRPLGIGVQGLADTYAKMRYGFDSPEAMQLNKDMFAVMYYAAMQKSLEIAKRDGAYETFKGSPLSEGKFQFDLWNVEPVRMVGRNDETYHKYNNEMQLEWESLRTEVMEHGVRNSLLMALMPTASTSQIMGNNECIEPFTSNIYLRRVLAGEFIVVNKYLLRDLKNLGLWNKDMK

SEQ ID NO: 90879 - protein, 292 aa, Unknown
  Bacterial polypetide isolated from the Sargasso Sea
IKHLEKIKARDPMSKIIEAQIETGQPYMLYKDSINNKSNQKNIGVIKSSNLCAEIVEYSDKNETSVCNLASIALPKFVKKSDKKLIYDYDALYETAKLATKNLDEVIDINFYPTDKTERSNNKHRPIGLGIQGLADVYFKMGIPYESEEAKQINKLIFETIYFGALESSCELAKEKGSYETFKNSPISEGKFQFDLWNVNPSSKWDWDTLRTKIKKYGVRNSLTTACMPTASTGIILGNTETFQIQTSNIYKRQTLSGEFLLVNRYLVNELSQRGLWNKEMRDRIILENGSV

SEQ ID NO: 90880 - protein, 274 aa, Unknown
  Bacterial polypetide isolated from the Sargasso Sea
VQFNKLMYQRMMKDGYISLFSPSDVPGLYDAFFADQEKFEELYVKYENDDSIRKKQIKAMELFSLFMQERASTGRIYLQNVDHCNTHSPFNPEVAPVRQSNLCLEIALPTKPLQHVNDENGEIALCTLSAFNLGAIKSLDEFEELSDLAVRALDNLLDYQDYPVPAAYNATMGRRTLGVGVINFAYYLAKNGVKYSDHSANGLVHRTFEAMQYYLLKASNNLAKEKGACPKFNETTYSQGIMPIDSYKKDLDSVCNEPLHYDWDALREEIKTHG

SEQ ID NO: 90881 - protein, 257 aa, Unknown
  Bacterial polypetide isolated from the Sargasso Sea
YQEMETNYPKAFKAYIDKGIELEILNPELKNFDIERLAEAIDFTRDNQFTYLGLQTLYDRYFIHCDDVRYELPQVFFMRVSMGLAIEEDKREERAIEFYKLLSSFDYMSSTPTLFNSGTKRPQLSSCYLTTIPDDLDGIFSAMKDNALLSKWAGGLGNDWTPVRAMNSYIKGTNGKSQGVVPFLKVANDTAVAVNQGGKRKGAMCGYLETWHLDIEEFLELRKNTGDERRRTHDMNTANWVPDLFMKRMEQDKNWTL

SEQ ID NO: 90882 - protein, 290 aa, Unknown
  Bacterial polypetide isolated from the Sargasso Sea
IFPIKNQEIWDRYKQHIQAFWTTEEVSLQDDLRDLETLNEGEKHFIKHVLAYFANSEAMINENLASRFYKEILIPEARCFISMQMLNESIHAEMYGLQIEAYVKDAKEKDMLFDAIQNVPCINHKAQWVSKWLNGSQNLLTRLIGFGLVEGLFFAGSFCAIYYFRKRGLLPGLALSNDWIARDEGMHFSFSSLMFRTLRDKFNNKTLTDADISDLSLIPSDVPQSQFEEIVREAVAFEKEFVRDALPVDLIGMNADLMCQYIEAVADRIADLFEFDRVFKTENPFDFMRA

SEQ ID NO: 90883 - protein, 323 aa, Unknown
  Bacterial polypetide isolated from the Sargasso Sea
MGENQGPVYFWKLYGDMLVAVNQGGKRKGAGCAYLETWHSDIEDFLELRKNVGDERMRAHDMNTANWIPDLFLKQVEKDEDWYLFSPNETPELHEIYGKEFEDKYWEYVEKGKAGELRVFKEVKAKDLWKKMLKALFETGHPWITFKDPSNIRYSNQHVGTVHSSNLCTEILLHTKPTKYKEGNLREVEEYGETAVCNLASINLKNHLKKRTLDFDKIRATAEIGMRMLDNVVDINFYPTKESENANVRHRPVGLGSMGWHDVFYALDVDYSSDEAVEWSDKIYEHISYGAILAFSKLAKERGKYSTYKDSLWGPGIFTIDTY

SEQ ID NO: 90884 - protein, 110 aa, Unknown
  Bacterial polypetide isolated from the Sargasso Sea
MYVVKRDGRREAVKFDKITARIKKLCYGLNPLVTPEKVAMKVIEGLYDGVTTSELDNLAAEVAATNTITHPDYALLASRIAVSNLHKNTKKSFSDVVKDLYEYIDPKTDK

SEQ ID NO: 90885 - protein, 302 aa, Unknown
  Bacterial polypetide isolated from the Sargasso Sea
MSSCYLSTLPDDLRGIFEGISDDAMLSKFAGGLGNDWSQVRALGSYIKGTNGKSQGVIPFLKVANDTAVAVNQGGKRKGAMCAYLETWHLDIEQFLELRKNTGDERRRTHDMNTANWIPDLFMKRVHGNEEWTLFSPSDTPDLHDLYGLDFEEKYMEYEDLAKSGGIKNFKTVNAVDIWRKILSMLFETGHPWITFKDPCNVRSPQQHKGVVHSSNLCTEITLNTSKDEIAVCNLGSVNLAAHITEAGKIDTKKLKKTIMTAMRMLDNVIEYNYYSVDKAKNSNLKHRPVGLGIMGFQGCFI

SEQ ID NO: 90886 - protein, 487 aa, Unknown
  Bacterial polypetide isolated from the Sargasso Sea
MVGRKVLFLFLKVVNDTAVAVNQGGKRKGAVCAYLETWHLDIEEFLELRKNTGDDRRRTHDMNTANWIPDLFMERVMNKETWTLFSPNEAKDLHDLTGNEFKEQYEKYEEEAKKGNIKAYKEVDADELWRKIISMLFETGHPWLTFKDACNLRSPQQHTGVIHSSNLCTEITLNTSQDEIAVCNLGSVNLKNHLDKDNNLDKEKLQKTISIAIRMLDNVIDINYYAVPQAENSNFKHRPIGLGIMGFQDILQIKKIPYSSDEAVELADDSMETVSYFAIEASSDLAKERGSYSSYEGSLWSQGIFPIDSISILKEHRTEGFLDQNEEKKKDWDTLKEKVKKQGIRNSNVMAIAPTATIANITGVTQSIEPTYSNLFVKSNLSGEFTVINENLVNALKEIDMWDEVMVYDLKNLNGSLETISRVPDEIKRIFATSFEIEPKWLIESASRRQKWIDQSQSLNLYVAEPNGKKQDVMYKMAWLRGLKTTY

SEQ ID NO: 90887 - protein, 449 aa, Unknown
  Bacterial polypetide isolated from the Sargasso Sea
WHLDIEQFLELRKNTGDERRRTHDMNTANWIPDLFMKRVHANEEWTLFSPSDTPDLHDLYGLEFEEKYTEYEDLAKTGGIKNFKTVNAVDIWRKILSMLFETGHPWITFKDPCNIRSPQQHKGVVHSSNLCTEITLNTSKEEIAVCNLGSVNLAAHITDDGKINTKKLKTTISTAMRMLDNVIEYNYYSVDKAKNSNLKHRPVGMGIMGFQDALYKIRVPYESEEAVDFADKSMEYVSYFAIEASMELAKERGAYESFDGSLWSQGILPIDSLKKLKKVRGKYLDVNLDESLKWDELRDKIKANGMRNSNTLAIAPTATISNICGVSQSIEPTYQNLYVKSNLSGEFTVINPYLINDLKSRDLWDEVMIKDLKYFDGQLQPINRVPDDLKAIYSTCFEIDTRWLVEAAARRQKWIDQSQSLNLYIPDSDGKKLDSAYKLAWIRGLKTTY

SEQ ID NO: 90888 - protein, 997 aa, Unknown
  Bacterial polypetide isolated from the Sargasso Sea
MQTTDNATSQYESASSRPLGGTEQGAKALAPQATFADYKVIRRNGSVVSFEPSKIAIAVTKAFLAVNGGQGAASARVREQVEQLTHNVVRALVRSRPNGGTFHIEDIQDQVELALMRGGEHNVARAYVLYREKRHLERQHAGEEAAAAGGEASTGINVVDNGVTRPLDLNALRALIVSACDGLGAAVNPDPIVAETVKNLYDGVPMSQVYDSAILAARTMIEKDPAYSQVTSRILLHTIRREILGEEVVQAEMSTRYAEYFPQFLKRGVDAGLLDDKLLQFDLKRLGEALDANRDLQFGYLGLQTLYDRYFLHVEGTRIEMPQAFFMRVAMGLSLNEIDRETRAIEFYNVLSSFDFMSSTPTLFNSGTHRSQLSSCYLTTVADDLDGIYEALKENALLSKFAGGLGNDWTRVRALGSHIKGTNGKSQGVVPFLKVVNDTAVAVNQGGKRKGAVCAYLESWHLDIEEFLELRKNTGDDRRRTHDMNTANWIPDLFMKRVMEGADWTLFSPSTCPDLHDKFGAEFEAAYTAYEDKVARGEIKLFKKIPAQQLWRKMLGMLFETGHPWITFKDPCNVRSPQQHVGVVHSSNLCTEITLNTSDTEIAVCNLGSVNLVAHLVKQADGSYALDHDKLKRTISVAMRMLDNVIDINYYAVPKARNSNLKHRPVGLGIMGFQDCLHLLRTPYASEAAVEFADRSMEAVCYYAYYASTELAEERGRYSSYRGSLWDRGILPQDTLKLLTEARGGYVEVDTSESLDWTSLRSRIASHGMRNSNCVAIAPTATISNIIGVSACIEPTFQNLYVKSNLSGEFTVVNEYLVRDLKERGLWDEVMVADLKYFDGMLSRIDRIPADLRAIYATAFEVDPTWLVEAASRRQKWIDQAQSLNIYMGGASGKKLDEVYKLAWLRGLKTTYYLRTMAATHVEKSTVAHGALNAVPTSGGSSSGGAQGAAGGFGAAGGDASSGAVNAAPALAPVEADGPVCTMRPGDPGFDECEACQ

SEQ ID NO: 90889 - protein, 538 aa, Unknown
  Bacterial polypetide isolated from the Sargasso Sea
ASENEIKEALILSSRSLVEIEPNYTFATSRILLDNLRTEALSFLDISQNATQKEMGKLYPKSLEAFIRKAIELELVNPELGKMNLKKLGKSLKPERDLQFSYLGLQTLYDRYFIHKNEIRFELPQIFFMRVAMGLAIEEKDREEKAIEFYDLLSSFDYMSSTPTLFNSGTIHSQLSSCYLTTVPDDLKGIYDALGDNAMLSKWAGGLGNDWTPVRGMGAHIKGTNGKSQGVVPFLKVVNDTAVAVNQGGKRKGAVCSYLETWHLDIEEFVELRKNTGDDRRRTHDMNTANWIPDLFMQRVMNGEKWTLFTPNETPDLHDLTGAAFKKRYEEYEKEAKEGRITVSKEVEAKELWRKIISMLFETGHPWITFKDACNLRSPQQHTGVIHSSNLCTEITLNTSPDEIAVCNLGSINLPNHLDEKGDLNEKKLEKTINTAIRMLDNVIDINYYAVPQAENSNLKHRPIGLGIMGFQDALYIKELPYSSEEAISFADESMEMVSYYAIKASSNLAVERESYSSFEGSLWSKGILPLDSIEILK

SEQ ID NO: 90890 - protein, 372 aa, Unknown
  Bacterial polypetide isolated from the Sargasso Sea
MSVVRRDGSITPFKSDKIANAIRKAFLAQTDLRDSKQIDKSVSELTETVTAALTRRIANGDMIHIEDIQDQVELALMRGEHHKVARAYVLYREQRANQRYKTAQLNEQIGAKVSTMAVTKRDGNKEDISLEKITNRISILSNGLEIDPITIAQKAIQGLYDGITTNEIDTYLAETAAALTVEHPDYSYLAGRIKANALHKETPGFIIATKNLYEDGLLRDEYYEKVKANAEEIEKIIDYDRDYYFDYFALTTLFRAYLLQSNNKTAERPQDLWMRVALCVSGDKFDFYQVKKTYDSLSQGFYTHATPTLFNSGLKMQQLSSCFLIGMEDDSIEGIFNTVKDCALISKTAGGIGLHAHNIRGGGSRIKSTNGK

SEQ ID NO: 90891 - protein, 511 aa, Unknown
  Bacterial polypetide isolated from the Sargasso Sea
TYASARLLLDSMRREALTFIYDKEFQATSKEMEKIYPDYFKGYMDKAVGLSLIDKDIASLFDLNILAKALLPERDLKFTYLGLQTLYDRYFIHSKDIRFELPQAFFMRVAMGLACNEEAREERAIEFYKLLSSFDFMSSTPTLFNSGTLRPQLSSCYLSTIPDDLRGIFGGITDDALLSKFAGGLGNDWSRVRGMGTHIKGTNGKSQGVVPFLKVANDTAVAVNQGGKRKGAMCAYLETWHLDIEEFLELRKNTGDDRRRTHDMNTANWIPDLFMKRVVEESVWTLFSPNDVPDLHETYGKDFENKYCNYEKLAKEGKIENYKEVSAVDLWKKMLGMLFETGHPWVTFKDPCNIRSPQKHTGVVHSSNLCTEITLNTSDSEIAVCNLGSVNLAAHIKDGKLDIEKLEKTVTTAMRMLDNVIDYNYYSVDKARNSNYKHRPVGLGLMGFQDALYKLSIPYSSQEAIDFADHSMEYISYFAIKASSDLASERGKYESFDGSLWSKGVLPIDSV

SEQ ID NO: 90892 - protein, 37 aa, Unknown
  Bacterial polypetide isolated from the Sargasso Sea
MNSDNVQVAPQESEISSYLVGQIDSAVSEDDFADFEL

SEQ ID NO: 90893 - protein, 575 aa, Unknown
  Bacterial polypetide isolated from the Sargasso Sea
NFETLTTESRNTILSPSVISTAPGQLKIIKRNGAVVGYESDKIAVAMTKAFLAVEGGTAAASPRIRELVSQLTEQVSQTFERRLPTGGTLHIEEVQDQVELALMRSGEHQVARSYVLYRAERAKLRTETVQPQPKDTEYSKINVTNKDESQAPLDVARLRTLIEEACQDLKSVDANRVIENALDNMYDGISVDDVSTSILITARTLVEEEPSYTYVTSRLLLDQLRTEALDFLGVAENATQGQMADLYPKTLEAFINKGVELELLDPQLTKFDLTFLGEAIKPERDLQFTYLGLQTLYDRYFIHWDEVRFELPQVFFMRVAMGLATEEDEPNTRAVEFYDLLSSFDYMSSTPTLFNSGTLRPQLSSCFLTTVPDDLKKIYGAIQDNAMLSKWAGGLGNDWTPVRALGSYIKGTNGKSQGVVPFLKVVNDTAVAVNQGGKRKGAVCAYLETWHLDIEEFLELRKNTGDDRRRTHDMNTANWIPDLFMKRVTEEGDWTLFSPSDTPDLHDLYGAAFEKRYKEYEGQTETGKLTLFKKVRAADLWRKMLSMLFETGHPWITFKDACNIRSPQQHIGVI

SEQ ID NO: 90894 - protein, 357 aa, Unknown
  Bacterial polypetide isolated from the Sargasso Sea
KPLGVQRYDGFKYPVLKKLTNQMLGYFWRPEEVSLQKDRGDYQLLTEPQKHIFTSNLKYQILLDSVQGRGPSMAFAPYCSLPELEGAMKVWEFMEMIHSRSYTYIIKNVYPDPTEVFDTILDDEKIIARAESVTAAYNTFVNQAHQWDTGCMWKKDSRGSSTQTWQEKELKRDLYRAVVNVNILEGIRFYVSFACSFAFGELKCMEGSAKIISLIARDEAQHLVLTQNIIKNWQNGDDDQMKEIAKEEEGNVKEMFINAVNEEKDWAEYLFRDGSMIGLNDKLLQKYVEWVANRRMKAIGIAPVYDVPARNNPLPWTEHWLNSKGQQNAPQETEIESYVVGGIKQNVKKNTFSGFKL

SEQ ID NO: 90895 - protein, 59 aa, Unknown
  Bacterial polypetide isolated from the Sargasso Sea
LVELNCDKVYNSTNPFEFMDMISLQGKTNFFEKRVSEYQKAGVLNNDTRSEEISFDEDF

SEQ ID NO: 90896 - protein, 155 aa, Unknown
  Bacterial polypetide isolated from the Sargasso Sea
MLWFHELVDPVRVAMRVIEGLYDGVTTSELDNLAAEIAATMTTTHPEYASLAARISVSNLHKNTNKSFSSTMKDLHTYVNPITGKKAPLLSDEVYEVIKKNAELLDSKIIYNRDFGYDYFGFKTLERSYLLKINGKICRKTTTHVNESFGWNSSG

SEQ ID NO: 90897 - protein, 900 aa, Unknown
  Bacterial polypetide isolated from the Sargasso Sea
MTEELQNTSLSGKGEKQIIADNASLAPIPGKYRVMRRNGKVTSFDLDKITVAMTKAFLSVEGSSAAASTRIHNEVELLASKVDGAIKRRFPEGGVIHIEDIQDQVELAIMRAGYQDVARSYVLYREERNQARNSNKVESLEDLPIKKGVINEDGSKQDLDITKLRLIIDEACSGVEDVSADAVFELIDKNIYDGIKKEDLSSSILISIRPLIEKDPNYSYVVARLLLTSLYEEGLTFLNFKDNAPTIKEMSKVYPEYFKSYITSAVELELIDKELLNYDIDFIAKNIDPSKDLAFTYLGLQTLYDRYFIHKQGKRFELPQAFFMRVAMGLAINEENREERTLEFYNLISSFDFMCSTPTLFNSGTLRPQLSSCYLSTLPDDLKGIFEGISDDAMLSKFAGGLGNDWSQVRALGSHIKGTNGQSQGVIPFLKVANDTAVAVNQGGKRKGAMCAYLETWHLDIEQFLELRKNTGDDRRRTHDMNTANWIPDLFMKRVHNDEGWTLFSPNDCPDLHDLTGLDFEKKYKEYERRAEQGKIVNFKSVKAVDLWRKILSMLFETGHPWITFKDPCNLRSPQQHVGVVHSSNLCTEITLNTSKDEIAVCNLGSINLAAHIDENNELNVKKLEKTIRTAMRMLDNVIDYNYYSVEKAKNSNAKHRPVGLGLMGFQDALYKLRIPYASEEAVEFADKSMEYVSYFAIQSSMELAIERGPYQTFDGSLWSQGILPIDSLRNFKEIRGKYLDVNMSQNLDWDTLREKIKKNGMRNSNSLAIAPTATISNICGVAQSIEPTYQNLYVKSNLSGEFTVINPYLIKDFKDANIWDEVMIKDLKYFDGQLSSISRVPDKLKSIYQTCFEIDTRWLVEAAARRQKWIDQSQSLNLYIPDTDGKKLDSAYKLAGSEV

SEQ ID NO: 90898 - protein, 275 aa, Unknown
  Bacterial polypetide isolated from the Sargasso Sea
MQFKKPIFWDKKFSVWKYLLLPLSYIYFFFSKINFKKKHTVNGVFSICVGNIYVGGTGKTPSCLLLKRILERLDIKSCFIKKNYSNQIDEQNLLSKYGDLFVEKIRLSALIKSKNQGYKVAIFDDGFQDKSINYNLKIICFNSENFIGNGNLIPSGPLREKISAVKNCDAVFLNGLSLNNKKNIDKLKTINPKIKIFETIYKMKDIENLDKSAKYLIFAGISNPVNFFNLLKNNNINIVKRIFYADHYIYNEEDIEKIKKISVKENLKIITTEKD

SEQ ID NO: 90899 - protein, 60 aa, Unknown
  Bacterial polypetide isolated from the Sargasso Sea
MQQEPLLQENKDRFVIFPIEHHDIWEWYKKCEASFWTAEEIDLHQDLNDWSSKLNGRREI

SEQ ID NO: 90900 - protein, 740 aa, Unknown
  Bacterial polypetide isolated from the Sargasso Sea
RGVQAELLDDKLLQFVLKRLGAALDNNRDLQFGYLGLQTLYDRYFLHHDGVRIEMPQAFFMRVAMGLSLNEIDREARAIEFYNVLSSFDFMSSTPTLFNSGTRRSQLSSCYLTTVDDDLDGIYEALKENALLSKFAGGLGNDWTRVRALGSHIKGTNGKSQGVVPFLKVVNDTAVAVNQGGKRKGAVCAYLETWHLDIEEFLELRKNTGDDRRRTHDMNTANWIPDLFMKRVHEGGDWTLFSPSTCPDLHDKFGAEFEAAYTAYEDKVARGEIKLFKKLPAAQLWRKMLGMLFETGHPWITFKDPCNVRSPQQHVGVVHSSNLCTEITLNTSDSEIAVCNLGSVNLVAHLKEQADGTLALDHDKLKRTVSVAMRMLDNVIDINYYAVAKARNSNLKHRPVGMGIMGFQDCLHLLRTPYASQEAVEFADTSMEAVCYYAYYASTELAQERGRYSSYRGSLWDRGILPQDSVKLLAEARGGYVEVDSSESMDWTELRSRIATYGMRNSNCIAIAPTATISNIIGVSACIEPTFQNLYVKSNLSGEFTVVNDYLVRDLKARGLWDEVMVADLKYFDGTLSRIDRIPADLRAIYATAFEVDPKWLVEAASRRQKWIDQAQSLNIYMGGASGKKLDEIYKLAWVRGLKTTYYLRTMAATHVEKSTVAHGALNAVSSGGGEGSGGAGGVGGGAAGSFGANGGAASGGIQVAAAAPAVAVEAAPEADGPVCMMRPGDPGFDECEACQ

SEQ ID NO: 90901 - protein, 492 aa, Unknown
  Bacterial polypetide isolated from the Sargasso Sea
RRRTHDMNTSNWIPDLFMKRVETDDDWTLFSPEEVGDLHDSFGKKFEDLYTNYERMIDTGEIKKFKKIPAKELWRKMLTRLFETGHPWITFKDPCNVRSPQDHVGVVHSSNLCTEITLNTSAEETAVCNLGSVNLSKHVTEDGKLDKGLLEKTINIAMRMLDNVVDLNFYPTVEAKNSNMKHRPIGLGIMGLQDALFKLDLPFDSQKALNFSDQLMEQISYHAISASSDLAKERGAYESFKGSKWDRGIFPLDSLSLLEEERGQNIDVNKITSLDWEGLKSKVKENGMRNSNTMAIAPTATISNIAGCYPCIEPIYKNIYVKANMSGEFTVVNNYLINDLKALNLWSKDMLDKIKYFDGNLDHIEELPEDIKNKYKEAFSIDPVVLLKHTSVRGKWIDQSQSHNVFMQGVSGKKLSEIYTAAWKFGLKTTYYLRTLAASQIEKSTLDANKFGYTQKREYKKVEEGAAVEEQQSVTNEATNSEAPGSEVASAC

SEQ ID NO: 90902 - protein, 169 aa, Unknown
  Bacterial polypetide isolated from the Sargasso Sea
FFAGSFCAIYYFRKRGLLPGLALSNDWIARDEGMHFSFSALMFKTLRDKFNNGTLSDSDIKNLNLITSNVAQSEFEEIVREAVSFEKEFVTSALPVDLIGMNKELMCEYIEAVADRIADLFEFERVFNTENPFDFMRALDVQNVTNFFEKRVSEYQRPTDRALGFDDNF

SEQ ID NO: 90903 - protein, 245 aa, Unknown
  Bacterial polypetide isolated from the Sargasso Sea
TNGKSQGVVPFLKVANDTAVAVNQGGKRKGAMCSYLETWHMDIEEFLELRKNTGDDRRRTHDMNTANWVPDLFMKRVQNDEDWSLFSPGETPDLHDLIGKEFEERYAEYEEMGEKGELRQFKKIKAKELWRKMLTMLFETGHPWITFKDSCNLRSPQQHEGVVHSSNLCTEITLNTKASEEIAVCNLGSVNLKQHMKDGKLDEEKVKQTVTTAIRMLDNVININYYSVETSEKSNMKHRPIGLGL

SEQ ID NO: 90904 - protein, 205 aa, Unknown
  Bacterial polypetide isolated from the Sargasso Sea
MDDQYIGSYSTFKNSPASKGILQFDMWGVTPSLYDWDVLKKKITTTGLRNSLLLAPMPTASTSQILGNNECFEPFTSNIYTRRTLAGEFIVVNKHLMNDLLMIDMWSEEMKNAIIEHKGSVQNIENIPKYIKEKYKISWEISMKNVIDMARDRGAFICQSQSMNLWMEDPNYKTLTSMHFYAWKQGLKTGIYYLRRKPKHQAQQF

SEQ ID NO: 90905 - protein, 294 aa, Unknown
  Bacterial polypetide isolated from the Sargasso Sea
MTVTKRNGEKEPISLDKITNRVSVLSTGLNIDPIVVVQKAVPGLYNEITSTEIDTYLAETAASLTVEHPDYSYLAARIKANSLHKDTPGFIISTKNLFDDGLLREEYYNKVIASAEDIEAIIDYDRDYNFDYFAFTTLTRAYLLKFENKTIERPQDLWMRVALTVTGDTFNFEKVKQTYDSLSNGYYTHATPTLFNSGLKMQQLSSCFLIGMEDDSIEGIFNTIKDCALISKTAGGIGMHAHNIRGSGSRIKSTNGKSNGLIPFLKIFNETAKSVDQGGGKRKGSFAVYLEPWH

SEQ ID NO: 90906 - protein, 261 aa, Unknown
  Bacterial polypetide isolated from the Sargasso Sea
NENLASRFYKEILIPEARCFISMQMLNESIHAEMYGLQIEAYVKDSKEKEMLFDAIQNVPCINHKAQWVSKWLNGNQNLLTRLIGFGLVEGLFFAGSFCAIYYFRKRGLLPGLALSNDWIARDEGMHFSFSSLMFRTLRDKFNNKTLTDSDINDLSLIPSDVPQSQFEEIVREAVAFEKEFVKDALPVDLIGMNADLMCKYIEAVADRIADLFEFDRVFNTENPFDFMRALDVQNVTNFFEKRVSEYQRPTDRALSFDEAF

SEQ ID NO: 90907 - protein, 123 aa, Unknown
  Bacterial polypetide isolated from the Sargasso Sea
FACLLHSQLERPTSESKIHRIIAEAVTIEKEFITDALPVSLIGMNADLMSQYLEFVADRLLVALNCTRLYDATNPFPWMEMISMQGKTNFFEKRVGEYQKSGVLNSGEVAASLQTRFSMEEDF

SEQ ID NO: 90908 - protein, 221 aa, Unknown
  Bacterial polypetide isolated from the Sargasso Sea
MNSNMTVTKRCGARETIDLDKIHRVITWAAKGLKNVSVSEVELRTHLQFFDGIPTEAIHETIIKSAADLISPESPDYQFLAARLAVFHLRKKAFGQFEPPKLYDHVTKLVELGKYDMHILQDYTREELDIMDSYIDHWRDMNFSYAAVKQLEGKYLVQNRVTHEIYESAQFLYILVAACLFARYPKETRLQYVKDFYDAVSTFKISLPTPIMAGVRTPTRQ

SEQ ID NO: 90909 - protein, 157 aa, Unknown
  Bacterial polypetide isolated from the Sargasso Sea
RKRGLLPGLALSNDWIARDEGMHFSFSALMFKTLRDKFSNGSLTDSDISDLSLIPSEVPQSQFEEIVREAVSFEKEFVKDALPVDLIGMNANLMCDYIEAVADRIADLFEFERVFNTENPFDFMRALDVQNVTNFFEKRVSEYQRPTDRALSFDEAF

SEQ ID NO: 90910 - protein, 228 aa, Unknown
  Bacterial polypetide isolated from the Sargasso Sea
NQKNIGVIKSSNLCAEIVEFSGNNETAVCNLASIALPKFVNKKEKKYDYKKLYETAKLAIRNLDQVIDINFYPTNKTDNSNKLHRPVGLGVQGLADVFFMLKTPYDSEKAIDINKQIFETIYFGALESSMELAKEKGTYSTYEGSPLSEGRFQFDLWNVKPSTNWDWEGLREKIKKYGVRNSLTTACMPTASTGIILSNTETFQIQTSNIYQRQTLSGEILLVNRHFG

SEQ ID NO: 90911 - protein, 59 aa, Unknown
  Bacterial polypetide isolated from the Sargasso Sea
HVDQGLSLTLFFPDTATTRDINKAQIYAWKKGIKTLYYIRLRQLALEGTEIEGCVSCAL

SEQ ID NO: 90912 - protein, 284 aa, Unknown
  Bacterial polypetide isolated from the Sargasso Sea
MSYTTFSRTNNDQMKEPMFFGNPVNVSRYDQQKYGIFEKLIEKQLSFFWRPEEVDVSKDRIDFQQLPEHEKHIFLSNLKYQTLLDSVQGRSPNVALLPIVSLPELETWIETWAFSETIHSRSYTHIVRNITNEPHKVFDDILLNERIVERADDVTRYYDDLITSVSLYHLCGVGTHEVNGKTHTISMHDLKRKLYICILSVNVLEAIRFYVSFACSFAFAERELMEGNAKIIKLIARDEALHLTGTQHMLNIMAAGEDDPEMAIIAKECEDEAYAIFRKAAEQE

SEQ ID NO: 90913 - protein, 101 aa, Unknown
  Bacterial polypetide isolated from the Sargasso Sea
DVPQSQFEEIVREAVAFEKEFVKDALPVDLIGMNADLMCQYIEAVADRIADLFEFDRVFKTENPFDFMRALDVQNVTNFFEKRVSEYQRPTDRALSFDEAF

SEQ ID NO: 90914 - protein, 222 aa, Unknown
  Bacterial polypetide isolated from the Sargasso Sea
MAFKIEAYVKDTKEKDMLFDAIQNVPCINHKAQWVSKWLNGSQNLLTRLIGFGLVEGLFFAGSFCAIYYFRKRGLLPGLALSNDWIARDEGMHFSFSSLMFRTLRDKFNNKTLTDSDINDLSLIPSDVPQSQFEEIVREAVAFEKEFVKDALPVDLIGMNAELMCKYIEAVADRIADLFEFERVFNTENPFDFMRALDVQNVTNFFEKRVSEYQRPTDRALS

SEQ ID NO: 90915 - protein, 245 aa, Unknown
  Bacterial polypetide isolated from the Sargasso Sea
ARCFISMQMLNESIHAEMYALQIEAYVKDPKEKDMLFDAISNVPCINHKAQWVSKWLNGNQNLLTRLIGFGLVEGLFFAGSFCSIYYFRKRGLLPGLSLSNDWIARDEGMHFSFSALMFKTLRDKFNNKTLTDEDIVDVSLIPNDVPQTEFEEIVREAVSFEKEFVKDALPVDLIGMNKELMCQYIEAVADRIADLFEFERVFNTENPFDFMRALDVQNVTNFFEKRVSEYQRPTDRALSFDEAF

SEQ ID NO: 90916 - protein, 129 aa, Unknown
  Bacterial polypetide isolated from the Sargasso Sea
SPRQTLERSYLLKVNGTIAERPQHMLMRVSIGIHKDDIASAVETYNYISQKYFTHARCAPVAVCACFVRDARTHGMSHVCQRCMGRSACGVAAAGQRLTVSELMCSPTLFNAGTPHPPDVVVLPCTPEG

SEQ ID NO: 90917 - protein, 131 aa, Unknown
  Bacterial polypetide isolated from the Sargasso Sea
FSNELISRDEALHTEFAVLMYSKLNKKIRKDKLYEIVKEAVEIEKEFITAALPCRLIGMNDILMSQYIEFVADRLVIQLGYEPIYNSSNPFEFMEMISIEGKTNFFEKRVGEYALATKDKEENIFELDGVF

SEQ ID NO: 90918 - protein, 224 aa, Unknown
  Bacterial polypetide isolated from the Sargasso Sea
FRGSPASEGILQYDMWDVKPSDRWDWESLKTKIKDTGLRNSLVLAPMPTASTAQILSNNECFEPYTSNMYSRRVLSGEFVVLNEHMVRELIDRNLWTDDIRNHIMLDKGSIQAIDIIPEDVRELYKTAWEMKMRDIIDMAADRGAFIDQSQSLNMFVEKPSFSKLYSIIMYGWKKGLKTGVYYLRTRSAADPIQFTVKKIKAKKESPVKPAEQNTDDECVMCSA

SEQ ID NO: 90919 - protein, 219 aa, Unknown
  Bacterial polypetide isolated from the Sargasso Sea
VKDQKEKDLLFDAIQNVPCINHKAQWVSKWLNGNQNLLTRLIGFGLVEGLFFAGSFCAIYYFRKRGLLPGLALSNDWIARDEGMHFSFSALMFKTLRDKFNNNKLTDADVADLSLIPNNVPQSQFEEIVREAVSFEKEFVRDALPVDLIGMNQDLMCQYIEAVADRIADLFEFERVFNTENPFDFMRALDVQNVTNFFEKRVSEYQRPTDRALSFDDAF

SEQ ID NO: 90920 - protein, 251 aa, Unknown
  Bacterial polypetide isolated from the Sargasso Sea
FLSNLRYQTLLDSVQGRSPNATLLPLISIPELETWVETWSFSETIHSRSYTHIIRGMVDDPSIVFDGIVTDEEIISRAISISTEYDKLYEMTCARQHLGEDEFERLYVSEFDGKPYPLQRQLFRTLVSINALEAIRFYVSFACTFAFGERKLLEGNTKIMRFIARDEALHCEGTERMLRFMRTGREGLLWAQIAADEEPFIYQTMMDVAEQEMRWADYLFKDGSMIGLNADILKSYVKYRTNLAMRRLGLK

SEQ ID NO: 90921 - protein, 297 aa, Unknown
  Bacterial polypetide isolated from the Sargasso Sea
GLFEFYKLLSSFDYMSSTPTLFNSGTKRPQLSSCYLTTVPDDLSGIYGAIRDNALLSKWAGGLGNDWTNVRALGSKIKGTNGKSQGIVPFLKVSNDTAVAVNQGGKRKGAFCAYLECWHLDVEEFLDLRKNTGDDRRRTHDMNTANWIPDLFMKRLEKGEKWTLFSPSDVPELHDIYGKEFETKYTEYERKAEAGEIKHFKTVEAKDLWRKILSMLFETGHPWVTFKDPCNIRSPQGHVGTVHSSNLCTEITLNTNEDEIAVCNLGSINLPQHIDEGKINIEQLKSSVTTAIRMLDN

SEQ ID NO: 90922 - protein, 298 aa, Unknown
  Bacterial polypetide isolated from the Sargasso Sea
FSMYDNITTQEIDILSAEICIGMITSDPDYEILATRIVASNIHKICPNNFHLAMRKLQKAGVITDEVVEVAQQVKDHIKTDRDFDFGYFGLKTLEKSYLQRVNGKLIETPQYMFMRVAIGIHGKDVPAVLETYDKMSQGYFIHATPTLFNAGTPRPQMSSCFLIANKEDSINGIYGTLTECAQISKWAGGIGMHIHDIRANKSHIRGTNGNSDGIIPMLRVFNATARYVNQAGRRKGSIAVYLEPWHADIMDFLELRLNQGDEEARCRDLFSAMWIPDLFMKRVEEGGNWSLFCPDKA

SEQ ID NO: 90923 - protein, 252 aa, Unknown
  Bacterial polypetide isolated from the Sargasso Sea
IGLGIQGLADVYFKLGIGYETEEAKSINKLIFETIYFGALEASCELAKEKGAYETYNNSPISEGKFQFDLWNVNPSSKWDWETLRAKIKKHGVRNSLTTACMPTASTGIILGNTETFQIQTSNIYKRQTLSGEFLLVNRYLVNELSQRNLWNKEMRDKIILENGSVENINEIPNELKEVYKTVWEVSQKTVIDMAADRAPFIDQTQSMNLWLSTPTFGKVNSMHMYAWKKGLKTGMYYLRSRSAVDAVKVTV

SEQ ID NO: 90924 - protein, 227 aa, Unknown
  Bacterial polypetide isolated from the Sargasso Sea
YGLQIEAYVKDTKEKDMLFDAIQNVPCINHKAQWVSKWLNGNQNLLTRLIGFGLVEGLFFAGSFCAIYYFRKRGLLPGLALSNDWIARDEGMHFSFSSLMFRTLRDKFNNKTLTDADISDLSLIPSDVPQSQFEEIVREAVAFEKEFVQDALPVDLIGMNADLMCQYIEAVADRIADLFEFDRVFKTENPFDFMRALDVQNVTNFFEKRVSEYQRPTDRALSFDEAF

SEQ ID NO: 90925 - protein, 199 aa, Unknown
  Bacterial polypetide isolated from the Sargasso Sea
MRNSLLLAPMPTASTSQILGNNECFEAFTSNLYVRRTLSGEFIVLNKHLVNDLISRGLWSTEMKTEIIRHKGSVQAIEGIPMDLKEIYRTTWEISQKHILDMAADRGAYIDQSQSLNIHMTDANPAKVSSMHFYGWKKGLKTGMYYLRTKAAADAIQFTVEQKAKDETVESLAARAEELKREAIACSIENGDDCEACGS

SEQ ID NO: 90926 - protein, 218 aa, Unknown
  Bacterial polypetide isolated from the Sargasso Sea
KDIKEKDDLFDAIKNVPCINHKAQWVSKWLNGNHNLLVRLIGFGLVEGLFFAGSFCAIYYFRKRGLLPGLALSNDWIARDEGMHFSFSALMYKTLRDKYNNGTLNDTDIADINLIPKDVHQSEFEEIVREAVAFEKEFVKDSLPVDLIGMNADLMCEYIEAVADRIADLFEFDRVFNTENPFDFMRALDVQNVTNFFEKRVSEYQRPTDRALSFDDTF

SEQ ID NO: 90927 - protein, 75 aa, Unknown
  Bacterial polypetide isolated from the Sargasso Sea
PVDLIGMNADLMCQYIEAVADRIADLFEFDRVFKTENPFDFMRALDVQNVTNFFEKRVSEYQRPTDRALSFDEAF

SEQ ID NO: 90928 - protein, 65 aa, Unknown
  Bacterial polypetide isolated from the Sargasso Sea
LMCQYIEAVADRIADLFEFDRVFKTENPFDFMRALDVQNVTNFFEKRVSEYQRPTDRALSFDEAF

SEQ ID NO: 90929 - protein, 116 aa, Unknown
  Bacterial polypetide isolated from the Sargasso Sea
FCVSDVWQLDNKLDYNRTAEIVGEAVAVEKNFICDALPCELIGMNKNLMSQYIEFVADRLLTALDFPKLYGSRNPFDWMELISMQGKTNFFEKRVGEYQKANVLSGTSAFALDSDF

SEQ ID NO: 90930 - protein, 270 aa, Unknown
  Bacterial polypetide isolated from the Sargasso Sea
SAINWNKIEDDKDLEVWNRLTSNFWLPEKVPLSNDIPAWQKLNAAEQQLTIRVFTGLTLLDTIQNVAGAPALMTDSLTPHEEAVLSNISFMEAVHARSYSSIFSTLCQTKDVDAAYTWSEENTPLQRKAQIVLAHYASDEPLKKKIASVFLESFLFYSGFWLPMYFSSRGKLTNTADLIRLIIRDEAVHGYYIGYKYQKGLEHISESSREELKHFAFDLLMELYDNEARYTEELYAQTGWVDDVKAFPLYNAHKALMNLGYEALFPPEMA

SEQ ID NO: 90931 - protein, 122 aa, Unknown
  Bacterial polypetide isolated from the Sargasso Sea
RQYNNGTLNDSDIIDKNLIPKDIAQSEFEEIVREAVAFEKEFVKEALPVDLIGMNSDLMCQYIEAVADRIADLFEFQRVFNTENPFDFMRALDVQNVTNFFEKRVSEYQRPTDRALSFDDAF

SEQ ID NO: 90932 - protein, 290 aa, Unknown
  Bacterial polypetide isolated from the Sargasso Sea
CPGLSDVYGDDFEKLYTKYEAEKKNLEKIKARDLMSKIIEAQIETGQPYMLYKDSINNKSNQKNIGVIKSSNLCAEIVEYSDKNETSVCNLASIALPKFVKKSDKKIYYDYDALYETAKLATKNLDEVIDINFYPTDKTERSNNKHRPIGLGIQGLADVYFKLGIGYESEAAKEINKLIFETIYFGALEASCELAKEKGAYETFKNSPISNGKFQFDLWNVNPSSKWDWDSLRSKIKKHGVRNSLTTACMPTASTGIILGNTETFQIQTSNIYKRQTLSGEFLLVNRFLV

SEQ ID NO: 90933 - protein, 244 aa, Unknown
  Bacterial polypetide isolated from the Sargasso Sea
MKVQKRNGSLENVSFDKIQTRLLTLCQEPKLKLLNIDTTIVAQKVCSEIYDGVTTEELDILSSEISISLYSKNVDYKHLASRIVVSNHHKNTSGTFGNIIDRLHNYKKNGKGEPLINDDFYNLVQSNLELIESKIDYICDYNFDYFGYKTLERSYLLKIDGKIVERPQDMLMRVSLSIHRKDLDKAFETYEHMSKGDFIHATPTLFNAGTNKEQFSSCFLLAMQDDSVQGIFDTLTDLLKFQNM

SEQ ID NO: 90934 - protein, 298 aa, Unknown
  Bacterial polypetide isolated from the Sargasso Sea
MRNKEERAIEFYNLFSNMLYTPSTPTLFNSGTTHSQLSSCYLNTFDDSIDGIFEGVWQEARKSKYAGGLGFDVTNFRASGAFIKGTNGISGGLVPWLKILNDTLVAVNQGGKRPGAGCAYLEPWHLDFEDFLNLRRNTGDDRLRCHDMNTASWVPDLFMQKVKSNEDWYMFCPSDCRDLHETFGAEFEKLYNEMCQKADAGELSNFRVVNAKDLWKKMLKVLFETSHPWITFKDPSNIRYSNQHLGVVHSSNLCTEILLHTKPSTYENGTKTEIGETAVCNLGSVNLKNHLRVPSEAK

SEQ ID NO: 90935 - protein, 221 aa, Unknown
  Bacterial polypetide isolated from the Sargasso Sea
MGSYSSFAGSMTSKGVLQFDKWGVTPTTRYNWKKLKTSIIKHGLRNSLLIAPMPTASTSQILGNNECIEPFTSNLYSRRTLAGEFIISNKHLIRDLIDLDLWNKDVKNKLIKNRGSIQHIESIPDHIKKKYKTVWEISMKSVIDMAKDRGAYICQSQSMNLWMADPSYKALTAMHFYAWESGLKTGMYYLRRQPKHHVQQFTIEPTKSIRNTNEISNEDEE

SEQ ID NO: 90936 - protein, 287 aa, Unknown
  Bacterial polypetide isolated from the Sargasso Sea
RIIISNNHKNTISSFSETMEKLYNFKDIHNNNIPIIDSKIWNIIENNKDFFDSIVDYSRDYEIDYFGFKTLERAYLMRVNKVVVERPQHMWLRVAIGIHFNDLDSVKETYDLMSQKYFTHATPTLYNAGTPRPQLSSCYLLSMENDSIDGIYNTLKDCASISKWAGGIGLHIHNVRATGSHIRGTNGTSNGIVPMLQVFNKTARYVDQGGGKRNGSFAIYLEPWHGDIEDFLDLKKNHGDEELRARDLFYAMWIPSLFMERVEKDKEWSLFCPDKCPGLADCYRSNF

SEQ ID NO: 90937 - protein, 284 aa, Unknown
  Bacterial polypetide isolated from the Sargasso Sea
MRVAMGLAVEEDQKEERAIEFYRLLSSFDYMSSTPTLFNSGTLRPQLSSCYLTTIPDDLDGIFGAMKDNALLSKWAGGLGNDWSPVRALGSYIKGTNGKSQGVVPFLKVANDTAVAVNQGGKRKGAMCAYLETWHLDIEEFLDLRKNTGDDRRRTHDMNTANWVPDLFMKRVELDKNWTLFSPGEAPDLHDLTGLAFEKRYEEYEALAAEGKMDQHKTIPAKDLWRKMLTMLFETGHPWITFKDSCNLRSPQQHIGVIHSSNLCTEITLNTSNDEIAVCNLGSV

SEQ ID NO: 90938 - protein, 223 aa, Unknown
  Bacterial polypetide isolated from the Sargasso Sea
YDRYLIHHDSKRIELPQVFFMRVAMGLAHCEGDARNERAIEFYQQFSSFDYMSSTPTLFNAGTLRPQLSSCFLTTIPDDLDGIYGAVKDNALLSKYAGGIGNDWTPVRSLGAHIKGTNGKSLGVVPFMNVADATAVAVNQSGKRKGAVCGYLETWHMDIEEFLELRKNTGDDRRRTHDMNTANWIPDLFMQRVFETADWTLFSPNETPDLHDLYGDAFAKRYI

SEQ ID NO: 90939 - protein, 187 aa, Unknown
  Bacterial polypetide isolated from the Sargasso Sea
GSQNLLTRLIGFGLVEGLFFAGSFCAIYYFRKRGLLPGLALSNDWIARDEGMHFSFSSLMFRTLRDKFNNKTLTDADISDLSLIPSDVPQSQFEEIVREAVAFEKEFVKDALPVDLIGMNADLMCQYIEAVADRIADLFEFDRVFKTENPFDFMRALDVQNVTNFFEKRVSEYQRPTDRALSFDEAF

SEQ ID NO: 90940 - protein, 315 aa, Unknown
  Bacterial polypetide isolated from the Sargasso Sea
LDYGVQLNKLMYERMIKNGNITLFSPSDVPGLYDAFFEDQELFEQLYTKYEADDSIRKKTIKAVDLFSMMMQERASTGRIYIQNVDHCNTHSPFNPKKAPVRQSNLCLEIALPTKPLNDINDESGEIALCTLAAFNLGKIDDLNELEDLSDLIVRALDSLLSYQDYPVPAAQRASLARRTLGVGVINFAYFLAKNGVKYSDGSANGLTHRAFEAIQYWLLRASNQLAKEQGACEAFSDTTYAQGILPIDSYKKDVDKFCEEPLQYDWETLRKDIVDTGLRNSTLTALMPSETSSQISNATNGIEPPRGYISVSRA

SEQ ID NO: 90941 - protein, 264 aa, Unknown
  Bacterial polypetide isolated from the Sargasso Sea
AVNQGGKRKGAMCGYLETWHLDIEEFLELRKNTGDERRRTHDMNTANWVPDLFMKRVEQDKNWTLFSPGETADLHDLIGKAFEKKYEEYEEKAKKGEMDQFKSIPAKELWRKMLTMLFETGHPWITFKDSCNLRSPQQHTGVIHSSNLCTEITLNTSADNEIAVCNLGSVNLANHMENGKLNKEKVKQTVSTAIRMLDNVININYYSVDTAKNSNFKHRPIGLGLMGFQDALYLQDIPYCSDEAIDFADKSMELISYNAIYAST

SEQ ID NO: 90942 - protein, 112 aa, Unknown
  Bacterial polypetide isolated from the Sargasso Sea
MIFADINLIPKDVQQSEFEEIVREAVAFEKEFVKDSLPVDLIGMNADLMCEYIEAVADRIADLFEFDRVFNTENPFDFMRALDVQNVTNFFEKRVSEYQRPTDRALSFDDAF

SEQ ID NO: 90943 - protein, 173 aa, Unknown
  Bacterial polypetide isolated from the Sargasso Sea
YDDLIEATALYNLHGEGTHRVAGRDVTITLRELKKKLYLCLMSVNALEAIRFYVSFACSFAFAERELMEGNAKIIKMIARDEALHLTGTQHMLNLMRSGQDDPEMAEIAAECEQACFELFKEAAIQEKEWAEYLFQDGSMIGLNKDILCQYVEYITNLRMNAVGLQPAFAGAK

SEQ ID NO: 90944 - protein, 283 aa, Unknown
  Bacterial polypetide isolated from the Sargasso Sea
IKARELWSAILTSQIEVGTPYLLYKDACNRKSNQQNLGTIKSSNLCTEIVEYTSPEETAVCNLASISLKKFIKKKDCSGLVFRLFSKPNCVYCELAKGLLNKMNIQYEVKNYKELTNVSGEYPLGVKFPQIYRIDNHKTDIIGGYTELYEYLKPGYDFVSLQKITERLTKNLNNIIDYNYYPTKETKISNLRHRPIGIGVQGLANVFFEFGYAFDSDEAKELNERIFECIYYGSLKASMELSRARENDMKIYKSYKNQFADGSDFGGDNFISSDKFNTVKNSL

SEQ ID NO: 90945 - protein, 160 aa, Unknown
  Bacterial polypetide isolated from the Sargasso Sea
MNQNLSVSKRDGRKEPLDLDKIHRVIAWAAEGLNNVSVSQVELKSHIQFYDGIRTEDIHETIIKAAADLISKDTPDYQYLAARLAVFHLRKKAYGQFEPPKLYDHMVKMVESHKYDAHLLADYTKEEIDELDAYIDHARDMTFSYAAVKQLEGKYLVQNP

SEQ ID NO: 90946 - protein, 249 aa, Unknown
  Bacterial polypetide isolated from the Sargasso Sea
YLLRHPHTRKVIETPQQFFLRIASALSEDVPEALALYRRMGNLDYLPSSPTLFNSGTTHEQLSSCFLLDSPQDSLESIYSKYGDIAQLSKFSGGIGVSYTRVRSRGSLIKSTNGHSNGIVPWLKTMDSSVAAVNQGGKRKGAACVYLETWHADIEDFLELRDNTGDESRRAHNLNLANWIPDLFMKRVEADQEWSLFDPRVVPEFTDLFGEAFEQAYLQAEAQGKANRTISARKLYSRMMRTLAETGNG

SEQ ID NO: 90947 - protein, 238 aa, Unknown
  Bacterial polypetide isolated from the Sargasso Sea
IPDLFMKRVEKDLDWTLMSEHECPGLSDKYGDDFKSLYEKYEKEMPHLEKIKARDLMSKIIEAQIETGQPYMLYKDSINKKSNQKNIGVIKSSNLCAEIVEYSDKSETSVCNLASIALPKFVKKSKNKKIKEYDYKALYKTAKLATKNLDEVIDINFYPTEKTETSNNKHRPIGLGIQGLADVYFELDIPYDSEEAKVINKLIFETIYFGALEASHELAKEKGAYSTFKGSPLSEGKF

SEQ ID NO: 90948 - protein, 294 aa, Unknown
  Bacterial polypetide isolated from the Sargasso Sea
KDNALLSKWAGGLGNDWTPVRAMNSYIKGTNGKSQGVVPFLKVANDTAVAVNQGGKRKGAMCGYLETWHLDIEEFLELRKNTGDERRRTHDMNTANWVPDLFMKRVEKDENWTLFSPGETPDLHDLIGKAFEEKYEEYEEKAKNGEMDQFKSVPAKELWRKMLTMLFETGHPWITFKDSCNLRSPQQHSGVVHSSNLCTEITLNTSADNEIAVCNLGSVNLANHMKNGKLDEEKVKKTVSTAIRMLDNVININYYSVNTAKNSNLKHRPIGLGLMGFQDALYLQNIPYCSDEAV

SEQ ID NO: 90949 - protein, 195 aa, Unknown
  Bacterial polypetide isolated from the Sargasso Sea
FYPIWHLEVESLLVLKNNRGVEDNRIRHLDYGVQLNKLMYQRLIKGENISLFSPSDVPGLYDAFFEDQDEFERLYLQYEQDSSIRKKTLKAVELFSLMMQERASTGRIYIQNVDHCNTHSPFDSKVAPIRQSNLCLEIALPTKPLNNIDDPNGEIALCTLSPLNLGAIKNLAELEPLADLAVRALDNLLDYQDYP

SEQ ID NO: 90950 - protein, 309 aa, Unknown
  Bacterial polypetide isolated from the Sargasso Sea
RIDDLTAELCTSEMTSETEYGDLASRIVISNNHKNTSDSFMDVIEKMYRHVDEKNIKNSRISDKVYNFIKKHSELIIKKINYDLDFNFDYFGFKTLEKAYLVKLNGHIIERIQHMLMRVSIGIHHDDIEAALNTYDMMSNKYFIHATPTLFHAGSNHPQLLSCFLLGVDDSIQGIYKTLYDCAQISKWAGGIGTHITNIRAKDSIIRGTNGITSGIIPMLKVYNETARYVNQSGKRNGSFAIYLEPWHADILSFLNLRKNHGDENQRARDLFYAMWIPDLFMKRLEKKGKWSLFCPDECKDLCNLYGDK

SEQ ID NO: 90951 - protein, 85 aa, Unknown
  Bacterial polypetide isolated from the Sargasso Sea
MQQEPLLQENKDRFVIFPIEHHDIWEWYKKCEASFWTAEEIDLHQDLNDWSTKLNDDERYFIKHILAFFAASDGIVNENLAENFV

SEQ ID NO: 90952 - protein, 292 aa, Unknown
  Bacterial polypetide isolated from the Sargasso Sea
SLGSYIKGTNGKSQGVVPFLKVANDTAVAVNQGGKRKGAMCSYLETWHMDIEEFLELRKNTGDDRRRTHDMNTANWVPDLFMKRVQNDEEWSLFSPGETPDLHDLIGKEFEERYAEYEEMGEKGKLRQFKKIKAKELWRKMLTMLFETGHPWITFKDSCNLRSPQQHEGVVHSSNLCTEITLNTKASEEIAVCNLGSVNLKQHMKDGKLDEDKVKQTVTTAIRMLDNVININYYSVETSENSNMKHRPIGLGLMGFQDTLYMQNISYNSQEAVDFADRSMELISYYAINASS

SEQ ID NO: 90953 - protein, 281 aa, Unknown
  Bacterial polypetide isolated from the Sargasso Sea
VRGGAATLFYPLWHLEVESLLVLKNNRGVEENRVRHLDYGVQFNRLMYTRLIKDDYITLFSPSDVPGLYDAFFEDQEKFEQLYVKYENDSSIRKKRLKALELFTLFMQERASTGRIYLQNVDHCNTHSPFNPKFAPVRQSNLCLEIALPTKPLNDVNDPEGEIALCTLSAFNLGAIENLAELEELAELAVRSLDSLLDYQDYPIPAAFHASINRRTLGVGVINYAYYLAKNGVKYSDGSANALTHRTFEAMQYYLLKASNKLAQEFGACPKFNETTYAEGI

SEQ ID NO: 90954 - protein, 162 aa, Unknown
  Bacterial polypetide isolated from the Sargasso Sea
AIYYFRKRGLLPGLALSNDWIARDEGMHFSFSALMYKTLRDKYNNGTLNDSDIYNTDLIPKDIQQSEFEEIVREAVSFEKEFVKDALPVSLIGMNADLMCQYIEAVADRIADLFEFERVFNTENPFDFMRALDVQNVTNFFEKRVSEYQRPTDRALSFDDAF

SEQ ID NO: 90955 - protein, 101 aa, Unknown
  Bacterial polypetide isolated from the Sargasso Sea
MTKELLLSEEENRYVIFPIKQEPIWNMYKKAMSSFWTPEEIDLSKDMDDFTKLKDEEQHFIKNVLAFFAASDGIVNENLVERFCNEVKILEAKFFYGFQNS

SEQ ID NO: 90956 - protein, 52 aa, Unknown
  Bacterial polypetide isolated from the Sargasso Sea
QTYLNLKGVFNTENPFDFMRALDVQNVTNFFEKRVSEYQRPTDRALSFDDAF

SEQ ID NO: 90957 - protein, 295 aa, Unknown
  Bacterial polypetide isolated from the Sargasso Sea
ADIEKFLELRKNTGAEEFRARDLFYALWIPDLFMQRVKDDDDWTLMSEHECPGLSDCYGDEFEKLYIKYEKEKTHLEKIKARSLMSKIIEAQIETGQPYMLYKDSINKKSNQKNIGVIKSSNLCAEIVEYSDKNETAVCNLASIALPKFIDKKNLKYDYKRLYETAKLATKNLDQVIDINFYPTNKTDKSNNLHRPIGLGVQGLSDVFFKLSIPHDGEKASRINKLIFESIYFGALEASMELAKEKGVYSTFKGSPLSEGKFQFDLWKVKPSNMWDWDSLREKIKKYGVRNSLTT

SEQ ID NO: 90958 - protein, 317 aa, Unknown
  Bacterial polypetide isolated from the Sargasso Sea
RASTGRIYLQNVDHCNTHSPFISTVAPIRQSNLCLEIALPTKPLSNVMDEEGEIALCTLSAFNLGAIESLDELEELAELAVRALDNLLDFQDYPVPAAKNATMGRRTLGIGVINYAYYLAKNGKRYSDGSANALTHKTFEAIQYYLMKASNELAKERGACPKFNETTYSQGIMPTDTYKRDLDQFCEEPLHLDWDSLRESIKQHGMRNSTLSALMPSETSSQISNATNGIEPPRGHISVKASKDGILKQVVPDYENLKDNYELLWDIPSNDGYLQLVGIMQKFVDQTISANTNYDPSKYEGGKVPMKVLLKDLLTAY

SEQ ID NO: 90959 - protein, 137 aa, Unknown
  Bacterial polypetide isolated from the Sargasso Sea
MDSIQGRSPNVALLPLISIPELETWVETWAFSETIHSRSYTHIIRNIVNDPAVVFDDIVTNEQIQKRAEGISSYYDELIEMTSYWHLLGEGTHTVNGKTVVVNLRELKKKLYLCLMSVNALEAIRFYVSFACSFTFS

SEQ ID NO: 90960 - protein, 297 aa, Unknown
  Bacterial polypetide isolated from the Sargasso Sea
MVTKRDGTKEPVSLDKITNRVSVLSTGLSIDPIVVAQKAIPGLYNDITSTEIDNYLAETSAALTVEHPDYSNLAARIKSNALHKLTPGFVIATKNLFEDGLLHESYYNQVMENAEEIESVIDYDRDYSFDYFALTTLIRAYLLKYENQTIERPQDLWMRVALTVSGKEFNLSKVKETYDSLSKGLYTHATPTLFNSGLKMQQLSSCFLIGMEDDSIEGIFNTIKDCALISKTAGGIGMHAHNIRGSGSRIKSTNGKSNGLIPFLKIFNETAKSVDQGGGKRKGSFAIYLEPWHADIE

SEQ ID NO: 90961 - protein, 107 aa, Unknown
  Bacterial polypetide isolated from the Sargasso Sea
MDLIPGPVAQSEFEEIVREAVEFEKEFVTDALPVDLIGMNKEMMCMYIEAVSDRIADLFGFERVFNTENPFDFMRALDVQNVTNFFEKRVSEYQRPTDRSLSFDESF

SEQ ID NO: 90962 - protein, 266 aa, Unknown
  Bacterial polypetide isolated from the Sargasso Sea
DWSPVRALGSYIKGTNGKSQGVVPFLKVANDTAVAVNQGGKRKGAMCAYLETWHLDIEEFLDLRKNTGDDRRRTHDMNTANWVPDLFMKRVELDLNWTLFSPGETPDLHDLTGLEFEKRYEEYEALAAEGKMDQHKTIPAKDLWRKMLTMLFETGHPWITFKDSCNLRSPQQHIGVIHSSNLCTEITLNTSNDEIAVCNLGSVNLPQHMKDGVLDQEKIKQTVTTALRMLDNVIDINYYSVDTAKNSNLKHRPVGMGLMGFQMPSI

SEQ ID NO: 90963 - protein, 128 aa, Unknown
  Bacterial polypetide isolated from the Sargasso Sea
MFKTLRDKFNNNSLTDADVSDLSLIPNDVPQSQFEEIVIEAVSFEKEFVRDALPVDLIGMNQDLMCQYIEAVADRIADLFEFERVFNTENPFDFMRALDVQNVTNFFEKRVSEYQRPTDRALSFDDAF

SEQ ID NO: 90964 - protein, 200 aa, Unknown
  Bacterial polypetide isolated from the Sargasso Sea
INHKAQWVSKWLNGNQNLLMRLIGFGLVEGLFFAGSFCSIYYFRKRGLLPGLALSNDWIARDEGMHFSFSALMYKTLRDKYNNGTLDDTDIADKSLIPKDVAQSEFEEIVREAVSFEKEFVKEALPVDLIGMNSDLMCQYIEAVADRIADLFEFQRVFNTENPFDFMRALDVQNVTNFFEKRVSEYQRPTDRALSFDDAF

SEQ ID NO: 90965 - protein, 288 aa, Unknown
  Bacterial polypetide isolated from the Sargasso Sea
DLIAPVFFMRVAMGLASNEDNREQRAIEFYNLISSFDYMTSTPQLFNSGTLRPQLSSCFLTTVPDDLHGIYSAIRDNAMLSKWAGGLGNDWTPVRALGAHIKGTNGKSQGVVPFLKVVNDTAVAVNQGGKRKGAVCSYLETWHLDIEEFLELRKNTGDDRRRAHDMNTANWIPDLFMKRVFNDQEWTLFSPNNVPDLHEKHGKEFESAYLEYERLAIAGEIEVYKTVKASDLWRKMISMLFETGHPWITFKDSCNVRSPQQHTGTIHSSNLCTEITLNTNPEEIAVCN

SEQ ID NO: 90966 - protein, 329 aa, Unknown
  Bacterial polypetide isolated from the Sargasso Sea
MISKGVKSIFPIKNQEIWDRYKQHIQAFWTTEEVSLQDDLRDLETLNDGEKHFIKHVLAYFANSEAMINENLASRFYKEILIPEARCFISMQMLNESIHAEMYGLQIEAYVKDTKEKDMLFDAIQNVPCINHKAQWVSKWLNGDQNLLTRLIGFGLVEGLFFAGSFCAIYYFRKRGLLPGLALSNDWIARDEGMHFSFSSLMFRTLRDKFNNKTLTDADISDLSLIPSDVPQSQFEEIVREAVAFEKEFVRDALPVDLIGMNKDLMCQYIEAVADRIADLFEFDRVFKTENPFDFMRALDVQNVTNFFEKRVSEYQRPTDRALSFDEAF

SEQ ID NO: 90967 - protein, 182 aa, Unknown
  Bacterial polypetide isolated from the Sargasso Sea
MPTASTSQILGNNECFEPYTSNIYTRRVLSGEFIVVNKHLLKDLIKLKLWDENMKDRLMAANGSIQEIKEIPDDIKLLYRTVWEVSQKSIIDMAADRGAYICQSQSMNIHMQDANFGKLTSMHFHAWKKGLKTGLYYLRTKAAADAIKFTIVKDEKALDKDQEQAAMQCSIDNQDDCEMCGS

SEQ ID NO: 90968 - protein, 333 aa, Unknown
  Bacterial polypetide isolated from the Sargasso Sea
KSQGIVPFLKVSNDTAVAVNQGGKRKGAFCAYLECWHLDVEEFLDLRKNTGDDRRRTHDMNTANWIPDLFMKRLEKGEKWTLFSPSDVPDLHDIYGKEFETKYREYERKAEAGEIKHFKTVEAKDLWRKILSMLFETGHPWVTFKDPCNIRSPQGHVGTVHSSNLCTEITLNTNEDEIAVCNLGSINLPQHIDEGKINIEQLKSSVTTAIRMLDNVIDINYYPVPQAENSNKKHRPIGLGLMGFQDALYKLGISYDSEEAVDFADKSMELISYFAIEASCELAEERGTYETYKGSLWDNGIFPLDSINLLAEQRGSDFIDQNTEKTLDWDKLK

SEQ ID NO: 90969 - protein, 956 aa, Unknown
  Bacterial polypetide isolated from the Sargasso Sea
MEIQQQEENKKINQSISDIETTAPGKLRVIKRNGKVVPFEDDKIKVAITKAFLAVESGNAAASERIHTKVNELTNNVVEIFKRRMPSGGTLHIEEIQDQVELQLMRSEELDVAKSYILYRAERTQERKKETLDIDIPDVPNINVTKADGSLEPLNVEKVAGLINDACDGLEEVSVKEVLDEALKNLYDGVSISDMRTSLVMSARTKVEKEPNYSFVTARILMDQIRNEALNFLGISEESTYHEMEKHYPAAFKAYIDKGIELDILNPELKEFNLDKLADAIDYERDNQFTYLGLQTLYDRYFIHSNDVRYELPQVFFMRVSMGLALEEDNREERAIEFYKLLSSFDYMSSTPTLFNSGTKRPQLSSCYLTTIPDDLDGIFSAMKDNALLSKWAGGLGNDWTPVRAMNSYIKGTNGKSQGVVPFLKVANDTAVAVNQGGKRKGAMCGYLETWHLDIEEFLELRKNTGDERRRTHDMNTANWVPDLFMKRVEQDREWTLFSPGETPELHDLIGKEFEDKYEAYEEKAKKGEMGQYKTVPAKELWRKMLTMLFETGHPWITFKDSCNLRSPQQHAGVVHSSNLCTEITLNTSADKEIAVCNLGSVNLANHMTDGKLDEKKIKQTVSTAIRMLDNVININYYSVDTAKNSNMKHRPIGLGLMGFQDALYLQNIPYCSDEAVEFADKSMEMISYNAILASTELAKERGAYESFEGSLWSQGILPKDSLDILEKHRGKEYLQVDRSETLDWGSLRKKVMKDGMRNSNVMAIAPTATISNITGVTQSIEPTYQNLYVKSNLSGEFTIVNPHLVRKLKELDLWDDVMINDLKYFEGSLTEISRIPDDIKKLFSTAFEVEPRYIVESASRRQKWIDQAQSLNLYIGNADGKKLDITYRMAWYSGLKTTYYLRSIAATSTEKSTVQQGKLNAVSSDANQTSNQELGAPAPVPDACSLDDPDCEACQ

SEQ ID NO: 90970 - protein, 605 aa, Unknown
  Bacterial polypetide isolated from the Sargasso Sea
LYDGVSISDMRTSLVMSARTKVEKEPNYSFVTARILMDQIRNEALGFLGVSEESTYHEMEKHYPAAFKAYIDKGIELDILNPELKEFDLEKLADAIDYQRDNQFTYLGLQTLYDRYFIHSNDVRYELPQVFFMRVSMGLALEEENREERAIEFYKLLSSFDYMSSTPTLFNSGTKRPQLSSCYLTTIPDDLDGIFSAMKDNALLSKWAGGLGNDWTPVRAMNSYIKGTNGKSQGVVPFLKVANDTAVAVNQGGKRKGAMCGYLETWHLDIEEFLELRKNTGDERRRTHDMNTANWVPDLFMKRVEQDREWTLFSPGETPELHDLIGKEFEDKYEEYEEKAKKGEMGQYKSVPAKELWRKMLTMLFETGHPWITFKDSCNLRSPQQHAGVVHSSNLCTEITLNTSADKEIAVCNLGSVNLANHMTDGKLDEKKIKQTVSTAIRMLDNVININYYSVDTAKNSNMKHRPIGLGLMGFQDALYLQNIPYCSDEAVEFADRSMEMISYNAILASTELAKERGAYESFEGSLWSQGILPKDSLDILEKHRGKEYLQVDRSETLDWDSLRKKVMKDGMRNSNVMAIAPTATISNITGVTQSIEPTYQNLYV

SEQ ID NO: 90971 - protein, 323 aa, Unknown
  Bacterial polypetide isolated from the Sargasso Sea
MISKGVKSIFPIKNQEIWDRYKQHIQAFWTTEEVSLQDDLRDLETLNDGEKHFIKHVLAYFANSEAMINENLASRFYKEILIPEARCFISIQMLNESIHAEMYGLQIEAYVKDAKEKDMLFDAIQNVPCINHKAQWVSKWLNGSQNLLTRLIGFGLVEGLFFAGSFCAIYYFRKRGLLPGLALSNDWIARDEGMHFSFSSLMFRTLRDKFNNKTLTDADISDLSLIPSDVPQSQFEEIVREAVAFEKEFVKDALPVDLIGMNADLMCQYIEAVADRIADLFEFDRVFKTENPFDFMRALDVQNVTNFFEKRVSEYQRPTDRAL

SEQ ID NO: 90972 - protein, 453 aa, Unknown
  Bacterial polypetide isolated from the Sargasso Sea
MRKNQIISFVTARILMDQIRSEALNFLGVAEESTYQEMESNYPKAFKAYIDKGIELDILNAELKTFDLEKLGKAIDFTRDNQFTYLGLQTLYDRYFIHCDDVRYELPQVFFMRVSMGLAIEEENREERAIEFYKLLSSFDYMSSTPTLFNSGTKRPQLSSCYLTTIPDDLDGIFSAMKDNALLSKWAGGLGNDWTPVRAMNSYIKGTNGKSQGVVPFLKVANDTAVAVNQGGKRKGAMCGYLETWHLDIEEFLELRKNTGDERRRTHDMNTANWVPDLFMKRVEKDENWTLFSPGETPELHDLIGKAFEEKYEEYEDKAKNGEMDQFKSIPAKELWRKMLTMLFETGHPWITFKDSCNLRSPQQHSGVVHSSNLCTEITLNTSADNEIAVCNLGSVNLANHMKDGKLDEEKIKKTVSTAIRMLDNVININYYSVDTAKNFNLKHRPIGLGLYG

SEQ ID NO: 90973 - protein, 466 aa, Unknown
  Bacterial polypetide isolated from the Sargasso Sea
MADNSQVSQKEEKEKSVNLLSLNVVRRDGSISAFKSDKISEAIKKAFLAQTKIRNNKNKEKEQEDSIHKTVEDLTHKVVSALTRRIADGDMIHIEDIQDQVELALMRDEHHKVARAYVLYREQRAASRYHTKKLKEQVGAKASSMTVTKRNGEKEPISLDKITNRVSVLSTGLNIDPIVVVQKAVPGLYNEITSTEIDTYLAETAASLTVEHPDYSYLAARIKANSLHKDTPGFIIATKNLFDDGLLRKEYYDKVLASSEEIESIIDYDRDYNFDYFAFTTLTRAYLLKFENKTIERPQDLWMRVALTVSGDKFNYDKVKETYDSLSNGYYTHATPTLFNSGLKMQQLSSCFLISMEDDSIEGIFNTIKDCALISKTAGGIGMHAHNIRGSGSRIKSTNGKSNGLIPFLKIFNETAKSVDQGGGKRKGSFAVYLEPWHSDIEQFLELRKNTGAEEFRARDLFYALW

SEQ ID NO: 90974 - protein, 299 aa, Unknown
  Bacterial polypetide isolated from the Sargasso Sea
MSYTTFSRTNNDQMKEPMFFGNPVNVSRYDQQKYGIFEKLIEKQLSFFWRPEEVDVSKDRIDFQQLPEHEKHIFISNLKYQTLLDSVQGRSPNVALLPIVSLPELETWIETWAFSETIHSRSYTHIVRNITNEPHKVFDDILLNERIIERADDVTRYYDDLIHSVNLYHLCGEGTHVVDGQTHTISLRDLKRKLYVCILSVNVLEAIRFYVSFACSFAFAERELMEGNAKIIKLIARDEALHLTGTQHMLNIMAAGEDDPEMAEIAKECEDEAYAIFRKAAEQEKDWAEFLFKDGSMIG

SEQ ID NO: 90975 - protein, 956 aa, Unknown
  Bacterial polypetide isolated from the Sargasso Sea
MEVQQQNQKENINQSISEIETTAPGKLRVIKRNGKVVPFEDDKIKVAITKAFLAIESGNAAASERIHKKVGELTDAVVEVFKRRMPSGGTLHIEEIQDQVELQLMRSEELDVAKSYILYRAERTQERKKEKVEIDLPDVPSINITKSDGSMVPLDVEKVAALISDACEDLEEVSVNEVLDEALKNLYDGVSISDMRTSLVMSARTKVEKEPNYSFVTARILMDQIRSEALNFLGVAEESTYQEMESNYPKAFKAYIDKGIELDILNPELKTFDIEKLGKAIDFTRDNQFTYLGLQTLYDRYFIHCDDVRYELPQVFFMRVSMGLAIEEENREERAIEFYKLLSSFDYMSSTPTLFNSGTKRPQLSSCYLTTIPDDLDGIFSAMKDNALLSKWAGGLGNDWTPVRAMNSYIKGTNGKSQGVVPFLKVANDTAVAVNQGGKRKGAMCGYLETWHLDIEEFLELRKNTGDERRRTHDMNTANWVPDLFMKRVEKDENWTLFSPGETPELHDLIGKAFEEKYEEYEEKAKNGEMDQFKSVPAKELWRKMLTMLFETGHPWITFKDSCNLRSPQQHSGVVHSSNLCTEITLNTSADNEIAVCNLGSVNLANHMKNGKLDEEKIKQTVSTAIRMLDNVININYYSVDTAKNSNLKHRPIGLGLMGFQDALYLQNIPYCSDEAVEFADRSMELISYNAIYASTELAKERGAYESFDGSLWSKGILPKDSLNILEENRGSEYLNVDRSETLDWETLRKKVKKDGMRNSNVMAIAPTATISNITGITQSIEPTYQNLYVKSNLSGEFTIVNPHLVRKLKELDLWDDVMINDLKYFEGSLSEISRIPEDIKKLFSTAFEVEPRYIVESASRRQKWIDQAQSLNLYIGNADGKKLDITYRMAWYSGLKTTYYLRSIAATSTEKSTVQQGKLNAVSSDASQASTKELGAPAPVPTACSLDDPDCEACQ

SEQ ID NO: 90976 - protein, 613 aa, Unknown
  Bacterial polypetide isolated from the Sargasso Sea
MASDEINITAPGKMRVIKRNGKVVPFEEDKIKVAVTKAFLANESGNAAASERIHIKVEEISADVEEVFKRRMPSGGTLHIEEIQDQVELQLMRNEEYVVARKYILYREERATERTKEAPQETTINAPEISVTKRDGTLVPLDINRLAAVVNHACDGLEDVSADLILEESIKNLYDGVSVSDMKSSLVMSARTKVEQEPNYSFVTARILLDELRSEALTFLNIAEESSHPEMEKYYPKAFQAYIDKGIELQMLDPKLKEFDLKKLGKAIDHDRDYQFTYLGLQTLYDRYFIHYQDTRYELPQIFFMRVAMGLSMEEDKKEERAIEFYRLLSSFDYMSSTPTLFNSGTLRPQLSSCYLTTIPDDLDGIFGAMKDNALLSKWAGGLGNDWSPVRALGSYIKGTNGKSQGVVPFLKVANDTAVAVNQGGKRKGAMCAYLETWHLDIEEFLDLRKNTGDDRRRTHDMNTANWVPDLFMKRVESDANWTLFSPGETPDLHDLTGLAFEKKYEEYEALAAEGKMDQHKTIPAKDLWRKMLTMLFETGHPWITFKDSCNLRSPQQHIGVIHSSNLCTEITLNTSNDEIAVCNLGSVNLPQHMKDGALDQEKVKQTVTTALR

SEQ ID NO: 90977 - protein, 956 aa, Unknown
  Bacterial polypetide isolated from the Sargasso Sea
MEIQQQEENKKINQSIGDLETTAPGKLRVIKRNGKVVAFEDYKIKVAITKAYLAIESGNAAASERIHKKVNELTENIVEVFKRRMPSGGTLHIEEIQDQVELQLMRSEELEVAKSYILYRAGRTQERKKETTSIDIPDTPNINVAKSDGSLVPLNVERLAGLINDACEGLDEVSVNEVLEEALKNLYDGVSIADMRTSLVMSARTKVEKEPNYSFVTARILMDQIRSEALGFLGVTEESTYQEMEVNYPQAFKAYIDKGIELDILNPELKNFDLDKLGDAINYTRDNQFTYLGLQTLYDRYFIHCDDVRYELPQVFFMRVSMGLALEENNREERAIEFYNLLSSFDYMSSTPTLFNSGTKRPQLSSCYLTTIPDDLDGIFSAMKDNALLSKWAGGLGNDWTPVRAMNSYIKGTNGKSQGVVPFLKVANDTAVAVNQGGKRKGAMCGYLETWHLDIEEFLELRKNTGDERRRTHDMNTANWVPDLFMKRVEQDKNWTLFSPGETSELHDLIGKAFEEKYEEYEEKAKNGEMDQFKSIPAKELWRKMLTMLFETGHPWITFKDSCNLRSPQQHAGVVHSSNLCTEITLNTSADNEIAVCNLGSVNLSNHMKDGKLDEEKVKQTVSTAIRMLDNVININYYSVDTAKNSNLKHRPIGLGLMGFQDALYLQDIPYCSDEAIEFADRSMELISYNAIYASTELAKERGSYESFEGSLWSKGILPKDSIEILEENRGKEYLNVDRSETLDWESLRKKVKKDGMRNSNVMAIAPTATISNITGVTQSIEPTYQNLYVKSNLSGEFTIVNPHLVRKLKELDLWDDVMINDLKYFEGSLSEISRIPDEIKKLFSTAFEVEPRYIVESASRRQKWIDQAQSLNLYIGNADGKKLDITYRMAWYSGLKTTYYLRSIAATQTEKSTVEKGKLNAVSSNTNEVSTNELGAPAPIPEACSLDDPDCEACQ

SEQ ID NO: 90978 - protein, 329 aa, Unknown
  Bacterial polypetide isolated from the Sargasso Sea
MISKGVKSIFPIKNQEIWDRYKQHIQAFWTTEEVSLQDDLRDLETLNDGEKHFIKHVLAYFANSEAMINENLASRFYKEILIPEARCFISIQMLNESIHAEMYGLQIEAYVKDAKEKDMLFDAIQNVPCINHKAQWVSKWLNGSQNLLTRLIGFGLVEGLFFAGSFCAIYYFRKRGLLPGLALSNDWIARDEGMHFSFSSLMFRTLRDKFNNNTLTDADISDLSLIPSDVPQSQFEEIVREAVAFEKEFVKDALPVDLIGMNADLMCQYIEAVADRIADLFEFDRVFNTENPFDFMRALDVQNVTNFFEKRVSEYQRPTDRALSFDEAF

SEQ ID NO: 90979 - protein, 300 aa, Unknown
  Bacterial polypetide isolated from the Sargasso Sea
TPEEVSLHDDLRDLETLNDGEKHFIKHVLAYFANSEAMINENLASRFYKEILIPEARCFISMQMLNESIHAEMYGLQIEAYVKDQKEKDLLFDAIQNVPCINHKAQWVSKWLNGNQNLLTRLIGFGLVEGLFFAGSFCAIYYFRKRGLLPGLALSNDWIARDEGMHFSFSALMFKTLRDKFNNNTLTDVDVADLSLIPNDVPQSQFEEIVREAVSFEKEFVRDALPVDLIGMNQDLMCQYIEAVADRIADLFEFERVFNTENPFDFMRALDVQNVTNFFEKRVSEYQRPTDRALSFDDAF

SEQ ID NO: 90980 - protein, 297 aa, Unknown
  Bacterial polypetide isolated from the Sargasso Sea
MLRAEKSERILSKENRQLAFRVSDQQLWDLYNRQLECFWNPSEIEPGKDKGWETLNENEREFISSILAFFATADAIVFDNVEMNFCNEVVITEAKFFYGMQAFMENIHSQVYMSLLTTYVTDEMEQKRLINAIYEIPTIKNKADWAVRFFSDDVPFAMRLIAFSIVEGVFFSSAFASIFWLKKYKKGILEALTLSNSFIARDEGLHTEFAVALFHRLSYHPDEKEVHELFASAVELEAQFVNRALNSAVVGLDASKLVEYVKFVADRLLVQLGYSPLYDISNNPLPFMETQSMRVTT

SEQ ID NO: 90981 - protein, 408 aa, Unknown
  Bacterial polypetide isolated from the Sargasso Sea
KSEKISNAIKKAFLAQTKIRNDKNKEKEQQDGIHKTVEALTHKVVSALTRRIADGDMIHIEDIQDQVELALMRDEHHKVARAYVLYREQRAASRYHTKKLKEQVGEKASSMMVTKRDGSKEPISLDKITNRVSVLSTGLNIDPIVVVQKAVPGLYSDISSVEIDTYLAETAAALTVEHPDYSYLAARIKVNSLHKETPGFIIATKNLHDDGLLREDYYKKVMENADAIESVIDYDKDYTFDYFALTTLIRAYLLKFDNKTIERPQDLWMRVTLTVTGNEFNLDKIKETYKSLSTGTYTHATPTLFNSGLKMQQLSSCFLIGMEDDSIEGIFNTIKDCALISKTAGGIGMHAHNIRGSGSRIKSTNGKSNGLIPFLKIFNETAKSVDQGGGKRKGSFAVYLEPWHADIE

SEQ ID NO: 90982 - protein, 913 aa, Unknown
  Bacterial polypetide isolated from the Sargasso Sea
MAPGKMRVIKRNGKVVAFDEEKIKVAIMKAFLEVEGGSAAGSSRIHDEVEKMTTDIVARSKGRLPSGGTIHIEELQDLVEIQLMRNEHHKVARAYVLYREARNSERPDEQETVAVEKNIEEVVDASVKKACSGLENVDEVMLATQIKSTSYEGISEKDLAESMLMTARTLVEKEPNYSYVTARLLLNNMEKEVADFLGLNKKLLNKRSEMYQEALPKTIAKGIELGILSEELQTFDLDKLGKVIKEERDLQFTYLGLQTLYDRYFITHEEIRYELPQVFLMRVAMGLAVQEKDKNEKAEEFYMLLSSFDYMSSTPTLFNSGTKRPQLSSCYLTTVPDDLGGIYDSIRDNALLSKWAGGLGNDWTNVRALGARIDGTNGKSQGIVPFLKVSNDTAVAVNQGGKRKGAFCAYLECWHLDVEEFLELRKNTGDDRRRTHDMNTANWIPDLFMKRLEKDEEWTLFSPSDVPDLHDIYGLEFEKKYVEYEKKAEKGDIKLFKKVKAKDLWRKVLSMLFETGHPWVTFKDPCNIRSPQGHVGTVHSSNLCTEITLNTNKDEIAVCNLGSINLPQHIDDGKINVEQLKSSIKTAIRMLDNVVDINFYPVPQAENSNKKHRPIGLGLMGFQDALYKLGISYNSDEAVDFADKSMELVSYFAIQASSELAKERGAYETYEGSLWDKGIFPIDSINLLAEQRGKEFIDQNTDTNLDWDSLKASVSENGMRNSNVMAIAPTATIANITGVSQSIEPTYQNLFVKSNLSGEFTVVNPYLIEELKKENLWDDVMLSDLKYFEGSLSQINRIPEATKERFKTAFEIEPRFIVEAASRRQKWIDQAQSLNLYIGNVDGKKLDVTYRMAWYKGLKTTYYLRSMGATATEKSTVDRSNLNAVETNQQEQQVASKAPEACSILDPDCEACQ

SEQ ID NO: 90983 - protein, 233 aa, Unknown
  Bacterial polypetide isolated from the Sargasso Sea
SIHAEMYGLQIEAYVKDQNEKDLLFDAIQNVPCINHKAQWVSKWLNGNQNLLTRLIGFGLVEGLFFAGSFCAIYYFRKRGLLPGLALSNDWIARDEGMHFSFSALMFKTLKNKYNNNTLTDADIADLSLIPNDVPQSQFEEIVREAVSFEKEFVKDALPVDLIGMNQDLMCQYIEAVADRIADLFEFERVFNTENPFDFMRALDVQNVTNFFEKRVSEYQRPTDRALSFDDAF

SEQ ID NO: 90984 - protein, 964 aa, Unknown
  Bacterial polypetide isolated from the Sargasso Sea
MTTQELSKTQETSAQGAIGALASDDINITAPGKMRVIKRNGKVVPFEEDKIKVAVTKAFLANESGNAAASERIHRRVEEISEDVEEVFKRRMPSGGTLHIEEIQDQVELQLMRNEEYVVARKYILYREERATERLKEGPQETTINAPEISVTKKDGTQVPLDINRLAAVVNHACDGLEDVSADLILEESLKNLYDGVSVSDMKSSLVMSARTKVEQEPNYSFVTARILLDELRSEALTFLNIAEESSHPEMEKYYPQAFQAYIDKGIELQMLDPQLKEFDLKKLGKAIDHDRDYQFTYLGLQTLYDRYFIHYQDTRYELPQIFFMRVAMGLAMEEDKKEERAIEFYKLLSSFDYMSSTPTLFNSGTLRPQLSSCYLTTIPDDLDGIFGAMKDNALLSKWAGGLGNDWSPVRALGSYIKGTNGKSQGVVPFLKVANDTAVAVNQGGKRKGAMCAYLETWHLDIEEFLDLRKNTGDDRRRTHDMNTANWVPDLFMKRVESDANWTLFSPGETPDLHDLTGLAFEKRYEEYEALAAEGKMDQHKTIPAKDLWRKMLTMLFETGHPWITFKDSCNLRSPQQHIGVIHSSNLCTEITLNTSNDEIAVCNLGSVNLPQHMKDGVLDHEKVKQTVTTALRMLDNVIDINYYSVDTAKNSNLKHRPVGMGLMGFQDALYMQDAPYCSDAAIEFADRSMEVISYYAIHASSELAKERGRYPSYEGSLWSQGIFPKDSIDILEKNRGSEYIKVDRSETLDWEKLKAKVKKDGMRNSNVMAIAPTATISNITGVTQSIEPTYQNLYVKSNLSGEFTIVNPHLVRKLKALDLWDDVMINDLKYFEGSLSEISRIPDDIKKLFSTAFEVEPKYIVESASRRQKWIDQAQSLNLYIGNANGKKLDLTYRMAWYSGLKTTYYLRSIAATTTEKSTINQGSLNAVSAQAETAPEVPHELGAPAPVPEACSLDDPDCEACQ

SEQ ID NO: 90985 - protein, 329 aa, Unknown
  Bacterial polypetide isolated from the Sargasso Sea
MISKGCKSIFPIQHQEIFDRYKQHVQAFWTPEEVSLQDDLRDLKTLGEGEIHFIKHVLAFFANSEAMINENLASRFYNEILIPESRLFITMQMLNESIHAEMYGLQIEAYVEDPSEKDKLFSAIQNVPCINKKAQWVSKWLNGNQNLLMRLIAFGLVEGLFFAGSFCAIYYFRKRGLLPGLALSNDWIARDEGMHFSFSALMFKTLSEKFNKGTLSDEDIKSMDLIPGAVTQSEFEEIVREAVEFEKEFVTDALPVDLIGMNKEMMCMYIEAVSDRIADLFGFDRVFNTENPFDFMRALDVQNVTNFFEKRVTEYQRPTDRSLSFDESF

SEQ ID NO: 90986 - protein, 934 aa, Unknown
  Bacterial polypetide isolated from the Sargasso Sea
MEQQVRQEKKEEAIEVSPNLVMAPGKMRVIKRNGKVVAFDEEKIKVAIMKAFLEVEGGTAAGSSRIHDEVEKMTADIVARSKGRLPSGGTIHIEELQDLVEIQLMRNEHHKVARAYVLYREARNSERPEEQETVAVEKNIEQVVDASVKRACAGLENIDEAMLATQIKNTTYEGISEKDLAESMLMTARTLVEKEPNYSYVTARLLLNNMEKEVVDFLGLNKKLLSKRSEMYQDALVKTIAKGIELGILNEELESFDLDRLGKVIKEERDLQFTYLGLQTLYDRYFITHEEIRYELPQVFLMRVAMGLAIQEKDKNEKAEEFYMLLSSFDYMSSTPTLFNSGTKRPQLSSCYLTTVPDDLGGIYDSIRDNALLSKWAGGLGNDWTNVRALGARIDGTNGKSQGIVPFLKVSNDTAVAVNQGGKRKGAFCAYLECWHLDVEEFLELRKNTGDDRRRTHDMNTANWIPDLFMKRLEKDEEWTLFSPSDVPDLHDIYGLDFEKKYVEYEKSAEKGDIKLFKKIQAKDLWRKVLSMLFETGHPWVTFKDPCNIRSPQGHVGTVHSSNLCTEITLNTNKDEIAVCNLGSINLPQHIEDGKINVEQLKSSIKTAIRMLDNVVDINYYPVPQAENSNKKHRPIGLGLMGFQDALYKLGISYNSDEAVDFADKSMELISYFAIQASSELAKERGAYETYEGSLWDKGIFPIDSINLLAEQRGKEFIDQNTDTNLDWGSLKAVVSENGMRNSNVMAIAPTATIANITGVSQSIEPTYQNLFVKSNLSGEFTVVNPYLIEELKKENLWDDVMLSDLKYFEGSLAQINRIPEAIKERFKTAFEIEPRFIVEAASRRQKWIDQAQSLNLYIGNVDGKKLDVTYRMAWYKGLKTTYYLRSMGATATEKSTVDRSNLNAVEANQQEQQVATKAPEACSILDPDCEACQ

SEQ ID NO: 90987 - protein, 223 aa, Unknown
  Bacterial polypetide isolated from the Sargasso Sea
IEAYVPNPEEKDKLFSAIENVPCINHKAQWVSKWLNGNQNLLTRLIGFGLVEGLFFAGSFCAIYYFRKRGLLPGLALSNDWIARDEGMHFSFSSLMFKILRDKYNNSTLSDLDIKDMNLISGDVTQPEFEEIVREAVSFEKEFVTSALPVDLIGMNKELMCQYIEAVADRIADLFEFERVFNTENPFDFMRALDVQNVTNFFEKRVSEYQRPSDRSLAFDEAF

SEQ ID NO: 90988 - protein, 574 aa, Unknown
  Bacterial polypetide isolated from the Sargasso Sea
MSGYIGAIRDNALLSKWAGGLGNDWTNVRALGSRIKGTNGKSQGIVPFLKVSNDTAVAVNQGGKRKGAFCAYLECWHLDVEEFLDLRKNTGDDRRRTHDMNTANWIPDLFMKRLEEDKDWTLFSPSDVPELHDLYGQEFEKKYEEYEALAEKDELSLYKKIPAKTLWRKMLSMLFETGHPWVTFKDPCNIRSPQGHVGTVHSSNLCTEITLNTNEEEIAVCNLGSINLPQHIQEGKIDIDQLKNTVRTAVRMLDNVIDINYYPVPQAENSNKKHRPVGLGLMGFQDALYKLGISYNSEEAVKFADKSMELISYFAIEASSELAAERGTYQTYEGSLWDRGIFPIDSINLLKEQRGENYLDQNIETTLDWDSLREKVKKSGMRNSNVMAIAPTATIANITGVSQSIEPTYQNLFVKSNLSGEFTVVNPYLIEELKNKELWDDVMLSDLKYYEGSLSQINRIPEEIKEKFKTAFEVEPKFIVEAASRRQKWIDQAQSLNLYIANVDGKKLDITYRMAWYKGLKTTYYLRSMGATSTEKSTVERSNLNAVDSEKGEQVAAQAPQACSILDPDCEACQ

SEQ ID NO: 90989 - protein, 719 aa, Unknown
  Bacterial polypetide isolated from the Sargasso Sea
MEVQQQNQKENINQSINEIETTAPGKLRVIKRNGKVVPFEDDKIKVAITKAFLAIESGNAAASERIHKKVGELTDAVVEVFKRRMPSGGTLHIEEIQDQVELQLMRSEELDVAKSYILYRAERTQERKKEKVEIDLPDVPSINITKSDGSLVPLDVEKVAGLISDACEDLEEVSVNEVLDEALKNLYDGVSISDMRTSLVMSARTKVEKEPNYSFVTARILMDQIRSEALNFLGVAEESTYQEMESNYPKAFKAYIDKGIELDILNPELKTFDLEKLGKAIDFTRDNQFTYLGLQTLYDRYFIHCDDVRYELPQVFFMRVSMGLAIEEENREERAIEFYKLLSSFDYMSSTPTLFNSGTKRPQLSSCYLTTIPDDLDGIFSAMKDNALLSKWAGGLGNDWTPVRAMNSYIKGTNGKSQGVVPFLKVANDTAVAVNQGGKRKGAMCGYLETWHLDIEEFLELRKNTGDERRRTHDMNTANWVPDLFMKRVEKDENWTLFSPGETPELHDLIGKAFEEKYEEYEEKAKNGEMDQFKSVPAKELWRKMLTMLFETGHPWITFKDSCNLRSPQQHSGVVHSSNLCTEITLNTSADNEIAVCNLGSVNLANHMKDGKLDEEKIKRTVSTAIRMLDNVININYYSVDTAKNSNLKHRPIGLGLMGFQDALYLQNIPYCSEEAVEFADRSMELISYNAIYASTELAKERGAYESFDGSLWSKGILQ

SEQ ID NO: 90990 - protein, 329 aa, Unknown
  Bacterial polypetide isolated from the Sargasso Sea
MISKGCKSIFPIQHQEIFDRYKQHVQAFWTPEEVSLQDDLRDLKTLGEGEIHFIKHVLAFFANSEAMINENLASRFYNEILIPESRLFITMQMLNESIHAEMYGLQIEAYVEDPSEKDKLFSAIQNVPCINKKAQWVSKWLNGNQNLLTRLIAFGLVEGLFFAGSFCAIYYFRKRGLLPGLALSNDWIARDEGMHFSFSALMFKTLSEKFNKGTLSDEDIKSMDLIPGPVAQSEFEEIVREAVEFEKEFVTDALPVDLIGMNKEMMCMYIEAVSDRIADLFGFERVFNTENPFDFMRALDVQNVTNFFEKRVSEYQRPTDRSLSFDESF

SEQ ID NO: 90991 - protein, 115 aa, Unknown
  Bacterial polypetide isolated from the Sargasso Sea
AIGIWSKEMKDLMIKAGGSIQNIIDIPDHIKELYKTVWEISQKVIIDMAADRGVFIDQSQSMNLFIENPTLSKLSSMHMYAWKSGLKTGMYYLRSKAKARPIQFSLEAECTACSA

SEQ ID NO: 90992 - protein, 222 aa, Unknown
  Bacterial polypetide isolated from the Sargasso Sea
MSYTTFSRNHNNQMQEPMFFGQTVNVSRYDQQKYPIFEKLIEKQLSFFWRPEEVDVSKDRLDFQALPEHEKHIFLSNLKYQTLLDSVQGRSPNVALLPIVSIPELETWIETWAFSETIHSRSYTHIIRNVTQSPELIFDDIVSNDKISERADAVTTYYDDLINSVSLYNLYGEGKHEINGKTVVVNLFELKKKLYLAMMSVNILEAIRFYVSFACSFAFAET

SEQ ID NO: 90993 - protein, 356 aa, Unknown
  Bacterial polypetide isolated from the Sargasso Sea
EIVEYSDKNETSVCNLASIALPKFVIKSQKNKTKEYDYKKLYETAKLATKNLDQVIGINFYPTNKTEVSNNKHRPIGLGIQGLADVFFELNIPYDGEEAKKINKKIFETIYFGALEASCELAKEKGAYSTFKGSPLSEGKFQFDLWGIEPSNMWDWDSLREKIKKVGVRNSLTTACMPTASTGIILGNTETFQIQTSNIYKRQTLSGEFLLVNRHLVKVLSKRNLWNKEMRDKIILENGSVQNIQNFPEDLKETYKTVWETSQKTVIDMAADRAPFIDQTQSMNLWLSTPTFGKVNSMHMYAWKKGLKTGMYYLRSRSAVDAVKVTVSSEKVAKEDFLKNAVTENDDPEDCLTCSA

SEQ ID NO: 90994 - protein, 378 aa, Unknown
  Bacterial polypetide isolated from the Sargasso Sea
GAFCAYLECWHLDVEEFLDLRKNTGDDRRRTHDMNTANWIPDLFMKRLEKGEKWTLFSPSDVPELHDIYGKEFETKYTEYEKKAETGEIKHFKTVEAKDLWRKILSMLFETGHPWVTFKDPCNIRSPQGHVGTVHSSNLCTEITLNTNEDEIAVCNLGSINLPQHIDEGKINVEQLKSSVTTAIRMLDNVIDINYYPVPQAENSNKKHRPIGLGLMGFQDALYKLGISYDSEEAVEFADKSMELISYFAIEASCALAEERGTYETYKGSLWDNGIFPLDSINLLAEQRGSDFIDQNTEKTLDWDKLKEKMSKHGIRNSNVMAIAPTATIANITGVSQSIEPTYQNLFVKSNLSGEFTVVNPYLIEELKKEGLWDEVML

SEQ ID NO: 90995 - protein, 172 aa, Unknown
  Bacterial polypetide isolated from the Sargasso Sea
MVEPILKENKDRFVIFPIKHHDLWEWYKKCEASFWTAEEIDLHQDLTDWSTKLNDDERYFVKHILAFFAASDGIVNENLAENFVNEVQYSEAKFFYGFQIMMENIHSETYSLLIDTYVKDDAEKDNLFNAIEVFPAIKKKADWALKWIESDSFAERLIAFAAVEGIFFSGAF

SEQ ID NO: 90996 - protein, 326 aa, Unknown
  Bacterial polypetide isolated from the Sargasso Sea
MSLAKYDMHILQDYTREELDIMDSYIDHWRDMNFSYAAVKQLEGKYLVQNRVTHEIYESAQFLYILVAACLFARYPKETRLQYVKDFYDAVSTFKISLPTPIMAGVRTPTRQFSSCVLIECGDSLDSINATASSIVKYVSQRAGIGINAGRIRALGSPIRGGEAFHTGCLPFYKYFQTAVKSCSQGGVRGGAATLFYPIWHLEVESLLVLKNNRGVEDNRIRHLDYGVQLNKLMYQRLIKGENISLFSPSDVPGLYDAFFEDQDEFERLYLQYEQDSSIRKKTLKAVELFSLMMQERASTGRIYIQNVDHWYTHSPFDSKVAPIRQ

SEQ ID NO: 90997 - protein, 267 aa, Unknown
  Bacterial polypetide isolated from the Sargasso Sea
EPPALYDHVARMVKKGKYDTHLLEDYTEEEFKQMDSFIVHDRDMSFSYAAVKQLEGKYLVQNRVTGEIYESAQFLYILVAACLFSNYPRETRLDYIKRFYDAVSTFKISLPTPIMSGVRTPTRQFSSCVLIECGDSLDSINATSSAIVKYVSQRAGIGINAGRIRALGSPIRGGEAFHTGCIPFYKHFQTAVKSCSQGGVRGGAATLFYPMWHLEVESLLVLKNNRGTDANRVRHMDYGVQINKLMYTRLLKGEDITLFSPSDVPGL

SEQ ID NO: 90998 - protein, 228 aa, Unknown
  Bacterial polypetide isolated from the Sargasso Sea
MEDKSSVQAENLDQVNLNKDLDENLVIEEPILKENPNRFVLFPIQHNDIWEMYKKQEASIWTAEELDLSPDLVDWENKLNDDERFFIKHVLAFFAASDGIVNENLAENFLSEVQYTEAKFFYGFQVMMENIHSETYSLLIDTYIKDTKEKNYLFNAIETFEPVKKKADWAMRWIDNGSYAERLISFAAVEGIFFSGSFCSIFWLKKRGLMPGLTFSNELISRDEGLHC

SEQ ID NO: 90999 - protein, 336 aa, Unknown
  Bacterial polypetide isolated from the Sargasso Sea
VSVLSTGLSIDPIVVAQKAIPGLYNDITSTEIDNYLAETSAALTVEHPDYSNLAARIKSNALHKLTPGFVIATKNLFDDGLLHENYYNKVMQNAEEIESIIDYDRDYSFDYFALTTLIRAYLLKFENETIERPQDLWMRVALTVSGKEFNLAKVKETYDSLSNGLYTHATPTLFNSGLKMQQLSSCFLIGMEDDSIEGIFNTIKDCALISKTAGGIGMHAHNIRGSGSRIKSTNGKSNGLIPFLKIFNETAKSVDQGGGKRKGSFAIYLEPWHADIEKFLELRKNTGAEEFRARDLFYALWIPDLFMQRVEKDEDWTLMSEHECPGLSDSYGKSFE

SEQ ID NO: 91000 - protein, 302 aa, Unknown
  Bacterial polypetide isolated from the Sargasso Sea
YDDGLLREDYYKKVMENADLIESIIDYDKDYTFDYFALTTLIRAYLLKFDNKTIERPQDLWMRVTLTVTGNEFNLDKIKETYKSLSTGTYTHATPTLFNSGLKMQQLSSCFLIGMEDDSIEGIFNTIKDCALISKTAGGIGMHAHNIRGSGSRIKSTNGKSNGLIPFLKIFNETAKSVDQGGGKRKGSFAVYLEPWHADIEKFLELRKNTGAEEFRARDLFYALWIPDLFMKRVENDEEWTLMSEHECPGLSDVYGDKFEKLYTKYENEIKHLEKIKARDLMSKIIEAQIETGQPYMLYKDS

SEQ ID NO: 91001 - protein, 241 aa, Unknown
  Bacterial polypetide isolated from the Sargasso Sea
MQQEPLLQENKDRFVIFPIKHHDIWEWYKKCEASFWTAEEIDLHQDLNDWSTKLNDDERYFIKHILAFFAASDGIVNENLAENFVNEVQYSEAKFFYGFQIMMENIHSETYSLLIDTYVKDDKEKDTLFKAIENFPAIKKKADWALKWIESDSFAERLIAFAGVEGVFFSGSFCSIFWLKKRGLMPGLTFSNELISRDEGVHCDFAVHLHNNHMINKVPKERIKEILLDALNIEREFITES

SEQ ID NO: 91002 - protein, 279 aa, Unknown
  Bacterial polypetide isolated from the Sargasso Sea
KDRKDFNEKMNDNERYFIENILAFFAASDGIVNENLGERFYNEIQIQEAKFFYGFQIAVENIHSETYSLLIETYVKDNAKKEKLFNAIDTIPSVKKKAEWAIKWINDKDATLGTRVIAFAAVEGIFFSGSFCSIFWLKKRGLMPGLCHSNELISRDEGLHTEFAVLIYSMLKNKPSKEIIYEIIKEAVELEKEFITESLPCNLIGMNMVLMKQYIEYIADRLLLMLGLEKVYHKENPFEWMELISVQGKTNFFEKRVGEYANIAKSNQNDNVFDLNEEF

SEQ ID NO: 91003 - protein, 274 aa, Unknown
  Bacterial polypetide isolated from the Sargasso Sea
IFETIYYAAVMASIEEAEKDGPYETYKGSPISQGEFQHNLWGIKDEELSGRWDWKDARKKLKKSGVRNSLLVAPMPTASTSQILGNNECFEPYTSNIYTRRVLSGEFIVVNKYLLEDLVALGVWNEDMKQELMQANGSIQNIKGIPDDIKEIYRTVWEMSMKDIIDMARHRGYFIDQSQSLNLFMEGATAAKLTSMHFYGWKSGLKTGMYYLRTKSAVDAIKFTLDNSKKAKVEKPVAEKVTSAPAAASKKNTDAKGKQIVAKPLSPEELKEML

SEQ ID NO: 91004 - protein, 272 aa, Unknown
  Bacterial polypetide isolated from the Sargasso Sea
QSSDLEPLLRENPQRFVLFPINYNSIWQMYKKSLGLFWTAEEIDLGKDLNDWVKLKPEEQHFIKNILAFFAGSDGIVLENLGSRFMNEIQIPEAKCFYGFQIAMENIHSETYSLLIDTYIKDSVEKDRLLRAIDTIPCVEKKGKWALRWINDTDSNFATRLVAFACVEGIFFSGSFCAIFWLKKRGLMPGLTSSNELISRDEGLHTDFACLIYSMLNQKLSFETIKEIVCDAVEIEKEFITDSIPCRLIGMNAQLMKTYIEFVADRLLVQLG

SEQ ID NO: 91005 - protein, 270 aa, Unknown
  Bacterial polypetide isolated from the Sargasso Sea
MSPQFVEPLLKEDDNRYVMFPIKDQDIWQMYKKQEDLFWRAEEIDLSKDMKHWDALNPDEKHFISMILAFFAASDGIVLENLGMRFMSEIQLAEARAFYGLQIAMENIHSITYSTLIDTYIKDKTEKNKLFNALNEYPCIKKKADWAIKWIQDKRSSFATRLVAFAVVEGIFFSGAFCSIFWLKKRGIMPGLCFSNELISRDEALHTEFAVLLHNKLERPLKKQKIEEIIREAVDIEIDFINNALPCRLIGMNGMLMQQYIEFVADRLAV

SEQ ID NO: 91006 - protein, 182 aa, Unknown
  Bacterial polypetide isolated from the Sargasso Sea
MEPLLDQSQNRYVLFPIQHDDIWEMYKKAESSFWTTEEIDLSKDHSDFSKLTPNEQHFIKYVLAFFAASDGIVNENLVERFTQEIQLLEAKFFYMFQGSIENIHSETYSLLIDTLIKNQEEKHSLFNAIEEIPSIRKKAEWAQTWINDKHSSFGHRVIAFAAVEGIFFSGAFCSIFWLKKRG

SEQ ID NO: 91007 - protein, 269 aa, Unknown
  Bacterial polypetide isolated from the Sargasso Sea
IIATKNLYEDGLLRDTYYEKVIENADVIESIIDYDKDYTFDYFALTTLIRAYLLKFDNKTIERPQDLWMRVTLTVTGNVFNLDKIKETYKSLSSGMYTHATPTLFNSGLKMQQLSSCFLISMEDDSIEGIFNTIKDCALISKTAGGIGMHAHNIRGSGSRIKSTNGKSNGLIPFLKIFNETAKSVDQGGGKRKGSFAVYLEPWHADIVKFLELRKNTGAEEFRARDLFYALWIPDLFMKRVENDEEWTLMSEHECPGLSDVYGDEFENY

SEQ ID NO: 91008 - protein, 308 aa, Unknown
  Bacterial polypetide isolated from the Sargasso Sea
SDEAKELNQEILETIYYAALNASVREAKKDGVYESYKGSPISKGEFQHNMWGVEDDDLSGRWDWKKLRKDVLKHGVRNSLLVAPMPTASTSQILGNNECFEPYTSNIYTRRVLSGEFIIVNKHLLNDLVELGLWSEDMKQDLMAANGSIQDIEGIPDDLKELYKTVWEMSMKDIIDMARHRGFFIDQSQSLNLFMEGATMSKLTSMHFYAWKSGLKTGMYYLRTKSAVDAIKFTLKKKESVPEKTEEIKLEAETEEVGEVQITRTEKAAKTKSKEKPVAVEPLTPEELKQIISQSKENEDDDCLMCGS

SEQ ID NO: 91009 - protein, 201 aa, Unknown
  Bacterial polypetide isolated from the Sargasso Sea
SDTMKDLHTYVNPITGKKAPLLSDEVFKVIKKNAELLDSKIIYNRDFGYDYFGFKTLERSYLLKINGNIVERPQHMLMRVSVGIHLDDIDAVIDTYELMSKKYFTHATPTLFNAGTPKPQMSSCFLLTMQDDSIDGIYDTLKQTAKISQSAGGIGLSIHNIRSTGSYISGTNGTSNGIVPMLRVFNDTARYVDQGGVKEKV

SEQ ID NO: 91010 - protein, 275 aa, Unknown
  Bacterial polypetide isolated from the Sargasso Sea
ELNQEIFETIYYAALYASVEEAKKDGVYESYKGSPISKGEFQHNMWGVEDNDLSGRWDWKKLRKDVLKHGVRNSLLVAPMPTASTSQILGNNECFEPYTSNIYTRRVLSGEFIIVNKHLLNDLVELGIWSEDMKQDLMAANGSIQDIEGIPDDLKELYKTVWEMSMKDIIDMARHRGFFIDQSQSLNLFMEGATMSKLTSMHFYAWKSGLKTGMYYLRTKSAVDAIKFTLKKKESVPEKTEEIKLEAETEEVGEVQITRTEKAAKTKSKEKPVAV

SEQ ID NO: 91011 - protein, 158 aa, Unknown
  Bacterial polypetide isolated from the Sargasso Sea
MSSCFLVHLKDDSIEGIYDTLKTCAQISKSAGGIGLNIHNIRARGSYIRGTNGTSNGLVPMLRVFNSTARYVDQGGGKRPGAFAMYLEPWHPDVFDFLDLRKNTGSEENRCRDLFLALWIPDLFMKRVEENGDWSMFCPCDCPGLSDCWGAEFEALYN

SEQ ID NO: 91012 - protein, 301 aa, Unknown
  Bacterial polypetide isolated from the Sargasso Sea
YALWIPDLFMKRVKDDEDWTLMSEHECPGLSDNYGKEFEILYTKYEKEKKHLEKIKARALMSKIIEAQIETGQPYMLYKDSINEKSNQKNIGVIKSSNLCAEIVEYSDKKETAVCNLASIALPKFIDSKNKKYDYKKLYETAKLATKNLDQVIDINFYPTNKTDVSNNLHRPIGLGIQGLSDVFFKLSIPHDHEEAAKINKLIFETIYFGALEASMELAKEKGAYSTFKGSPLSEGNFQFDLWKVKPSNMWEWDTLKEKIKKYGVRNSLTTACMPTASTGIILGNTETFQIQTSNIYKRQT

SEQ ID NO: 91013 - protein, 221 aa, Unknown
  Bacterial polypetide isolated from the Sargasso Sea
MFVVKRDGHKEPIMFDKITARVRKLCYGLNGLVDPVRVSMRVIEGLYDGVSTSELDNLASEISATMTTTHPDYAQLAARISVSNLHKNTKKSFSDTMKDLYEYVNPRTGKKAPLLSKEVYETIKKNSEKLDSSIIYNRDYGYDFFGFKTLEKSYLLKLSGKIAERPQHMLMRVSVGIHLDDIDSVIETYDLMSKRFFTHATPTLFNAGTPKPQMSSCFLLT

SEQ ID NO: 91014 - protein, 298 aa, Unknown
  Bacterial polypetide isolated from the Sargasso Sea
FSALWVPDLFMKRVEEGGNWSLFCPDKAPGLSDVYGDEFESLYTRYEAEGLANETIPALDVWKAIIKSQSETGTPYMLYKDSCNKKSNQKNVGVIKSSNLCSEIIEYSDDKETAVCNLSSIAIPSCVDIDTKTFNYTKLHGLTKMITRNLNRVIDRNFYPTENAKRSNFRHRPIGIGVQGLADVFIMCGMAFGSEESRNMNAYIFETMYHAALEASCELAELYGPYETFEGSPASKGILQFDMWDRQPRFSGMYDWTAMRERVKKGIRNSLFMAPMPTASTSQILGNNECFEPYTTNI

SEQ ID NO: 91015 - protein, 263 aa, Unknown
  Bacterial polypetide isolated from the Sargasso Sea
MAYTTFNRQINDQLKEPMFFGNPVNVSRYDQQKYGIFEKLIEKQLSFFWRPEEVDVSKDRIDFQNLPEHEKHIFISNLKYQTLLDSVQGRSPNVAFLPIVSLPELETWIETWAFSETIHSRSYTHIVRNISAEPHKVFDDIMLNEKILQRAEDVTRYYDALIDGINLYQRCGEGTHTINGETHSISLYELKRRLYLCVMSVNVLEAIRFYVSFACSFAFAERELMEGNAKIIRLIARDEALHLTGTQHMLNIMAAGDDDPQMA

SEQ ID NO: 91016 - protein, 125 aa, Unknown
  Bacterial polypetide isolated from the Sargasso Sea
MSEYLLTEENKRFVVFPIQNDKVYEMYKKAVASFWTPEEIDLEKDLTDFNNLNDDERHFIENVLAFFAASDGIVNENLGERFLNEVQIKEAKMFYGFQIAMEDKHGITYSLLIDTYKKESVKKDK

SEQ ID NO: 91017 - protein, 246 aa, Unknown
  Bacterial polypetide isolated from the Sargasso Sea
LTVTGNEFNLDKIKETYKSLSTGMYTHATPTLFNSGLKMQQLSSCFLIGMEDDSIEGIFNTIKDCALISKTAGGIGMHAHNIRGSGSRIKSTNGKSNGLIPFLKIFNETAKSVDQGGGKRKGSFAVYLEPWHADIVKFLELRKNTGAEEFRARDLFYALWIPDLFMKRVENDEEWTLMSEHECPGLSNVYGDEFEKLYTKYENEIKHLEKIKARDLMSKIIEAQIETGQPYMLYKDSINNKSNQKN

SEQ ID NO: 91018 - protein, 249 aa, Unknown
  Bacterial polypetide isolated from the Sargasso Sea
NENLAENFVNEVQYSEAKFFYGFQIMMENIHSETYSLLIDTYVKDDKEKDTLFKAIENFPAIKKKADWALKWIESDSFAERLIAFAGVEGIFFSGSFCSIFWLKKRGLMPGLTFSNELISRDEGVHCDFAVHLHNHHIINKVPKERIKEILIDALNIEREFITESLPVSLIGMNAKLMTQYLEFVTDRLLDQFGCEKEFNVSNPFDFMDMINLQGKTNFFEKRVSEYQKAGVLNNDKKEESNFDLDDDF

SEQ ID NO: 91019 - protein, 314 aa, Unknown
  Bacterial polypetide isolated from the Sargasso Sea
MRVAIQIHGKNLESVRQTYDYMSCKYFTHATPTLFNAGTTRPQLSSCYLIGMEDDSIDGIYNTLGDCARISKWAGGIGLHIHNVRASGTHIRGTNGTSNGIIPMLKVFNNTARYVDQGGGKRNGSFAIYLEPWHADIEDFLSLKKNHGDEEMRARDLFYAVWIPDLFMRRVKTNKKWTLLCPDECPGLADVYGDEFDKLYESYEKANKGKFQINARDLWFKILDSQIETGTPYILFKDACNKKSNQKNLGTIKSSNLCTEIVEYSDKNETAVCNLASIGLAKFVESPKYTVETLKSYDKSNKIYSKTKCNFCKK

SEQ ID NO: 91020 - protein, 276 aa, Unknown
  Bacterial polypetide isolated from the Sargasso Sea
LSLPTPIMSGVRTPTRQFSSCVLIEAGDSLDSINATASAIVKYVSQRAGIGVNPGRIRALGSPIRGGEAFHTGCIPFYKYFQTAVKSCSQGGVRGGAATLFYPLWHMEVESLLVLKNNRGVEENRVRHLDYGVQFNKLMYQRMMKDGYISLFSPSDVPGLYDAFFADQDKFEELYVKYENDDSIRKKQIKAMELFSLFMQERASTGRIYLQNVDHCNTHSPFNPEVAPVRQSNLCLEIALPTKPLQHVNDEEGEIALCTLSAFNLGAIKSLDELKS

SEQ ID NO: 91021 - protein, 283 aa, Unknown
  Bacterial polypetide isolated from the Sargasso Sea
MKDRCGATASTYPQVFVNGCHVGDYFAFEEFIEEAEPILLPTMNRFTIFPIEYEHLWSLYKKAQMSNWTAEEVDVSSDMEDWKSLSENEQHFIKYILAFFAGSDGIVFENINNNFADEVQITEARSFYAYQCHNEMVHGETYSKLIDKYIRDSTEKKRLFEAITLIDPIKKKAEWAMKWFDTSRPFAERLLAFACVEGIFFSGSFCAIFWLKKRGLMPGLCFSNELISRDEGLHLEFAIELFKMLKNKPSQDIVYEIVREAVEIEKSFIIEALPCSLIGMNSD

SEQ ID NO: 91022 - protein, 267 aa, Unknown
  Bacterial polypetide isolated from the Sargasso Sea
IEGIFNTIKDCSLISKTAGGIGMHAHNIRGSGSRIKSTNGKSNGLIPFLKIFNETAKSVDQGGGKRKGSFAVYLEPWHADIEKFLELRKNTGAEEFRARDLFYALWIPDLFMKRVENDEEWTLMSEHECPGLSDVYGNEFEKLYTKYENEMKHLEKIKARDLMSKIIEAQIETGQPYMLYKDSINNKSNQKNIGVIKSSNLCAEIVEYSDKNETSVCNLASIALPKFVKKSDKKLIYDYDGLYETAKLATKNLDEVIDINFYPTDKT

SEQ ID NO: 91023 - protein, 101 aa, Unknown
  Bacterial polypetide isolated from the Sargasso Sea
LKITEIITESVEIEKEFITESLPCRLIGMNSVLMSQYIEFVADRLSLQLGCDKIYNVTNPFDFMEMISLEQKTNFFESRVSEYSLAEMSGKEDAFNEEIDF

SEQ ID NO: 91024 - protein, 274 aa, Unknown
  Bacterial polypetide isolated from the Sargasso Sea
KEELRARDLFYAMWIPDLFMKRVESNEDWSLFSPDEAKDLHETYGEEFEKLYEKFEKEGKARKTVKAQDLWFEILEAQIETGNPYILYKDAANKKSNQKNLGTIKSSNLCTEIIEYTSPDEVAVCNLASIALNKFVKDDLTYDHQKLYEITKVITKNLNKVIDVNYYPVEEARNSNLRHRPIGIGVQGMADTFILMRHAFDSPEAKKLNSEIFETIYYASMEASMEIAKKEGPYKTYEGSPVSKGIFQFDMWGVAPSSKRWNWTKLKREVKKPW

SEQ ID NO: 91025 - protein, 280 aa, Unknown
  Bacterial polypetide isolated from the Sargasso Sea
KSFSDTMKDLHTYVNPITGKKAPLLSDEVFKVIKKNAELLDSKIIYNRDFGYDYFGFKTLERSYLLKINGNIVERPQHMLMRVSVGIHLDDIDAVIDTYELMSKKYFTHATPTLFNAGTPKPQMSSCFLLTMQDDSIDGIYDTLKQTAKISQSAGGIGLSIHNIRSTGSYISGTNGTSNGIVPMLRVFNDTARYVDQGGGKRKGSFAIYIEPWHSDIYDFLDLKKNHGKEEMRARDLFYAMWIPDLFMKRVENNEEWTLMCPNECPGLYDCHGDEFDKLY

SEQ ID NO: 91026 - protein, 272 aa, Unknown
  Bacterial polypetide isolated from the Sargasso Sea
FFISMEDDSIEGIFNTIKDCALISKTAGGIGMHAHNIRGSGSRIKSTNGKSNGLIPFLKIFNETAKSVDQGGGKRKGSFAVYLEPWHADIEQFLELRKNTGAEEFRARDLFYALWIPDLFMKRVEEDGDWTLMSEHECPGLSDSYGEEFVSLYEKYEKEMPNLEKIKARELMSKIIEAQIETGQPYMLYKDSINNKSNQKNIGVIKSSNLCAEIVEYSDKSETSVCNLASIALPKFVKRSKNKKNKEYDFKALYKTSKLATKNLDEVIDINF

SEQ ID NO: 91027 - protein, 115 aa, Unknown
  Bacterial polypetide isolated from the Sargasso Sea
MQQEPLLQENKDRFVIFPIKHHDIWEWYKKCEASFWTAEEIDLHQDLNDWSTKLNDDERYFIKHILAFFAASDGIVNENLAENFVNEVQYSEAKFFYGFQIMMENIHSETYSLLI

SEQ ID NO: 91028 - protein, 271 aa, Unknown
  Bacterial polypetide isolated from the Sargasso Sea
RVTKNLNKVIDRNYYPVKEAENSNFRHRPIGLGVQGLADAFIELRMPFTSEKAKELNQDIFETLYFAALQASVEESKKDGPYKTYKGSPISKGEFQHNMWGVKDEELSGRWDWAKLRKDVLKHGVRNSLLVAPMPTASTSQILGNNECFEPYTSNLYTRRVLSGEFIIVNKHLLKDLVELGLWNEDMKHELMRSNGSIQDIKQIPDELKELYKTVWEMSMKDIIDMARHRGYFIDQSQSLNLFMEGATMSKLTSMHFYGWKSGLKTGMYYL

SEQ ID NO: 91029 - protein, 270 aa, Unknown
  Bacterial polypetide isolated from the Sargasso Sea
CALISKTAGGIGMHAHNIRGSGSRIKSTNGKSNGLIPFLKIFNETAKSVDQGGGKRKGSFAIYLEPWHSDIEKFLELRKNTGAEEFRARDLFYALWIPDLFMKRVENDEDWTLMSEHECPGLSNTYGEKFEKLYEKYEKEFPNLEKIKARALMSKIIEAQIETGQPYMLYKDAINIKSNQKNIGVIKSSNLCAEIVEYSDNNETSVCNLASIALPQFIKKSNNKKEYDYKKLYETAKLATKNLDHVIDIIFYPTNKTETSNNKHRPIGLG

SEQ ID NO: 91030 - protein, 299 aa, Unknown
  Bacterial polypetide isolated from the Sargasso Sea
MRKKARGRKTMKAQDLWFKILESQIETGTPYMLYKDSANAKSNQQNLGTIKSSNLCTEIIEYTAPDEVAVCNLASLALPKYVTNEKTFDHDKLFEVTYQATVNLNRIIDENYYPVEEARNSNMRHRPIGLGVQGLADAFILMGFPFESEDARKLNSEIFETIYYASMMASKDLSKEFGPYETYEGSPVSNGAFQFDMWGVTPSNRWEWDLLKKEVKTHGVRNSLLLAPMPTASTAQILGNNECFEPYTSNVYTRRVLSGEFIIVNKHLLKDLVKEGLWNDEMRQRIMAENGSIQNIESV

SEQ ID NO: 91031 - protein, 276 aa, Unknown
  Bacterial polypetide isolated from the Sargasso Sea
KDFNEKMNDNERYFIENVLAFFAASDGIVNENLGERFYNEIQIQEAKFFYGFQIAVENIHSETYSLLIETYVKDNAKKEKLFNAIDTIPSVKKKADWAIKWIDDKDSSLGTRIIAFAAVEGIFFSGSFCSIFWLKKRGLMPGLCHSNELISRDEGLHTEFAVLMYSMLKHKPSKETVYEIIKEAVELEKEFITESLPCNLIGMNMVLMKQYIEYIADRLLLMLGLEKVYHKENPFEWMELISVQGKTNFFEKRVGEYANIAKSNQNDNVFELDEDF

SEQ ID NO: 91032 - protein, 252 aa, Unknown
  Bacterial polypetide isolated from the Sargasso Sea
FFGLKTLERAYLIKVDGKIVERPQHMIMRVCLAIHSDSIKETIKSYKLMSDGIFTHATPTLFNMGTNLQQASSCFLLTMVEDSIDGIYETMKRCALISKSAGGIGCSIHTIRAKGSKIKGTNGVSDGIIPMLKVFNDTACYVNQGGRRNGSFAMYVEPWHADIEDFLMLRRNTGTEEMRARDLFYALWVPDLFMKRVQTDGDWTLMCPNECPKLCDTYGDEFEKLYIQYEAEGRGKKTVKNQKIWKIILDSQ

SEQ ID NO: 91033 - protein, 226 aa, Unknown
  Bacterial polypetide isolated from the Sargasso Sea
QIAIENIHSEMYSLLIDTYIKSPEEKEHLFNAIETIPSVSKKAKWAIKWINDDSSSFAKRVVAFAIVEGIFFSGSFCAIFWLKKRGLMPGLTSSNELISRDEGMHTDFAVEIYKLINNKLDFDTIKEIVQEAVHIEKEFINESIPCKLIGMNSVLMSEYIEFVADRLLLQLGYNKIYNAKNPFDFMEMISLEGKTNFFEKRVMDYSKANIGTSNENKHSFSLDAAF

SEQ ID NO: 91034 - protein, 316 aa, Unknown
  Bacterial polypetide isolated from the Sargasso Sea
LEARKNHGDEELKARDLFYALWIPDYFMKCVHEDGMWHLFCPDKSPGLSDVVGSDFVDLYKKYVNDNNFVKKLKARELWFKILDSQMETGTPYILYKDHANLKSNQQNLGIIKSSNLCCEIIEYSSSTETAVCNLASIALSKFVKDDKSFDYDSLHEVSKQVTVNLNKLIDVNYYPNDKTRRSNMLHRPIGIGVQGLADVFMLMDLSFTSDEGKTLNKYIFETIYHASLEASNELAITRKKTLQQLHDVLLPKDDSFKLKCGLTELHKELCNNISDEELMSKLKLLKDCDINEYKPIYNELLNLSYGHAGSYSTFT

SEQ ID NO: 91035 - protein, 269 aa, Unknown
  Bacterial polypetide isolated from the Sargasso Sea
SNLHKNTKKSFSSTMKDLFEYVNPRTGKKAPLLADEVYEVIKKNAEKIDSNIIYNRDYGYDFFGFKTLERSYLLKLNGKIAERPQHMLMRVSIGIHLDDLDAAFETYELMSKKYFTHATPTLFNAGTPKPQMSSCFLLTMKQDSIDGIYDTLKQTAKISQSAGGIGLSIHNIRATGSYIAGTNGTSNGIVPMLRVFNDTARYVDQGGGKRKGSFAIYVEPWHADIFDFLELKKNHGKEEMRARDLFYAMWTPDLFMKRVEENGQWTLMC

SEQ ID NO: 91036 - protein, 199 aa, Unknown
  Bacterial polypetide isolated from the Sargasso Sea
GGRRNGSFAIYLSPDHPDIEDWLDLKKNTGDENARARDLFYGLWVPDLFMERVHANQEWSLFCPSICPNLDKVYGKDYESLYLEYESNGMANKKVNARELWFKILDAQMETGTPYLLFKDAANLKSNQQNIGTIRSSNLCAEIIEYSDKKETAVCNLASIALSQFVEHKKVPQPTSIKVYSKTKCNFCKMAKALLREFH

SEQ ID NO: 91037 - protein, 110 aa, Unknown
  Bacterial polypetide isolated from the Sargasso Sea
QLPKETVVEIIKDAVEMEKEFVTDALPVKLIGMNAELMCQYIEFVADRLLVELECSRVYNSKNPFDFMDMISLQGKTNFFEKRVAEYQKAGVLKKDEENDKPKFSLDEDF

SEQ ID NO: 91038 - protein, 328 aa, Unknown
  Bacterial polypetide isolated from the Sargasso Sea
YFAFTTLIRAYLLKFENKTIERPQDLWMRVALTVSGDNFNIDKVKETYDSLSNGYYTHATPTLFNSGLKMQQLSSCFLIGMEDDSIEGIFNTIKDCALISKTAGGIGMHAHNIRGSGSRIKSTNGKSNGLIPFLKIFNETAKSVDQGGGKRKGSFAVYLEPWHADIEKFLELRKNTGAEEFRARDLFYALWIPDLFMQRVEDDKDWTLMSEHECPGLSEKYGEEFVKLYEKYEKDMPHLEKINARSLMSKIIEAQIETGQPYMLYKDSINNKSNQKNIGVIKSSNLCAEIVEYSDKSETSVCNLASIALPKFIKKSNKAKTKEYDYKA

SEQ ID NO: 91039 - protein, 284 aa, Unknown
  Bacterial polypetide isolated from the Sargasso Sea
KYEEEGLATATVPAADVWKAILKSQTETGTPYMLYKDSCNRKSNQKNLGTIKSSNLCTEIIEYTDADETSVCNLASIALPKYVNKELKTFDFDKLHEVTKIVTRNLNRVIDRNFYPVETAKRSNMRHRPIGLGVQGLADVFIMCGLPFDCDDSRTLNAHIFETIYHAALEASSELAETDGSYETFEGSPASQGILQPDMWEGKTKFSGRYDWDAMRERVKTKGLRNSLLLAPMPTASTAQILGNNECFEPYTTNIYLRRTLAGEFVVVNNHLVNALKERGLCQK

SEQ ID NO: 91040 - protein, 288 aa, Unknown
  Bacterial polypetide isolated from the Sargasso Sea
KTFDFEKLHAVTKTVTKNLNRVIDRNFYPVETARRSNMKHRPIGLGVQGLADVFILCGLPFDCEDSRTLNAHIFETMYHAALEASSELAEVDGTYESFEGSPASQGILQPDMWEGVTKFSGRYDWDAMRERVKTKGLRNSLLMAPMPTASTAQILGNNECFEPYTTNIYLRRTLAGEFVVVNKHLVEDLKRVGLWSKEMKDLMVKAGGSIQNIVDIPDDIKKLYKTVWEISQKCIIDMATDRGRFIDQSQSMNLFMESPTLSKLSSMHMYAWKAGLKTGMYYLRSKAK

SEQ ID NO: 91041 - protein, 135 aa, Unknown
  Bacterial polypetide isolated from the Sargasso Sea
LLPGLCFSNELISRDEGLHLEFAIELFKMLKYKAQPNTVYEIVKDAVSIEKSFITEALPCSLIGMNSDKMSEYIEYVADRLLKQSGHDKIWNTKNPFDFMENISLDGKTNFFEKRVGDYGKMDEDSTSIEFDEEF

SEQ ID NO: 91042 - protein, 273 aa, Unknown
  Bacterial polypetide isolated from the Sargasso Sea
KISWNYEKNHGDEEMRARDLFYALWIPDLFMKKVEQDDYWYLMCPNMCPGLSDSYGEEFEKLYNTYVNENKYSKRIKARELWFQVLDSQMETGTPYMLYKDSINKKSNQKNIGIIKSSNLCCEITEYSDENETAVCNLASIALPQCVKQKNKLEKNKLLTIYSKTNCKYCNMAKALLKEFNQSYSEINLDDNEKRKSFYKEKSNQEGIEINSVPQLWNGNHYIGGYDKLKKYLFYHFDFEHLQQVTEVITENLNNIIDKNFYPTQKTFISNTT

SEQ ID NO: 91043 - protein, 106 aa, Unknown
  Bacterial polypetide isolated from the Sargasso Sea
MQNKEQNLEPILQENADRFVLFPIEHDDIWQFYKKAEASFWTAEEIDLSQDLKDWGNLNDGERHFIKHVLAFFAASDGIVNENLAEHFVSDVQYTEAKFFYGFQIA

SEQ ID NO: 91044 - protein, 307 aa, Unknown
  Bacterial polypetide isolated from the Sargasso Sea
FPIKHRKVWEMYKKAEASFWTAEEVDLTYDYRDWITLNDNEQHFISHVLAFFAASDGIVLENLCSRFMTDVQLPEARSFYGFQLAIENIHSEMYSLLLDTYIKDSAKKKDLFRAIHTVPTVAKKADWAIRWIGSDASFAERLVGFACVEGIFFSGSFCAIFWLKKRGLMRGLTFSNELISRDEGLHCDFACLLYGMLENPLPENLLHEIVGDAVKIEKEFVCDALSCALVGMNANLMSTYIEFVADRLLVQLGASKLYHAVNPFDWMELISLQGKANFFEHRVDQYQKAGVMHTAEDNHAFRTDCDF

SEQ ID NO: 91045 - protein, 268 aa, Unknown
  Bacterial polypetide isolated from the Sargasso Sea
NFWTAEELDLSTDLNDWVKLNDNEKYFIKNILAFFAASDGIVNENLVERFCQEVQILEAKFFYGFQIAMENIHSETYSLLIDTYIKDVQEKTKLLNAVDHIPSIKKKADWALKWINDDVAPFSHRVVGFAAVEGIFFSGAFCSIFWLKKRGLMPGLCHSNELISRDEGLHTEFAVLMYQNLVDKPKPDIIKEIIINAVSIEKEFITESLSCELIGMNAELMNQYIHYVADRLLLMFGLEKVYHSENPFDWMEMISVQGKTNFFEKRVG

SEQ ID NO: 91046 - protein, 282 aa, Unknown
  Bacterial polypetide isolated from the Sargasso Sea
MDKKELNKEKVNEKIDLNKDLDPNLSVEEPILKENPNRFVLFPIKHSDIWEMYKKQEASFWTAEELDLSPDLADWDNKLNDDERFFIKHVLAFFAASDGIVNENLAENFLSEVQYTEAKFFYGFQVMMENIHSETYSLLIDTYIKETKEKNYLFNAIETFEPVKEKAQWALKWIDNGSFAQRLIAFAAVEGIFFSGSFCSIFWLKKRGLMPGLTFSNELISRDEGLHCDFACMLYNNHLVNQLEKSEVQTIIEQAVAIEKEFITEALPVRLIGMNSDLMSQY

SEQ ID NO: 91047 - protein, 147 aa, Unknown
  Bacterial polypetide isolated from the Sargasso Sea
LKKRGLMPGLTFSNELISRDEGLHTEFATVIYSMLTEKLEKSRLQQIITDAVEIEKEFITESIPCRLIGMNAELMSKYIEFVADRLLVQLGNEKHYNSENPFQFMEMISMEGKTNFFEKRVADYSKANVSANNTGADNDLSFDNEDF

SEQ ID NO: 91048 - protein, 295 aa, Unknown
  Bacterial polypetide isolated from the Sargasso Sea
KGSFAVYLEPWHADIEKFLELRKNTGAEEFRARDLFYALWIPDLFMKRVENDEEWTLMSEHQCPGLSDVYGDEFEKLYTKYENEKNNLEKIKARDLMSKIIEAQIETGQPYMLYKDSINNKSNQKNIGVIKSSNLCAEIVEYSDKNETSVCNLASIALPKFVKKTDKKISYDYDSLYETAKLATKNLDEVIDINFYPTNKTERSNNKHRPIGLGIQGLADVYFKLGISYESEAAKEINKLIFETIYFGALEASCELAKEKGPYKTFANSPISEGKFQFDLWKVKPSSKWDWDTLR

SEQ ID NO: 91049 - protein, 308 aa, Unknown
  Bacterial polypetide isolated from the Sargasso Sea
CAQISQSAGGIGFSIHDIRATGSYIKGTNGTSNGIVPMLRVFNDTARYVDQGGGKRKGSFAIYVEPWHADIFDFLDLRKNHGKEEQRARDLFYALWIPDLFMQRVEENGDWTLMCPNECPGLADVHGKDFEKLYKKYESDGKGRKSIKAQELWFKILESQIETGTPYMLYKDAANEKSNQKNLGTIKSSNLCTEIIEYTAPDEVAVCNLASIALPKFVIDGNFDHEKLFKVAYRVTKNLDKVIDANYYPVAEARNSNMRHRPIGIGVQGLADTFILLRQAFESPEAKQLNKDIFETIYYAALTAPKDL

SEQ ID NO: 91050 - protein, 216 aa, Unknown
  Bacterial polypetide isolated from the Sargasso Sea
MEVIKRCGKTEPIYFDKITVRIKKLCTDKELKILDIPMVVQKTISNIYNKIKTSELDILSANICASLIILHPLYGNLAAKISISNLHKETDNSFFNTISKLYNNESSLITKEVYDIVNNNKEKLETIINYKNDYNYTFFGLKTLERSYLLKINNTIIERPQHMLLRVSLGIHKNNIDKVIETYNNMSIGNFIHASPTLFNSGTKFNQLSSCFLLGT

SEQ ID NO: 91051 - protein, 304 aa, Unknown
  Bacterial polypetide isolated from the Sargasso Sea
ARSYIRGSGSRIKSTNGKSNGLIPFLKIFNETAKSVDQGGGKRKGSFAVYLEPWHADIEKFLELRKNTGAEEFRARDLFYALWIPDLFMKRVENDEEWTLMSEHECPGLSDVYGDDFEKIYTKYENEKKHLEKIKARDLMSKIIEAQIETGQPYMLYKDSINNKSNQKNIGVIKSSNLCAEIVEYSDKNETSVCNLASIALPKFIKRTEKKASYDYDALYETAKLATKNLDEVIDINFYPTDKTERSNNKHRPIGLGIQGLADVYFKLGIGYESEEAKEINKLIFETIYFGALEASCELAKEKG

SEQ ID NO: 91052 - protein, 59 aa, Unknown
  Bacterial polypetide isolated from the Sargasso Sea
RLLTQLGCTKEYKSANPFDFMEMISLEGKTNFFEKRVGDYSLVSDTKSAAVFDMSNIEF

SEQ ID NO: 91053 - protein, 250 aa, Unknown
  Bacterial polypetide isolated from the Sargasso Sea
IINKEIWDLYKGHLAVFWTVEEVQLAKDVIDWEEKLTDNERQFITNILAFFAASDAVVADNLQLNFSEEIDIKEAKYFFRFQAMIEDIHSEMYSRMIEAFIKDENERDKIFNAVLYYPCIKKKSEWGKKWTDPAKNTIAVRLLAFALIEGVHFSGAFCAIFWLKKRNLMPGLTFSNEFISRDEGLHAQFGTYMFRKCKVTPSQEKVYEIVREAVEIEKEFITESIPCALLGMNSELMKQYIDFVADRLLV

SEQ ID NO: 91054 - protein, 173 aa, Unknown
  Bacterial polypetide isolated from the Sargasso Sea
MTLTNDFIEPILKENKDRFVVFPIKYNDIWKMYKKAEASFWTTEEIDLGQDLEDWSKLNDKEKHFIKHVLAFFAASDGIVNENLATEFYDEVQYPEARCFYGFQIAIENIHSETYSLLIDTYIDDEKEKDKLFRAIDTVPCVQKKAEWALKWINNTNSFAERVIAFAAVEGIF

SEQ ID NO: 91055 - protein, 315 aa, Unknown
  Bacterial polypetide isolated from the Sargasso Sea
YSTFTHATPTLFNAGTPRPQLSSCFLLSMTDDSIDGIFNTLKECAQISKWAGGIGLHVHNIRAKGTQIRGTNGTSNGLVPMLKVFNDTARYVDQGGGKRNGSFAIYLDPIHPDVEEFLELKKNHGDEESKARDLFYALWIPDLFMKKVEKNDSWCLFCPDQCPGFSDAVGDKYEELYNKYEAEEKYVKKIQARELWFKILDSQMETGTPYLLYKDACNLKSNQQNLGVIKSSNLCTEIVEYSSPEESAVCNLASVALSKFVKDTKEFDYDNLHKVVKIMTRNLNKIIDINYYPTDKTKRSNFLHRPIGIGVQGLA

SEQ ID NO: 91056 - protein, 333 aa, Unknown
  Bacterial polypetide isolated from the Sargasso Sea
DSIDGIYDTLKQTAKISQSAGGIGLSIHNIRSTGSYISGTNGTSNGIVPMLRVFNDTARYVDQGGGKRKGSFAIYIEPWHSDIYDFLDLKKNHGKEEMRARDLFYAMWIPDLFMKRVENNEEWTLMCPNECPGLYDCHGDEFDKLYLKYEKQSKGRKSIKARELWEKILESQIETGTPYMLYKDSANRKSNQKNLGTIRSSNLCTEILEYTSKDEIAVCNLASIALPMFVEDGKFNHQKLYDVTVRVTKNLNKVIDRNYYPVKEAENSNFRHRPVGLGVQGLADAFILLRMPFTSDEAKELNQEIFETIYYAALNASVEEAKKDGVYESYKGS

SEQ ID NO: 91057 - protein, 278 aa, Unknown
  Bacterial polypetide isolated from the Sargasso Sea
MLSLYLQPKYDFNALKEAAKATCINLNKIIDINYYPIPEAKLSNLKHRPIGIGVQGLADTYFKMRFPFESDEAHNLNKEIFETIYFGALEASMELSKNREEQILNYFKNESNDIKDSSLAYKADDTFNHFSEDIEREYAIGSYHTFIGSPLSQGKFQFDLWNKKPSDRWDWNELRQQIIKYGVRNSLVTALMPTASTSQILGNNECFEPNTSNMYTRRTQAGIFKMINKYLINDLKNYGIWSNDLKQKIIYDNGSVQNLDIPNELKDLYKIVWEIKQK

SEQ ID NO: 91058 - protein, 169 aa, Unknown
  Bacterial polypetide isolated from the Sargasso Sea
AERLISFAAVEGIFFSGSFCSIFWLKKRGLMPGLTFSNELISRDEGLHCDFACMLYNNHLVNKLPKEEVQKIIADAVEIEKEFVTESLPVRLIGMNADLMSQYIEFVADRLLVELGNDKIYNTSNPFDFMDMINLQGKTNFFEKRVGEYQKAGVLNQENNTTFSLDSDF

SEQ ID NO: 91059 - protein, 213 aa, Unknown
  Bacterial polypetide isolated from the Sargasso Sea
MSKVFTDPLLTVDDNRYVMFPIKNEEIWTMYKKALESFWRCEEVDLAKDNVDWESLTSNEQYFIKMILAFFAASDGIVLENLAGRFMNDVQLSEARAFYGFQIAMENIHSEMYSLLIETYVKDREEKTKLFEALDNFPCIKKKADWAIKWINDKRANFATRLIAFACVEGIFFSGAFCSIFWLKKRGLMPGLTFSNELISRDEALHTEFAIML

SEQ ID NO: 91060 - protein, 244 aa, Unknown
  Bacterial polypetide isolated from the Sargasso Sea
GIFNTIKDCALISKTAGGIGMHAHNVRGSGSRIKSTNGKSNGLIPFLKIFNETAKSVDQGGGKRKGSFAVYLEPWHSDIEKFLELRKNTGAEEFRARDLFYALWIPDLFMKRVENDEEWTLMSEHQCPGLSNVYGDEFEKLYTKYENEQKNLEKIKARDLMSKIIEAQIETGQPYMLYKDSINKKSNQKNIGVIKSSNLCAEIVEYSDKNETSVCNLASIALPKFVKKTDRKLSYDYQALYETA

SEQ ID NO: 91061 - protein, 473 aa, Unknown
  Bacterial polypetide isolated from the Sargasso Sea
SKETPDYQYMAARLAVFHLRKKAYGQFEPPKLYDHVVKMVEEKRYDAHILADYSKEELEQLDSFIVHSRDLDFSYAAVKQLEGKYLVQNRVTGQIYESAQFLYMLVAACLFANYPKDTRLSYVRRFYDAVSKFKISLPTPIMSGVRTPTRQFSSCVLIECGDSLDSINATSSAIVKYVSQRAGIGINAGRIRALGSPIRNGEAFHTGCIPFYKHFQTAVKSCSQGGVRGGAATLFYPLWHLEVESLLVLKNNRGVEENRVRHLDYGVQFNRLMYTRLIKDEMITLFSPSDVPGLYDAFFEDQEKFEELYVKYEADASIRKKRIKAVELFTLFMQERASTGRIYLQNVDHCNTHSPFNPKFASVRQSNLCLEIALPTKPLNDINDPNGEIALCTLSAFNLGAIEHLDELEELAELAVRALDSLLDYQDYPILAAYHASMNRRTLGIGVINYAYYLAKNGVKYSDGSANGLTHRT

SEQ ID NO: 91062 - protein, 389 aa, Unknown
  Bacterial polypetide isolated from the Sargasso Sea
FNSGLKMQQLSSCFLIGMEEDSIEGIFNTIKDCALISKTAGGIGMHAHNIRGSGSRIKSTNGKSNGLIPFLKIFNETAKSVDQGGGKRKGSFAVYLEPWHADIEQFLELRKNTGAEEFRARDLFYALWIPDLFMKRVEEDGDWTLMSEHECPGLSDKFGDGFVALYEKYEKEIPNLEKIKARDLMSKIIEAQIETGQPYMLYKDSINNKSNQKNIGVIKSSNLCAEIVEYSDKSETSVCNLASIALPKFVKKTKNKKSKEYDYKALYKTAKLATKNLDEVIDINFYPTEKTETSNSKHRPIGLGIQGLADVFFELDIAYDSEEAKNINTLIFETIYFGALEASHELAKEKGMYSTFKGSPLSEGKFPFDMWNTKPSDMWDWETLREKIK

SEQ ID NO: 91063 - protein, 325 aa, Unknown
  Bacterial polypetide isolated from the Sargasso Sea
MKPEPILEENKNRFVIFPIEHHDLWEWYKKCEASFWTAEEIDLHQDLTDWKTKLNDDERYFIKHILAFFAASDGIVNENLAENFVNEVQYSEAKFFYGFQIMMENIHSETYSLLIDTYVKDEKEKDVLFKAIDNFPAIKKKADWALKWVESDSFAERLIAFAGVEGIFFSGAFCSIFWLKKRGVMPGLTFSNELISRDEGVHCDFAVHLHNEHIVNKVPKERIREILVDALNIEREFITESLPISLIGMNAKLMTQYLEFVTDRLLVEFQCEKEFNVTNPFDFMDMINLQGKTNFFEKRVSEYQKAGVLNKEKKDDSKISFDDEF

SEQ ID NO: 91064 - protein, 824 aa, Unknown
  Bacterial polypetide isolated from the Sargasso Sea
MYVLKRDGRKEPIMFDKITARIKKLCYGFNPLVDPVRVAMRVIEGLYDGVTTSELDNLAAEIAATMTTTHPDYASLAARISVSNLHKNTLKSFSETMKDLYEYVNPITGKKAPLLSDEVYKVIKKNAEELDSKIIYNRDFGYDYFGFKTLERSYLLKINGQIVERPQHMLMRVSVGIHLDDLEAVIDTYELMSKKYFTHATPTLFNSGTPKPQMSSCFLLTMQDDSIDGIYDTLKQTAKISQSAGGIGLSIHNIRSTGSYISGTNGTSNGIVPMLRVFNDTARYVDQGGGKRKGSFAIYIEPWHSDIFDFLDLKKNHGKEEMRARDLFYAMWVPDLFMKRVEENAEWTLMCPNECPGLYDCHGDEFDKLYLKYEKKSKGRKTIKARELWEKILESQIETGTPYMLYKDSANRKSNQKNLGTIRSSNLCTEILEYTSKDEIAVCNLASIALPMFVEDGEFNHKKLYDVTVRVTKNLNKVIDRNYYPVKEAENSNFRHRPIGLGVQGLADAFIELRMPFTSEKAKELNQDIFETLYFAALQASVEESKKDGPYKTYKGSPISKGEFQHNMWGIKDEELSGRWDWAKLRKDVLKHGVRNSLLVAPMPTASTSQILGNNECFEPYTSNLYTRRVLSGEFIIVNKHLLKDLVDLNLWNEDMKHELMRSNGSIQDIKQIPDELKELYKTVWEMSMKDIIDMARHRGYFIDQSQSLNLFMEGATMSKLTSMHFYGWKSGLKTGMYYLRTKSAVDAIKFTLEKKEKAEVEETVEVEAVETVEAAEEVKITRTEKTKAKKSKEKPVAVEPLTPEELKQIISQSKENEDDDCLM

SEQ ID NO: 91065 - protein, 307 aa, Unknown
  Bacterial polypetide isolated from the Sargasso Sea
VMFPIADDNIWQMYKKMMDCFWRAEEIDLSKDPAHWEKLNDDEKHFIKMILAFFAASDGIVLENLGERFLCEVQLPEARAAYGFQLMMENVHSETYSLLIDTLIKDETEKTKLFKALENYPCIKKKADWAIKWIEDKRSGFATRLIAFACVEGIFFSGAFCSIYWLKKRGIMPGLTFSNELISRDEGMHTDFAVLLFKTLHNKTKKAKIFEIIKEAVEIEKEFITEALPCKLIGMNQKLMKQYIEFVADRLVVQLGYNKIYKTSNPFDFMEMISLEGKTNFFEKRVGDYSLSSGQKSDKAFAIDDCF

SEQ ID NO: 91066 - protein, 434 aa, Unknown
  Bacterial polypetide isolated from the Sargasso Sea
TLIRAYLLKFENKTIERPQDLWMRVALTVSCDNFDYNKVKETYESLSNGLYTHATPTLFNSGLKMQQLSSCFLIAMEEDSIEGIFNTIKDCALISKTAGGIGMHAHNIRGSGSRIKSTNGKSNGLIPFLKIFNETAKSVDQGGGKRKGSFAVYLEPWHADIEKFLELRKNTGAEEFRARDLFYALWIPDLFMKRVEEDKDWTLMSEHECPGLSDKYGKDFETLYEKYEKEFPHLEKIKARSLMSKIIEAQIETGQPYMLYKDSINKKSNQKNIGVIKSSNLCAEIVEYSDGKETSVCNLASIALPQFIKKINNKKEYDYQKLYETAKLATKNLDQVIDINFYPTNKTETSNNKHRPIGLGIQGLADVYFKMNLPYDSEKAKEINKLIFETIYFGALEASCELAKEKGVYSTFKGSPISEGNFQFDLWNTEPSNM

SEQ ID NO: 91067 - protein, 377 aa, Unknown
  Bacterial polypetide isolated from the Sargasso Sea
KAVPGLYNDITSIEIDTYLAETAASLTVEHPDYSYLAARIKANSLHKETPGFIIATKNLFDDGLLRDDYYNKVMANAEEIESIIDYDRDYNFDYFAFTTLVRAYLLKFENKTIERPQDLWMRVALTVSCDSFDLEKVKRTYYSLSNGFYTHATPTLFNSGLKMQQLSSCFLIGMEDDSIDGIFNTIKDCALISKTAGGIGMHAHNIRASGSRIKSTNGKSNGLIPFLKIFNETAKSVDQGGGKRKGSFAVYLEPWHADIEKFLELRKNTGAEEFRARDLFYALWIPDLFMKRVESDDDWTLMSEHECPGLSDKYGKDFEELYEKYEKELPHLEKIKARALMSKIIEAQIETGQPYMLYKDSINNKSNQKNIGVIKSS

SEQ ID NO: 91068 - protein, 376 aa, Unknown
  Bacterial polypetide isolated from the Sargasso Sea
MTYSTFCQTPNDATREPMFFGQSVNVARYDQQKYEVFEKLIEKQLSFFWRPEEVDVSRDKIDYNSLPDHEKHIFISNLKYQTLLDSIQGRSPNVAFLPLVSLPELETWIETWSFSETIHSRSYTHIIRNIVNDPSVIFDDIVVNHEILRRATDIAEFYDHLIKLTQTYHLLGEGTHVIDGEPLEVNTRTLKKALYLCMMSVNALEAIRFYVSFACSFAFAERKLMEGNAKIIRLIARDEALHLNSTQHILTIMQGGKDDPEMAEIAAECQQEAYNLFLKAAEQEKEWAKYLFKDGSMIGLNEQILCQYVEYITNQRMKSVNLPLPYAEQTNPLPWMKNWLESDAVQVAPQEVEVSSYLVGQIDAAVDSDEFLDFDL

SEQ ID NO: 91069 - protein, 762 aa, Unknown
  Bacterial polypetide isolated from the Sargasso Sea
MNSNMTVTKRCGARETIDLDKIHRVITWAAKGLKNVSVSEVELRTHLQFFDGIPTEAIHETIIKSAADLISPESPDYQFLAARLAVFHLRKKAFGQFEPPKLYDHVTKLVELGKYDMHILQDYTREELDIMDTYIDHWRDMNFSYAAVKQLEGKYLVQNRVTHEIYESAQFLYILVAACLFARYPKATRLQYVKDFYDAVSTFKISLPTPIMAGVRTPTRQFSSCVLIECGDSLDSINATASSIVKYVSQRAGIGINAGRIRALGSPIRGGEAFHTGCLPFYKYFQTAVKSCSQGGVRGGAATLFYPIWHLEVESLLVLKNNRGVEDNRIRHLDYGVQLNKLMYQRLIKGENISLFSPSDVPGLYDAFFEDQAEFERLYLQYEQDSSIRKKTLKAVDLFSLMMQERASTGRIYIQNVDHCNTHSPFDSKVAPIRQSNLCLEIALPTKPLNNIDDPNGEIALCTLSALNLGTITDLAELEPLADLAVRALDNLLDYQDYPIKAAQISSMNRRTLGIGVINFANYLAKNGMKYSDGSANNLTHKTFEAIQFYLLKASMNLAKEKGACPLFNETTYAQGILPIDTYKRDLDKICSEPLHLDWEALRNDIKEYGLRNSTLSALMPSETSSQISNATNGIEPPRGLISVKASKDGQLKQVVPDFDELKYNYELLWQMPSNEGYLQLVGIMQKFVDQAISANTNYDPARFEGRKVPMQTLLKDLLNAYKLGVKTLYYHNTRDGASDQHDDITNIEKEDDGCAGGACKI

SEQ ID NO: 91070 - protein, 248 aa, Unknown
  Bacterial polypetide isolated from the Sargasso Sea
RWDWKKLRKDVLKHGVINSLLVAPMPTASTSQILGNNECFEPYTSNIYTRRVLSGEFIIVNKHLLNDLVELGLWSEDMKQDLMAANGSIQDIEGIPDDLKELYKTVWEMSMKDIIDMARHRGFFIDQSQSLNLFMEGATMSKLTSMHFYAWKSGLKTGMYYLRTKSAVDAIKFTLKKKESVPEKTEEIKLEAETEEVGEVQITRTEKAAKTKSKEKPVAVEPLTPEELKQIISQSKENEDDDCLMCGS

SEQ ID NO: 91071 - protein, 457 aa, Unknown
  Bacterial polypetide isolated from the Sargasso Sea
MNNNLLVTKRNGEKESIDLEKIHKVVTWAAKGLKNVSVSQVEIKAQIQFYDGINTSEIHETLIKSAADLISTDAPDYQYLAARLAIFHLRKKAYGQFEPPALLEHVGKMVDMGKYDKHLLEDYTPEEFAEMDTYIDHWRDMNFSYAAVKQLEGKYLVQNRVTGEIYESAQFLYILVAACLFANYDKATRMDYIRRFYDAASTFKLSLPTPIMAGVRTPTRQFSSCVLIETGDSLDSINATASAIVKYVSQRAGIGVNAGRIRALGSPIRGGEAFHTGCIPFYKYFQTAVKSCSQGGVRGGAATLFYPIWHMEVESLLVLKNNRGVEENRVRHLDYGVQFNKLMYQRMMKDGYISLFSPSDVPGLYDAFFADQEKFEELYVKYENDDSIRKKQIKAMELFSLFMQERASTGRIYLQNVDHCNTHSPFNPEVAPVRQSNLCLEIALPTKPLQHVNDENG

SEQ ID NO: 91072 - protein, 560 aa, Unknown
  Bacterial polypetide isolated from the Sargasso Sea
MADNLQVSAKISEEKSVNILTLSVVRRDGAITPFKSDKISNAIKKAFLAQTKIRNDKNKEKEQQDGIHKTVEALTHKVVSALTRRIADGDMIHIEDIQDQVELALMRDEHHKVARAYVLYREQRAASRYHTKKLKEQVGEKASSMMVTKRDGSKEPISLDKITNRVSVLSTGLNIDPIVVVQKAVPGLYSDISSVEIDTYLAETAAALTVEHPDYSYLAARIKVNSLHKETPGFIIATKNLYDDGLLREEYYKKVMENADLIESIIDYDKDYTFDYFALTTLIRAYLLKFDNKTIERPQDLWMRVTLTVTGSEFNLDKIKETYKSLSTGMYTHATPTLFNSGLKMQQLSSCFLIGMEDDSIEGIFNTIKDCALISKTAGGIGMHAHNIRGSGSRIKSTNGKSNGLIPFLKIFNETAKSVDQGGGKRKGSFAVYLEPWHADIEKFLELRKNTGAEEFRARDLFYALWIPDLFMKRVENDEEWTLMSEHECPGLSDVYGDEFEKLYTKYENEMKHLEKIKARDLMSKIIEAQIETGQPYMLYKDSINNKSNQKNIGVIKSSN

SEQ ID NO: 91073 - protein, 473 aa, Unknown
  Bacterial polypetide isolated from the Sargasso Sea
MNLFVTKRNGHKEPIDLDKIHRVLDWAAEGLDNVSVSQVELKSHIQFYDGIRTADIHETVIKAAADLISEQSPDYQYMAARLAIFHLRKKAYGQFEPPHLYQHVAKLVDMGKYDKHLLEDYSQAEFEELNQHLDHWRDMDFSYAAVKQLEGKYLVQNRVTGEIYESPQFLYILVAACLFSKYPKDTRLDYIKRFYDAVSTFKISLPTPIMSGVRTPTRQFSSCVLIECDDSLDSINATASAIVRYVSQRAGIGINAGRIRGLGSPIRGGEAFHTGCIPFYKYFQTAVKCCSQGGVRGGAATLFYPLWHTEVESLLVLKNNRGVEENRVRHMDYGVQINKLMYQRLIKGGDITLFSPSDAPGLYDAFFADQDKFEALYVKYEQDPSIRKKTLKAVDLFSLMMQERAGTGRIYIQNVDHCNTHSPFDPSVAPVRQSNLCLEIALPTKPLNNVDDEEGEIALCTLSAFNLGAIEKL

SEQ ID NO: 91074 - protein, 762 aa, Unknown
  Bacterial polypetide isolated from the Sargasso Sea
MNSNMTVTKRCGARETIDLDKIHRVITWAAKGLKNVSVSEVELRTHLQFFDGIPTEAIHETIIKSAADLISPESPDYQFLAARLAVFHLRKKAFGQFEPPKLYDHVTKLVELGKYDMHILQDYTREELDIMDSYIDHWRDMNFSYAAVKQLEGKYLVQNRVTHEIYESAQFLYILVAACLFARYPKETRLQYVKDFYDAVSTFKISLPTPIMAGVRTPTRQFSSCVLIECGDSLDSINATASSIVKYVSQRAGIGINAGRIRALGSPIRGGEAFHTGCLPFYKYFQTAVKSCSQGGVRGGAATLFYPIWHLEVESLLVLKNNRGVEDNRIRHLDYGVQLNKLMYQRLIKGENISLFSPSDVPGLYDAFFEDQDEFERLYLQYEQDSSIRKKTLKAVELFSLMMQERASTGRIYIQNVDHCNTHSPFDSKVAPIRQSNLCLEIALPTKPLNNIDDPNGEIALCTLSALNLGAIKNLAELEPLADLAVRALDNLLDYQDYPIKAAEISSMNRRTLGIGVINFANYLAKNGMKYSDGSANNLTHKTFEAIQFYLLKASMNLAKEKGACPLFNETTYAQGILPIDTYKRDLDKICSEPLHLDWETLRQDIKQHGLRNSTLSALMPSETSSQISNATNGIEPPRGLISVKASKDGQLKQVVPDFDELKYNYELLWQMPSNEGYLQLVGIMQKFVDQAISANTNYDPTRFEGRKVPMQTLLKDLLNAYKLGVKTLYYHNTRDGASDQHDDITNIEKEDDGCAGGACKI

SEQ ID NO: 91075 - protein, 376 aa, Unknown
  Bacterial polypetide isolated from the Sargasso Sea
MTYSTFCQTPNDATREPMFFGQSVNVARYDQQKYEVFEKLIEKQLSFFWRPEEVDVSRDKIDYNSLPDHEKHIFISNLKYQTLLDSIQGRSPNVAFLPLVSLPELETWIETWSFSETIHSRSYTHIIRNIVNDPSVIFDDIVVNQEILRRATDIAEYYDHLIKLTQVYHLLGEGTHVIDDEPIEVNTRTLKKALYLCMMSVNALEAIRFYVSFACSFAFAERKLMEGNAKIIRLIARDEALHLNSTQHILTIMQGGKDDPEMAEIAAECQQEAYNLFLKAAEQEKEWAKYLFKDGSMIGLNEQILCQYVEYITNQRMKSVNLPLPYAEQSNPLPWMKNWLESDAVQVAPQEVEVSSYLVGQIDSAVDSDEFLDFDL

SEQ ID NO: 91076 - protein, 225 aa, Unknown
  Bacterial polypetide isolated from the Sargasso Sea
MQQEPLLQENKDRFVIFPIKHHDIWEWYKKCEASFWTAEEIDLHQDLNDWSTKLNDDERYFIKHILAFFAASDGIVNENLAENFVNEVQYSEAKFFYGFQIMMENIHSETYSLLIDTYVKDDKEKDTLFKAIENFPAIKKKADWALKWIESDSFAERLIAFAGVEGVFFSGSFCSIFWLKKRGLMPGLTFSNELISRDEGVHCDFAVHLHNNHMINKVPKERIKK

SEQ ID NO: 91077 - protein, 269 aa, Unknown
  Bacterial polypetide isolated from the Sargasso Sea
RREIFYQTILAFFAASYGIVNENLAENFVNEVQYSEAKFFYGFQIMMENIHSETYSLLIDTYVKDDKEKDTLFKAIENFPAIKKKADWALKWIESDSFAERLIAFAGVEGIFFSGSFCSIFWLKKRGLMPGLTFSNELISRDEGVHCDFAVHLHNNHIINKVQKERIKEILIDALNIEREFITESLPVSLIGMNAKLMTQYLEFVTDRLLDQFGCEKEFNVSNPFDFMDMINLQGKTNFFEKRVSEYQKAGVLNNDKKEESNFDLDDDF

SEQ ID NO: 91078 - protein, 826 aa, Unknown
  Bacterial polypetide isolated from the Sargasso Sea
MYVIKRDGRKEPIMFDKITARIKKLCYGFNELVDPVRVAMRVIEGLYDGVTTSELDNLAAEIAATMTTTHPDYASLAARISVSNLHKNTTKSFSDTMKDLHAYVNPITGKKAPLLSDEVYKVIKKNAELLDSKIIYNRDFGYDYFGFKTLERSYLLKINGNIVERPQHMLMRVSVGIHLDDIDAVIDTYELMSKKYFTHATPTLFNAGTPKPQMSSCFLLTMQDDSIDGIYDTLKQTAKISQSAGGIGLSIHNIRSTGSYISGTNGTSNGIVPMLRVFNDTARYVDQGGGKRKGSFAIYIEPWHSDIYDFLDLKKNHGKEEMRARDLFYAMWIPDLFMKRVENNEEWTLMCPNECPGLYDCHGDEFDKLYLKYEKQSKGRKSIKARELWEKILESQIETGTPYMLYKDSANRKSNQKNLGTIRSSNLCTEILEYTSKDEIAVCNLASIALPMFVEDGKFNHQKLYDVTVRVTKNLNKVIDRNYYPVKEAENSNFRHRPVGLGVQGLADAFILLRMPFTSDEAKELNQEIFETIYYAALNASVEEAKKDGVYESYKGSPISKGEFQHNMWGVEDDDLSGRWDWKKLRKDVLKHGVRNSLLVAPMPTASTSQILGNNECFEPYTSNIYTRRVLSGEFIIVNKHLLNDLVELGIWSEDMKQDLMAANGSIQDIEGIPDDLKELYKTVWEMSMKDIIDMARHRGFFIDQSQSLNLFMEGATMSKLTSMHFYAWKSGLKTGMYYLRTKSAVDAIKFTLKKKESVPEKTEEIKLEAETEEVGEVQITRTEKAAKTKSKEKPVAVEPLTPEELKQIISQSKENEDDDCLMCGS

SEQ ID NO: 91079 - protein, 458 aa, Unknown
  Bacterial polypetide isolated from the Sargasso Sea
QQKNLFDDGLLREDYYNKVMASAEDIESIIDYDRDYNFDYFAFTTLTRAYLLKFENKTIERPQDLWMRVALTVSGNSFNFDKVKETYDSLSNGYYTHATPTLFNSGLKMQQLSSCFLIGMEDDSIEGIFNTIKDCALISKTAGGIGMHAHNIRGSGSRIKSTNGKSNGLIPFLKIFNETAKSVDQGGGKRKGSFAVYLEPWHADIEQFLELRKNTGAEEFRARDLFYALWIPDLFMKRVEEDGDWTLMSEHECPGLSDNYGDEFVSLYEKYEREMPNLEKIKARELMSKIIEAQIETGQPYMLYKDSINKKSNQKNIGVIKSSNLCAEIVEYSDKSETSVCNLASIALPKFVKKTKNKKNKEYDFKALYKTAKLATKNLDEVIDINFYPTDKTEISNSKHRPIGLGIQGLADVFFELEIAYDSEEAKKINKLIFETIYFGALEASHELAREKGGLFYL

SEQ ID NO: 91080 - protein, 499 aa, Unknown
  Bacterial polypetide isolated from the Sargasso Sea
MSDNSQVSAKIKNNNEINLLSLSVVRRDGSIAQFKSEKIFNAIKKAFLAQTKIRNNKEKDNEQTSSIHKTIEVLTDKVVTALTRRIADGDMIHIEDIQDQVELALMRDEHHKVARAYVLYREQRAASRYHTKKLKEQIGVKVSSMMVTKRDGTKEPVSLDKITNRVSVLSTGLSIDPIVVAQKAIPGLYNDITSTEIDNYLAETSAALTVEHPDYSNLAARIKSNALHKLTPGFVIATKNLFEDGLLHESYYNKVIQNAEEIESIIDYDRDYSFDYFALTTLIRAYLLKFENQTIERPQDLWMRVALTVSGKEFNLSKLKETYDSLSNGLYTHATPTLFNSGLKMQQLSSCFLIGMEDDSIEGIFNTIKDCALISKTAGGIGMHAHNIRGSGSRIKSTNGKSNGLIPFLKIFNETAKSVDQGGGKRKGSFAIYLEPWHADIEKFLELRKNTGAEEFRARDLFYALWIPDLFMQRVENDEDWTLMREHECPGLSDSYGKS

SEQ ID NO: 91081 - protein, 836 aa, Unknown
  Bacterial polypetide isolated from the Sargasso Sea
MADNLQVSAKIPEEKSVNILTLSVVRRDGAITPFKSDKISNAIKKAFLAQTKIRNDKNKEKEQQDGIHKTVEALTHKVVSALTRRIADGDMIHIEDIQDQVELALMRDEHHKVARAYVLYREQRAASRYHTKKLKEQVGEKASSMMVTKRDGSKEPISLDKITNRVSVLSTGLNIDPIVVVQKAVPGLYSDISSVEIDTYLAETAAALTVEHPDYSYLAARIKVNSLHKETPGFIIATKNLYDDGLLREEYFKKVMENADAIESIIDYDKDYTFDYFALTTLIRAYLLKFDNRTIERPQDLWMRVTLTVTGNEFNLDKIKETYKGLSSGVYTHATPTLFNSGLKMQQLSSCFLIGMEDDSIEGIFNTIKDCALISKTAGGIGMHAHNIRGSGSRIKSTNGKSNGLIPFLKIFNETAKSVDQGGGKRKGSFAVYLEPWHADIEKFLELRKNTGAEEFRARDLFYALWIPDLFMKRVENDEEWTLMSEHECPGLSDVYGDEFEKLYTKYENEMKHLEKIKARDLMSKIIEAQIETGQPYMLYKDSINNKSNQKNIGVIKSSNLCAEIVEYSDKNETSVCNLASIALPKFVKKSDKKLIYDYDALYETAKLATKNLDEVIDINFYPTDKTERSNNKHRPIGLGIQGLADVYFKLGIPYESEEAKEINKLIFETIYFGALEASCELAKEKGAYETFKNSPISEGKFQFDLWNVNPSSKWDWDSLRAKIKEHGVRNSLTTACMPTASTGIILGNTETFQIQTSNIYKRQTLSGEFLLVNRYLVNELSQRGLWNKEMRDKIILENGSVENINEIPAELKEIYKTVWEVSQKTVIDMSADRAP

SEQ ID NO: 91082 - protein, 312 aa, Unknown
  Bacterial polypetide isolated from the Sargasso Sea
MLLPTMNRFTVFPIEHENLWSMYKKAQMSNWTAEEVDVSADMEDWKNMSENERHFVKYILAFFAGSDGIVFENINNNFADEVQLTEARSFYAYQVHNEMVHGETYSKLIDKYIRDSGEKKRLFEAITTIDPIKKKAEWAMKWFDNSRPFSERLLAFACVEGIFFSGSFCAIFWLKKRGLMPGLCFSNELISRDEGLHLEFAIELFKMLKNKPSQDVVHNIVREAIEIEKSFIIEALPCSLIGMNAEKMSDYIEYVSDRLLKQAGFNKIWNTQNPFDFMENISLDGKTNFFEKRVGDYGKIDESTDVTFDEDF

SEQ ID NO: 91083 - protein, 717 aa, Unknown
  Bacterial polypetide isolated from the Sargasso Sea
MFVVKRDGHKEPVMFDKITARIKKLCYSLNPLVDPVRVSMRVIEGLYDGVTTSELDNLAAEVAATMTTTHPDYANLASRISVSNLHKNTKKSFSQTMDDLYNYVNPRTNKKAPLLSDEVYKVIKKNAEKLDSTIIYNRDFNYDYFGFKTLERSYLLKLNGVTVERPQHMLMRVSIGIHLDDLDAAIETYTLMSKKYFTHATPTLFNSGTPKPQLSSCFLLTMQDDSIDGIYNTLKQTAKISQSAGGIGLSIHNIRATGSYIAGTNGTSNGIVPMLRVFNDTARYVDQGGGKRKGSFAIYIEPWHSDIFDFLELKKNHGKEEMRARDLFYAMWIPDLFMKRVESNEEWTLMCPNECPGLYDTHSEEFEKLYLKYEKDQKGRKTIKARELWEKILEAQIETGTPYMLYKDACNRKSNQKNLGTIRSSNLCTEILEYTSKDEIAVCNLASIALPMFVKNNSFDHKELFKVTKRVTKNLNKVIDRNYYPVKEAENSNFRHRPIGLGVQGLADTFIKLRMPFTCDDAKTLNQEIFETIYFAALTASMEEAIKEGAYKSYKGSPISKGEFQHNMWGIKDDELSGRWDWDGLRKEIKKNGVRNSLLVAPMPTASTAQILGNNECFEPYTSNIYTRRVLSGEFIVVNKHLLEDLVKLGLWTEELKQELMKANGSIQHIDGIPEDIKELYRTVWELKMKDVIDMARHRGYFIDQSQSLNLFMEGAT

SEQ ID NO: 91084 - protein, 526 aa, Unknown
  Bacterial polypetide isolated from the Sargasso Sea
LIRAYLLKFDNKTIERPQDLWMRVTLTVTGNEFNLDKIKETYKSLSTGMYTHATPTLFNSGLKMQQLSSCFLIGMEDDSIEGIFNTIKDCALISKTAGGIGMHAHNIRGSGSRIKSTNGKSNGLIPFLKIFNETAKSVDQGGGKRKGSFAVYLEPWHSDIEKFLELRKNTGAEEFRARDLFYALWIPDLFMKRVENDEEWTLMSEHECPGLSDVYGDEFEKLYTKYENELKHLEKIKARDLMSKIIEAQIETGQPYMLYKDSINNKSNQKNIGIIKSSNLCAEIVEYSDKNETSVCNLASIALPKFVKKSDKKLVYDYDALYETAKLATKNLDEVIDINFYPTDKTEKSNNKHRPIGLGIQGLADVYFKLGIAYESEEAKEINKLIFETIYFGALEASCELAKDKGAYETFKNSPISEGKFQFDLWNVNPSSKWNWDSLRTKIKEHGVRNSLTTACMPTASTGIILGNTETFQIQTSNIYKRQTLSGEFLLVNRYLVNELSQRGLWNKEMRDKIILENGSVENINE

SEQ ID NO: 91085 - protein, 454 aa, Unknown
  Bacterial polypetide isolated from the Sargasso Sea
MVKFVERPQHMLMRVSVGIHLDDIDAVIDTYELMSKKYFTHATPTLFNAGTPKPQMSSCFLLTMQDDSIDGIYDTLKQTAKISQSAGGIGLSIHNIRSTGSYISGTNGTSNGIVPMLRVFNDTARYVDQGGGKRKGSFAIYIEPWHADIYDFLDLKKNHGKEEMRARDLFYAMWMPDLFMKRVENNEEWTLMCPNECPGLYDCHGDEFDKLYLKYEKQSKGRKSIKARELWEKILESQIETGTPYMLYKDSCNRKSNQKNLGTIRSSNLCTEILEYTSKDEIAVCNLASIALPMFVEDGEFNHQKLFDVTVRVTKNLNKVIDRNYYPVKEAENSNFRHRPVGLGVQGLADAFILLRLPFTSDKAKELNQEIFETIYFAALTASVEEAKKDGVYESYKGSPISKGELQHNMWGVEDEDLSGRWDWKVLRKSILKHGVRNSLLVAPMPNPAKYFSN

SEQ ID NO: 91086 - protein, 728 aa, Unknown
  Bacterial polypetide isolated from the Sargasso Sea
MADNSQVSQNIATEKSINLLNLNVVRRDGSISSFKSDKISEAIKKAFLAQTKIRNNKNKEKEQEDGIHKTVEELTYKVVSALTRRIAEGDMIHIEDIQDQVELALMRDEHHKVARAYVLYREQRAASRYHTKKLKEQVGAKASSMAVTKRNGEKEPISLDKITNRVSVLSTGLSIDPIVVVQKAVPGLYNEITSAEIDIYLAETAASLTVEHPDYSYLAARIKANSLHTDTPGFIIATKNLFDDGLLREDYYNKVMASAEDIESIIDYDRDYNFDYFAFTTLTRAYLLKFENKTIERPQDLWMRVALTVSGDKFNFDKVKETYDSLSNGYYTHATPTLFNSGLKMQQLSSCFLISMEDDSIEGIFNTIKDCALISKTAGGIGMHAHNIRGSGSRIKSTNGKSNGLIPFLKIFNETAKSVDQGGGKRKGSFAVYLEPWHADIEQFLELRKNTGAEEFRARDLFYALWIPDLFMKRVEEDGDWTLMSEHECPGLSDNYGDEFVSLYEKYEKEIPNLEKIKARELMSKIIEAQIETGQPYMLYKDSINNKSNQKNIGVIKSSNLCAEIVEYSDKSETSVCNLASIALPKFVKKSKNKKNKEYDFKALYKTSKLATKNLDEVIDINFYPTEKTETSNNKHRPIGLGIQGLADVFFELEIAYDSEEAKKINKLIFETIYFGALEASHELAKEKGAYSTFKGSPLSEGKFQFDMWNTSPSEMWDWETLREKIKK

SEQ ID NO: 91087 - protein, 666 aa, Unknown
  Bacterial polypetide isolated from the Sargasso Sea
MRDEYYEKVKANAEEIEKIIDYDRDYYFDYFALTTLFRAYLLQSNNKTAERPQDLWMRVALCVSGDKFDFYQVKKTYDSLSQGFYTHATPTLFNSGLKMQQLSSCFLIGMEDDSIEGIFNTVKDCALISKTAGGIGLHAHNIRGGGSRIKSTNGKSNGLIPFLKIFNETARSVDQGGGKRKGSFAVYLEPWHADIEAFLELRKNTGAEEFRARDLFYALWIPDLFMERVEEDADWTLMSEHECPGLSDTYGKEFVDLYTKYENEMPDLKRIKARALMSKIIEAQIETGQPYMLYKDAVNNKSNQKNIGVIKSSNLCAEIVEYSEKDETAVCNLASIALPKFVTDESKFDYQNLYQVAKLATKNLDQVIDINFYPTNKTENSNSRHRPIGLGIQGLADVYFKMNIPYDSVQAQIINKQIFETIYFGALEASMELATDKGPYSTFKGSPLSEGKFQFDLWGVKPSSMWDWKGLMEKIQKHGVRNSLTTACMPTASTGIILGNTETFQVQTSNIYKRQTLSGEFLLVNRHLVKELMKRNLWSKELRDQIILENGSVQNIEGFPEDLKDVYKTVWETSQKTVIDMAADRAPFIDQTQSMNLWLATPTFGKVNSMHMYAWKKGLKTGMYYLRSRSAVDAVKVTVSSEKKAKESYVKEAQSNEPEDCVTCSA

SEQ ID NO: 91088 - protein, 220 aa, Unknown
  Bacterial polypetide isolated from the Sargasso Sea
YYDDLIQSVNLYHLCGEGTHVVDGISHTISLRELKRKLYICILSVNVLEAIRFYVSFACSFAFAERELMEGNAKIIKLIARDEALHLTGTQHMLNIMAAGEDDPEMAIIAKECEDEAYAIFRKAAEQEKDWAEFLFKDGSMIGLNKDILCQYVEYITNNRMQAVGLKPIFSTTQNPIPWINAWLVSDNVQVAPQESEISSYLVGQIDNEMDGADFGDFDL

SEQ ID NO: 91089 - protein, 383 aa, Unknown
  Bacterial polypetide isolated from the Sargasso Sea
ALTTLIRAYLLKFDNKTIERPQDLWMRVTLTVTGNEFNLDKIKETYKNLSTGTYTHATPTLFNSGLKMQQLSSCFLIGMEDDSIEGIFNTIKDCALISKTAGGIGMHAHNIRGSGSRIKSTNGKSNGLIPFLKIFNETAKSVDQGGGKRKGSFAVYLEPWHADIEKFLELRKNTGAEEFRARDLFYALWIPDLFMKRVENDEEWTLMSEHECPGLSDVYGDEFEKLYTKYENEMKHLEKIKARDLMSKIIEAQIETGQPYMLYKDSINNKSNQKNIGVIKSSNLCAEIVEYSDKNETSVCNLASIALPKFVKKSDKKLIYDYDALYETAKLATKNLDEVIDINFYPTDKTERSNNKHRPIGLGIRGLADVYFKLGIAYDSEEA

SEQ ID NO: 91090 - protein, 438 aa, Unknown
  Bacterial polypetide isolated from the Sargasso Sea
RELWEKILESQIETGTPYMLYKDSANRKSNQKNLGTIRSSNLCTEILEYTSKDEIAVCNLASIALPMFVEDGEFNHQKLYDVTVRVTKNLNKVIDMNYYPVKEAENSNFRHRPVGLGVQGLADAFILLRLPFTSDKAKELNQEIFETIYYAALNASVEEAKKDGVYESYKGSPISKGEFQHNMWGVEDKDLSGRWDWKKLRKDVLKHGVRNSLLVAPMPTASTSQILGNNECFEPYTSNIYTRRVLSGEFIIVNKHLLNDLVELNLWNEDMKQDLMAANGSIQDIEGIPDDLKELYKTVWEMSMKDIIDMARHRGFFIDQSQSLNLFMEGATMSKLTSMHFYAWKSGLKTGMYYLRTKSAVDAIKFTLKKKESKPVEPKVEVEAEEVGEVEITRTEKATASKSKEKPVAVEPLSPEELKQILSQSKENEDDDCLMCGS

SEQ ID NO: 91091 - protein, 319 aa, Unknown
  Bacterial polypetide isolated from the Sargasso Sea
ATAVRPRSSPRWRATSMGGTTINRIDEVLAPYVTISWEKHREVALEWGISDVDAYAMARTEKECYDAFQSLEYEVNTLHTANGQTPFVTFGFGLGDSWQSRLIQRAILSNRIAGLGKNKKTAVFPKLVFAIKDGLNHKQGDPNYDIKQLALECASKRMYPDILNYDQVVKVTGSFKTPMGCRSFLGAYEEHGELVHEGRNNLGVVSLNLPRIALKSRDEADFWDKLDAALRVAKTALMYRIKRLDGVKARVAPILYMEGACGVRLKADDNVSEIFKHGRASISLGYIGVHETINALFGDQVHLFDSAELQQKGIAIIAR

SEQ ID NO: 91092 - protein, 705 aa, Unknown
  Bacterial polypetide isolated from the Sargasso Sea
MPVVIKRDGCRTPFDETRIRDAVIAAANSVGIEDADYAATVAACVRERVANLAEVEIHHLQDAVENLLMEGPYKSLARVYIEYRHDRDICRDATSKLNLEIRGLVEQSNAALLNENANKDSKVIPTQRDLLAGIVAKHYAKSHILPKDVVAAHELGEIHYHDLDYSPFFPMFNCMLIDLAGMLTHGFKMGNAEIETPKSISTATAVTAQIIAQVASHIYGGTTINRIDEVLAPFVAKSYDKHYQVALNWQIKDAKAYATALTEKECHDAFQSLEYEVNTLHTANGQTPFVTFGFGLGTSWESRLIQQSMLKVRMTGLGKNRKTAVFPKLVFAIRDGINHKVGDCNYDVKQMALKCASMRMYPDILNYEQVEKVTGSFKTPMGCRSFLGAYKENGELVHEGRNNLGVVSLNLPRVALEANGDEAEFYRILDERLQLARRALDTRIERLNGVKARVAPILYMEGACGVRLRADDDIAQIFKNGRASISLGYIGLHETINALYGTETHVFDDAKLREKAVAIVAHLKAATDAWKAETGYGFSLYSTPSESLCSRFCKLDARQFGVVAGVTDKGYYTNSFHLDVEKRVNPYDKIDFEQPYPAIANGGFICYGEYPNMQHNIEALENVWDYSYSRVPYYGTNTPIDECYDCGFTGEFSCTSKGFTCPKCGNHEPSRVSVTRRVCGYLGSPDARPFNHGKQEEVKRRIKHL

SEQ ID NO: 91093 - protein, 705 aa, Unknown
  Bacterial polypetide isolated from the Sargasso Sea
MPVVIKRDGCRTPFDETRIRDAVVAAANSVGIEDADYAATVAACVRERVANMAEVEIHHLQDAVENLLMEGPYKSLARVYIEYRHDRDICRDATSKLNLEIRGLVEQSNAALLNENANKDSKVIPTQRDLLAGIVAKHYAKSHILPKDVVAAHEIGEIHYHDLDYSPFFPMFNCMLIDLAGMLTHGFKMGNAEIETPKSISTATAVTAQIIAQVASHIYGGTTINRIDEVLAPFVAKSYDKHYQVALNWQIKDAKAYATAQTEKECHDAFQSLEYEVNTLHTANGQTPFVTFGFGLGTSWESRLIQQSMLKVRMAGLGKNRKTAVFPKLVFAIRDGINHKVGDCNYDVKQMALKCASMRMYPDILNYEQVEKVTGSFKTPMGCRSFLGSYKENGELVHEGRNNLGVVSLNLPRVALEANGDEAEFYRILDERLLLARRALDTRIERLNGVKARVAPILYMEGACGVRLRADDDIAQIFKNGRASISLGYIGLHETINALYGTETHVFDDAKLREKAVAIVAHLKAATDAWKAETGYGFSLYSTPSESLCSRFCKLDARQFGVVAGVTDKGYYTNSFHLDVEKHVNPYDKIDFEQPYPAIANGGFICYGEYPNMQHNIEALENVWDYSYSRVPYYGTNTPIDECYDCGFTGEFSCTSKGFTCPKCGNHEPSRVSVTRRVCGYLGSPDARPFNHGKQEEVKRRIKHL

SEQ ID NO: 91094 - protein, 285 aa, Unknown
  Bacterial polypetide isolated from the Sargasso Sea
NYDQVVKVTGSFKTPMGCRSFLGVYEENGEQIHDGRNNIGVISLNLPRIALEAKGDEATFWKLLDNRLELAYKALMTRIARLEGVKARVAPILYMEGACGVRLKADDDVSEIFKNGRASISLGYIGIHETINALSGNQHMYDSDALREKGVAIVRRLRDAVDRWKEETGYGFSLYSTPSENLCDRFCRLDTAEFGVIEGVTDKGYYTNSFHLDVEKKVNPYDKIDFEAPYPPLANGGFICYGEYPNIQHNLKALEDVWDYSYQHVPYYGTNTPIDECYECGFTGE

SEQ ID NO: 91095 - protein, 601 aa, Unknown
  Bacterial polypetide isolated from the Sargasso Sea
MVEQTNAALLNENANKDSKVIPTQRDLLAGIVAKHYATSHMLPRDVVQAHESGDLHFHDLDYSPFFPMFNCMLIDLKGMLTHGFKMGNAEIDTPKSISTATAVTAQIIAQVASHIYGGTTINRIDEVLAPYVTISWEKHREVALEWGISDVDAYAMARTEKECYDAFQSLEYEVNTLHTANGQTPFVTFGFGLGDSWQSRLIQRAILSNRIAGLGKNKKTAVFPKLVFAIKDGLNHKQGDPNYDIKQLALECASKRMYPDILNYDQVVKVTGSFKTPMGCRSFLGAYEEHGELVHEGRNNLGVVSLNLPRIALKSRDEADFWDKLDAALRVAKTALMYRIKRLDGVKARVAPILYMEGACGVRLKADDNVSEIFKHGRASISLGYIGVHETINALFGDQVHLFDSAELQQKAIAIIARLKAATDEWKEETGYGFSLYSTPSENLCSRFCRIDAKEFGVVAGVTDKGYYTNSFHLDVEKQVNPYDKLDFEAPYPPIASGGFICYGEYPNIQHNLEALENVWDYSYDKVPYYGTNTPIDECYDCGFTGEFECTSKGFTCPRCGNHDPAKVSVTRRVCGYLGSPDARPFNAGKQEEVKRRVKHM

SEQ ID NO: 91096 - protein, 712 aa, Unknown
  Bacterial polypetide isolated from the Sargasso Sea
MTPHVMKRDGCKVPFKSERIKEAILRAAKAAGVDDADYCATVAEVVSSQMNERSQVDINEIQTAVENQLMSGPYKQLARAYIEYRHDRDIQREKRGRLNQEIRGLVEQTNSALLNENANKDSKVIPTQRDLLAGIVAKHYARQHLLPRDVVQAHERGDIHYHDLDYSPFFPMFNCMLIDLKGMLTQGFKMGNAEIEPPKSISTATAVTAQIIAQVASHIYGGTTINRIDEVLAPFVTESFNKHRKTAEEWQIPDADGYAHSRTEKECYDAFQSLEYEVNTLHTANGQTPFVTFGFGLGTSWESRLIQQSILRNRIAGLGKNRKTAVFPKLVFAIRDGLNHKFGDPNYDIKQLALECASKRMYPDILNYDQVVKVTGSFKTPMGCRSFLGVWENENGEQIHDGRNNLGVISLNLPRIALEAHGDEATFWKLLDDRLVLARKALMTRIARLEGVKARVAPILYMEGACGVRLKADDDVSEIFKNGRASISLGYIGIHETINALFGDKHLYDSEQLRAKAIAIVERLRQAVDQWKDETGYGFSLYSTPSENLCDRFCRLDTAEFGVVPGVTDKGYYTNSFHLDVEKKVNPYDKIDFEAPYPPLASGGFICYGEYPNIQHNLKALEDVWDYSYQHVPYYGTNTPIDECYECGFTGEFECTSKGFTCPKCGNHDAARVSVTRRVCGYLGSPDARPFNAGKQEEVKRRVKHLGNGQIG

SEQ ID NO: 91097 - protein, 344 aa, Unknown
  Bacterial polypetide isolated from the Sargasso Sea
CCTKIGSIIPDEARTFGMEGFFQKIGIYAHEGQKYEPEDSAQLSSYREEKSGQVLEEGITEAGSMSSWIAAGTAYTNHDIEMIPIYLFYSMFGFQRIGDFAWAAGDSQARGFLIGATAGRTTLAGEGLQHQDGHSHLLASTIPNCISYDPTFHYELAVIFREGLRRMHEKNENIFYYITTMNENYSHPAMPDDCEDGILKGMYKIKETSGSKEAKIQLLGSGTILREMMAASEILKKEYQVDSEVWSVTSFNELRKNGMEVERFNLLNPAETNKKSYVEECLGKQQGPILTATDYMRINADQIRPFTKKSFYSLGTDGYGRSDTRKNLKNFFEVDKEHIVAYSL

SEQ ID NO: 91098 - protein, 84 aa, Unknown
  Bacterial polypetide isolated from the Sargasso Sea
DTVKILEQKLAHIKTPITLSIIGCVVNGPGEAAMTDIGITGGGKGNNMLYLKGIQTEKLSNQEIIKKVVDLVEKKALEIDNNKK

SEQ ID NO: 91099 - protein, 79 aa, Unknown
  Bacterial polypetide isolated from the Sargasso Sea
KLEDRLSHIKTPISLSIIGCVVNGPGEAAQTDIGITGGGKGNNMLYLNGVESEKISTDEMISKVVRLVEEKAEEIEKIQ

SEQ ID NO: 91100 - protein, 76 aa, Unknown
  Bacterial polypetide isolated from the Sargasso Sea
KLSHIKTPITLSIIGCVVNGPGEAAQTDIGITGGGKDSSMLYLKGLQTEKINNQEIVSKIVNLVEKKAIEIENNKQ

SEQ ID NO: 91101 - protein, 76 aa, Unknown
  Bacterial polypetide isolated from the Sargasso Sea
RTDHLKGIKIGIMGCIVNGPGEMADADYGYVGTGPGLISLYKGQNVIKKNVNANEAVDALIQLIDSHGDWVEPTNV

SEQ ID NO: 91102 - protein, 70 aa, Unknown
  Bacterial polypetide isolated from the Sargasso Sea
MVVFCPGSIKSSIGLGNLLLDGIGDTIRVSLSDDPVEEIKIGNEILKSLNLRNRGVKIISCPSCARQAFR

SEQ ID NO: 91103 - protein, 249 aa, Unknown
  Bacterial polypetide isolated from the Sargasso Sea
MFGGTTGKLTGTIKSALDNNPLVGANIIIENTDLGTATDISGDYVILNIAPGKYNVTIRMIGYGVKKYENIRISIDKTTRLSAQLNIKAVEGQEVIVSATRPLIDFDKTNSEAIVTSEELEVMPIEDVLDVIKLQGGVTQDAGGGIHIRGGRSSEVAYLVDGVSVTDAYDGAIAVNIENANIQELQVISGTFNAEYGKAMSGIVNIVTKDGSDKFESYLQLYSGDHQSDDNMYKDLSSLHLTNDRNLTL

SEQ ID NO: 91104 - protein, 120 aa, Unknown
  Bacterial polypetide isolated from the Sargasso Sea
AVEIGATTLILSNHGGRQLDQTISPIGLLPEVKSAVGDDVEIIVDGGIRRGSDIFKAIALGASACSIGRPYLYGLAVNGEAGVVKSLEILRDEFTRTMALMGVTSVSQIDESCLRKRKRL

SEQ ID NO: 91105 - protein, 94 aa, Unknown
  Bacterial polypetide isolated from the Sargasso Sea
LLLGKDSVYFYTGVEGQYSIGPMNISPSFTPGYYEKGSGKDLGSALEFKSEIKVGFDILKDSKLGYSYSHISNNDWGSKNPGTDNQQIIFQTKF

SEQ ID NO: 91106 - protein, 128 aa, Unknown
  Bacterial polypetide isolated from the Sargasso Sea
RISLSDDPPKEARIGNEILKSLNLRNRGVKIISCPSCARQAFPVINTVKILEEKLSHITTPITLSVIGCVVNGPGEAAMTDVGITGGGKGSNMLYLSGIQSEKVLSDDIITKVVDSVEKKARELENSK

SEQ ID NO: 91107 - protein, 29 aa, Unknown
  Bacterial polypetide isolated from the Sargasso Sea
KDLQKKYGEPNADALVESALRHVEILDRF

SEQ ID NO: 91108 - protein, 114 aa, Unknown
  Bacterial polypetide isolated from the Sargasso Sea
GFEILKSLGLRNRGVKIISCPSCARQQFEVIKTVKNLEKKLDDISTPITVSIIGCVVNGPGEATMTNIGITGGGNDTHMIYLDGKKNNVVKNVDLENYLEDLIRKKTKEIEISN

SEQ ID NO: 91109 - protein, 109 aa, Unknown
  Bacterial polypetide isolated from the Sargasso Sea
MFGGTTGKLAGTIKSALDNSPLVGANIIIENTDLGTATDISGDYVILNIPPGKYNVTIRMIGYEVKKYENIRISIDKTTRLSAQLNIEAVEGQEVIVSATRPLIDFDKT

SEQ ID NO: 91110 - protein, 110 aa, Unknown
  Bacterial polypetide isolated from the Sargasso Sea
MSIRPFRDIKRKKTKAVQIGNIILGDNNPITVQSMTNTLTTDVKATLKQIHDIANEGAELVRVSIPDVESSKALKEIVKHSSVPIIADIHYHYKRAIESAEAGSKCLRIN

SEQ ID NO: 91111 - protein, 112 aa, Unknown
  Bacterial polypetide isolated from the Sargasso Sea
KVGNEILKSLNLRNRGVKIISCPSCARQAFKVIETVKELENRLSHIKKPITLSIIGCVVNGPGEAKQTEIGITGGGKDNHMLYLNGLETEKVMTKDMINKIVSLVEEKASNL

SEQ ID NO: 91112 - protein, 283 aa, Unknown
  Bacterial polypetide isolated from the Sargasso Sea
GFFQKVGIYAHEGQKYEPEDSAQLSSYREEKSGQVLEEGITEAGAMSSWIAAGTSYTNHDIEMIPIYLFYSMFGFQRIGDLAWAGADSQSRGFLIGATAGRTTLAGEGLQHQDGHSHLMASTIPNCVSYDPTFHYELAVIFRDGLKRMHEKKENIFYYITTMNENYPHPAMPEDKSCEEGILKGMYKIKEFNKYKKSKIQFLGSGTILREMIAGAEILQNEYQIDSEIWSVTSFNELRRDGLEVERYNLLNPDKEPKKSYVEKCLGKTEGPVLAASDYMRMNS

SEQ ID NO: 91113 - protein, 120 aa, Unknown
  Bacterial polypetide isolated from the Sargasso Sea
QEIKVGNEILKSLNLRNRGVKIISCPSCARQAFEVIETVKSLEEKLSHIKTPITLSIIGCVVNGPGEAALTDIGITGGGKGSNMLYLKGVQTEKLNNSEIISKVVGLVEKKAEEIENERQ

SEQ ID NO: 91114 - protein, 109 aa, Unknown
  Bacterial polypetide isolated from the Sargasso Sea
ILKSLGIRSRGVNIISCPSCARQAFPVIETVKTLEKKLSHITKPINLSIIGCVVNGPGEAAQTEIGLTGGGQDNNLLYLSGLPHKKVASSEIIDKVVKLVEKKVRETEQ

SEQ ID NO: 91115 - protein, 96 aa, Unknown
  Bacterial polypetide isolated from the Sargasso Sea
IISCPSCARQAFPVIDTVKILEDKLSHIKKPLTLSIIGCVVNGPGEAAQTDIGLTGGGEGNNLFYLSGIPHHKVANKEIIEKVVELVESKAKEKVN

SEQ ID NO: 91116 - protein, 128 aa, Unknown
  Bacterial polypetide isolated from the Sargasso Sea
MIKRRDTYNVDVGGVVIGSSNPIRIQSMTNTPTEDASATVDQIKSLCDAGSELVRVTVNNEKSAENIINIKNLLIKSNYNLPIIGDFHYNAHILLSDYPEAATVLDKYRLNPGNIGTSSKYDDNFAKI

SEQ ID NO: 91117 - protein, 85 aa, Unknown
  Bacterial polypetide isolated from the Sargasso Sea
EERLAHIAEPITLSIIGCVVNGPGEAAMTDLGFTGGGKESGMMYVSGRPDHKLSNADMVERIVAQVEEKAERLKAQREAEAVPAE

SEQ ID NO: 91118 - protein, 70 aa, Unknown
  Bacterial polypetide isolated from the Sargasso Sea
SIIGCVVNGPGEARETDIGLTGGGKGTHQIYLSGMADHRLSNGDIVEHVVDLVEARVAELKAADAALKQS

SEQ ID NO: 91119 - protein, 131 aa, Unknown
  Bacterial polypetide isolated from the Sargasso Sea
VIDKEGDDQTNLIGIEHRNPNLFRSTFLGKIAPVSGAFVTGKNSLYFYTGIEGQYNIGPMNISPSFTPGYYEKGSGKELGSALEFKSEIKVGFDILKDSTLGYSYSHISNNDWGSTNPGTDNQQITFSKKF

SEQ ID NO: 91120 - protein, 273 aa, Unknown
  Bacterial polypetide isolated from the Sargasso Sea
IAVQSMTATSTRDVESTSAQVNALHAAGADVVRIAVDSRKDAEAVAQIRKRTEANLAVDLQENYRLAEQLAPHVDKIRYNPGHLYHHEPDKPWQEKVRQIADVAAAHDCALRVGVNCGSVDPEKVAAFEEGDSVGPMLQSALDHCNWLDEIGFTRYCVSLKDSNPQLVIEVNQKFAAERPDVPLHLGVTEAGLPPDGIIKTRIAFEQLISRGIGDTVRVSLTVPNDRKPEEIVAGREILADISAGRVRSVVQFNADRINIISCPSCSRVENEA

SEQ ID NO: 91121 - protein, 103 aa, Unknown
  Bacterial polypetide isolated from the Sargasso Sea
ERGVRIISCPSCARQGFEVIETVKILEKKLSHIKTPITLSVIGCVVNGPGEAALTDVGITGGKKGNNMLYLSGVQSEKVFTNDMIDKVVSEVEKKASELENLK

SEQ ID NO: 91122 - protein, 76 aa, Unknown
  Bacterial polypetide isolated from the Sargasso Sea
MSIRPFRDIKRRKTKEISVGKVKVGGNNPITVQSMTNTLTTDIKATINQINEIQGEGADIVRVSCPDEPSSKALKR

SEQ ID NO: 91123 - protein, 101 aa, Unknown
  Bacterial polypetide isolated from the Sargasso Sea
GVKIISVLSCARQGFQVIETVKILEENFSHIKTPITLSIIGCVVNGPGEASQTDIGITGGGQNSNMLYLKGVQTEKVSNKEIISKVVELVEKKAEEIQSKK

SEQ ID NO: 91124 - protein, 131 aa, Unknown
  Bacterial polypetide isolated from the Sargasso Sea
DTIRISLSDNPVEEVKIGNEILKSLNLRERGVKIISCPSCARQGFEVIETVKILEKKLSHIKTPITLSVIGCVVNGPGEAALTDVGITGGKKGNNMLYLSGVQSEKVFTSDMIDKVVSEVEKKASELDNSK

SEQ ID NO: 91125 - protein, 77 aa, Unknown
  Bacterial polypetide isolated from the Sargasso Sea
EEKLSHIKTPITLSIIGCVVNGPGEASMTDIGITGGGKGNNMLYLSGVQREKVLTKDIIEKVVTEVEKKVFELENLK

SEQ ID NO: 91126 - protein, 51 aa, Unknown
  Bacterial polypetide isolated from the Sargasso Sea
MTVSKRRQTPSVDIGGILMGSDHPVRVQSMTNTVTNNAAATIQQIKELADA

SEQ ID NO: 91127 - protein, 89 aa, Unknown
  Bacterial polypetide isolated from the Sargasso Sea
MSIRPFRDINRRKTKEIFVGNIKIGGDNPITVQSMTNTLTTDIKSTILQINSIEEEGADLVRVSCPDEASSAALKQIVKNVNLPNYCRY

SEQ ID NO: 91128 - protein, 107 aa, Unknown
  Bacterial polypetide isolated from the Sargasso Sea
KSLNLRNRGVKIISCPSCARQAFQVIDTVKILEEKLAHIKTPITLSIIGCVVNGPGEAAMTDVGITGGGKGNNMLYLSGIQNEKVLTNDIIDKVVYEVEKKASELEN

SEQ ID NO: 91129 - protein, 245 aa, Unknown
  Bacterial polypetide isolated from the Sargasso Sea
MIDRTAKFILSVLLLSLNLMFGGTTGKLAGTIKSALDNSPLVGANIIIEDTDLGTATDISGDYVILNIPPGKYNVTIRMIGYEVKKYENIRISIDKTTRLSAQLNIEAVEGQEVIVSATRPLIDFDKTNSEAIVTSEELEVMPIEDVLDVIKLQGGVTQDAGGGIHIRGGRSSEVAYLVDGVSVTDAYDGAIAVNIENANIQELQVISGTFNAEYGKAMSGIVNIVTKDGSDKFESYLQLYSGDH

SEQ ID NO: 91130 - protein, 82 aa, Unknown
  Bacterial polypetide isolated from the Sargasso Sea
IDTVKILEDKLSHIKKPLTLSIIGCVVNGPGEASQTDIGLTGGGEGNNLFYLSGIPHNKVANKDIIEKVVELVESKAEEKVN

SEQ ID NO: 91131 - protein, 90 aa, Unknown
  Bacterial polypetide isolated from the Sargasso Sea
MEIRPYRAIKRKKTKKIKVGNIPIGGNSFISVQSMTNTLTTDVKSTVKQILSLEEAGADIVRVSCPDQESTKALREIVKEIKVPIVADIH

SEQ ID NO: 91132 - protein, 52 aa, Unknown
  Bacterial polypetide isolated from the Sargasso Sea
MSLRPFRDIFRRKTKVIKVGNVKVGGNNPITVQSMTNTLTKNVKETLSQINK

SEQ ID NO: 91133 - protein, 60 aa, Unknown
  Bacterial polypetide isolated from the Sargasso Sea
MSIRPFRDIKRRETREINVGKVKVGGGNPITVQSMTNTLTTDIKATINQINEISSEGADM

SEQ ID NO: 91134 - protein, 72 aa, Unknown
  Bacterial polypetide isolated from the Sargasso Sea
MKINLQEYCKDLSNYQRFPTRQVMVGDIPIGKDNPIRIQSMTTTDTMDTKGTIAQSIRMIDAGCEIVRITAP

SEQ ID NO: 91135 - protein, 307 aa, Unknown
  Bacterial polypetide isolated from the Sargasso Sea
ALEFLRIFEKHNFYDTILSMKSSNPLVMKEAYRLLVMRMEEESMDYPLHLGVTEAGNGSEGRIKSAVGIGGLLCQGLGDTIRVSLTEPAENEIPAAKAILGGVEKLIERISTALGENERFEEKSVSETTISPNQIQSTLRIQSEKTSGRSILMKPSGCKIGDRETFKLLSWKTETEFADPKKVFDAKLDRSDGEQFLLLNEQEIETGLDKTILDHLKSKLLVLEVSNPLYTLRNLNQRHEGKAKPAVIGFQLPIIETMEDHLGLAAELGELISSRELHALICRDGDPESLSARFAQNLMQATRGSNV

SEQ ID NO: 91136 - protein, 259 aa, Unknown
  Bacterial polypetide isolated from the Sargasso Sea
LHEAFSPLVLRCSELGRSMRIGTNHGSLSDRILNRFGDTPRGMAESALEFLRIARSHGFEEMILSMKASNPKVMIEAYRLVVSLMNEEGMNYPLHLGVTEAGDGEDARIKSAIGIGSLLLDGLGDTIRVSLTEDPVAEIPVARDLVRRAEAWWSDPGSGKPGPEELIDPFSFSRRPCGEISLSGKVRIGDKHPPVVLVHAQHPLEQTDKIISEFARAQSANKDAPIEGLVVHLEDSLQLPHLQVLMDSLVGAVPSIFVE

SEQ ID NO: 91137 - protein, 75 aa, Unknown
  Bacterial polypetide isolated from the Sargasso Sea
KLSHIKTPVTLSVIGCVVNGPGEAAMTDIGITGGGKGSNMLYLSGIQSQKILTEDIISEVVNQVEKKVKEIEKNS

SEQ ID NO: 91138 - protein, 96 aa, Unknown
  Bacterial polypetide isolated from the Sargasso Sea
DNPTQEVKIGNEILKSLNLRNRGVKIISCPSCARQAFQVIDTVKILEEKLAHIKTPITLSIIGCVVNGPGEAAMTDIGITGWGQRQQYVIFIWRSE

SEQ ID NO: 91139 - protein, 72 aa, Unknown
  Bacterial polypetide isolated from the Sargasso Sea
PVIDTVRELERRLSHIKDPITLSIIGCVVNGPGEALNSDIGVTGGGKGNNMIYLSGVADHKIKNPEIVDHVV

SEQ ID NO: 91140 - protein, 88 aa, Unknown
  Bacterial polypetide isolated from the Sargasso Sea
GFEVVETVKILEEKLSHIKTPLTLSIIGCVVNGPGEASQTDIGITGGGKDSSMLYLKGLQTEKLDNRNIISKVVQLVEQKAQEIEKKK

SEQ ID NO: 91141 - protein, 87 aa, Unknown
  Bacterial polypetide isolated from the Sargasso Sea
QAFQVIDTVKILEEKLSHIKTPITLSIIGCVVNGPGEAAMTDIGITGGGKGNNMLYLSGVQSEKVLTKDIIEKVVTEVEKKVSELEN

SEQ ID NO: 91142 - protein, 93 aa, Unknown
  Bacterial polypetide isolated from the Sargasso Sea
MCRQGFEVIETVKLLEEKLSHIKTPITLSVIGCVVNGPGEAALTDVGITGGRNGNNMLYLSGIQKEKVLTKDMVNRVVSEVEKKVSEIENNLK

SEQ ID NO: 91143 - protein, 66 aa, Unknown
  Bacterial polypetide isolated from the Sargasso Sea
IIGCVVNGPGEAALTDIGITGGGKGNNMLYLNGIESEKLTTDKIISKVVNLVEKKAKEIEKLNNAS

SEQ ID NO: 91144 - protein, 303 aa, Unknown
  Bacterial polypetide isolated from the Sargasso Sea
KNRRMELGGFIPERTSYSKPIKTPNKDIFDFMKVSTGEKQMSTTMALVRLLTNLLRDKNVAPKLVPIIPDEARTFGMEGFFQKIGIYAHEGQKYEPEDSAQLSSYKEEKSGQVLEEGITEAGSMSSWIAAGTSYSNHDIEMIPIYLFYSMFGFQRIGDFAWAAGDSQARGFLIGATAGRTTLAGEGLQHQDGHSHLIASTIPNCISYDPTFHYELAIIFREGLRRMHEKNENVFYYITTMNENYTHPGIPKDKDCEDGILKGMYKIKDYSNYKKNKIQLLGSGTILREMMSAAEILQKELPHR

SEQ ID NO: 91145 - protein, 109 aa, Unknown
  Bacterial polypetide isolated from the Sargasso Sea
YEILKSLGIRSRGVNIISCPSCARQAFPVIETVKKLEKRLSHIKKPINLSIIGCVVNGPGEAAQTEIGLTGGGQDNNLLYLSGIPHSKVASSEIVEKVVKLVEEKIKNS

SEQ ID NO: 91146 - protein, 79 aa, Unknown
  Bacterial polypetide isolated from the Sargasso Sea
MEIRPHRIIKRKKTKKIKVGNIFVGGDSVISVQSMTNTLTTDHEATIKQIKELEEAGADIVRDSCPDEESTKALKIITK

SEQ ID NO: 91147 - protein, 68 aa, Unknown
  Bacterial polypetide isolated from the Sargasso Sea
PFRDINKKKTKVINVGNLKIGGDNPISVQSMTNTLTKDVKGTIKQINEIAETGADLVRVSCPDEESTK

SEQ ID NO: 91148 - protein, 54 aa, Unknown
  Bacterial polypetide isolated from the Sargasso Sea
MSLRPFRDIKRRKTKVISVGKVKVGGNNPISVQSMTNTLTTDIKATIKQINENQ

SEQ ID NO: 91149 - protein, 191 aa, Unknown
  Bacterial polypetide isolated from the Sargasso Sea
MPKDRNSIVVKIGGVAIGGGEPIVIQSMTNTDTADIKKTTQQIIELYEEGSEIVRITVDREEAAKAVPFIREGLDKAGYSIPLVGDFHYIGHKLLKDYPDCAKTLDKYRINPGNVGFKNKKDKQFSEIIEIACKNDKPIRIGANWGSIDQELLTLLMDENNRAEVKKSSAEILRDALIKSVIYSASRAEEI

SEQ ID NO: 91150 - protein, 316 aa, Unknown
  Bacterial polypetide isolated from the Sargasso Sea
IKYIKEKRLKLGGFIPERTTYAKSIKAPPKNIFDNMKESTGSKEMSTTMALVRMLTNLLRDKNVAPRLVPIIPDEARTFGMEGFFQKVGIYAHEGQKYEPEDSAQLSSYREEKSGQVLEEGITEAGAMSSWIAAGTSYTNHDIEMIPIYLFYSMFGFQRIGDFAWAGADSQSRGFLIGATAGRTTLAGEGLQHQDGHSHLLASTIPNCISYDPTFHYELAVIFREGLRRMHEKKENVFYYITTMNENYPHPAIPKDKLCEEGILKGMYKIKEFNKNKKTKIQFLGSGTILREMIAGAEILQNEYQIDSEVWSVTSL

SEQ ID NO: 91151 - protein, 110 aa, Unknown
  Bacterial polypetide isolated from the Sargasso Sea
YEILKSLGIRSRGVNIISCPSCARQAFPVIETVKQLEEKLSHIKEPISLSIIGCVVNGPGEAAQTEIGLTGGGQDNNLLYLSGIPHNKVPSSEIIEKVVQLVEEKVKNKK

SEQ ID NO: 91152 - protein, 53 aa, Unknown
  Bacterial polypetide isolated from the Sargasso Sea
MNIRPFREIKRRKTKEINVGHIKVGGDNPISVQSMTNTLTKDVKETLKQIGTN

SEQ ID NO: 91153 - protein, 59 aa, Unknown
  Bacterial polypetide isolated from the Sargasso Sea
MTGLVDHLIERRKSIPVKVGSVTVGGDKPIVVQSMTNTDTADIDGTVEQVEALHRAGSE

SEQ ID NO: 91154 - protein, 150 aa, Unknown
  Bacterial polypetide isolated from the Sargasso Sea
DEGLYLTRMTKSVTVIHRRDELRASKILQQRAFDNPKMKFVWNSVVEEIKGNGTVQSMTLKNLKTDELSEHLTEGIFIFIGFHPVNEFMQGIIDLDSAGHVITNLQMETNVPGVFAAGDVRQFSDRQLANAVGDGVAAALAAYRYINEDD

SEQ ID NO: 91155 - protein, 103 aa, Unknown
  Bacterial polypetide isolated from the Sargasso Sea
LGIRSRGVNIISCPSCARQAFPVIETVKKLEKKLSHIKKPINLSIIGCVVNGPGEAAQTEIGLTGGGNDSNLLYLSGIPHTKVASSDIINKVVKLVEDKVKEN

SEQ ID NO: 91156 - protein, 88 aa, Unknown
  Bacterial polypetide isolated from the Sargasso Sea
MSVRPFRDIIRRKTKVINVGDVKIGGDNPISVQSMTNTLTTDVKATINQINDIAEEGADIVRVSCPDTESTKALKEIVKHISIPSSGR

SEQ ID NO: 91157 - protein, 298 aa, Unknown
  Bacterial polypetide isolated from the Sargasso Sea
KYLKECRIKLGGNLPERSSFAKAIKTPPKDIFAKMKESTGEKEMSTTMVLVRMLTNLMRDKNVAPRLVPIIPDEARTFGMEGLFQKIGIYAHEGQKYEPVDSEQLSSYREDIKGQVLEEGITEAGAISSWIAAGTSYVNHDISMIPIYIFYSMFGFQRTGDFVWAAGDNQTRGFLIGATAGRTTLSGEGLQHGDGHSHILSSVVPNCISYDPTFSYELAVIFREGLRRMYEKRENIFYYITTMNENYPHPEIPKEKNIEEDILKGMYKFKEFNKNKKTKIQLLGSGTILREILLQQKY

SEQ ID NO: 91158 - protein, 293 aa, Unknown
  Bacterial polypetide isolated from the Sargasso Sea
KESTGKKEMSTTMILVRMLTSLLRDKNVAPRLVPIIPDEARTFGMEGFFQKIGIYAHEGQKYEPVDYEQLSSYREDIKGQVLEEGITEAGAMSSWIAAGTSYTNHDISMIPIYLFYSMFGFQRTGDFAWAAGDNQTRGFLIGATAGRTTLAGEGLQHADGHSHIISSVIPNCKSYDPTFGYELAVIFREGLRRMYEKQENIFYYITTMNENYSHPAIPKDKTVEDGILKGMYLFKEFKKYNKTKIQLLGSGTILREMLAAAEILQKDYQIDSSVWSVTSFNELRKEAIEVKDK

SEQ ID NO: 91159 - protein, 83 aa, Unknown
  Bacterial polypetide isolated from the Sargasso Sea
NQLEERLEDVTEPLTVSVIGCVVNGPGEALVSDLGVAGASKKSGFYINGQRQKLRLDNETVAEQLEQQVREYLQQKIAVRQLD

SEQ ID NO: 91160 - protein, 321 aa, Unknown
  Bacterial polypetide isolated from the Sargasso Sea
MALVRMLTALLRDKNVSPRLVPIIPDEARTFGMEGFFQKIGIYAHEGQKYEPVDSEQLSSYREDKSGQVLEEGITESGAMSSWIAAGTAYTNHDIEMIPIYIFYSMFGFQRVGDLAWAAGDSQARGFLIGATAGRTTLAGEGLQHQDGHSHLMASNIPNCVSYDPTFAYEMAVILRDGMKRMHEKKENIFYYITAMNENYPHPAKPKDADEGILKGMYLLKETRNKGNTRVQLLGSGTILREVIDAAEILSKEYGIDSDIWSVTSFNELRKDGMETERWNLLNPDGKEKKSYVEKCLEKREGPVFAASDYIRSFSDQLRPY

SEQ ID NO: 91161 - protein, 120 aa, Unknown
  Bacterial polypetide isolated from the Sargasso Sea
DPVEEVKAGYEILKSLHIRSRGVQIISCPSCSRQAFPVIDTVKVLEKKLSHIKKPITLSIIGCVVNGPGEAAQTEVGLTGGGQGNNLLYLSGIPHTKVASNSIIDKVVELVENKVKEKNN

SEQ ID NO: 91162 - protein, 79 aa, Unknown
  Bacterial polypetide isolated from the Sargasso Sea
MSIRPFRDINRKKTKEINVGNLKIGGGNPISVQSMTNTLTKDVKSTIKQIKEIENAGADLVRVSCPDKESTEALKQIVK

SEQ ID NO: 91163 - protein, 90 aa, Unknown
  Bacterial polypetide isolated from the Sargasso Sea
ARQGFQVIETVKVLENRLSHIKAPITLSVIGCVVNGPGEAAMTDVGITGGKKGNNMLYLSGIQSKKVLTSDMVEKIVSEVEKKASELESK

SEQ ID NO: 91164 - protein, 99 aa, Unknown
  Bacterial polypetide isolated from the Sargasso Sea
KIISCPSCARQGFKVIETVKILEKKLSHIKTPITLSVIGCVVNGPGEAAMTDVGITGGQNGNNMLYLSGVQSEKVLTKDMIEKVVSEVEKKVCELNDLK

SEQ ID NO: 91165 - protein, 214 aa, Unknown
  Bacterial polypetide isolated from the Sargasso Sea
FWYGRFFSKIGIYAHEGQKYEPVDSEQLSSYREDKSGQVLEEGITESGAMSSWIAAGTSYTNHDLEMIPIYIFYSMFGFQRVGDLAWAAGDSQARGFLIGATAGRTTLAGEGLQHQDGHSHLLASNIPNCVSYDPTFAYEMGVILRDGIKRMHEKKENIFYYITAMNENYSHPEKPKGCDEGIIKGMYLFHRNNNKGKTKVQLLGSGTILREII

SEQ ID NO: 91166 - protein, 68 aa, Unknown
  Bacterial polypetide isolated from the Sargasso Sea
TSITLSIIGCVVNGPGEAAMTDIGITGGGKGNNMLYLSGVQSEKVLTSEIINKVVSEVEKKVAELEKK

SEQ ID NO: 91167 - protein, 121 aa, Unknown
  Bacterial polypetide isolated from the Sargasso Sea
DPVQEIKIGNEILKSLNLRNRGVKIISCPSCARQGFEVIKTVKLLEDKLSHIKTPITLSVIGCVVNGPGEAALTDVGITGGKNGNNMLYLSGIQKEKVLTKDMISKVVSEVEKKVSEIENN

SEQ ID NO: 91168 - protein, 90 aa, Unknown
  Bacterial polypetide isolated from the Sargasso Sea
ARQGFPVIDTVKILEEKLSHIKEPITLSIIGCVVNGPGEASQTQIGLTGGGKGDHMMYLSGLPHHKVTSDKMIEEIISLVEKKSQELQNN

SEQ ID NO: 91169 - protein, 64 aa, Unknown
  Bacterial polypetide isolated from the Sargasso Sea
TLSIIGCVVNGPGEAAQTEIGLTGGGQDNNLLYLSGVPHTKIASSKIIDKVVQLVEEKVKEKNN

SEQ ID NO: 91170 - protein, 114 aa, Unknown
  Bacterial polypetide isolated from the Sargasso Sea
IGNEILKSLGLRNRGVKIISCPSCARQASQVIDTVKILEEKLKHIKTPITLSIIGCVVNGPGEAAFTDVGITGGGKGNNMLYLSGVQSKKVLTSEIINKVISEVEKKAAEIENK

SEQ ID NO: 91171 - protein, 76 aa, Unknown
  Bacterial polypetide isolated from the Sargasso Sea
MSIRPFRDIKRRKTKEINVGKVKVGGDNPISVQSMTNTLTTDIKATINQINEIQSEGADIVRVSCPDEASSKALKE

SEQ ID NO: 91172 - protein, 267 aa, Unknown
  Bacterial polypetide isolated from the Sargasso Sea
KLVPIIPDEARTFGMEGFFQKIGIYAHEGQKYEPEDSAQLSSYREEKSGQVLEEGITEAGSMSSWIAAGTAYTNHDIEMIPIYLFYSMFGFQRIGDFAWAAGDSQARGFLIGATAGRTTLAGEGLQHQDGHSHLLASTIPNCISYDPTFHYELAVIFREGLRRMHEKNENIFYYITTMNENYSHPAMPDDCEDGILKGMYKIKETSGSKEAKIQLLGSGTILREMMAASEILKKEYQVDSEVWSVTSFNELRKNGMEVERFNLLNPT

SEQ ID NO: 91173 - protein, 79 aa, Unknown
  Bacterial polypetide isolated from the Sargasso Sea
LVKEHTNHLKGLKISVMGCIVNGPGEMADADYGYVGSGDGVISLYKGKELVKRNISSEQAVDELIRLIKENNDWVDPKN

SEQ ID NO: 91174 - protein, 263 aa, Unknown
  Bacterial polypetide isolated from the Sargasso Sea
EGITEAGSISSWIAAGTAYTNHDVEMIPIYLFYSMFGFQRIGDFAWAAGDSQARGFLIGATAGRTTLAGEGLQHQDGHSHLLASTIPNCISYDPTFHYELAVIFREGLRRMHEKNENIFYYITTMNENYPHPKMPKDCEDGILKGMYKIKESSSSKEAKIQLLGSGTILREMMAASDILKKEYQVDSEVWSVTSFNELRKNGIEVERQNLLNPSETNKKSYIEECLGKQQGPILAATDYMRINADQIRSFTKKSFYSLGTDGY

SEQ ID NO: 91175 - protein, 97 aa, Unknown
  Bacterial polypetide isolated from the Sargasso Sea
SCPSCARQAFQVIDTVKILEEKLSHIKTPITLSIIGCVVNGPGEAALTDIGITGGGKGNNMLYLSGVQSEKVLTGDIIEKVVFEVEKKASELEKINK

SEQ ID NO: 91176 - protein, 317 aa, Unknown
  Bacterial polypetide isolated from the Sargasso Sea
YAHEGQKYEPEDSAQLSSYREEKSGQVLEEGITEAGSMSSWIAAGTAYTNHDIEMIPIYLFYSMFGFQRIGDFAWAAGDSQARGFLIGATAGRTTLAGEGLQHQDGHSHLLASTIPNCISYDPTFHYELAVIFREGLRRMHEKNENIFYYITTMNENYSHPAMPDDSEDGILKGMYKIKETSSSKDVKIQLLGSGTILREMMAASEILKKEYHVDSEVWSVTSFNELRKNGMEVERFNLLNPAETNKKSYVEECLGKQQGPILTATDYMRINADQIRPFTKKSFYSLGTDGYGRSDTRKNLRNFFEVDKEHIVAYSL

SEQ ID NO: 91177 - protein, 111 aa, Unknown
  Bacterial polypetide isolated from the Sargasso Sea
NEILKSLNLRNRGVKIISCPSCARQAFQVIDTVKILEEKLSHIKTPITLSIIGCVVNGPGEASMTDIGITGGGKGNNMLYLSGVQSEKVLTKDIIEKVVTEVEKKVSELKN

SEQ ID NO: 91178 - protein, 40 aa, Unknown
  Bacterial polypetide isolated from the Sargasso Sea
MSLRPFRDIFRRKTKVIKVGNVKVGGNNPITVQSMTNTLT

SEQ ID NO: 91179 - protein, 276 aa, Unknown
  Bacterial polypetide isolated from the Sargasso Sea
IRILTNLLRDKNVAQKLVPIIPDEARTFGMEGFFQKIGIYAHEGQKYEPEDAAQLSSYKEEKGGQVLEEGITEAGSMSSWIAAGTSYTNHDIEMIPIYLFYSMFGFQRIGDFAWAAGDSQARGFLIGATSGRTTLAGEGLQHQDGHSHLISSTIPNCISYDPTFHYELSVIFREGLRRMHEKNENIFYYITTMNENYPHPGIPKDNNIEEGILKGMYKIKEYSKYKNTKIQLLGSGTILREMIKAGEILQNEYKIDSEIWSVTSFTELRRNGLEIE

SEQ ID NO: 91180 - protein, 97 aa, Unknown
  Bacterial polypetide isolated from the Sargasso Sea
ISCPSCARQGFEVIDVVKKLEDKLSHIKTPLTLSIIGCVVNGPGEAASTDIGITGGGKDSNMLYLNGIQKEKLRNDEIISKIVSLVEKKEKDIKNKI

SEQ ID NO: 91181 - protein, 60 aa, Unknown
  Bacterial polypetide isolated from the Sargasso Sea
MEIRPHRIIKRKKTKKIKVGNVFVGGDSPITVQSMTNTLTTDYTATINQINKLEDAGADM

SEQ ID NO: 91182 - protein, 92 aa, Unknown
  Bacterial polypetide isolated from the Sargasso Sea
CARQAFNVIDTVKVLENKLSHIKRPLTLSIIGCVVNGPGEAAQTDIGITGGGKGNNMLYLKGVVSEKITTKEIISKVVNLVEKKVEEIEKNI

SEQ ID NO: 91183 - protein, 115 aa, Unknown
  Bacterial polypetide isolated from the Sargasso Sea
IKAGYEILKSLGIRSRGVNIISCPSCARQAFPVIETVKELEKKLSHIKKSITLSIIGCVVNGPGEASQTEIGLTGGGQDNNLLYLSGIPHTKVASNEIIEKVVQLVEEKVKEKTN

SEQ ID NO: 91184 - protein, 312 aa, Unknown
  Bacterial polypetide isolated from the Sargasso Sea
NLLRDKNVAPRLVPIIPDEARTFGMEGFFQKVGIYAHEGQKYEPEDSAQLSSYREEKGGQVLEEGITEAGAMSSWIAAGTSYTNHDIEMIPIYLFYSMFGFQRIGDFAWAGADSQSRGFLIGATAGRTTLAGEGLQHQDGHSHLLASTIPNCISYDPTFHYELAVIFREGLRRMHEKKENIFYYITTMNENYSHPAIPKDKFCEEGILKGMYKIKEFNKYKKTKIQFLGSGTILREMLAGAEILQKEYQIDSEIWSVTSFNELRRDGLEVERFNLLNPDKENKKSYVEKCLGKTEGPILAASDYMRMNSDQI

SEQ ID NO: 91185 - protein, 294 aa, Unknown
  Bacterial polypetide isolated from the Sargasso Sea
HEGQKYEPVDSEQLSSYREDKSGQVLQEGITEAGAMSSWIAGGTAYTNHDIEMIPIYLFYSMFGFQRIGDLAWAAADSQTRGFLIGATSGKTTLAGEGLQHQDGHSHLLASAIPNCVSYDPTFSYEMAVIFRDGLKRMHEKNENIYYYITAMNENYSHPEKPAGSDQGILKGMYLFKEFKGRGKTKVQMLGSGTILREIIKAAEILSKNHGIDCKVWSVTSFNELKKDGMEIERENLLNPSEKPKKSYLETCLDKQEGTVIAASDYIRSYSDQIRPFVKKPFYSLGTDGLEEGH

SEQ ID NO: 91186 - protein, 71 aa, Unknown
  Bacterial polypetide isolated from the Sargasso Sea
YRTPITLSIIGCVVNGPGEARKADIGLTGGGQGTHQIYLNGVTDHRISDKGIADHIVELVERKAAEVEGQA

SEQ ID NO: 91187 - protein, 54 aa, Unknown
  Bacterial polypetide isolated from the Sargasso Sea
MSLRPFRNIDRKKTKVINVGHVKVGGDNPISVQSMTNTLTTDVSATIKQIQEIH

SEQ ID NO: 91188 - protein, 82 aa, Unknown
  Bacterial polypetide isolated from the Sargasso Sea
MNIRPFREIKRRKTKEINVGNVKVGGDNPISVQSMTNTLTKDVKKTIDQIEQIKEVGADIVRVSCPDEDSTKALKDIIKNIS

SEQ ID NO: 91189 - protein, 43 aa, Unknown
  Bacterial polypetide isolated from the Sargasso Sea
MNIRPFREIKRRKTKEINVGDVKVGGDNPISVQSMTNTITKNV

SEQ ID NO: 91190 - protein, 240 aa, Unknown
  Bacterial polypetide isolated from the Sargasso Sea
MKNLFITILIYLLMTTVHSLAETGKKRGVMEKLKTATCEGFFFGIKAGKDCHKRIKATSEIDKIKEKKSKREAKKSKFKKKVCEGYFFGIKAGKDCDKFLKQEKKIAKKNIEKYSYDKSLSETDLSLYTGTFDVIDKEGDDQTTLVGVEHRNPNLFRNTFLGKLAPVTGAFVTGNNSLYFYTGIEGQYSLGPLNISPSFTPGYYEKGDGKDLGSAMEFKSEIKVGFDILKDSKLGYSYSH

SEQ ID NO: 91191 - protein, 404 aa, Unknown
  Bacterial polypetide isolated from the Sargasso Sea
MKSTGEKEMSTTMALVRMLTTLLRDKNVSPRLVPIIPDEARTFGMEGFFQKIGIYAHEGQKYEPVDSEQLSSYREDKSGQVLEEGITESGAMSSWIAAGTAYTNHDIEMIPIYIFYSMFGFQRVGDLAWAAGDSQARGFLIGATAGRTTLAGEGLQHQDGHSHLMASNIPNCVSYDPTFAYEMAVILRDGIKRMHEKKENIFYYITAMNENYPHPAKPKDVDDGILKGMYLLKENNNKGKTKVQLLGSGTILREVIGAADILSKEYGIDSDIWSVTSFNELRKDGMETERWNLLNPDEKKKKSYVEKCLEKRDGPVIAVSDYVRSFSDQLRPYVQKPFYSFGTDGYGRSDTRKKLRKFFEVDKEHIVAYTLSALAKEQLIAIKHAEKAIKKYKIDKEKAFPTKL

SEQ ID NO: 91192 - protein, 397 aa, Unknown
  Bacterial polypetide isolated from the Sargasso Sea
EMSTTMALVRMLTNLLRDKNVAPKLVPIIPDEARTFGMEGFFQKIGIYAHEGQKYEPEDSAQLSSYREEKSGQVLEEGITEAGSMSSWIAAGTAYTNHDIEMIPIYLFYSMFGFQRIGDFAWAAGDSQARGFLIGATAGRTTLAGEGLQHQDGHSHLLASTIPNCISYDPTFHYELAVIFREGLRRMHEKNENIFYYITTMNENYSHPAMPDDCEDGILKGMYKIKETSGSKEAKIQLLGSGTILREMMAASEILKKEYQVDSEVWSVTSFNELRKNGMEVERFNLLNPAETNKKSYVEECLGKQQGPILTATDYMRINADQIRPFTKKSFYSLGTDGYGRSDTRKNLRNFFEVDKEHIVAYSLSVLANEQLVASKYAEDAFKKYKIDKNKPMPTKM

SEQ ID NO: 91193 - protein, 410 aa, Unknown
  Bacterial polypetide isolated from the Sargasso Sea
MGKSGESINTTHQQKKLDVDDLLYYRDRFDVPLTDEQVKNIEYYRPKEDSQEIKYLKERRLQLGGFIPERSSFAKSIKVPTKDIFDVMKQSTGTKEMSTTMALVRMLTNLLRDKNVSPKLVPIIPDEARTFGMEGFFQKIGIYAHEGQKYEPVDAKLLSSYREDKSGQVLEEGITEAGSMSSWIAAGTSYTNHDIEMIPIYLFYSMFGFQRVGDFAWAAGDSQARGFLIGATSGRTTLAGEGLQHQDGHSHLLASTIPNCVSYDPTFAYELAVIFRDGLRRMYEKKENVFYYITTMNENYPHPAIPKDKNIEEAILKGMYKIKQISKNKKTKIQLLGSGTILREMMQAADILDKDFKIDCDIWSVTSFNELRKDGMEVERHNLLNPNEKPKKAYVENCLKDAEGPILAAS

SEQ ID NO: 91194 - protein, 396 aa, Unknown
  Bacterial polypetide isolated from the Sargasso Sea
MSTTMALVRMLTNLLRDKNVAPKLVPIIPDEARTFGMEGFFQRIGIYAHEGQKYEPEDSAQLSSYREEKSGQVLEEGITEAGSMSSWIAAGTAYTNHDIEMIPIYLFYSMFGFQRIGDFAWAAGDSQARGFLIGATAGRTTLAGEGLQHQDGHSHLLASTIPNCISYDPTFHYELAVIFREGLRRMHEKNENIFYYITTMNENYSHPEMPKDCEDGILKGMYKIKETSGSKDAKIQLLGSGTILREMMAASEILKNEYQVDSEVWSVTSFNELRKNGMEVERFNLLNPAETNKKSYVEECLGKQQGPILTATDYMRINADQIRPFTKKSFYSLGTDGYGRSDTRKNLRNFFEVDKEHIVAYSLSILANEQLVASKYAEDAIKKYKIDKNKPMPTKM

SEQ ID NO: 91195 - protein, 75 aa, Unknown
  Bacterial polypetide isolated from the Sargasso Sea
KKLEHIKTPMSLSIIGCVVNGPGEALMTDIGFTGGGAGSGMIYRLGKTDHKLDNDKMIDHIVDLVEKRAEELSEK

SEQ ID NO: 91196 - protein, 416 aa, Unknown
  Bacterial polypetide isolated from the Sargasso Sea
MFGGTTGKLAGTIKSALDNSPLVGANIIIENTDLGTATDISGDYVILNIAPGKFNVTIRMIGYGVKKYENIRISIDKTTRLSAQLNIEAVEGQEVIVSATRPLIDFDKTNSEAIVTSEELEVMPIEDVLDVIKLQGGVTQDAGGGIHIRGGRSSEVAYLVDGVSVTDAYDGAIAVNIENANIQELQVISGTFNAEYGKAMSGIVNIVTKDGSDKFESYLQLYSGDHQSDNKMYKDLSSYNLTNDRNLTLNLSGPIIKQKLNFFISARSYASDGWLNGMQTFTMYGDTIHNDNNLNGYFDSSDVKKEPYYRPMNWRDKYSLQTKLTYKLNPKLILRLNSITSDEQWENYNHYRQMAQDGQKTNYARGTFTGIKLSQSFSSKTFYDININQSVHEYETYLFKNPLDLRYITPDHLSAK

SEQ ID NO: 91197 - protein, 49 aa, Unknown
  Bacterial polypetide isolated from the Sargasso Sea
ISLPGTGEEPAAPVFVDGNKFKILRGKNIADDFKKILYNYIDENYEKNI

SEQ ID NO: 91198 - protein, 90 aa, Unknown
  Bacterial polypetide isolated from the Sargasso Sea
MEIRPHRIIKRKITKEIKVGKLTVGGKAPISVQSMTNTLTTDVKETINQIHDLEEAGVDIVRVSCPDEKSTKALKEIISEVSVPIVADIH

SEQ ID NO: 91199 - protein, 50 aa, Unknown
  Bacterial polypetide isolated from the Sargasso Sea
MSLRPFRDIHRRKTKVIHVGNVKIGGDNPISVQSMTNTITSNTKETIKSN

SEQ ID NO: 91200 - protein, 43 aa, Unknown
  Bacterial polypetide isolated from the Sargasso Sea
MSIRPFRDIHRKKTKVINVGGVKIGGNNPISVQSMTNTLTRKY

SEQ ID NO: 91201 - protein, 76 aa, Unknown
  Bacterial polypetide isolated from the Sargasso Sea
VQKLEARLSHIKTPMSLSIIGCVVNGPGEALMTDVGFTGGGAGSGMVYLAGKASHKMSNEEMIDHIVQLVEKKVRN

SEQ ID NO: 91202 - protein, 75 aa, Unknown
  Bacterial polypetide isolated from the Sargasso Sea
KLSHIKTPITLFLIGCVVNGPGEAAQTDIGITGGGKDSSMLYLKGVQTEKLNNNDIVSKIVNLVEKKAEEIEIKK

SEQ ID NO: 91203 - protein, 59 aa, Unknown
  Bacterial polypetide isolated from the Sargasso Sea
MSIRPFRDINRRKTKVINVGKVKIGGDNPISVQSMTNTLTTDIKSTIKQIDEIQNEGAD

SEQ ID NO: 91204 - protein, 52 aa, Unknown
  Bacterial polypetide isolated from the Sargasso Sea
MNIRPFREIKRRKTKEINVGYVKVGGDNPISVQSMTNTLTKDVKETVKQMKK

SEQ ID NO: 91205 - protein, 72 aa, Unknown
  Bacterial polypetide isolated from the Sargasso Sea
IKTPITLSIIGCVVNGPGEASLTDIGITGGGKDSSMLYLKGVQTEKLDNQEIVSKVVDLVEKKASEIDKQQK

SEQ ID NO: 91206 - protein, 81 aa, Unknown
  Bacterial polypetide isolated from the Sargasso Sea
VIGTVKKLEERLSSISEPFTISVIGCVVNGPGEATMSDVGFTGGGNDSGMLYVDGKQLAKRNNDELIDSIVSEVEKKIKQK

SEQ ID NO: 91207 - protein, 49 aa, Unknown
  Bacterial polypetide isolated from the Sargasso Sea
MFNRRKTSQIQVGKVGIGSNYPISVQSMTTTKTRDVDGTLAQIYEIASN

SEQ ID NO: 91208 - protein, 348 aa, Unknown
  Bacterial polypetide isolated from the Sargasso Sea
KYLKERRLKLGGYLPERSTFAKPIKAPPEDIFDVMMKSTGDKEMSTTMALVRMLTNLLRDKNVASRLVPIIPDEARTFGMEGFFQKIGIYAHEGQKYEPVDSEQLSSYREDKKGQVLEEGITEAGSMSSWIAAGTSYTNHDIEMIPIYLFYSMFGFQRVGDFAWAAGDSQARGFLIGATSGRTTLAGEGLQHQDGHSHLLSSTIPNCVSYDPTFAYELAVIFRDGLKRMHEKKENIFYYITTMNENYPHPEIPKDSEKGILRGMYKIKEFSKYKKTKIQLLGSGTILREMINAAEMLQKDYQIDSEVWSVTSFSELRKNGMEVERYNLLHPDKKKKKSYIEECLGSSE

SEQ ID NO: 91209 - protein, 90 aa, Unknown
  Bacterial polypetide isolated from the Sargasso Sea
MEVRPHRIIKRKKTKLIKVGKVSVGGESIISVQSMTNTLTTNIKETINQIHSLEEAGADIVRVSCPDEGSTKALKNIVKEISVPLVADIH

SEQ ID NO: 91210 - protein, 57 aa, Unknown
  Bacterial polypetide isolated from the Sargasso Sea
MDKRSKTYSVKVGDIYIGSEHPIRVQSMTNTNTSNIADTVSQIIELYDAGSELVRVT

SEQ ID NO: 91211 - protein, 56 aa, Unknown
  Bacterial polypetide isolated from the Sargasso Sea
MIERKKTKEVRIGNVMIGGDHAVTVQSMTTTKTHDVTATLKEVERLEEAGCHLIRI

SEQ ID NO: 91212 - protein, 82 aa, Unknown
  Bacterial polypetide isolated from the Sargasso Sea
MEIRPHRIIKRKKTKKIKVGNIFVGGDSVISVQSMTNTLTTDHEATIKQIKELEEAGADLVRVSCPDEESTKALKIITKKTR

SEQ ID NO: 91213 - protein, 71 aa, Unknown
  Bacterial polypetide isolated from the Sargasso Sea
METRPHRIIKRKKTRKITVGNINVGGDSQISVQSMTNTLTTDIKKTINQINSLKEAGADIVRVSCPDEDST

SEQ ID NO: 91214 - protein, 135 aa, Unknown
  Bacterial polypetide isolated from the Sargasso Sea
SLLLDGIGDTVRVSLSDDPVEEIKVGNEILKSLNLRNRGVKIISCPSCARQAFEVIKTVKELEKRLSHIKKPITLSIIGCVVNGPGEAKQTEIGITGGGKDNHMLYLNGLETEKVMTKDMINKIVSLVEEKASNL

SEQ ID NO: 91215 - protein, 43 aa, Unknown
  Bacterial polypetide isolated from the Sargasso Sea
MHCESPIKRRLSRKIWVGSVPVGGDAPIAVQSMTNTDTNDGLL

SEQ ID NO: 91216 - protein, 150 aa, Unknown
  Bacterial polypetide isolated from the Sargasso Sea
TIKSSIGFGSLLLDGIGDTIRVSLSDDPVKEINVGNEILKSLNLRNRGVRIISCPSCARQAFEVINTVKVLEERLSHIKTPITLSIIGCVVNGPGEAAQTDIGITGGGKGNHMLYINGVESEKIKSEEIISKVVTMVEKKAAEIENNPKK

SEQ ID NO: 91217 - protein, 39 aa, Unknown
  Bacterial polypetide isolated from the Sargasso Sea
MSIRPWRDIQRKKTKKIKVGNVEIGGDAPISVQSMTNTL

SEQ ID NO: 91218 - protein, 320 aa, Unknown
  Bacterial polypetide isolated from the Sargasso Sea
WRYTIGYVESAMEFLRICGYWNYHEVILSMKASNTQVMVQAYRLLVKKMVDEGMNYPLHLGVTEAGDGEDGRIKSSVGIGALLEDGIGDTIRVSLTEEPEFEIPVAKLMAQRYKEGFTLEPLEKIVSLPYDPFFHSRRKTTNINGIGSDYVPRVFSDLSRRDNIRPEDLAPLGYLYSKEQDKWHLSEQAVDYLYVGDNKIEFELPGTLSIIQNSKIWKENDQIYPVFNLDNYRTASKRSNQMNFLFIDGKTITDELKLILNQDKTIVLILRNSDEHSVMVHRKFIIDMVDLGIKTPVILNRSYNDISNLDFQIKSSIDVD

SEQ ID NO: 91219 - protein, 261 aa, Unknown
  Bacterial polypetide isolated from the Sargasso Sea
MGRRRKTLGARGRRGAVTPRAQAVSQEYAMNEEGVLMPTGKYCVNHAETVRRKTRTVNVGNVKIGSEHPIVKQTMTTSDTRDVEATVAEVIRCADAGAEMVRITVQGMQEAKACKEIKETLVARGYDTPLIADIHFAPKVAMMVAECFDKIRVNPGNFADGRKKFEDILYETDEEYNAELEEIEKIFTPLVLKCKERGVAMRIGTNHGSLSARTLSRYGDTPMGMVESAFEFARICRKHDYHNFVFSMKASNPLVMVQAYR

SEQ ID NO: 91220 - protein, 95 aa, Unknown
  Bacterial polypetide isolated from the Sargasso Sea
MEIRPYRKIKRRKTKLIKVGKVEVGGNSKITVQSMTNTLTTDIKETINQILELEKSGADIVRVSCPDEASTAALKDITKEINVPIVADIHFHHKR

SEQ ID NO: 91221 - protein, 152 aa, Unknown
  Bacterial polypetide isolated from the Sargasso Sea
FEKVAIDASIDLGSILLEGMGNGIWIQAMDFESKINELSFLILQNTRTRIFKTDYISCPSCGRTKFDLQETTALVKKHTNHLKGLKISVMGCIVNGPGEMADADYGYVGSGDGIISLYKGKELVKRNISSEDAVDELILLIKENDDWVDPKN

SEQ ID NO: 91222 - protein, 107 aa, Unknown
  Bacterial polypetide isolated from the Sargasso Sea
MFQADFISCPSCGRTFFDLQQTTEQIKRKTAHLTGVKIAVMGCVVNGPGEMADADYGYVGAGPGKIHLYRGQQCVQRNIPSHDAVDKLIELIRIEGRWIEPVEASAA

SEQ ID NO: 91223 - protein, 135 aa, Unknown
  Bacterial polypetide isolated from the Sargasso Sea
MISEIRPFRNINRKKTKEISVGKIKVGGNNPITVQTMTNTLTTDHKSTVEQINKVTEAGADIVRVSCPDSKSTQALKTIIKHVDVPIVADIHFHYKRAIEAAENGADCLRINPGNIGDVKRISEVISAAKNNNCS

SEQ ID NO: 91224 - protein, 219 aa, Unknown
  Bacterial polypetide isolated from the Sargasso Sea
MRRKTLSVKIGKVFIGSDHSIKTQSMTTASTMDTDKSVDEAIRIIQAGGKLVRFTAPNINEAKNLLNIKNALVAKGYDDPLVADIHFTPNAALEASKIVEKVRINPGNYVDKKKFEVKEYDDKSYQDELLKIEEKFIPLINSCKENKVAMRIGTNHGSLSDRVMNRFGDTPLGMVESAMEFLRICKKNDYDQIVLSMKSSNPIVMIHAYRLLVKSMENE

SEQ ID NO: 91225 - protein, 111 aa, Unknown
  Bacterial polypetide isolated from the Sargasso Sea
RVISCPGCGRTSNSYFVELSKSIKSYISSQMPDWKRQYPGIEDMNIAVMGCIVNGPGESKHANIGISLPGNNEDPSAPVYIDGKKFTTLQGDNIDNQFIDILQSYIEDKYS

SEQ ID NO: 91226 - protein, 276 aa, Unknown
  Bacterial polypetide isolated from the Sargasso Sea
MVQAYRLLSHEMYKLGWDYPLHLGVTEAGEGEDGRMKSSIGIGALLLDGLGDTIRVSLTEASELEIEPCTRLANLGMKACADNIGVEQFDETVRDFKTFTRRTGDLPEQKDSDTIDFRNILHRDGSVLAAVTTAQLASEDGFYRELGTKLAVGMPLRDIATCDSILLSEVPAASEEKALRSIRRLQEIGVGVIVPAAALKATPLENAIALVTADEVGEALPAGAGRKAVTLNGFETTEQLKAVAASDAVMVLVKTKDGESRLHSSRRIAKELAQIG

SEQ ID NO: 91227 - protein, 236 aa, Unknown
  Bacterial polypetide isolated from the Sargasso Sea
MKRRITQPVYVGDVQIGGNSPISIQSMTKTDTRDVKSTVKQIKELEEAGCDIIRCAVPDKEAATALKDIKSKIKIPLIADIHFHYQLALESLKSGVDCLRLNPGNIRDKEKVSEIVNEAKKLKVPIRIGVNFGSLPPVGKIGATRGISRHNDGVNLLEKGLGQEEKEYSVVDHMVATGLWEIKILEDLDFDMIKISLKAFDLDTTIEAYRKMSKLVPYPLHLGITEAGTAKSGSIR

SEQ ID NO: 91228 - protein, 145 aa, Unknown
  Bacterial polypetide isolated from the Sargasso Sea
MSLTQSKEVNSLSKRYSTHIERRITRTVMVGDIAIGSDYPVRVQSMINEDTMDVENAYLAIKRLHDVGCEIVRLTVPSLAHAKAVGDIKVKLLENNINTPLVADVHHNGMKIAMEVAKHVDKVRINPGLFVFEKSDPTRTEYTDE

SEQ ID NO: 91229 - protein, 113 aa, Unknown
  Bacterial polypetide isolated from the Sargasso Sea
MSVRPYRDIERRKSRQIMVGDVPVGGDAPITVQSMTNTRTTDVAGTIEQIRTLEVAGADIVRVSCPDEDSTLALREIIPEVTVPIVADIHFHYQRAIEAAEAGAACLRLNPGN

SEQ ID NO: 91230 - protein, 98 aa, Unknown
  Bacterial polypetide isolated from the Sargasso Sea
PSCGRTFFDLQQTTEQIKRKTAHLMGVKIAVMGCVVNGPGEMADADYGYVGAGPGKIHLYRGQQCVQRNIPSHDAVDKLIELIRSEDRWIEPVEASAA

SEQ ID NO: 91231 - protein, 105 aa, Unknown
  Bacterial polypetide isolated from the Sargasso Sea
MSIRPFRDIKRRKTKVINVGNVKIGGDNPISVQSMTNTLTTDIKGTINQINDIAKEGADIVRVSCPDEDSSFALKEIVKHVPVPIVADIHFHYKRAIEAAENGAK

SEQ ID NO: 91232 - protein, 98 aa, Unknown
  Bacterial polypetide isolated from the Sargasso Sea
TYFVELSKSIKNHINKQMPLWKNKYQGVEDLNIAVMGCIVNGPGESKHANIGISLPGNNEDPSAPVFIDGKKYKTLHGNNIEDQFLDILQSYIDEKYS

SEQ ID NO: 91233 - protein, 151 aa, Unknown
  Bacterial polypetide isolated from the Sargasso Sea
MGSIKSSIGLGNLLMDGIGDTIRVSLSDDPVEEVKIGNEILKSIGLRNRGVKIISCPSCARQGFQVIETVKILEDKLSHIKEHITISIIGCVVNGPGEASQTDIGITGGGGDSNMLYLNGLQSEKLSNNEIISKVVQQVEKKASEIQKKGK

SEQ ID NO: 91234 - protein, 144 aa, Unknown
  Bacterial polypetide isolated from the Sargasso Sea
MISEIRPFRNINRKKTKEIKVGKVKVGGNNPITVQTMTNTLTTDHKSTIEQINKVTEAGADIVRVSCPDSNSTDSLKTILKHVDIPIVADIHFHYKRAIEAAENGADCLRINPRNIGDIKRVAEIISAAKNNNCSIRIGVNAGS

SEQ ID NO: 91235 - protein, 154 aa, Unknown
  Bacterial polypetide isolated from the Sargasso Sea
MGGFVSGSIKSSIGLGTLLLDGIGDTIRISLSDDPVKEVQIGNEILKSLNLRERGVKIISCPSCARQGFEVIETVKVLEKRLSHIKTPITLSVIGCVVNGPGEAAMTDVGITGGKKGNNMLYLSGIQSEKVLTSDMIEKVVSEVEKKASELENS

SEQ ID NO: 91236 - protein, 264 aa, Unknown
  Bacterial polypetide isolated from the Sargasso Sea
MEPLEKIVSLPYDPFFHSRRRTTNINGIGSDSVPRVFSDLSRIDNIRPEDLAPLGYLYSEEQDKWHLSEQAVDYLYVGNNKIEFELPGTLSIIQNSKIWKENDQSYPVFNLDNYRTTSKRSNQMNFLFMDGKTITDELKLILNQDKTIVLILRNSDEHSVMVHRKFIIDMVDLGIKTPVILNRSYNDISNLDFQIKSSIDIGSLYIDGLGDGVWVDFGSEYGVVNQTVFGILQASRMRISKTEYISCPSCGRTLFDLQETTSKI

SEQ ID NO: 91237 - protein, 84 aa, Unknown
  Bacterial polypetide isolated from the Sargasso Sea
HKIQNEGADLVRVSCPDESSSKALKEIVKHIDIPLIADIHFHFKRAIEAAENGASCLRINPGNIGDKKKIHDVLKAAKNNDCSI

SEQ ID NO: 91238 - protein, 134 aa, Unknown
  Bacterial polypetide isolated from the Sargasso Sea
MSLTQSKEVNSLSKRYSTHIERRITRTVMVGDVAIGSDYPVRVQSMINEDTMDVENAYLAIKRLHDVGCEIVRLTVPSLAHAKAVGDIKAKLLENNINTPLVADVHHNGMKIAMEVAKHVDKVRINPGLFVFEK

SEQ ID NO: 91239 - protein, 141 aa, Unknown
  Bacterial polypetide isolated from the Sargasso Sea
IGIGKLLSQGIGDTIRVSLTADPIEEVKVGFEILKSLNLRSKGVKIISCPSCARQAFPVIETVKTLEKRLSHITKPLTLSIIGCVVNGPGEAMNSDIGVTGGGKNTNMIYLSGVADHKISNSEIVDHVVKLVEEKVSLLND

SEQ ID NO: 91240 - protein, 255 aa, Unknown
  Bacterial polypetide isolated from the Sargasso Sea
MKASGYKIGDRETFKLLSWKTGTEFTDPKKVFDAKLDRSDGEQVLLLNEQEIETGSDKTILDHLKSKLLVLEVSNPLYTIRNLNQRLEGKAKPAAIGFQLPIIETMEDHLGLAAELGELISSRELHALICRDGDPESLSARFAQNLMQAARVRMFQADFISCPSCGRTFFDLQQTTEQIKRKTAHLTGVKIAVMGCVVNGPGEMADADYGYVGAGPGKIHLYRGQQCVQRNIPSHDAVDKLIDLIGSEGRWIEPV

SEQ ID NO: 91241 - protein, 122 aa, Unknown
  Bacterial polypetide isolated from the Sargasso Sea
GFDILKSLNLRKKGVNIIACPSCSRQNFDVIKTVNELEARLEDINESVDLAVIGCLVNGPGEAREVDVGLTGGTPNNLAYRDGEKSHHITADDLVDELERMVRAKVKKQREDEEKGIIARSE

SEQ ID NO: 91242 - protein, 108 aa, Unknown
  Bacterial polypetide isolated from the Sargasso Sea
MSHYSQNKIIRRRTKKIKVGSVEVAGDAKISVQSMTNTLTSDVDATVKQINDLVSEGADIVRVSCPDQESTKSLKEIINYVNVSIVADIHFHYKRAIEAADAGAACLR

SEQ ID NO: 91243 - protein, 115 aa, Unknown
  Bacterial polypetide isolated from the Sargasso Sea
MSIRPFRDIKRKKTKEINVGKVKVGGNNPISVQSMTNTLTTDIKATINQINEIHSEGADIVRVSCPDESSTKSLKEIIQHVDVPVVADIHFHYKRAIEAAESGASCLRINPGNME

SEQ ID NO: 91244 - protein, 152 aa, Unknown
  Bacterial polypetide isolated from the Sargasso Sea
MERQYQKIDRRKSNIIKVGNVNIGGNSPISVQTMTNTITSDIKSTIDQINRVTKVGADLVRVSIPDQDSSTALKEICKESKIPIIADIHFHYKRAIESAVNGASCLRINPGNIGSKEKIKEVIKAAKDNNCSMRIGVNGGSLEKKILEKYKE

SEQ ID NO: 91245 - protein, 92 aa, Unknown
  Bacterial polypetide isolated from the Sargasso Sea
MSLRPYRDINKRKTKEIKVGDVKIGGSNPITVQSMTNTLTTDVTATINQIEKLTNEGADLVRVSCPDEASSKSLKEICKHSKVPIIADIHFH

SEQ ID NO: 91246 - protein, 80 aa, Unknown
  Bacterial polypetide isolated from the Sargasso Sea
MRKLVEETEKRIVDLKPKRSLKVAILGCVVNGPGEASDADIGIAGGRFGKGQIYKNGKLFKSCEESELVDILVEEIKNLN

SEQ ID NO: 91247 - protein, 122 aa, Unknown
  Bacterial polypetide isolated from the Sargasso Sea
MQIFIFIIRESVEAAISGADCLRINPGNIGSKEKVKEILKAAKDNNCSVRVGINAGSLEKKILEKYKEPCPEALVESALNNIKILEDADFFNFKISVKSSDVFLSIKAYRSLSEVCNYPLHL

SEQ ID NO: 91248 - protein, 97 aa, Unknown
  Bacterial polypetide isolated from the Sargasso Sea
MSIRPFRDIVRKKTKKIKVGNVEVGGNAPISVQSMTNTLTTNIEQTVKQINELKEAGADIVRVSCPDQDSSLSLKKIIKQVKVPIVADIHFHYKRVS

SEQ ID NO: 91249 - protein, 149 aa, Unknown
  Bacterial polypetide isolated from the Sargasso Sea
LAGSIKSSIGIGHLLMKGIGDTIRVSLSANPEEEIKAGYDILKSLNLRSRGVKIISCPSCARQAFPVIETVKRLEEKLSHIKKPITLSIIGCVVNGPGEASQTEIGLTGGGNDSNLLYLSGIPHKKVINENIISQVVKLVEEKAKEKKL

SEQ ID NO: 91250 - protein, 148 aa, Unknown
  Bacterial polypetide isolated from the Sargasso Sea
KSAIGLGSLLWMGIGDTVRVSLSADPVQEVKVGYEILKSLGLRHRGVNIISCPSCARQGFDVIKTVEILEQKLEHIKTPMSLSIIGCVVNGPGEALMTDVGFTGGGAGNGMVYWAGKQDHRIENTKMIDHIVELVEQRALELSSEEKV

SEQ ID NO: 91251 - protein, 147 aa, Unknown
  Bacterial polypetide isolated from the Sargasso Sea
MRRKTLSVKIGNIFIGSDHSIKTQSMTTASTMDTDRSVNEAIRIIQAGGKLVRFTAPNINEAKNLLNIKNTLVAKGYKDPLVADIHFTPNAALEASKIVEKVRINPGNYVDKKKFEVKEYDDESYQDELLKIKEKFIPLINSCKENG

SEQ ID NO: 91252 - protein, 46 aa, Unknown
  Bacterial polypetide isolated from the Sargasso Sea
PVVADIHFHFKRAIEAAENGAHCLRINPGNIGEKKKISQVYFSGKK

SEQ ID NO: 91253 - protein, 138 aa, Unknown
  Bacterial polypetide isolated from the Sargasso Sea
SSYGRIGDTIRVSLSDNPTKEIKIGNEILKSLNLRNRGVKVISCPSCARQAFPVIDTVRILEEKLSHIKAPITLSIIGCVVNGPGEAALTDIGITGGGKNSNMLYLKGIQSEKLSNDEIISKVVSLVEKKAEELEKIS

SEQ ID NO: 91254 - protein, 86 aa, Unknown
  Bacterial polypetide isolated from the Sargasso Sea
MNGPFQSATGPSVRRHSIPVKVGHVTIGGGSPIVVQSMTNTDTADIKGTVEQVAELARAGSEIVRITVDRREAAAAVPHIRDELHR

SEQ ID NO: 91255 - protein, 76 aa, Unknown
  Bacterial polypetide isolated from the Sargasso Sea
MDKQPVQRKITKKIWVGDVPVGGGSPVSVQSMTNTETLDVSATVNQIKELEDAGADIVRVSVPSMDAAEAFKHIRE

SEQ ID NO: 91256 - protein, 108 aa, Unknown
  Bacterial polypetide isolated from the Sargasso Sea
MNIRPFREIKRRKTKEINVGHVKVGGDNPISVQSMTNTLTKDVKATIKQIEQIEEAGADIVRVSCPDEESTKALKNIIRNTSLPIVADIHFHYKRAIEAAESGAACLR

SEQ ID NO: 91257 - protein, 145 aa, Unknown
  Bacterial polypetide isolated from the Sargasso Sea
SSIGLGTLLLEGIGDTIRISLSDHPVEEVKIGNEILKSLNLRERGVKIISCPSCARQGFEVIETVKILEKKLSHIRTPITLSVIGCVVNGPGEAAQTDIGITGGKKGNNMLYLSGVQSEKVFTNDMIDKVVREVEKKASELDNSK

SEQ ID NO: 91258 - protein, 261 aa, Unknown
  Bacterial polypetide isolated from the Sargasso Sea
MIKPSGCKIGDRETFKLLSWKTDTEFTDPKKVFDAKLDRSDGEQILVLNEQEIETGLDNTILDHLKSKLLVLEVSNPLYTIRNLNQRFEGNAKPAAIGFQLPFIETIEDHLGLAAELGELISSRELHALICRDGDPESISARFAQNLMQATRVRMFQADFISCPSCGRTFFDLQQTTEQIKSKTAHLTGVKIAVMGCVVNGPGEMADADYGYVGAGPGKIHLYRGQQCVQRNIPSHDAVDKLIDLIRSEGRWIEPVEASAA

SEQ ID NO: 91259 - protein, 86 aa, Unknown
  Bacterial polypetide isolated from the Sargasso Sea
MKNVEKTRHITKVVKVGNVSIGGMNPIVVQSMTNTDTADVKGTFEQVKDLVDAGSEIVRITVNTEKAAIAVPNIQEKYLKLAMMFR

SEQ ID NO: 91260 - protein, 129 aa, Unknown
  Bacterial polypetide isolated from the Sargasso Sea
MSIRPFRDIKRRVTRVINVGKVKVGGNNPISVQSMTNTLTKDAKDTLRQINNISEVGGDIVRVSCPDEDSTFAIKEITKHSPIPIVADIHFHYKRAIEAAENGADCLRINPGKKGEKEKILEVIQQQKI

SEQ ID NO: 91261 - protein, 126 aa, Unknown
  Bacterial polypetide isolated from the Sargasso Sea
MLRSYQKIKRRKTRVINVGDILIGGNNPISVQTMTNTLTIDTKSTIKQIDKVFKAGADLVRVSIPDKESSKSLKKIVKESKIPIIADIHFHYKRAIEAAENGASCLRINPGNIGSLEKVKEVIKQP

SEQ ID NO: 91262 - protein, 89 aa, Unknown
  Bacterial polypetide isolated from the Sargasso Sea
MSIRPFRDIKRRKTKKIKVGKVEVGGDAPISVQSMTNTLTTDIKATTKQINELAEAGADIVRVSCPDKDSSLSLKKILKTCKRSYSCRY

SEQ ID NO: 91263 - protein, 191 aa, Unknown
  Bacterial polypetide isolated from the Sargasso Sea
MSLTQSKEVNSLSKRYSTHIERRITRTVMVGDIAIGSNYPVRVQSMINEDTMDVENAYLAIKRLHDVGCEIVRLTVPSLAHAKAVGDIKAKLLENDINIPLVADVHHNGMKIAMEVAKHVDKVRINPGLFVFEKSDPTRTEYTDEEFETIKQTILKRFTPLVEVLKAENKALRIGVNHGSLSERMLFTYGD

SEQ ID NO: 91264 - protein, 105 aa, Unknown
  Bacterial polypetide isolated from the Sargasso Sea
MQIRPHRIIKRKRTKEIKVGKVSVGGNSKITVQSMTNTLTTDVKNTIIQINQLEEAGADIVRVSCPDENSSKSLKEIIKNVEVPIVADIHFHYKRAIEAAQMGAS

SEQ ID NO: 91265 - protein, 106 aa, Unknown
  Bacterial polypetide isolated from the Sargasso Sea
MSIRPFRDINRRKTKVINVGNVKVGGENPITVQSMTNTLTKDSYSTIKQINKIAEQGADIIRVSCPDEDSTLSLKEIVKHVDVPLVADIHFHYKRAIEAAENGAKC

SEQ ID NO: 91266 - protein, 93 aa, Unknown
  Bacterial polypetide isolated from the Sargasso Sea
MSIRPFRDIKRKITKVINVGKVKVGGNNSISVQSMTNTLTSNVKETLNQINKISEVGGDIVRVSCPDEQSTNAFKGITKHSPIPVVADIHFHY

SEQ ID NO: 91267 - protein, 106 aa, Unknown
  Bacterial polypetide isolated from the Sargasso Sea
MSLRPFRDIQRRKTKEIKVGKIKIGANNPIAVQSMTNTKTTDIKSTIEQINKIEEEGADLVRVSCPDEESSLALKEITKHVNLPVIADIHFHYKRAMKQQLMVRHV

SEQ ID NO: 91268 - protein, 40 aa, Unknown
  Bacterial polypetide isolated from the Sargasso Sea
IKKATNIPLVSDIHFDYKIALKVLEYDVDCVRINPGNIGS

SEQ ID NO: 91269 - protein, 132 aa, Unknown
  Bacterial polypetide isolated from the Sargasso Sea
MSIRPFRDINRKKTKPVRVGNIIIGDNQPVSVQSMTNTLTTDIKATLKQINDIISEGGDLVRVSVPDKDSSDALKEITKNSSVPIIADVHYHYKRAIESAENGAKCLRINPGNIGDVKKIREIISAAKNNDC

SEQ ID NO: 91270 - protein, 146 aa, Unknown
  Bacterial polypetide isolated from the Sargasso Sea
IKSSIGLGNLLLDGIGDTIRVSLSDDPVEEIKIGNEILKSLNLRNRGVRIISCPSCARQGFQVINTVKILEEKLSHIKTPITLSIIGCVVNGPGEAALTDIGVTGGGKNSNMLYLKGVQTEKLDNQDIISRVVELVEKKAEEIEIK

SEQ ID NO: 91271 - protein, 204 aa, Unknown
  Bacterial polypetide isolated from the Sargasso Sea
TNTIMQTFSNNVVIVLNVDNANRHDLLSAFNFLEEKRIKIPVILKGSYQSSDFEKVAIDASIDIGSILLEGMGNGIWIQTKDFDSKINELSFLILQNTRTRIFKTDYISCPSCGRTKFDLQETTALVKEHTNHLKGLKISVMGCIVNGPGEMADADYGYVGSGDGVISLYKGKELVKRNISSEQAVDELIQLIKENDDWVDPKN

SEQ ID NO: 91272 - protein, 114 aa, Unknown
  Bacterial polypetide isolated from the Sargasso Sea
MRRKTLSVKIGKVFIGSDHSIKTQSMTTASTMDTDKSVDEAIRIIQAGGKLVRFTAPNINEAKNLLNIKDALVAKGYDDPLVADIHFTPNAALEASKIVEKVRINPGNYVDKKK

SEQ ID NO: 91273 - protein, 223 aa, Unknown
  Bacterial polypetide isolated from the Sargasso Sea
MNNTYNNHLFNYKRRKSLSVSIGDSAIGGSNPIRIQSMTTSDTMDTNETVEESIRMINSGSEYIRITAPSINEAKNLRNIKKELSNRGYNIPLIADIHFTPNAAEIAAKIVEKVRINPGNYADKKSFKKIEYDDNSYNAEIERIYERVSPLIKICKSNGTAMRIGTNHGSLSDRIMSRFGDTPLGMVESALEYLRICEDHSFYNIVLSMKASNPLVMVHAYRL

SEQ ID NO: 91274 - protein, 162 aa, Unknown
  Bacterial polypetide isolated from the Sargasso Sea
MSLTQSKEVNSLSKRYSTHIERRITRTVMVGDIAIGSDYPVRVQSMINEDTMDVENAYLAIKRLHDVGCEIVRLTVPSLAHAKAVGDIKAKLLENNINTPLVADVHHNGMKIAMEVAKHVDKVRINPGLFVFEKSDPTRTEYTDEEFETIKQTILKRFTPLV

SEQ ID NO: 91275 - protein, 106 aa, Unknown
  Bacterial polypetide isolated from the Sargasso Sea
MSLRPFRDIKRRKTKVINVGTVKIGGDNPISVQSMTNTLTTDIKSTISQINKIAEEGADIVRVSCPDKDSTNALKEITKHVSIPVVADIHFHYKRAIEAAENGANV

SEQ ID NO: 91276 - protein, 117 aa, Unknown
  Bacterial polypetide isolated from the Sargasso Sea
MERSYQKIDRRKTRTINVGKLKIGGNNPILVQTMTNTPTVDIKSTLAQIKRVTDIGADIVRVSVPDKNSSEALKEICKVSQVPIIADIHFHYLRAVESAKNGASCLRINPGNIGSKE

SEQ ID NO: 91277 - protein, 97 aa, Unknown
  Bacterial polypetide isolated from the Sargasso Sea
MNIRPFRDIKRRKTKKIKVGKVDIGGDAPISVQSMTNTLTTDVEATIKQINKLTEAGADIVRVSCPDKDSSLALKKISKRIEVPIVADIHFNYKLAI

SEQ ID NO: 91278 - protein, 151 aa, Unknown
  Bacterial polypetide isolated from the Sargasso Sea
EKVAIEASIDIGSILLEGMGNGIWIQTKDFDSKINELSFLILQNTRTRIFKTDYISCPSCGRTKFDLQETTALVKEHTNHLKGLKISVMGCIVNGPGEMADADYGYVGSGDGVISLYKGKELVKRNISSEYAVDELIQLIKENDDWIDPKN

SEQ ID NO: 91279 - protein, 193 aa, Unknown
  Bacterial polypetide isolated from the Sargasso Sea
NFDNFKISVKASNVFTAVESYRMLSNFCDYPLHLGITEAGSYFSGSIKSSIGLGLLLYDGIGDTVRVSLSDHPTQEVKVGFEMLKSLNLRDYGVTIISCPSCARQQFDVIETVKNVEKKLSHIKKPITVSIIGCVVNGPGEATMTNIGITGGGNNTHMVYVDGEKSHRIHNEDLVEYLVKTIENKVDQIHHLK

SEQ ID NO: 91280 - protein, 120 aa, Unknown
  Bacterial polypetide isolated from the Sargasso Sea
MSIRPFRDIKRRKTKVINVGNVKIGGNNPISVQSMTNTLTTDVKATIKQINDIAEEGADIVRVSCPDEASTSALKEIIKHVSIPVVADIHFHYKRAIEAAENGASCLRINPRTILVMNRK

SEQ ID NO: 91281 - protein, 61 aa, Unknown
  Bacterial polypetide isolated from the Sargasso Sea
MTSLQRIPRRKSRQIKVGDVLVGGGAPISVQSMTNTVTADIAATIQQVQALEGAGADIVRV

SEQ ID NO: 91282 - protein, 104 aa, Unknown
  Bacterial polypetide isolated from the Sargasso Sea
MSVRPFRDISRRKTKVINVGDVKIGGDNPISVQSMTNTLTTDVKATINQINDIAQEGADIVRVSCPDTESTKALKEIVKHVSIPVVADIHFHYKRAIEAAENGA

SEQ ID NO: 91283 - protein, 108 aa, Unknown
  Bacterial polypetide isolated from the Sargasso Sea
MEIRPHRKINRKKTKVIKVGNIFIGGDHPISVQSMTNTLTYDSKATIKQINSLEEKGADIVRVSCPDEESTLALKTIIKNVNVPIVADIHFHYKRAIEAAKNGASCLR

SEQ ID NO: 91284 - protein, 118 aa, Unknown
  Bacterial polypetide isolated from the Sargasso Sea
MSIRPFRDIKRKITKEINVGEVKVGGNNPISVQSMTNTLTKDIKKTVSQINQISEVGADIVRVSCPDEDSTKALKEIVKHVSVPIVADIHFHYKRAIEAAENGAKCLRINPENIGDEN

SEQ ID NO: 91285 - protein, 61 aa, Unknown
  Bacterial polypetide isolated from the Sargasso Sea
MNNPYGIDINRNKTRKIYVGDIPVGGDAPISVQSMTNTDTRDIKSTIKQVLDLEDAGADIV

SEQ ID NO: 91286 - protein, 203 aa, Unknown
  Bacterial polypetide isolated from the Sargasso Sea
MLRSYQKINRRKTRVINVGDVLIGGNNPISVQTMTNTLTIDSKSTINQIGKVFKAGADLVRVSIPDRESSESLKKIVKESKIPIIADIHFHYKRAIEAAENGASCLRINPGNIGSLEKVKDVIKAAKDNNCSIRIGVNGGSLEKKILEKYSEPNPEALIESALNNIKILEDNDFFNFKISVKSSDIFMAIGAYEGLAEICDYP

SEQ ID NO: 91287 - protein, 177 aa, Unknown
  Bacterial polypetide isolated from the Sargasso Sea
MRRKTLSVKIGKVFIGSDHSIKTQSMTTASTMDTDKSVDEAIRIIQAGGKLVRFTAPNINEAKNLLNIKDALVAKGYDDPLVADIHFTPNAALEASKIVEKVRINPGNYVDKKKFQVKEYNDKSYQDELLKIEKKFIPLINSCKKNNVAMRIGTNHGSLSDRVMNRFGDTPLGMVES

SEQ ID NO: 91288 - protein, 154 aa, Unknown
  Bacterial polypetide isolated from the Sargasso Sea
KQEDYLLGSIKSSIGIGRLLMKGIGDTIRVSLSANPVEEVKAGFEILNALGIRSRGVQIISCPSCARQAFPVIDTVKILEKKLSHIKKPMTLSIIGCVVNGPGEAAQTDIGLTGGGDGSNLLYLSGIPHNKVASQDIVNKVVNLVESKAKENSN

SEQ ID NO: 91289 - protein, 164 aa, Unknown
  Bacterial polypetide isolated from the Sargasso Sea
ITEAGGFRSGTVKSAMGLGSLLMDGIGDTIRISLASDPVDEIKVGWDILRGLKIRSRGINFIACPSCSRMNFDVIGTMNQLESRLEDIKEDIDVAVIGCYVNGPGESKHTDIGVTGGSPKNLIYIDGKPDHKVESADLADYLEKIIREKVKEKSKTQENLIAKI

SEQ ID NO: 91290 - protein, 81 aa, Unknown
  Bacterial polypetide isolated from the Sargasso Sea
MTEPGLFETVKRRQSVPVDVGGVTVGGGVPIVVQSMTNTDTADVESTAKQVADLARAGSEIVRITVDRDEAAKAVPHIRDR

SEQ ID NO: 91291 - protein, 132 aa, Unknown
  Bacterial polypetide isolated from the Sargasso Sea
MGDTIRVSLTEPSENEIPVAKSILQATRSRIYNTDFISCPSCGRTFFDLESTTEKIKSHTSHLKGVKIAIMGCVVNGPGEMADADFGYVGSGPDKINLFHGKTCVQRNIPAEHAVESLIELIQDCGMWSDPP

SEQ ID NO: 91292 - protein, 140 aa, Unknown
  Bacterial polypetide isolated from the Sargasso Sea
GTLLLDGIGDTIRISLSDNPVEEVRIGNEILKSLNLRERGVKIISCPSCARQGFKVIETVKVLEKKLSHIKTPITLSVIGCVVNGPGEAAMTDVGITGGKKGNNMLYLSGVQSEKVSTTDMIDKIVSEVEKKALEIEKSK

SEQ ID NO: 91293 - protein, 126 aa, Unknown
  Bacterial polypetide isolated from the Sargasso Sea
SLSDDPVEEVKVGNEILKSLNLRKRGVMIVSCPSCARQAFQVIDTVKILEEKLSHIKTPITLSIIGCVVNGPGEASQTDIGITGGGKGSNMLYLKGIETEKIPTESIISKVVNLVEKKAKEIEKNN

SEQ ID NO: 91294 - protein, 197 aa, Unknown
  Bacterial polypetide isolated from the Sargasso Sea
EILLKNNYENFKLSIKSSDIFMAVESYEKISDLIEQPLHLGITESGSLKTGTVKSSIGLGRLLMQGIGDTIRVSLASDPIDEIKVGWEMLKSLKIRSRGVKIVACPSCSRQNFQVINTVNKLENDLSELKEEVTLAVIGCYVNGPGESKIADVGVTGAAPKHLIYLNGKPAYKVETKDLEKALIKEVEEIAEKKRNT

SEQ ID NO: 91295 - protein, 147 aa, Unknown
  Bacterial polypetide isolated from the Sargasso Sea
MPGSIKTSIGFGNLILDGIGDTIRVSLSDDPVEEINVGNEILKSLNLRNRGVKIISCPSCARQAFQVIETVKQLEKRLSHIKKPITLSIIGCVVNGPGEAKQTEIGITGGGKDNHMLYLNGLETEKVMTKDMINKIVTLVEEKASDL

SEQ ID NO: 91296 - protein, 151 aa, Unknown
  Bacterial polypetide isolated from the Sargasso Sea
VKSSIGVGMLLSEGIGDTIRISLASDPVDEIKVGWDILKSLNLRSRGVKIIACPSCSRQNFNVIEVVNELESRFEDISEDLEVAIIGCYVNGPGESKAADIGLTGASPNNLLYINGLPSKKLTNEELVDEIESQVRDKINSPSSDTIIARG

SEQ ID NO: 91297 - protein, 131 aa, Unknown
  Bacterial polypetide isolated from the Sargasso Sea
MSLTQSKEVNSLSKRYSTHIERRITRTVMVGDIAIGSDYPVRVQSMINEDTMDVENAYLAIKRLHDVGCEIVRLTVPSLAHAKAVGDIKAKLLENNINTPLVADVHHNGMKIAMEVAKHVDKVRINPGLFV

SEQ ID NO: 91298 - protein, 146 aa, Unknown
  Bacterial polypetide isolated from the Sargasso Sea
MVLRDTIRVSLSADPVEEVKVAFDLLKALDIRNRGVKVISCPSCSRQQFDVISTVSEIERRLSHIKQSLTVSIIGCVVNGPGEAKTADIGLTGGGKDTHQIYISGVANHRLKDKNIVDHIVELVEKYIAEMNNKTSSDNQEKQLIA

SEQ ID NO: 91299 - protein, 161 aa, Unknown
  Bacterial polypetide isolated from the Sargasso Sea
MHLGITEAGGFVPGSIKSSIGLGTLLLDGIGDTIRISLSDDPVEEVKIGNEILKSLNLRERGVKIISCPSCARQGFEVIETVKVLEKKLSHIKTPITLSVIGCVVNGPGEAAMTDVGITGGKKGNNMLYLSGVQTEKVLTSEMIEKVVLEVEKKAAELENN

SEQ ID NO: 91300 - protein, 266 aa, Unknown
  Bacterial polypetide isolated from the Sargasso Sea
DYLFIDELDNLDDSKKYIIEGKDWNENLSKNIFPYFNSLKDFRKSEAISNTLNFIEIELSKITKTIMQTFSNNIVIVLNVNNANRHDLLSAFNFLEEKRIKIPVILKGSYQSSDFEKVAIDASIDIGSILLEGMGNGIWIQTKDFDSKINELSFLILQNTRTRIFKTDYISCPSCGRTKFDLQETTALVKEYTNHLKGLKISVMGCIVNGPGEMADADYGYVGSGNGVISLYKGKELVKRNISSEQAVDELIQLIKENDDWVDPKN

SEQ ID NO: 91301 - protein, 93 aa, Unknown
  Bacterial polypetide isolated from the Sargasso Sea
MSLRPFRDIKRRKTKVISVGDVKVGGDNPISVQSMTNTLTTDIKSTINQINNIAAEGADIVRVSCPDKDSTSALKEIIKHVSVPIVADIHFHL

SEQ ID NO: 91302 - protein, 90 aa, Unknown
  Bacterial polypetide isolated from the Sargasso Sea
MGIVVNLEHQIVRKKTRKILIGDVPVGGDAPISVQSMTNTLTSDSESTINQIKQLSEAGADIVRVSVPDQEAADSFKIIKENSPVPLVAD

SEQ ID NO: 91303 - protein, 109 aa, Unknown
  Bacterial polypetide isolated from the Sargasso Sea
RGINFIACPSCSRMNFDVIGTMNQLEQRLEDVKEDLDVAVIGCYVNGPGESKHVSIGVTGASPRNLIYIDGKPDHKIESEDLVDHLENLIREKISKDSSDEASIIAKEV

SEQ ID NO: 91304 - protein, 153 aa, Unknown
  Bacterial polypetide isolated from the Sargasso Sea
AGPAKSGTIKSSVGIGSLLSKGIGDTIRVSLTEDPVEEVHVGFEILKSLGLASKGVTIVSCPTCGRLEVDLFKIAGEVEEELKDVKTPMTLALMGCAVNGPGEATHTDLGIAFGKGAGHLYYKGKRRKRVKEKNAIGELKKMISEFEAEKENE

SEQ ID NO: 91305 - protein, 96 aa, Unknown
  Bacterial polypetide isolated from the Sargasso Sea
RQEFDVIGTVNALEERLEDIITPMDVSIIGCVVNGPGEALVSDLGLAGAANKSAFYEGGQRVDRLDNKDLIPTLERRIRARAAMLDPANQIQVDEG

SEQ ID NO: 91306 - protein, 130 aa, Unknown
  Bacterial polypetide isolated from the Sargasso Sea
MSERRQTSQIQVGKVGVGSDYPVSVQSMTTTKTRDTDETLGQVYELANNGADIVRVTCNEIEAAESLVKICARSPVPIVADIHFQYKLALAAVEAGVHGLRLNPGNIRNEKQIKEVARECLNANIPIRIG

SEQ ID NO: 91307 - protein, 149 aa, Unknown
  Bacterial polypetide isolated from the Sargasso Sea
MKRTYQKIKRRYSRVINVGNVKIGGDNPIAVQTMTNTLTTNSKDTISQIERSAKLGADIVRVSIPDKDSSNSLKEIVKHSTVPIVADIHFHYKRAIESANNGASCIRINPGNIGSVERIKEVIKAAKDNDCSIRVGVNAGSLERQILEK

SEQ ID NO: 91308 - protein, 118 aa, Unknown
  Bacterial polypetide isolated from the Sargasso Sea
EEVKVGFEILKSLDLRTRGVKIVSCPSCARQGFPVIDTVKILEQKLSHIKEPLTISIIGCVVNGPGEALKSEIGLTGGGKDTNMVYLSGVADHKINNSDIVDHIVQLVEDKISKNDKN

SEQ ID NO: 91309 - protein, 146 aa, Unknown
  Bacterial polypetide isolated from the Sargasso Sea
MELRPHRIIERRRTREIKVGNVSVGGTSKISVQSMTNTLTTDIKGTINQIQSLEEAGADIVRVSCPDEASTKALKDIVKEVKAPIVADIHFHYKRAIEAASMGASCLRINPGYIGSKERILEVVKAAKDNNCSIRIGVNARSLDKS

SEQ ID NO: 91310 - protein, 299 aa, Unknown
  Bacterial polypetide isolated from the Sargasso Sea
SCPDEESSKSLKEIVDQTNVPIVADIHFHYKRAIEAAESGASCLRINPGNIGSIDRVKEVVKAAKDNDCSIRIGVNGGSLEKNILEKYKGPSPSAMVESALFHENILRDLDFNNFKISVKTSNVLLTVESYKELSKVTDAPLHLGITEAGGLMDGTIKSSIGIGQLLAQGIGDTLRVSLSADPVEEIKVGFSILKSLGLRHRGVNIISCPSCARQGFDVIGTVKKLEDRLSSISEPFTISVIGCVVNGPGEATMSDVGFTGGGNDSGMLYVDGKQLAKRNNDELIDSIVSEVEKKIKQK

SEQ ID NO: 91311 - protein, 233 aa, Unknown
  Bacterial polypetide isolated from the Sargasso Sea
DSNIPIRIGVNSGSLEKDLLEKYGYPSADALVESAERHLSILDELDFKNVKVSVKSSNVNIMIDAYRKLAKKTDVPFHLGVTESGTYEIGSVKSSIGIGSLISEGIGDTIRVSLTDDPIKEVKMGKNILKALGHFENGIELITCPGCGRLEIDLQSLVEDVEKRIEKIKIKKTLKVSILGCVVNGPGEALGSDIGIAGGRGKGQIYKNGKIYKSCKESEIVDILVEEIEKINL

SEQ ID NO: 91312 - protein, 234 aa, Unknown
  Bacterial polypetide isolated from the Sargasso Sea
ERKILDKYIEPNSDAMVKSALFHSQILKENDFHDFKISVKASDVFLTIDAYKKLAEKTDAPFHIGITEAGGLRAGTVKSSIGLGYLLLNGIGDTIRVSLSADPVEEVKVAFDLLKALDIRNRGVKVISCPSCSRQQFDVISTVSEIERRLSHIKQSLTVSIIGCVVNGPGEAKTADIGLTGGGKNTHQIYISGVANHRLKDKNIVDHIVELVEKYIAEKNKNTSPNNQEKQLIA

SEQ ID NO: 91313 - protein, 253 aa, Unknown
  Bacterial polypetide isolated from the Sargasso Sea
KKVIEVINAAKHNGVPIRVGVNAGSLEKDLQKKYGEPNSDALVESAQRHIDILAKHDFDHYKISLKASNIEMTVDAYRKISDLIDQPLHLGITEAGSFRGGTVKSSIGVGMLLSEGIGDTIRISLASDPVDEIKVGWDILKSLNLRSRGVKIIACPSCSRQNFNVIEVVNELESRFEDISEDLEVAIIGCYVNGPGESKAADIGLTGASPNNLLYINGLPSKKLTNEELVDEIESQVRDKINSSSSDTIIARG

SEQ ID NO: 91314 - protein, 293 aa, Unknown
  Bacterial polypetide isolated from the Sargasso Sea
MSIRPFRDIKRRVTKAINVGKVKVGGDNPISVQSMTNTLTKDVKNTLKQINNISEVGGDIVRVSCPDEESTSALKEITKHSTIPIVADIHFHYKRAVEAAENGADCLRINPGNIGEKDKIEQVISAAKNNNCSIRIGVNSGSLEKDILEKYKEPCPEALVESAIRNIKILEDLNFFNFKISVKSSDVFLSVKAYRELSKVTDYPLHLGITEAGSFVPGTIKSSIGLGNLLMDGIGDTIRISLSDDPVEEIKVGNEILKSLNLRNRGVKIISCPSCARQGFQVIDTVKILEEKL

SEQ ID NO: 91315 - protein, 288 aa, Unknown
  Bacterial polypetide isolated from the Sargasso Sea
HSSMLTSETTDLDSVMLEIQALHRASCEMIRITIPNRKALDAIPEVRRRMSDEGIERPLIADIHFNPQLAVDSCEFFEKVRINPGNYADRKKFEIREYSDLQYAEELERIEETLLPLVKNLKIYQRCLRIGANHGSLSDRVMNRFGDSPEGMVQSALEFLRIFEKHNFYDTILSMKSSNPLVMKEAYRLLVMRMEEESMDYPLHLGVTEAGNGSEGRIKSAVGIGGLLCQGLGDTIRVSLTEPAENEIPAAKAILGGVEKLIERISTDLGENERFEEKSVSETTISPN

SEQ ID NO: 91316 - protein, 123 aa, Unknown
  Bacterial polypetide isolated from the Sargasso Sea
MNIRPFREIKRRKTKEINVGHVKVGGDNPISVQSMTNTLTKDVKETVKQIEQIEEAGADIVRVSCPDEDSTTALKEIIKNTSIPIVADIHFHYKRAIEAAESGAACLRINPGNIGDKKKIKEV

SEQ ID NO: 91317 - protein, 121 aa, Unknown
  Bacterial polypetide isolated from the Sargasso Sea
MSIRPFRDIKRRPTKVINVGKVKVGGNNPISVQSMTNTLTKNVKETLNQINKISEAGGDIVRVSCPDEDSSRSLKEIKKHSPIPIVADIHFHFKRAIEAAENGADCLRINPGNIGDKNKIS

SEQ ID NO: 91318 - protein, 287 aa, Unknown
  Bacterial polypetide isolated from the Sargasso Sea
ERPASMMIIFAKIIEIAIKNDKPIRIGGNWGSLSKQYLENTVIEGQKADDYEHIIKKGLIDSVLKSASYAEKLGLSSNKIILSCKVSSVPQLIDVYTEIASKCKYPLHLGLTEAGMGDEAVVSSVAALSILLNQGIGDTIRVSLTPDKMGVRTKEVEVCRNILSSLKLKQYKPKVISCPGCGRTSSNYFIDLTKDINNHINNSMIDWKSKYIGVEEINIAVMGCIVNGPGESKHANIGISLPGTNESPSAPVFVDGEKVTTLKGDSIKDEFIALIEEYIAKNYKKVS

SEQ ID NO: 91319 - protein, 265 aa, Unknown
  Bacterial polypetide isolated from the Sargasso Sea
NIGSLERIKEVIKAAKNNNCSMRIGVNAGSLERRILDKYREPNADAMVESALFHSQILNENDFHDFKISVKASDVFLTIDAYKKLAEKTDAPFHIGITEAGGLRAGTVKSSVGLGYLLLNGIGDTIRVSLSADPVEEVRVAYDLLKALDIRNRGVKVISCPSCSRQQFDVISTVSEIEKRLSHINQSLTVSIIGCVVNGPGEAKTADIGLTGGGRNTHQVYISGVANHRLKDKDIVQHIVDLVEKYIAEINENKNTSNQEKQLIA

SEQ ID NO: 91320 - protein, 166 aa, Unknown
  Bacterial polypetide isolated from the Sargasso Sea
MGITEAGGLRGGTVKSSIGLGLLLWDGIGDTIRVSLAADPVEEVKVGWDMLKSLKLRSRGINFIACPSCSRQNFDVIKTMNELEMRVEDIRTDMDVAVIGCVVNGPGEAKEVDLGLTGGQPNLVYIDGKPAGKLTNDGLVDDLERMIRERAATLDEERKDLITSVK

SEQ ID NO: 91321 - protein, 164 aa, Unknown
  Bacterial polypetide isolated from the Sargasso Sea
YPLHLGITEAGSFVPGSIKSSIGLGNLLMDGIGDTIRISLSDDPVEEIKVGNEILKSLNLRDRGVKIISCPSCARQGFQVIDTVKVLEEKLSHIKTPITLSIIGCVVNGPGEAAQTDIGITGGGKDSSMLYLKGVQTEKINNQEIVSKIVNLVEKKAIEIENNK

SEQ ID NO: 91322 - protein, 243 aa, Unknown
  Bacterial polypetide isolated from the Sargasso Sea
MSNWIKRKNTKVVNVGNVPVGGGNPISIQSMTNTDTKDVVSTIKQIKNLELAGADIVRVSVPGFEEAQAFKEIKKGADIPLVADIHFDYKIALEVADTADCLRINPGNIGKENRVKEVINSAIDNNIPIRVGVNAGSLEKDLQKKYGEPNADALVESALRHVEILDKFNFENYKMSLKASNIEMTVDAYRKISTLINQPLHLGITEAGSFRAGTVKSSIGVGMLLSEGIGDTIRISLASDPID

SEQ ID NO: 91323 - protein, 239 aa, Unknown
  Bacterial polypetide isolated from the Sargasso Sea
KTREINVGKVKVGGENPISVQSMTNTLTTDVKATINQINEISSEGADIVRVSCPDESSSKALKDIIKHVDVPIVADIHFHYKRAIEAAENGASCLRINPGNIGNINKIKEVVKAAHDNNCSIRVGVNAGSLEKDILEKYKEPCPEALVESALNNIKILEDANFDNLKISVKSSDVFLSIQAYRQLSKVTDYPLHLGITEAGGFVPGSVKSSIGLGTLLLDGIGDTIRISLSDNQLRRVR

SEQ ID NO: 91324 - protein, 273 aa, Unknown
  Bacterial polypetide isolated from the Sargasso Sea
TNTLTTDVKSTINQINNISAEGADIVRVSCPDKDSTTALKEIIKHVSVPIIADIHFHYKRAIEAAENGAKCLRINPGNIGDKKKVQEIVSSAKNNNCSIRIGVNAGSLERDILEKYKEPCPEALVESALRNIKILEDQDFFNFKISVKSSDVFLSIAAYRQLSKVCDYPLHLGITEAGSFISGSIKSSIGLGTLLMDGIGDTIRVSLSDEPSKEARIGNEILKSLNLRNRGVKIISCPSCARQAFPVINTVKILEEKLSHIKTPITLSIIGCV

SEQ ID NO: 91325 - protein, 241 aa, Unknown
  Bacterial polypetide isolated from the Sargasso Sea
SSEGSERYNCSIRIGVNAGSLDKSLLEKYKEPCPEALVESAQYNIKLLEDNDFFNFKISVKSSDIFLTVKAYRELSKLCDYPLHLGVTEAGGLFTGSIKSSIGIGQLLMEGIGDTIRVSLSSDPVDEVKAAFEILKSLNIRSRGVNIISCPSCARQAFPVIETVKQLEKKLSHIKKPINLSIIGCVVNGPGEAAQTEIGLTGGGQDSNLLYLSGIPHSKVASPDIVDKVVELVEQKVEELN

SEQ ID NO: 91326 - protein, 270 aa, Unknown
  Bacterial polypetide isolated from the Sargasso Sea
NWGSLDQDLLAKMMDENAARSTPWEAQSVMYEALIQSAIGSAERAVEIGLPRNKIILSCKVSGVQDLIAVYRELARRCEFALHLGLTEAGMGSKGIVASTAALSVLLQQGIGDTIRISLTPEPGGPRTGEVVVGQEILQTMGLRSFTPMVIACPGCGRTTSTLFQELASQIQTYLRTQMPVWRDQYPGVEKMHVAVMGCIVNGPGESKQANIGISLPGSGENPAAPVFIDGEKVKTLRGENIAQEFQQIVSDYVERRYGRAEAGRAEALN

SEQ ID NO: 91327 - protein, 194 aa, Unknown
  Bacterial polypetide isolated from the Sargasso Sea
MDYKSKLQKYCSSLTSYQRWPTREVKVGSVAVGKKNPIRIQSMTTTDTMDTENTISQSIRMIEAGCEIVRITAPSIKEAKNLKYIRQGIRKKGYDTPLVADIHFTPNAAEVAARIVEKVRINPGNFADRKKFEAHEYSDKAYENEIERINNKFSPLVKVCKEYGTAMRIGTNHGSLSDRILSRYGDTPLGMVES

SEQ ID NO: 91328 - protein, 243 aa, Unknown
  Bacterial polypetide isolated from the Sargasso Sea
MSIRPFRDIKRKITKEVSIGNVKVGNQNPIVVQSMTNTLTSNPSETIKQIIDISNEGAGLVRVSVPDIESSKALKEITKHSPVPIIADIHYHYKRAIESAENGAKCLRINPGNIGDKKKIKEVISAAKNNDCAIRIGVNAGSLEKDILEKYKEPCPEALVESAIRNIQIIEDEDFYNFKVSVKSSDIFLSIGAYKQLSRITNYPLHLGITESGSFVPGSIKSSIGMGILLLEGIGDTIRVSLS

SEQ ID NO: 91329 - protein, 145 aa, Unknown
  Bacterial polypetide isolated from the Sargasso Sea
MSVRPWRDIQRKKTKGIKVGNVKVGGDAPISVQSMTNTLTTDIEATVEQVRGLEDAGADLVRISCPDEDSTTALKSIIKKVNVPIIADIHFHYKRAIEAAKAGAACLRINPGNIGNEEKVKEVVQAAKDFNCSMRIGVNAGSLER

SEQ ID NO: 91330 - protein, 313 aa, Unknown
  Bacterial polypetide isolated from the Sargasso Sea
ADIVRFSVPTMDAAGAFKKIKSKVKLPVVADIHFDYKIALAVADSADCLRINPGNIGKAEKIREVINAAKSNDIPIRVGVNAGSLEKHLQKKYGEPNSDALVESAMKQIDILEKNNFDNFKLSLKASNIDMTVESYRKISKKIDQPLHLGITESGTFRAGSVKSSIGIGMLLSEGIGDTIRISLASDPVDEVKVGWDILKSLNLRSRGVKIVACPSCSRQNFDVIKVVNELETRLEDISEDIEVAIIGCYVNGPGESKVADIGLTGAANKSLLYVSGSPNKKLDNLDLVNQLENEVRNKLAERGTGASDIIAV

SEQ ID NO: 91331 - protein, 235 aa, Unknown
  Bacterial polypetide isolated from the Sargasso Sea
FDCAIRIGVNAGSLEKNILEKYREPSPEAMLESALMHTKILQDNDFHNFKISVKASDVFLAVSAYELLSKQIDYPLHVGITEAGSLIAGTVKSSIGIGNLLWKGIGDTIRVSLSADPSEEVKVAYEILKSLGLRRKGVTIVSCPSCARQQFDVIKTVQEVEKRLEYINTHITVSIIGCVVNGPGEAKETDIGITGGGKGTHQIYISGLTNHIIKNEDIVDHLVRQVEDKIAQMNI

SEQ ID NO: 91332 - protein, 177 aa, Unknown
  Bacterial polypetide isolated from the Sargasso Sea
MLRPYQKINRRKTRIVNVGNILVGGDNPITVQTMTNTLTTDIVSTNRQIDRAVNAGADLVRVSVPDKESTLALKEITKHSKVPIIADIHFHYKRAIEAADNGASCLRINPGNIGSKERVKDVIKAAKNNNCSIRIGVNAGSLEKKILEKYSEPNPEALVESAKDNVKILEDNDFFNF

SEQ ID NO: 91333 - protein, 197 aa, Unknown
  Bacterial polypetide isolated from the Sargasso Sea
MSIRPFRDIKRRVTKVISVGNVKVGGNNPISVQSMTNTLTKNVKETLIQINKISEVGGDIVRVSCPDEDSTTALKEITKHSPIPVVADIHFHFKRAIEAADNGADCLRINPGNIGDKNKIAEVISAAKNNNCSIRIGVNSGSLEKDILEKFKEPCPEALAESAIRNIKILEDLRFFNFKNSVKSSDVFLSIKAYREL

SEQ ID NO: 91334 - protein, 232 aa, Unknown
  Bacterial polypetide isolated from the Sargasso Sea
MINVGNVKVGGDAKITVQSMTNTLTTDIDATVSQINSLVEEGADIVRVSCPDKESTESLKELVNQSSVPIVADIHFHYKRAIEAAEAGAACLRVNPGNIGKEKIIEVIEAAKQNNISMRVGVNAGSIDEQILTKYKEPCSDALVESALENIKLLEDNNFENFKISVKASDVFITIESYEKLAQLCDYPFHVGLTEAGTYLSGSIKSSISIGTLLSKGIGDTIRVSLTADPVE

SEQ ID NO: 91335 - protein, 260 aa, Unknown
  Bacterial polypetide isolated from the Sargasso Sea
NVPIIADIHFHYLRAIESAKNGASCLRINPGNIGSKEKIKEVIKAAKDNDCSIRIGVNGGSLEKKILEKYSEPNPDALIESAMNNIKILEDHDFYNFKISVKASDIFLAIKSYEGLSELCDYPFHLGITEAGGRRSGSVKSSMGIGQLLLRGIGDTLRVSLSDEPEEEVRVGYEILKGLGIRNRGVKIISCPSCARQQFPVIETVKKLESSLEDINVPMTVSIIGCVVNGPGEATMTEVGITGGGNDTHMIYINGKKDHR

SEQ ID NO: 91336 - protein, 258 aa, Unknown
  Bacterial polypetide isolated from the Sargasso Sea
SCPDENSTNALKEIVKHIDIPLVADIHFHYKRAIEAAESGADCLRINPGNIGDKKKIKEVIMAAKNNNCSIRIGVNAGSLEKDILEKYKEPCPEALVESALRNIKILEDLDFQNFKISVKSSDVFLSVKSYRLLSQQTTYPLHLGITEAGSYLPGSIKSSIGLGNLLMDGIGDTIRVSLSDDPVEEVKIGNEILKSIGLRNRGVKIISCPSCARQGFEVIETVKILEDKLSHIKEPITLSIIGCVVNGPGEASQTDME

SEQ ID NO: 91337 - protein, 254 aa, Unknown
  Bacterial polypetide isolated from the Sargasso Sea
VESALKELKYLEDVGFYDIKISVKHSNVPLMIESYRLLAEKVDYPLHLGVTEAGPLPGGLIKSTAGIGTLLSEGIGDTIRYSLTTDPVEEAKSGRALLEYLGLRERNSLDLIACPSCGRAEVDVIKVAEEAQNVLDNENIPLQVAVMGCVVNGPGEARSADLGIAAGKNKGHLFIKGEVVRVVNEKEMVDALLKEARLIVEEGIEARLAAADKNAPEIAQKDVNELINSQGDINNFLERKKSVVEISSNTDIEN

SEQ ID NO: 91338 - protein, 210 aa, Unknown
  Bacterial polypetide isolated from the Sargasso Sea
MSVRPFRDISRKKTKVINVGTVKIGGDNPISVQSMTNTLTTDVKATIKQIHDICEEGADLVRVSCPDEESTFSLKEITKHAPLPIIADIHFHYKRAIEAAENGAKCLRINPGNIGSKEKIYEVLSAAKNNDCSIRIGVNAGSLEKDILEKHKEPCPEALVESALRNIKILEDQNFFNFKVSVKSSDVFFVIGAYRQLSNVCDYPLHLGIT

SEQ ID NO: 91339 - protein, 191 aa, Unknown
  Bacterial polypetide isolated from the Sargasso Sea
MSNWIKRKKTKVVKVGNVPVGGNNPISIQSMTNTDTCDEVSTINQIKDLEAAGADIVRVSVPGFEEAKAFKKIKNAVNIPLVADIHFDYKIALEVADSADCLRINPGNIGKEDRVKEVISAAIDNDIPIRVGVNAGSLEKDLQKKYGEPNADALVESALRHVDILDKFNFENYKMSLKASNIEMTVEAYRK

SEQ ID NO: 91340 - protein, 197 aa, Unknown
  Bacterial polypetide isolated from the Sargasso Sea
MEENNLSQRYSTRIIRRDTRPVMVGDIGIGGDNPVRVQSMINEDTMDIEGSTAAIRRLHEVGCEIVRLTVPTLASAKAVGEIKKLLASTYQPVPLVADVHHNGMKIALEVAKHVDKVRINPGLFVFEKPDPNRTEFTKDEIDEIKEKIIQKFKPIVNTLKEQNKALRIGVNHGSLSERMLFAYGDTPFGMVESAMGF

SEQ ID NO: 91341 - protein, 299 aa, Unknown
  Bacterial polypetide isolated from the Sargasso Sea
MSVRRQTSQIQIGKVGVGSDYPVTVQSMTTTKTRNTDETLGQIYELANNGADIVRVTCNEIEAAESLVKICARSPVPIVADIHFQYKLALAAVEAGVHGLRLNPGNIRNEKQIKEVARECLNANIPIRIGVNAGSLDKDILEKYGDAVPKALVESALLEARYLEDVDFHDIKISVKHSNVPLMIESYRLLAASVEYPLHLGVTEAGPLPGGLIKSIAGISTLLSEGIGDTIRLSLTTDPVEEAKYGRQLLEYLNLRERKSLDLIACPSCGRAEVDVIKIAAEAQKVLGKRRSSNSSSCY

SEQ ID NO: 91342 - protein, 175 aa, Unknown
  Bacterial polypetide isolated from the Sargasso Sea
SIGAYRQLSKVCDYPLHLGITEAGSFVSGSIKSSIGLGSLLMDGIGDTIRISLSDNPTKEVIIGNEILKSLNLRNRGVKIISCPSCARQAFQVIDTVKILEDKLSHIKTPITLSIIGCVVNGPGEAAMTDIGITGGGKGNNMLYLSGVQSEKVLTKDIIEKVVTEVEKKVSELEK

SEQ ID NO: 91343 - protein, 284 aa, Unknown
  Bacterial polypetide isolated from the Sargasso Sea
VPVPIVADIHFHYKRAIEAAENGAACLRINPGNIGSVNKIKEVINAAKNNNCSIRIGVNSGSLEKDILEKFKEPCPEALVESALRNISIVEEEDFFNFKISVKSSDVFLSIAAYRQLSDKIDYPLHLGITEAGSFLPGSIKSSIGFGALLLDGIGDTIRVSLSDDPVEEIKVGNEILKSLNLRERGVKIISCPSCARQAFQVIDTVKKLELSLSHIKTPITLSIIGCVVNGPGEASQTDIGITGGGKGNNMLYLNGIETEKIATKDIIDKIVSLVEKKAQEIEK

SEQ ID NO: 91344 - protein, 180 aa, Unknown
  Bacterial polypetide isolated from the Sargasso Sea
DVFLSIAAYRLLSKKTDYPLHLGITEAGSYLPGSVKTSIGFGNLLLDGIGDTIRVSLSDDPIEEIKVGNEILKSLSLRSRGVKIISCPSCARQAFQVIETVKILEKKLSHIKEPITLSIIGCVVNGPGEAKQTDIGITGGGKDNHMLYLNGLDTEKVTTNNMIDKIVAMVEEKVANIRNN

SEQ ID NO: 91345 - protein, 259 aa, Unknown
  Bacterial polypetide isolated from the Sargasso Sea
KDICKHSQVPIIADIHYHYKRALEAADNGAKCLRINPGNIGDKKKIKEVISAAKNNDCAIRVGVNAGSLEEDLLNKYKEPCPEALVESAMRNISLLEDEDFLNFKISVKSSDVFLAIAAYKQLSKKVDYPLHLGITESGSYIPGSIKSSIGIGTLLLDGIGDTIRVSLSDDPVKEVKIANEILKSLNLRNKGVKIISCPSCARQGFDVIKTVKILEEKLSHIKTPITLSIIGCVVNGPGEASQTDVGITGGGKDSNMLY

SEQ ID NO: 91346 - protein, 119 aa, Unknown
  Bacterial polypetide isolated from the Sargasso Sea
MSIRPFRDIKRRKTKTISLGNVKVGGDNPISVQSMTNTLTTDVKGTIKQINEIQNEGADLVRVSCPDEASSKALKEIVRNVDVPIIADIHFHYKRAIEAAESGASCLRINPGNIGDKKK

SEQ ID NO: 91347 - protein, 223 aa, Unknown
  Bacterial polypetide isolated from the Sargasso Sea
YQKIKRRKTRVVNVGDVLIGGNNPISVQTMTNTITSDVKATSKQIERVVSAGADLVRVSVPDEESAIALKHITKNSNVPIIADIHFHYKRAIESAENGASCLRINPGNIGSKTKVKDVINAAKNNNCSIRIGVNAGSLNKNILEKYSEPNPEALIESAMDNIKLLEDNDFFNFKISVKSSDIFMGIKAYEGLSKQCDYPLHIGITEAGSKRAGSIKSSIGMGN

SEQ ID NO: 91348 - protein, 158 aa, Unknown
  Bacterial polypetide isolated from the Sargasso Sea
ESRKREVFYLGSIKSSIGFGSLLMSGIGDTIRVSLSDDPVEEIKVGNEILKSLNLRNRGVKIISCPSCARQAFNVIETVKKLEDKLSHIKTPISLSIIGCVVNGPGEAAQTDLGITGGGKGNNMLYLNGIEFEKISSDEMISKVVRLVEEKAEEIENA

SEQ ID NO: 91349 - protein, 230 aa, Unknown
  Bacterial polypetide isolated from the Sargasso Sea
MSVRPFRDISRRKTKVINVGDVKIGGDNPISVQSMTNTLTTDVKATINQINDIAEEGADLVRVSCPDTESTKALKEIVKHVSIPVVADIHFHYKRAIEAAENGAKCLRINPGNIGEESKIHDVLSAAKNNGCSVRIGVNAGSLEKDILDKFKEPCPEALVESALRNIKILEDKDFFNFKISVKSSDVFLSIGAYRQLSKVCDYPLHLGITEAGSFVSGSIKSSIGLGSLL

SEQ ID NO: 91350 - protein, 232 aa, Unknown
  Bacterial polypetide isolated from the Sargasso Sea
QIHSLEEVGADIVRVSCPDEDSTKALKDIVKEVKVPIVADIHFHYKRAIEAAKMGASCLRINPGNIGSRDRILEVVKAAKDYNCSIRIGVNAGSLDKTLLEKYKEPCPEALVESAMYNVKLLEDNDFFNFKISVKSSDVFLTVKSYRKLSKACDYPLHLGITEAGGLMTGSIRSSIGIGQLLMDGIGDTIRVSLSSDPIDEIKSGYEILKSLGIRARGVNIISCPSCARQAF

SEQ ID NO: 91351 - protein, 251 aa, Unknown
  Bacterial polypetide isolated from the Sargasso Sea
MSLRPFRDIHRKKTKIIRVGNVKIGGDSPISVQSMTNTLTKDSKATISQINELANQGADLVRVSCPDEDSTIALKEIAKHSVVPIIADIHFHYKRAIESADNGAKCLRINPGNIGDRKKIKDIILAAKNNDCAIRIGVNAGSLEKDILEKFKEPCPEALVESALRNIKIIEDEDFFNFKISVKSSDVFLSIGAYRQLSKLTDYPLHLGITEAGSYLPGSIKSSIGLGNLLLDGIGDTIRVSLSDDPIQEIK

SEQ ID NO: 91352 - protein, 215 aa, Unknown
  Bacterial polypetide isolated from the Sargasso Sea
KEPCPEALVESALRNIKILEDENFQNLKVSVKSSDVFLSIEAYRQLSKSTDYPLHLGITEAGGFLPGSIKSSIGLGTLLLEGIGDTIRISLSDNPVKEVKIGNEILKSLNLRERGVRIISCPSCARQGFEVIETVKILEKKLSHIRTPITLSVIGCVVNGPGEAALTDVGITGGKKGNNMLYLSGVQSEKVFTNDIIDKVVREVEKKASELDNSK

SEQ ID NO: 91353 - protein, 226 aa, Unknown
  Bacterial polypetide isolated from the Sargasso Sea
IKSVIDSANMAQEIGLAANKIILSCKTSNITSLVDIYRELSKTDYPLHLGLTEAGMGTDGIIASTSALSILLYEGIGDTIRVSLTPESDKDRVNEVFTCKEILSSLNLRKFKPRVVSCPGCGRTSSDYFIKLSRNINQLVENKMSEWKNIYPGVESMTIAVMGCIVNGPGESKHADIGISLPGDNEDPHAPVFIDGKKFKTLSGPDIEGEFINILQGYIETKYSKT

SEQ ID NO: 91354 - protein, 284 aa, Unknown
  Bacterial polypetide isolated from the Sargasso Sea
MNEYCHSLTRYERFETRCVMVGDVGVGGNNPIRIQSMTTTDTMNTDKTIAQSIRMIEAGCEIVRITAPSVNEAKNLKPILDGIRSRGYRTPLVADIHFTPNAAEIAATIVEKVRINPGNYADRKKFEEHEYSDFSYAEELERIRARFTPLVKICKENGTAMRIGTNHGSLSDRILSRYGDTPIGMVESALEFIRIAEDESYHDMILSMKASNTQVVVQAYRLLVNKMIEEGMNYPLHLGVTEAGEAEDGRIKSALGIGALLEDGLGDTIRVSLTEEPEAEIPVA

SEQ ID NO: 91355 - protein, 180 aa, Unknown
  Bacterial polypetide isolated from the Sargasso Sea
MSIRPFRDIKRRVTKVINVGNVKIGGDNPISVQSMTNTLTKNVKETLNQINKISEAGGDIVRVSCPDEESTNALKEISKHSTIPIVADIHFHFKRAIEAAENGANCLRINPGNIGDKNKIAQVISAAKNNNCSIRVGVNAGSLEKDILEKFKEPCPEALVESAIRNINIVEDLDFFNFKI

SEQ ID NO: 91356 - protein, 148 aa, Unknown
  Bacterial polypetide isolated from the Sargasso Sea
MNGPFDRPTGPSARRQSVPVKVGHVTIGGGLPIVVQSMTNTDTADIKGTAEQVAQLARAGSEIVRITVDRKEAAAAVPHIRDELDRRGVNVPLVGDFHYIGHSLLTEFPACAKALAKYRINPGNVGHREKRDSQFSTMVGNRRSIRKT

SEQ ID NO: 91357 - protein, 170 aa, Unknown
  Bacterial polypetide isolated from the Sargasso Sea
ILSSKCDYPLHLGITEAGSLKSGSVKSSIGMGMLLMEGIGDTIRVSLSEDPVEEVKIGFEILKSLNLRHRGVNIISCPSCARQAFPVIDTVKILEQKLSHIKTPITISVIGCVVNGPGEASQTQIGLTGGGQGNHMMYLSGIPHHKVASDSIIDEIVNLVEEKTKELINN

SEQ ID NO: 91358 - protein, 163 aa, Unknown
  Bacterial polypetide isolated from the Sargasso Sea
MSVRPFRDIIRRKTKVINVGDVKIGGDNPISVQSMTNTLTTDVKATINQINDIAEEGADIVRVSCPDAESTKALKEIVKHISIPVVADIHFHYKRAIEAAENGAKCLRINPGNIGEESKIHDVLSAAKNNGCSVRIGVNAGSLEKDILDKFKEPCPEALVESA

SEQ ID NO: 91359 - protein, 218 aa, Unknown
  Bacterial polypetide isolated from the Sargasso Sea
EKYKEPCPEALVESALRNISIVEDLDFFNFKVSVKSSDVFLSIEAYRQLSKVTDYPLHLGITEAGTFLPGSIKSSIGFGSLLMSGIGDTIRVSLSDDPVEEIKVGNEILKSLNLRNRGVKIISCPSCARQAFNVIETVKKLEDRLSHIKTPISLSIIGCVVNGPGEAAQTDLGITGGGKGNNMLYLNGIESEKITSDEMISKVVRLVELKAEEIEKAK

SEQ ID NO: 91360 - protein, 201 aa, Unknown
  Bacterial polypetide isolated from the Sargasso Sea
MSIRPFRDIIRKKTKEINVGKVLVGGNNPISVQSMTNTLTKDIKSTINQINAIEKEGADLVRVSCPDEESSKSLKQITKNVKIPIIADIHFHYKRAIEAAENGASCLRINPGNIGEKKKIKEVVSAAKNNNCSIRIGVNAGSLEKDILEKYKEPCPEALVESALRNISLIENENFNNLKVSVKSSDVFLSIGAYRKLSKAT

SEQ ID NO: 91361 - protein, 281 aa, Unknown
  Bacterial polypetide isolated from the Sargasso Sea
RRKTRTINGRRFKNWEVKIQYWVQTMTNTPTVDIKSTLAQIKRVADIGADIVRVSVPDKNSTDALKEICKKSKVPIIADIHFHYLRAVESAKNGASCLRINPGNIGSKEKIKEVIKAAKDNECSIRIGVNGGSLEKKILEKYAEPNPDALIESAMNNIKILEDHDFYNFKISVKASDIFLAIKSYEGLSELCDYPLHLGITEAGGRRSGSVKSSMGIGQLLLKGIGDTLRVSLSDEPEEEVRVGYEILKSLGIRNRGVKIISCPSCARQQFPVIETVKKLE

SEQ ID NO: 91362 - protein, 239 aa, Unknown
  Bacterial polypetide isolated from the Sargasso Sea
MSLRPFRDIKRRKTKEISVGNIKIGGSNPISVQSMTNTLTTDIEATISQINSLAEEGADLVRVSCPDKDSTKSLKEIIKHSKVPIVADIHFHYKRAIEAAENGAKCLRINPGNIGEKEKISSVVLAAKNNDCAIRIGVNAGSLEKDILEKYKEPCPEALVESALRNIKIIEDLNFYNFKVSVKSSDVFLSIAAYRELSKVTDYPLHLGITEAGSFLPGSIKSSIGFGNLILDGIGDTIR

SEQ ID NO: 91363 - protein, 212 aa, Unknown
  Bacterial polypetide isolated from the Sargasso Sea
MEIRPYREVKRKKTKVIKVGKVLVGGDSPISVQSMTNTLTTDIKSTIDQVNRLEEKGADIVRISCPDESSTQCLKDITNNVNVPIVADIHFHYKRAIEAAKNGAACLRINPGNIGSKERILDVVKAAKDYDCSIRVGVNAGSLEKKLLDKYKEPCPEALVESAIYNIKLFEDNNFFNFKLSVKSSDIFLAIKSYELLSEKCDYPLHLGITEA

SEQ ID NO: 91364 - protein, 233 aa, Unknown
  Bacterial polypetide isolated from the Sargasso Sea
SIRIGVNAGSLEKDILEKFKEPCPEALVESALRNIKILEDKDFFNFKISVKSSDVFLSIGAYRQLSNVCDYPLHLGITEAGSFIPGSIKSSIGIGSLLLDGIGDTIRISLSDDPIKEIKIGNEILKSLNLRNRGVKIISCPSCARQGFEVIDTVKILEKKLSHIKTPITLSIIGCVVNGPGEAAQTDIGITGGKKGSNMLYLSGVQSEKVSTEDMINKVVLEVEKKVSELKNN

SEQ ID NO: 91365 - protein, 166 aa, Unknown
  Bacterial polypetide isolated from the Sargasso Sea
MSLRPFRNIDRKKTKVINVGDVKIGGDNPISVQSMTNTLTSDVSATIKQIQEIHEEGADIVRVSCPDEESSKALKDITKNIQIPVIADIHFHYKRAIEAAENGAKCLRINPGNIGDKTKIHDVLKAAKDNDCSIRIGVNAGSLERDILEKYKEPCPEALVESALRN

SEQ ID NO: 91366 - protein, 228 aa, Unknown
  Bacterial polypetide isolated from the Sargasso Sea
QKKIKEVISAAKNNDCAIRVGVNAGSLEEDLLNKYKEPCPEALVESAMRNISFLEDEDFFNFKISVKSSDVFLAIAAYKQLSDKVDYPLHLGITESGSYIPGSIKSSIGIGSLLLDGIGDTIRVSLSDDPVKEIKIANEILKSLNLRNKGVKIISCPSCARQGFDVIETVKILEEKLSHIKKPITLSIIGCVVNGPGEASQTDIGVTGGGKDSNMLYIHGVQNRKISN

SEQ ID NO: 91367 - protein, 185 aa, Unknown
  Bacterial polypetide isolated from the Sargasso Sea
MSIRPFRDIKRKKTKVINVGNIKIGGDNPISCQTMTNTLTTDVKATIEQINEVVNEGADLVRVSCPDEESTKALKEITKHSQVPIIADIHFHYKRAIEAAQNGAKCLRINPGNIGDKKKIHDVLSAAKDYGCAIRIGVNAGSLEEDILEKYKEPCPEALVESALRNIKILEDQNFLNFKISVKSS

SEQ ID NO: 91368 - protein, 197 aa, Unknown
  Bacterial polypetide isolated from the Sargasso Sea
MSIRPFRDIKRRVTRVINVGKVKIGGDNPISVQSMTNTLTRDPKDTLKQINNISEVGGDIVRVSCPDEESTFALKEITKHSPIPIVADIHFHYKRAIEAAENGADCLRINPGNIGEKEKILQVISAAKNNNCSIRIGVNSGSLEKDILEKYKEPCPEALVESAVRNIKIIEDLDFFNFKISVKSSDVFLSVKAYKEL

SEQ ID NO: 91369 - protein, 123 aa, Unknown
  Bacterial polypetide isolated from the Sargasso Sea
MSIRPFRDIKRKKTKEINVGSIKVGGNNPISVQSMTNTLTTDVEATVKQINEIQMEGADIVRVSCPDELSTKALKEIVKHVDIPIVADIHFHYKRAIEAAENGASCLRINPGNIGNVNKIREV

SEQ ID NO: 91370 - protein, 239 aa, Unknown
  Bacterial polypetide isolated from the Sargasso Sea
AAKNNNCSIRIGVNGGSLEKKILEKYSEPNPDALIESALNNIKILEDNDFFNFKISVKSSDIFMAIEAYKGLAELCDYPLHLGITEAGGKRAGSIKSSIGMGNLLLNGIGDTIRVSLSDDPEEEVRVGFEILKSLGIRNRGVKIISCPSCARQQFQVIDLVKKLEKSLEDVKESITVSIIGCVVNGPGEANMTNIGITGGGNNTHMIYIDGKKDHIVKDENLAFYLDDIIRKKVKKSSI

SEQ ID NO: 91371 - protein, 163 aa, Unknown
  Bacterial polypetide isolated from the Sargasso Sea
MHLGITEAGGKRTGSIKSSIGIGQLLLKGIGDTIRVSLSDEPEEEVIVGYEILKSLGIRNRGVKIISCPSCARQQFPVIETVKKLEESLQDITTPLTVSIIGCVVNGPGEASTTQIGVTGGGNDTHMIYVNGKKDHRIKNKELPAYLESIIRKTALEEKNKTL

SEQ ID NO: 91372 - protein, 316 aa, Unknown
  Bacterial polypetide isolated from the Sargasso Sea
LTKNVKETLNQINRISEVGGDIVRVSCPDEDSTKALKEITKHSGVPIVADIHFHYKRAIEAAENGADCLRINPGNIGDIKKIKEVILAAKNNNCSIRVGVNAGSLEKDILEKYKEPCPESLVESAIRNIKIIEDLDFFNFKVSVKSSDVFLSIKAYKELSKVTDYPLHLGITEAGSFLPGSIKSSIGIGSLLINGIGDTIRVSLSDDPVEEIKVGNEILKSLNLRNRGVKIISCPSCARQAFQVIDIVKSLEEKLSHIKTPITLSIIGCVVNGPGEAALTDIGITGGGKGSSMLYFKGIQTEKISNADIISKVVSI

SEQ ID NO: 91373 - protein, 173 aa, Unknown
  Bacterial polypetide isolated from the Sargasso Sea
MSIRPYRDIKRRKTKVVNVGNVKVGGDNPITVQSMTNTLTTDVVATIKQINSIQEEGADLVRVSCPDESSSKALKEIVKHVDIPVIADIHFHYKRAIEAAESGASCLRINPGNIGDKKKIYEVLQAAKNNNCSVRIGVNAGSLEKDILEKFKEPCPEALVESALRNIKILEDQ

SEQ ID NO: 91374 - protein, 229 aa, Unknown
  Bacterial polypetide isolated from the Sargasso Sea
NGADCLRINPGNIGNKNKISQVISAAKNNNCSIRIGVNSGSLEKDILEKFKEPCPEALAESAIRNIKILEDLDFFNFKISVKSSDVFLSIKAYRELSKITDYPLHLGITEAGSFIPGSIKSSIGLGNLLLDGIGDTIRISLSDDPVEEIKVGNEILKSLNLRNRGVKIISCPSCARQGFQVIETVKILEEKLSHIKTPITLSIIGCVVNGPGEAALTDIGITGGGKNSN

SEQ ID NO: 91375 - protein, 311 aa, Unknown
  Bacterial polypetide isolated from the Sargasso Sea
HSLEEAGADIVRVSCPYEKSTKALKDIVREVSIPIVADIHFHYKRAIEAAEMGASCLRINPGNIGADKRIIDVVKAAKNNNCSIRIGVNAGSLEKNLLEKYKEPCPEALVESAQHNIKLLEDNDFFNFKISVKSSDIFLTVKAYKKLSEICNYPLHLGVTEAGGLLTGSIKSSIGIGQLLMNGIGDTIRVSLSSDPVDEIKAGFEILKSLGIRSRGVNIISCPSCARQAFPVIQTVKILEEKLSHIKKPISLSIIGCVVNGPGEAAQTEIGLTGGGQDNNLLYLSGVPHTKVPSSKIIDKIVKLVEEKTKD

SEQ ID NO: 91376 - protein, 300 aa, Unknown
  Bacterial polypetide isolated from the Sargasso Sea
ELRPYREVKRKKTKTFKVGKVLVGGSAPISVQSMTNTLTTDVKATIEQINRLVEKGADIVRVSCPDESSTKSLKLITKEVDVPIVADIHFHFKRAIEAAKNGAACLRINPGNIGTKDRVLEVVKAAKDYNCSIRIGVNAGSLEKTLLDKYKEPCPEALVESAMYNVKLFEDNNFYNFKLSVKSSDIFLAIKSYEMLSDRCDYPLHIGVTEAGGLISGSIKSSIGIGSLLMKGIGDTIRVSLSADPEEEVKAGYEILKSLNLRSRGVKIISCPSCARQAFPVIETVKVLEQKLSHIKKPIT

SEQ ID NO: 91377 - protein, 290 aa, Unknown
  Bacterial polypetide isolated from the Sargasso Sea
MSIRPFRDINRNQTKEIKVGDVLIGDKNPISVQSMTNTLTTDVNATIKQIDQIIEKGGDLVRVSVPDEDSSKALKEITRHSSIPIIADVHYHYKRALEAADNGAKCLRINPGNIGDKNKIKEIIKAAKNNDCAIRVGVNAGSLERELLEKYKEPCPEALVDSALRNIKILEDEDFFNIKVSVKSSDVFLSVNAYRQLSKKTNYPLHLGITESGSFIPGSIKSSIGLGILLMEGIGDTIRISLSDEPYKEIEIGNEILKSLNLRNRGVKIISCPSCARQGFEVINTVKILE

SEQ ID NO: 91378 - protein, 162 aa, Unknown
  Bacterial polypetide isolated from the Sargasso Sea
MHLGITESGSFLPGSIKSSIGMGTLLLEGIGDTIRVSLSDDPVKEVTIGNEILKSLNLRNRGVRIISCPSCARQGFEVINTVKLLEQKLSHIKTPITLSIIGCVVNGPGEAALTDIGITGGGKDSSMLYIKGVQIEKISNNEIISKVIQLVEKKSEEIEKNK

SEQ ID NO: 91379 - protein, 303 aa, Unknown
  Bacterial polypetide isolated from the Sargasso Sea
TTDVKGTINQINSLEEAGADIVRVSCPDEDSTKALKTITKDINVPLVADIHFHYKRAIEAAKMGASCIRINPGNIGTRDRILEVMKAAKDNNCSLRIGVNAGSLDKSILEKYKEPCPEALVESADYNIKLLEDNDFFNFKLSVKSSDIFLTVKAYRKLSEICNYPLHLGVTEAGSLFTGSIKSSIGIGQLLMEGIGDTIRVSLSSDPVDEIKAGFEILKSLGIRSRGVNIISCPSCARQAFPVIETVKKLEERLSHIKKPINLSIIGCVVNGPGEAAQTEIGLTGGGQDSNLLYLSGVPHTKV

SEQ ID NO: 91380 - protein, 226 aa, Unknown
  Bacterial polypetide isolated from the Sargasso Sea
GSLEKDLLEKYKEPCPEALVESALRNISIVEDFDFYKFKVSVKSSDVFLSIEAYRQLSKVTDYPLHLGITEAGTFLPGSIKSSIGFGSLLMSGIGDTIRVSLSDDPSEEIKVGNEILKSLNLRNRGVKIISCPSCARQAFNVIETVKKLEERLSHIKTPISLSIIGCVVNGPGEAAQTDIGITGGGKGNNMLYLNGIESEKITSDEMISKVVRLVEVKAEEIEKAK

SEQ ID NO: 91381 - protein, 141 aa, Unknown
  Bacterial polypetide isolated from the Sargasso Sea
GSLLMNGIGDTIRVSLSDDPVEEIKVGNEILKSLNLRNRGVKIISCPSCARQAFQVIDTVKALEEKLSHIKTPITLSIIGCVVNGPGEAALTDIGVTGGGKGSNMLYLKGIQKEKLSNAEIISKVVGIVEKKAKEIENKKE

SEQ ID NO: 91382 - protein, 208 aa, Unknown
  Bacterial polypetide isolated from the Sargasso Sea
MSIRPFRDIKRRVTKVISVGNVKVGGNNPISVQSMTNTLTKNVKETLNQINKISEVGGDIVRVSCPDEESTHALKEITKHSPVPIVADIHFHFKRAIEAAENGADCLRINPGNIGDKNKIAEVISAAKSNNCSIRIGVNSGSLEKDILEKFKEPCPEALAESAIRNIKILEDLDFFNFKISVKSSDVFLSIKAYRELSKATDYPLHLG

SEQ ID NO: 91383 - protein, 188 aa, Unknown
  Bacterial polypetide isolated from the Sargasso Sea
KFKISVKSSDIFMAIKAYESLSELCDYPLHLGITEAGAKRTGTIKSSIGMGNLLLNGIGDTIRVSLSDEPEEEVRVGFEILKSIGARNRGVKIISCPSCARQQFEVIDLVKKLEKSLEDIEKTITVSIIGCVVNGPGEANMTNIGITGGGNNTHMIYVDGKKDHIVKDRDLAPYLEDIIRKKVKNDSI

SEQ ID NO: 91384 - protein, 187 aa, Unknown
  Bacterial polypetide isolated from the Sargasso Sea
MQIRPHRIINRRKTKKIKVGKVSIGGDSPISVQSMTNTITSDETSTINQVNQLKEVGADLVRISCPDQDATKALKNIIKKTDIPIIADIHFHYKRAIEAAKSGADCLRINPGNIGSNERVKEVIKAAKDYNCAVRIGVNAGSLEKKILEKYKEPCPEALVESATYNIKLLEDNDFFNFKISVKSSDV

SEQ ID NO: 91385 - protein, 271 aa, Unknown
  Bacterial polypetide isolated from the Sargasso Sea
KTKVVQVGNVPVGGNNPISIQSMTNTDTCDEVSTINQIKDLEAAGADIVRVSVPGFEEAKAFKKIKNAVNIPLVADIHFDYKIALEVADSADCLRINPGNIGKEDRVKEVISAAIDNDIPIRVGVNAGSLEKDLQKKYGEPNADALVESALRHVDILDKFNFENYKMSLKASNIEMTVEAYRKISNIIDQPLHLGITEAGSYRAGTVKSSIGVGMLLSEGIGDTIRISLASDPVDEIKIGWDILKSLNIRSRGVKIKACPSCSRQNFNVIE

SEQ ID NO: 91386 - protein, 325 aa, Unknown
  Bacterial polypetide isolated from the Sargasso Sea
EYKRRETEEVLNFGKENVPRVMPDFSKVSKVEMKDLKSIGHSYLPELDKWGMNDLGADYIYTGSNPIEFMLPNGLKEVMDYEVWKNCSDKVNKFPYISDLEKVESPDEKLNFIGVDTDNYDQTIFGLLEKTSNTVLILHSDQPHATASVRRFVVELMNREIHAPVVLNQEYDERTQDELIVHASTDAGTLMIDGIGDGIMLSPTFTPSIDLLKLYNNTAFGILQAARTRITKTEYISCPSCGRTLFDLQETTAMIRKRTDHLKGVKIGIMGCIVNGPGEMADADFGYVGSGKGKITLYKGQEVVKRGVPSEHALDELIELIKEHG

SEQ ID NO: 91387 - protein, 287 aa, Unknown
  Bacterial polypetide isolated from the Sargasso Sea
SLRRYSTHIERRITRTVMVGDIGIGSDYPIRVQSMINEDTMDVNNSYLAIKRLHDVGCEIVRLTVPSLAHAKAVGDIKKKLIANNINTPLVADVHHNGMKIAMEVAKHVDKVRINPGLFVFEKSDPKRTEYTDEEFKLIKNTILKRFTPLVEVLKLENKALRIGVNHGSLSERMLFTYGDTPLGMTESAMEFVKICDELDFHNIIISMKASRAPVMLAAYRMIADRLDAEGYNYPLHLGVTEAGDGDYGRIKSTAGIGTLLAEGLGDTIRVSLTEAPEKEIPVCYSI

SEQ ID NO: 91388 - protein, 195 aa, Unknown
  Bacterial polypetide isolated from the Sargasso Sea
YKMSLKASNIEMTVEAYRKISNIIDQPLHLGITEAGSYRAGTVKSSIGVGMLLSEGIGDTIRISLASDPVDEIKIGWDILKSLNIRSRGVKIVACPSCSRQNFNVIEVVNELEQRLEDISDDIEVAIIGCYVNGPGESKAATIGLTGASPNNLLYIDGTPNKKISNEDLVDELEEQVRSKISKQKIESEKIILRS

SEQ ID NO: 91389 - protein, 291 aa, Unknown
  Bacterial polypetide isolated from the Sargasso Sea
MVGFKEKKDIQFSSMIETAAKNNKPVRIGVNWGSLDQELLADLMDKNSKLKKPLDADNVTKQALIESALNSAKRAEELGLKKEQIIISCKVSELHALIDVYDELAEKSNYSLHLGLTEAGMGIKGIVSSTAALSLILSKGIGDTIRISLTPKPDGDRREEVYVAQEILQNLGIRSFVPKVTACPGCGRTTSKVFQELAEDIQMYIRNQMPNWKKKYEGVEALKLAVMGCIVNGPGESKNADLGISLPGTGESPTMPVFIDGKKSHNLKGKNITEDFKKIIHEYIEKRYKKR

SEQ ID NO: 91390 - protein, 103 aa, Unknown
  Bacterial polypetide isolated from the Sargasso Sea
MSNWIKRKKTKTIKVGDVSVGGGNPISVQSMTNTDTCDVLSTVKQINDLESAGADIVRVSVPGFDEAKAFKEIKSAVNIPLVADIHFDYKIALEVADTADCLR

SEQ ID NO: 91391 - protein, 176 aa, Unknown
  Bacterial polypetide isolated from the Sargasso Sea
RKISNLIDQPLHLGITEAGSFRGGTVKSSIGVGMLLSEGIGDTIRISLASDPVDEIKVGWDILKSLNLRSRGVKIIACPSCSRQNFNVIEVVNELESRFEDISEDLEVAIIGCYVNGPGESKAADIGLTGASPNNLLYINGLPSKKLTNEELVDEIESQVRDKINSPSSDTIIARG

SEQ ID NO: 91392 - protein, 294 aa, Unknown
  Bacterial polypetide isolated from the Sargasso Sea
MTNTLTTDVKSTINQINDIAEEGADIVRVSCPDADSTKALKEIVKHVSIPIVADIHFHYKRAIEAAESGAKCLRINPGNIGEESKIHDVLSSAKNNGCSIRIGVNAGSLEKDILDKFKEPCPEALVESALRNIKILEDKDFFNFKISVKSSDVFLSIAAYRQLSKACDYPLHLGITEAGSFVSGSIKSSIGLGSLLMDGIGDTIRISLSDNPTKEVTIGNEILKSLNLRNRGVKIISCPSCARQAFQVIDTVKILEEKLSHIKAPITLSIIGCVVNGPGEAAMTDIGITGGGKG

SEQ ID NO: 91393 - protein, 149 aa, Unknown
  Bacterial polypetide isolated from the Sargasso Sea
MEIRPHRIIKRKKTRKIKVGDLYVGGDSPISVQSMTNTLTTDYKATIKQIKELEDSGADIVRVSCPDEDSTKALKKITKESKVPIVADIHFHYKRAIESAKSGAKCLRINPGNIGSKDRVKEVIKAAKDYECAIRIGVNAGSLEKNILE

SEQ ID NO: 91394 - protein, 180 aa, Unknown
  Bacterial polypetide isolated from the Sargasso Sea
YVFLSIQAYRQLSKATDYPIHLGITEAGSFIPGSIKSSIGLGTLLLDGIGDTIRVSLSDNPVEEVKIGNEILKSLNLRERGVKIISCPSCARQGFQVIETVKVLEKNLSHIKAPITLSVIGCVVNGPGEAAMTDVGITGGKNGNNMLYLSGVQSKKVLTTDMIEKIVIEVEKKASEFENK

SEQ ID NO: 91395 - protein, 249 aa, Unknown
  Bacterial polypetide isolated from the Sargasso Sea
TKSTIKQINELKEVGADIVRVSCPDEESTLNLKEIIKNVDVPIVADIHFHYQRAIEAAKNGASCLRINPGNIGSRERVLEVVKAAKDFNCSIRIGVNAGSLDKNLLEKFKEPCPEALVESAKYNIKLLEDNDFFNFKISVKSSDVFLSIKAYEQLSAVCDYPLHLGITEAGGLFTGSIKSSIGIGQLLMKGIGDTIRVSLSADPVEEVKAGYEILKSLNIRSRGVKIISCPSCARQAFPVIETVKILEK

SEQ ID NO: 91396 - protein, 206 aa, Unknown
  Bacterial polypetide isolated from the Sargasso Sea
MSNWIKRKKTKVVKVGNVPVGGNNPISIQSMTNTDTCDEVSTINQIKDLEAAGADIVRVSVPGFEEAKAFKKIKNAVNIPLVADIHFDYKIALEVADSADCLRINPGNIGKENRVKEVISAAIDNDIPIRVGVNAGSLEKDLQKKYGEPNADALVESALRHVDILDKFNFENYKMSLKASNIEMTVEAYRKISNIIDQPLHLGITE

SEQ ID NO: 91397 - protein, 299 aa, Unknown
  Bacterial polypetide isolated from the Sargasso Sea
EDSTKSLRDIIKNTSIPIVADIHFHYKRAIEAAESGAACLRINPGNIGDKKKIKEVISAAKNNNCSIRIGVNAGSLEKDILEKYKEPCPEALVESALRNINIVEDFDFYEFKVSVKSSDVFLSIEAYRQLSKATDYPLHLGITEAGTFLPGSIKSSIGFGSLLMSGIGDTVRVSLSDDPVEEINVGNEILKSLNLRNRGVKIISCPSCARQAFNVIETVKKLEYRLSHIKTPISLSIIGCVVNGPGEAAQTDIGITGGGKGNNMLYLNGVESEKISTDEMISKVVKLVEEKAKEIEKAK

SEQ ID NO: 91398 - protein, 149 aa, Unknown
  Bacterial polypetide isolated from the Sargasso Sea
SVKSAIGLGNLLMEGIGDTIRVSLSADPVEEVKIGNEILKSIGLKSRGVKIISCPSCARQGFKVIDTVKTLEEKLSHIKEPITLSIIGCVVNGPGEAAFTDIGITGGGKDSNMLYLNGTQTEKLNNKEIISKVVDLVEKKAEEIQNNNK

SEQ ID NO: 91399 - protein, 280 aa, Unknown
  Bacterial polypetide isolated from the Sargasso Sea
VEEGADIVRVSCPDKGSTESLKEVVNQSSVPIVADIHFHYKRAIEAAEAGAACLRVNPGNIGKEKIIEVIEAAKQNNISMRIGVNAGSIDEKILMKYKEPCSDALVESALENIKLLEDNNFENFKISVKASDVFITIESYEKLAQLCDYPFHVGLTEAGTYLSGSIKSSISIGNLLSKGIGDTIRVSLTADPVEEIKVGYEILKSLDLGSRGIKIISCPSCARQAFPVIETVKKLEQRLAHIKTPLTLSIIGCVVNGPGEALKSDIGLTGGGKGNNMIYC

SEQ ID NO: 91400 - protein, 266 aa, Unknown
  Bacterial polypetide isolated from the Sargasso Sea
MISDIRPFRKIIRKRTKEVKVGKIKVGGDNPITVQTMTNTLTTDHKSTIEQINKVTEAGADIVRVSCPDQNSTKSLKTIIKNVDVPIVADIHFHYKRAIEAAENGADCLRINPGNIGDIKRIAEVISAAKNNNCSIRIGVNAGSLERDILEKYREPCPEALVESALRNIEILENMNFTNLKVSVKSSDVFLSIAAYRLLSEKTDYPLHLGITEAGSYLPGSIKTSIGFGSLLLDGIGDTIRVSLSDDPIEEIKVGNEILKSLNLRN

SEQ ID NO: 91401 - protein, 278 aa, Unknown
  Bacterial polypetide isolated from the Sargasso Sea
DIHFHYKRAMKAAENGAKCLRINPGNIGDKKKIHDVLKAAKDNDCSIRIGVNAGSLERDILEKYKEPCPEALVESALRNIKILEDEDFFNFKVSVKSSDVFLSIAAYRQLSKAMNYPLHLGITEAGGFVPGSVKSSIGLGSLLLDGIGDTIRVSLSDEPVKEVKIGNEILKSLGLRNRGVKIISCPSCARQAFQVIDTVKILEEKLSHIKTPITLSIIGCVVNGPGEAALTDIGITGGGKGNNMLYLSGVQSEKVLTSEIINKVISEVEKKAAEIENK

SEQ ID NO: 91402 - protein, 194 aa, Unknown
  Bacterial polypetide isolated from the Sargasso Sea
REDNAHGMAEQRRAIIDLMLFMVSCPLVIKRSYHHLDEESFQLFSSTDLGGLLIDGLGDGIWIDANDCCSKQQLVSTAFGILQATRTRISKTEYISCPSCGRTLFDLQETTAKIRNETAHLKGVKIGIMGCIVNGPGEMADADYGYVGTGPGKITLYREKEVVRRNVPENEAVEALIDLIREHGDWIEAPALEH

SEQ ID NO: 91403 - protein, 211 aa, Unknown
  Bacterial polypetide isolated from the Sargasso Sea
CPEALVDSALRNIRILEDEDFFNLKVSVKSSDVFLSIGAYRQLSKKINYPLHIGITEAGSFLPGTIKSSIGFGALLLDGIGDTIRVSLSDDPVKEVHVGNEILKSLNLKHRGVKIISCPSCARQGFEVIDTVKILEEKLSHIKTPITLSIIGCVVNGPGEAAMTDIGITGGGKGSNMLYLSGVQTEKVLTKNIIDKVVEEVEKKASEIENN

SEQ ID NO: 91404 - protein, 171 aa, Unknown
  Bacterial polypetide isolated from the Sargasso Sea
MSIRPFRDIIRKKTKVIKVGKVNVGGSNPISVQSMTNTLTNDIKATIKQIQEISKAGADIVRVSCPDQDSSKALKEIVKHIDIPLVADIHFHYKRAIEAAENGADCLRINPGNIGDRNKIKEVINSAKNNNCSIRIGVNAGSLERDILEKFKEPCPEALVESALRNIKIIE

SEQ ID NO: 91405 - protein, 209 aa, Unknown
  Bacterial polypetide isolated from the Sargasso Sea
DRICYGVCQICDELDFHNIIISMKASRAPVMMAAYRMIADRLDSEGYNYPLHLGVTEAGDGDYGRIKSTAGIGTLLAEGLGDTIRVSLTEAPEKEIPVCYSILQSLGLRKTMVEYISCPSCGRTLFNLEEVVDKVRNATSHLTGLDIAIMGCIVNGPGEMADADYGYVGKGKGTIALYRRKEEIKRVPEDEGVNALIQLIKDDGKWIDP

SEQ ID NO: 91406 - protein, 163 aa, Unknown
  Bacterial polypetide isolated from the Sargasso Sea
PLHIGITEAGGKRTGSIKSSIGMGNLLLKGIGDTIRVSLSDDPEEEVKVGFEILKSLGVRNRGVKIVSCPSCARQQFQVIDLVKKLEKSLEDIQKPLTVSIIGCVVNGPGEANMTNIGITGGGNNTHMIYVDGNKDHIVKDKDLAPYLEDIIRKKAENKSIKK

SEQ ID NO: 91407 - protein, 155 aa, Unknown
  Bacterial polypetide isolated from the Sargasso Sea
MSIRPFRDIKRRETLEVKVGNVKIGGKNPISVQSMTNTLTTNIKETLNQIQNIANEGADLVRVSIPDQDSSKALKVITKNSPVPIVADIHFHYKRALESADNGAKCLRINPGNIGDLKKIQEIVKAAKNNDCAIRIGVNSGSLERDILEKFKEPC

SEQ ID NO: 91408 - protein, 249 aa, Unknown
  Bacterial polypetide isolated from the Sargasso Sea
SRDRILEVVKAAKDNNCSLRIGVNAGSLDKTLLEKYKEPCPDALVESAMYNVKLLEDNDFFNFKISVKSSDVFLTVKSYKKLSKICDYPLHLGITEAGGLLSGSIRSSIGIGQLLMDGIGDTIRVSLSSDPVDEIKSGYEILKSLGIRARGVNIISCPSCARQAFPVIETVKELEKKLAHVKKPITLSIIGCVVNGPGEAAQTEIGLTGGGQDSNLLYLSGLPHTKVASSEIIDKVVNLVEEKVKEKTN

SEQ ID NO: 91409 - protein, 285 aa, Unknown
  Bacterial polypetide isolated from the Sargasso Sea
MLRPYQKINRRKSHVITVGKVKIGGNNPIAVQTMTNTLTTNTKETILQIERSAKLGADIVRVSVPDEESSNSLKEIVKHSSVPIVADIHFHHKRAIESAKNGAACIRINPGNIGSTERIKEVIKAAKDNNCSIRVGVNSGSLEKQVLDKYSEPNPEALVESAKLNIKILEDNDFTNFKISVKSSDIFMSIKAYNEIASFCEYPLHLGITEAGGKRTGSIKSSIGIGNLLLSGIGDTIRVSLSDEPEEEVRVGFEILKSLGLRNRGVKIISCPSCARQQFQVIDTV

SEQ ID NO: 91410 - protein, 149 aa, Unknown
  Bacterial polypetide isolated from the Sargasso Sea
TIRISLTPEPNGSRTREVIVAQELLQSMGLRSFLPQIAACPGCGRTTSTVFQELARDIQLYVRKKMPEWKVSYMGVEDMQVAVMGCIVNGPGESKHANIGISLPGTGEDPSAPVFIDGKKKLTLRGDDLALQFQHIVDKYVDSHYPLRS

SEQ ID NO: 91411 - protein, 246 aa, Unknown
  Bacterial polypetide isolated from the Sargasso Sea
TVKQIEKIEEAGADIVRVSCPDEDSTKALKDIVKNTSIPIVADIHFHYKRAIEAAESGAACLRINPGNIGDKNKIKEIISAAKNNNCSIRIGVNAGSLEKDLLEKFKEPCPEAMVESALRNISIIEDFDFYKFKVSVKSSDVFLSIEAYRQLSKVTDYPLHLGITEAGTFLPGSIKSSIGFGSLLMSGIGDTIRVSLSDDPVQEIKVGNEILKSLNLRNRGVKIISCPSCARQAFNVIETVKKLED

SEQ ID NO: 91412 - protein, 221 aa, Unknown
  Bacterial polypetide isolated from the Sargasso Sea
MEIRPHRIINRKKTKKIKVGSIFVGGDSPISVQSMTNTLTTDHKSTINQIKELEEAGADIVRVSCPDEESTKALKKITKETKVPIVADIHFHYKRAIESARSGAKCLRINPGNIGSKERIKEVIKAAKDYDCAIRIGVNAGSLEKKILEKYKEPCPDALVESATHNIKLLEDNDFFNFKISVKSSDVFLAVKAYESLSNLYDYPLHLGITEAGGLFTGSIK

SEQ ID NO: 91413 - protein, 96 aa, Unknown
  Bacterial polypetide isolated from the Sargasso Sea
MFAENPIKRRQSTQIRVGNVLIGGDAPIAVQSMTNTRTTDVAATVAQIQAIAKAGADLVRVSVPTMEAAEAFKLIKQQSPIPLVADIHFDYRIALK

SEQ ID NO: 91414 - protein, 210 aa, Unknown
  Bacterial polypetide isolated from the Sargasso Sea
EALVESALRNIKILEDKDFYNFKISVKSSDVFLSIGAYRQLSKVCDYPLHLGITEAGSFVSGSIKSSIGLGSLLMDGIGDTIRISLSDNPTKEVTIGNEILKSLNLRNRGVKIISCPSCARQAFQVIDTVKILEEKLSHIKTPITLSIIGCVVNGPGEAAMTDIGITGGGKGNNMLYLSGVQSEKVLTKDIIEKVVTEVENKVSELENLK

SEQ ID NO: 91415 - protein, 195 aa, Unknown
  Bacterial polypetide isolated from the Sargasso Sea
LNFNNLKISVKSSDVFLSIKSYELLSQKTDYPLHLGITEAGSFIPGSIKSAIGLGSLLMEGIGDTIRVSLSDDPVQEVKIGNEILKSIGLRKRGVKIISCPSCARQGFEVIETVKILEEKLSHIQESITLSIIGCVVNGPGEAAFTDIGITGGGRESNMLYLNGVQTEKLGNKDIISKVIDLVEKKAEEIQNKDK

SEQ ID NO: 91416 - protein, 286 aa, Unknown
  Bacterial polypetide isolated from the Sargasso Sea
QALKEIVKLSPIPIVADIHFHYLRAIEAADAGAACLRINPGNIGNIKKVKEVISAAKQNETSIRIGVNAGSLEKNILEKYGEPTPEALVESALDHIRILKEHDFHDYKISVKASDVFLAVAAYTQLADIDNCPLHIGITEAGSLRAGTVKSSIGLGNLLWSGIGDTIRVSLSAHPSEEVKVGYEMLKSLGLRRRGVTVISCPSCARQQFDVIKTVQEVEQRLEHISESITVSIIGCIVNGPGEAKETDIGLTGGGKGTHQIYVNGITDHIIRNENVADYIVNFVQN

SEQ ID NO: 91417 - protein, 179 aa, Unknown
  Bacterial polypetide isolated from the Sargasso Sea
FLSIAAYRQLSKVCDYPLHLGITEAGSFISGSIKSSVGLGTLLLEGIGDTIRVSLSDDPTKEIQIGNEILKSLNLRNRGVKIISCPSCARQAFQVIDTVKILEEKLSHIKTPISLSIIGCVVNGPGEASMTDIGITGGGKGNNMLYLSGVQTEKVLTEEIIAKVVSEVEKKAEEIENKN

SEQ ID NO: 91418 - protein, 249 aa, Unknown
  Bacterial polypetide isolated from the Sargasso Sea
MEVRPHRTIFRKKTKVIKVGNVAVGGNSIISVQSMTNTLTTDIKSTINQINSLEEAGADIVRVSCPDEGSTKSLNEIVKEVNVPIVADIHFHYKRAIEAAKSGASCLRINPGNIGSKDRVLEIVKAAKDNDCSIRIGVNAGSLDKILLDKYKEPCPEALVESAQYNIRLLEDNDFFNFKISVKSSDIFLTVKAYKKLSEICNYPLHLGVTEAGGLLTGSIKSSIGIGQLLMDGIGDTIRVSLSSDPVDE

SEQ ID NO: 91419 - protein, 134 aa, Unknown
  Bacterial polypetide isolated from the Sargasso Sea
MVGNRHKTHKVKIGNIYMGGDANIVVQSMTNTDTADAAATANQIMELANAGSEVVRITVNTEEAAAAVSKIKEILVKNNCNVPLVGDFHYNGHKLLTDYQECAEILDKYRINPGNVGFGEKRDKQFENMIEQAL

SEQ ID NO: 91420 - protein, 133 aa, Unknown
  Bacterial polypetide isolated from the Sargasso Sea
MSVRPFRDIKRRKTKVINVGTVKIGGDNPITVQSMTNTLTTNAKATINQINDIVNEGADIVRVSCPDKDSTLALKEIVKNVSVPIVADIHFHYKRAIEAAENGAKCLRINPGNIGDKVKIHEVLSAAKNNDCS

SEQ ID NO: 91421 - protein, 264 aa, Unknown
  Bacterial polypetide isolated from the Sargasso Sea
MKYSHSIKRKKTKKIQIGNIFVGGDSPITVQTMTNTLTHDIDATLEQIFLIEQEGCDIVRVSVPDEKSSQALKKIIPEINIPLVADIHFHYKRALEAAENGAHCLRINPGNIGSKEKIKEVVEAAKQNKIPIRIGVNSGSLEKSILEKYKSPTSEALFESAKLNIKLLEDLNFDNFKISVKASNVFTSVESYRMLSNYCDYPIHLGITEAGSYFSGSIKSSIGLGMLLYDGIGDTVRVSLSDHPTQEEKVGFEMLKSLNLRDYG

SEQ ID NO: 91422 - protein, 261 aa, Unknown
  Bacterial polypetide isolated from the Sargasso Sea
MTNTLTSDVKSTIKQIQEIQSEGADIVRVSCPDESSSKALKEITKHVNIPIVADIHFHYKRAIEAAENGASCLRINPGNIGDKKKIVEVIKSARNNNCSIRVGVNAGSLEKDILERFKEPCPEALVESAIRNIEILEDMDFSNLKVSVKSSDVFLSVEAYRQLSKKIDYPLHLGITEAGSFISGSIKSSIGLGILLKEGIGDTIRVSLSDDPVKEVAIGNEILKSLNLRNRGVKIISCPSCARQGFQVIDTVRILEEKLSH

SEQ ID NO: 91423 - protein, 200 aa, Unknown
  Bacterial polypetide isolated from the Sargasso Sea
MKFNRRKTRQIQIGKVGIGSDFPISVQSMTTTKTKDVESTLSQIYELASNGADIVRVTCNEVDAATGLVEITQRSPVPIVADVHFQYKLALAAIDAGVNGLRLNPGNIRKEQQIKEVAKEALSANIPIRIGVNGGSLDKDLLEKYGDATPEALVESALKELKYLEDVGFFDIKISVKHSNVPLMIESYRLLAEKVGLPSA

SEQ ID NO: 91424 - protein, 117 aa, Unknown
  Bacterial polypetide isolated from the Sargasso Sea
MNIRPFREIKRRKTKEINVGHVKVGGDNPISVQSMTNTLTKEIRQTINQIQQIEEAGADIVRVSCPDEDSTKALKDIIKNTSLPIVADIHFHYKRAIEAAESGAACLRINPGNIGDK

SEQ ID NO: 91425 - protein, 187 aa, Unknown
  Bacterial polypetide isolated from the Sargasso Sea
MSIRPFRDIKRKLTKEISVGNVKIGGNNPISVQSMTNTLTKDIKKTVNQINQIAEVGADLVRVSCPDENSTKALKEIVKHVSVPIIADIHFHYKRAIEAADNGASCLRINPGNIGNENKIKEVINAAKNNNCSIRIGVNAGSLERDILEKYKEPCPEALVESAIRNIGIIENEDFYNLKVSVKSSDV

SEQ ID NO: 91426 - protein, 163 aa, Unknown
  Bacterial polypetide isolated from the Sargasso Sea
YPLHLGITEAGGFIPGSIKSSIGLGTLLLDGIGDTIRISLSDDPVKEVKIGNEILKSLNLRERGVRIISCPSCARQGFQVIETVKILEQKLSHIKTPITLSVIGCVVNGPGEAAMTDVGITGGKKGNNMLYLSGVQSEKVLTNDMIEKVVSEVEKKASELEKK

SEQ ID NO: 91427 - protein, 214 aa, Unknown
  Bacterial polypetide isolated from the Sargasso Sea
MLSSNFIKRRKSRKVMVGNVAVGGDAPISVQSMTNTETTDVKSTVAQIHRLEKVGADIIRVSVPTMDAADAFKTIRGQVQTPLVADIHFDYRIALKVLEYGADCLRINPGNIGNVERVKAIVDSAKDKSIPLRIGVNAGSLGKSLLRKYKEPCAEAMVESALNQIDTLDKLDFHQFKISLKASEIFMTLQACRELAGQVDQPFHLGITEAGGQR

SEQ ID NO: 91428 - protein, 179 aa, Unknown
  Bacterial polypetide isolated from the Sargasso Sea
MTSEIRPFRKINRKKTKEINVGKIKVGGDNPITVQTMTNTLTSDHKSTIEQINKVTEAGADIVRVSCPDSRSTESLKTIIKHVDVPIVADIHFHYKRAIEAAENGADCLRINPGNIGDEKKIAEIIAAAKNNNCSIRIGVNAGSLEKDILERYREPCPEALVDSALRNIRIIEDMDFLI

SEQ ID NO: 91429 - protein, 289 aa, Unknown
  Bacterial polypetide isolated from the Sargasso Sea
MFNRRKTSQIQVGKVGIGSNFPISVQSMTTTKTRDVDGTLAQIYEIASNGADIVRVTCNEVEAAEGLVEITQRSPVPIIADIHFQYKLALAAIDAGVDGLRLNPGNIRKESQIKEVAKAALSANIPIRIGVNGGSLDKDLLEKYGDATPEALVESAMTELKYLEDVDFFNIKISVKHSNVPLMIESYRLLAEKVEYPLHLGVTEAGPLPGGLIKSTAGISTLLNEGIGDTIRYSLTADPIEEAKSGRQLLEYLGLRERNSLDLIACPSCGRAEVDVIKVAEEAQEALNK

SEQ ID NO: 91430 - protein, 295 aa, Unknown
  Bacterial polypetide isolated from the Sargasso Sea
GVKIAMEVAQHVDKVRINPGLFVFDKPDPNRQEFSDEEFAAIGARIRETFEPLVTLLRDQNKALRIGVNHGSLAERMLFTYGDTPKGMVESAMEFVRICDELDFHNIVISMKASRAPVMLAAYRLMADTMDKEGFNYPLHLGVTEAGDGDYGRVKSTAGIATLLADGLGDTIRVSLTEAPEREIPVCYSILQSLGLRKTMVEYVACPSCGRTLFNLEEVLHKVRDATSHLTGLDIAVMGCIVNGPGEMADADYGYVGKTPGVISLYRGRDEIRKVPEEEGVNALILVDQRGRALG

SEQ ID NO: 91431 - protein, 263 aa, Unknown
  Bacterial polypetide isolated from the Sargasso Sea
MSLRPFRNIDRKKTKVINVGDVKVGGDNPISVQSMTNTLTTDVSATIKQIQEIHDEGADIVRVSCPDEDSSKALKEITKNVQIPIVADIHFHYKRAIEAAENGAKCLRINPGNIGDKKKIYDVLKAAKDNDCSIRIGVNAGSLERDILEKYKEPCPEALVESALRNIKILEDEDFFNFKVSVKSSDVFLSIAAYRQLSKVMNYPLHLGITEAGGFVTGSVKSAIGLGSLLLDGIGDTIRVSLSDDPVKEVKIGNEILKSLGLR

SEQ ID NO: 91432 - protein, 270 aa, Unknown
  Bacterial polypetide isolated from the Sargasso Sea
MLRPYQKINRRKTRVINVGSVLVGGNNPISVQTMTNTLTTDVKSTSNQINRAVSAGVDLVRVSVPDKESTEALKEITKHSKVPIIADIHFHYKRAIEAANNGASCLRINPGNIGSKERVKEIIKAAKDNNCSIRVGVNAGSLDRKILEKYSEPNPEALVESAKENIKILEDNDFYNFKISVKSSDIFMAIKAYELLANECDYPLHLGITEAGGKRTGSIKSSIGMGNLLLNGIGDTIRVSLSDEPEEEVKVGFEILKSLGVRNRGVKIVS

SEQ ID NO: 91433 - protein, 303 aa, Unknown
  Bacterial polypetide isolated from the Sargasso Sea
MSIRPFRDIKRRKTKVITVGNVKIGGDNPISVQSMTNTLTKDIKATLNQINQVANEGADLVRVSCPDEDSTKALKEIVKHSSVPIIADIHYHYKRALESADNGAKCLRINPGNIGDKKKIKEIINAAKNNGCSIRIGVNAGSLERDILEKYKEPCPEALVESALRNIEIIENEDFFNFKVSVKSSDVFLSIGAYKKLSKKTEYPLHLGITEAGSYLPGSIKSSIGLGNLLLDGIGDTIRVSLSDDPVEEIKIGNEILKSLNLRERGVKIISCPSCARQAFQVIDTVKVLEDKLSHIKTPITCR

SEQ ID NO: 91434 - protein, 136 aa, Unknown
  Bacterial polypetide isolated from the Sargasso Sea
MSIRPFRDIKRRKTKEINVGKVKVGGNNPISVQSMTNTLTTDIKATINQINEIQTEGADIVRVSCPDEESSKALKEIVKHVDIPIVADIHFHFKRAIEAAENGASCLRINPGNIGNIDKIKEVVKAAHNNNCSIRV

SEQ ID NO: 91435 - protein, 223 aa, Unknown
  Bacterial polypetide isolated from the Sargasso Sea
KYGEPCPEAMVESGLDHIKILEDNDFHEFKISVKASDVFLSAAAYQTLADATDAPLHLGITEAGGLMSGTIKSSIGLGSLLWLGIGDTIRVSLSADPVEEVKVGYDILKSLGLRHRGVNIISCPSCARQGFNVIETVKILEDRLAHVKTPMSLSIIGCVVNGPGEALMTDIGFTGGGAGNGMIYWAGKQDHRIGNDAMVDHIVDLVEKRAKEIDAEKIQEAAE

SEQ ID NO: 91436 - protein, 213 aa, Unknown
  Bacterial polypetide isolated from the Sargasso Sea
MSIRPFRDIKRRVTKVINVGNVKIGGENPISVQSMTNTLTKNVKETLNQINKISEAGGDIVRVSCPDEESTDALKEIKKHSPIPIVADIHFHFKRAIEAAENGADCLRINPGNIGDKNKIAQVISAAKNNKCSIRIGVNSGSLEKDILEKFKEPCPEALAESAIRNIKILEDLDFFNFKISVKSSDVFLSIKAYRELSKVTNYPLHLGITEAG

SEQ ID NO: 91437 - protein, 175 aa, Unknown
  Bacterial polypetide isolated from the Sargasso Sea
DYPLHIGVTEAGGLRSGTVKSSVGLGMLLWSGIGDTLRVSLSADPVEEVKVGFDLLKSLGLRHRGVNVVSCPSCARQQFDVIETVKVLEARLSHITTPMTVSVIGCVVNGPGEATMTDIGFTGGGRGTHQVYIAGQPHHRLQDEDIVDHLVHLVEEKATAIEADVGRDDIPSAAE

SEQ ID NO: 91438 - protein, 198 aa, Unknown
  Bacterial polypetide isolated from the Sargasso Sea
MNFLKIKRRNSLKIKVGNVEIGGNAPISVQSMTNTKTEDVQATLDQVKQLEYAGADLVRISVPNEEAATAFKLIKKDSNVPLIADIHFDYKMGILAAKNGADCLRINPGNIGNIDRVKEVVKCAEDKDIPIRVGVNAGSLEKKLQKKYGEPTPEALVESAMNHVDILESLNFQNFKLSIKASDVGMMVESYRIIAEMI

SEQ ID NO: 91439 - protein, 290 aa, Unknown
  Bacterial polypetide isolated from the Sargasso Sea
WRRNPISVQSMTNTLTTDIKSTINQINEISSEGADIVRVSCPDEQSSRALKEIIKHVDIPVVADIHFHYKRAIEAAESGASCLRINPGNIGNKDKIKEVVKAAIDNNCSIRVGVNAGSLEKDILEKYKEPCPEALVESALRNIKILEDENFQNLKISVKSSDVFLSVEAYRQLSKSTDYPLHLGITEAGGFIPGSVKSSIGLGTLLLEGIGDTIRISLSDNPIEEVKIGNEILKSLNLRERGVKIISCPSCARQGFEVIETVKILEKKLSHIKTPITLSVIGCVVNGPGE

SEQ ID NO: 91440 - protein, 119 aa, Unknown
  Bacterial polypetide isolated from the Sargasso Sea
MSIRPFRDINRKKTKVINVGNVKIGGDNPISVQSMTNTLTKDFKATIKQINEITDAGADLVRVSCPDKESTEALKKIVHSVNIPIIADIHFHYKRAIEAAKNGADCLRINPGNIGNEIK

SEQ ID NO: 91441 - protein, 158 aa, Unknown
  Bacterial polypetide isolated from the Sargasso Sea
LGITEAGTYLPGSIKSSIGFGTLLLDGIGDTIRVSLSDDPVEEIKVGNEILKSLGLRNRGVKIISCPSCARQAFQVIDTVKKLEKKLSHIKEPITLSIIGCVVNGPGEAKQTEIGITGGGKDNHMLYLNGLESEKITTKDMIDKIVTLIEEKVAKLQN

SEQ ID NO: 91442 - protein, 201 aa, Unknown
  Bacterial polypetide isolated from the Sargasso Sea
MSIRPFRDINRKKTKEINVGYLKIGGDNPISVQSMTNTLTKDVKSTIKQIKQIENAGADLVRVSCPDKESTEALKQIIKQVKVPIVADIHFHYKRAIEAAENGAHCLRINPGNIGDRQKIKEVIKAAQNNGCAIRVGVNAGSLEKDILEKYREPCPEALVESALRNIEILENENFFNLKVSVKSSDVFLSIGAYKQLSQKI

SEQ ID NO: 91443 - protein, 224 aa, Unknown
  Bacterial polypetide isolated from the Sargasso Sea
MLRPYQKINRRISRVIKVGSVSIGGSNKIAVQTMTNTLTSNAKETIAQIERSAKLGADLVRVSIPDKESANSLKDIVKHSPVPVIADIHFHYKRGIEAACNGASCIRINPGNIGSIDRIKELIKAAKDNNCSIRIGVNAGSLEKQILDKYSEPNPEALVESAKLNIKILEDNDFTNFKISVKSSDIFMSIMAYEKLASICDYPLHLGITEAGGKRTGSIKSSIG

SEQ ID NO: 91444 - protein, 261 aa, Unknown
  Bacterial polypetide isolated from the Sargasso Sea
MEIRPHRKIKRKTTKKIKVGNVSVGGNSQISVQSMTNTLTTDIKGTINQILSLEEAGADIVRVSCPDEESTKALKSIVKKVSVPIVADIHFHYKRAIEAAEMGASCLRINPGNIGTNQRVLEVIKAAKDNDCSIRIGVNAGSLDKKLLEKYKEPCPEALVESAQHNIKLLEDNDFFNFKISVKSSDIFLTVKAYKKLSEICDYPLHLGVTEAGGLLTGSIKSSIGIGQLLMEGIGDTIRISLSSDPVDEVKAGYEILKSLG

SEQ ID NO: 91445 - protein, 214 aa, Unknown
  Bacterial polypetide isolated from the Sargasso Sea
FKEPCPEALVESALRNIKILEDKDFFNFKISVKSSDVFLSIGAYRQLSNLTDYPLHLGITEAGSFVSGSIKSSIGLGSLLMDGIGDTIRISLSDNPTKEVKIGNEILRSLNLRNRGVKIISCPSCARQAFKVIDTVKILEEKLAHIKTPITLSIIGCVVNGPGEAAMTDIGITGGGKGNNMLYLSGVQNEKVLTSDIIDKVVYEVEKKASELEN

SEQ ID NO: 91446 - protein, 174 aa, Unknown
  Bacterial polypetide isolated from the Sargasso Sea
MSVRPFRDINRRKTKVINVGDVKIGGDNPISVQSMTNTLTTDVKATINQINDIAEEGADIVRVSCPDPDSTKALKEIVKHVSIPVVADIHFHYKRAIEAAENGAKCLRINPGNIGEESKIHDVLSAAKNNGCSVRIGVNAGSLEKDILDKFKEPCPEALVESALRNIKILEDKD

SEQ ID NO: 91447 - protein, 270 aa, Unknown
  Bacterial polypetide isolated from the Sargasso Sea
RAIEAAESGASCLRINPGNIGSKDRIKEVIKAAKDHDCAIRIGVNAGSLEKKILEKYKEPCPEALVESATHNIKLLEENNFFNFKISVKSSDVFLSVKAYESLSKLYDYPLHLGITEAGGLFTGSIKSSIGIGKLLMQGIGDTIRVSLSADPVEEVKAGFEILSSLGIRARGVQIISCPSCARQAFPVIDTVKILEKKLSHIKKPMTLSIIGCVVNGPGEAAQTDIGLTGGGDGNNLLYLSGIPHNKVASKDIINKVVNLVESKAKEINN

SEQ ID NO: 91448 - protein, 280 aa, Unknown
  Bacterial polypetide isolated from the Sargasso Sea
MEIRPHRSITRRKTKVIQVGNVKVGGNEIISVQSMTNTLTPDVKSTLKQIEELKDAGADIVRVSCPDEESTRALKKITKETTIPIVADIHFHYKRAIEAAKYGAACLRINPGNIGSKDRIIEVIKAAKDYNTSIRIGVNAGSLDKSLLEKYKEPCPEALVESAMYNVRLLEDNNFTNFKISVKSSDVFLAIKSYEQLSKICNYPLHLGITEAGSLFSGSIKSSIGIGQLLMKGIGDTIRVSLSDDPVQEVKAGYEILKSLNIRSRGVKIISCPSCARQAF

SEQ ID NO: 91449 - protein, 246 aa, Unknown
  Bacterial polypetide isolated from the Sargasso Sea
DYKIALEVADSADCLRINPGNIGKEDRVKEVISAAIDNDIPIRVGVNAGSLEKDLQKKYGEPNADALVESALRHVDILDKFNFENYKMSLKASNIEMTVDAYRKISNIIDQPLHLGITEAGSYRAGTVKSSIGVGMLLSEGIGDTIRISLASDPVDEIKIGWDILKSLNIRSRGVKIVACPSCSRQNFNVIEVVNELEQRLEDISDDIEVAIIGCYVNGPGESKAANIGLTGASPNNLLYIDGTPN

SEQ ID NO: 91450 - protein, 173 aa, Unknown
  Bacterial polypetide isolated from the Sargasso Sea
AYRSLSSACDYPLHLGVTEAGGFVTGSIKSSIGIGMLLSEGIGDTIRVSLSADPVEEVRVGYEILKSLNLRHKGVNIISCPSCARQGFPVIETVKKLEEKLAHIKESITLSIIGCVVNGPGEASQTQIGLTGGGQNNHMMYLSGVPHKKVASDKIIKEIVTLVEKKSKELRKN

SEQ ID NO: 91451 - protein, 190 aa, Unknown
  Bacterial polypetide isolated from the Sargasso Sea
TPNAAEIAATIVEKVRINPGNYADRKKFEVHEYSDSSYSEELERIRARFTPLIKICKENGTAMRIGTNHGSLSDRILSRYGDTPLGMVESALEFIRIAEDESYHDMILSMKASNTQVVVQAYRLLVNKMIEEGMNYPLHLGVTEAGEAEDGRIKSALGIGALLEDGLGDTIRVSLTEEPEAEIPVAKVIA

SEQ ID NO: 91452 - protein, 124 aa, Unknown
  Bacterial polypetide isolated from the Sargasso Sea
MKTNWIKRKKTKTIYVGNVPVGGNNPISVQSMTNTDTCDVVSTINQINDLKKAGADIVRVSVPGFDEAKAFKEIKNAVNIPLVADIHFDYKIALEVADTADCLRINPGNIGKEDRVQEVINAAL

SEQ ID NO: 91453 - protein, 166 aa, Unknown
  Bacterial polypetide isolated from the Sargasso Sea
MEIRPYREVKRKKTRVIKVGKVSVGGNSPISVQSMTNTLTTDAKSTINQINNLEERGADIVRVSCPDESSTKSLKEITKNVNVPIVADIHFHYKRAIEAAKNGAACLRINPGNIGAKDRILDVVKAAKDFNCSIRIGVNAGSLEKKLLDKYKEPCPEALVKVRLQC

SEQ ID NO: 91454 - protein, 262 aa, Unknown
  Bacterial polypetide isolated from the Sargasso Sea
MNIRPFREIKRRKTKEINVGHIKVGGDNPISVQSMTNTLTKDVKETVKQIEQIEEAGADIVRVSCPDEDSTKALKDIIKNTSIPIVADIHFHYKRAIEAAESGAACLRINPGNIGDKKKIKEVISAAKNNNCSIRIGVNAGSLEKDLLEKYKEPCPEALVESALRNISIVEELDFNKFKVSVKSSDVFLSIEAYRQLSKVTDYPLHLGITEAGSFLPGSIKSSIGFGSLLMSGIGDTIRVSLSDDPVEEIKVGNEILKSLNL

SEQ ID NO: 91455 - protein, 177 aa, Unknown
  Bacterial polypetide isolated from the Sargasso Sea
IFLTVKAYRKLSNICNYPLHLGVTEAGGLFTGSIKSSIGIGQLLMEGIGDTIRVSLSSDPVDEVKAGFEILKSLGIRSRGVNIISCPSCARQAFPVIETVKILEEKLAHIKKPINISIIGCVVNGPGEAAQTEIGLTGGGQDNNLLYLSGIPHTKIPSSEIIDKVVKLVEEKTKEQK

SEQ ID NO: 91456 - protein, 292 aa, Unknown
  Bacterial polypetide isolated from the Sargasso Sea
NKLEDAGADIVRVSCPDEESTQALRKITKEVKVPIVADIHFHYKRAIESAVSGAKCLRINPGNIGSNERIKEVIKAAKDYDCAIRIGVNAGSLEKKILEKYKEPCPEALVESASHNIKLLEDNDFFNFKISVKSSDVFLAVKAYEILSKSCNYPLHLGITEAGGLLTGSIKSSIGIGKLLMQGIGDTIRVSLSADPIEEVKAGFEILKSLGIRSRGVQIISCPSCARQAFPVIDTVKILEKKLSHIKKPMTLSIIGCVVNGPGEASQTDIGLTGGGDGNNLLYLSGIPHNKV

SEQ ID NO: 91457 - protein, 160 aa, Unknown
  Bacterial polypetide isolated from the Sargasso Sea
GITEAGSFVPGSIKSSIGLGSLLLDGIGDTIRVSLSDDPVKEVRIGNEILKSLNLRNRGVKIIACPSCARQGFEVIKTVKILEEKLAHIKTPISLSIIGCVVNGPGEAAFTDVGITGGGKDSNMLYIKGLQKEKISNKEIISKVIELVENKVKEIDSKKI

SEQ ID NO: 91458 - protein, 235 aa, Unknown
  Bacterial polypetide isolated from the Sargasso Sea
FSLSLIEISSLGGIKEFSDNLNFIRVCSNELELLKSSNLPNNTVLILHSKNDHFMPDMRSFFLSTSVSLPIIVSKSYDFSYSDKLIVQSSTDLGGIFIQGMGDGIFLRSSKKSDINYNRLNSLSFKILQAARVRVTSTDFISCPSCGRTLFDLQKTTAMIREKTNHLKGLKIGIMGCIVNGPGEMADADYGYVGSGKDKITLYRGQEVVKRAINYEHGVNELIELIKDDGNWIDP

SEQ ID NO: 91459 - protein, 249 aa, Unknown
  Bacterial polypetide isolated from the Sargasso Sea
MFAESPIKRRKSTRINVGNVPIGDGAPIAVQSMTNTRTTDVAATVDQINRIVAVGGEIVRVSVPTMEAAEAFKEIKKQVSVPLVADIHFDYRIALKVAEYGVDCLRINPGNIGNMERVRSVVDCAKDKNIPIRIGVNGGSLEKDLQEKYGEPTPEALVESAMRHVDILDKLNFDQFKVSVKASDVFLAVGAYRLLAQKIDQPLHLGITEAGGQRAGAVKSAVGLGMLLAEGIGDTLRVSLAADPGKKSR

SEQ ID NO: 91460 - protein, 169 aa, Unknown
  Bacterial polypetide isolated from the Sargasso Sea
MQVRPHRIINRKKTREIKVGNISVGGGSPISVQSMTNTKTSDVKSTVKQILSLEEAGADIVRVSCPDESSTKALKHIVKEVKAPIVADIHFHYKRAIEAAEMGASCLRINPGNIGSRNRVLEVVKAAKNNNCSIRVGINAGSLDKSLLEKYKEPCPEALVESAKYNIKL

SEQ ID NO: 91461 - protein, 291 aa, Unknown
  Bacterial polypetide isolated from the Sargasso Sea
NVPLVGDFHFIGHRLLRDFPELAATLAKFRINPGNVGRGVRHDENFATFIDIAKDLGKPVRIGVNAGSLDPDLMALKMDENSRISEPLDSEQVENHALVESALKSAEAALDIGLTPNQIIISCKVSRFPQMVSVYRELSERSDFPLHLGLTEAGMGQKGIVATTAALSTLLEQGIGDTIRASLTPEVGGDRSTEVRLCQDILQAIGLRRFRPAVTACPGCGRTTSTLFRELAQDIQAHIDEKLPEWQSRHKGSESLQVAVMGCVVNGPGESRAANIGISLPGAGEEPRAPG

SEQ ID NO: 91462 - protein, 319 aa, Unknown
  Bacterial polypetide isolated from the Sargasso Sea
INSCKENGVAMRIGTNHGSLSDRIMNRYGDTPLGMVESAMEFLRICKENDYDQIILSMKSSNPIVMIHAYRLLVKSMENENMHYPLHLGVTEAGDGLDGRIKSALGIGTLLTEGIGDTIRVSLTEDPEFEIPAAEKILERIDNISKKVRLKNTDKRAFSFFKRETESIKNIGEKNPPIVISNSLNDFEGNVPDYLFIDNLDNLNDSKKYIIDGKDWNENLSKNIFPYFNSLKDFRKSESVSNTLNFVEIELTKITNTITQTFSNNVVIVLNVDNAIRNDILSAFNFLEEKLIKIPIILKGSYQSSDFEKVAIDASIDIG

SEQ ID NO: 91463 - protein, 281 aa, Unknown
  Bacterial polypetide isolated from the Sargasso Sea
VSIPIVADIHFHYKRAIEAAENGASCLRINPGNIGSNQRVLEVIKAAKDNNCAIRIGVNAGSLDKDLLEKYKEPCPEALVESAQKNIKLLEDNDFFNFKISVKSSDIFLTVKSYKKLSEICNYPLHVGVTEAGGLLTGSIKSSIGIGQLLMEGIGDTIRVSLSSDPLDEIKAGYEILKSLGIRSRGVNIISCPSCARQAFPVIETVKILEEKLAHIKKPINISIIGCVVNGPGEAAQTEIGLTGGGQDNNLLYLSGVPHSKVPSPDIIKKVVELVEEKVKE

SEQ ID NO: 91464 - protein, 156 aa, Unknown
  Bacterial polypetide isolated from the Sargasso Sea
LGVTEAGGLFSGTIKSSIGVGQLLMEGIGDTIRVSLSSDPVDEVKAGFEILKSLGIRSRGVNIISCPSCARQAFPVIETVKILEKKLAHITKPINLSIIGCVVNGPGEAAQTEIGLTGGGQDNNLLYLSGVPHSKVPSSEIIKRIVKLVEEKTKDI

SEQ ID NO: 91465 - protein, 170 aa, Unknown
  Bacterial polypetide isolated from the Sargasso Sea
MDIRPHRVIRRKKTREIKVGNVSVGGDSIISVQSMTNTLTTDIKATVKQINDLEDAGADIVRVSCPDEESTKSLKHIIKEVNVPVVADIHFHYKRALEAAKVGAGCLRINPGNIGSKNRIIEVIKAAKDNNCSIRIGVNAGSLDKTLLEKYKEPCPEALVESAKYNIRLF

SEQ ID NO: 91466 - protein, 315 aa, Unknown
  Bacterial polypetide isolated from the Sargasso Sea
QSMTNTLTKDVKETVKQIEQIEKRGADIVRVSCPDEDSTKALKDIVKNTYIPIVADIHFHYKRAIEAAESGAACLRINPGNIGDKKKIKEVISAAKNNNCSIRIGVNAGSLEKDLLEKYKEPCPEALVESALRNISIVEDFDFNEFKVSVKSSDVFLSIEAYRQLSKVTDYPLHLGITEAGTFLPGSIKSSIGFGSLLMSGIGDTLRVSLSDDPVEEIKVGNEILKSLNLRNRGVKIISCPSCARQAFNVIETVKKLEDRLSHIKTSISLSIIGCVVNGPGEASQTDIGITGGGKGNNMLYLNGVESKKISSDEM

SEQ ID NO: 91467 - protein, 159 aa, Unknown
  Bacterial polypetide isolated from the Sargasso Sea
GVTEAGSFIPGSIKSSIGLGTLLLEGIGDTIRISLSDDPIQEVKIGNEILKSLNLRNRGVKIISCPTCARQAFQVIDTVKELEKKLSHIKTPITLSIIGCVVNGPGEAAQTDIGITGGGKGNNMLYLNGIQTKKIPSESIISKVVELVEEKALEIENNK

SEQ ID NO: 91468 - protein, 147 aa, Unknown
  Bacterial polypetide isolated from the Sargasso Sea
MEVRPHRIIKRKKTKKIKVGNIYVGGDAPVSVQSMTNTLTTDHKATIKQIKELEEAGADIVRVSCPDEESTKALKIITKETDLPIVADIHFHFKRAIESAVSGAKCLRINPGNIGSKERIKEVIKAAKDYGCAIRIGVNAGSLEKKI

SEQ ID NO: 91469 - protein, 227 aa, Unknown
  Bacterial polypetide isolated from the Sargasso Sea
DILEKFKEPCPEALVESAIRNIEILENEDFTNLKVSVKSSDVFLSIGAYRQLSKKINYPLHIGITEAGSFLPGTIKSSIGFGALLMDGIGDTIRVSLSDDPVEEVKVGNEILKSLNLRHRGVKIISCPSCARQGFEVIKTVKILEEKLAHIKTPLTLSIIGCVVNGPGEAALTDIGITGGGKGNNMLYLSGIQKEQVMTNNIINKVVDEVEKKILEIERENDTTQNC

SEQ ID NO: 91470 - protein, 234 aa, Unknown
  Bacterial polypetide isolated from the Sargasso Sea
TNTLTTDVKNTIKQIHSLEEAGVDIVRVSCPDESSTKSLKQIVKDINVPIVADIHFHYKRAIEAAEMGASCLRINPGNIGSKERILEVVKAAKDNNCSIRIGVNAGSLDKSLLEKYKEPCPEALVESAQHNIKLLEDNNFFDFKISVKSSDIFLTVKAYKQLSEICDYPLHLGITEAGGLLTGSIKSSIGIGQLLMNGIGDTIRVSLSSDPVDEVKAGFEILKSLGIRSRGINI

SEQ ID NO: 91471 - protein, 145 aa, Unknown
  Bacterial polypetide isolated from the Sargasso Sea
IQSSIGLGKLLWSGIGDTIRVSLSADPVEEVKAGFQILKSLGIRNKGVTIISCPSCARQNFDVINTVKIIEEKLSHIKETISLSIIGCVVNGPGEARETNIGITGGGKKFHQIYIDGNISHRMEQKDFINHVINLVEEYAERLRK

SEQ ID NO: 91472 - protein, 148 aa, Unknown
  Bacterial polypetide isolated from the Sargasso Sea
MEIRPHRTIKRRKTKTIKVGNVSIGGDSVISVQSMTNTLTTDTKATIKQINELQESGADIVRVSCPDEKSTKNLKEITKETSVPIVADIHFHYKRAIEAAKNGANCLRINPGNIGSSERVLEVVKAAKDHNCSIRIGVNAGSLDKVLL

SEQ ID NO: 91473 - protein, 280 aa, Unknown
  Bacterial polypetide isolated from the Sargasso Sea
ADIHFHYKRAIEAADNGASCIRINPGNIGSQDRIKEVIKAAKSNNCSIRVGVNAGSLEKQVLDKYSEPNPDALVESAILNIKILEDNDFTNFKISVKSSDIFMSVKAYQDLAKLCDYPLHLGITEAGGRRSGSIKSSIGIGNLLLQGIGDTIRVSLSDEPEEEVRVGFEILKSLGLRNRGVKIISCPSCARQQFQVIDTVKSLEKRLDDITTPMTVSIIGCVVNGPGEATMTDIGITGGGNDTHMIYLNGKKNNIVKNVDLENYLEKLIRERSKELQIVE

SEQ ID NO: 91474 - protein, 176 aa, Unknown
  Bacterial polypetide isolated from the Sargasso Sea
MHNQAPIQRRKSKRIYVGNVPIGDGAPIAVQSMTNTRTTDVAATVNQIKALERVGADIVRVSVPTMDAAEAFKLIKQQVSVPLVADIHFDYRIALKVAEYGVDCLRINPGNIGNEERIRMVVDCARDKNIPIRIGVNAGSLEKDLQEKYGEPTPQALLESAMRHVDHLDRLNFDQL

SEQ ID NO: 91475 - protein, 297 aa, Unknown
  Bacterial polypetide isolated from the Sargasso Sea
MTNTLTTDVKSTIEQVVAASEAGADLVRVSVPDLESSKALKEIVKESPVPIVADIHFHYKRGIEAAEAGAACLRINPGNIGSEERVKEVIRAAKDNNCSMRIGVNAGSLEKDLLEKYREPCPEAMVESGLDHIKILEDNDFHEFKISVKASDVFLSAAAYQALADATDAPLHLGITEAGGLMSGTIKSSIGLGSLLWLGIGDTIRVSLSADPVEEVKVGYDILKSLGLRHRGVNIISCPSCARQGFNVIETVQILEDRLAHVKTPMSLSIIGCVVNGPGETLMTDIGFTGGGAGNGM

SEQ ID NO: 91476 - protein, 190 aa, Unknown
  Bacterial polypetide isolated from the Sargasso Sea
ISLILKLSVKSSDIFLTVKAYQQLSEICNYPLHLGVTEAGGLFTGSIKSSIGIGQLLMSGIGDTIRVSLSSDPIDEIKAGYEILKSLGIRSRGVNIISCPSCARQAFPVIETVKELEKKLSHIKKPINLSIIGCVVNGPGEAAQTEIGLTGGGQDSNLLYLSGIPHSKVASSEIIDKVVKLVEDKAKEII

SEQ ID NO: 91477 - protein, 124 aa, Unknown
  Bacterial polypetide isolated from the Sargasso Sea
MSIRPFRDIKRKKTNVISVGNVKIGGDNPISVQSMTNTVTKDTKSTINQINNIASEGADLVRVSCPDKESTSALKEIAKHSSIPIIADIHFHYLRAIESAENGAKCLRINPGNIGDRKKIKDIV

SEQ ID NO: 91478 - protein, 238 aa, Unknown
  Bacterial polypetide isolated from the Sargasso Sea
MSIRPFRDIKRKKTRKIKVGKVEVGGDAPISVQSMTNTLTTNIDATIKQVNELKEAGADIVRISCPDKESSTALKKIISQVDVPIIADIHFHYKRAIEAAMSGAHCLRINPGNIGSKEKVKDVLKAAKDYNCSIRVGVNAGSLEKILLEKYKEPCPEALVESAVNNIKLLEDENFFNFKISVKSSDIFLTTKAYRSLSSVCDYPLHLGITEAGSLTTGSVKSSLGIGLLLMEGIGDTI

SEQ ID NO: 91479 - protein, 222 aa, Unknown
  Bacterial polypetide isolated from the Sargasso Sea
MTRNRRHTIAVKVGSVTIGGNNPIIVQSMTNTDTADVDATTKQVQELAIAGSELVRITVNTSEAAAKVATIREKLDGLGCYVPLVGDFHYNGHKLLIDYPECAQALGKYRINPGNVGFGKKKDNQFAIMIEQAIKYGKPVRIGVNWGSLDQDLLTKMMDDNAKRSAPLDTDEVMQEALIISALNSAERAVELGLPKDHIVLSCKVSGVQKLISVYRDISQRC

SEQ ID NO: 91480 - protein, 224 aa, Unknown
  Bacterial polypetide isolated from the Sargasso Sea
MVKKRKFLKFISAAKNNNCSIRIGVNSGSLEKDILEKFKEPCPEALVESAIRNVKILEDLDFFNFKVSVKSSDVFLSIKAYRELSKIIDYPLHLGITEAGSFIPGSIKSSIGLGNLLLDGIGDTIRVSLSDDPVEEIKIGNEILKSLNLRNRGVKIISCPSCARQGFEVIDTVKILEEKLSHIKTPITLSIIGCVVNGPGEAAQTDIGITGGGQNSNMLYLKGV

SEQ ID NO: 91481 - protein, 272 aa, Unknown
  Bacterial polypetide isolated from the Sargasso Sea
TNTLTTDVKATINQINDIAEEGADIVRVSCPDENSSKALKEIIKHVSIPVVADIHFHYKRAIEAAENGASCLRINPGNIGDETKIHEVLKAAKNNNCSIRIGVNAGSLEKDILEEFKEPCPEALVKSALRNIKILEDKDFFNFKISVKSSDVFLSIAAYRQLSKVIDYPLHLGITEAGSFVSGSIKSSIGLGSLLMDGIGDTIRISLSDNPTQEVKIGNEILKSLNLRNRGVKIISCPSCARQAFQVIDTVKILEEKLAHIKTPITLSIIGC

SEQ ID NO: 91482 - protein, 280 aa, Unknown
  Bacterial polypetide isolated from the Sargasso Sea
LKKIAKDSKVPIIADIHFHYKRAIEAAKSGAKCLRINPGNIGQKEKIKQVIAAAKDYGCALRIGVNAGSLEKDILEKYKGPCPDALVESALRNIKIIEDEDFFNFKVSVKSSDVFLSVASYRLLSNKTDYPLHLGVTESGSFVPGSVKTSIGLGLLLMEGIGDTIRVSLSDDPIKEVKIGNEILKSLNLRNRGVKVISCPSCARQGFEVIDVVKKLEEKLSHIKTPLTLSIIGCVVNGPGEAALTDIGITGGGKDSNMLYLNGIQKEKLKNDEIIPKLLL

SEQ ID NO: 91483 - protein, 154 aa, Unknown
  Bacterial polypetide isolated from the Sargasso Sea
MSIRPFRDIKRRKTKKIKVGNIEVGGDSPISVQSMTNTLTTDVKKTIKQINALEEAGADIVRVSCPDQESCFSLKNIKKDINVPIVADIHFHYKRAIEAAKYGANCLRINPGNIGSKEKIKEVLKAAKDNGCSIRIGVNAGSLGREILEKYKEP

SEQ ID NO: 91484 - protein, 200 aa, Unknown
  Bacterial polypetide isolated from the Sargasso Sea
MNLNSIRPWRNIDRRSSRKIMVGSVPVGADSPITVQTMTNTLTTDIKSTINQIISCTDAGADIIRVSCPDLESTKSLKTIVKESPIPIVADIHFHYKRAIEAAEAGAACLRINPGNIGSNTRIKEVIKAAKDFGCSIRIGVNAGSLEKKLLDKYGEPCPEAMIESGLAHIKLLEDNDFFEFKISVKASDVFLAAAAYQGL

SEQ ID NO: 91485 - protein, 251 aa, Unknown
  Bacterial polypetide isolated from the Sargasso Sea
INQINEIQNEGADLVRVSCPDESSSKALKEITKYVDVPIIADIHFHYKRAIEAAENGASCLRINPGNIGNEKKIRDVLLAAKDNECSIRIGVNAGSLEKDILDKYKEPCPEALVESALRNIKILEDQDFFNFKISVKSSDVFLSIKAYRQLSEVTNYPLHLGITEAGSFVSGSIKSSIGVGTLLLDGIGDTIRISLSDDPVKEVKIGNEILKSLNLRTKGVKIISCPSCARQGFQVIDTVKILEEKLSHIK

SEQ ID NO: 91486 - protein, 231 aa, Unknown
  Bacterial polypetide isolated from the Sargasso Sea
MPSPEIQMPSSLLPRKSTQQVRVGKILVGGDAPIVVQSMTNTDTADVDATVRQVIELAEAGSEIVRITVNNDDAAKAVPVIRTRLDMAHCSVPLVGDFHYNGHTLLQEYSDCADVLDKYRINPGNVGQGEKRDIRFCQMIEQACLRNKPVRIGVNWGSLDPQLLARKLDKNAALASPRSLETVTREALVDSALNSAELAQREGLRPDQIILSAKVSAVPELVAVYRQLAER

SEQ ID NO: 91487 - protein, 198 aa, Unknown
  Bacterial polypetide isolated from the Sargasso Sea
MSIRPFRDIKRKKTKKIKVGKVEVGGDSPISVQSMTNTLTQNIKDTVKQTNELSEAGADIVRISCPDKESSMSLKKIVSEVDVPIVADIHFHYKRAIQAAGAGASCLRINPGNIGSVSRVHEILKAAKDNNCSIRVGINAGSLEKDLLEKYKEPCPEALCESALRNIKILEDKDFFNFKVSVKSSDVFLSIKAYKLLS

SEQ ID NO: 91488 - protein, 240 aa, Unknown
  Bacterial polypetide isolated from the Sargasso Sea
MSIRPFRDIKRRKTKKIKVGKVEIGGDAPISVQSMTNTLTTDIKKTIDQINNLADAGADIVRVSCPDQESSYAIKKIIKNVKVPLVADIHYHYKRAIEAANSGANCLRINPGNIGSKDRVKEVLKAAKDNNCSLRIGVNAGSLDKTILEKYKEPCPEALVESAINNIKLLEDENFFNFKISVKSSDVFLATKAYRILSSKCDYPLHLGITEAGSLKSGSVKSSIGMGILLMEGIGDTIRV

SEQ ID NO: 91489 - protein, 247 aa, Unknown
  Bacterial polypetide isolated from the Sargasso Sea
MSIRPYRDIYRKKTKVIKVGSLNIGGDNPISVQSMTNTLTKDKRATIDQINRIEEAGADLVRVSCPDEASTKALKEIKRSTNIPIVADIHFHYQRAIEAAINGADCLRINPGNIGDKKKIKEVIKAAKDNNCSIRVGVNAGSLEKDILESYKEPCPEALVDSAIRNIRILEDEDFFNLKVSVKSSDVFLSIGAYRQLSKKINYPLHIGITEAGSFLPGTIKSSIGFGALLLDGIGDTIRVSLSDDPV

SEQ ID NO: 91490 - protein, 255 aa, Unknown
  Bacterial polypetide isolated from the Sargasso Sea
MLENGASCLRINPGNIGSKEKVKDVIKAAKDFNCSIRIGVNGGSLEKKILEKYSEPNPEAMVESAIENIKLLEDNDFFNFKISVKASDIFLTIKSYEKLSKLCDYPLHLGITEAGSNKTGSIKSSIGIGQLLLQGIGDTIRVSLSDEPEEEVKVGYEILKSLGLRNRGVKIISCPSCARQQFPVIETVKKLEKSLENIDIPMTISIIGCVVNGPGEANMTQIGITGGGNDTHMIYIDGKKDHRIKNENIPSYWKK

SEQ ID NO: 91491 - protein, 284 aa, Unknown
  Bacterial polypetide isolated from the Sargasso Sea
VINVGEVKIGGDNPISVQSMTNTLTTDTKSTIEQINKICEEGADLVRVSCPDTSSTKALKEITKHSQVPIIADIHFHYKRAIEAAENGAKCLRINPGNIGDEKKIYEVLSAAKNNNCSIRIGVNAGSLEKDILEKYKEPCPEALVESAERNIKILEDKDFFNFKISVKSSDVFLSIASYRLLSKKCNYPLHLGITEAGAFIPGSIKSSIGLGALLLEGIGDTIRISLSDDPIQEVKIGNEILKSLNLRNRGVKIISCPTCARQAFQVIDTVKLLEEKLSHIKTP

SEQ ID NO: 91492 - protein, 251 aa, Unknown
  Bacterial polypetide isolated from the Sargasso Sea
IHFHYKRGIEAANNGASCIRINPGNIGSIERIKEVIKAAKDNNCSIRVGVNAGSLEKQILEKFSEPNPEALVESAKLNIKILEDNDFTNFKISVKSSDIFMSIKAYEQLAELCDYPLHLGITEAGGKRTGSIKSSIGVGNLLLRGIGDTIRISLSDEPEEEVRVGFEILKSLGLRNRGVKIISCPSCARQQFEVIKTVKNLEKKLDDISTPITVSIIGCVVNGPGEATMTNIGITGGGNDTHMIYLDGKKN

SEQ ID NO: 91493 - protein, 284 aa, Unknown
  Bacterial polypetide isolated from the Sargasso Sea
INELESAGADIVRVSCPDKESTKALKKITKKTKVPIVADIHFHYKRAIESAISGAKCLRINPGNIGSKERVKEVVKAAKDYDCAIRIGVNAGSLDKNILEKYKEPCPEALIESAEQNIKLLEDNDFFNFKISVKSSDVFLAIKAYEGLSNSYDYPLHLGITEAGGLVTGSIKSSIGIGKLLMQGIGDTIRVSLSADPVEEVKAGYEILKALGIRSRGVQIISCPSCARQAFPVIDTVKILEDKLSHIKKPLTLSIIGCVVNGPGEAAQTDIGLTGGGEGNNLFY

SEQ ID NO: 91494 - protein, 154 aa, Unknown
  Bacterial polypetide isolated from the Sargasso Sea
TEAGGLITGSIKSSIGIGKLLMQGIGDTIRVSLSADPVEEVKAGFEILSSLGIRSRGVQIISCPSCARQAFPVIDTVKILEKKLSHIKKPMTLSIIGCVVNGPGEASQTDIGLTGGGDGNNLLYISGIPHNKVVSQDIINKVVNLVESKAKENS

SEQ ID NO: 91495 - protein, 199 aa, Unknown
  Bacterial polypetide isolated from the Sargasso Sea
MEIRPHRVIKRNKTRKIKIGNISIGGDSPISVQSMTNTLTTDYVGTIKQINLLEEAGADIVRVSCPDEDSTASLKKIVKETNVPIVADIHFHYKRAIESAKSGAKCLRINPGNIGSKDRVKDVIKAAKDYDCAIRIGVNAGSLERKILEKYKEPCPDALIESAMHHIKILEDNDFFKFKVSVKSSDVFLAVKAYEGLSK

SEQ ID NO: 91496 - protein, 212 aa, Unknown
  Bacterial polypetide isolated from the Sargasso Sea
EPCPEALVESAMFNVKLFEDNDFFNFKLSVKSSDVFLATKSYEILSQSCDYPLHLGITEAGGLKSGSIKSSIGIGYLLMKGIGDTIRVSLSADPIEEIKAGFDILKSLNLRSRGINIISCPSCARQAFPVIETVQKLEKKLAHIKKPITLSIIGCVVNGPGEASQTEIGLTGGGNDNNLLYISGIPHKKIVNDEIINQVVKLVEEKVNEKNR

SEQ ID NO: 91497 - protein, 127 aa, Unknown
  Bacterial polypetide isolated from the Sargasso Sea
DTKNESGFINETIFGVLQASRMRISKTEYISCPSCGRTLFDLQETTGKIRERTSHLKGIKIGVMGCIVNGPGEMADADYGYVGTGEGKISLYKGQNLVKRGIPSEKAVDELVNLISENGDWIDPPHV

SEQ ID NO: 91498 - protein, 297 aa, Unknown
  Bacterial polypetide isolated from the Sargasso Sea
KGLRQRGYTTPIVADIHFTPNAAKIAAKIVEKVRINPGNYADRKKFQTYEYTDQSYIEELERIRDRFVPLVQICKENGTSMRIGTNHGSLSDRIMSRYGDTPLGMVESAMEFIRIAEDEGYQDIILSMKSSNTQVMVQAYRLLVKTMNDEGMNYPLHLGVTEAGEAEDGRIKSAVGIGTLLEDGLGDTIRVSLTEEPEREIPVAKILSDRYLKMDKNQKVIPKIDALPYDPFFYKRRKTNSIFNIGDQQVPRVVGNLSSKDFISYDDLAPFGYIYAPKQDKWHVSDQAVDYLYLGKK

SEQ ID NO: 91499 - protein, 156 aa, Unknown
  Bacterial polypetide isolated from the Sargasso Sea
MSIRPFRDIKRRKTKTINVGNVKVGGENPISVQSMTNTLTSDIKSTIKQIQEIQSEGADIVRVSCPDESSSKALKEIIKHVDIPIVADIHFHYKRAIEAAENGASCLRINPGNIGDKKKIIEVIQSAKDNNCSIRVGVNAGSLEKDILEKFKEPCP

SEQ ID NO: 91500 - protein, 228 aa, Unknown
  Bacterial polypetide isolated from the Sargasso Sea
MSIRPFRDIKRRKTKVINVGKVKVGGDNPISVQSMTNTLTTDIKATINQINEIYSEGADIVRVSCPDESSSKALKEIIKHVDVPIVADIHFHYKRAIEAAKSGASCLRINPGNIGNINKIKEVVKAARDNNCSIRVGVNAGSLEKDILEKYREPCPEALVESALRNIKILEDEDFNNLKISVKSSDVFLSIEAYRQLSKATDYPLHLGITEAGGFIPGSIKSSIGLGT

SEQ ID NO: 91501 - protein, 200 aa, Unknown
  Bacterial polypetide isolated from the Sargasso Sea
MERSYQKIDRRKTRTINVGGLKIGGKNPILVQTMTNTPTVDIKSTLAQIKRVTDIGADIVRVSVPDKSSTEALKEICKKSQVPIIADIHFHYLRAVESAKNGASCLRINPGNIGSKEKIKEVIKAAKDNECSIRIGVNGGSLEKKILEKYSEPNPDALIESAINNIKILEDHDFYNFKISVKASDIFLATKSYEGLSELC

SEQ ID NO: 91502 - protein, 283 aa, Unknown
  Bacterial polypetide isolated from the Sargasso Sea
KDIDVPIVADIHFPFKRAIEAAVNGASCLRINPGNIGSINKIREVIKAARDNNCSIRVGVNAGSLEKDILDKYKEPCPEALVESALRNIKILEDEDFSNLKISVKSSDVFLSIEAYRQLSKATDYPLHLGITEAGSFIPGSIKSSIGIGSLLLEGIGDTIRISLSDNPVEEVKIGNEILKSLNLRERGVKIISCPSCARQGFQVIETVKILEEKLSHIKTPITLSVIGCVVNGPGEAAMTDVGITGGNKGSNMLYLSGVQSEKVMTKDMIDKVVTEVEKKPLS

SEQ ID NO: 91503 - protein, 253 aa, Unknown
  Bacterial polypetide isolated from the Sargasso Sea
TNTLTKDISSTINQIERIVNCGADLVRLSIPDKDSSEALRYICKETKIPIIADIHFHYKRALEAADNGAACLRINPGNIGSIEKIKEVIRAAKNNNCSIRIGVNGGSLEKKILEKFSEPNPQALIESAILNMKILEDNDFTNFKISVKSSDVFMTIKAYEGLADICDYPLHIGITEAGGLRAGSIKSSIGLGNLLMKGIGDTIRVSLSDEPEEEIKVGFEILKSLSLRNRGIKIIACPSCARQQFPVIDTVKK

SEQ ID NO: 91504 - protein, 125 aa, Unknown
  Bacterial polypetide isolated from the Sargasso Sea
MSIRPYRDIKRKKTKVINVGKVKIGGDNPISVQSMTNTLTTDIKKTIIQINEIQSEGADLVRVSCPDEESSKSLKEITKHVDIPIIADIHFHYKRAIEAAENGASCLRINPGNIGDEKKIHDVLQ

SEQ ID NO: 91505 - protein, 256 aa, Unknown
  Bacterial polypetide isolated from the Sargasso Sea
GILEIKKKLVEVIKSAKDNNCSIRVGVNAGSLEKDILEKFKEPCPEALVESAIRNIEILEDMDFSNLKVSVKSSDVFLSVEAYRQLSKKIDYPLHLGITEAGSFISGSIKSSIGLGILLKEGIGDTIRVSLSDDPVKEVAIGNEILKSLNLRNRGVKIISCPSCARQGFQVIDTVKILEEKLSHIKTPITLSIIGCVVNGPGEAAMTDIGITGGQKGSNMLYLSGVQSEKVMTDEMITRVIHEVEKKASELENNSK

SEQ ID NO: 91506 - protein, 281 aa, Unknown
  Bacterial polypetide isolated from the Sargasso Sea
MSIRPFRDIKRKKTKVINVGKVKVGGDNPISVQSMTNTLTTDVKATIKQINEIQSEGADLVRVSCPDESSSKALKEIIKHVDIPVIADIHFHYKRAIEAAESGASCLRINPGNIGDKKKIHDILQAAKDNKCSIRIGVNSGSLEKDILEKYKEPCPEALVESALRNIKILEDQNFFNFKISVKSSDVFLSIEAYRQLSRVTDYPLHLGITEAGSFISGSIKSSIGLGSLLLDGIGDTIRISLSDDPVKEVTIGNEILKSLNLRNRGVKIISCPSCARQAFQ

SEQ ID NO: 91507 - protein, 130 aa, Unknown
  Bacterial polypetide isolated from the Sargasso Sea
MNIRPFRDIKRKKTKKIKVGKIEVGGDAPISVQSMTNTLTTDVDATIKQINELTEAGADIVRVSCPDKDSSLSLKKIIKQVDVPIVADIHYHYARAIEAAESGAHCLRINPGNIGSKKRVQEIIKAAKDN

SEQ ID NO: 91508 - protein, 146 aa, Unknown
  Bacterial polypetide isolated from the Sargasso Sea
MSIRPFRDIKRRKTKVINVGKVKIGGDNPISVQSMTNTLTTDVKATINQINDIAEEGADIVRVSCPDEGSTLALKEIIKHVSIPVVADIHFHYKRAIEAAENGASCLRINPGNIGDESKIYEVLKAAKNNDCSIRSGVNAGSLEKD

SEQ ID NO: 91509 - protein, 301 aa, Unknown
  Bacterial polypetide isolated from the Sargasso Sea
GADIVRVSVPGFDEAKAFKEIKKLSKIPLVADIHFDYKIALEVADTADCLRINPGNIGKEDRVKEVISAAIDNNVPIRVGVNAGSLEKDLQKKYGEPNADALVESALRHVEILDKFNFDNYKMSLKASNIEMTVDAYRKISNLIDQPLHLGITEAGSYRAGTVKSSIGVGMLLSEGIGDTIRISLASDPVDEIKIGWDILKSLNIRSRGVKIVACPSCSRQNFNVIKVVNELEQRLEDVSEDIEVAIIGCYVNGPGESKAANIGLTGASPSNLLYVDGSPNKKISNENLVDELEEQVRNKI

SEQ ID NO: 91510 - protein, 230 aa, Unknown
  Bacterial polypetide isolated from the Sargasso Sea
MSVRPFRDINRRKTKVINVGDVKIGGDNPISVQSMTNTLTTDVKATINQINDIAEEGADIVRVSCPDVESTKALKEIVKHVSIPVVADIHFHYKRAIEAAENGAKCLRINPGNIGDESKIHDVLSAAKNNGCSVRIGVNAGSLEKDILDRFKEPCPEALVESALRNMKILEDKNFFNFKISVKSSDVFLSIGAYRQLSKVCDYPLHLGITEAGSFVSGSIKSSIGLGSLL

SEQ ID NO: 91511 - protein, 286 aa, Unknown
  Bacterial polypetide isolated from the Sargasso Sea
NVSIGGNNQIAVQTMTNTLTSNAKDTLEQIERSAKLGVDIVRVSVPDKESSNSLKEIAKHSSVPIIADIHFHYQRGIEAANNGASCIRINPGNIGSIDRIKEVIKAAKDNNCSIRVGVNAGSLEKQILEKFSEPTPEALVESAKLNIKILEDNDFTNFKISVKSSDIFMSIKAYEQLAELCDYPLHLGITEAGGKRTGSIKSSIGVGNLLLKGIGDTIRISLSDEPEEEVRVGFEILKSLGLRNRGVKIISCPSCARQQFEVIKTVKNLERKLDDISTPITVSIIG

SEQ ID NO: 91512 - protein, 160 aa, Unknown
  Bacterial polypetide isolated from the Sargasso Sea
MEIRPHRIIHRRKTRKIKVGNISIGGNSPISIQSMTNTLTTDIKKTINQIHSLEDAGVDIVRVSCPDENSTKSLREIVKEVKSPIVADIHFHYKRAIEAAEMGASCLRINPGNIGSKNRVLEVVKAAKDNNCSIRIGVNAGSLDKELLEKYKEPCPEALV

SEQ ID NO: 91513 - protein, 262 aa, Unknown
  Bacterial polypetide isolated from the Sargasso Sea
NSKVINVGEVKVGGDNPISVQSMTNTLTTDTKSTIEQINKICEEGADLVRVSCPDTSSTKALKEITKHSQVPIIADIHFHYKRAIEAAENGAKCLRINPGNIGDEKKIHEVLSAAKNNNCSIRIGVNAGSLEKDILEKYKEPCPEALVESAERNIKILEDKDFFNFKISVKSSDVFLSIASYRLLSKKCNYPLHLGITEAGAFIPGSIKSSIGLGALLLEGIGDTIRVSLSDDPIQEVKIGNEILKSLNLRDRGVKIIACPT

SEQ ID NO: 91514 - protein, 262 aa, Unknown
  Bacterial polypetide isolated from the Sargasso Sea
SCIRINPGNIGNIERIKEVIKAAKDNNCSIRVGVNAGSLEKQILEKFSEPNPEALVESAKLNIKILEDNDFTNFKISVKSSDIFMSIKAYEQLAELCDYPLHLGITEAGGKRTGSIKSSIGVGNLLLKGIGDTIRISLSDEPEEEVRVGFEILKSLGLRNRGVKIISCPSCARQQFEVIKTVKNLEKKLDDIATPITVSIIGCVVNGPGEATMTNIGITGGGNDTHMIYLDGKKNNVVKNVDLENYLEDLIRKKTKEIELSN

SEQ ID NO: 91515 - protein, 177 aa, Unknown
  Bacterial polypetide isolated from the Sargasso Sea
VPQGTKKDELALSLGMRAGALLGDGLGDGLLVEPDDHSDFDLNYLRETSFALLQGSRMRNTKTEFVSCPSCGRTLFDLQEVTAQISEKTGHLPGVAIAIMGCIVNGPGEMADADFGYVGGAPGKVDLYVGKEVVQKAIPNEEACDALVELIKEHGMWVDKPDQAEEDAPVEAELAAA

SEQ ID NO: 91516 - protein, 234 aa, Unknown
  Bacterial polypetide isolated from the Sargasso Sea
SIRVGVNAGSLEKQILEKFSEPNPEALVESAKLNIKILEDNDFTNFKISVKSSDIFMSIKAYEQLAKLCDYPLHLGITEAGGKRTGSIKSSIGVGNLLLRGIGDTIRISLSDEPEEEVRVGFEILKSLGLRNRGVKIISCPSCARQQFEVIKTVKNLEKKLDDISTPITVSIIGCVVNGPGEATMTNIGITGGGNDTHMIYLDGKKNNVVKNVDLENYLEDLIRKKTKEIELTN

SEQ ID NO: 91517 - protein, 290 aa, Unknown
  Bacterial polypetide isolated from the Sargasso Sea
GYNPISVQSMTNTLTTDVLATIKQIQEIHEEGADIVRVSCPDEDSSKALKEITKNVQIPIIADIHFHYKRAIEAAENGAKCLRINPGNIGEKNKIYDVLKAAKDNDCSVRIGVNAGSLEKDILEKYKEPCPEALVESALRNIKILEDKDFFNFKVSVKSSDVFLSIAAYRQLSKVTEYPLHLGITEAGSFVTGSVKSSIGLGSLLLDGIGDTIRVSLSDDPVQEVKIGNEILKSLGLRNRGVKIISCPSCARQAFQVIDTVKILEEKLSHIKTPITLSIIGCVVNGPGEA

SEQ ID NO: 91518 - protein, 193 aa, Unknown
  Bacterial polypetide isolated from the Sargasso Sea
MANHSPITRRPSRQIMVGNVPVGGDAPIAVQSMTNTETCDVSATVNQVNDIAGAGADMVRVSVPSMEAAEAFREIRRQVSVPLIADIHFDHKIALKVAEYGVDCLRINPGNIGRDNKVREVIDCARDKGIPIRIGVNAGSLGKELLRKYAEPNAEALVESALRHVSILDKFDYQDFKVSVKASDVFMAVDAYR

SEQ ID NO: 91519 - protein, 236 aa, Unknown
  Bacterial polypetide isolated from the Sargasso Sea
APLVTLLRDQNKALRIGVNHGSLAERMLFTYGDTPKGMVESAMEFVRICDELDFHNIVISMKASRAPVMLAAYRLMADTMDKEGFNYPLHLGVTEAGDGDYGRVKSTAGIATLLADGLGDTIRVSLTEAPEREIPVCYSILQSLGLRKTMVEYVACPSCGRTLFNLEEVLHKVREATSHLTGLDIAVMGCIVNGPGEMADADYGYVGKTPGVISLYRGRDEIRKVPEEDGVTALIQ

SEQ ID NO: 91520 - protein, 282 aa, Unknown
  Bacterial polypetide isolated from the Sargasso Sea
VSVPTMDAAEAFRLIKQQVNVPLVADIHFDYRIALKVAEYGVDCLRINPGNIGNEERIRMVVDCARDKNIPIRIGVNAGSLEKDLQEKYGEPTPQALLESAMRHVDHLDRLNFDEFKVSVKASDVFLAVESYRLLAKQIDQPLHLGITEAGGARSGAVKSAIGLGLLLSEGIGDTLRVSLAADPVEEIKVGFDILKSLRIRARGINFIACPTCSRQEFDVIGTVNALEQRLEDIITPMDISIIGCVVNGPGEALVSTLGVTGGNKKRGLYEDGVRRDRLTTT

SEQ ID NO: 91521 - protein, 135 aa, Unknown
  Bacterial polypetide isolated from the Sargasso Sea
MNIRPFREIIRRKTKEINVGHVKVGGDNPISVQSMTNTITKNVKETVNQIQRIEQEGADIVRVSCPDQDSTKALKDIIKHTSLPIVADIHFHYKRAIEAAESGAACLRINPGNIGDRNKIKEIISAAKNNNCAIR

SEQ ID NO: 91522 - protein, 254 aa, Unknown
  Bacterial polypetide isolated from the Sargasso Sea
MSIRPYRDIKRKKTKVIKVGNVKIGGNNPISVQSMTNTLTTNTAATIKQINEIQNEGADIVRVSCPDESSSIALKEIIKNVDIPIIADIHFHYKRAIEAAKSGASCLRINPGNIGDKKKIYEVLQSAKDNNCSIRIGVNAGSLEKDILEKYKEPCPEALVESALRNIKILEDQDFLNFKISVKSSDVFLSIEAYRQLSKVTNYPLHLGITEAGSFTSGSVKSSIGIGSLLLDGIGDTIRVSLSDDPVKEVKNWK

SEQ ID NO: 91523 - protein, 281 aa, Unknown
  Bacterial polypetide isolated from the Sargasso Sea
IIADIHFHHMRAIEAAENGAKCLRINPGNIGDKKKIYDVLSAAKNNNCSIRIGVNAGSLEKDILEKFKEPCPEALVESALRNIKILEDQNFSNFKISVKSSDVFLSIAAYKQLSKVTDYPLHLGITEAGSFVSGSIKSSIGLGTLLLDGIGDTIRVSLSDDPVHEVKIGNEILKSLNLRNRGVKIIACPSCARQAFQVIDTVKILEEKLSHIKTPITLSIIGCVVNGPGEAAMTDIGITGGGKGSNMLYLSGIQSEKVLTKNIISKVVSEVEKKASELEKK

SEQ ID NO: 91524 - protein, 163 aa, Unknown
  Bacterial polypetide isolated from the Sargasso Sea
GLRSGTIKSAIGLGNLLWAGIGDTIRVSLSADPVEEVKAGYEMLKSLGLRRRGVTVISCPSCARQQFDVIKTVQIIEERLEHIDLPITVSIIGCVVNGPGEARETDIGLTGGGKGTHQIYLSGMADHRLTNGDIVEHVVDLVETRVAEIKAAVAAADISEKAS

SEQ ID NO: 91525 - protein, 293 aa, Unknown
  Bacterial polypetide isolated from the Sargasso Sea
MSIRPFRDIKRKKTKEVKVGNVFIGNDNPITVQSMTNTLTTDVKQTLNQINDIANEGADLVRVSIPDESSSKALKEIVKHSSIPIIADIHYHYKRALESADNGAKCLRINPGNIGDIKKIREVISAAKNNDCAIRIGVNAGSLEKDILEKYKEPCPEALVESALQNIKIIEDQNFFNFKVSVKSSDVFLSIAAYRQLSKVTDYPLHLGITESGSFIPGSIKSSIGLGILLLEGIGDTIRVSLSDDPVKEVKIGNEILKSLNLRDKGVKIISCPSCARQGFEVINTVKILEEKL

SEQ ID NO: 91526 - protein, 91 aa, Unknown
  Bacterial polypetide isolated from the Sargasso Sea
LRAQMPVWRVRYPGVETLRVAVMGCIVNGPGESKHADIGISLPGTGEAPAAPVFIDGEKAMTLRGDDIANEFHRIVEQYIEKRFGAGVAAV

SEQ ID NO: 91527 - protein, 328 aa, Unknown
  Bacterial polypetide isolated from the Sargasso Sea
RLGADIVRVSCPDEDSTKALKDIVNEVKVPIVADIHFHYKRAIEAAKMGASCLRINPGNIGSKDRILEVVKAAKDHNCSIRIGVNAGSLDKALLEKYKEPCPDALVESAMYNVKLLEDNDFFNFKISVKSSDVFLTVKAYRKLSKECNYPLHLGITEAGGLITGSIRSSIGIGQLLMDGIGDTIRVSLSSDPVDEIKSGYEILKSLGIRSRGVNIISCPSCARQAFPVIETVKELEKKLSHVKKPITLSIIGCVVNGPGEAAQTEIGLTGGGQDNNLLYLSGIPHTKVASTEIIDKVVQLVEEKVKEKTKLIMIPKDKVAELLQSMMI

SEQ ID NO: 91528 - protein, 179 aa, Unknown
  Bacterial polypetide isolated from the Sargasso Sea
MSIRPFRDIIRKNTKVIKVGKVKVGGDNPISVQSMTNTLTKDVKKTVEQINNMSEAGADIVRVSCPDEESTKSLKEIIKNVDVPIVADIHFHYKRAIEAAENGAACLRINPGNIGDENKINEIIKAAKNNECSIRVGVNAGSLEKDILEKFKEPCPEALVESALRNIKILEDKDFYNFK

SEQ ID NO: 91529 - protein, 318 aa, Unknown
  Bacterial polypetide isolated from the Sargasso Sea
SDVLATVNQINELQAAGADIVRVSVPGFDEAKAFKEIKSIVTIPLVADIHFDYKIAIEVADSADCLRINPGNIGKESKIKEVITAALDNDVPIRVGVNAGSLEKDLQKKYGEPNADALVESALRHVDILDRFNFDNYKMSLKASNIEMTVDAYRKISNLINQPLHLGITEAGSFRAGTVKSSIGVGMLLSEGIGDTIRISLASNPVDEIKVGWDILKSLNIRSRGVKIIACPSCSRQNFNVIEVVNELEERLEDISDDIEVAVIGCYVNGPGESKAAEIGLTGASPKNLLYVDGMPDKKISSENLVKEIEEKVREKLY

SEQ ID NO: 91530 - protein, 145 aa, Unknown
  Bacterial polypetide isolated from the Sargasso Sea
MSLRPYRDILKRKTKEISVGNVKIGGQNPISVQSMTNTLTTDISATMKQIEDLIDEGADLVRVSCPDEGSTKALKEICKHSKVPIIADIHFHYKRALEAADNGAKCLRVNPGNIGNKDKLKEIIKSAKYNDCSIRIGVNAGSLEQ

SEQ ID NO: 91531 - protein, 207 aa, Unknown
  Bacterial polypetide isolated from the Sargasso Sea
MESKCLRINPGNIGEESKIHDVLSAAKNNGCSVRIGVNAGSLEKDILDKFKEPCPEALVESALRNIKILEDKDFFNFKISVKSSDVFLSIGAYRQLSKACDYPLHLGITEAGSFVSGSIKSSIGLGSLLMDGIGDTIRISLSDNPIKEITIGNEILKSLNLRNRGVKIISCPSCARQAFQVIDTVKILEKKLSHIKTPITLSIIGCV

SEQ ID NO: 91532 - protein, 95 aa, Unknown
  Bacterial polypetide isolated from the Sargasso Sea
MAEDITSYIREMMPSWKKSFPGVEQMDVAVMGCVVNGPGESKHANIGISLPGTFEEPKAPVYIDGEHKLTLKGEGLVEDFKEILHDYVVRTYGQA

SEQ ID NO: 91533 - protein, 283 aa, Unknown
  Bacterial polypetide isolated from the Sargasso Sea
KKTKEIRVGKVKVGGNNPISVQSMTNTLTTDIKGTIKQINEICAEGADIVRVSCPDEPSSKALKEIAKHVDVPIVADIHFHYKRAIEAAENGASCLRINPGNIGSKNKIKEVIKAARDNNCSIRVGVNAGSLEKDILEKYKEPCPEALVESALRNIKILEDEYFDNLKVSVKSSDVFLSIEAYRQLSKLTDYPLHLGITEAGGFLPGSIKSSIGLGALLLNGIGDTIRVSLSDNPVEEVKIGNEILKSLSLRERGVKIISCPSCARQGFQVIETVKVLEKKLS

SEQ ID NO: 91534 - protein, 269 aa, Unknown
  Bacterial polypetide isolated from the Sargasso Sea
GNNQIAVQTMTNTLTSNSKDTIAQIERSAKLGVDLVRVSVPDRESSYSLKEIVKHSPVPIIADIHFHYKRGIEAANNGASCIRINPGNIGSIERIKEVIRAAKDNNCSIRVGVNAGSLEKQILEKFSEPNPEALVESAKLNIKILEDNDFTNFKISVKSSDIFMSIKAYEQLAELCDYPLHLGITEAGGKRSGSIKSSIGVGNLLLRGIGDTIRISLSDEPEEEVRVGFEILKSLGLRNRGVKIISCPSCARQQFEVIKTVKNLEKKLD

SEQ ID NO: 91535 - protein, 251 aa, Unknown
  Bacterial polypetide isolated from the Sargasso Sea
MSIRPFRDIKRRKTKVINVGKIKIGGDNPISVQSMTNTLTSDVKGTIKQINDIAEEGADIVRVSCPDEGSTLALKEIIKHVSIPVVADIHFHYKRAIEAAENGASCLRINPGNIGDETKIHEVLKAAKNNDCSIRIGVNAGSLEKDILEEFKEPCPEALVQSAKRNIKILEDKDFFNFKISVKSSDVFLSIAAYRQLSKVTDYPLHLGITEAGGFVSGSIKSSIGLGSLLMDGIGDTIRISLSDNPTQEVK

SEQ ID NO: 91536 - protein, 223 aa, Unknown
  Bacterial polypetide isolated from the Sargasso Sea
MNLRPFRHIERRKSKVINVGEVKIGGDNPISVQSMTNTLTTDTKSTIEQINKICEEGADLVRVSCPDTSSTKALKEITKHSQVPIIADIHFHYKRAIEAAENGAKCLRINPGNIGDEKKIHEVLSAAKNNNCSIRIGVNAGSLEKDILEKYKEPCPEALVESAERNIKILEDKDFFNFKISVKSSDVFLSIASYRLLSKKCNYPLHLGITEAGAFIPGSIKSS

SEQ ID NO: 91537 - protein, 167 aa, Unknown
  Bacterial polypetide isolated from the Sargasso Sea
MNTSKVKRKKTKKIWVGDVPVGGDAPISVQSMTNTNTEDIESTVKQINGISEAGGDIVRVSIPTFEAANSLIEIKKQTKIPIVADIHFDYKIALESLRNGVDCVRINPGNIGSEKKIREVILAAEDKGVPIRIGINAGSLEKELQTKYGEPNADALVESAMKHVEIL

SEQ ID NO: 91538 - protein, 293 aa, Unknown
  Bacterial polypetide isolated from the Sargasso Sea
IKKLEDAGADIVRVSCPDEESTKALKKITKKIKLPIVADIHFHYKRAIESAVSGAKCLRINPGNIGSKERVKEVIKAAKDYDCAIRIGVNAGSLEKNILEKYKEPCPEALIESANHNIKLLEDNDFFNFKISVKSSDVFLAVKAYEGLSNSYDYPLHLGITEAGGLFTGSIKSSIGIGKLLMQGIGDTVRVSLSADPVEEVKAGFEILSALGIRSRGVQIISCPSCARQAFPVIDTVKILEKKLSHIKKPMTLSIIGCVVNGPGEAAQTDIGLTGGGDGSNLLYLSGVPHNKV

SEQ ID NO: 91539 - protein, 309 aa, Unknown
  Bacterial polypetide isolated from the Sargasso Sea
EKKAKIVSVGKVKIGGDFPIAVQSMTNTLTTDAKATIIQINKLREVGADIVRVSCPDKESSLALKEIIKNTETPIVADVHFHYKRAIEAAESGANCLRINPGNIGSKERVYEILKSAKDNNCSIRIGVNAGSLEKKFLEKYKEPCPEAMVESALEKIKIFEDKDFFNFKISVKSSDVFLSVKAYRALSKQCDYPLHLGITEAGSLIPGSVKSSIGIGMLLMEGIGDTIRVSLSDDPVQEIKVGFEILKSLNLRHRGVNIISCPSCARQAFPVIETVKNLEKRLAHINTPLTLSIIGCVVNGPGEAAQTQ

SEQ ID NO: 91540 - protein, 262 aa, Unknown
  Bacterial polypetide isolated from the Sargasso Sea
NKSWEIFGDKKKIKEIVSAAKNNDCAIRIGVNAGSLEQDILEKYKEPCPEALVESALRNIKIIEDEDFFNFKVSVKSSDVFLSIGAYKQLSKLTEYPLHLGITEAGSFLPGSIKSSIGLGNLLLDGIGDTIRVSLSDDPVNEVKVGNEILKSLNLRNRGVKIISCPSCARQAFQVIDTVKILEEKLSHIKVPITLSIIGCVVNGPGEAAYTDIGITGGGKGSNMLYLKGVQTKKISNDEIISKVIELVEKEAEKIKINDTNK

SEQ ID NO: 91541 - protein, 212 aa, Unknown
  Bacterial polypetide isolated from the Sargasso Sea
EPCPEAMVESALNHVKILEDNDFFEFKISCKASDVFLAVAAYYGISDACDYPIHLGITEAGGMIPGTIKSSIGMGSLLWAGIGDTIRVSLSADPVEEIKVGFNMLKSLNLRHRGVNIISCPSCARQNFNVISTVGELEKRLEHITTPMTLSVIGCVVNGPGEAKETDIGLTGGKNHQIYLDGEKHHILREGNMIDHLVELCEKKQKELLSKS

SEQ ID NO: 91542 - protein, 200 aa, Unknown
  Bacterial polypetide isolated from the Sargasso Sea
YNVKLLEDNEFFNFKISVKSSDVFLTVKSYKKLSEICEYPLHLGITEAGGLLSGSIRSSIGIGQLLMDGIGDTIRVSLSSDPVDEIKSGFEILKSLGIRSRGVNIISCPSCARQAFPVIETVKELEKKLSHVKKPITLSIIGCVVNGPGEAAQTEIGLTGGGQDSNLLYLSGIPHTKVASSKIIDKVVQLVEEKVKEKNN

SEQ ID NO: 91543 - protein, 260 aa, Unknown
  Bacterial polypetide isolated from the Sargasso Sea
MSIRPFRDISRKKTKEINVGNLKIGGDNPISVQSMTNTLTKDSKSTIKQIKDLENAGADLVRVSCPDKESTEALKQIVKQVKVPIVADIHFHYKRAIEAAENGAHCLRINPGNIGDLQKVKEVIKAAKNNGCAIRVGVNAGSLEKDILEKYKEPCPEALVESALRNIKILENEDFFNFKVSVKSSDVFLSIGAYKQLSAKIDYPLHIGITEAGSFLPGTIKSSIGFGSLLLDGIGDTIRVSLSDDPVKEINVGNEILKSL

SEQ ID NO: 91544 - protein, 203 aa, Unknown
  Bacterial polypetide isolated from the Sargasso Sea
MNNPYGIDIKRNKTRKIYVGDIPVGGDAPISVQSMTNTDTRDIKSTIKQVLDLEDAGADIVRISCPDEESSKALKEIVDQTNVPIVADIHFHYKRAIEAAESGASCLRINPGNIGSIDRVKEVVKAAKDNDCSIRIGVNGGSLEKNILEKYKGPSPSAMVESALFHENILRDLDFNNFKISVKTSNVLLTVESYKELSKVTDA

SEQ ID NO: 91545 - protein, 222 aa, Unknown
  Bacterial polypetide isolated from the Sargasso Sea
DILEKYKEPCPEALVESASRNIKILEDLDFQNFKISVKSSDVFLSVKSYKLLSQQTKYPLHLGITEAGSYLPGSIKSSIGLGNLLMDGIGDTIRVSLSDDPVEEVKIGNEILKSIGLRNRGVKIISCPSCARQGFEVIETVKILEDKLSHIKEPITLSIIGCVVNGPGEASQTDIGITGGGGDSNMLYLNGTQTKKLNNKEIISKVVEQVEKKASEIQKKAK

SEQ ID NO: 91546 - protein, 150 aa, Unknown
  Bacterial polypetide isolated from the Sargasso Sea
MSIRPFRDIKRKKTKKIKVGNVEIGGDAPISVQSMTNTLTTDVEATIKQINDLDNAGADIVRVSCPDQESSLSLKKILKHVNVPIVADIHFHYKRAIECASSGASCLRINPGNIGSKEKVKEILKAAKDNNCSIRIGVNAGSLEKSLLEK

SEQ ID NO: 91547 - protein, 234 aa, Unknown
  Bacterial polypetide isolated from the Sargasso Sea
MQIYCPSLTRYQRFKTRCVMVGEVGVGGDNPIRVQSMTTTDTMDTEMTIAQSIRMIEAGCEIVRITAPSIKEAKNLRPILDGIREKGYKTPLVADIHFTPNAAEIAATIVEKVRINPGNYADRKKFETHEYSDKSYAEELERIRERFIPLVKICKENGTAMRIGTNHGSLSDRILSRYGDTPLGMVESGMEFIRIAESEGYHDMILSMKASNTQVVVQAYRLLINKMIEEGMNY

SEQ ID NO: 91548 - protein, 237 aa, Unknown
  Bacterial polypetide isolated from the Sargasso Sea
NNCSIRIGVNAGSLEKDILEKYKEPCPEALVESALRNIKILENQDFFNFKISVKSSDVFLSIAAYRQLSKVCDYPLHLGITEAGSFISGSVKSSIGLGSLLMDGIGDTIRISLSDDPSKEAKIGNEILKSLSLRNRGVKIISCPSCARQAFPVINIVKILEDKLSHIKTPMTLSIIGCVVNGPGEAAMTDIGITGGGKGNNMLYLSGIQSEKVLTEDIISRVITEVEKKAKEIENSK

SEQ ID NO: 91549 - protein, 122 aa, Unknown
  Bacterial polypetide isolated from the Sargasso Sea
MKQDSPIIRRKSRQIMVGNVPVGGDAPIAVQSMTNTETCDVEATVGQIKALQEAGADIVRVSVPSMDAAEAFGKIREQVSLPLVADIHFDYKIALRVAELGVDCLRINPGYIGRDDRVSAVI

SEQ ID NO: 91550 - protein, 146 aa, Unknown
  Bacterial polypetide isolated from the Sargasso Sea
MEIRPHRIIKRKKTKKIKVGSISVGGDSPITVQSMTNTLTTDAKATIKQIHQLEESGVDIVRVSCPDTDSTKKLKEIVKEVSAPIVADIHFHHKRAIEAAKNGASCLRINPGNIGSSDRVLEIIKAAKDHNCSIRIGVNAGSLDQT

SEQ ID NO: 91551 - protein, 145 aa, Unknown
  Bacterial polypetide isolated from the Sargasso Sea
MFSESPIKRRKSTRINVGNVPIGDGAPIAVQSMTNTDTMDVDATVAQIQAIQDAGADIVRVSVPTMDAAEAFKSIKEQVSIPLVADIHFDYRIALKVAKYGVDCLRINPGNIGSEERIRAVVDSAREHNIPIRKGVNGGSLERDL

SEQ ID NO: 91552 - protein, 212 aa, Unknown
  Bacterial polypetide isolated from the Sargasso Sea
EYPLHLGVTEAGPLPGGLIKSVAGISTLLSEGIGDTIRLSLTTDPVDEAKYGRQLLEYLNLRERKSLDLIACPSCGRAEVDVIKVANEAQEALEEKGFPIQVAVMGCVVNGPGEAKSADLGIAAGRNKGHLFIKGQVVKVVDEKDMVSSLVKEGELITNEGIEARLAAADKDAAKIAQEDVEALIDIQGDINNFKLKSKSVVEITSNEDIDT

SEQ ID NO: 91553 - protein, 224 aa, Unknown
  Bacterial polypetide isolated from the Sargasso Sea
MEIRPHRKITRKKTRKIMVGKVPVGGDSPISVQSMTNTLTTDVKATINQINDLEQAGADIVRVSCPDENSTKSLEEIIKQVNLPVVADIHFHYKRAIEAAKMGASCLRINPGNIGSKDRVVEVIKAAKDYNCSIRIGVNAGSLDKTLLEKYKEPCPEALVESAGYNIKLLEDNDFFNFKISVKSSDIFLTVKAYKKLSEICNYPLHLGVTEAGSLLTGSIKSSI

SEQ ID NO: 91554 - protein, 191 aa, Unknown
  Bacterial polypetide isolated from the Sargasso Sea
FNFKVSVKSSDVFLSIQAYKQLSKLTEYPLHLGITEAGSYLPGSIKSSIGLGTLLLNGIGDTIRVSLSDNPVQEVKIGNEILKSLNLRNRGVKIISCPSCARQAFNVIETVKILEEKLSHIKTPITLSIIGCVVNGPGEATQTQIGITGGGKGNNMLYLNGIQSEKISNDAIIAKVVDLVENKVKELQNKK

SEQ ID NO: 91555 - protein, 178 aa, Unknown
  Bacterial polypetide isolated from the Sargasso Sea
FLSTKAYQQLSKVCDYPLHLGITEAGSLTSGSIKSSIGMGILLMEGIGDTIRVSLSANPVEEVKIGYEILKSLNLRHRGVNIISCPSCARQGFPVINTVKILEEKLAHIKEPITLSVIGCVVNGPGEASQTQIGLTGGGKDDHMMYISGLPHHKVASEKIIEEVVSMVENKSKELKNT

SEQ ID NO: 91556 - protein, 325 aa, Unknown
  Bacterial polypetide isolated from the Sargasso Sea
GYKAPIVGDFHYNGHILLSKCPNSAKMLSKYRINPGNVGKKDKHDKNFAQMIEIAIANNKAVRIGVNGGSLDEELLTQLMDKNATLAKPQDAKSVFYEAMVQSALQSAELAEKIGLPKNKIILSTKLSDVQDMIYVYQKLAALSDYSLHLGLTEAGGSIKGISASSAALGVLLHQGIGDTIRVSLTPEPGVGRDLEVKVCKYLLQSMGVRYFMPMVTSCPGCGRTNSDKFVYLAKDVTTYIETNMPKWKLKYPGVETLNIAVMGCVVNGPGESKHADIGISLPGSSEAPGVPIYQDGKLFTVLKGSQIKEEFIQLLDSYIHTRFS

SEQ ID NO: 91557 - protein, 235 aa, Unknown
  Bacterial polypetide isolated from the Sargasso Sea
SLEENGADIVRVSCPDESSTKALKLIVKEVNVPIVADIHFHYQRAIEAAKMGASCLRINPGNIGSKDRILEVVKAAKDYDCSIRIGVNAGSLDKALLEKYKEPCPDALVESAMYNVKLLEDNDFFNFKISVKSSDVFLSVKSYLQLSEICAYPLHLGITEAGGLFTGSIKSSIGIGQLLMQGIGDTIRVSLSSDPIDEVKAGYEILKSLGIRARGVNIISCPSCARQAFPVIETV

SEQ ID NO: 91558 - protein, 123 aa, Unknown
  Bacterial polypetide isolated from the Sargasso Sea
MKTNWIKRKKTKTIYVGSVPVGGNNPISVQSMTNTDTCDVVSTINQINDLKKAGADIVRVSVPGFDEAKAFKEIKNAVNIPLVADIHFDYKIALEVANTADCLRINPGNIGKEDRIQEVINAA

SEQ ID NO: 91559 - protein, 153 aa, Unknown
  Bacterial polypetide isolated from the Sargasso Sea
MSLRPFRDIFRRKTKVIKVGKVKVGGNNPITVQSMTNTLTKNIKETLNQINRISEVGGDIVRVSCPDEDSTKALKEITKHSGIPIVADIHFHYKRAIEAAENGADCLRINPGNIGDTKKIEEVISAAKNNNCSIRVGVNAGSLEKDILEKYKE

SEQ ID NO: 91560 - protein, 266 aa, Unknown
  Bacterial polypetide isolated from the Sargasso Sea
MNIRPFREIKRRKTKEINVGHIKVGGDNPISVQSMTNTLTKDVKETVKQIEQIEEAGADIVRVSCPDKDSTKALKNIVKNTSIPIVADIHFHYKRAIEAAENGAACLRINPGNIGDKKKIKEVISAAKNNNCSIRIGVNAGSLEKDLLEKYKEPCPEALVESALRNISIVEDFDFYKFKVSVKSSDVFLSIEAYRQLSKVTDYPLHLGITEAGTFLPGSIKSSIGFGSLLMSGIGDTIRVSLSDDPVEKIRVGNEILKSLNLRNRG

SEQ ID NO: 91561 - protein, 234 aa, Unknown
  Bacterial polypetide isolated from the Sargasso Sea
MEIRPHRIIKRKKTKKIKVGKVFVGGDSPITVQSMTNTLTTDVKNTIKQINLLEESGADIVRVSCPDEDSTKALKDIVKEVKVPIVADIHFHYKRAIEAAKMGASCLRINPGNIGSKERVLEVIRAAKDNDCSLRIGVNAGSLDKSLLEKYKEPCPEALVESAKYNIQLCEDNDFFNFKISVKSSDIFLTVKAYKQLSEICDYPLHLGVTEAGGLLNGSIKSSIGIGQLLMIGI

SEQ ID NO: 91562 - protein, 181 aa, Unknown
  Bacterial polypetide isolated from the Sargasso Sea
SSDVFLAIKAYEGLSNLYDYPLHLGITEAGGLVTGSIKSSIGIGKLLMQGIGDTIRVSLSADPIEEIKAGYEILNALGIRSRGVQIISCPSCARQAFPVIDTVKILENKLSHIKKPLTLSIIGCVVNGPGEAAQTDIGLTGGGEGNNLFYLSGIPHHKVANKEIIEKVVELVESKAKEKVN

SEQ ID NO: 91563 - protein, 161 aa, Unknown
  Bacterial polypetide isolated from the Sargasso Sea
HLGITEAGSFLPGSIKSSIGLGNLLMDGIGDTIRISLSDDPVEEIKVGNEILKSLNLRNRGVKIISCPSCARQGFQVIDTVKILEEKLSHIQTPITLSIIGCVVNGPGEAAQTDIGITGGGKDSSMLYLKGVQTEKLNNNEIVSKIVNLVEKKVEEIEIKK

SEQ ID NO: 91564 - protein, 263 aa, Unknown
  Bacterial polypetide isolated from the Sargasso Sea
NEGCDIVRVSIPDEKSSTALKKIIPNISIPLIADIHFHYKRALEAAENGADCLRINPGNIGSVEKIKEVIEAAKQNNIPIRVGVNAGSLEKQILEKHKSPTAQALFESAKLNIQLLEDQNFDNFKISVKASNIFTSVEAYQLLSNYCNYPLHLGITEAGSYFSGSIKSSIGLGMLLYQGIGDTIRVSLSDHPTQEVKVGFEMLKSLNLRDYGVTIISCPSCARQQFDVIKTVKSVESRLSHIKKPITVSIIGCVVNGPGEATM

SEQ ID NO: 91565 - protein, 304 aa, Unknown
  Bacterial polypetide isolated from the Sargasso Sea
MSVRPFRDINRRKTKVINVGDVKIGGDNPISVQSMTNTLTTDVKATINQINDIAEEGADIVRVSCPDTESTKALKEIVKHVSIPVVADIHFHYKRAIEAAENGAKCLRINPGNIGEESKIHDVLSAAKNNDCSVRIGVNAGSLEKDILDKFKEPCPEALVESALRNIKILEDKDFFNFKISVKSSDVFLSIGAYRQLSKVCDYPLHLGITEAGSFVSGSIKSSIGLGSLLMDGIGDTIRISLSDNPTKEVTIGNEILKSLNLRNRGVKIISCPSCARQAFQVIDTVKILEEKLSHIKTQITLSI

SEQ ID NO: 91566 - protein, 212 aa, Unknown
  Bacterial polypetide isolated from the Sargasso Sea
MSLRPFRDIHRRKTKVINVGNIKIGGDNPISVQSMTNTLTKDAKATIKQINDIANEGADLVRVSCPDEDSTLALKEIVKHSSIPIIADIHFHYKRALESADNGAKCLRINPGNIGDKKKIKEIISAAKNNDCAIRIGVNAGSLEKDILEKYKEPCPEALVESAQRNIQIIEDEDFFNFKVSVKSSDVFLSIGAYRQLSKISEYPLHLGITEA

SEQ ID NO: 91567 - protein, 156 aa, Unknown
  Bacterial polypetide isolated from the Sargasso Sea
MNQPSPIKRRASRQIQVGNVPIGGDAPIAVQSMTNTETCDVEATVAQIHAIAAAGADLVRVSVPSMEAAEAFKEIRPRAGVPVVADIHFDHKIALKVAEYGVDCLRINPGNIGREAKVKEVIAACQDRGIPIRIGVNAGSLGKELLRKYPEPNADA

SEQ ID NO: 91568 - protein, 185 aa, Unknown
  Bacterial polypetide isolated from the Sargasso Sea
MSVRPFRDIKRRKTKVINVGDVKIGGDNPISVQSMTNTLTTDVKATINQINDISEEGADIVRVSCPDVESTKALKEIVKHVSIPVVADIHFHYKRAIEAAENGAKCLRINPGNIGEKSKIHDVLSAAKNNGCSVRIGVNAGSLEKDILDKFKEPCPEALVESALRNIKILEDKDFFNFKISVKSS

SEQ ID NO: 91569 - protein, 274 aa, Unknown
  Bacterial polypetide isolated from the Sargasso Sea
MGNNNVPRVIVDISYLNSIDRKVLNNLGYTYYENEDKWGIGDFACDYIFIGDNEVKFNIPGTLNIIQSYSRWIIDKDSSRIPLLNLADYLNGCVCHPSINFLNLTLNELSDSLIEKLIFDKTVVLIIETDNKHGLAEQRKFFIDLLKIKLEIPVIIKRSYSNMSIESFQLHSATDFGGLLIDGLGDGIFISSKNCGPLIEINHTSFGILQASRTRISKTEYISCPSCGRTLFDLQETTAMIRSKTSHLKGVKIGIMGCIVNGPGEMADADYGYV

SEQ ID NO: 91570 - protein, 152 aa, Unknown
  Bacterial polypetide isolated from the Sargasso Sea
SFVTGSVKSAIGIGSLLLDGIGDTIRVSLSDDPVKEVKIGNEILKSLGLRNRGVKIISCPSCARQAFQVIDTVKKLEEKLSHIKTPITLSIIGCVVNGPGEAALTDIGITGGGKGNNMLYLSGVQREKVLTSEIINKIVSEVEKKAAEIEKK

SEQ ID NO: 91571 - protein, 273 aa, Unknown
  Bacterial polypetide isolated from the Sargasso Sea
MGGDNPISVQSMTNTLTKDVKSTIKQIKEIENAGADLVRVSCPDKESTEALSQIVKQVKVPIVADIHFHFKRAIEAAENGAHCLRINPGNIGDLQKVKEVIKAAKNNNCAIRIGVNAGSLEKDILEKYKEPCPEALVESALRNIEILENEDFFNLKVSVKSSDVFLSIGAYRQLSNKIDYPLHIGITEAGSFLPGTIKSSIGFGSLLLDGIGDTIRVSLSDDPVKEINVGNEILKSLNLRNRGVRIISCPSCARQAFEVIDTVKILEEKLSHI

SEQ ID NO: 91572 - protein, 200 aa, Unknown
  Bacterial polypetide isolated from the Sargasso Sea
HIKILEDEDFFNFKISVKSSDVFLTTKAYRALALACDYPLHLGITEAGSFVSGSIKSSIGIGMLLSEGIGDTIRVSLSADPIEEVKIGYEILKSLHLRHKGVNIISCPSCARQGFPVIETVKILEEKLAHIKEPITLSIIGCVVNGPGEASQTQIGLTGGGQDNHMMYLSGLPHKKVASGKLIEEVVALVENKSKEFKKN

SEQ ID NO: 91573 - protein, 177 aa, Unknown
  Bacterial polypetide isolated from the Sargasso Sea
MSIRPFRDIKRKKTKVISVGKIKIGGDNPISVQSMTNTLTTDVKSTIKQINDIQNEGADLVRVSCPDESSSKALKEIVKHIDIPIIADIHFHFKRAIEAAENGASCLRINPGNIGDKKKIHDVLSAAKNNGCSVRIGVNAGSLEKDILEKYKEPCPEALVESALRNIKIFRGSRFLK

SEQ ID NO: 91574 - protein, 186 aa, Unknown
  Bacterial polypetide isolated from the Sargasso Sea
VLNLQTFLWQLNAYELLSEQCNYPLHLGITEAGGKRTGSIKSSIGMGNLLLKGIGDTIRVSLSDEPEEEIRVGFEILKSLGIRNRGVKIVSCPSCARQQFQVIDLVKKLENSLEDIEKPLTVSIIGCVVNGPGEANMTNIGITGGGNNTHMIYVDGKKNHIVKDKDLAVYLENIIRNKVDNISIEN

SEQ ID NO: 91575 - protein, 264 aa, Unknown
  Bacterial polypetide isolated from the Sargasso Sea
MTNTDTADAISTAKQIQSLATAGSELVRITVNNEESAKQVPKIKNLLEATGCKIPIIGDFHYNGHELLKKYPECAESLSKYRINPGNVGFGRKKDSQFSAMIEAAIRHKKPVRIGVNWGSLDPALIAKMMDENASLKNPKTSREVTHDALIQSALTSAQRAEDIGLNKNQIIVSCKVSEVQDLISVYGRLAQKCEYPLHLGLTEAGMGSKGIVASSVSIGVLLQQGIGDTVRVSLTPEPDGDRSEEVIVAQELLQTMGYSILLP

SEQ ID NO: 91576 - protein, 158 aa, Unknown
  Bacterial polypetide isolated from the Sargasso Sea
MEIRPHRTIKRKKTKKIKVGNVSIGGDSIISVQSMTNTLTTNHEATLKQIKQLEEAGADLVRVSCPDEDSTKALKIITKQSKLPIIADIHFHYKRAIESAMSGAKCLRINPGNIGSNERIKEVIKAAKDYDCAIRIGVNAGSLEKKILEKYKGPCPEA

SEQ ID NO: 91577 - protein, 155 aa, Unknown
  Bacterial polypetide isolated from the Sargasso Sea
AGGIRTGSIKSSIGMGNLLLNGIGDTIRVSLSDDPVEEVKVGYEILKSLGIRNRGVKIVSCPSCARQQFEVIDLVKKLEKSLEDIENPITVSIIGCVVNGPGEANMTNIGITGGGNNTHMIYVDGKKDHIVKNKDLAPYLEDIIRKKSKNNSIKI

SEQ ID NO: 91578 - protein, 156 aa, Unknown
  Bacterial polypetide isolated from the Sargasso Sea
MQIRPHRIINRRRTRKIKVGKVFIGGDSPISVQSMTNTITSDETSTINQVNQLKEVGADLVRISCPDQDSTKALKNIIKKTDIPIIADIHFHYKRAIEAAKSGADCLRINPGNIGSNERVKEVIKAAKDYNCAIRIGVNAGSLEKKILEKYKEPCP

SEQ ID NO: 91579 - protein, 200 aa, Unknown
  Bacterial polypetide isolated from the Sargasso Sea
MSIRPFRDIKRRKTREINVGKVKVGGNNPISVQSMTNTLTTDIKATINQINDIHSEGADIVRVSCPDEASTKALKEIVNHVDIPIVADIHFHFKRAIEAAENGASCLRINPGNIGNVSRIKEVVRAASQNNCSIRVGVNAGSLEKDILEKFREPCPEALVESALRNIKILEDENFHNIKVSVKSSDLFLSIMAYRQLQRK

SEQ ID NO: 91580 - protein, 301 aa, Unknown
  Bacterial polypetide isolated from the Sargasso Sea
SCPDEGSTKALKNIIKEIKVPIVADIHFHYKRAIEAAKMGASCLRINPGNIGSSDRVLEVLKAAKDFNCSIRIGVNAGSLDKALLEKYKEPCPDALVESAMYNVKLLEDNDFFNFKISVKSSDVFLTVKSYRKLSKICDYPLHLGVTEAGGLLSGSIRSSIGIGQLLMEGIGDTIRVSLSSDPVDEIKSGFEILKSLGIRARGVNIISCPSCARQAFPVIETVKELEKKLSHIKKPITLSIIGCVVNGPGEAAQTEIGLTGGGQDNNLLYLSGIPHSKVASSKIINKVVQLVEEKVKEKNN

SEQ ID NO: 91581 - protein, 276 aa, Unknown
  Bacterial polypetide isolated from the Sargasso Sea
DIVRVSCPDEDSTKSLKDIVREVNTPIVADIHFHYKRAIEAAKMGASCLRINPGNIGSKERVLDVLKAAKDNNCSIRIGVNAGSLDKTLLEKYKEPCPEALVESAEYNIKLFEDNDFFNFKISVKSSDIFLTVKSYLKLSKICDYPLHLGVTEAGGLFTGSIKSSIGIGQLLMQGIGDTIRVSLSSDPVDEVKAGFEILKSLGIRSRGVNIISCPSCARQAFPVIETVKELEKRLSHITKPINLSIIGCVVNGPGEAAQTKIGLTGGGQDSNLLYL

SEQ ID NO: 91582 - protein, 252 aa, Unknown
  Bacterial polypetide isolated from the Sargasso Sea
TTDHVSTIKQIKDLEEAGADIVRVSCPDEASTKSLKKIVKEIKVPIVADIHFHYKRAIESAISGAKCLRINPGNIGSKERIKEVVKAAKDYDCAIRIGVNAGSLEKSILEKYKEPCPEALVESATHNIKLLEDSDFFNFKVSVKSSDVFLAVKAYEKLSKLYDYPLHLGITEAGGLLTGSIKSSIGLGRLLMEGIGDTIRVSLSADPIEEVKAGFEILKALGIRSRGVQIISCPSCARQAFPVIDTVKILEK

SEQ ID NO: 91583 - protein, 176 aa, Unknown
  Bacterial polypetide isolated from the Sargasso Sea
MLRPYQQIHRRKSRVIKVGDVSIGGNNQIAVQTMTNTLTSNAKDTIAQIERSAKLGVDLVRVSVPDKESSHSLKEIVKHSPVPIIADIHFHYKRGIEAANNGASCIRINPGNIGSIERIKEVIKAAKDNNCSIRVGVNAGSLEKQILEKFSEPNPEALVESAKLNIKILEDNDFTN

SEQ ID NO: 91584 - protein, 253 aa, Unknown
  Bacterial polypetide isolated from the Sargasso Sea
IGNKDKIKEVVKAAVDNNCSIRVGVNAGSLEKDILEKYKEPCPEALVESALRNIKILEDENFQNLKVSVKSSDVFLSIQAYKQLSKSTDYPLHLGITEAGGFIPGSVKSSIGLGTLLLEGIGDTIRISLSDNPVEEVKIGNEILKSLNLRERGVKIISCPSCARQGFEVIETVKILEKKLSHIKTPITLSVIGCVVNGPGEAAQTDVGITGGNKGNNMLYLSGVQSEKVLTRDMIDKVVSEVEKKASELDNSK

SEQ ID NO: 91585 - protein, 297 aa, Unknown
  Bacterial polypetide isolated from the Sargasso Sea
MSIRPFRDINRRKTKVINVGDVKVGGDNPISVQSMTNTLTTNVKATVNQIIEIQNEGADLVRVSCPDEDSTKALKEIAKQVKIPIIADIHFHYKRAVEAAISGASCLRINPGNIGDKKKIKEVIKSAKDNDCSIRVGVNAGSLEKDILEKYKEPCPEALVESALRNIKILEDEDFFNLKVSVKSSDVFLSVEAYRQLSKISDYPLHLGITEAGSFISGSIKSSIGIGSLLHSGIGDTIRVSLSDNPVKEVTIGNEILKSLNLRNRGVKIIACPSCARQGFEVINTVKLLEEKLSHIK

SEQ ID NO: 91586 - protein, 310 aa, Unknown
  Bacterial polypetide isolated from the Sargasso Sea
ITVQSMTNTPTTNVKSTINQINSLEEKGADIVRVSCPDESSTQSLKNIIKNVNVPIVADIHFHYKRAIEAAKNGAACLRINPGNIGSKDRVLDVVKAAKDYNCSIRIGVNAGSLEKKLLDKYKEPCPEALVESAIYNVKLFEDNDFYNFKLSVKSSDIFLAIKSYEMLSEKCNYPLHLGITEAGGLITGSIKSSIGMGHLLMNGIGDTIRVSLSADPQEEVKAGYEILKSLNIRSRGVKIISCPSCARQAFPVIETVKALEEKLSHIKTPITLSIIGCVVNGPGEASQTEIGLTGGGNDSNLLLFVGIPH

SEQ ID NO: 91587 - protein, 184 aa, Unknown
  Bacterial polypetide isolated from the Sargasso Sea
MSIRPFRDIKRRKTKEINVGKVKVGANNPITVQSMTNTLTTDVKATIKQINEIHNEGADIVRVSCPDESSTKALKEIIKSVEVPIVADIHFHYKRAIEAAVNGASCLRINPGNIGSAHKIKEIIKAARDNNCSIRVGVNAGSLEKDILDKYKEPCPEALVESALRNIKILEDEEFYNLKISVKS

SEQ ID NO: 91588 - protein, 244 aa, Unknown
  Bacterial polypetide isolated from the Sargasso Sea
SCPDQASTQNLREIVRESPVPLVADIHFHYRRGIEAAEAGVACLRINPGNIGVSDKVKEVVKAAVDNDCSMRIGVNGGSLERHLLEKYNEPCPDAMVESALEHARLLEDNDFFNFKISVKASNVFLATAAYQKLAEVTDYPLHLGITEAGSFRAGTVKSAIGMGMLLLNGIGDTIRVSLSADPVEEVRVGFDILKSLNLRHRGVNIISCPSCARQQFDVIDTVKSLEERLSHITTPITLSIIGC

SEQ ID NO: 91589 - protein, 216 aa, Unknown
  Bacterial polypetide isolated from the Sargasso Sea
MSNWIKRKKTKVVKVGNVSVGGNNPISIQSMTNTDTCDEVSTINQIKDLEAAGADIVRVSVPGFEEAKAFKKIKNAVNIPLVADIHFDYKIALEVADSADCLRINPGNIGKEDRVKEVISAAIDNDIPIRVGVNAGSLEKDLQKKYGEPNADALVESALRHVDILDKFNFENYKMSLKASNIEMTVEAYRKISNIIDQPLHLGITEAGSYRAGNGK

SEQ ID NO: 91590 - protein, 176 aa, Unknown
  Bacterial polypetide isolated from the Sargasso Sea
MELRPHRIIKRKKTREIKVGKVLVGGRSKISVQSMTNTLTTDIKSTISQINILEDSGADIVRVSCPDEESTKALKDIVKNVNVPIVADIHFHYKRAIEAAKMGAACLRINPGNIGSKERILEVVKAAKDFNCSIRIGVNAGSLDKSLLEKYKEPCPEALVESASYNIKLLEDNDFS

SEQ ID NO: 91591 - protein, 257 aa, Unknown
  Bacterial polypetide isolated from the Sargasso Sea
KESKVKEVIDAAKHNNVPIRVGVNAGSLEKDLQKKYGEPNADALVESALRHVDILDKFNFDNYKMSLKASNIEMTVEAYRKISKIIDQPLHLGITEAGSYRAGTVKSSIGVGMLLSEGIGDTIRISLASDPVDEIKVGWDILKSLNIRSRGVKIVACPSCSRQNFNVIKVVNDLEQRLEDISDDIEVAIIGCYVNGPGESKAADIGLTGASPSNLLYIDGSPNIKIKNDNLVDELEKQVRQKVSDNKLLSEKIIARS

SEQ ID NO: 91592 - protein, 237 aa, Unknown
  Bacterial polypetide isolated from the Sargasso Sea
IRIGVNAGSLEKDLQKKYGEPTPAALVESAMRHVEHLDRLDFQDFKVSVKASDVFMAVDAYRLLATQIEQPLHLGITEAGGLRSGTVKSAVGLGMLLAEGIGDTIRISLAADPVEEIRVGFDILKSLRLRSRGINFIACPSCSRQNFDVVKTMNELETRLEDVLTPMDVAVIGCVVNGPGEAKEADIGLTGGTPNNLIYQDGKPDQKVDNLELVDRLEKMIRDKVAAKQAAEANTIA

SEQ ID NO: 91593 - protein, 198 aa, Unknown
  Bacterial polypetide isolated from the Sargasso Sea
MSVRPFRNIKRRKTKEIKVGNVKVGGDNPISVQSMTNTLTTDTKATINQINKITEEGADIVRVSCPDESSTFALKEIVKHVSVPIVADIHFHYKRAIEAAKNGAKCLRINPGNIGDESKINEVINAAKDNDCSIRVGVNAGSLERDILEKFKEPCPEALVESALRNIKILEDKNFLNFKISVKSSDVFLSTSAYRQLS

SEQ ID NO: 91594 - protein, 217 aa, Unknown
  Bacterial polypetide isolated from the Sargasso Sea
MNLRPFRHIERRKSKVINVGEVKIGGDNPISVQSMTNTLTTDTKSTIEQINKICEEGADLVRVSCPDTSSTKALKEITKHSQVPIIADIHFHYKRAIEAAENGAKCLRINPGNIGDEKKIYEVLSAAKNNNCSIRIGVNAGSLEKDILEKYKEPCPEALVESAERNIKILEDKDFFNFKISVKSSDVFLSIASYRLLSKKCNYPLHLGITEAGAFIP

SEQ ID NO: 91595 - protein, 212 aa, Unknown
  Bacterial polypetide isolated from the Sargasso Sea
MKINIQEYCKDISDYQRFPTREVMLGDIAIGKDNPIRVQSMTTTDTMDTKGTIAQSIRMIDAGCEIVRITAPSIKEAKNLKMIRDGLRDKGYKTPLVADIHFTPNAAEVAAEIVEKVRINPGNFVDKKKFEMLDYSNRDYEDELVRISERFSPLIKICKDNSTAMRIGTNHGSLSDRILSRYGDTPLGMVESAMEFIRICEYWNYHDIILSR

SEQ ID NO: 91596 - protein, 307 aa, Unknown
  Bacterial polypetide isolated from the Sargasso Sea
TEAGADIVRVSAPDEDSTLALKDIVKHVSVPVVADIHFHYKRAIEAAENGAKCLRINPGNIGEENKIKEVVSAAKNNDCAIRIGVNAGSLEKDILEKYKEPCPEALVESALRNIDIIENQNFFNFKVSVKSSDVFLSIEAYRQLSKVTKYPLHLGITEAGSFLPGSIKSSIGFGTLLLEGIGDTIRVSLSDNPVEEVKVGNEILKSLNLRNRGVKIISCPSCARQAFQVIETVKILEEKLSHIKAPISLSIIGCVVNGPGEAAQTDIGITGGGKGNNMLYLSGIESEKITTEEIISKVVRLVEKKAE

SEQ ID NO: 91597 - protein, 273 aa, Unknown
  Bacterial polypetide isolated from the Sargasso Sea
GDFHYNGHKLLIDYPECAQALDKYRINPGNVGFGKKKDNQYAIMIEQAIKYDKPIRIGVNWGSLDQDLLTKMMDDNAKRSAPLDTDEVMQEALIISALNSAERAVELGLPKDHIVLSCKVSGVQKLISVYRDISQRCEYALHLGLTEAGMGSKGIVASTASLGVLLQEGIGDTIRISLTPEPNGDRCNEVIVAQEILQTMGLRSFTPLVTACPGCGRTTSTVFQELAENIQAYVRGQMPIWRKKYIGVEDMNLAVMGCIVNGPGESKHADIGI

SEQ ID NO: 91598 - protein, 161 aa, Unknown
  Bacterial polypetide isolated from the Sargasso Sea
PLHLGITEAGSFISGSIKSSIGLGSLLMDGIGDTIRISLSDNPTKEVTIGNEILKSLNLRNRGVKIISCPSCARQAFQVIDTVKLLEEKLSHIKTPITLSVIGCVVNGPGEAAMTDVGITGGGKGNNMLYLSGVQNEKVLTKDIIEKVVTEVEKRASELEN

SEQ ID NO: 91599 - protein, 143 aa, Unknown
  Bacterial polypetide isolated from the Sargasso Sea
MIPERRKTVAVDVGGVRIGGDAPVIVQSMTNTDTADVQSTCDQISLLAEAGSQLVRITVNNHEAAQAVPEIISRLREAGNETPIVGDFHYNGHLLLTQYPECARSLAKLRINPGNVGTKHRDANFTQIVEVAIEYDKPVRIGV

SEQ ID NO: 91600 - protein, 183 aa, Unknown
  Bacterial polypetide isolated from the Sargasso Sea
MQHQSPVKRRVSRQIKVGSVLVGGDAPISVQSMTNTETCDVAATVAQIRRLEEVGADIVRVSVPSMEAAEAFGEIRKQVGIALVADIHFDYKIALRVADLGVDCLRINPGNIGREDRVKAVVDAARHNGIPIRIGVNAGSLEKDLQKKYGEPTPAALVESAMRHVEHLDRLDFQDFKVSVKAS

SEQ ID NO: 91601 - protein, 230 aa, Unknown
  Bacterial polypetide isolated from the Sargasso Sea
FSPEEFAAIGQRIRETFEPLVTLLRDQNKALRIGVNHGSLAERMLFTYGDTPEGMVESAMEFVRICHELDFHNIVISMKASRAPVMLAAYRLMADTMDKEGFNYPLHLGVTEAGDGDYGRIKSTAGIATLLADGLGDTLRVSLTEAPEKEIPVCYSILQSLGLRKTMVEYVACPSCGRTLFNLEEVLHKVRNATSHLTGLDIAVMGCIVNGPGEMADADYGYVGKTPGVI

SEQ ID NO: 91602 - protein, 256 aa, Unknown
  Bacterial polypetide isolated from the Sargasso Sea
MEIRPHRIIKRRKTKKIKLGNIFVGGDSPISVQSMTNTLTTDYKATIKQIRDLEEAGIDIVRVSCPDEDSTKALKKITKEIKIPIVADIHFHYKRAIESAVSGAKCLRINPGNIGSKDRVKEVIKAAKDYDCAIRIGVNAGSLDKKVLEKYKEPCPEALIESAIHNIKLLEDNDFFNFKISVKSSDVFLAVKAYEGLSKRFDYPLHLGITEAGGLFTGSIKSSIGIGKLLMQGIGDTIRVSLSANPVEEVKAGFEI

SEQ ID NO: 91603 - protein, 157 aa, Unknown
  Bacterial polypetide isolated from the Sargasso Sea
MEVRPHRTIKRRKTKKIKVGNVSIGGESIISVQSMTNTITSDVASTVKQINELKEAGADLVRVSCPDEESTEALKKIVKATDIPIIADIHFHYKRAIESAKSGASCLRINPGNIGSTERIKEVIKAAKDHGCSIRIGVNAGSLEKKILEKYKEPVQR

SEQ ID NO: 91604 - protein, 208 aa, Unknown
  Bacterial polypetide isolated from the Sargasso Sea
ALVESALRNIRLIEDMDFSNFKVSVKSSDVFLSIAAYKLLSDKTDYPLHLGITEAGSYLPGSIKTTIGFGNLLLSGIGDTIRVSLSDDPVEEIKVGNEILKSLNLRNRGVKIISCPSCARQAFQVIETVKQLEKKLSHIKEPITLSIIGCVVNGPGEAKQTEIGVTGGGKDNHMLYLNGLETEKVTTNDMIDKIVTLVEEKVSNLQNK

SEQ ID NO: 91605 - protein, 161 aa, Unknown
  Bacterial polypetide isolated from the Sargasso Sea
LGITEAGSFLPGSIKSSIGMGSLLMNGIGDTIRVSLSDDPVEEIKVGNEILKSLNLRNRGVKIISCPSCARQAFQVIDTVKSLEEKLSHIKTPITLSIIGCVVNGPGEAALTDIGITGGGKGSNMLYLKGIQTEKLGNAEIISKVVSIVEKKAEEIENKKK

SEQ ID NO: 91606 - protein, 181 aa, Unknown
  Bacterial polypetide isolated from the Sargasso Sea
ESYRKISKLIDQPLHLGITEAGGYRSGTVKSSVGLGSLLLEGIGDTIRISLASDPVDEVKVGWDILKSLKIRSRGINFIACPSCSRMNFDVIGTMNKLESRLEDIKEDLDVAVIGCYVNGPGESKHTAIGVTGGSPKNLIYIDGKPDHKVDSTELAEHLESLIRDKIEKNKEQENNLILKS

SEQ ID NO: 91607 - protein, 325 aa, Unknown
  Bacterial polypetide isolated from the Sargasso Sea
IKALERVGADIVRVSVPTMDAAEAFKLIKQQVSVPLVADIHFDYRIALKVAEYGVDCLRINPGNIGNEERIRMVVDCARDKNIPIRIGVNAGSLEKDLQEKYGEPTPQALLESAMRHVDHLDRLNFDQFKVSVKASDVFLAVESYRLLAKQIDQPLHLGITEAGGARSGAVKSAIGLGLLLSEGIGDTLRVSLAADPVEEIKVGFDILKSLRIRARGINFIACPTCSRQEFDVIGTVNALEQRLEDIITPMDVSIIGCVVNGPGEALVSTLGVTGGNKKSGLYEDGVRKDRLDNSDMIDQLEARIRAKATMLDEAQRINVQQVEK

SEQ ID NO: 91608 - protein, 343 aa, Unknown
  Bacterial polypetide isolated from the Sargasso Sea
KVGGNNPISVQSMTNTLTTDTNATIKQINEIQSEGADIVRVSCPDESSSKALKEITKHIDVPIVADIHFHYKRAIEAAANGASCLRINPGNIGNINKIKEVVKAARDNNCSIRVGVNAGSLEKDILEKYREPCPEALVESALRNIKILEDENFDNLKISVKSSDVFLSIEAYRQLSKSTDYPLHLGITEAGGFIPGSIKSSIGLGTLLLEGIGDTIRISLSDNPVEEVKIGNEILKSLNLRERGVKIISCPSCARQGFQVIETVKVLEQKLSHIKTPITLSVIGCVVNGPGEAAMTDVGITGGKKGNNMLYLSGVQSEKVLTRDMIEKIVSEVEKKASELENS

SEQ ID NO: 91609 - protein, 365 aa, Unknown
  Bacterial polypetide isolated from the Sargasso Sea
MSIRPFRDIKRRVTKVINVGNVKVGGNNPISVQSMTNTITKNIKDTLNQINQISEVGGDIVRVSCPDEDSTSALKEITKHSPIPVVADIHFHFKRAIEAAENGADCLRINPGNIGDKNKISEVISAAKNNNCSIRIGVNSGSLEKDILEKFKEPCPEALAESAIRNIKILEDLDFFNFKISVKSSDVFLSIKAYRELSKATDYPLHLGITEAGSFVPGSVKSSIGLGNLLLDGIGDTIRISLSDDPVEEIKVGNEILKSLNLRNRGVKIISCPSCARQGFQVIDTVKILEEKLSHIKTPITLSIIGCVVNGPGEAALTDIGITGGGKNSNMLYLNGVQTEKLDNQDIISKVVELVEKKAEEIEKQ

SEQ ID NO: 91610 - protein, 364 aa, Unknown
  Bacterial polypetide isolated from the Sargasso Sea
MKYSHSIKRKKTKKIQIGNIYVGGDSPITVQTMTNTLTHDIDATLEQISQIEQEGCDIVRVSVPDEKSSQALKKIIPEINIPLVADIHFHYKRALEAAENGAHCLRINPGNIGSKDKVREVVEAAKQNKIPIRIGVNAGSLEKTILEKYKSPTAEALFESAKLNIKLLEDLNFDNFKISVKASNVFTAVESYRMLSNFCEYPLHLGITEAGSYFSGSIKSSIGLGLLLYDGIGDTVRVSLSDHPTQEVKVGFEMLKSLNLRDYGVTIISCPSCARQQFDVIETVKSVEKKLSHIKKPITVSIIGCVVNGPGEATMTNIGITGGGNNTHMVYVDGEKSHRIQNEDLVEYLVETIEDKVEQIHHLK

SEQ ID NO: 91611 - protein, 356 aa, Unknown
  Bacterial polypetide isolated from the Sargasso Sea
DRKKTKEINVGDVKVGGDNPISVQSMTNTLTTDVTATIKQIQEIHEEGADIVRVSCPDEDSSKALKEITKNVQIPVIADIHFHYKRAIEAAENGAKCLRINPGNIGDKKKIHDVLKAAKDNDCSIRIGVNAGSLERDILEKYKEPCPEALVESALRNIKILEDEDFFNFKVSVKSSDVFLSIAAYRQLSKVMNYPLHLGITEAGGFVTGSVKSAIGLGSLLLDGIGDTIRVSLSDDPVKEVKIGNEILKSLGLRNRGVKIISCPSCARQAFQVIDTVKILEEKLSHIKTPITLSIIGCVVNGPGEAALTDIGITGGGKGNNMLYLSGVQSEKVLTGEIINKVVSEVEKKVAEIEKK

SEQ ID NO: 91612 - protein, 283 aa, Unknown
  Bacterial polypetide isolated from the Sargasso Sea
SIPVVADIHFHYKRAIEAAENGAKCLRINPGNIGEESKIHDVLSAAKNNGCSVRIGVNAGSLEKDILDKFKEPCPEALVESALRNIKILEDKDFFNFKISVKSSDVFLSIGAYRQLSKVCDYPLHLGITEAGSFISGSIKSSIGLGSLLMDGIGDTIRISLSDNPTKEVTIGNEILKSLNLRNRGVKIISCPSCARQAFQVIDTVKILEEKLSHIKTPITLSIIGCVVNGPGEAAMTDIGITGGGKGNNMLYLSGVQSEKVLTKDIIEKVITEVEKKVSELEN

SEQ ID NO: 91613 - protein, 369 aa, Unknown
  Bacterial polypetide isolated from the Sargasso Sea
MLRPYQKINRRKSRTINVGKVNIGGENPIAVQTMTNTLTSDAKNTISQIERSAKLGADIVRVSVPDKDSSTSLKEIVKHSPVPIVADIHFHYLRAIEAAENGAACIRINPGNIGNQDRIQEVIKAAKNNNCSIRVGVNAGSLERQILEKYSEPTPEALVESAKLNIKILEDNDFTNFKISVKSSDIFMSINAYDKLAKLCDYPLHLGITEAGGKRTGSIKSSIGIGNLLLQGIGDTIRVSLSDEPEEEVRVGFEILKSLGLRNRGVKIISCPSCARQQFQVIETVKNLEKKLDDVSTPITVSIIGCVVNGPGEATMTDIGVTGGGNGTHMIYLDGKKNNVIKNVDLETYLEKLIRKKSEQIQISELNET

SEQ ID NO: 91614 - protein, 326 aa, Unknown
  Bacterial polypetide isolated from the Sargasso Sea
MSIRPFRDIKRKITKEVRIGNIVLGNNNPIVVQSMTNTLTSNASETLKQIVNISKEGAGLVRVSVPDVDSSKSLKEITKHSPVPIIADIHYHYKRAIESAENGAKCLRINPGNIGDKKKIKEIISAAKNNDCAIRIGVNAGSLEKDILEKYKEPCPEALVESAVRNIKIIEEEDFFNFKVSVKSSDIFLSIGAYKQLSKITDYPLHLGITESGSFVPGSVKSSIGMGLLLLEGIGDTIRVSLSDDPIKEVKIGNEILKSLNLLNRGVKIISCPSCARQGFNVIDTVRILEEKLAHIQTPITLSIIGCVVNGPGEAALTDIGITGGR

SEQ ID NO: 91615 - protein, 364 aa, Unknown
  Bacterial polypetide isolated from the Sargasso Sea
MQIRPHRIINRRKTKKIKVGNIFVGGDSPISVQSMTNTITSDSDSTIRQINQLQEAGADIVRVSCPDEESTAALSKIVKSTNIPIVADIHFHYKRAIESAKSGASCLRINPGNIGSKERIKEVIKAAKDYDCAIRVGVNAGSLEKNILEKYKEPCPEALVESATYNVKFLEDNDFFNFKISVKSSDVFLAVKAYEMLSKLYDYPLHLGITEAGGLLTGSIKSSIGIGGLLMKGIGDTIRVSLSADPIEEIKAGFEILGALGIRSRGVQIISCPSCARQAFPVIETVKILENKLSHIKKPITLSIIGCVVNGPGEASQTDIGLTGGGEGNNLLYLSGIPHNKVASQSIIEKVVDLVESKANEIKN

SEQ ID NO: 91616 - protein, 309 aa, Unknown
  Bacterial polypetide isolated from the Sargasso Sea
VSVPGFEEAKAFKKIKNAVNIPLVADIHFDYKIALEVADSADCLRINPGNIGKEDRVKQVISAAIDNDIPIRVGVNAGSLEKDLQKKYGEPNADALVESALRHVDILDKFNFENYKMSLKASNIEMTVEAYRKISNIIDQPLHLGITEAGSYRAGTVKSSIGVGMLLSEGIGDTIRISLASDPVDEIKIGWDILKSLNIRSRGVKIVACPSCSRQNFNVIEVVNELEQRLEDISDDIEVAIIGCYVNGPGESKAATIGLTGASPNNLLYIDGTPNKKISNEDLVDELEEQVRSKISKQKIESEKIILRS

SEQ ID NO: 91617 - protein, 365 aa, Unknown
  Bacterial polypetide isolated from the Sargasso Sea
MSLRPFRDISRKKTKVINVGNVKIGGDNPISVQSMTNTLTTNVKATIKQINDICEEGADLVRVSCPDEKSTFALKEISKHAPVPIIADIHFHYKRAIEAAENGAKCLRINPGNIGNKEKIYEVLSAAKNNDCSIRIGVNAGSLEKDILDKYKEPCPEALVESAIRNIKILEDNNFFNFKVSVKSSDVFLSIAAYRQLSKICDYPLHLGITEAGSFASGSIKSSIGLGTLLLDGIGDTIRVSLSDDPVKEIKVGNEILKSLNLRNRGVKIISCPSCARQAFQVIETVKILENKLSHIKTPITLSVIGCVVNGPGEAASTDIGITGGGKGSNMLYLSGIQTEKILTKEIISKVVSLVEKKASEIKNI

SEQ ID NO: 91618 - protein, 131 aa, Unknown
  Bacterial polypetide isolated from the Sargasso Sea
DGIGDTIRVSLSDDPIEEIKVGNEILKSLNLRERGVKIISCPSCARQAFQVIDTVKELEKRLSHIKKPITLSIIGCVVNGPGEAKQTEIGITGGGKDNHMLYLNGLETEKVMTRDMIDKIVNLVEEKVSSL

SEQ ID NO: 91619 - protein, 330 aa, Unknown
  Bacterial polypetide isolated from the Sargasso Sea
TNTQTTDTKATITQINNLAKEGADLVRVSVPDKESSVALKEIVKYSNVPIIADIHYHYKRALESADNGAKCLRINPGNIGSKNKVQEIIKAAKNNNCALRIGVNAGSLEKDILEKYKEPCPEALVESALRNINLIEDEDFFNFKISVKSSDVFLSIGAYRKLSEVTNYPLHLGITEAGGFVPGSIKSAIGVGSLLMEGIGDTIRISLSDDPINEVKIGNEILKSLSLRERGVKIISCPSCARQGFEVIKTVKVLEEKLSHIKEPLTLSIIGCVVNGPGEAAQTDIGITGGGKDSSMLYLKGVQTEKVLNDEIVSKIVDLVEQKAKEIKYK

SEQ ID NO: 91620 - protein, 185 aa, Unknown
  Bacterial polypetide isolated from the Sargasso Sea
MFTNILAAGSSVPVIHHIQFTDADVKDDIVIQSGSQVGGLLCDGLGDGVLIEHPTAELDYLRRTSFGLLQGSRMRNTKTEYVSCPSCGRTLFDLQEVTAAISERTGHLPGVAIAVMGCIVNGPGEMADADFGYVGGAPGKIDLYVGKEVVKRGIDNDTACDELIQLIKDHGRWVDKEEEEEAVAA

SEQ ID NO: 91621 - protein, 294 aa, Unknown
  Bacterial polypetide isolated from the Sargasso Sea
MEIRPHRIIKRKTTKKVKVGNISVGGDSPISVQSMTNTLTTDIKGTIEQINSLQEAGAEIVRVSCPDKESTKALKNIIKEVSVPIVADIHFHYKRAIEAADMGASCLRINPGNIGTKQRVLEVIKAAKDNDCSIRIGVNAGSLDSKLLEKYKEPCPEALVESAQDNIKLLEDNDFFNFKISVKSSDIFLTVKAYKKLSDICDYPLHLGVTEAGGLFTGSIKSSIGIGQLLMEGIGDTIRVSLSSDPVDEIKAGYEILKSLGIRSRGVNIISCPSCARQAFPVIETVKILERKLA

SEQ ID NO: 91622 - protein, 235 aa, Unknown
  Bacterial polypetide isolated from the Sargasso Sea
MSIRPFRDIKRKKTKEISVGKVKVGGNNPISVQSMTNTPTTNIQATIKQIHEIQGEGADIVRVSCPDESSSKALKEIIKHVDVPIVADIHFHYKRAIEAAESGASCLRINPGNIGNLNKIKEVIKAAKNNNCSIRVGVNAGSLEKDILEKYKEPCPEALVESALRNIKILEDENFDKMKISVKSSDVFLSIAAYRELSKVTNYPFAFRNYRSRRFCTRQYKVLYWIRHITFRWYR

SEQ ID NO: 91623 - protein, 256 aa, Unknown
  Bacterial polypetide isolated from the Sargasso Sea
KKKIYEVLKAAKNNNCSIRIGVNAGSLEKDILEKFKEPCPEALVESALRNIKILEDQDFFNFKISVKSSDVFLSVNAYKQLSAACDYPLHLGITEAGSFIPGSIKSSVGLGMLLVQGIGDTIRISLSDDPVKEVQIGNEILKSLSLRNRGVKIISCPSCARQAFPVIETVKILEEKLAHIKTPITLSVIGCVVNGPGEAASTDIGITGGGKGTNMLYLSGVQTSKVPSEKIISEVISQVEKKALEIEKDNASTKNN

SEQ ID NO: 91624 - protein, 296 aa, Unknown
  Bacterial polypetide isolated from the Sargasso Sea
SHSLKEIVKHSPVPIIADIHFHYKRGIEAANNGASCIRINPGNIGSAERIKEVIKAAKDNNCSIRVGVNAGSLEKQILEKFSEPNPEALVESAKLNIKILEDNDFTNFKISVKSSDIFMSIKAYEQLAELCDYPLHLGITEAGGKRTGSIKSSIGVGNLLLRGIGDTIRISLSDEPEEEVRVGFEILKSLGLRNRGVKIISCPSCARQQFEVIKTVKNLEKKLDDISTPITVSIIGCVVNGPGEATMTNIGITGGGNDTHMIYIDGKKNNVVKNVDLENYLEDLIRKKTKEIELRD

SEQ ID NO: 91625 - protein, 364 aa, Unknown
  Bacterial polypetide isolated from the Sargasso Sea
MKYSHSIKRKKTKKIQIGNIFVGGDSPITVQTMTNTLTHDIDATLEQISLIEQEGCDIVRVSVPDEKSSKALKKIIPEIKIPLVADIHFHFKRALEAAENGAHCLRINPGNIGSKEKVKEVVEAAKQNKIPIRIGVNSGSLEKSILEKYKSPTSEALFESAKLNIKLLEDLNFDNFKISVKASNVFTAVESYRKLSNFCDYPLHLGITEAGSYFSGSIKSSIGLGLLLYDGIGDTVRVSLSDHPTQEVKVGFEMLKSLNLRDYGVTIISCPSCARQQFDVIETVKNVEKKLSHIKKPITVSIIGCVVNGPGEATMTNIGITGGGNNTHMVYVDGEKSHRIQDEDLVEYLVKTIENKVDQIHHLK

SEQ ID NO: 91626 - protein, 181 aa, Unknown
  Bacterial polypetide isolated from the Sargasso Sea
MSIRPFRDIQRKITKEINVGEVKIGGNNPISVQSMTNTVTQDVKNTINQINEISEAGADIVRVSCPDEDSTKALKEITKHAAVPIVADIHFHYKRAIEAAENGAKCLRINPGNIGDQKKIKEVINSAKNNNCSIRIGVNAGSLERDILEKYKEPCPEALVESALRNISIIENEDFFNFKVS

SEQ ID NO: 91627 - protein, 373 aa, Unknown
  Bacterial polypetide isolated from the Sargasso Sea
MSIRPFRDIKRRVTRVINVGKVKIGGDNPISVQSMTNTLTRDAKNTLKQINSISEVGGDIVRVSCPDEESTFALKEITKHSTIPIVADIHFHYKRAIEAAENGADCLRINPGNIGEKEKISQVISAAKNNNCSIRIGVNSGSLEKDILEKYKEPCPEALVESAIRNIKILEDLDFFNFKISVKSSDVFLSVKAYKELSKVTDYPLHLGITEAGSFIPGSIKSSIGLGNLLMEGIGDTIRISLSDDPVEEIKVGNEILKSLNLRNRGVKIISCPSCARQGFQVIDTVKILEEKLSHIKTPITLSIIGCVVNGPGEAAQTDIGITGGGKDSSMLYLKGIQTEKLDNQEIISKVVNLVETKASEIEKNKNDSLKKS

SEQ ID NO: 91628 - protein, 368 aa, Unknown
  Bacterial polypetide isolated from the Sargasso Sea
MGFIRIAEDESYHDMILSMKASNTQVVVQAYRLLVNKMIEEGMNYPLHLGVTEAGEAEDGRIKSALGIGALLEDGLGDTIRVSLTEEPEAEIPVAKVIADRYSSIETQENNLEEINSLPYDPFFYKRRSTRQLTNIGSDNVPRVIGDLSKNRSIKYEDLGQFGYLYSPEQDKWHVSDLAIDFLYIGSNSIDFELPGTINVIHDPSNIKKNDGYYTLYTNEDIGSIPKNDISFLICKDIDNIFPELLSLKKCIIVLDTDNSNGYRSQRKFFVECLNNKIDNPIIIKRRYSELPKDKLMLNSAIDIGALQIDGLGDGIWLSSEHEHSIVNEIAFGILQASRTRISKTEYISCPSCGRTLFDLQETTAKDP

SEQ ID NO: 91629 - protein, 298 aa, Unknown
  Bacterial polypetide isolated from the Sargasso Sea
LALREITKNVSLPVVADIHFHYKRALEAAENGASCLRINPGNIGDKKKVKEVISAAKNNNCSIRIGVNAGSLEKDILEKYKEPCPEALVESAIRNIKIIEDQNFSNLKVSVKSSDVFLSLWAYRQLSKKIDYPLHLGITEAGSFIPGSIKSSIGLGTLLLEGIGDTIRVSLSDDPVKEVQIGNEILKSLNLKQRGVKIISCPSCARQGFDVIDTVKTLEDKLSHIKTPITLSIIGCVVNGPGEAAYTDLGVTGGGGNNHMLYINGNQTKKISTQEMVDKVIALIEKKELEIKNKSTNK

SEQ ID NO: 91630 - protein, 355 aa, Unknown
  Bacterial polypetide isolated from the Sargasso Sea
MAYRLLINKMIEEGMNYPLHLGVTEAGEAEDGRIKSALGIGALLEDGLGDTIRVSLTEEPEAEIPVAEALVERYNDLQEEENSLANIKSLPYDPFFYKRRSTIDLLNFGSKEVPRVIGDLSMNSSIKYEDLGQFGYLYSPEQDKWHVSDVAIDFLYIGTNSIDFELPGTIGVIKDHSVSEDRDGYYSLYTLDHIDAISSKDTSFIICKDEDKIFTELLYLKNCIIILETDQYHGYRSLRKFFIECQNKGLKNPIIIKGSYHGLPKEKLMLYSAIDIGSLFIDGLGDGIWLSSEHEHSFINETAFGILQASRTRISKTEYISCPSCGRTLFDLQETTAMIRARTDHLKGIKIGIMG

SEQ ID NO: 91631 - protein, 372 aa, Unknown
  Bacterial polypetide isolated from the Sargasso Sea
MFAESPIKRRKSTRINVGNVPIGDGAPIAVQSMTNTRTTDVAATVDQINRIVAVGGEIVRVSVPTMEAAEAFKEIKKQVSVPLVADIHFDYRIALKVAEYGVDCLRINPGNIGNMERVRSVVDCAKDKNIPIRIGVNGGSLEKDLQEKYGEPTPEALVESAMRHVDILDKLNFDQFKVSVKASDVFLAVGAYRLLAQKIDQPLHLGITEAGGQRAGAVKSAVGLGMLLAEGIGDTLRVSLAADPVEEIKVGFDILKSLSIRSRGINFIACPSCSRQEFDVIGTVNALEQRLEDILTPMDVSIIGCVVNGPGEAEVSDLGLTGARNMSGLYEDGKRVKERLPNDDLVDKLEAKIRAKASRMSEQNKIQVSVKD

SEQ ID NO: 91632 - protein, 365 aa, Unknown
  Bacterial polypetide isolated from the Sargasso Sea
MSIRPFRDIKRKKTKVISVGKVMIGGNNPISVQSMTNTKTTDTKSTIEQINKVEEAGADLIRVSCPDEESSSALKEIIKNINLPVIADIHFHYKRALEAAKNGASCLRINPGNIGDQKKIKEIVKAAKDNNCAIRVGVNAGSLEKDILEKYREPCPEALVESALRNIKILEDEDFNNLKISVKSSDVFLSIEAYRQLSKATDYPLHLGITEAGGFIPGSIKSSIGLGTLLLEGIGDTIRISLSDNPVEEVKIGNEILKSLNLRERGVKIISCPSCARQGFQVIETVKVLEQKLSHIKTPITLSVIGCVVNGPGEAAMTDVGITGGKKGNNMLYLSGVQSEKVLTSDMIEKIVSEVEKKASELENN

SEQ ID NO: 91633 - protein, 362 aa, Unknown
  Bacterial polypetide isolated from the Sargasso Sea
MSNPYGIDIKRKKTRQIFVGDVPVGGNSPISVQSMTNTDTRDIKSTVDQVIGLQDAGADLVRISCPDEESSIALKTIIDETNVPIVADIHFHYKRAIEAAESGASCLRINPGNIGSIDRVKEVVKAAKDNNCSIRIGVNGGSLEKKIIEKYKGPSPAAMVESALFHENILRDLDFHNFKVSVKTSNVLLTVESYKELSKVTDAPLHLGITEAGGLMDGTIKSSIGIGQLLAQGIGDTLRVSLSADPVEEIKVGFSILKSLGLRHRGVNIISCPSCARQGFDVIDTVKKLEDRLSNISEPFTISIIGCVVNGPGEATMSDIGFTGGGNNSGMLYVDGKQLAKKNNGELIESIVNEVEKKIKQK

SEQ ID NO: 91634 - protein, 204 aa, Unknown
  Bacterial polypetide isolated from the Sargasso Sea
MNNPYGIDIKRNKTRKIYVGDIPVGGDAPISVQSMTNTDTRDIKSTIKQVLDLEDAGADIVRISCPDEESSKALKEIVEQTNVPIVADIHFHYKRAIEAAESGASCLRINPGNIGSIDRVKEVVKAAKDNDCSIRIGVNGGSLEKNILEKYKGPSPSAMVESALFHENILRDLDFNNFKISVKTSNVLLTVESYKELSKVTDAP

SEQ ID NO: 91635 - protein, 341 aa, Unknown
  Bacterial polypetide isolated from the Sargasso Sea
MSIRPFRDIQRRKTNVIKVGKVNIGGDNPISVQSMTNTLTNDVKSTIKQIQEISKAGADIVRVSCPDSESTKALKEILKHIDIPLVADIHFHYKRAIEAAENGADCLRINPGNIGDLNKIKEVIKSAKNNNCSIRIGVNAGSLEKDILEKFKEPCPEALVESAMRNIKILEDLDFRNFKISVKSSDVFLSVKSYKQLSEKTDYPLHLGITEAGSYIPGSIKSAIGLGNLLMEGIGDTIRVSLSDDPVQEVKIGNEILKSIGLRSRGVKIISCPSCARQGFKVIDTVKILEDKLSHIDEPITLSIIGCVVNGPGEAAFTDIGVTGGGKESNMLYLNGVQLKS

SEQ ID NO: 91636 - protein, 365 aa, Unknown
  Bacterial polypetide isolated from the Sargasso Sea
MIESVIKRKKTRKIWVGDVPVGGNSPISVQSMTNTDTDDVVSTVKQIHQLQDAGADIVRVSVPTLEAAESFKKIRTQVNIPLVSDIHFDYKIALAVLNNGVDCLRINPGNIGNEKKIKEVIASAKDKNIPIRVGVNAGSLEKDLQMKYGEPNADALVESGMRHVEILKKNNYENFKLSIKSSDIFMAVESYEKISNLIDQPLHLGITESGSLKTGTVKSSIGLGSLLMKGIGDTIRVSLASDPIDEVKVGWEMLKSLKIRSRGVKIVACPSCSRQNFQVISTVNKLETELSELKEEVTLAVIGCYVNGPGESKIADVGVTGADPKHLIYLGGKPAYKVETKDLEKALVKEVMKVAENKRNTILKQ

SEQ ID NO: 91637 - protein, 367 aa, Unknown
  Bacterial polypetide isolated from the Sargasso Sea
MSNWIKRNKTKTIMVGNIPVGGNNPISIQSMTNTDTCDVVSTVNQIKDLESAGADIVRVSVPGYDEANAFKEIKKAVNIPLVADIHFDYKIALEVADTADCLRINPGNIGKEERIREVINAALHNNVPIRVGVNAGSLEKDLQKKYGEPNADALVESALRHVEILDKFNFDNYKMSLKASNIEMTVEAYRKISKLIDQPLHLGITEAGSYRAGTVKSSIGIGMLLTEGIGDTIRISLASDPVDEIKIGWDILKSLNIRSRGVKIIACPSCSRQNFNVINVVNELEERLEDISDDIEIAIIGCYVNGPGESKAASIGLTGASPKNLLYIDGTPNKKISNDDLVNELEKQVRKKISKNKTESEQIILRS

SEQ ID NO: 91638 - protein, 403 aa, Unknown
  Bacterial polypetide isolated from the Sargasso Sea
MDKRKKTNSVQVGNIKIGSEHPIVIQSMTSTPTSDVNRTVEQIIRLNEAGSEVIRMTVNDSKAAESVVSIKNRLIQSNCNVPLVGDFHFNGHILLAEYQETASILDKYRINPGNIGTSNKYDANFESIINIAIANDKPIRIGGNWGSINKSILNDMIIEKESHKSSISYSDLIKKALIKSVIDSANMAQEIGLPANKIILSCKTSDIASLVDIYRELSKTDYPLHLGLTEAGMGKDGMIASTSALSILLYEGIGDTIRVSLTPESDEERVNEVFVCKEILSSLNLRKFKPRVVSCPGCGRTSSDYFIKLSRNINQLVENKMSEWKNIYPGVESMTIAVMGCIVNGPGESKHADIGISLPGDNEDPHAPVFIDGKKFKTLSGPDIEGEFINILQGYIETKYRNN

SEQ ID NO: 91639 - protein, 434 aa, Unknown
  Bacterial polypetide isolated from the Sargasso Sea
MQSEAQSPRSSQICSTEPVFGGHKPRRVSHAVDVRWGGQLVTIGGDAPVRVQSMTNTDTADAIGTAIQIKELANAGSELVRITVNTPEAAAAVPAIREQLDRMGVTVPLVGDFHYNGHLLLRDYPGCAESLSKYRINPGNVGQGAKRDTQFAQMIEAAAKYDKPVRIGVNWGSLDQDLLARMMDENGARAQPWDAQSVMYEALIQSAIGSAERAVELGLGRDRIILSCKVSGVQDLIAVYRELSRRCGFALHLGLTEAGMGSKGIVASTAALGVLLQEGIGDTIRISLTPEPGASRTGEVIVGQEILQTMGLRSFAPMVIACPGCGRTTSTLFQELAMQIQTYLREQMPVWRKAYPGVEKMNVAVMGCIVNGPGESKHANIGISLPGSGENPAAPVFIDGEKVKTLRGERIAEEFQQIVSDYVERNYGRAEATN

SEQ ID NO: 91640 - protein, 231 aa, Unknown
  Bacterial polypetide isolated from the Sargasso Sea
MSIRPFRDIKRRLTKVIKVGKVKIGGNNAISVQSMTNTLTRNAKETLNQIGKIAEVGGDIVRVSCPDEESTHALKEITKHSPIPIVADIHFHFKRAIEAAENGSDCLRINPGNIGDINKISQVISAAKNNNCSIRIGVNSGSLEKDILEKFKEPCPEALVESAIRNIKILEDLDFFNFKISVKSSDVFLSIKAYRELSKVTDYPLHLGITEAGSFIPGSIKSSIGLGNLLL

SEQ ID NO: 91641 - protein, 405 aa, Unknown
  Bacterial polypetide isolated from the Sargasso Sea
MKRRQTKQIKVGKVGVGSDYPITVQSMTTTKTKDTEKTLEQVYELASNGADIVRVTCNEVDAATSLIKISTRSPVPIIADIHFQYKLALAAIEAGVQGLRLNPGNIRDEKHIKEVAKEALLAEIPIRVGVNAGSLDKDIAKKYPESSPEALVESALKEIRYLEEVDFYNIKISVKHSNVPLMIEAYRLLAEKVQYPLHLGVTEAGPLPGGLIKSVAGISTLLSEGIGDTIRLSLTTDPVDEAKYGRQLLEYLNLRDRKSLDLIACPSCGRAEVDVIKVANEAQESLEKKGFPIQVAVMGCVVNGPGEAKSADLGIAAGRNKGHLFIKGQVVKVVDEKDMVSSLVKEAELITNEGIEARLAAADKDAAKIAQEDAEALIDIQGDINNFKLKSKSVVEITSNEDIDT

SEQ ID NO: 91642 - protein, 156 aa, Unknown
  Bacterial polypetide isolated from the Sargasso Sea
MFNRRKTSQIQVGKVGVGSNFPISVQSMTTTKTRDVDGTLAQIYEIASNGADIVRVTCNEVEAAEGLVEITQRSPVPIIADIHFQYKLALAAIDAGVDGLRLNPGNIRKESQIKEVAKAALSANIPIRIGVNGGSLDKDLLEKYGDATPEALVESA

SEQ ID NO: 91643 - protein, 240 aa, Unknown
  Bacterial polypetide isolated from the Sargasso Sea
MKSNIKRRKTRVINVGDVSVGYNSNISVQSMTNTNTQDSFATLDQIEKIADAGADLVRVSCPDQDSTNALRTIVKNSPIPIIADIHFHYKRAIEAADAGAACLRINPGNIGSVDRIKEVINAAKSNDCSIRIGVNAGSLERKILDKYKEPNSDAMVESALFHSQILKENDFHDFKISVKASDVFLTIDAYKKLAEKTDAPFHIGITEAGGLRAGTVKSSIGLGYLLLNGIAGYNKSFFIS

SEQ ID NO: 91644 - protein, 316 aa, Unknown
  Bacterial polypetide isolated from the Sargasso Sea
MNNSWIKRKKTNHIFVGDVGVGGDHPISIQSMTNTNTADVEATVNQVEQLQAAGADIVRVSVPDGDCAKAFKKIKESVSIPLVADIHFDYKIALLVADSADCLRINPGNIGKENKVKEIIQAANDNNIPIRIGVNAGSLEKDLQKKYGEPNSDALVESALRHVDILDRHDFSNFKLSLKASNIQMTVESYRKISDLLDQPLHLGITESGSYRAGSVKSSIGLGMLLSEGIGDTVRVSLASDPVDEIKVGWDILKSLNLRSRGIRIVACPSCSRQNFNVIEVVNELESRFEGISEDLEVAIIGCYVNGPGESKAADV

SEQ ID NO: 91645 - protein, 253 aa, Unknown
  Bacterial polypetide isolated from the Sargasso Sea
LLNSKMDENIKLKIPKSAEEIESDALITSALLSYEKALDLGLGKDKIIISCKVSRLNQMVNCYREISKNCSAPLHLGLTEAGMGMKSIVATTAALSILLEQGIGDTIRSSLTPEVGSPRSREVELCQEILQSLAIRSYKPEVTSCPGCGRTTSTYFRELASEINLFLDNKKKNWADKYPGSESLKVAVMGCVVNGPGESKAANIGVSLPGSGESPVAPVYVDGKKLKVLKGDNISGEFINMVESYVEKKWGNK

SEQ ID NO: 91646 - protein, 366 aa, Unknown
  Bacterial polypetide isolated from the Sargasso Sea
MNIRPFREIKRRKTKEINVGNIKVGGDNPISVQSMTNTLTKDVKETVNQIKQIEEAGADIVRVSCPDQDSTKALKDIIKNTSIPIVADIHFHYKRAIEAAESGAACLRINPGNIGDKKKIKEVISAAKNNNCSIRIGVNAGSLEKDLLEKYKEPCPEALVESALRNISIVEDFDFYEFKVSVKSSDVFLSIEAYRQLSKVTNYPLHLGITEAGTFLPGSIKSSIGFGSLLMSGIGDTIRVSLSDDPVEEIKVGNEILKSLNLRNRGVKIISCPSCARQAFNVIETVKKLEDRLSHIKTPISLSIIGCVVNGPGEAAQTDIGITGGGKGNNMLYLNGVESKKISSEEMISKVVRLVEEKAEEIEKAK

SEQ ID NO: 91647 - protein, 470 aa, Unknown
  Bacterial polypetide isolated from the Sargasso Sea
MIKEYLRRKTRTVMVGKVGVGSAEPVRIQSMLTSETTDLDSVMLEIQALQRASCEMIRITIPNRKALDAIPEVRRRMSEEGIERPLIADIHFNPQLAVDSCEFFEKVRINPGNYADRKKFEIREYSDLQYAEELERIEETLLPLVKNLKIYQRCLRIGTNHGSLSDRVMNRFGDSPEGMVQSALEFLRIFEKHDFYDTILSMKSSNPLVMKEAYRLLVMRMEEESMDYPLHLGVTEAGNGSEGRIKSAVGIGGLLCQGLGDTIRVSLTEPAENEIPAAKAILGGVEKLIERISKDLEKNKRFEEKSVSEPTISPNQNQSTLRIQSEKTSGRSILMKPSGCKIGDRETFKLLSWKTETEFTDPKKVFDAKLDRSDGEQVLLLNEQEIETGLDKTILDHLKSKLLVLEVSNPLYMIWNLNQRFEGSAKPAAIGFQLPIIESTEDHLGLASELGELISSGELHALICRDGDPE

SEQ ID NO: 91648 - protein, 159 aa, Unknown
  Bacterial polypetide isolated from the Sargasso Sea
LGITEAGSFASGSIKSSIGLGTLLLDGIGDTIRVSLSDDPVKEIKTGNEILKSLNLRNRGVKIISCPSCARQAFQVIDTVKILESKLSHIKAPITLSVIGCVVNGPGEAASTDIGITGGGKGSNMLYLSGIQTEKILTEEIISKVVSLVEKKASEIQNI

SEQ ID NO: 91649 - protein, 303 aa, Unknown
  Bacterial polypetide isolated from the Sargasso Sea
MLRSYQKIYRRKTRVVNVGEVLIGGDNPISVQTMTNTLTTDIVATSRQIDRAISAGADLVRVSVPDKESTQALKEIIKHSKVPIIADIHFHYKRAIESAENGAGCLRINPGNIGSKEKVKDVIKAAKNNNCSIRIGVNAGSLDKKILDKYSEPNPEALIESALDNIKILEDNDFFNFKISVKSSDIFMAIKAYEGLAEKCDYPLHIGITEAGGKRTGSIKSSIGMGNLLLNGIGDTIRVSLSDEPEEEVKVGFEILKSLGVRNRGVKIVSCPSCARQQFQVIDLVKKLEKSLEDIQIPLTVSI

SEQ ID NO: 91650 - protein, 170 aa, Unknown
  Bacterial polypetide isolated from the Sargasso Sea
MSIRPFRDIKRKKTKVVKIGNITLGDNNPITVQSMTNTLTTDVKATLKQINDIANEGAELVRVSVPDIESSKALKEIVKHSSVPIIADIHYHYKRAIESAEAGAKCLRINPGNIGEVKKIKEVISAAKNNNCALRIGVNAGSLEKDILEKYKEPCPEALVESALRNIKIV

SEQ ID NO: 91651 - protein, 364 aa, Unknown
  Bacterial polypetide isolated from the Sargasso Sea
MSVRPFRDIKRRKTKVINVGDVKIGGDNPISVQSMTNTLTTDVKATINQINDIAEEGADLVRVSCPDTESTKALKEIVKHVSIPVVADIHFHYKRAIEAAENGAKCLRINPGNIGEESKIHDVLSAAKNNGCSVRIGVNAGSLEKDILDKFKEPCPEALVESALRNIKILEDKDFYNFKISVKSSDVFLSIGAYRQLSKVCDYPLHLGITEAGSFVSGSIKSSIGLGSLLMDGIGDTIRISLSDNPTKEVTIGNEILKSLNLRNRGVKIISCPSCARQAFQVIDTVKILEEKLSHIKTPITLSIIGCVVNGPGEAAMTDIGITGGGKGNNMLYLSGVQSEKVLTKDIIEKVVTEVEKKVSELEN

SEQ ID NO: 91652 - protein, 310 aa, Unknown
  Bacterial polypetide isolated from the Sargasso Sea
MSIRPFRDIQRKLTKEINVGNVKIGGNNPISVQSMTNTNTKDIKKTIKQINNISELGADIVRVSCPDEDSTKALKEIVKHSQVPIVADIHFHYKRAIEAAENGAKCLRINPGNIGDQKRIKEVISAAKNNNCSIRIGVNAGSLEKDILEKYKEPCPEALVESALRNISIIENEDFFNFKLSVKSSDVFLSIAAYRQLSSKTDYPLHLGITEAGSFLPGSIKSSIGFGALLLDGIGDTIRVSLSDDPAEEVKVGNEILKSLNLRNRGVKIISCPSCARQAFQVIDTVKVLEEKLSHIKTPNNFVDNWLCSK

SEQ ID NO: 91653 - protein, 366 aa, Unknown
  Bacterial polypetide isolated from the Sargasso Sea
MNIRPFRNISRKKTKVINVGDVKVGGDNPITVQSMTNTLTKDVKATIKQINSISEVGGDIVRVSCPDEDSTKALKEIAKHTAVPLVADIHFHYKRAVEAASNGASCLRINPGNIGDKNKIKEVILAAKDNNCSIRIGVNAGSLERDILEKYKEPCPEALVESAIRNIKIIEDLDFFNFKISVKSSDVFLSINAYRKLSKVTDYPLHLGITEAGSFLPGSIKSSIGLGNLLIDGIGDTIRVSLSDDPVEEVKVGNEILKSLGLRNRGVKIISCPSCARQGFQVIDTVKILEEKLSHIKTPITLSIIGCVVNGPGEAALTDIGITGGGRNSNMLYLKGVQSEKLGNDEIISKVIELVEKKAEEIEKIK

SEQ ID NO: 91654 - protein, 405 aa, Unknown
  Bacterial polypetide isolated from the Sargasso Sea
MSLTQSKEVNSLSKRYSTHIERRITRTVMVGDIAIGSDYPVRVQSMINEDTMDVENAYLAIKRLHDVGCEIVRLTVPSLAHAKAVGDIKAKLLENNINTPLVADVHHNGMKIAMEVAKHVDKVRINPGLFVFEKSDPTRTEYTDEEFETIKQTILKRFTPLVEVLKAENKALRIGVNHGSLSERMLFTYGDTPLGMTESAMEFVKICDELDFHNIIISMKASRAPVMMAAYRMIADRLDSEGYNYPLHLGVTEAGDGDYGRIKSTAGIGTLLAEGLGDTIRVSLTEAPEKEIPVCYSILQSLGLRKTMVEYISCPSCGRTLFNLEEVVDKVRNATSHLTGLDIAIMGCIVNGPGEMADADYGYVGKGKGTIALYRRKEEIKRVPEDEGVNALIQLIKDDGKWIDP

SEQ ID NO: 91655 - protein, 368 aa, Unknown
  Bacterial polypetide isolated from the Sargasso Sea
MKTSWIKRKKTKTIYVGNVPVGGNNPISVQSMTNTDTCDVVSTVKQINDLKKAGADIVRVSVPGFDEAKAFKEIKNAVNIPLVADIHFDYKIALEVADTADCLRINPGNIGKEDRVQEVINAALDNNVPIRVGVNAGSLEKDLQKKYGEPNADALVESALRHVEILDKYNFENYKMSLKASNIEMTVEAYRKISKVIDQPLHLGITEAGSYRAGTVKSSIGVGMLLTEGIGDTIRISLASDPVDEIKIGWDILKSLNIRSRGVKIVACPSCSRQNFNVIKVVNDLEQRLEDISDDIEVAIIGCYVNGPGESKAADIGLTGASPSNLLYIDGSPNKKIKNDNLVDELEKQVRIKIEDNRIKSDKIILRS

SEQ ID NO: 91656 - protein, 105 aa, Unknown
  Bacterial polypetide isolated from the Sargasso Sea
MKEHTIQRKKTKKIWVGDVPVGGGSPVSVQSMTNTETTDVKATINQIKDLEDAGADIVRVSVPTMEAAEAFKEIKKASNIPLVSDIHFDYKIALKVLEYDVDCVR

SEQ ID NO: 91657 - protein, 264 aa, Unknown
  Bacterial polypetide isolated from the Sargasso Sea
CLRINPGNIGRADRVREVISAARDHGCSMRIGVNAGSLEKHLLEKYAEPCPEALVESALEHARILQDNDFHEFKISVKASDVFLAVAAYHHLADAIDCPLHIGITEAGGMRSGTVKSAIGLGGLLWAGIGDTVRVSLSADPTEEVRVAYEMLKSLGLRRRGVTVISCPSCARQQFDVISTVQTIEERLEHIDIPMTVSIIGCIVNGPGEARETDIGLTGGGRGTHQVYISGLADHRLTDGDIVEHVVGLVEARAAAIKSGEIEG

SEQ ID NO: 91658 - protein, 366 aa, Unknown
  Bacterial polypetide isolated from the Sargasso Sea
MSIRPFRDINRKKTKEINVGKVKVGGNNPISVQSMTNTLTTNVKATINQINLIANEGADIVRVSCPDEGSTEALKEIIKNVSVPIVADIHFHYKRAVEAAKNGAHCLRINPGNIGSKIKIKEVLNAAKDNQCSIRIGVNAGSLEKDILEKYKEPCPEALVESALRNIKILEDEDFFNFKVSVKSSDVFLSIEAYKQLSEVTDYPLHLGITEAGSYVPGSIKSSIGIGNLLLRGIGDTIRISLSDDPVQEIKIGNEILKSLGLRYRGVKIISCPSCARQGFPVIETVKKLEERLSHIKTPLTLSIIGCVVNGPGEASMTDIGLTGGGKGNNMLYLSGVQSNIITNENILTEIIKQVEKKAEEIETSK

SEQ ID NO: 91659 - protein, 418 aa, Unknown
  Bacterial polypetide isolated from the Sargasso Sea
ANDYNCSIRIGVNGGSLEKDILEKYKEPCPEALVESALKNIRILEDNNFFNFKISVKASDIFLAVNSYRKLAETCDYPLHLGITEAGGYFPGTVKSSIGLGLLLMEGIGDTIRVSLSASPVEEVKAGLEILKSLNLKNRGVKIISCPSCARQAFEVIKTVEILEQRLSHIKESLTLSIIGCVVNGPGEASQTDIGLTGGGKGNNMVYLSGLQNHKVPSENIIDHIVELVEKKAERIKKFINMIPLEKVNSIILRYDELEKLLSKTNIDKKEFVKNSKEYSSIGSIIKEAKEYQKILKDKDELRLILNDQKSDKDLKMMAESELNEAKKKELILEKKIKYFMLPKDEADEKNAIIEIRAGTGGLEASLFASDLFSMYQKVSSKNNWKIEILNTSQSDAGGFKEIIFLVNGKNVFSKIKI

SEQ ID NO: 91660 - protein, 223 aa, Unknown
  Bacterial polypetide isolated from the Sargasso Sea
MNIRPFREIKRRKTKEINVGHVKVGGDNPISVQSMTNTLTKDVKETVKQIKQIEEAGADIVRVSCPDEDSTKALKDIIKNISIPIVADIHFHYKRAIEAAESGAACLRINPGNIGDKKKIKEVISAAKSNNCSIRIGVNAGSLEKDLLEKYKEPCPEALVESALRNISIIEDFDFNRLKVSVKSSDVFLSIEAYRQLSKVTNYPLHLGITEAGTFLPGSIKSS

SEQ ID NO: 91661 - protein, 405 aa, Unknown
  Bacterial polypetide isolated from the Sargasso Sea
MKRRKTKQIKIGKVGVGSDYPITVQSMTTTKTKDTEKTLQQIYELASNGADIVRVTCNEVDAATSLIEISTRSPVPIIADIHFQYKLALAAIEAGVHGLRLNPGNIRDEKHIKEVAREALLAKIPIRVGVNAGSLDKDIAKKYPESSPEALVESALKEIRYLEEVDFYNIKISVKHSNVPLMIESYRLLADKVEYPLHLGVTEAGPLPGGLIKSVAGISTLLSEGIGDTIRLSLTTDPVDEAKYGRQLLEYLNLRDRKSLDLIACPSCGRAEVDVIKVANEAQEALEEKGFPIQVAVMGCVVNGPGEAKSADLGIAAGRNKGHLFIKGQVVKVVDEKDMVSSLVKEGELITNEGIEARLAAADKNAAKIAQEDVDALINIQGDINNFKLKSKSVVEITSNEDIET

SEQ ID NO: 91662 - protein, 406 aa, Unknown
  Bacterial polypetide isolated from the Sargasso Sea
MKINRRKTTQLSVGKVGVGSDFPISVQSMTTTKTKDVEGTLSQIYEIASNGADIVRVTCNDIDAAKGLVEITQRSPVPIIADIHFQYKLALAAIQAGVDGLRLNPGNIRKESQIKDVAKAALDANIPIRIGVNGGSLDKDLLEKYGDSTPEALVESALKELRYLEDVDFNDIKISVKHSNVRLMIESYRLLAEKVNYPLHLGVTEAGPLPGGLIKSTAGIGTLLNEGIGDTIRYSLTTDPVEEAKSGRQLLEYLGLRERNSLDLIACPSCGRAEVDVIKVAEEAQNVLNNENIPLQVAVMGCVVNGPGEARSADLGIAAGKNKGHLFIKGEVVRVVNEKEMVSSLLDEARLIVEEGIEARLAKADENAAEIAQKDVDDLLSSQGDINNFLERKKSVVEITSNQDNE

SEQ ID NO: 91663 - protein, 147 aa, Unknown
  Bacterial polypetide isolated from the Sargasso Sea
MGFSMQSEAQSQSSSKIVSNEPVFGGHAARRKSHAVDVRWGGQLVTIGGDAPVRVQSMTNTDTADAIGTAIQIKELAQAGSELVRITVNTPEAAAAVPAVREQLDRMGVSVPLVGDFHYNGHLLLRDYPACAESLSKYRINPGNVGH

SEQ ID NO: 91664 - protein, 367 aa, Unknown
  Bacterial polypetide isolated from the Sargasso Sea
MTDWIKRKTTKVIDVGGVLVGGNNPISIQSMTNTNTSDVVSTVKQIKDLEDAGADIVRVSVPGFDEAKAFKEIKKLVEIPLVADIHFDYKIALEVADTADCLRINPGNIGKEVRVKEVISAAIDNNIPIRVGVNAGSLEKDLQKKYGEPNADALVESALRHVEILDRFNFDNYKMSLKASNIEMTVDAYRKISNIISQPLHLGITEAGSYRAGTVKSSIGVGMLLSEGIGDTIRISLASDPIDEIKIGWDILKSLNLRSRGVKIVACPSCSRQNFNVIKVVNELEQRLEDISEDIEVAIIGCYVNGPGESKAANIGLTGASPNNLLYIDGTPNKKVSNDNLVDELEEQVRSKVLIKKEESEKIILRS

SEQ ID NO: 91665 - protein, 273 aa, Unknown
  Bacterial polypetide isolated from the Sargasso Sea
MSVSIDSIRPWRQISRRKSREINVGNVKIGGDNPISVQTMTNTNTADANATILQVNKCAEAGAEIVRVSCPDIESTKALKEICRISSVPIVADIHFHYKRAIEAAEAGAACLRINPGNIGNNDKIREVIKAAKDFGSSIRIGINAGSIEKDLLEKYREPCPEALLESAKRNIGILQDNDFFEFKISVKASDVFLAVAAYSDLVTITDAPFHIGITEAGSLFSGTVKSAIGLGNLLWAGLGDTIRVSLSADPVEEVKAGFEILKSLNLRHQGCA

SEQ ID NO: 91666 - protein, 373 aa, Unknown
  Bacterial polypetide isolated from the Sargasso Sea
GDTIRVSLTEEPEFEIPVAKLIAQRYKEGFMLEPLEKIVSLPYDPFFHSRRKTTNINGIGSDYVPRVFSDLSRIDNIRPKDLAPLGYLYSEEQDKWHLSEQAVDYLYVGNNKIEFELPGTLSIIQNSKIWKENDQSYPVFNLDNYRTTSKRSNQMNFLFIDDKTITDELKLILKEDKTIVLILRKSDVHSVMLHRKFIIDMFDLGITAPVILNRSYNDISNLDFQIKSSIDIGSLYIDGLGDGVWVDFGSEYGIVNQTVFGILQASRMRISKTEYISCPSCGRTLFDLQETTSKIREVTNHLKGVKIGIMGCIVNGPGEMADADYGYVGTGNGYISLYKGQEVVKRNIPTDGAVEALISLIKEHGDWIDPVSV

SEQ ID NO: 91667 - protein, 258 aa, Unknown
  Bacterial polypetide isolated from the Sargasso Sea
DREDRVKAVVEAARDKGIPIRIGVNAGSLEKDLQKKYGEPTPAALVESALRHVEHLDRLNFPDFKVSVKASDVFMAVEAYRLLAKQIEQPLHLGITEAGGLRSSTVKSAVGLGMLLAEGIGDTIRISLAADPVEEIKVGFDILKSLRLRSRGINFIACPSCSRQNFDVVKTMNELEARVEDLLVPLDVAVIGCVVNGPGEAKEAHIGLTGGSPNNLVYIDGKPASKLTNENLVDELEKLIRDKAAEKVAADAAVIVRG

SEQ ID NO: 91668 - protein, 189 aa, Unknown
  Bacterial polypetide isolated from the Sargasso Sea
FNFKISVKSSDVFLAVKAYEGLSNLYDYPLHLGITEAGGLFTGSIKSSIGIGRLLMQGIGDTIRVSLSADPVEEVKAGFEILNALGIRSRGVQIISCPSCARQAFPVIDTVKILEKKLSHIKRPMTLSIIGCVVNGPGEAAQTDIGLTGGGDGNNLLYLSGIPHNKVVSEDIISKVVSLVEAKAKETNS

SEQ ID NO: 91669 - protein, 370 aa, Unknown
  Bacterial polypetide isolated from the Sargasso Sea
MSKKTEIKRRKSKKIFVGNLAVGGSSPISVQSMTNTDTEDVKATVNQIIALETAGADLVRVSTPTMSSVEAFKEIKKLTNVPLIADIHFDYKIALEVANAGADCLRINPGNIGSATKVNTVIKCAEDHDIPIRIGVNAGSLEKKLQKKYGEPCPEALVESAMGHVEILKKNNFENFKLSIKASDIDLMTESYRLIAKEIDQPLHLGLTEAGGFRSGTVKSTIAISQLLKEGIGDTLRVSLASDPVDEIKVGFDILKSLKLRKKGINFIACPSCSRQNFDVIKTMNELEVRLEDIKESIDVAVIGCYVNGPGESKAAHVGLTGASPKSLIYVDGTPDEKISNDQIVDQIEKKVRIKIKEMASKKEKLIASS

SEQ ID NO: 91670 - protein, 644 aa, Unknown
  Bacterial polypetide isolated from the Sargasso Sea
MDHKSKLQEYCSSLTSYQRWPTREVMVGSVAVGKKNPIRIQSMTTTDTMDTENTIKQSIRMIKAGCEIVRITAPSIKEAKNLKYIRQGIRKKGYDTPLVADIHFTPNAAEVAARIVEKVRINPGNFVDRKKFETHEYSEKDYENEIERLKDKFSPLVKVCKEYGTAMRIGTNHGSLSDRILSRYGDTPLGMVESAMEFLRICGYWNYHEVILSMKASNTQVMVQAYRLLVKKMVDEGMNYPLHLGVTEAGDGEDGRIKSSVGIGTLLEDGIGDTIRVSLTEEPEFEIPVAKLMAQRYKEGFTLVPLEKIVSLPYDPFFHSRRKTTNINGIGSDSVPRVFSDLSRIDNIRPEDLAPLGYLYSEEQDKWHLSEQAVDYLYVGNNKIEFELPGTLSIIQNSKIWKENDQSYPVFNLDNYRTTSKRSNQMNFLFIDDKTITDELKLILKADKTIVLILRNSDEHSVMLHRKFIIDMFDLGITAPVILNRSYNDISNLDFQIKSSIDIGSLYIDGLGDGVWVDFGSEYGIVNQTVFGILQASRMRISKTEYISCPSCGRTLFDLQETTSKIREVTNHLKGVKIGIMGCIVNGPGEMADADYGYVGTGNGYISLYKGQEVVKRNIPTDGAVEALIGLIKEHGDWIDPVSV

SEQ ID NO: 91671 - protein, 319 aa, Unknown
  Bacterial polypetide isolated from the Sargasso Sea
MIKRRETYNVDVGGVIIGSSHPIRIQSMTNTQTEDSLKTASQIKELYDSGSELVRITVNNEDSAKSVIKIKDLLVKSNYNLPLIGDFHYNGHTLLACYPEAASILDKYRINPGNVGSSDNKNFTEIINIAKKYDKAVRIGGNWGSLSRSYLEKTIVDGKKSDMYEDIIKDALIDSVLKSAELAEELGLASNKIILSCKVSSVTQLVEVYTKIAKKCRYPLHLGLTEAGMGDEAIVSSVAALSILINQGIGDTIRVSLTPDKMGARTQEVDVCKNILASLGLKQYKPKVVSCPGCGRTSSNYFIELTKDINNHIENNMIT

SEQ ID NO: 91672 - protein, 126 aa, Unknown
  Bacterial polypetide isolated from the Sargasso Sea
MSNWIKRKKTKVVKVGNVPVGGNNPISIQSMTNTDTCDEVSTINQIKDLEAAGADIVRVSVPGFEEAKAFKKIKNAVNIPLVADIHFDYKIALEVADSADCLRINPGNIGKEDRVKEVISAAIDND

SEQ ID NO: 91673 - protein, 243 aa, Unknown
  Bacterial polypetide isolated from the Sargasso Sea
KDNECSIRIGVNGGSLEKKILEKYSEPNPDALIESAMNNVKILEDLDFYNFKISVKASDIFLAIKSYEGLSELCDYPLHLGITEAGGRRSGSVKSSMGIGQLLLKGIGDTLRVSLSDEPEEEVRVGYEILKGLGIRNRGVKIISCPSCARQQFPVIETVKKLESSLEDINVPITVSIIGCVVNGPGEATMTQVGITGGGNGTHMIYINGKKDHRINNEELPSYLESIIRKKADEIMNIKKSQL

SEQ ID NO: 91674 - protein, 364 aa, Unknown
  Bacterial polypetide isolated from the Sargasso Sea
ISRRKTRKIMVGNVAVGGDAPISVQSMTNTETTDVKATVEQIHRLEKAGVDIVRVSVPTMDAADAFKSIRAQIKTPLVADIHFDYRIALKVLKYGADCLRINPGNIGSVERVKAIVDSAKDKSIPLRIGVNAGSLGKSLLRKYKEPCAEAMIESALTQIDTLDKLDFHEFKVSLKASEIFMTLQACRELSRQVDQPFHLGITEAGGQRSGTVKSSIGLGSLLMEGIGDTIRVSLASDPVEEVKVGSDLLKALGLRHRGVNLVACPSCSRQNFDVISVVNELETRLEDIIEPIDVAIIGCIVNGPGEAKGAEIGLTGASPKNLVYVDGIPDHKVSNANLVDELEAMVRKRIESKQSQSKDIIATD

SEQ ID NO: 91675 - protein, 220 aa, Unknown
  Bacterial polypetide isolated from the Sargasso Sea
MHIYCPSLTRYQRFKTRSVMVGEVGVGGDNPIRVQSMTTTDTMDTEATIAQSIRMIEAGCEIVRITAPSIKEAKNLRPILNGIRAKGYKTPLVADIHFTPNAAEIAATIVEKVRINPGNYADRKKFETHEYSDKSYAEELERIRERFIPLVKTCKENGTAMRIGTNHGSLSDRILSRYGDTPLGMVESGMEFIRIAESEGYHDMILSMKASNTQVVVHGL

SEQ ID NO: 91676 - protein, 365 aa, Unknown
  Bacterial polypetide isolated from the Sargasso Sea
MKEQTIQRKKTKQIWVGDVPVGGGAPISVQSMTNTETTDIKSTVKQIQELEDAGADIVRVSVPTMEAAEAFKEIKKASNIPLVSDIHFDYKIALKVLDYGVDCVRINPGNIGSEKKIKEVIASAKDKSIPIRVGVNAGSLEKDLQMKYGEPNADALVESAMRHVEILLKNNYENFKLSIKSSDIFMAVESYEKISDLIEQPLHLGITESGSLKTGTVKSSIGLGQLLMQGIGDTIRVSLASDPIDEVKVAWEMLKSLKIRSRGVKIVACPSCSRQNFQVIDTVNKLENELSELKEEVTLAVIGCYVNGPGESKVADVGVTGATPKHLIYLNGKPAYKVETKDLEKALIKEVVEIAEKKRNTIVKQ

SEQ ID NO: 91677 - protein, 220 aa, Unknown
  Bacterial polypetide isolated from the Sargasso Sea
MNIRPFREIKRRKTKEINVGNIKVGGDNPISVQSMTNTLTKDVKETVNQIKQIEEAGADIVRVSCPDQDSTKALKDIIKNTSIPIVADIHFHYKRAIEAAESGAACLRINPGNIGDKKKIKEVISAAKNNNCSIRIGVNAGSLEKDLLEKYKEPCPEALVESALRNINIVEDFDFYEFKVSVKSSDVFLSIEAYRQLSKVTNYPLHLGITEAGTFLPGSK

SEQ ID NO: 91678 - protein, 164 aa, Unknown
  Bacterial polypetide isolated from the Sargasso Sea
KKTDYPLHLGITEAGSYLPGSIKTSIGFGSLLLDGIGDTIRVSLSDDPIEEVNVGNEILKSLNLRNRGVKIISCPSCARQAFQVIDTVKQLEKRLSHIKKPITLSIIGCVVNGPGEAKQTEIGITGGGKDNHMLYLNGLETEKVMTKDMINKIVTLVEEKASNL

SEQ ID NO: 91679 - protein, 387 aa, Unknown
  Bacterial polypetide isolated from the Sargasso Sea
MPLRRHSKTVSIGSIKIGGNEPIRIQSMLTCDTSDVDSCVEEITRLDAVDCEIIRLTVPNQKSVDSVPLIREEMRNRGIERPIVADVHFNPNLAVNVCEFVDKVRINPGNYADRKKFEVREYTETQYQEELDRIEQKLIPLIKNMKKYGNSLRVGTNHGSLSDRLMNRYGDTPEGMVESAMEFLRILRKHDFEETVLSMKSSNPLVMIDSYRQLVKKMDKEDMHYPLHLGVTEAGNELDGRIKSAIGIGTLLCEGLGDTIRVSLTEPSENEIPVAKSILQSTRSRIYNTDFISCPSCGRTFFDLASTTDKIKSRTSHLKGVKIAIMGCVVNGPGEMADADFGYVGSGVDKINLFHGKKCVSRNIPADLAVDRLIELIQKSGMWSDPP

SEQ ID NO: 91680 - protein, 366 aa, Unknown
  Bacterial polypetide isolated from the Sargasso Sea
MSIRPFRDINRKKTKSVRVGNVIIGDDQPVSVQSMTNTLTTDVKATLKQINDIINEGGDLVRVSVPDKDSSDALKEITKHSSVPIIADVHYHYKRAIESAENGAKCLRINPGNIGDVKKIREIISAAKNNDCAIRIGVNAGSLEKDILEKYKEPCPEALVESALRNIKIIEDEDFFNFKVSVKSSDVFLSVAAYRQLSKVTNYPLHLGITESGSFLPGSIKSSIGMGTLLLEGIGDTIRVSLSDDPVKEVTIGNEILKSLNLRNRGVRIISCPSCARQGFEVINTVKLLEQKLSHIKTPITLSIIGCVVNGPGEAALTDIGITGGGKDSSMLYIKGLQTEKISNNEIISKVIQLVEKKSEEIEKNK

SEQ ID NO: 91681 - protein, 178 aa, Unknown
  Bacterial polypetide isolated from the Sargasso Sea
MNKRRQTSQIYVGNVGVGSDFPVSVQSMTTTKTRDTDETLEQIYELANNGADIVRVTCNEIEAAESLVKICARSPVPIVADIHFQYKLALAAVEAGVHGLRLNPGNIRNEKQIKEVAKECLNANIPIRIGVNAGSLDKEILEKYGDAVPEALVESALLEARYLEDVEFHNIKISVKHS

SEQ ID NO: 91682 - protein, 174 aa, Unknown
  Bacterial polypetide isolated from the Sargasso Sea
EAYRQLSKVCDYPLHLGITEAGTFLPGSIKSSIGFGSLLLSGIGDTIRVSLSDDPVEEIKVGNEILKSLNLRNRGVKIISCPSCARQAFDVIETVKKLEQNLSHIKTPISLSIIGCVVNGPGEAAQTDIGITGGGKGNNMLYLNGIESNKISSNEMISKVVKLVEEKAKEIENA

SEQ ID NO: 91683 - protein, 290 aa, Unknown
  Bacterial polypetide isolated from the Sargasso Sea
MSIRPYRDIKRRKTKVVNVGNVKIGGDNPISVQSMTNTLTTDVKATINQINDIAEEGADIVRVSCPDVESTAALKEILKHVSIPVVADIHFHYKRAIEAAENGANCLRINPGNIGNEKNIYEVLSAAKNNGCSVRIGVNAGSLEKDILEKFKEPCPEALVESALRNINILEDKDFFNFKISVKSSDVFLSIEAYRQLSKATDYPLHLGITEAGSFVTGSIKSSIGIGSLLMDGIGDTIRISLSDDPTKEIKIGNEILKSLNLRERGVKIISCPSCARQAFQVIDTVKILE

SEQ ID NO: 91684 - protein, 354 aa, Unknown
  Bacterial polypetide isolated from the Sargasso Sea
VSVGFLVGGDNPISIQSMTNTNTCDVVSTVNQIKDLEDAGADIVRVSVPGFEEAKAFKEIKKLSKIPLVADIHFDYKIALEVADTADCLRINPGNIGKEDRVKEVISAAINNNVPIRVGVNAGSLEKDLQKKYGEPNADALVESALRHVEILDKFNFDNYKMSLKASNIEMTVDAYRKISNLIDQPLHLGITEAGSYRAGTVKSSIGVGMLLSEGIGDTIRISLASDPVDEIKIGWDILKSLNIRSRGVKIIACPSCSRQNFNVIKVVNELEQRLEDVSDDIEVAIIGCYVNGPGESKAANIGLTGASPNNLLYVDGSPNKKISNNNLVDELEEQVRDKILKNKNESEKIILRS

SEQ ID NO: 91685 - protein, 192 aa, Unknown
  Bacterial polypetide isolated from the Sargasso Sea
MSIRPFRDIKRKLTKEISVGNVKIGGNNPISVQSMTNTLTKDIKKTVNQINQIAEVGADLVRVSCPDENSTKALKEIVKHVSVPIIADIHFHYKRAIEAADNGASCLRINPGNIGNENKIKEVINAAKNNNCSIRIGVNAGSLERDILEKYKEPCPEALVESAIRNIGIIENEDFYNLKVSVKSSDVFLSIA

SEQ ID NO: 91686 - protein, 371 aa, Unknown
  Bacterial polypetide isolated from the Sargasso Sea
MYNETPIKRRPSTRIYVGNVPIGDGAPIAVQSMTNTKTTDVEATIAQIRALEKVGADIVRVSVPTMDAAEAFKVIKQSVSVPLVADIHFDYRIALKVAEYGVDCLRINPGNIGNEERIRSVVECARDKNIPIRIGVNGGSLEKDLMDKYKEPTPEALLESAMRHVDILDRLNFDQFKVSVKASDVFLAVESYRLLAKQIRQPLHLGITEAGGARAGAVKSAVGLGMLLAEGIGDTLRISLAADPVEEIKVGFDILKSLRIRSRGINFIACPSCSRQEFDVISTVNELERRLEDVTTAMDVSIIGCVVNGPGEALVSHIGLTGGHRKSGYYDEGERQKERFDNDNLVDSLEAKIRAKASQMANRIQVKDTTE

SEQ ID NO: 91687 - protein, 365 aa, Unknown
  Bacterial polypetide isolated from the Sargasso Sea
MSIRPFRDIKRRKTKVITVGDVKIGGDNPISVQSMTNTLTTDVKATIKQINEIHSEGADLVRVSCPDESSSKALKEIIRHIDIPLIADIHFHYKRAIEAAENGASCLRINPGNIGSKKKIKEVIKSAKDNNCSIRIGVNSGSLEKDILEKFKEPCPEALVESAIRNIKILEDEDFFNLKVSVKSSDVFLSIEAYRQLSKVTDYPLHLGITEAGSFISGSIKSSIGLGALLLNGIGDTIRISLSDNPVQEVKIGNEILKSLNLRNRGVRIISCPSCARQGFQVIETVKILEDKLAHIKTPITLSIIGCVVNGPGEAAMTDVGITGGKKGNNMLYLSGIQTGKVFTDDMINRVVNEVEKKASELENN

SEQ ID NO: 91688 - protein, 330 aa, Unknown
  Bacterial polypetide isolated from the Sargasso Sea
MTTTKTHDIKATLKEVERLEEAGCQIIRITVPDQPAADALYEIKKKMNVPLVADIHFNYRMALEAVDAGADKIRINPGNIGGKKKVKEVLDKVAGAGLPIRIGVNAGSLEKDLIEKYGFPTPEAMVESAKRHIDICQEHNFNDIIVSLKASDVNLMMSSYELFSKKYDYPLHLGVTEAGPTKSGTIKSSVGMGALLAKGIGDTIRVSLTDDPVEEVHVGFEILKSLGLASKGVTIVACPTCGRLEVDLFKIAGEMEEKLKDVKTPMTVALMGCAVNGPGEASHTDLGIAFGKGAGHLYYQGENRGKISEDQAMNKLEEMISEFETSKQEE

SEQ ID NO: 91689 - protein, 145 aa, Unknown
  Bacterial polypetide isolated from the Sargasso Sea
MNNPYGIDIKRNKTRKIYVGDIPVGGDAPISVQSMTNTDTRDIKSTIKQVLDLEDAGADIVRISCPDEESSKALKEIVDQTNVPIVADIHFHYKRAIEAAESGASCLRINPGNIGSIDRVKEVVKAAKDNDCSIRIGVNGGSLEK

SEQ ID NO: 91690 - protein, 286 aa, Unknown
  Bacterial polypetide isolated from the Sargasso Sea
NRKDDNFKTFIDIAKDLDKPVRIGVNAGSLDQELLDLKMEENNKLKIPKSAEEVESDALISSAIISYQKAIDYGLSKNNIIISCKVSRLNQMVHCYREISKQCSAPLHLGLTEAGLGMKSIVATTAALSILIEEGIGDTIRSSLTPEVGALRSREVELCQEILQSLGIRTYKPQVTACPGCGRTTSTYFRELASEIKDHLDLKNKQWKKDFPGSEELKVAVMGCVVNGPGESKAANIGVSLPGSGESPVAPVFVDGEKVKILKGENISNEFIQMVESYVEKKWGNK

SEQ ID NO: 91691 - protein, 366 aa, Unknown
  Bacterial polypetide isolated from the Sargasso Sea
MNIRPFREIKRKKTKEINVGNVRVGGDNPISVQSMTNTLTKDIKETVNQIKQIEEAGADIVRVSCPDQDSTKALRDITKNTSIPIVADIHFHYKRAIEAAESGAACLRINPGNIGDKKKIREVISAAKNNNCSIRIGVNAGSLEKDLLEKYKEPCPEALVESALRNISIVEDFDFYEFKVSVKSSDVFLSIEAYRQLSKVTDYPLHLGITEAGTFLPGSIKSSIGFGSLLMSGIGDTVRVSLSDDPVEEIKVGNEILKSLNLRNRGVKIISCPSCARQAFNVIKTVKKLEDRLSHIKTPISLSIIGCVVNGPGEAAQTDIGITGGGKGNNMLYLNGIESEKITSDEMISKVVRLVEEKAEEIEKAK

SEQ ID NO: 91692 - protein, 378 aa, Unknown
  Bacterial polypetide isolated from the Sargasso Sea
MCCLQGIVVISEQQIVRKETRKIYVGDVPVGGDSPISVQSMTNTLTADSVSTIKQIQQLHDAGADIVRVSVPDQEAADSFHVIKSKSPVPLVADIHFDYTMALEAIKGGADCIRINPGNIGKEEKIKEVISAAKDTNTPIRVGINAGSLERKLQIKYGEPNSDALVESALNHINILKRLNFEDFKLSIKASDVQMTVESYRKISELIDQPLHLGITEAGGFRSGTVKSAMGLGSLLMDGIGDTIRISLASDPVDEIKVGWDILRGLKIRSRGINFIACPSCSRMNFDVIGTMNQLESRLEDIKENIDVAVIGCYVNGPGESKHTDIGVTGGSPKNLIYIDGKPDHKVESVDLADHLEKMIREKVKEKSKIEENLIAKT

SEQ ID NO: 91693 - protein, 358 aa, Unknown
  Bacterial polypetide isolated from the Sargasso Sea
MEIRPHRLIKRKKTKKIKVGNVYVGGDSAISVQSMTNTLTTDYVATIKQINELEQAGADIVRVSCPDEESTKALKKITKEAKVPIVADIHFHYKRAIESAVSGAKCLRINPGNIGSKERIKEVVKAAKDYDCAIRIGVNAGSLDKNILEKFKEPCPEALIESAEQNIKLLEDNDFFNFKISVKSSDVFLAVKAYEGLSKLYDYPLHLGITEAGGLITGSIKSSIGIGKLLMQGIGDTIRVSLSANPVEEVKAGYEILKSLGIRSRGVQIISCPSCARQAFPVIDTVKILEDKLSHIKKPLTLSIIGCVVNGPGEASQTDIGLTGGGEGNNLFYLSGIPHNKVANKDIIEKSSRASLSQ

SEQ ID NO: 91694 - protein, 274 aa, Unknown
  Bacterial polypetide isolated from the Sargasso Sea
HFHHKRAIEAAKIGVHCLRINPGNIGSKERVKDIIKAAKDNNCSIRIGVNAGSLDKSLLEKYKEPCPEALVESASDSIKLFEDNDFFNFKISVKSSDIFLTVKAYRLLSKICDYPLHLGVTEAGGLFTGSIKSSIGIGQLLMEGIGDTIRVSLSSDPVDEVKAGFEILKSLGIRSRGVNIISCPSCARQAFPVIETVKILEKKLSHIKKPISLSIIGCVVNGPGEAAQTEIGLTGGGQDNNLLYLSGVPHTKVASSEIIDKIVELVENKAKDLN

SEQ ID NO: 91695 - protein, 363 aa, Unknown
  Bacterial polypetide isolated from the Sargasso Sea
MLRPYQIIDRRKTRVINVGNVLIGGDNPISVQTMTNTITSDTKKTLDQINTVVEAGADLVRVSVPDKESTNALKVICKNSKVPIIADIHFHYKRALEAADNGAACLRINPGNIGSLEKVKEVIKAAKDNDCSIRIGVNAGSLEKQILEKFSEPNPEALVESALLNMKILEDNDFLNFKLSVKASDVFMAIKAYKKLASICDYPLHLGITEAGGQRSGSIKSSIGIGNLLLNGIGDTIRVSLADKPEEEVRVGFEILKSLGIRNRGIKIIACPSCARQQFPVIETVKKLEESLQDITKPITVSIIGCVVNGPGEAKMTNIGITGGGNDTHMLYIDGKKDRRIKNVDLTSYLEKVIRDKSQNFKH

SEQ ID NO: 91696 - protein, 336 aa, Unknown
  Bacterial polypetide isolated from the Sargasso Sea
AVQTMTNTLTSNAKDTIAQIERSAKLGVDLVRVSVPDKESSFSLKEIVKHSPVPIIADIHFHYKRGIEAANNGASCIRINPGNIGNIERIKEVIKAAKDNNCSIRVGVNAGSLEKQILEKFSEPNPEALVESAKLNIKILEDNDFTNFKISVKSSDIFMSIKAYEQLADLCDYPLHLGITEAGGKRTGSIKSSIGVGNLLLRGIGDTIRISLSDEPEEEVRVGFEILKSLGLRNRGVKIISCPSCARQQFEVIKTVKNLEKKLDDISTPITVSIIGCVVNGPGEATMTNIGITGGGNDTHMIYLDGKKNNVVKNVDLESYLEDLIRKKTKEIEMSN

SEQ ID NO: 91697 - protein, 357 aa, Unknown
  Bacterial polypetide isolated from the Sargasso Sea
MIKRRKTREVKIGDLIIGGEHAITVQSMTTTKTDDITGTLKEVERLEEAGCHIIRITVPDKAAAKALYEIKKRMNVPLVADIHFDYRMALEAVDAGADKIRINPGNIGGKARVKEVLNKVKGANLPIRIGVNAGSLEKDLIEKYSFPTAEAMVESAQRHIDICREHGFEDIIVSLKASDVNLMIGAYSLFSQKYDYPLHLGVTEAGPAKSGTVKSAVGLGNLLANGIGDTIRVSLTDDPVEEVHVGFEILKSLGLASKGVTIVSCPTCGRLEVDLFKIAGEVEEELKDVKTPMTLALMGCAVNGPGEATHTDLGIAFGKGAGHLYYKGEKRGKVKEDQALDELKAMISEFEEEKKED

SEQ ID NO: 91698 - protein, 365 aa, Unknown
  Bacterial polypetide isolated from the Sargasso Sea
MKEHTIQRKKTKKIWVGDVPVGGDAPISVQSMTNTETTDVKATIKQIIDLEDAGADIVRVSVPTMEAAEAFKEIKKATNIPLVSDIHFDYKIALKVLEYDVDCVRINPGNIGSEKKIKEVIASAKEKDIPIRVGVNAGSLEKDLQMKYGEPNADALVESAMRHVEILLKNNYENFKLSIKSSDIFMAVESYEKISDLIEQPLHLGITESGSLKTGTVKSSIGLGRLLMQGIGDTIRVSLASDPVDEVKVAWEMLKSLKIRSRGVKIVACPSCSRQNFQVIDTVNKLENELSELKEEVTLAVIGCYVNGPGESKVADVGVTGAAPKHLIYLNGKPAYKVETKDLEKALIKEVVEIAEKKRNTIVKQ

SEQ ID NO: 91699 - protein, 180 aa, Unknown
  Bacterial polypetide isolated from the Sargasso Sea
MSVRPFRDIKRRKTKVINVGKVKIGGENPISVQSMTNTLTTDVKATIKQINDITEEGADIVRVSCPDESSTLALKEIVKHVSIPVVADIHFHYKRAIEAAENGASCLRINPGNIGDTSKIHEVLKAAKNNNCSIRVGVNAGSLEKDILEKFKEPCPEALVESAQRNIKILEDKDFFNFKN

SEQ ID NO: 91700 - protein, 233 aa, Unknown
  Bacterial polypetide isolated from the Sargasso Sea
IRIGVNAGSLEKDILEKYKEPCPEALVESAQRNIKILEDQNFFNFKISVKSSDVFLSIAAYRQLSKVCDYPLHLGITEAGSFIPGSIKSSIGLGTLLLDGIGDTIRISLSDDPIKEVKIGNEILKSLNLKNRGVKIISCPTCARQAFQVIDVVKVLEEKLSHIKTPITLSVIGCVVNGPGEAAQTDIGITGGGKGSNMLYLNGLQSQKISNDDIISKVVELVEKKALEIENKK

SEQ ID NO: 91701 - protein, 363 aa, Unknown
  Bacterial polypetide isolated from the Sargasso Sea
MSQYSQNKIIRRRTKKIEVGSVEVGGDAKISVQSMTNTLTSDVNATLQQINDLVSEGADIVRVSCPDQESTESLKEIVNYVDVPIVADIHFHYKRAIEAADAGAACLRINPGNIGVDKIIEVIDAAKQNNICMRIGVNAGSIDEKILKKYSKPCADALVESAIENIRLLEDNNFDNFKISVKASDVFTTIEAYEKLAKLCDYPFHVGLTEAGTYLSGSIKSSISIGNLLSQGIGDTIRVSLTADPVEEIKVGHEILKSLNLASRGIKIISCPSCARQAFPVIDTVRELERRLSHIKDPITLSIIGCVVNGPGEALNSDIGVTGGGKGNNMIYLSGVADHKIKNPEIVDHVVNLVEKKIQSLHD

SEQ ID NO: 91702 - protein, 179 aa, Unknown
  Bacterial polypetide isolated from the Sargasso Sea
SDVFLSNSCIPSYWSEKTDYPLHLGITEAGSFLPGSIKSSIGFGSLLLDGIGDTIRVSLSDDPVKEIKVGNEILKSLNLRNRGVKIISCPSCARQAFQVIETVKQLEERLSHITKPITLSIIGCVVNGPGEAKQTEIGITGGGKDNHMLYLNGLEVEKVMTKDMINKIVTLVEEKASNL

SEQ ID NO: 91703 - protein, 365 aa, Unknown; identical to SEQ ID NO: 91698
  Bacterial polypetide isolated from the Sargasso Sea

SEQ ID NO: 91704 - protein, 348 aa, Unknown
  Bacterial polypetide isolated from the Sargasso Sea
MFSESPIKRRKSTRINVGNVPIGDGAPIAVQSMTNTDTMDVDATVAQIQAIQDAGADIVRVSVPTMDAAEAFKSIKEQVSIPLVADIHFDYRIALKVAKYGVDCLRINPGNIGSEERIRAVVDSAREHNIPIRIGVNGGSLERDLQEKYGEPTPEALLESAMRHVDILRRLDFDQFKISVKASDVFLAVGAYRLLAKEIDQPLHLGITEAGGMRSGSVKSAVGLGMLLAEGIGDTLRVSLAADPVQEIKVGFDILKSLRIRSRGINFIACPSCSRQEFDVVSTMNQLEERLEDIIEPVSVSVIGCVVNGPGEALVSDIGLAGANRRSGLYINGERQKARIDNNNIVSN

SEQ ID NO: 91705 - protein, 98 aa, Unknown
  Bacterial polypetide isolated from the Sargasso Sea
MSDWIRRKPTNLVTLGNVKVGDFNPISVQSMTNTNTEDIDSTINQINNLAIAGADIVRVSVPTETAAEAFKKIKKVVSVPLVADIHFDYKLALAVADS

SEQ ID NO: 91706 - protein, 122 aa, Unknown
  Bacterial polypetide isolated from the Sargasso Sea
MTNWIKRKKTQVVNVGGVLVGGDNPISIQSMTNTDTCDVVSTVNQIKDLEDAGADIVRVSVPGFEEAKAFKEIKKLSKIPLVADIHFDYKIALEVADTADCLRINPGNIGKEDRVKEVISAA

SEQ ID NO: 91707 - protein, 300 aa, Unknown
  Bacterial polypetide isolated from the Sargasso Sea
MRRQTLSVKIGKVFIGSEHSIKTQSMTTASTMDTNQSVDEAIRIIKAGGKLVRFTAPNINEAKNLLNIKNALVEKGYDHPLVADIHFTPNAALEASKIVEKVRINPGNYVDKKKFEVKEYDDASYQDELLKIEEKFIPLINSCKQNDVAMRIGTNHGSLSDRIMNRFGDTPLGMVESAMEFLRICKQNDYDQIVLSMKSSNPIVMIHAYRLLVKSMEDENMHYPLHLGVTEAGDGLDGRIKSALGIGTLLTEGIGDTIRVSLTEDPEFEIPAAEKILEKIDSFSKKVRLKNNNKRAFSFF

SEQ ID NO: 91708 - protein, 202 aa, Unknown
  Bacterial polypetide isolated from the Sargasso Sea
MNIRPFREIKRRKTKEIKVGNVKVGGDNPISVQSMTNTLTKDVKETVNQIKQIEEAGADIVRVSCPDQDSTKALRNIIKNISIPIVADIHFHYKRAIEAAESGVACLRINPGNIGDKKKIKEVISAAKNNNCSIRIGVNAGSLEKDLLEKYKEPCPEALVESALRNISIVEDFDFYEFKVSVKSSDVFLSIEAYKQLSKATN

SEQ ID NO: 91709 - protein, 278 aa, Unknown
  Bacterial polypetide isolated from the Sargasso Sea
MSVRPFRDIKRRKTKVINVGDVKIGGDNPISVQSMTNTLTTDVKATINQINDIAEEGADIVRVSCPDTESTKALKEIVKHVSIPVVADIHFHYKRAIEAAENGAKCLRINPGNIGEESKIHDVLSAAKNNGCSVRIGVNAGSLEKDILDKFKEPCPEALVESALRNIKILEDKDFFNFKISVKSSDVFLSIGAYRQLSKVCDYPLHLGITEAGSFVSGSIKSSIGLGSLLMDGIGDTIRISLSDNPTKEVTIGNEILKSLNLRNRGVKIISCPSCARQ

SEQ ID NO: 91710 - protein, 369 aa, Unknown
  Bacterial polypetide isolated from the Sargasso Sea
MNFLKIKRRNSLKIKVGNVEIGGDAPISVQSMTNTKTEDVQATLDQVKQLEDAGADLVRISVPNEEAATAFKFIKKDSNVPLIADIHFDYKMGILAAKNGADCLRINPGNIGNIDRVKEVVKCAEDKDIPIRVGVNAGSLEKKLQKKYGEPTPEALVESAMNHVDILESLNFQNFKLSIKASDVGMMVESYRIIAEMIKQPLHLGLTEAGGFRSGTVKSSIAMGALLMDGIGDTIRVSLASDPVDEIKVGFDLLKSLKLRSKGINFIACPSCSRQNFNVIETMNQLEARLEDVRENIDVAVIGCYVNGPGESKAAHVGITGADPNNLIYIDGEPDHKIGNENLVEHLEKQIRDKVKSIEIENKKIIAKG

SEQ ID NO: 91711 - protein, 396 aa, Unknown
  Bacterial polypetide isolated from the Sargasso Sea
MFETVKRRQSVPVDVGGVTVGGGVPIVVQSMTNTDTADVESTAKQVADLARAGSEIVRITVDRDEAAKAVPHIRDRLMLMGVEVPLVGDFHYIGHKLLTENPACAEALAKYRINPGNVGFREKRDTQFSTMIEVANKFEKPVRIGVNWGSLDQELLTRLMDENTASDNPKDAAQVTRDAMVMSGLLSAERAEELGMPRNRIIISAKVSAVQDLIAVYRDLAARCDYTLHLGLTEAGMGTKGVVASSAGMGILLQDGIGDTIRISLTPEPGGDRTREVTVAQELLQVLGLRSFVPLVTACPGCGRTTSTVFQELAQKIQAHIRERMPGWREQYPGVEELNVAVMGCIVNGPGESKHADIGISLPGTGEEPAAPVFIDGEKKMTLRGPGIADDFRVLV

SEQ ID NO: 91712 - protein, 371 aa, Unknown
  Bacterial polypetide isolated from the Sargasso Sea
MYNETPIKRRPSTRIYVGNVPIGDGAPIAVQSMTNTKTTDVEATVAQIRALEKVGADIVRVSVPTMDAAEAFKVIKQSVSVPLVADIHFDYRIALKVAEYGVDCLRINPGNIGNEERIRSVVECARDKNIPIRIGVNGGSLEKDLMDKYKEPTPEALLESAMRHVDILDRLNFDQFKVSVKASDVFLAVESYRLLAKQIRQPLHLGITEAGGARAGAVKSAVGLGMLLAEGIGDTLRISLAADPVEEIKVGFDILKSLRIRSRGINFIACPSCSRQEFDVISTVNELERRLEDVTTAMDVSIIGCVVNGPGEALVSHIGLTGGHRKSGYYDEGERQKERFDNDNLVDSLEAKIRAKASQMANRIQVKDTTE

SEQ ID NO: 91713 - protein, 166 aa, Unknown
  Bacterial polypetide isolated from the Sargasso Sea
MKEKAIVRKKTKKIWVGDVPIGGDAPITIQSMTNTHTQDINATTTQINALADAGADIVRVSVPDMASAEAFQKIKQNVNLPLVADIHFDHKIALKVIENGADCVRINPGNIGSEQKIKEVIFSAKDKKIPIRIGVNAGSLEKDLHKIWRANSDALVESALRHVDIL

SEQ ID NO: 91714 - protein, 185 aa, Unknown
  Bacterial polypetide isolated from the Sargasso Sea
MTNWIKRKKTKVVNVGGVPVGGDNPISIQSMTNTNTCDVVSTVNQIKDLEDAGADIVRVSVPGFEEAKAFKEIKKLSKIPLVADIHFDYKIALEVADVADCLRINPGNIGKEDRVKEVISAAIDNNVPIRVGVNAGSLEKDLQKKYGEPNADALVESALRHVEILDKFNFDDYKMSLKASNIEMT

SEQ ID NO: 91715 - protein, 266 aa, Unknown
  Bacterial polypetide isolated from the Sargasso Sea
MSIRPFRDIKRRKTKVINVGDVKVGGDNPISVQSMTNTLTTDIKATINQINAITAEGADIVRVSCPDEKSTIALKEITKHVSVPIVADIHFHYKRAIEAAENGAKCLRINPGNIGDKLKVHEILSAAKNNNCSIRIGVNAGSLEKDILEKYKEPCPEALVESALRNIKILEDQNFFNFKISVKSSDVFLSIAAYRQLSKVCDYPLHLGITEAGSFVSGSIKSSIGLGSLLMEGIGDTIRVSLSDDPTKEIKIGNEILKSLNLRSRG

SEQ ID NO: 91716 - protein, 209 aa, Unknown
  Bacterial polypetide isolated from the Sargasso Sea
LRPSAMVESALFHENILRDLDFNNFKISVKTSNVLLTVESYKELSKVTDAPLHLGITEAGGLMDGTIKSSIGIGQLLAQGIGDTLRVSLSADPVEEIKVGFSILKSLGLRHRGVNIISCPSCARQGFDVIGTVKKLEERLSSISEPFTISVIGCVVNGPGEATMSDVGFTGGGNDSGMLYVDGKQLAKRNNDELIDSIVSEVEKKIKQK

SEQ ID NO: 91717 - protein, 365 aa, Unknown
  Bacterial polypetide isolated from the Sargasso Sea
MSIRPFRDIKRKKTKKIKVGKVEVGGDAPISVQSMTNTLTTNVDATIKQINDLDKAGADIVRVSCPDKDSSLALKKILKHVNVPIVADIHFHYKLAIEAANSGAHCLRINPGNIGSKKKVQEILKAAKDNNCSIRIGVNAGSIERSLLEKYKEPCPEALVESAVNNIKILEDEDFFNFKISVKSSDVFLSTKAYRSISKICNYPLHLGITEAGSLKSGSIKSSIGIGMLLMEGIGDTIRVSLSADPVEEVKIGYEILKSLNLRHKGVNIISCPSCARQGFPVIDTVKILEEKLSHIKEPITLSIIGCVVNGPGEAGQTQIGLTGGGKGEHMVYISGLPHHKVASDKIIDDVISLVEKKSKEIRNT

SEQ ID NO: 91718 - protein, 405 aa, Unknown
  Bacterial polypetide isolated from the Sargasso Sea
MFNRRKTSQIQVGKVGIGSNFPISVQSMTTTKTRDVDGTLAQIYEIASNGADIVRVTCNEVEAAEGLVEITQRSPVPIIADIHFQYKLALAAVDAGVDGLRLNPGNIRKESQIKEVAKAALSANIPIRIGVNGGSLDKDLLEKYGDATPEALVESAMTELKYLEDVDFFNIKISVKHSNVPLMIESYRLLAEKVEYPLHLGVTEAGPLPGGLIKSTAGISTLLNEGIGDTIRYSLTADPIEEAKSGRQLLEYLGLRERNSLDLIACPSCGRAEVDVIKVAEEAQEALNKEDIPLQVAVMGCVVNGPGEARSADIGIAAGKNKGHLFIRGEVVRVVNEKDMVTSLLDEARLIVEEGIESRLAAADDNAAELAQKDVEDLLNSQGDINNFTERKKSVVEITSKQDND

SEQ ID NO: 91719 - protein, 363 aa, Unknown
  Bacterial polypetide isolated from the Sargasso Sea
MSQYSQNKIIRRRTKKIKVGSVEVGGDAKISVQSMTNTLTSDVNATVKQINDLVSEGADIVRVSCPDQESTKSLKEIINNVDVPIVADIHFHYKRAIEAADAGAACLRINPGNIGVDKIIEVIDAAKQNNICMRIGVNAGSIDEKILKKYSEPCADALVESAIANIRLLEDNYFDNFKISVKASDVFTTIEAYEKLAKLCDYPFHVGLTEAGTYLSGSIKSSISIGNLLSQGIGDTIRVSLTADPVEEIKVGHEILKSLNLGSRGIKIISCPSCARQAFPVIDTVRELERRLSHIKDPITLSIIGCVVNGPGEALNSDIGVTGGGKGNNMIYLSGVADHKIKNPEIVDHVVNLVEKKIQSLHD

SEQ ID NO: 91720 - protein, 322 aa, Unknown
  Bacterial polypetide isolated from the Sargasso Sea
NQINNLVAAGADIVRVSVPDKDSATAFKKIKKAVSIPLVADIHFDYMLAIEVADSADCLRINPGNIGKEKKVIEVINAAKHNGVPIRVGVNAGSLEKDLQKKYGEPNSDALVESAQRHIDILAKHDFDHYKISLKASNIEMTVDAYRKISNLIDQPLHLGITEAGSLRGGTVKSSIGVGMLLSEGIGDTIRISLASDPVDEIKVGWDILKSLNLRSRGVKIIACPSCSRQNFNVIEVVNELESRFEDISEDLEVAIIGCYVNGPGESKAVDIGLTGASPNNLLYINGLPSKKLTNEELVDEIESQVRDKINSLSSDTIIARG

SEQ ID NO: 91721 - protein, 144 aa, Unknown
  Bacterial polypetide isolated from the Sargasso Sea
SSIGLENLLLDGIGDTIRISLSDDPVEEIKVGNEILKSLNLRNRGVKIISCPSCARQGFQVIDTVKILEERLSHIKTPITLSIIGCVVNGPGEAALTDIGITGGGQNSNMLYLNGVQTQKLDNQDIISKVVELVEKKAEEIEKQ

SEQ ID NO: 91722 - protein, 300 aa, Unknown
  Bacterial polypetide isolated from the Sargasso Sea
MSLRPFRDIKRRKTKVINVGNVKIGGDNPISVQSMTNTLTTDVKATIKQINDIAEEGADIVRVSCPDEDSSKALKEIIKHVSIPVVADIHFHYKRAIEAAENGASCLRINPGNIGDETKIHEVLKAAKNNNCSIRIGVNAGSLEKDILEEFKEPCPEALVKSALRNIKILEDKDFLNFKISVKSSDVFLSIASYRQLSKVIDYPLHLGITEAGSFVSGSIKSSIGLGSLLMDGIGDTIRISLSDNPTQEVKIGNEILKSLNLRNRGVKIISCPSCARQAFQVIDTVKILEEKLAHIKTPI

SEQ ID NO: 91723 - protein, 91 aa, Unknown
  Bacterial polypetide isolated from the Sargasso Sea
MSAHESPIIRRKSRQIMVGNVPVGGDAPITVQTMTNTKTTDVAATVEQIQRIERVGADIVRVSVPTMEAAEAFKLIKQQTRIPIVADIHFD

SEQ ID NO: 91724 - protein, 378 aa, Unknown
  Bacterial polypetide isolated from the Sargasso Sea
MYCLQGIVVISKQQIVRKKTRKIYVGDVPVGGDSPISVQSMTNTLTADSDSTIRQIQQLHEAGADIVRVSVPDQEAADSFHVIKSKSPLPLVADIHFDYTMALEAIKGGADCIRINPGNIGKEEKIKEVISAAKDTNTPIRVGINAGSLERKLQIKYGEPNSDALVESALNHINILKRLNFEDFKLSIKASDVQMTIESYRKISELIDQPLHLGITEAGGFRSGTVKSAMGLGSLLMDGIGDTIRISLASDPVDEIKVGWDILKGLKIRSRGINFIACPSCSRMNFDVIGTMNQLESRLEDIKEDIDVAVIGCYVNGPGESKHTDIGVTGGSPKNLIYIDGKPDHKVESADLADYLEKIIREKVKEKSKTQENLIAKI

SEQ ID NO: 91725 - protein, 246 aa, Unknown
  Bacterial polypetide isolated from the Sargasso Sea
KNRIAEVISAAKNNVSSIRIGVNAGSLEKDILEKYKEPCPEALVESALRNIKIIEDMDFSNLKVSVKSSDVFLSIAAYKLLSNKTDYPLHLGITEAGSYLPGSIKTSIGFGSLLLDGIGDTVRVSLSDDPVEEIKVGNEILKSLNLRERGVKIISCPSCARQAFQVIETVKELEKKLSHIKKPISLSIIGCVVNGPGEAKQTEIGITGGGKDNHMLYLNGVDTEKVMTKDMINRIVSLVEEKASKL

SEQ ID NO: 91726 - protein, 367 aa, Unknown
  Bacterial polypetide isolated from the Sargasso Sea
MNNWIKRKKTKTIMVGSVPVGGDNPISIQSMTNTDTCDVVSTVKQIKDLELAGADIVRVSVPGYEEAKAFKEIKKAVNVPLVADIHFDYKIALEVADTADCLRINPGNIGKEDRVKEVINAATDNNVPIRVGVNAGSLEKDLQKKYGEPNADALVESALRHVEILDRFNFENYKMSLKASNIEMTVDAYRKVSDLIKQPLHLGITEAGSFRAGTVKSSIGVGMLLSEGIGDTIRISLASDPVDEIKVGWDILKSLNIRSRGVKIIACPSCSRQNFNVIKVVNELEQRLEDISEDIEVAIIGCYVNGPGESKAANIGLTGASPKNLLYVDGAPNKKISNDNLVNELEDQVRKKVAQSKTDSEKIILRS

SEQ ID NO: 91727 - protein, 182 aa, Unknown
  Bacterial polypetide isolated from the Sargasso Sea
SVKTSNVLLTVESYKELSKVTDAPLHLGITEAGGLMDGTIKSSIGIGQLLAQGIGDTLRVSLSADPVEEIKVGFSILKSLGLRHRGVNIISCPSCARQGFDVIGTVKKLEDRLSSISEPFTISVIGCVVNGPGEATMSDVGFTGGGNDSGMLYVDGKQLAKRNNDELIDSIVSEVEKKIKQK

SEQ ID NO: 91728 - protein, 398 aa, Unknown
  Bacterial polypetide isolated from the Sargasso Sea
MTALDRRYDTQIHRRITRTVMVGDVAIGSDHPVVVQSMINEDTLDIDAAVAGIVRLAEAGSEIVRVTTPSMAHARAMGEIRAAVRARGCTVPLVADVHHNGVKIAMEVAQHVDKVRINPGLFVFDKPDPNRQEFSDEEFAAIGARIRETFEPLVTLLRDQNKALRIGVNHGSLAERMLFTYGDTPKGMVESAMEFVRICDELDFHNIVISMKASRAPVMLAAYRLMADTMDKEGFNYPLHLGVTEAGDGDYGRVKSTAGIATLLADGLGDTIRVSLTEAPEREIPVCYSILQSLGLRKTMVEYVACPSCGRTLFNLEEVLHKVRDATSHLTGLDIAVMGCIVNGPGEMADADYGYVGKTPGVISLYRGRDEIRKVPEEEGVNALIQLIKEDGRWVEPA

SEQ ID NO: 91729 - protein, 121 aa, Unknown
  Bacterial polypetide isolated from the Sargasso Sea
MSIRPFRDIKRRVTKVINVGDVKVGGNNPISVQSMTNTLTKNVKETLNQINKISEVGGDIVRVSCPDVDSTNALKEITKHSPIPVVADIHFHFKRALEAAENGADCLRINPGNIGDKNKIA

SEQ ID NO: 91730 - protein, 429 aa, Unknown
  Bacterial polypetide isolated from the Sargasso Sea
IMQEYCNSLTKYSRWNTREVKCGDIAIGGENPIRIQSMTTTDTMDTRGTIEQSIRMIKAGCEIVRITAPSLNEARNLKDIKIGLRKKGMKTPIVADIHFTPNAALAAARIVEKVRINPGNYADRKQFKNYEYSDQSYNEELERIRGKFLPLINVCKLEGTAMRIGTNHGSLSDRILSRFGDTPIGMVESAMEFLRIAKDENYNDIVLSMKASNTQVMIQAYRLLVKHMVSEKMNYPLHLGVTEAGEAEDGRIKSSVGIGTLLEDGLGDTIRVSLTEEPEFEIPVAKTLLKRYKNRNENLEIKPIIALPYSPFFRVRRESYSVNNIGSKYVPRVISDLSKLDVIKKNDLAKIGYNYLLNEDKWKISDQAPDLIYIGGKTIDFQPPGALKVLADASCYDKKNGQFPFLSIKLYNPEIWDPDEIVFLEVNAD

SEQ ID NO: 91731 - protein, 121 aa, Unknown
  Bacterial polypetide isolated from the Sargasso Sea
VGFDILKSLRIRSRGVNFIACPSCSRQEFDVIKTMNELEQRLEDIIDPVTVSVIGCVVNGPGEALISDLGVAGANRMSGFYLKGQRQKLRIDNNTVAEQLEAQIRLYLAEQKRLIEIKQLD

SEQ ID NO: 91732 - protein, 275 aa, Unknown
  Bacterial polypetide isolated from the Sargasso Sea
RAIEAAANGAACLRINPGNIGDKKKVSEVIKAAKDYNCAIRVGVNAGSLEKDILEKYKEPCPEALVESAIRNIHILEDQDFFNLKVSVKSSDVFLSLWAYRQLSKKVNYPLHLGITEAGSFIPGSIKSSIGLGTLLLEGIGDTIRVSLSDDPVKEIKIGNEILKSLNLKNSGVKIISCPSCARQGFNVIETVKILEDKLSHIKSPITLSIIGCVVNGPGEAAQTDFGITGGGNNNHMLYINGDQIKKISSKELVEKVISLIEEKERKIKSDSQTN

SEQ ID NO: 91733 - protein, 277 aa, Unknown
  Bacterial polypetide isolated from the Sargasso Sea
DYKIALLVADSADCLRINPGNIGKENKVQEIIQAAKDNNIPIRIGVNAGSLEKDLQKKYGEPNSDALVESALRHVDILDRYNFSNFKLSLKASNIQMTVDSYRKFSKLLDQPLHLGITESGSYRAGSVKSSIGLGMLLSEGIGDTIRVSLASDPVDEVKIGWDILKSLNLRSRGIRIVACPSCSRQNFNVIEVVNELETRFEGISEDLEVAIIGCYVNGPGESKAADVGLTGGPSNLLYVNGTPSKKVSNEKLVDTIEEQVKEQLEKKNSLDIIAKG

SEQ ID NO: 91734 - protein, 202 aa, Unknown
  Bacterial polypetide isolated from the Sargasso Sea
LRNIKILEDEDFFNLKISVKSSDVFLSIEAYRQLSKVTDYPLHLGITEAGGFIAGSIKSSIGIGSLLLSGIGDTIRISLSDDPVKEVKIGNEILKSLSLRNRGVKIISCPSCARQGFEVIDTVKILEKKLSHIKTPITLSIIGCVVNGPGEAALTDIGITGGRKGNNMLYLSGVQKEKVLTEEIISRVVSEVEKKASELDKK

SEQ ID NO: 91735 - protein, 336 aa, Unknown
  Bacterial polypetide isolated from the Sargasso Sea
NTKTTDVEATVAQIQAIAKAGADLVRVSVPTMEAAEAFKLIKQQSPIPLVADIHFDYRIALKVAEYGVDCLRINPGNIGREDRIRSVVEAARDKNIPIRIGVNGGSLEADLQEKYGEPTPEALVESAMRHVDILDRLNFDQFKVSVKASDVFLAVGAYRLLAKQIKQPLHLGITEAGGARAGAVKSAIGLGMLLSEGIGDTLRISLAADPVEEVKVGFDILKSLRIRSRGINFIACPSCSRQEFDVIKTMNELEQRLEDVVDPMTVSVIGCVVNGPGEALISDLGVAGANRMSGFYLKGQRQKLRIDNNNVAEQLEAQVRLYLEEQKRLIEIKQLD

SEQ ID NO: 91736 - protein, 298 aa, Unknown
  Bacterial polypetide isolated from the Sargasso Sea
PDKESTESLKEVVNQSSVPIVADIHFHYKRAIEAAEAGAACLRVNPGNIGKEKIIEVIEAAKQNNISMRVGVNAGSIDEKILIKYKEPCSDALVESALENIKLLEDNNFENFKISVKASDVFITIESYEKLAQLCDYPFHVGLTEAGTYLSGSIKSSISIGTLLSKGIGDTIRVSLTADPVEEIKVGYEILKSLDLGSRGIKIISCPSCARQAFPVIETVKKLEQRLAHIKTPLTLSIIGCVVNGPGEALKSDIGLTGGGKGNNMIYLSGVADHKITNPEIVDHVVELVEQKVRTIND

SEQ ID NO: 91737 - protein, 223 aa, Unknown
  Bacterial polypetide isolated from the Sargasso Sea
MWRAAHTQRRVCIVGSGPAGFYSAKYLLKAVGEDDEITVVEKLPTPFGLVRSGVAPDHPEVKTVQDDFEQVAQDPRFRFCGNVEVGRDVAVDELRELFDAVVLANGAADDRALGIPGEDLSGVLGAREFVNWYNGHPEFVDLAPDLAAHEVAVVVGNGNVAVDCARILTKGVDELAQTDIAEHALEMLRESRVRHVVVLGRRGHAQAAFTIKELRELSKNGRG

SEQ ID NO: 91738 - protein, 161 aa, Unknown
  Bacterial polypetide isolated from the Sargasso Sea
MPEDEEANVIMLATGTGIAPMRTYLRRMFEAKEREANGWKFRGKAWLFMGAPKTANLLYDEDFLRYESEYPDNFRYTKAISREQQNPKGGRMYIQDRVTEYADEIFAMIEDPKTHVYMCGLRGMEPGIDEAMTAAAAAKGLDWAELRPQLKKAERWHVETY

SEQ ID NO: 91739 - protein, 309 aa, Unknown
  Bacterial polypetide isolated from the Sargasso Sea
MSSFWKIAVIGSGPAGFYAAAELFRQQSGSIKVDIFDRLPTPFGLVRGGVAPDHQKIKSVTKIYSRIAENENFRFFGNVEFGSDIFRSDLLEFYDAIIYAVGSPSDRPLGISGEELPGSHSATEFVAWYNGHPDFREHKFKLSVKDVFVIGMGNVALDVARVLAKTPNELSKTDIADYALEALFESQIEDIWLVGRRGPLQAAFTPVEAREFLEMESADVILEGGSLKLDAESQLILENDASKDTKKNIEILKQISEKGSSKKKKRVHFLFLASPLEILGKECVEKIRMVRNELFKRDDGNLRSQATGD

SEQ ID NO: 91740 - protein, 243 aa, Unknown
  Bacterial polypetide isolated from the Sargasso Sea
TGTVTENYSALKEGAIEKVQHITFDLSGGDPDFKYVEGQSCGILAAGEDAKGKPHRPRLYSIASTRYGDNFAGNTLSLCVRQLQYEKDGETINGVCSTYLCNLSPGDKVKISGPVGKEMLLPDEEDSNIIMLATGTGIAPMRAYLRRMFEPTEIEKHQWNFKGKAWLFMGAPKTANLLYDADFEHYKSKFPENLRYTKAISREQNNTKGGRMYIQDRVLEHAEEIFDMIENPKTHIYLCGLKG

SEQ ID NO: 91741 - protein, 225 aa, Unknown
  Bacterial polypetide isolated from the Sargasso Sea
LRLYSIASTRHGDDFNGNTVSLCVRQLQYEKDGETINGVCSTYLCDIKPGDKVKITGPVGKEMLLPDEEDANIVMLATGTGIAPMRAYLRRMFEATEKEKNNWNFKGKAWLFMGAPKSANLLYEEDLQRYLADYPDNFKYTKAISREEQNSKGGRMYIQDRVLESANELFNMIEEEKTHIYLCGLKGMEPGIDEAMTKAAEEKGLNWAELRPQLKKAGRWHVETY

SEQ ID NO: 91742 - protein, 247 aa, Unknown
  Bacterial polypetide isolated from the Sargasso Sea
MLKVKSIGIMPAGEDANGKPHKLRLYSIASTRHGDNFNGNTVSLCVRQLQYEKDGETINGVCSTYLCDIKPGDKVKITGPVGKEMLLPDEEDANIVMLATGTGIAPMRAYLRRMFEPTEKEKNKWNFKGKAWLFMGAPKSANLLYEEDLQRYLTDNPNNFKYTKAISREQQNTKGGRMYIQDRVLESANELFNMIEDEKTHIYLCGLKGMEPGIDEAMTKAAEEKGLNWSELRPQLKKAGRWHVETY

SEQ ID NO: 91743 - protein, 241 aa, Unknown
  Bacterial polypetide isolated from the Sargasso Sea
IGIMPAGEDANGKPHKLRLYSIASTRHGDDFNGNTVSLCVRQLQYEKDGETINGVCSTYLCDIKPGDKVKITGPVGKEMLLPDEEDANIVMLATGTGIAPMRAYLRRMFEPTEKEKNKWNFKGKAWLFMGAPKSANLLYEEDLQRYITENPDNFKYTKAISREQQNTKGGRMYIQDRVLESANELFNMIEDEKTHIYLCGLKGMEPGIDEAMTKAAEEKGLNWAELRPQLKKAGRWHVETY

SEQ ID NO: 91744 - protein, 280 aa, Unknown
  Bacterial polypetide isolated from the Sargasso Sea
PNDPVVARVHSSVPATSPRAAGIVRHVEIDVSGTPLEGAFRAGQSFGVVPPGETAKGKPHGVRLYSIASPTRGEDGAGKILSTTTKRVISEYADAEDADRHELFLGVCSNHLCDLRPGDEVLVAGPNGKGFLLPEAPEQHNYIFLATGTGIAPFRGFLKELLEGESICPSKILLMLGVPWETDLLYREELEALAQKHNNLELRWAISRENHHPDRGPYVHDRLEREWSELESRFTDPNAMVYACGLAGMQVGVFRLLAQRGLTEQFLKIRDEETAGMDPS

SEQ ID NO: 91745 - protein, 210 aa, Unknown
  Bacterial polypetide isolated from the Sargasso Sea
MRVSNAATEHCNEALFTVVARGPQVGAKPSVVQTYTVAMNQFSALFKRLGATGAKIVSVNGAGEERSAAPAVATPAPAKQPAKKTAKKAVTSSAPKKKPHADVPVNTYKPKTPFMGTVTENYSLLRDGAIGRVQHITFDLAGGDPQLKYIEGQSIGIIPEGEDANGKPHKLRLYSIASTRHGDNLEGNTVSLCVRQLEYKNDAGEQIYGV

SEQ ID NO: 91746 - protein, 239 aa, Unknown
  Bacterial polypetide isolated from the Sargasso Sea
MYSQAKVIAGGLAHIPVVIAVFYFILTTFNKRALKFVEQTKTKKPEPKAVEPKKPAVSKVENSKIEAPKTETSKVAKKKHADVPVNIYRPKTPFEGTVIENYSLLKEGAIGRVNHITFDLKDSDPFLNYVEGQSIGIMPAGEDANGKPHKLRLYSIASTRHGDDFNGNTVSLCVRQLQYEKDGETINGVCSTYLCDIKPGDKVKITGPVGKEMLLPDEEDANIVMLATGTGIAPMRAYL

SEQ ID NO: 91747 - protein, 252 aa, Unknown
  Bacterial polypetide isolated from the Sargasso Sea
ITFDLKDSDPFLNYVEGQSIGIMPAGEDANGKPHKLRLYSIASTRHGDDFNGNTVSLCVRQLQYEKDGETINGVCSTYLCDIKPGDKVKITGPVGKEMLLPDEEDANIVMLATGTGIAPMRAYLRRMFEPTEKEKNKWNFKGKAWLFMGAPKSANLLYEEDLQRYLTDNPDKFKYTKAISREQQNTKGGRMYIQDRVLESANELFNMIEDEKTHIYLCGLKGMEPGIDEAMTKAAEEKGLNWSELRPQLKKA

SEQ ID NO: 91748 - protein, 286 aa, Unknown
  Bacterial polypetide isolated from the Sargasso Sea
VETSKIEAPKTETSKVVKKKHADVPVNIYRPKTPFEGTVIENYSLLKEGAIGRVNHITFDLKDSDPFLNYVEGQSIGIMPAGEDANGKPHKLRLYSIASTRHGDDFNGNTVSLCVRQLQYEKDGETINGVCSTYLCDIKPGDKVKITGPVGKEMLLPDEEDANIVMLATGTGIAPMRAYLRRMFEPTEKEKNKWNFKGKAWLFMGAPKSANLLYEEDLQRYIADNPDNFKYTKAISREQQNSKGGRMYIQDRVLESANELFNMIEDEKTHIYLCGLKGMEPGIDEA

SEQ ID NO: 91749 - protein, 375 aa, Unknown
  Bacterial polypetide isolated from the Sargasso Sea
MYSQAKVIAGGLAHIPVVIAVFYFILTTFNKRALKFVEEAKTKKPEAKAVETKKVAVSKIEAPKTEAPKTEAPKIVKKKHADVPVNIYRPKTPYEGTVIENYSLLKEGAIGRVNHITFDLKDSDPFLNYIEGQSIGIMPAGEDANGKPHKLRLYSIASTRHGDDFNGNTVSLCVRQLQYEKDGETINGVCSTYLCDIKPGDKVKITGPVGKEMLLPDEEDANIVMLATGTGIAPMRAYLRRMFEPTEKEKNKWNFKGKAWLFMGAPKSANLLYEEDLQRYIAENPDNFKYTKAISREQQNTKGGRMYIQDRVLESANELFNMIEDEKTHIYLCGLKGMEPGIDEAMTKAAEEKGLNWSELRPQLKKAGRWHVETY

SEQ ID NO: 91750 - protein, 389 aa, Unknown
  Bacterial polypetide isolated from the Sargasso Sea
MRVPVATAGGTTSPLFTVVASGIKAGSGASVIRTYQVAMSGLNNLYKRLSASGARIISVSPASEDSPSAPVAASSAPEPQAVTTAPAPKKKPHANVPVNTYKPKTPFMGTVTENYSLVKDGGIGRVQHITFDLSGGEPQLEYIEGQSIGIIPEGNDANGKPHKLRLYSIASTRHGDNYQDNTVSLCVRQLEYKNEAGEQIYGVCSTYLCDIEPGSKVKITGPVGKEMLLPDDEDANIIMLATGTGIAPMRTYIRRMFESRERDANGWTFRGKAWLFMGAPKTGNLLYDEDFLHYEKEFPENFRYTKAISREQQNTKGGRMYIQDRVLEHAEEIFSMIENPKTHVYMCGLRGMEPGIDEAMTAAAAAKGLDWSELRPQLKKADRWHVETY

SEQ ID NO: 91751 - protein, 375 aa, Unknown
  Bacterial polypetide isolated from the Sargasso Sea
MYSQAKVIAGGLAHIPVVIAVFYFILTTFNKRALKFVEEAKTKKTDSKAVDTKKPSVSKAENSKIEASKTETPKVAKKKHADVPVNIYRPKTPYEGTVIENYSLLKEGAIGRVNHITFDLKDSDPFLNYVEGQSIGIMPAGEDANGKPHKLRLYSIASTRHGDDFNGNTVSLCVRQLQYEKDGETINGVCSTYLCDIKPGDKVKITGPVGKEMLLPEEEDSNIVMLATGTGIAPMRAYLRRMFEPTEKEKNKWNFKGKAWLFMGAPKSANLLYEEDLQRYLVDNPDNFKYTKAISREQQNTKGGRMYIQDRVLESANELFNMIEDEKTHIYLCGLKGMEPGIDEAMTKAAEEKGLNWSELRPQLKKSGRWHVETY

SEQ ID NO: 91752 - protein, 279 aa, Unknown
  Bacterial polypetide isolated from the Sargasso Sea
KAGVADMDAVNVSQLKGSGLIGDDGKAIAAVTYDRNADGTPDYSKVTLGHGEGPTQLKNVANATDDGDALNLGQLKEAGLVGEDDKGNLASAAVTYDRNADGTINHDQITLKGADGTTLSNVKAGVADMDAVNVSQLKGSGLIGDDGKAIAAVTYDRNADGTPNYGQATLGHGEGPTQLKNVANATDDGDALNLGQLKEAGLVGDDGSGNLTSLAVTYDNAAKDAITLGGTGATTPVAIHNVADGVLSATSKDAVNGSQLFATNTRVGDIENSLKDGGV

SEQ ID NO: 91753 - protein, 275 aa, Unknown
  Bacterial polypetide isolated from the Sargasso Sea
SQLKGSGLIGDDGKAIAAVTYDRNADGTPDYSKVTLGHGEGPTQLKNVANATDDGDALNLGQLKEAGLVGEDDKGNLASAAVTYDRNADGTINHDQITLKGADGTTLSNVKAGVADMDAVNVSQLKGSGLIGDDGKAIAAVTYDRNADGTPNYGQATLGHGEGPTQLKNVANATDDGDALNLGQLKEAGLVGDDGSGNLTSLAVTYDNAAKDAITLGGTGATTPVAIHNVADGVLSATSKDAVNGSQLFATNTRVGDIENSLKDGGVIDPVTGKS

SEQ ID NO: 91754 - protein, 269 aa, Unknown
  Bacterial polypetide isolated from the Sargasso Sea
TTLANVKAGVADMDAVNVSQLKGSGLIGDDGKAIAAVTYDRNADGTPDYSKVTLGHGEGPTQLKNVANATDDGDALNLGQLKEAGLVGEDDKGNLASAAVTYDRNADGTINHDQITLKGADGTTLSNVKAGVADMDAVNVSQLKGSGLIGDDGKAIAAVTYDRNADGTPNYGQATLGHGEGPTQLKNVANATDDGDALNLGQLKEAGLVGDDGSGNLTSLAVTYDNAAKDAITLGGTGATTPVAIHNVADGVLSATSKDAVNGSQLFAT

SEQ ID NO: 91755 - protein, 349 aa, Unknown
  Bacterial polypetide isolated from the Sargasso Sea
MTLLIGYFLLALIISFICSTLESVLLSVTHSHIGIISKTNSKGGKLLITLKHDINKPLAAILTLNTIANTVGAAGVGAQALVVYGSHAVAIASAILTFCILIFSEIIPKTIGATYWKKLAVSSAYVINVLMVITFPFVWMSQLLSAKLTPDEDDVKMVSREEIAAMAEMGEDEGSIDEHESDIIENLFRLKDMHVDSILTPRSVIYALEDNQTVGQVMDTDEDINFSRIPIFHENIDNVVGIVFKDTLLETMADDYFEKTMAEISEPVDTVFEKESVESVLNKFTKNRSHIFIVKDEFGGTTGLVTLEDCIETLLGVEIMDESDEVADMRKLAKDQLRQQRRIEENGDS

SEQ ID NO: 91756 - protein, 176 aa, Unknown
  Bacterial polypetide isolated from the Sargasso Sea
MNLIQHFVNGKIIPGKSDRRGKVFNPAIGEQESEVILGLKSDLDEAVDVAKKAFETWSLKPPIQRARIMFKFKDLIEKNSDELTKMIVSEHGKVYEDAKGSLIRGLEVVEFTCGIPQVLKGEFTENVGTDIDSWSIRQPLGVCAGITPFNFPAMVPMWMFPMAIACGNTFVLKPSE

SEQ ID NO: 91757 - protein, 139 aa, Unknown
  Bacterial polypetide isolated from the Sargasso Sea
KPYTGDGVQGDRFVEPTIFTGVTNNMRIAQEEVFGPILSVIPFDTEEDAIRIGNDIVFGLAAGVWTSDLGRAFRMSEKLKAGTVWVNTYRAVSFMTPFGGYKRSGQGRESGQESIKEFMQVKSVWIAQQTTSSNPFIMQ

SEQ ID NO: 91758 - protein, 197 aa, Unknown
  Bacterial polypetide isolated from the Sargasso Sea
MYSKFGQFIDGKWQPSEKKETYDVINPATEEVIGKASKATEADVLKALKSAEKGFKVWKKTPAWQRSYKIRKIADLMRERKKELAKWLALEVGKPLVEGEGEVGGGADIFEWNAEETKRIFGQTVESRFEDTRVQVIYQPVGVVAALIPWNFPIILASRKISTALAAGCSVIVKPDVITPGAVMELMNVINDAGIPP

SEQ ID NO: 91759 - protein, 264 aa, Unknown
  Bacterial polypetide isolated from the Sargasso Sea
EAFVDFSFSTKEERVQILENIIAEYEKRSEELAETISKEMGAPIWLSQVAQVASGLTHFKDTLNVLKSYDFEYEKDGYLVRKEPVGVVGMITPWNWPMNQMCTKVASGIAAGCTMVLKPSEITPFCGIILAEIIHDAGVPAGIFNLVNGMGPVVGASMSEHKDIDMMHFTGSTRAGVAVAQASAPTVKRVAQELGGKSANIVLDDADIEKAVSAGVSSCFLNTGQSCNAPTRMLVSSKNYDKAVEVAANTANAMKVGDPFDADT

SEQ ID NO: 91760 - protein, 168 aa, Unknown
  Bacterial polypetide isolated from the Sargasso Sea
MTIKVGINGMGRIGRMIVRSIYENYKGKIVVKHINNRSSSEVCANLLKYDSIHGNFSSIIKSGENYIKINKEKISYTQHSMINDIKWKKYDVDYVFECTGKFNSKDQLLPHIVNGVKKVIVSAPCKMADKTIVFGVNHKKINKNDRIISAASCTTNCLAPVADVINKN

SEQ ID NO: 91761 - protein, 57 aa, Unknown
  Bacterial polypetide isolated from the Sargasso Sea
KKFSINGFHHDPHSSIFAADQTKVLQKKMVRVLSWYDNEWGFSNRMADTALEISKLL

SEQ ID NO: 91762 - protein, 322 aa, Unknown
  Bacterial polypetide isolated from the Sargasso Sea
EIFALAEAPEHLVQTVIGDGETGAELIDQAPDKVSFTGSVTTGKMIAAKCGEMLIPYSLELGGKDAMIVCSDADIKDAASGAVVGSCMNAGQYCCGTERIYVMDDVYDEFVAETVSITQSLIQSNDCKGDVGPTFWDKQVDIIEDHVNDAVAKGAKVLVGGKRNPNFEGLYFEPTVLVEVTHEMKIMKDETFGPIISIMKVQSEEEALMLANQSHYGLNGNVWTKDLKKGQILAKSIETGACSVNDMAMSYGVNEVPFGGVKESGLGVVNGKEGLLAYAHPMPIIIGKKSASSYPYTDKSFDQLKGALKIFWGNRLVRKLFG

SEQ ID NO: 91763 - protein, 51 aa, Unknown
  Bacterial polypetide isolated from the Sargasso Sea
RKLRSGMVDVNGVGIAVASPFGGYKHSGIGREAGTEGLIEFLEVKTVGGWN

SEQ ID NO: 91764 - protein, 203 aa, Unknown
  Bacterial polypetide isolated from the Sargasso Sea
MENKKKFYIDGKWQEPQSKQEIKVINPATEENSAVITLGNKDDVDHAVSSAKKAYETWSFSLKEERIKLLEKLYENYKKRWADIAKAITLEMGAPKDFATKLQAGTGAAHIKSFIRHLKSFEFEKPLGDHAPNQRLIYEPKGVCALITPWNWPMNQVCLKVMPALASGCTMVLKPSELAPLSSMILAELIDETKFPPGVFNLI

SEQ ID NO: 91765 - protein, 154 aa, Unknown
  Bacterial polypetide isolated from the Sargasso Sea
MKLIEHFVGGKIIPGSSDKKGKVFNPATGEQEKQVRLASSSDLDQAVEIAKKAFETWSLKPSLQRARIMFKFKELIEKNSDELTQLIVSEHGKVYEDAKGSLTRGLEVVEFACGIPHLLKGEFSENVGTDVDSWSMRQPLGVVAGITPFNFPAY

SEQ ID NO: 91766 - protein, 210 aa, Unknown
  Bacterial polypetide isolated from the Sargasso Sea
TEEFVQHAKDHVAENYPTIKNNPDYTSIIHLNHFERLNELVQDAKSKGATVIEINPAQEDFSQQEHHKIVPTLILNPTDDMKVMQEEIFGPLMPVKTYKDFNETVNFINKNPKALALYYFGDDKTEMNNVLDNTSSGQAVMNDVLFQFSMHDLPFGGVGPSGMGAYHGYDGFKNFSHKRSVLKGQNILDAGKMITAPFTESTEKNIKRLT

SEQ ID NO: 91767 - protein, 288 aa, Unknown
  Bacterial polypetide isolated from the Sargasso Sea
MPDDLASSDQYIKNQESAEKYISRFRKKTLGHYINGARTSTEGAKTFENISPISGKILNEVALGTAEDIDAASKAAKKAFPEWRDMTSSDRRKILHKIADLIVARADEIALTECVDTGQAFRFMSKAAIRGAENYRFFADKILEANNGLSLPAKDHINYTVRTPIGPVGVITPWNTPFMLSTWKIAPALAAGCTVVHKPAEWSPLTAMLLAEISAEAGIPEGVINLVNGTGEEAGKLLTEHPDIKAISFVGESFTGSKIMSQGSNTLKRVHFELGGKNPVIVFLMMQT

SEQ ID NO: 91768 - protein, 302 aa, Unknown
  Bacterial polypetide isolated from the Sargasso Sea
DELTKIIVFEHGKVYDDARGSLTRGLEVVEYACGIPQMLKGEFTENVGTSVDSWSIRQPLGVCAGITPFNFPAMVPMWMFPMAIACGNTFVLKPSEKDPSCSIRLAELLKESGLPDGVFNVVNGDKEAVDALINNKEVVAMSFVGSTPIAKYIYENCAKNEKRVQALGGAKNHCVVMPDCDLDQAVNGLMGAAYGSAGERCMAQSVAVAVGNIGDKLVDRLAKKVESLKVGPGMDKNSEMGPLVTKEHLAKVKSYVDVGEKEGAKLIVDGRNFRLQGYENGYYLGGCLFDHVTKDMRIYKEE

SEQ ID NO: 91769 - protein, 41 aa, Unknown
  Bacterial polypetide isolated from the Sargasso Sea
TQTQVIDGKFGRVLSWYDNEWGFSNRMCDTAIAMKRAKKNA

SEQ ID NO: 91770 - protein, 296 aa, Unknown
  Bacterial polypetide isolated from the Sargasso Sea
MKAERDGSFSHGLFRLPAYIAGLKSGKINGKNRPKVSKITPSVVKVDGNNCLAPMVLNKSLPELIKAAKENGVAVLSITNSHHMAAMWPETEAIAEEGLVAFACTSYKPAVAPAGSIKPLFGTNPISFAWPRKSKPPVVYDMATASMAMGEVQVAKREGHKVPLGTGLTKDGKETTDPAEIADGGVLLPFGGYKGSGIAMMVELLAGALVGDNFSYETAENDNNDGGPPSGGEFILAISPEKLSNSDWDTHSSKFFEKMKSMGDVRLPGERRHKNRLDKGPRHINEDLVNKIKSLS

SEQ ID NO: 91771 - protein, 113 aa, Unknown
  Bacterial polypetide isolated from the Sargasso Sea
EIIPSLKGKLEGIAMRVPTPNVSLVELVFCTKKEIDIKKINDVFETASKSELNKILEVTHEKLVSIDFNHRSASAIIDASLTNVVGTKMGKISAWYDNEWGFSNRMCDIAENL

SEQ ID NO: 91772 - protein, 268 aa, Unknown
  Bacterial polypetide isolated from the Sargasso Sea
MKTISHFIDGKIYSDSKSRKGPIFNPAIGEQIAEVELGTKATVEKAIESSSKAFINWSKTTPINRARILSKYKDLLIKNMEELAVMVSEQHGKTIADAKGSIQRGIEVVEYATGITDSLKGDHSTSVGTNVDSHTLRQPLGVCAGITPFNFPAMVPMWMYPVSIACGNAFVLKPSEKDPSCPMRLAELAIEAGLPAGVLNVVNGDKEAVDTLLENKKVQAISFVGSTPIAEYVYHTGTKNNKRVQALGGAKNHMVIMPDADVDKTTDA

SEQ ID NO: 91773 - protein, 313 aa, Unknown
  Bacterial polypetide isolated from the Sargasso Sea
VSAAKKAFETWAFSKKEERLDLLEKLYVVYKKRWAEMAKLISLEMGAPMKFSTEMQAATGASHIKSFKNILKDFKFEKDLGEEKNNQKLLYEPKGVCALITPWNWPINQVNLKVIPALASACTVVLKPSEVAPLSSMLLAEMIDEVKFPPGVFNLINGDGAVTGDALTSHPDINMISFTGSTRAGALISQNAAKDFKRISLELGGKGANIIFKDADSEAVARGVLRCFRNSGQSCNAPTRMLVEKSIYNETVEKVKELANNTKVDSPQKDGDHIGPVVSEVQFNKIQTLIQKGIDEGAKLIAGGTGKPQGFEK

SEQ ID NO: 91774 - protein, 119 aa, Unknown
  Bacterial polypetide isolated from the Sargasso Sea
MKLIEHFIDGKIYSGNSKRKGKVFNPATGEQSAEVTLATTQDINKAVETANNSFETWSNTPPLQRARIMFKFKDLIEKNSDELTKIIVSEHGKVYEDAKGSLIRGLEIVEYACGIPQML

SEQ ID NO: 91775 - protein, 337 aa, Unknown
  Bacterial polypetide isolated from the Sargasso Sea
LRPASDGGTFESRNPAWLEDCLGVFPLSTKEDVHDALISAREAFSQWSQTPAPTRGQIIGNMGRLLMQHKDDIVRVESREIGKTLKESAGEVQEAIDTCLFFQSEGRRLYGQTVNSELPDKELFTYRRPLGVCGIINASNFPSAVPFWKMIPAIMCGNTCVWKSPQDSPLLSFMLTRIMHEAGLPNGVVNLIHGKGSGAGQFLVDSVDEGLVNKISFTGSTPVGKMIGEVCGRNLVSCSLELGGKNPLVVMPSANIENAVEGAYWAAFGTAGQRCTSLGNLILHKDIYEEFMDKFMAKVKETKIGDSLRNDDVLYGSMLSEKYANDFLRDLGMCETD

SEQ ID NO: 91776 - protein, 245 aa, Unknown
  Bacterial polypetide isolated from the Sargasso Sea
MRAEIILEIYADLRNWGGKQMTKRLAGKVAVITGGASGIGRECSLRFAEEGAKIVVADINLDRASSVCAEIKAAGNEAVPFAVDASIPEDVVAMADAAMNEFGQVDACVAAAGISHASYVSREPQEQAGADRHDRHDMMLIDKSLANWQRVLDVNLTGVMLTNQAIAKKMQESGGGAIVNIASIAGKTALMGASDYCVSKAGVWMLTKCGAIELARHGIRVNAVGPGYIKTSMSGAATSNDAWVE

SEQ ID NO: 91777 - protein, 319 aa, Unknown
  Bacterial polypetide isolated from the Sargasso Sea
GHADDGSTSNIVNPANSKQLGTVPNCGSNETLKAIKAAKEAYKVWSKTDAKERSSVLKNLHRLMLEHQEDLARIITHEGGKPLSESMGEIAYAASFFEWFSEEAKRVYGDVIPGHQQDRRTLVIKQPIGVVGCITPWNFPSAMLARKIAPAIAVGCTVVAKPAPETPYSATAMAYLSELAGIPKGVFNVVTGDAEKIGSVMTTHKEVKKITFTGSTAVGKQLLKQSADTVKKVSLELGGHAPFIVFEDANLDDAVDGALIAKYRNSGQTCVCANRIYVQSSIYDDFSKRFTEKASQLVVGDGLAESTQQGPLISEDAME

SEQ ID NO: 91778 - protein, 272 aa, Unknown
  Bacterial polypetide isolated from the Sargasso Sea
MTDLTKNPDLRLRDKPDDFFGDWKWREGLAELMVPIIGRLYRNGVNVLMYGHSLTNQSPIEIMKSHRFIRRVEDTEISELETYPFLQRIELQDIKDCEIDLGEIVVDFMKENKSLDDSEIDSHIKSYILDPLDKVDQNRPSKPQDIVLYGFGRIGRLVSRIMAQMTGPGNYYRLRAIVVRKGSDKNDLLKRASLLRRDSVHGSFHGTIRVDNETETLVINGNPVKIIYANGPKDFNYSDYDIDNPIVIDNTGVWREEKDLSLHLESGASKVV

SEQ ID NO: 91779 - protein, 312 aa, Unknown
  Bacterial polypetide isolated from the Sargasso Sea
LQSRFPNTRIQIYYQPVGVVAALVPWNFPIILASRKISTALAAGCSVIVKPDVITPGCVMQLVDICRQAGVPPGVVNLLSGDPAFISNELLSSDIIKKVSITGSTRVGKLILKKAADKVQRVTMELSGHAPFIVFDDVDLDKVTDMAIAAKFRNNGQVCISPNRFYIHESKKDSFAELMVKKTKKLKIGDGMNKDTILGPLTTKKRLDEIEKLVEITKKEGAKVLCGGQRPAGFNKGYFFEPTIFDNVKDNFTIMNQEPFGPLVPILSFKNFDEVIKRANNNDLGLASYIFTNNIKKAHKASELMETGTVAV

SEQ ID NO: 91780 - protein, 274 aa, Unknown
  Bacterial polypetide isolated from the Sargasso Sea
MSNDLNFYINGEWVRSESNELIDVINPANEEVIGQVTAGTKEDIDLAVSAAFKAFSSYQQTTKEQRVELLNNIITEYENRYDDFVQTITKEMGSPLWLSEAAQAKTGIKNIHETLDALKNYEFEKPEGDYTIIKEPIGVIGMITPWNWPMNQITTKVSAALAAGCTMVLKPSEISPYCAMLLAEVFDSAGVPNGVFNVVNGYGPTVGAALSEHPDVAMMSFTGSTRAGIAVAQASAVSVKRVHQELGGKSSNIILDDVVDLEKSVKGGAGHCFL

SEQ ID NO: 91781 - protein, 70 aa, Unknown
  Bacterial polypetide isolated from the Sargasso Sea
MALEITLQTEDKEKAKRVSKKLRSGIVYINGNSPDSGTPFGGYKQSGNGREGGSWGLEEYLEVKTITGWK

SEQ ID NO: 91782 - protein, 239 aa, Unknown
  Bacterial polypetide isolated from the Sargasso Sea
KSAIDHAEKAFQSWKNTTAKERSIILKKWSDLIIEHVDDLAKIMTIEQGKPLAEAKGEILMGASYIEFYAEEAKRVYGDIIPDPRPGKRIVIIKQPVGVVGAITPWNFPNSMITRKCAAALAVGCTTVVKPASQTPFSALAVAELAKDAGFPDGVFNIVTGSAKEIGMELTKNPKIKKISFTGSTEVGKILMEQSASTVKKLSMELGGHAPFIVFEDANIDEAVTGALQSKFRNSGQTC

SEQ ID NO: 91783 - protein, 276 aa, Unknown
  Bacterial polypetide isolated from the Sargasso Sea
ETSKEERIKLLEKLLEIYNSRWDDMTNAISTELGCPKDWCSANQTSSGASHIEDFIKRLKEFNFEPGFGKDSVNHIIYEPIGVCGLITPWNWPINQIALKVIPALATGCTMILKPSEIAPLSGMLFAEMIHESGFPKGVFNLVNGDGLGVGTDLSKHPDIDMVSFTGSTRAGKLITKNAADTIKRVCLELGGKGGNIVFEDSYPDAVRDGIRNIMSNSGQSCDAPTRMLVQKSIYDRAIKEAADEANKIKVDLASKSGDHIGPVISKVQFDKIQSL

SEQ ID NO: 91784 - protein, 40 aa, Unknown
  Bacterial polypetide isolated from the Sargasso Sea
DVTQTQVIKGKFSRVLSWYDNEWGFSNRMCDTSIQIAGLI

SEQ ID NO: 91785 - protein, 278 aa, Unknown
  Bacterial polypetide isolated from the Sargasso Sea
KFYINGKWVDPIKPKDFQVINPSTEEVCAIISLGSPGDTNAAVKSARNSFETWKEVSKNERIKLLEKLLEIYNTRWDQMTDAISTELGCPKDWCSANQTASGAGHIEDFIKRLKDFNFEPGFDKGSVNHIVYEPIGVCGLITPWNWPINQIALKVIPALATGCTMILKPSEIAPLSGMLFAQMIHDAGFPPGVFNLVNGDGVGVGTDLSGHPDVDMVSFTGSTRAGKLITKNAAETIKRVCLELGGKGGNIVFADSYPDAVRDGIRNIMSNSGQSCDA

SEQ ID NO: 91786 - protein, 189 aa, Unknown
  Bacterial polypetide isolated from the Sargasso Sea
MYEKYGQFIDGKWHKSSTGETYEVINPANEEIIGKASKASSEDVDKALLSAQKGLEVWKKTPPWQRAYILRRIADKMREKQDILAKWMTLEVGKPFAEAKGEVNGAADIYEWNAEETKRIYGQTVESRFEDTRVHVYYQPVGVVAALVPWNFPLVLSARKISTALAAGCSVIVKPDVITPGVVMEQVEI

SEQ ID NO: 91787 - protein, 276 aa, Unknown
  Bacterial polypetide isolated from the Sargasso Sea
IIKWLEKKKFYINGIWIFPFKANDFEVINPSNEEPFAAISLGSEEDTDAAVKAAKNAFETWKDTKVEERISLLEKLLNIYKKRFDEMANAISMEMGAPMDWSTNVQTASGQSHLEDFIIRLKEFNFEKNFDPKSNNYIRYEPIGVCGLITPWNWPINQIALKVIPAFATGCTMILKPSEIAPISGVIFAEMIDEAGFPNGVFNLVNGTGDVVGNQISGHPDIDMVSFTGSTRAGKLILKNSAETIKRVCLELGGKGGNIVFADSYPNAVRDGIKNV

SEQ ID NO: 91788 - protein, 204 aa, Unknown
  Bacterial polypetide isolated from the Sargasso Sea
MKKYNHFVNGKEMLPNGGEYFETENPYTCEKWAEVAKGDAYDVDAAVNVAKEVFENNWSKTKPTERGKLLVRLAELVERDAQKLGEIEVQDNGKLIAEMGAQTKYLAEWYRYFGGLADKVEGAVLPSDKPGIFNFTKYEPFGVVGMITAWNSPLLLLSWKLAPALAAGNTAVVKPSEFTSASTLEFMKLISEAGFPDGVVNCVT

SEQ ID NO: 91789 - protein, 164 aa, Unknown
  Bacterial polypetide isolated from the Sargasso Sea
MNTIQHFVNGNKFSGESKRVGKVFNPATGEQSAEVKLASTKDVNDAVQNAKKAFETWSNKPPLQRARVMFKFKELIEKNSDELTKIIVSEHGKVYEDAKGSLTRGLEVVEYACGIPQILKGEFTENVGSNVDSWSIRQPLGVCAGITPFNFPAMVPMWMFPMAI

SEQ ID NO: 91790 - protein, 112 aa, Unknown
  Bacterial polypetide isolated from the Sargasso Sea
ELKGKLEGLAMRVPTPNVSFVDLVFNSKNKLSVNKINNSFKKASKKELKNVLETTNEKLVSIDFNHNPNSAIVDLSLTNVVGDKMAKVSAWYDNEWGFASRMCDLAEYIHKI

SEQ ID NO: 91791 - protein, 251 aa, Unknown
  Bacterial polypetide isolated from the Sargasso Sea
DVINPANEEVIGQITAGTKDDINKAVNAASEAFKTFSQSSQNERIELLKNIIQEYENRYKDFVEVITKEMGAPNWLSERAQANTGLINFKETLEALEEYEFQKEEGGYILRREPIGVIGMITPWNWPMNQITTKVSAAIASGCTMVLKPSEISPYCSMLLAEVMHDAGVPKGVFNLVNGYGPIVGAALSDHEKVDMMSFTGSTRAGIAVAQASAATVKRVQQELGGKSANIILDDVADLEKSVTGGAGHCF

SEQ ID NO: 91792 - protein, 299 aa, Unknown
  Bacterial polypetide isolated from the Sargasso Sea
CYSSFVNNLLNPEVSPDDLAEDPVKSVKKAIDKLQHEKIVNPSDIFSPRVNSSGYDLSEPKNLLDLKSDLLKFDNLKVEAKNFCSEINESKNEKRYSIANGNEIGDCSFADIANELNFQQCTEWKNTPVSERADIFYRIADNLEKDSTKFLYYLIHEAGKTYKDSYDEIREAVDFLRYYADNAKSLLSEPNNLNGPTGESNQLFYQSKGTFVCISPWNFPLAIFAGQIAAALVTGNSVISKPSEHTPIIATMMIELFYKNGVPKSALKLIQGDGSIGSKLISFDHISGVAFTGSSATAK

SEQ ID NO: 91793 - protein, 267 aa, Unknown
  Bacterial polypetide isolated from the Sargasso Sea
IDKSEISYTHETEISDVKWGDLGCDIVIDCTGNHKEISSLKNYFKSGVKKVLVSAPIDDPNVLNLVYGINHEKYDPKKNDVITAASCTTNCLAPIIKVIHENIGIQRGQITTIHNPTNTNTVIDKPHKDLRRARSSLISLQPTTTGSATAIGLIYPELEERLNGHAVRVPVLNASLTDCVLQLESETNKSEVNELFRIASQSYLKGILGFENRPLVSSDYTNDTRSSIIDGLSTLITDNSLLKVYAWYDNEVGYACRMLDLVNHIRQ

SEQ ID NO: 91794 - protein, 297 aa, Unknown
  Bacterial polypetide isolated from the Sargasso Sea
QYIQNHVVQPLSTSTNTRPDTPKDIVLFGFGRIGRLITRIMAEKTGPGNYYKLKAIVVRKGSSENDLLKRASLLRRDSVHGAFSGTIRVDTDNDLLVVNGNPIKLLYADSPDELNYSDFDIIDPILIDNTGAWRDTQGLKKHLDAGASKVVLTAPGKGDMKNIVYGINDHNLDSKDNLVSAASCTTNAIVPVLKIVNDEFAIENGHIETVHAYTNDQNLIDNYHKGDRRGRSAPLNMVITSTGAVKAVSKALPELEGKLSGNAIRVPIPNVSLAVMNLNLKNSTTRNEFVNFLQFTA

SEQ ID NO: 91795 - protein, 285 aa, Unknown
  Bacterial polypetide isolated from the Sargasso Sea
KEERLDLLEKLYVVYKKRWAEMAKLISLEMGAPMKFSTEMQAATGASHIKSFKNILKDFKFEKDLGEEKNNQKLLYEPKGVCALITPWNWPINQVNLKVIPALASACTVVLKPSEIAPLSSMLLAEMIDEVKFPSGVFNLVNGDGETTGDALTSHPDVNMISFTGSTRAGALISQNAAKDFKRISLELGGKGANIIFKDADSEAVARGVLRCFRNSGQSCNAPTRMLVEKSIYNETVEKVKELANNTKVDVPEKDGDHIGPVVSEVQFNKIQNLIQKRNRRRRKI

SEQ ID NO: 91796 - protein, 200 aa, Unknown
  Bacterial polypetide isolated from the Sargasso Sea
MENVEKFYINGAWVTPKSSNSMPVINPANEEEIAKVYLGNEEDVNSAVDAAKNAFDSFSQSSKSERLDLLKKIRSVTSDRYEELAVAMSNEMGAPMTFSRDTQADSGIGHLDGFIESLEKLETEVTLSNGDILLKEPIGVCGLITPWNWPINQITLKVLPAIATGCTSVLKPSEHTPLSAALYAEILHEAGVPAGVFNLI

SEQ ID NO: 91797 - protein, 53 aa, Unknown
  Bacterial polypetide isolated from the Sargasso Sea
SSDFNHNPASSNFDLTQTQVIDGKFGRVLSWYDNEWGFSNRMCDTAVAMKRSR

SEQ ID NO: 91798 - protein, 265 aa, Unknown
  Bacterial polypetide isolated from the Sargasso Sea
TLLANAEAAFESWSQTPVKDRANLLRRIADILERHHDELVAICIKEAGKVAQDGIDEVREAVDFCRYYAARAEELSEDERFEARGVILCISPWNFPLAIFLGQVAAAIVTGNTVIAKPAEQTSLIALRTIELMLSVGLPEHVVQPVIARGSEVGKTIVPDERIQAVMFTGSTETGTLISQTLAARNDIQVPLIAETGGQNCMIVDSTALPEQVVDDVISSGFQSAGQRCSALRVLFIQEDVADGIIEMLKGALAELHIGDPSLLS

SEQ ID NO: 91799 - protein, 291 aa, Unknown
  Bacterial polypetide isolated from the Sargasso Sea
DIDKAVCAALDAFSSFQQTTKDQRIELLKNVITEYEARYDDFVQIITKEMGSPIWLSEAAQAKTGIKNIHETLDALESYEFERPEGDYTLIKEPIGVIGMITPWNWPMNQITTKVSAALAAGCSMVLKPSEISPYCAMLLAEVFDKAGVPNGVFNVVNGYGPTVGAALSEHPDVAMMSFIGSTRAGIAVAQASASSVKRVHQELGGKSSNIILDDVADLEKSVKGGAGHCFLNSGQSCNAPTKMLISSKNYDKAVEIAVATANNTTVGDPSGEFRLGPIANKVQYEKILKL

SEQ ID NO: 91800 - protein, 294 aa, Unknown
  Bacterial polypetide isolated from the Sargasso Sea
VAELAAEAGVPRGVLQILPGAGPIVGEKLGRHTDIDMVSFTGSTETGRLFLKYSSESNLKKTVLECGGKNPAVVFNDAENLDLVAEHIVNGAFWNMGENCSAISRLIVHKDIKSDLLKKIVDRLRDWKTGDPLDPQNHLGALIDKEHCKKVSSYLSEGAVIGGEIDGCYIGPTIYETTTDDKKAKDEIFGPILSVLEVQTNEEAISLANKTEYGLTASIFSANTTNALRAARDLKAGTVTVNSYGEGDITTPFGGYKQSGFGGRDNGVHAHEQYCEVKTIWIDLTDPASQDKIQ

SEQ ID NO: 91801 - protein, 60 aa, Unknown
  Bacterial polypetide isolated from the Sargasso Sea
DKEKVKRVARKLRSGMVDVNGVGIAVASPFGGYKHSGIGREAGTEGLIEFLEVKTVGGWN

SEQ ID NO: 91802 - protein, 301 aa, Unknown
  Bacterial polypetide isolated from the Sargasso Sea
TPNNWALFQNCGSNETFEAIKAAKEAHKAWSKTDAKERSSVLKNLHRLMLEHQEDLARIITHEGGKPLSESMGEIAYAASFFEWFSEEAKRVYGDVIPGHQQDRRTLVIKQPIGVVGCITPWNFPSAMLARKIAPAIAVGCTVVAKPAPETPYSATAMAYLSELAGIPKGVFNVVTGDAEKIGSVMTTHKEVKKITFTGSTAVGKQLLKQSADTVKKVSLELGGHAPFIVFEDANLEDAVDGALIAKYRNSGQTCVCANRIYVQSSIYDDFSKRFTEKASQLVVGDDLAESTQQGPLISER

SEQ ID NO: 91803 - protein, 202 aa, Unknown
  Bacterial polypetide isolated from the Sargasso Sea
EVNNPASMEIIGKVPNFTAQETKSVIDHADKAFQSWKNTTAKERSIILKKWSDLIIENVDDLAKIMTIEQGKPLAEAKGEILMGASYIEFYAEEAKRVYGDIIPDPRPGKRIVIIKQPVGVVGAITPWNFPNSMITRKCAAALAVGCTTVVKPASQTPFSALAVAELAKIAGFPNGVFNIITGSAKEIGMELTKNPKIKKIS

SEQ ID NO: 91804 - protein, 231 aa, Unknown
  Bacterial polypetide isolated from the Sargasso Sea
NEEVIGQIPAGTKEDINKAVSAALDAFSTFQNTTKAERIELLKNIITEYENRYDDFVQTISKEMGSPIWLSEAAQAKTGIKNIHETLDALESYEFERPEGDYTLIKEPIGVIGMITPWNWPMNQITTKVSAALAAGCTMVLKPSEISPYCAMLLAEVFDKAGVPNGVFNVVNGYGPTVGAALSEHPDVAMMSFTGSTRAGIAVAQASASSVKRVHQELGGKSSNIILDDVI

SEQ ID NO: 91805 - protein, 232 aa, Unknown
  Bacterial polypetide isolated from the Sargasso Sea
MEINKFYIDGKFVDPDGSEKIDIVNPATEEVVGFVISGSLKDVDIAVAAANKAFPSAMALTLEQKKKILEEIITGMEERREDFAQIISEEMGSPIQMARKAQYGAGVIHFKNTLNVIDRFDFNEVHGNITINKLPIGPVGMITPWNWPLNQMCTKIASAIAAGTSCVLKPSEITPGAAHIFAEVIDKTSMPKGMFNLIHGLGVTVGKAMSSHSDLEMISFTGSTRAGIDIQK

SEQ ID NO: 91806 - protein, 48 aa, Unknown
  Bacterial polypetide isolated from the Sargasso Sea
HDPHSSIFDVTQTQVIKGKFSRVLSWYDNEWGFSNRMCDTAIQISKLI

SEQ ID NO: 91807 - protein, 132 aa, Unknown
  Bacterial polypetide isolated from the Sargasso Sea
ASQSIVPTSTGASKAIGEIIPSLKGKLEGIAMRVPTPNVSLVELVFCTKKDLSIEKINSAFQNFNKKNKILKITKEKLVSIDFNHNPASSIVDASLTNVVGKNMGKISAWYDNEWGFSNRMCDIAEYLHKIS

SEQ ID NO: 91808 - protein, 275 aa, Unknown
  Bacterial polypetide isolated from the Sargasso Sea
TKLIVLEHGKVYEDAKGSLNRGLEVVEFACGIPHLLKGEFTENVGTDVDSWSTRQPLGVCAGITPFNFPAMVPMWMFPIAIACGNTFVLKPSEKDPSCSIKLAQLFKEAGLPDGVFNVVNGDKEAVDSLITNKDVSAISFVGSTPIAKYIYENSAKNEKRVQALGGAKNHCVVMPDCDLNQAVNGLMGAVYGSAGERCMAQSVVVAVGKIGDDLVSNLAKKVENLKIGPGLDKKSEMGPLVTREHLEKVKSYVDLGVKEGAKLVVDGRNIKLTGI

SEQ ID NO: 91809 - protein, 105 aa, Unknown
  Bacterial polypetide isolated from the Sargasso Sea
KFLDPVVSVINLKDEAEALEIANDTLYGLGAGVWTRNGNIAYRMGRAIQAGIVWTNCYHAYPAHSPFGGYKQSGVGRETHKMMLNHYRQNKNLHVSYAEQKLGFF

SEQ ID NO: 91810 - protein, 273 aa, Unknown
  Bacterial polypetide isolated from the Sargasso Sea
KPASETPLTMLALMPILSKAGVPPGVVNILPSRSSGEVVSKMLSDPRVRVVSFTGSTEVGRKLLHAAADNIVKPAMELGGNAPFIVCKDANIEAAADGLMVAKMRNLGEACTAANRIYVHESIKDKFIAIFSKKMAALKMGNGVEPDVDVGPLVNAETRDKVEYFVSDAISKGAKLELGGVKPNIPGFFYPPTVLSNVPDDADCLLDEIFGPVAAIQTFADEKEVIEKSNSTEYGLVAYLYTEDVRRGLSLSEKLEFGMIGLNRGLVSDPAAP

SEQ ID NO: 91811 - protein, 285 aa, Unknown
  Bacterial polypetide isolated from the Sargasso Sea
IGKASKATKADVTKALKSAEEGFKVWKKTPPWQRSYKIRKIADLMRERKKELAKWLALEVGKPLVEGEGEVGGGADIFEWNSEETKRIFGQTVESRFENTRVQVNYQPVGVVAALIPWNFPIILASRKISTALAAGCSVIVKPDVITPGAVMELMNIINDAGIPPGVVNLLSGDPEEVSNELISSNIIKKVSITGSTRVGKLILKKAADKVQRVTMELSGHAPFIVFEDSNIEKVTDMAITSKYRNNGQVCISPSRFYIHESKKNEFAKTFIEKTKKLKLGDGMK

SEQ ID NO: 91812 - protein, 256 aa, Unknown
  Bacterial polypetide isolated from the Sargasso Sea
RVVSFTGSTEVGRKLLHAAADNIVKPAMELGGNAPFIVCKDANIEAAADGLMVAKMRNLGEACTAANRIYVHESIKDKFIAIFSKKMAALKMGNGVEPDVDVGPLVNAETRDKVEYFVSDAISKGAKLELGGVRPNIPGFFYPPTVLSNVPDDADCLSDEIFGPVAAIQTFADEKEVIEKSNSTEYGLVAYLYTEDVRRGLSLSEKLEFGMIGLNRGLVSDPAAPFGGVKQSGLGREGGKEGMLEFQETQYISTEW

SEQ ID NO: 91813 - protein, 260 aa, Unknown
  Bacterial polypetide isolated from the Sargasso Sea
FCQADPAQLPWNELEVDVVLECTGVFHSRADAQLHLDAGAKKVLFSHPADADIDATVIYGINQHLLTDEMTVVSAGSCTTNCIVPVIQVLDQHFGVESGTITTIHASMNDQQVIDAYHSDLRRTRAASQSIIPVDTKLARGIERIMPHLAGRFEAIAVRVPTVNVTAMDLSVTLHQDVDVTQINQVLQHARAGELAGILDYTEEPLVSVDFNHDAHSCIVDGSQTRVSHKRLVKCLVWCDNEWGFANRMIDTTRAMMSFV

SEQ ID NO: 91814 - protein, 114 aa, Unknown
  Bacterial polypetide isolated from the Sargasso Sea
IIPSLKGKLEGIAMRVPTPNVSLVELVFCTKKDLSIEKINSAFQNFSKKNRILEITEDKLVSVDFNHNSSSSIVDASLTNVVGKNMGKISAWYDNEWGFSNRMCDIAEYLHKIS

SEQ ID NO: 91815 - protein, 309 aa, Unknown
  Bacterial polypetide isolated from the Sargasso Sea
GARRYGCRFEAWSKRDVSERAEILNRTADALERHMAELIAICMREAGKVAQDSIDEVREAVDFCRYYAVRAEELAEDQRLLPRGVVLCISPWNFPLAIFLGQVAAALVTGNTVVAKPAEQTSIVAQRAVDIMHSVGLPEDALKLIVSPGKEVGETLLPDERIKAVMFTGSTQTGTLISQVLAERGGEQVPLIAETGGQNCMIVDSTALPEQVVDDVIHSGFQSAGQRCSALRVLFVQDDIADELTEMLIGALKELTVGDPTQLATDVGPVIDEKALKSLTDHQDYMEGKGKLLYRSEMPKGLKTVRSSR

SEQ ID NO: 91816 - protein, 206 aa, Unknown
  Bacterial polypetide isolated from the Sargasso Sea
MEIVNNFINGRFVKPQNKNYIDLYEPATGKVYGKVANSSKLDVNRAISAALSAFPEWSEKPPAERASYLTKISIGLQSRLEDLAQFESRDTGKPVSITTKIDIPRAIKNFRFFSNLIKDFDTRYNLNNENYSNTIIRSPMGIVACISPWNLPLYLFSWKIAPALAAGNTVIAKPSEITPFTASKLAEVCIEIGFPKGVLNIINGHG

SEQ ID NO: 91817 - protein, 160 aa, Unknown
  Bacterial polypetide isolated from the Sargasso Sea
MYDKYGQFIDGKWQKSASGETYNVINPATEEIIGKASKANSSDVQRALKSAEKGLEIWKNTSPWERAKIIRKISELIRHRTDILSKWLTLEVGKPLTEGPGEVGGAADIFEWNSEETKRIFGEINQSRFPNTRIHVIYQPVGVVAALVPWNFPVILASRK

SEQ ID NO: 91818 - protein, 250 aa, Unknown
  Bacterial polypetide isolated from the Sargasso Sea
PKDFATKLQAGTGASHIKSFIRYLKNFEFEKPLGEHAPNQRLIYEPKGVCALITPWNWPMNQVCLKVMPAIAAGCTMVLKPSELAPLSSMILAEIIDEVKFPKGVFNLVNGDGATTGEALTSHPDINMISFTGSTRAGALISQNAAKDFKRVSLELGGKGANIIFKDADPEAIERGALRCFRNSGQSCNAPTRMLVEKSMYGEAIERLKKYTENFEVGDPKKEGEHIGPVISETQYNKIQTLIQKGIDEG

SEQ ID NO: 91819 - protein, 288 aa, Unknown
  Bacterial polypetide isolated from the Sargasso Sea
ENRYKDFVEVITKEMGAPNWLSERAQANTGLINFKETLEALEEYEFQKEEGGYTLRREPIGVIGMITPWNWPMNQITTKVSAAIASGCTMVLKPSEISPYCSMLLAEVMHDAGVPKGVFNLVNGYGPVVGAALSEHEKVDMMSFTGSTRAGIAVAQASATTVKRVQQELGGKSANIILDDVADLEKSVKGGAGHCFLNSGQSCNAPTRMLVSLKNYDKAVEVAVATANSTTVGDPNGEFRLGPISNKTQYEKIIKLIEIGIEEGARLVAGGVEKPEGCEKGYYIKPTV

SEQ ID NO: 91820 - protein, 328 aa, Unknown
  Bacterial polypetide isolated from the Sargasso Sea
SWRLSPWNLPLLLMTWKVGPALACGNTVVVKPSEETPTTTARLGEVMKEAGVPDGVYNVVHGFGGDSAGAYLTEHPQVDGFTFTGETGTGEVIMKAAAKGIRDISLELGGKNAGLVFADCDMEKAIEGTMRSAFANCGQVCLGTERVYVERSIFDEFVGRLKEAAEGLKIGPPDDADANLGPLVSLKHREKVLSYYQKAVDDGATVVTGGGVPDMPAELAGGAWVEPTIWTGLADDSAVVTDEIFGPCCHIRPFDTEEEAIELANSLPYGLASAIWSENITRAHRVAGQIEAGIIWVNSWFLRDLRTPFGGSKQSGVGREGGRHSLGV

SEQ ID NO: 91821 - protein, 269 aa, Unknown
  Bacterial polypetide isolated from the Sargasso Sea
GRIGRMIVRSIIESKNKNIEIKHINNRTNSKVCSSLLKYDSIHGKFDAEINFDENHLLINKNKITFSNETDLNKIHWNKYEVDYVLECTGKFNSKDKLLAHINNGAKKVIVSAPCKDADKTIVYGVNESELKKDDNIISAASCTTNCLAPVAHVLNENFEIEKGFMTTIHSFTSDQRILDNSHEDPRRARSASQSIVPTSTGASKAIDEIIPSLKGKLEGVAMRVPTPNVSLIELVFCTKKDLSIDKINLAFQNFSKKNKILETTKEKL

SEQ ID NO: 91822 - protein, 249 aa, Unknown
  Bacterial polypetide isolated from the Sargasso Sea
NPATEEIVGKFAVAEIIDLDESLEAADTAFKSWKKVAPFLRYKMMRSAAELLRQRADEIARIMTIEQGKPLAEAKGETLLGADTIDWFAEEGRRAYGRVIPSQMESVNQIVIKEPVGPVAAFSPWNFPINQAVRKISGAIAAGCSIILKGPEDTPASCAELVKVFVDAGAPSGLINLVYGIPSDISNYLIPHPIVKKISFTGSTAVGKKLASLAAEHMKLSTMELGGHAPAIVFNDANLSAALDVLTAQ

SEQ ID NO: 91823 - protein, 62 aa, Unknown
  Bacterial polypetide isolated from the Sargasso Sea
LDVNQKPLVSKDFNHNPHSSIFDVTQTQVIKGKFSRVLSWYDNEWGFSNRMCDTSIQIAGLI

SEQ ID NO: 91824 - protein, 71 aa, Unknown
  Bacterial polypetide isolated from the Sargasso Sea
SCERTFKGILATNSAPLVSKDFNHNPHSSIFDLTQTQVIKSKFSRVLSWYDNEWGFSNRMCDTTIQIAGLI

SEQ ID NO: 91825 - protein, 307 aa, Unknown
  Bacterial polypetide isolated from the Sargasso Sea
LKNGANSSFVNNLLNPEVSPDDLAEDPVKSVKKAIDKLQHEKIVNPSDIFSPRVNSSGYDLSEPKNLLDLKSDLLKFDNLKVEAKNFCSEINESKNEKRYSIANGNEIGDCSFADIANELNFQQCTEWKNTPVSERADVFYRIADNLEKDSTKFLYYLIHEAGKTYKDSYDEIREAVDFLRYYADNAKSLLSEPNNLNGPTGESNQLFYQSKGTFVCISPWNFPLAIFAGQIAAALVTGNSVISKPSEHTPIIATMMIELFYKNGVPKSALKLIQGDGSIGSKLISFDHISGVANTGSSATAKKINL

SEQ ID NO: 91826 - protein, 89 aa, Unknown
  Bacterial polypetide isolated from the Sargasso Sea
FIASRETSVDEINEVVKAASEGALKGVLDYNDGPLVSIDFNHNPASSTYDATMTKVQEGTLVKVCSWYDNEWGFSNRMLDTTLALVNAD

SEQ ID NO: 91827 - protein, 169 aa, Unknown
  Bacterial polypetide isolated from the Sargasso Sea
MNKIIQNFKKISYGLAPEDSKEVYEWINKLHQPNYLYINGKWVRSQSKKTIQGINPANNSKLYKLAVANKSDVKSAVNAAKKAFPKWRSISPTKRSKFLYALARLIQKHSRFLAVLETIDNGKPIRETRDIDIPLVARHFYYHAGWAAKLNNKNLNPIGVVGQIIPWNF

SEQ ID NO: 91828 - protein, 281 aa, Unknown
  Bacterial polypetide isolated from the Sargasso Sea
GGKKDIDKAVSAAKNSFEIWAFSKKEERLELLEKLYTIYKKRWAEMAKLISMEMGAPMKFATELQAATGASHIKSFKNILKDFRFEKDLGDEKNNQKLLYEPKGVCALITPWNWPINQVNLKVIPALASACTVVLKPSEIAPLSSMLLAEMIDEAKFPSGVFNLVNGDGELTGNALTSHPDINMISFTGSTRAGALISQNAAKDFKRISLELGGKGANIIFKDADSNAIARGVLRCFRNSGQSCNAPTRMLVEKSIYKETVEKVIELANNTKVDAPNKDGD

SEQ ID NO: 91829 - protein, 317 aa, Unknown
  Bacterial polypetide isolated from the Sargasso Sea
SFFEWFSEEAKRVYGDVIPGHQQDRRTLVIKQPIGVVGCITPWNFPSAMLARKIAPAIAVGCTVVAKPAPETPYSATAMAYLSELAGIPKGVFNVVTGDAEKIGSVMTTHKEVKKITFTGSTAVGKQLLKQSADTVKKVSLELGGHAPFIVFEDANLEDAVDGALIAKYRNSGQTCVCANRIYVQSSIYDDFSKRFTEKASQLVVGDGLAESTQQGPLISEDALKKASKHVEDAKNKGATVTTGGNPHSLGGLFFEPTVLTGVSDEMLIAQEETFGPVAPIFSFDSEKEVLERANNTPYGLAAYFYTSDLGKSWRVS

SEQ ID NO: 91830 - protein, 111 aa, Unknown
  Bacterial polypetide isolated from the Sargasso Sea
NGKLDGVSVRVPTQNVSVVDFKFNASRSTSVDEINNIIKESANGELNNILGFTDEPLVSSDFNHDSRSSIFHMDQTKVMDNTFVRVLSWYDNEWGFSNRMSDTAVAIGKTI

SEQ ID NO: 91831 - protein, 166 aa, Unknown
  Bacterial polypetide isolated from the Sargasso Sea
MYSKFGQFINGKWQQAEKKETYDVINPATEEVIGKASKASSTDVQKALKSAEKGLEVWKNTAPWQRAYVLRKIADLMREKKDVLAKWLTLEVGKPLTEAVGEVVGSADIFEWNAEETKRIYGQTVQSRFPDTRVHVYYQPVGVVAALVPWNFPITLASRKISTALA

SEQ ID NO: 91832 - protein, 296 aa, Unknown
  Bacterial polypetide isolated from the Sargasso Sea
PESKNTINVINPANEDIICDIILGNNLDLDKAVNSAKKAFQKYSLFSKEDKLLILDNIISAYKKRMDDLSNAITNEMGAPKTLSEKAQVPSGLGHFIQARKILETFKFEENLNSSLVKKEAIGVCGLITPWNWPLNQIACKVAPALAAGCTMILKPSEIAPLSAIIFAEILHEAGVPKGVFNLINGTGAEIGLNMSKHADIDMMSFTGSTSAGISVAKNSADSVKRVTQELGGKSANIILNDADFERVVSKGIFHCMNNTGQSCNAPTRMLIPVEQMDEAIAIVKTTIEKIKVGNP

SEQ ID NO: 91833 - protein, 217 aa, Unknown
  Bacterial polypetide isolated from the Sargasso Sea
AIVPWNYPLWMAIWKIAPSLITGNSVILKPAEQSPMSAIKIAELLSEAGIPDGVFSVLPGDGPTTGKSLCLHNDVDCVAFTGSGEVGKLVLQYSGQSNMKRVQLECGGKSPNIVFADCPDLDAAAEASAYAIFGNQGEVCSAGSRLIVQKEIEKDFIDKVAKLSQNMQPADPFDPDSFAGAIVNDEQLAKIDKYVKVGMEEGANVAVGGTLHARTGG

SEQ ID NO: 91834 - protein, 261 aa, Unknown
  Bacterial polypetide isolated from the Sargasso Sea
VIKQPIGVVGCITPWNFPSAMLARKIAPAIAVGCTVVAKPAPETPYSATAMAYLSELAGIPKGVFNVVTGDAEKIGSVMTAHKEVKKITFTGSTAVGKHLLKQSADTVKKVSLELGGHAPFIVFEDANLEDAVDGALIAKYRNSGQTCVCANRIYVQSSIYDDFSKRFTEKASQLVVGDGLAESTQQGPLISEDAMKKASKHVEDAKNKGATIATGGNPHSLGGLFFEPTVLTGVSDEMLIAQEETFGPVAPIFSFDRKKK

SEQ ID NO: 91835 - protein, 55 aa, Unknown
  Bacterial polypetide isolated from the Sargasso Sea
KRVARKLRSGMVDVNGAGIAVDAPFGGYKHSGIGREAGKEGLTEFLEVKSVGGWN

SEQ ID NO: 91836 - protein, 283 aa, Unknown
  Bacterial polypetide isolated from the Sargasso Sea
MLNKRNFYINGQWVAPAKPNDFDVINPSNEEPFAVISLGTKEDTDSAVKAAKSAFIKWKETSKEERIKLLEKLLAIYKKRSKEMSEAISMEMGSPIDYSSSTHTTSGQSHLEDFILRLKEFNFEEHFDTKSNNHISYEPIGVCGLITPWNWPINQIALKVVPAFAAGCTMILKPSEIAPISGMLFAEMIDETGFPSGVFNLVNGDGAGVGTNISGHHDIDMISFTGSTRAGKLISKNAADTIKRVCLELGGKGGNIVFADSYPDAVRDGIRNVMSNSGQSCDA

SEQ ID NO: 91837 - protein, 49 aa, Unknown
  Bacterial polypetide isolated from the Sargasso Sea
NHNKHSSIFDVTQTQVIKGKFSRVLSWYDNEWGFSNRMCDTAIQIAGLI

SEQ ID NO: 91838 - protein, 113 aa, Unknown
  Bacterial polypetide isolated from the Sargasso Sea
LSGKLSGVAVRVPTSNVSMIDLTFTSKKHTTSDEVNEAVRLAVKNGKLKNVLSYTDEKLVSTDFFHNPHSSIFHTDQTFVTGSKLVRILSWYDNEWGFSNRMADTAVEISKHL

SEQ ID NO: 91839 - protein, 283 aa, Unknown
  Bacterial polypetide isolated from the Sargasso Sea
QKYLSGGKKDVDKAVSAAKKAFETWAFSKKEERLDLLEKLYVVYKKRWAEMAKLISLEMGAPMKFSTEMQAATGASHIKSFKNILKDFKFEKDLGEEKNNQKLLYEPKGVCALITPWNWPINQVNLKVIPALASACTVVLKPSEIAPLSSMLLAEMIDEVKFPSGVFNLVNGDGETTGDALTSHPDVNMISFTGSTRAGALISQNAAKDFKRISLELGGKGANIIFKDADSEAVARGVLRCFRNSGQSCNAPTRMLVEKSIYNETVEKVKELANNTKVDVPQK

SEQ ID NO: 91840 - protein, 38 aa, Unknown
  Bacterial polypetide isolated from the Sargasso Sea
TQTQVIKGKFSRVLSWYDNEWGFSNRMCDTTLQIASLI

SEQ ID NO: 91841 - protein, 275 aa, Unknown
  Bacterial polypetide isolated from the Sargasso Sea
MKDKKNFYINGKWQAPKSKQQIEVVNPSTEEKCAVITLGNKEDVDIAVSSAKEAYSSWAFSSKEERIKLLEKLYENYKKRWADISEAITTEMGAPKDFATKLQVGTGAAHIKSFIRHLKNFEFEKPLGDHAPNQRLLFEPKGVCALITPWNWPMNQVCLKVIPALASGCTMVLKPSELAPLSSMVLTEIIDETKFPPGVFNLINGDGNITGDALTRHPDINMISFTGSTRAGALISQNAANDFKRVSLELGGKGANIIFKDADPKAIEWGALRCF

SEQ ID NO: 91842 - protein, 298 aa, Unknown
  Bacterial polypetide isolated from the Sargasso Sea
FNPATGEVSSKVNLASTADLNEAVDAAKKAFPSWSEKTPLFRARVLFKFKELIEKNYDELTKIIVSEHGKVYEDAKGSLTRGLEVVEFACGIPQLLKGEFTENVGTNVDSWSMRQPLGVCAGITPFNFPAMVPMWMFPIAIACGNTFVLKPSEKDPSCSMKLAELFLKAGLPPGVFNVVNGDKEAVDAIINNKDISAVSFVGSTPIAKYIYENCAKNEKRVQALGGAKNHCVVMPDCDLDQAVNGLMGAAYGSAGERCMAQSVAVAVGKIADPLVKSLSKKVETLKIGPGLDKKSQMG

SEQ ID NO: 91843 - protein, 213 aa, Unknown
  Bacterial polypetide isolated from the Sargasso Sea
MATDPAKISPLTELLQRQRASYLAAPNPDYAIRKERLIRLKAALLKFQQPLVEALSQDYGHRSVDDSLISDIMPVVNNINYSLKNLKKWLKPSRRHAGILLAPAQVKVHYQPLGVIGIIVPWNFPVMLSIGPLVTAIAAGNHAMLKLSEFTPATNSVIKQLLAEVFEESHVAVVEGEADVAAQFSALPFDHLLFTGSTTVGRHVMRAAANNLT

SEQ ID NO: 91844 - protein, 214 aa, Unknown
  Bacterial polypetide isolated from the Sargasso Sea
HRLMLEHQEDLARIITHEGGKPLSESMGEIAYAASFFEWFSEEAKRVYGDVIPGHQQDRRTLVIKQPIGVVGCITPWNFPSAMLARKIAPAIAVGCTVVAKPAPETPYSATAMAYLSELAGIPKGVFNVVTGDAEKIGSVMTTNKEVKKITFTGSTAVGKQLLKQSADTVKKVSLELGGHAPFIVFEDANLEDAVDGALIAKYRNSGQTCVCAQ

SEQ ID NO: 91845 - protein, 294 aa, Unknown
  Bacterial polypetide isolated from the Sargasso Sea
MRDLLRGVAEKSIVNEKDIASIICAESGKPLIECLDEIEWISSIFEYYSEIGRDQRGRVVAPVAPNSMSMVVKESYGVVGCIVPWNYPLLLMAWKVAPALAAGNTVVVKPSELTPLSTLHWLDVACNHLPKGILNAVTGSGNTGENLVRHPDTRVIAFTGSVDTGKKIAVMAAKQLKKTSLELGGNDPIIICDDVDIEIAARGTAWGGLLNAGQVCTSIERVFVMESIADSFIEAVVEEAKKVRLGDPMNGQTDMGPLVSDDQLKKTLAKTSHAKLEGARLLCGGKKPEAFEKG

SEQ ID NO: 91846 - protein, 221 aa, Unknown
  Bacterial polypetide isolated from the Sargasso Sea
VQAAKKAFVKWKETSKEERIKLLEKLLNIYKKRFSEMAKAMSMEMGAPIDFATSVHTASGQSHIEDFILRLKNFKFEENFNNKSNNYIGHEPIGVCGLITPWNWPINQVALKVIPALATGCTMILKPSEIAPISAMLFAEMIDESGFPAGVFNLVNGDGAGVGTQISGHPDIDMVSFTGSTRAGKLITKNAADTIKRVCLELGGKGGNIVFSDSYPNAVRD

SEQ ID NO: 91847 - protein, 253 aa, Unknown
  Bacterial polypetide isolated from the Sargasso Sea
MGEQQSEVILGLKSDLDQAVDIAKKAFETWSLKPPIQRARIMFKFKELIEKNSDELTKMIVSEHGKVYEDAKGSLVRGLEVVEFTCGIPQVLKGEFTENVGTDIDSWSIRQPLGVCAGITPFNFPAMVPMWMFPMAIACGNTFILKPSEKDPSISIKLAELFKEAGLPDGVFNVINGDKEVVDAILTNKDIKAVSFVGSTPIAKYIYENAAKNEKRVQALGGAKNHCVVMPDCDLDQAVNGLMGAAYGSAGER

SEQ ID NO: 91848 - protein, 261 aa, Unknown
  Bacterial polypetide isolated from the Sargasso Sea
MKLSHSKIKEVKSNIDFPSQIFINGKYQYSASEKIFENISPIDGKIINKVAFAQQADIDLAVLKAREAFNKGYWSNLPPGQRKKILLKFAQLLERDRLELALLDTVDMGKTINDTYNADLPTSIDNIEWYAEIIDKLFDDISPSSKEYMGLITKEPVGVVAAIVPWNYPLWMAIWKIAPALITGNSVILKPAEQSPMSAIKIGALLSEAGVPDGVFSVLPGDGPITGKSLCLHNDIDCVAFTGSGEVGKLVLQYSGQSNRK

SEQ ID NO: 91849 - protein, 239 aa, Unknown
  Bacterial polypetide isolated from the Sargasso Sea
MELKNKSLFRQECYIGGNWVQSHSNEKIEVDNPVDQKIIGFVPKCGTKETKNSINEADIAFKSWKNKTAKERSNILKKWHDLILKNIDDLAYIMTIEQGKPLAEAKGEILMGTTYIEFYAEEAKRVYGDIIPDPLPDRRIVVIKQPVGVVGAITPWNFPSTMITRKCAPALAVGCTVVVKPASQTPFSALALAVLAEEAGFPKGVFNVITGSASEIGKELTENPIVKKISFTGSTEVGK

SEQ ID NO: 91850 - protein, 267 aa, Unknown
  Bacterial polypetide isolated from the Sargasso Sea
GGKWIESISNNRIEVDNPANKEIIGYVPECSTEETKLAINKANKAFPSWKAKTAKERSIILKKWSRLIEENVDDLATIMTIEQGKPLAEARGEILMGVSYIDFYAEEGKRVYGDIIQDPLPDRRILIIKQPVGVVGAITPWNFPSTMITRKCAPGLAVGCTVVIKPASQTPFSALALGVLAKDAGFPDGVINIITGSAKDIGKELTENPIVKKISFTGSTEVGKILLKQSASTVKKVSMELGGHAPFIVFDDANIDEAVKGAMQSKF

SEQ ID NO: 91851 - protein, 312 aa, Unknown
  Bacterial polypetide isolated from the Sargasso Sea
SISSPIDGRILAERTYHSEGQINAILEKTKMAQREWQNVPLTEKGTILKKFIDCFTSKSDELSREITLQMGRPIKFAPGEINGTRERAEKMINLAEIGLQDTECGNKEGFKRYIQRNPLGTVFVVAAWNYPYLIAVNSVVPALMAGNSVILKHSAQTPFCAERFYEAFKEAGLPDGLFEYVHTNHQDTAKIIKDSRVDFVAFTGSVGGGYAICEASASRFIGTGLELGGKDPAYVCHDSDLNLAIESLVDGAFFNSGQSCCGIERIYVDERVYDKFIEGFIDLTNQYQLGDPLDPDTNLGPLAKMSGAKFVR

SEQ ID NO: 91852 - protein, 274 aa, Unknown
  Bacterial polypetide isolated from the Sargasso Sea
EVGKPFAEAKGEVGGAADIFEWNAEETKRIYGQTVESRFEDTRVHVYYQPVGVVAALTPWNFPAVLSARKISTALAAGCSVIVKPDVITPGIVMEMVDICRECGVPPGVVNLLSGDPPSIAQQLIASDIIKKISITGSSRVGKLILKQAADKVQRVTMELSGHSPFIVFDDANIKKAADMAIAAKFRNNGQVCISPNRFYIHESKKDEFVNLFIEKTKKLKIGDGMDPTTKLGPLTTKKRLNEIEELVEKTKQEGAKVLLGGKRPAGFNKGFFY

SEQ ID NO: 91853 - protein, 265 aa, Unknown
  Bacterial polypetide isolated from the Sargasso Sea
MALRAGVPAGLFSVLTGNDTRILGNELTTHPLVRKITFTGSTEVGRVLLQQAASTVKKCSMELGGNAPVLVFDDADLDTAVEGVIASKFRNTGQACISANRIYVQDGIYDAFAQRMAERVAQLKVGNGLADGVQQGPLIDDGAVTKVEEHIADAVAGGARVKLGGKRHALGGCFFEPTILVDVQPSMMVAREETFGPVAPLFRFHTEDEALRLANDTEFGLAAYLYSRDASRIWRVSAGIESGMVGINCGLISNEVAPFGGVKQS

SEQ ID NO: 91854 - protein, 285 aa, Unknown
  Bacterial polypetide isolated from the Sargasso Sea
DRLSKWLTLEVGKPLSEGAGEVGGAADIFEWNSEETKRIFGEINQSRFPNTKIHVIYQPVGVVAALVPWNFPVILASRKISTALAAGCSVIVKPDVITPGSVMEIVDICKEAGVPPGVVNLLSGDPAAISSELIQSDIIKKISITGSTRVGKLILKQAADKVQRVTMELSGHSPFIVFDDVDLNKVTDMAITAKFRNNGQVCISPNRFYIHEKKKDEFADLMVKKTKKLKMGNGMDKDTLLGPLCTKERLEGVERLVETTKKEGGKVLLGGKRAANFNKGYYYDP

SEQ ID NO: 91855 - protein, 181 aa, Unknown
  Bacterial polypetide isolated from the Sargasso Sea
MKNHENIYINGEWVSSGGDGSIEVMNPSTEEVVGSIPDGVASDVDAAVESARAAFPAWSALSLEDRLSFIEGLAGQLAARSEEVGELISTEMGMPQPLANIIQAGLPAGTTASVLETARSFAFEEQMGNTLVTREPMGVVGCITPWNYPLHQIMAKVAPALAVGCTVVLKPSEVAPLNAFL

SEQ ID NO: 91856 - protein, 253 aa, Unknown
  Bacterial polypetide isolated from the Sargasso Sea
VVVRDSENPEDLIKRASLLRNDSVHGTFPGTIRVNRKNNSLIVNGNEIVFIYASDPRKVDYKKYGIKKATIIDNTGVWRDEDGLKKHVKNPSVERVVLTAPGKGKIKNIVYGINDHKVSEEDKILGAASCTTNAIVPALKVVDDNFKILSGHIETVHAYTNDQNLIDNYHSADRRGRSAALNLVITDTGAAKAISSILPELKGKITANAIRVPTPNVSLAIMHLNIKKGVSVEDLNQCFRNAAFHSNLRTTID

SEQ ID NO: 91857 - protein, 302 aa, Unknown
  Bacterial polypetide isolated from the Sargasso Sea
KERGNRKTWLDKKNFYINGAWVKPNSSEEIKVIDPATEENCAVITLGNKADVDNAVNAAKDAYESWAFSSKEERIGLLEKLYENYKKRWADIAEAITLEMGAPKDFATKLQAGTGASHIKSFIRYLKNFEFEKPLGDHAPNQRLIYEPKGVCALITPWNWPMNQVCLKVMPAIASGCTMVLKPSELAPLSSMILAEIIDEVKFPKGVFNLVNGDGATTGDALTSHPDINMISFTGSTRAGALISQNAAKDFKRVSLELGGKGANIIFKDADPEAIERGALRCFRNSGQSCNAPTRMLVEKIN

SEQ ID NO: 91858 - protein, 314 aa, Unknown
  Bacterial polypetide isolated from the Sargasso Sea
WFAEEAKRIYVDIIPDRLSDRRIIVIKQPVGVVAAITPWNFPSSMITRKCAPALAVGCPVVIKPASQTPLSALALAVLAEEAGFPKGVINIITGDANEIGTEMSSNPIVRKLSFTGSTEIGKILLAQCSNTVKKVSMELGGHAPFIVFDDANIEESVVGAIQSKFRNTGQTCVCANRIFVHEKIYDEFLEKFTRAVSKIKVGDGFADDTTSGPLIDEYSLKKVKEHVKDAINNGASVAIGGDIHRLGGNFYQPTVLSNVSMKSKITYEETFGPVAPLYKFSNDQEVIKMANDTPYGLATYFYSRDIGRAWKVAE

SEQ ID NO: 91859 - protein, 266 aa, Unknown
  Bacterial polypetide isolated from the Sargasso Sea
IQSDIIKKISITGSVRVGKLILKQAADKVQRVTMELSGHSPFIVFDDADVKKAADMAISAKFRNNGQVCISPNRFYIHEKKKDEFVDLFIEKTKKLKIGNGMDPETQLGPLTTQKRLNEVEALVEKTKKEGAKVLLGGKKPAGFNKGFFYEPTIFDDVKDDFTIMKEEPFGPLVPMLSFKSFDEVIERANNHDLGLCSYVCTNSMEIAHLASEQLETGSVAVNTGFVAIAEAPFGGIKQSGYGREGGSNAIKDYLNVKYTHLGIKG

SEQ ID NO: 91860 - protein, 168 aa, Unknown
  Bacterial polypetide isolated from the Sargasso Sea
MYSKFGQFIDGKWQQAEKKETYEVINPATEEVIGKASKASSVDVDKALKSAEKGLKVWRNTPPWQRSYIIRKIADLMREKKNNLAKWLTLEVGKPLAEGVGEVGGAADIFEWNAEETKRIYGQTVESRFPDSRVHVYYQPVGVVAALVPWNFPIVLASRKISTALAAG

SEQ ID NO: 91861 - protein, 84 aa, Unknown
  Bacterial polypetide isolated from the Sargasso Sea
ETEEEAIAITNDTSYGLGNYLQTEDKEKAKRVARKVRAGTVYINGQATDTGMPFGGYKQSGNGREGGVWGFTEFLEVKAITGWN

SEQ ID NO: 91862 - protein, 290 aa, Unknown
  Bacterial polypetide isolated from the Sargasso Sea
MTNTVTTINPYTEHPIKEYRLLDEKAAQQAVDNADKCFQSWKLVSIKERAALALNLAKVLESQQQQLAQLMTDEMGKLKAQGLQEVQLCADICRYTAKQAAEVLADEQRNTENGRAIISYQPIGVVLGIQPWNFPLYQVIRYSIVNLVAGNTTVLKHASNVFGMAEKIAAMFLEAGFPTHCYQSLLIDGDTATGLISHPKIRGISFTGSDEVGKSVAAAAAKLAKKTVLELGSNDAYLILDDADIELAVKTCVEGRMVNNGETCVAAKRFIVTEKNYADFKHAFATAMAH

SEQ ID NO: 91863 - protein, 179 aa, Unknown
  Bacterial polypetide isolated from the Sargasso Sea
QGKRLAEAKGEILMGASYIEFYAEEAKRVYGDIVRDPRLGKRIVIIKQLVGVVGAITRWNFLNSMITRKCAAALGVGCTKVVKLASQTQYSALAVAVLAKEAGFLDGVFNVIIGLASEIGKELTSNFIVRKISFIGFTEVGKILLEQSVSIVKKVSMEFGGHASFIVFDDADMDEVVVG

SEQ ID NO: 91864 - protein, 334 aa, Unknown
  Bacterial polypetide isolated from the Sargasso Sea
VRAEELAEDQRLLPRGVVLCISPWNFPLAIFLGQVAAALVTGNTVIAKPAEQTSIIAQRAVDIMHSVGLPEDALKLIVSPGKEVGETLLPDERIKAVMFTGSTQTGTLISQVLAERGGEQVPLIAETGGQNCMIVDSTALPEQVVDDVIHSGFQSAGQRCSALRVLFVQDEIADDLIEMLTGAMKELTVGDPTQLATDVGPVIDEKALKSLTDHQEYMEDKAKLLYRNEMPAGFENGTFFAPTLYEIKNIDVLEKEVFGPVVHIVRFKSKNLDSVLEQINGTGYGLTMGIHSRIEERANELAAKSRAGNVYINRNMIGAIVGVQPFGGRGLSGT

SEQ ID NO: 91865 - protein, 224 aa, Unknown
  Bacterial polypetide isolated from the Sargasso Sea
WKRSYKIRKIADLMRERKHELAKWLALEVGKPLVEGEGEVGGGADIFEWNAEETKRIFGQTVESRFEDTRVQVIYQPIGVVAALVPWNFPIILASRKISTALAAGCSVIVKPDVITPGAVMELMNIINDAGIPPGVVNLLSGDPEEVSNELISSDIVKKVSITGSTRVGKLILKKAADKVQRVTMELSGHAPFIVFEDSNIDKVTDMAITSKYRNNGQVCISPQ

SEQ ID NO: 91866 - protein, 153 aa, Unknown
  Bacterial polypetide isolated from the Sargasso Sea
MQEVLKLQREHFLNEGPPSYELRIDRLDRVQDMVIQNKERITEALNADFGSRSANQSLISDVYAILPAFSHAKKHLKSWMKDEKRKSNFPFGLMGAKSYIHREPLGVVGMISPWNFPMYLSLAPLAGIFSAGNQVMHKPSEFTPITSELLKEI

SEQ ID NO: 91867 - protein, 259 aa, Unknown
  Bacterial polypetide isolated from the Sargasso Sea
KTLTLEMGKPINEAKIEMGFVIDVTRWYGEEGKRAYGRLIPARVPGARQMVIKEPVGPSCAFVAWNFPGTNVIRKVAGALAAGCSMLIKPSEETPGTAVAIARCFQEAGLPNGALNVVFGIPDNVSRKVLGSWIPRKMSFTGSIPVGKHLQKLAADTMKRCTMELGGHSPVIVFDDADIENALNITAGFKFRNAGQVCISPTRFYVQDKAYKSFVDGFTDRARAIKVGNGIEDGIQMGPLIDARRLPIMEDFVSDAKDR

SEQ ID NO: 91868 - protein, 252 aa, Unknown
  Bacterial polypetide isolated from the Sargasso Sea
MSLSSLEKNLNQLQDLRERFRREPIKHFIDGEWVSSSNKETFINGSPIDESIIGEVALGTQQDVDEACQAAHNAFSDWAAMSGAKRRELLHAIADSIEANAEEIALVESLDTGQPIRFMSKAAIRGAENYRYFADMAPSARDGLALPAQKHMNYTVRQPIGPVGVITPWNTPFMLSTWKIAPALAAGCTVVHKPAEWSPCTAALLARLMEEAGLPKGVINTVHGLGETTGKALTENALIRAIAFVGESATGS

SEQ ID NO: 91869 - protein, 305 aa, Unknown
  Bacterial polypetide isolated from the Sargasso Sea
TDNAVKAAKTAFKTWKETSKEERLDLLEKLLVVYKKRFGEMAEAISLEMGAPMDWATDVQTGSGQAHLEDFILRLKEFNFDEHFDQKSNNHICYEPIGVCGLITPWNWPINQIALKVVPAFATGCTMILKPSEIAPISGMLFAEMIDEVGFPDGVFNLVNGDGAGVGTQISSHPDIDMVSFTGSTRAGRLISKNAAETIKRVCLELGGKGGNIVFADSYKNAVRDGIRNVMSNSGQSCDAPTRMLVEKSIYKRAVDEAVDEANKINVDQASKKGDHIGPVISKTQYDKIINLIESGISEGATLAA

SEQ ID NO: 91870 - protein, 92 aa, Unknown
  Bacterial polypetide isolated from the Sargasso Sea
VLSILPYKDEEEAVNIANDTEYGLYGYVSSGDVEHAKKVANRIRAGSIAINGAQADFTAPFGGYKQSGNGKEWGPFGFEEFLETKAVVGYAD

SEQ ID NO: 91871 - protein, 253 aa, Unknown
  Bacterial polypetide isolated from the Sargasso Sea
MINGRWEIGTTTGVSTNPSDTREVVAEYARADRNQTELAVRAAADALPTWSQSTPQRRADVLDMIGSELLARKDELGALLAREEGKTLPEGVAEVARSGQIFKFFAGEALRIQGELLASVRQGVQVDVTREPVGVVGIIAPWNFPFAIPAWKIAPALAYGNTVVFKPAELVPACGWALAEIISRSGLPAGAFNLIMGSGREVGQTLVDHPLVNALSFTGSVSTGDRILRAASARRAKVQLEMGGKNPLIVLAD

SEQ ID NO: 91872 - protein, 317 aa, Unknown
  Bacterial polypetide isolated from the Sargasso Sea
LAAGCTMVVNPAEATPLCAKAVFQIFEKASFPPGVVNLVTADNPKPIGDMFINDARIRKITFTGSTKIGKMLAEGAGRGLKRISLELGGHAPFIVCADADPVHAAKGLSLVKFLNSGQACISPNRIYVHARQEKAFLDELKSRVSKLKAGPGLEQDSKIGPLINQQALEKVENQVQDALKKGAKLISGGERIRDDSCTNGFFYAPTILNQVTPEMLIYREETFGPVAPVIIYQDEDDLLEMANDTHYGLASYVYTQNLKSAMWLFEGLDFGIVGINDINPTSAAAPFGGIKDSGIGREGASEGIHEYLETKLGGFSI

SEQ ID NO: 91873 - protein, 261 aa, Unknown
  Bacterial polypetide isolated from the Sargasso Sea
WKETLVDERINFLEKLLKVYKKRFNEIAEAMSMEMGSPIDYATMVHAASGQAHLEDFILRLKNFKFGEDFNSKSNNYIAREPIGVCGLITPWNWPINQIALKVIPAFATGCTMILKPSEIAPISAMLFAEMIDEAGFPPGVFNLVNGDGAGVGTDISGHPDIDMISFTGSTRAGKLITKNAADTIKRVCLELGGKGGNIVFADSYPNAVRDGIRNVMSNSGQSCDAPTRMLVEKSIYERAIKEAADEANKIKVDLASKKGD

SEQ ID NO: 91874 - protein, 123 aa, Unknown
  Bacterial polypetide isolated from the Sargasso Sea
KSLGDIIPDLKGKVEGISIRVPTPNVSLVEFIFSSKKNLSIKEINNLFLKASKSELKNILDTTSEKLVSSDFNHNSHSSIVDLSLTQVADNKMAKVSAWYDNEWGFANRMCDLAVYLGNLNKK

SEQ ID NO: 91875 - protein, 224 aa, Unknown
  Bacterial polypetide isolated from the Sargasso Sea
IVFDDADIKKAADMAVAAKFRNNGQVCISPSRFYIQENKKDEFINLFVEKTKKLKIGDGMDPSVNLGPLTTKKRLNEVEELVETTKKEGAKVLLGGKRPKGFNKGFYYEPTIFDNIKDDYTIMKVEPFAPLVPMLSFKSFEEVIERANNHELGLSSYICTNSMDKAHRASELMEAGTVAVNTPLVALAEAPFGGIKQSGYGREGGSMAIKDYLNVKYTHLGLKG

SEQ ID NO: 91876 - protein, 280 aa, Unknown
  Bacterial polypetide isolated from the Sargasso Sea
MKTISHFIDGKIYSDGKSRKGPIFNPAIGEQIAEVELGSKATVEKAIESSSKAFITWSKTTPISRARILSKYKDLLIKNMEELAVMVSEQHGKTIADAKGSIQRGIEVVEYATGITDSLKGDHSTSVGTNVDSHTLRQPLGVCAGITPFNFPAMVPMWMYPVSIACGNTFVLKPSEKDPSCPMRLAEIAIEAGLPAGVLNVVNGDKEAVDTLLENKTVQAISFVGSTPIAEYVYHTGTKNNKRVQALGGAKNHMVIMPDADVNKTTDAIIGSAFGSAGER

SEQ ID NO: 91877 - protein, 129 aa, Unknown
  Bacterial polypetide isolated from the Sargasso Sea
MEEEIFGPILPVVKVKSLDESINYVNSNEKPLALYLFSSKSSSHNRVLKNTSSGGMVINDCVLHHMNPNLPFGGINNSGVGSYHGKFGFDAFSHHKAVLRSSSLSPFKIMLPPYTKTKETLANLIKKYF

SEQ ID NO: 91878 - protein, 267 aa, Unknown
  Bacterial polypetide isolated from the Sargasso Sea
AWKKLSAFERSKIMRKAAEILKSRTKYIAELMTIESGKPIADAEIELGMGIDQIEWFAEEGRRAYGRIIPSRLKIVNQFVFKEPVGVVAAFTPWNWPVQQTARKIAPALAAGCSIIVKGPEETPTSTAEFVKAFDEAGIPKGTLNLVFGIPSEISKYLIPHPIVKKVTFTGSTQVGKQLMSLAGLHMKKVTMELGGHSPAIICEDANIETAVNVLVGTKFRNAGQICISPSRFLVHKKIYEKFLNLFVENVRLKKVGNGLEDDIKMG

SEQ ID NO: 91879 - protein, 292 aa, Unknown
  Bacterial polypetide isolated from the Sargasso Sea
KNTTAKERSIILKKWSDLIIEHVDDLAKIMTIEQGKPLAEAKGEILMGASYIEFYAEEAKRVYGDIIPDPRPGKRIVIIKQPVGVVGAITPWNFPNSMITRKCAAALAVGCTTVVKPASQTPFSALAVAELAKAAGFPNGVFNIITGSAKEIGMELTKNPKIKKISFTGSTEVGKILMEQSASTVKKLSMELGGHAPFIVFEDANIDEAVTGALQSKFRNSGQTCICTNRLFVHEKVYDSFLEKFTNEVKKIKVGNGLNDGIVSGPLIDKSSLDKVIDHVQDAVNTGAKIAV

SEQ ID NO: 91880 - protein, 120 aa, Unknown
  Bacterial polypetide isolated from the Sargasso Sea
TNVKNNMRIAQEEVFGPVLSIIRFKDEEDAIKIGNDILFGLAAGVWTSDIGRALRMADKLKAGTVWVNTYRAVSYMSPFGGYKRSGQGRESGQECIKEFLETKSVWISHETSTANPFIIK

SEQ ID NO: 91881 - protein, 74 aa, Unknown
  Bacterial polypetide isolated from the Sargasso Sea
NDTEYGLGNYLQTEDKDKAKRVSKKLRSGIVYINGNSPDPGTPFGGYKQSGNGREGGSWGLEEYLEVKTITGWK

SEQ ID NO: 91882 - protein, 80 aa, Unknown
  Bacterial polypetide isolated from the Sargasso Sea
KINSIVLQASKTKKLNGILTTNSLPLVSIDFNHNSSSSVFDMSQTQVVKDKFCRVLSWYDNEWGFSNRMVDTMVNLKKFI

SEQ ID NO: 91883 - protein, 246 aa, Unknown
  Bacterial polypetide isolated from the Sargasso Sea
NLKKVSLELGGKDPMILCDDADIEIAAQGASWGGFVNAGQVCTSIERVYVFENVMDQFTEAIIEEAKKVVLGDPMKEDTHIGPMASKLQQEKAIEKVNQAIKDGARLLTGGSVPKNLDRGYFYQPTVLDNIEPNMEIITEEAFSPVLPIQKVSSIEEAIQWSNDSVYGLGCSIFTNDIDRALTAADDIKSGTVCINSPLMENIAAPFGGMKQSGIGREHGKEALDEFREAKHIFIDYKQESKDWWF

SEQ ID NO: 91884 - protein, 172 aa, Unknown
  Bacterial polypetide isolated from the Sargasso Sea
MKVSSVLDTSHLKVKFPFKAKYGNYINGKFVEPKSGKYFDNVSPISNEKICSVARSNEKDVEAALDAAHAAFPEWGKTDITTRSNILYKIADVLEKNLNLLAVAECLDNGKPIRECMAADLPLVIDHWRYFAGVIRAEEGSIAEISNNQYSYNFHEPLGVVGQIVPWNFPII

SEQ ID NO: 91885 - protein, 50 aa, Unknown
  Bacterial polypetide isolated from the Sargasso Sea
AITPWNFPAAMITRKAGPSLSAGCPIIIKPASSTPFTATGLVELANRAGI

SEQ ID NO: 91886 - protein, 64 aa, Unknown
  Bacterial polypetide isolated from the Sargasso Sea
LQTEDKEKAKRVSKKLRSGIVYINGNAPDSGTPFGGYKQSGNGREGGNWGLEEYLEVKTITGWN

SEQ ID NO: 91887 - protein, 79 aa, Unknown
  Bacterial polypetide isolated from the Sargasso Sea
DIANDTEYGLGAGVFTKDLKKASWTASKLEAGQVYVNKWFTGNHATPFGGYKQSGYSREKGVDGLKSYLQVKNVGISLG

SEQ ID NO: 91888 - protein, 188 aa, Unknown
  Bacterial polypetide isolated from the Sargasso Sea
MYEKFGQFINGKWQQSSDKSTYEVINPANEEILGKASKATPEDVNLALKSAQKGLEVWKQTPPWQRSYIIRKIADKMREKQEVLAKWMTLEVGKPFLEAKGEVSGAADIFEWNAEETKRIYGQTVESRFVDTRVHVYYQPVGVVAALTPWNFPLVLSSRKISTALAAGCSVIVKPDVITPGTVMELVD

SEQ ID NO: 91889 - protein, 275 aa, Unknown
  Bacterial polypetide isolated from the Sargasso Sea
KIQHINNRADIETACALLKRDSVHGKFNADISIEKNYININGDKICYSQKDKLEEINWKDNDVDFVMECTGKFNSKEKLIPHLNNGAKKVIVSAPCKDADRTIVFGVNEKELKMEDKIISAASCTTNCLAPVAHVLNENFEIEKGFMTTIHSFTTDQRILDNSHKDLRRARTASQSIVPTSTGASKAIGEIIPSLKGKLEGVAMRVPTPNVSLIELIFCSKKDLSVEKINSAFKNFSKKQKIKVLEITEEKLVSIDFNHNPASSIVDASYNKCYR

SEQ ID NO: 91890 - protein, 298 aa, Unknown
  Bacterial polypetide isolated from the Sargasso Sea
INPSNEEAFAIITLGSKEDTDTAVEAAKNAFVNWKEISKEEKISLLEKLLKIYKKRFNEMAEAMSMEMGSPIDFATSTHTASGQAHLEDFILRLKEFEFEEHFNSKSNNHITREPIGVCGLITPWNWPINQIALKVIPAFATGCTMILKPSEIAPISAMLFAEMIDEVGFPAGVFNLVNGDGAGVGTQISGHPDIDMVSFTGSTRAGKLITKNAANTIKRVCLELGGKGGNIVFADSYPDAVRDGIRNVMSNSGQSCDAPTRMLVEKSIYERAVREATDEANKIKVNIASKKGDHIGP

SEQ ID NO: 91891 - protein, 312 aa, Unknown
  Bacterial polypetide isolated from the Sargasso Sea
DGKWQQAEKKETYDVINPATEEVIGKASKASSTEVQKALKSAEKGLEVWKNTAPWQRAYVLRKIADLMREKKDIIAKWLTLEVGKPLTEAVGEVGGGADIFEWNAEETKRIYGQTQQSRFPDTRVHVYYQPVGVVAALVPWNFPIVLASRKISTALAAGCSVICKPDVITPGAVMELVNICKEAGVPDGVVSLLSGDPAEISNELMESDIIKKVSVTGSTRVGKIILKKAADKVQRVTMELSGHSPFIVCEDVDMNKVADIAITGKFRNNGQVCISPNRFYIQENRKDEFVNAFIERAKKLKIGNGMDKGVD

SEQ ID NO: 91892 - protein, 255 aa, Unknown
  Bacterial polypetide isolated from the Sargasso Sea
PAMVPMWMFPMALATGNTFVLKPSERDPGAPMMLARLLKQAGLPDGCFNIVHGDKEAVDALLDNPDIAAISFVGSTAIGKYIYSRGCANGKRVQALCGAKNHMVIMPDADMGQAVDAAMGAAYGSAGERCMAISAVLAVGDDTADRFVEALAPKVRALKIGQYDEPGVEMGPVITAESKARVKDYIHQGEAAGATVVVDGRNLKLQGYENGFFVGGTLLDHVTPDMSVYRDEIFGPVLSVMRPKSYEEARQLVID

SEQ ID NO: 91893 - protein, 272 aa, Unknown
  Bacterial polypetide isolated from the Sargasso Sea
MYVKYEPVGVVAGLIPWNFPIVLSSRKISTALAAGCSVICKPDVITPGSVMELMNIINDAGVPPGVVNLLSGDPAQISSQLISSDIVKKVSITGSTRVGKLILKQAAEKVQRVTMELSGHSPFIVFDDVDINKVTDMAITAKFRNNGQVCISPARFYIHEKKKDEFAKTLVEKVSKLKIGNGMDDDTILGPLTTEKRLNEIEALVEKTKKEGATVLCGGKRPSGFNKGYFYEPTIFDNVQDNFTIAREEPFGPLVPLLTFKDTDEVVKRAND

SEQ ID NO: 91894 - protein, 276 aa, Unknown
  Bacterial polypetide isolated from the Sargasso Sea
MLDKKNFYINGVWVKPNSSKEIKVIDPATEENCAVITLGNKADIDNAVNAAKDAYESWAFSSKEERIGLLEKLYENYKKRWADIAEAITLEMGAPKDFATKLQAGTGASHIKSFIRYLKNFEFEKPLGDHAPNQRLIYEPKGVCALITPWNWPMNQVCLKVMPAIASGCTMVLKPSELAPLSSMILAEIIDDVKFPKGVFNLVNGDGATTGDALTSHPDINMISFTGSTRAGALISQNAAKDFKRVSLELGGKGANIIFKDADPEAIERGALRCFR

SEQ ID NO: 91895 - protein, 259 aa, Unknown
  Bacterial polypetide isolated from the Sargasso Sea
FNADIKFDKKYLFINKNKISFSQESALENIDWKKNGVDYVFECTGKFNSKEKLLSHIKKGAKKVIVSAPCKNADKTIVFGVNEKILTRSDLIISAASCTTNCLAPVVSILNNNFEIEKGFMTTIHSFTSDQRILDNSHKDPRRARSASQSIVPTSTGASKAIGEIIPSLKGKIEGVAMRVPTPNVSLIELVFCTKKEVTKEKINYSFLNASKTKFKRIVDITDEKLVSIDFNHNAFSAIVDASLTCVIGKNMGKISAWY

SEQ ID NO: 91896 - protein, 104 aa, Unknown
  Bacterial polypetide isolated from the Sargasso Sea
VSVIDLTFMPAKPATVETVNAAVRSAARAGSLAGILDVADAPLVSSDFNHDPHSSIFAEAQTTVTEGGMVRVLSWYDNEWGFSNRMLDTAAKLAAVGQSARAAA

SEQ ID NO: 91897 - protein, 45 aa, Unknown
  Bacterial polypetide isolated from the Sargasso Sea
YPAHSPFGGYKQSGVGRETHKMMLNHYRQNKNLHVSYAEKKLGFF

SEQ ID NO: 91898 - protein, 231 aa, Unknown
  Bacterial polypetide isolated from the Sargasso Sea
FKNILKDFKFERDLGEEKNNQKLLYEPKGVCALITPWNWPINQVNLKVIPALASACTVVLKPSEIAPLSSMLLAEMIDEVKFPAGVFNLVNGDGEITGDALTSHPDIDMISFTGSTRAGALISQNAAKDFKRISLELGGKGANIIFKDADSDAVARGVQRCFRNSGQSCNAPTRMLVEKSIYNETVDKVKELANSTKVDLPGKDGEHIGPVVSETQFNKIQNLIQKGIDEG

SEQ ID NO: 91899 - protein, 268 aa, Unknown
  Bacterial polypetide isolated from the Sargasso Sea
DESIIGSIAAGTKEDIDVAVAAAKEAFKSFGFSSKEDRITLLENIISEYEKRSEELAQTISAEMGAPLWLSNVAQVTSGLSHFKDTLEVLKTFEFETTENEYIVRKEPIGVIGMITPWNWPMNQMCTKVASAIASGCTMVLKPSEITPFCGILFTEILDAAKVPAGVFNLVNGMGPIVGAALSEHQDIDMMHFTGSTRAGVAVAIASAPTVKRVAQELGGKSANIILDDADIEKAAGAGANHCFMNTGQSCNAPTRMLVSSKNYDKAV

SEQ ID NO: 91900 - protein, 230 aa, Unknown
  Bacterial polypetide isolated from the Sargasso Sea
SGHSPFIVFDDADTKKAAYMAIAAKFRNNGQVCISPNRFYIHESKKDEFVNLFVDKTKKLKIGDGMNPETQLGPLTTKKRLNEIEELVEKTKQEGAKVLYGGKRPAGFNKGFFYEPTIFDNVKDDYTIMKQEPFGPLVPMLSFKSFDEVIERANNHELGLCSYVCTNSMEKAHLASEQLETGTVGVNTGMIAIAEAPFGGIKQSGYGREGGSNAIKDYLNVKYTHMGLKG

SEQ ID NO: 91901 - protein, 256 aa, Unknown
  Bacterial polypetide isolated from the Sargasso Sea
KSAEKGLEIWKNTSPWERSKIIRKISDLIRKKTDILSKWLTLEVGKPISEAPGEVGGAADIFEWNSEETKRIFGETNQSRFSNTRIHVYYQPVGVVAALVPWNFPIVLASRKISTALAAGCSVIVKPDVITPGSVMELVDICNEAGLPPGVVNLLSGDPAEISNELIKSDTIKKISITGSTRVGKLILKQAAEKVQRVTMELSGHSPFIVFEDVDLNKVTDMAISAKFRNNGQVCISPSRFYIHESKKKDFTNLMI

SEQ ID NO: 91902 - protein, 308 aa, Unknown
  Bacterial polypetide isolated from the Sargasso Sea
DCNVINPSTEENCAVISIGSKEDINLAVKSAKDAFNEWAFTSKEEKIKLLETLYANYKKRWADFANAITMEMGAPKDFATKLQAGTGASHMKSFIRYLKNFEFEKPLGEHAPNQRLLYEPKGVCALITPWNWPMNQVCLKVMPALSAGCTMVLKPSELAPLSSMILAEIIDETKFPSGVFNLVNGNGEITGNALTSHPDIDMISFTGSTRAGALISKNAANDFKRVSLELGGKGANIVFKDADPDAVERGATRCFRNSGQSCNAPTRMLVEKSIYKATVDRLIKFANDFKVDDPTKEGDHIGPVIQKH

SEQ ID NO: 91903 - protein, 178 aa, Unknown
  Bacterial polypetide isolated from the Sargasso Sea
MPSSLADVINNDFKILSGFMTTIHSFTTDQRLLDNSHKDPRRARSAVQSIVPTSTGASKSIGEIIPDLKGKIEGISVRVPTPNVSLVEFVFCTKKNLTVSKINNLFTKKSNKQLKGILEVTNEKLVSIDFNHNPNSAVLDSSLTSVIGTNMGKISAWYDNEWGFSNRMCDLVKYIHKI

SEQ ID NO: 91904 - protein, 138 aa, Unknown
  Bacterial polypetide isolated from the Sargasso Sea
RARSASQSIVPTSTGASKAIGEIIPNLKGKLEGVAMRVPTPNVSLVELIFCTKKDINIKKINDAFEQSSKNKLKKILEVTHEKLVSIDFNHHPASAIVDASLTNVVGSNMGKISAWYDNEWGFSNRMCDIAETLHKIS

SEQ ID NO: 91905 - protein, 56 aa, Unknown
  Bacterial polypetide isolated from the Sargasso Sea
AGIVWTNCYHAYPAHSPFGGYKQSGVGRETHKMMLNHYRQNKNLHVSYAEKKLGFF

SEQ ID NO: 91906 - protein, 146 aa, Unknown
  Bacterial polypetide isolated from the Sargasso Sea
MNLSKFYIDGDWVDPIEPNSIPVINPASEDSIGNVSIGSKEDVDKAVQAARNAFQSFSKTLVSERVELLTEIRNIYKKRFDDIATAIQTEMGAPNSLARGSQATVGLSHLKTAIRVLENHKFEFKHGSYVVRHEPIGVCGLITPWN

SEQ ID NO: 91907 - protein, 244 aa, Unknown
  Bacterial polypetide isolated from the Sargasso Sea
MNIGINGLGRIGRLVIRDFFGGTIRKFDTPNSNIIHVNDPHFNAETLCHLLKHDSVHGIWDASIKTLGNDRITINGNELRLTNFINPSDVNWRQSHCNVVLDCTGKFLSKEKLQGYFNSDIKKVIVSAPINDPEILNIVFGVNDHLYDPSKYNIITAASCTTNCLAPIVSVVHKNLEILKGQITTIHNPTNTNVLLDKPHKDLRRARSTMLSMHPTSTGSAKAIGLIFPRIKRKTRWPRSQGTS

SEQ ID NO: 91908 - protein, 301 aa, Unknown
  Bacterial polypetide isolated from the Sargasso Sea
MIDKSKFYINGKWINPTIKNDYEVINPSNETPYAFISLGNKEDVNVAVNAAKNAFLEWSQIDKETKIILLEKLSKIYKSRWDEITNTMSEEMGAPLDWSSSAQTSSGFDHINDFIKRLKEFEFEKKFEDKSNNYIVYEPIGVCGLITPWNWPINQITLKVIPALASGCTMILKPSEIAPLSGMLFAEIIDEAGFPPGVFNLINGDGAGVGTDLSSHSDIDMISFTGSTRAGKLISKNAADTIKRVCLELGGKGGNIVFSDSHPDAVREGVRNIMSNSGQSCDAPTRMLVEKSIYDRAIEEA

SEQ ID NO: 91909 - protein, 272 aa, Unknown
  Bacterial polypetide isolated from the Sargasso Sea
SPSKPNDLEVINPSNEDPYAVISLGSKEDIDKAVKAAKTAFESWKKTSKEERLKLLEKLLEIYKKRFSEMAKAISDEMGAPMDWATDVQTGSGQAHLEDFILRLKKFNFDEHFDSKSNNHICYEPIGVCGLITPWNWPINQIALKVVPAFATGCTMILKPSEIAPLSGMLFAEMIDEAGFPSGVFNLVNGDGAGVGTNISGHPDIDMVSFTGSTRAGRLISKNAADTIKRVCLELGGKGGNIVFADSYPNAVRDGIRNVMSNSGQSCDAPTR

SEQ ID NO: 91910 - protein, 62 aa, Unknown
  Bacterial polypetide isolated from the Sargasso Sea
ILKKHLGTASKLEAGQVYVNKWFTGNHATPFGGYKQSGYSREKGVDGLKSYLQVKNVGISLG

SEQ ID NO: 91911 - protein, 71 aa, Unknown
  Bacterial polypetide isolated from the Sargasso Sea
SKTKKLNGILTTNSLPLVSIDFNHNSSSSVFDLSQTQVVKDKFCRVLSWYDNEWGFSNRMVDTMVDLKKFI

SEQ ID NO: 91912 - protein, 318 aa, Unknown
  Bacterial polypetide isolated from the Sargasso Sea
WNFPIAIPAWKLAPALAYGNAVVMKPAELTPGCAWELAKILDEAGCPAGIFNLVMGPGSKVGARIVEHEDIAAVSFTGSVATGRQVAVDCAARGKKVQLEMGGKNPMVVVDDADLEVAIGACLNGAFFSTGQRCTASSRLIVTAGIHDAFLDKLTTAAADLVIGDPLDSKSQIGPVVDQGQLDQNLEYLALAATEGCDVRGGGLGNGNGYFMHPAIFAGASNQMRVSREEIFGPMASVIKVADYDEALVVANDTEFGLSSGICTTSLKLATDFRRNAKAGMVMVNLPTAGVDYHVPFGGRKGSSYGPREQGSYAREFY

SEQ ID NO: 91913 - protein, 269 aa, Unknown
  Bacterial polypetide isolated from the Sargasso Sea
SELTIKLSRLTFPYLILISLVTLYSGILNSLGKFASVAFTPIILNLFLIIGITSTNFININSGELIAIAVTLAGIFQLLWLLFPLYKLDIKIFLTLPYYTKKQKEFFKLFLPGVIGASVVQINLLTDIIFASLLSKGSISFLYFADRINQLPLGVIGVALSTALLPILSKKIAAKEEEKAIDIQNRSIELALFFGIPAMFVFIFFPQEIIKPLFQRGAFTSSDTISTANALAAYAYGLPAYILLKIFSVSFFSRKNTSIPVKVAIFAVC

SEQ ID NO: 91914 - protein, 203 aa, Unknown
  Bacterial polypetide isolated from the Sargasso Sea
GETLQGRLPETRIHVYYQPVGVVAALVPWNFPITLAARKISTALSAGCSVIVKPDVITPGSVMELVNICNEAGVPPGVVNLLSGDPSFISDNLLSSDIIKKVSITGSTRVGKIILKKAAEKVQRVTMELSGHSPFIVFEDADIEKVTDIAIFAKFRNNGQVCISPSRFYIHESKKNDFTKLIVEKSKKLKIGNGMDNNVALGT

SEQ ID NO: 91915 - protein, 137 aa, Unknown
  Bacterial polypetide isolated from the Sargasso Sea
SNNHIYYEPIGVCGLITPWNWPINQIALKVVPAFATGCTMILKPSEIAPISAMLFAEMIDEVGFPKGVFNLVNGDGVGVGTQISSHPDIDMVSFTGSTRAGRLISKNAAETIKRVCLELGGKGGNIVFADSYKNAVR

SEQ ID NO: 91916 - protein, 45 aa, Unknown
  Bacterial polypetide isolated from the Sargasso Sea
MVDVNGAGIAVDAPFGGYKHSGIGREAGKEGLTEFLEVKSVGGWN

SEQ ID NO: 91917 - protein, 81 aa, Unknown
  Bacterial polypetide isolated from the Sargasso Sea
RRGYFIANDTPYGLTNYIQTHDKEKVKRVARKLRSGMVDVNGVGIAVASPFGGYKHSGIGREAGTEGLIEFLEVKTVGGWN

SEQ ID NO: 91918 - protein, 250 aa, Unknown
  Bacterial polypetide isolated from the Sargasso Sea
CNFDSSGIYENVIKSHNLLKQGIHKVIITHSPNDSVDHTVIIGANENSFDISKHRIISSSICDANACAPILKIIDEELSIVDGFITTLHPWLGYQNLLDGSLRSVSSPGHYWSDFSLGRSSTESLIPKPTTLVPALQKALPEITSNIFAMSFRVPTSIVSASDMVLSLKKHTTIQYIEELFIELEKLYPDVIRINNESLVSIDFKGIKQSCVIDMRWLKVFQNKVKLVLWYDNEWGYSNRIVDMVKLLNK

SEQ ID NO: 91919 - protein, 271 aa, Unknown
  Bacterial polypetide isolated from the Sargasso Sea
TTEKSKKHNVDYLIMSAPPKDLDITPMYCPGVNDKDYKGESIVSVASCTTNCLTPFLKKIIQTNHTIEDVNFITIHASTASQSIVDEANTSKRTSRSVWNNIIPHSTGAQKTVNYLLPSLKDKVKGTSLRVPINTVSMIDVNIRFSQTIDKDNLLTSLVTDDIFNISEEKLVSSDYIGTTAPSILDKSCTIQLTPQTIKFGLWYDNEWSFCTQMIRMTKKIHHYTTKKHNSLLDLDFRQKRVFIRCDFNCPKGDDFRIQSAIPTIQYILTQ

SEQ ID NO: 91920 - protein, 200 aa, Unknown
  Bacterial polypetide isolated from the Sargasso Sea
MTIKIGINGMGRIGRMVVRSIVESNNKNLKINHINNRSNSETTSKLIKYDSIHGKLNANLDYDTNHLIINKNKITFSQKTKIEDINWKKYDVDYVFECTGKFNSKEKLLDHLENGAKKVIVSAPCKNADKTIVFGVNENIITKEDKIISAASCTTNCLAPVTSVLDEKFEIEKGFMTTIHAFTSDQRILDNSHKDPRRAR

SEQ ID NO: 91921 - protein, 166 aa, Unknown
  Bacterial polypetide isolated from the Sargasso Sea
MYKKFGQFIDGKWQESSDKGTYEVINPANEEVIGNASKATPQDVDRALKSAEKGLEVWKKTPPWQRSYIIRKIADKMREKQDVLAKWMTLEVGKPFLEAKAEVGGSADIFEWNAEETKRIYGQTVESRFADTRVHVYYQPVGVVAELSPWNFPLVLSSKKISTALA

SEQ ID NO: 91922 - protein, 289 aa, Unknown
  Bacterial polypetide isolated from the Sargasso Sea
RARVMFKFKELIEKNSDELTKMIVSEHGKVYEDAKGSLIRGLEVVEFTCGIPQVLKGEFTENVGTDIDSWSIRQPLGVCAGITPFNFPAMVPMWMFPMAIACGNTFVLKPSEKDPSISIKLAELFQEAGLPDGVFNVINGDKEVVDAILINKDIKAVSFVGSTPIAKYIYENAAKNEKRVQALGGAKNHCVVMPDCDLDQAVNGLMGAAYGSAGERCMAQSVAVAVGNIGDNLVNELSKKVEALKVGPGMDKKSEMGPLVTKEHLEKVKGYVDLGVKEGAKLVVDGRNL

SEQ ID NO: 91923 - protein, 82 aa, Unknown
  Bacterial polypetide isolated from the Sargasso Sea
MLRIAINGFGRIGRMVLRALYENNYKGLSVVAINNRASTETSAFLLERDTVHGKFNHSIKYTKDEILIGKDRIQCYQENDPI

SEQ ID NO: 91924 - protein, 47 aa, Unknown
  Bacterial polypetide isolated from the Sargasso Sea
SGMVEINGTSFAGGSPFGGYKQSGNGREGGSWGLEEFMEIKSISGWK

SEQ ID NO: 91925 - protein, 271 aa, Unknown
  Bacterial polypetide isolated from the Sargasso Sea
MYKKFGQFIDGKWQQAEKKETYDVINPATEEVIGKASKASSIDVQKALKSAEKGLEIWKNTAPWQRAYTLRKIADLMREKKDVLAKWLTLEVGKPIAEAVGEVGGAADIFEWNAEETKRIYGQTQQSRFPDTRVHVYYQPVGVVAALVPWNFPIVLASRKISTSLAAGCSVICKPDVITPGAVMELVNICKEAGVPDGVVNLLSGDPAEISNELMESDIIKKVSITGSTRVGKIILKKAADKVQRVTMELSGHSPFIVCEDVDMNKVADIA

SEQ ID NO: 91926 - protein, 256 aa, Unknown
  Bacterial polypetide isolated from the Sargasso Sea
MEMGAPIDYATSTHALSGQSHIEDFILRLKEFKFEHHFDSKSNNYIAYEPIGVCGLITPWNWPINQIALKVIPAFATGCTMILKPSEISPISAMIFAEMIHEAGFPAGVFNLVNGDGKGVGIQISAHPDIDMISFTGSTRAGKLITKNAADTVKRVCLELGGKGGNIVFADSYPNAVRDGIKNVMSNSGQSCDAPTRMLVEKSIYERAVKEAIDEANKIKVDLASKKGDHIGPVVSKIQYDKIINLIKNGIDEGAT

SEQ ID NO: 91927 - protein, 172 aa, Unknown
  Bacterial polypetide isolated from the Sargasso Sea
MSSGNKYKVISNKLKFEGRAFINGKYVNAIDGKKFETINPATGQKLCAVAKCNHKDVDLAVKVSRKAFNSGVWSKSSPEHRKEVLLKFAELLRKHGDENSVLECIDTGKLIADCINEVANDAPMHFQWYGELIDKVFGKVGPTEPSITSLIVKEPIGVVAGIVPWNFPLMMA

SEQ ID NO: 91928 - protein, 157 aa, Unknown
  Bacterial polypetide isolated from the Sargasso Sea
TIHAFTTDQRLLDNSHKDPRRARSASQSIVPTSTGASKAIGEIIPSLKGKLEGVAMRVPTPNVSLIELVFCTKKDLTIQKINKSFLDASKKSLKGIIDITNEKLVSVDFNHNPNSAIVDANLTNTIGKNMGKISAWYDNEWGFSNRMCDLAKYIHKI

SEQ ID NO: 91929 - protein, 125 aa, Unknown
  Bacterial polypetide isolated from the Sargasso Sea
TGASKAIGEIIPSLKGKLEGIAVRVPTPNVSLIEFVFCSKKKIDVKKINDAFETASKNELNKILEITHEKLVSIDFNHHSASAIVDASLTNVVGTNMGKISAWYDNEWGFSNRMCDIAENLHKIS

SEQ ID NO: 91930 - protein, 284 aa, Unknown
  Bacterial polypetide isolated from the Sargasso Sea
MYTKFPVTRIYAPVGSKKELLPYLVRRLLENGANSSFVNKYLDKQIPISEVIENPIDVASRNLDEKEYLEHVKRPLNVFSDRKNSKGYDLADQKKISELASETSKYLSHTFKATSIIDGVSAQDTQTVNITSPATQTNIGKVSFAGANELNSIKNLEPCKEWKILDIKKKIEIFNNAVQLIEQNKFKFFYLLGSEAGKTFKDADAEIREAVDFILYYSSKAKQLNIPQILEGPTGEKNFLEYSSKGIFLCISPWNFPLAILVGQVAAALLTGNTVVCNQLKILL

SEQ ID NO: 91931 - protein, 310 aa, Unknown
  Bacterial polypetide isolated from the Sargasso Sea
KTLAEGEAEVSAAADIFEWNAEETKRIYGQSLQSRFDNTKIQIIYQPVGVVAALSPWNFPLILAARKVSAALAAGCSVICKPDVITPGTVMEMVDIIKDCGVPPGSVNLLSGDPATITTQLLASSVVKKVSITGSTRVGKIILKQAADKVQRVTMELSGHAPFIVFDDVNIDKATDMAMTCKYRNNGQVCISPSRFYIHESKKEEFTKSFVAKTKKLKIGNGLDKDVQLGPLTTKKRLEEVEQLVEETKKEGAKVLCGGQRPAGFNKGYFYEPTIFDNVKDNYKIMTVEPFGPLSPITTFKSFDEVIKRA

SEQ ID NO: 91932 - protein, 293 aa, Unknown
  Bacterial polypetide isolated from the Sargasso Sea
GAPMKFSTEMQAATGASHIKSFKNILKDFQFEKDLGEEKNNQKLLYEPKGVCALITPWNWPINQVNLKVIPALASACTVVLKPSEIAPLSSMLLAEMIDEVKFPSGVFNLVNGDGEITGNALTSHPDINMISFTGSTRAGALISQNAAKDFKRISLELGGKGANIIFKDADSEAVARGVLRCFRNSGQSCNAPTRMLVEKSIYNETVEKVKELANNTKVDSPEKDGDHIGPVVSEMQFNKIQTLIQKGIDEGAKLVAGGRGKPKGFEKGYYVKPTVFADVNNQMEIARTENFG

SEQ ID NO: 91933 - protein, 96 aa, Unknown
  Bacterial polypetide isolated from the Sargasso Sea
TFGPVAPLFKFKDEDDVIQQANDTIFGLASYFYASDLSRVWRVAEALEYGMVGINTGLISTEVAPFGGVKQSGIGREGSHHGIDEYLELKYLCFSI

SEQ ID NO: 91934 - protein, 241 aa, Unknown
  Bacterial polypetide isolated from the Sargasso Sea
MSSRTLDENRAIAARGLAKFSSEPVSHLVSGQWVGSRSNAVFDNFSPSDGRLLGKVAAGDAHEVDAAAKGASYAFEDWVGRSGNDRKKILHRIADLIVERADEIATVESVDTGQPIRFMSSAAIRGAENFRYFADAAPGALDGNAMPTESHLNFSTRRAIGPVGVITPWNTPFMLSTWKIAPALAAGCTVVHKPAEWSPLSASILGEIAQDAGVPAGVWNIVHGSGEVAGRALTEHPLIRA

SEQ ID NO: 91935 - protein, 289 aa, Unknown
  Bacterial polypetide isolated from the Sargasso Sea
AELFSEAGLPDGVFNVINGDKDVVNMIIKSEEISSISFVGSTPVAKYIYREAAKHEKRVQALGGAKNHLIVMPDANINQAVDGIMGAAFGSAGERCMAISVAVAVGDIADNLVEQLSNKAQTLKVAPWTDPKSDMGPVISHEHKEKIIEYINIGEQEGAKLVIDGRKINIQGYENGYFVGPTIFDDVKKNMKIYTDEIFGPVLCIVRAKNYEDALSLVNNHKFGNGTSIYTSDGEISRHFSTNCKIGMVGINVPIPVPMAFHSFGGWKTSLFGDHAIHGVEGVEFIQNS

SEQ ID NO: 91936 - protein, 88 aa, Unknown
  Bacterial polypetide isolated from the Sargasso Sea
DDEEEAVRIANDSIYGLGGGVWSGDESRAIRVARRIRTGQVNINGGPFNMQAPFGGYKQSGNGRENGKYGLEEFLEYKALQLNPAKTA

SEQ ID NO: 91937 - protein, 176 aa, Unknown
  Bacterial polypetide isolated from the Sargasso Sea
MEQYKNFIDGKWINSESKETIKVDNPSNGKIIGEISCAKKNEVDLAVEAAKNSYNSRVLVDMPLLSRAKLMRKIAEETRKVSKEGGELLCYENGKNIASAIKEFNDVADMFDYYAGLTDKLEGKTIPVAKNVFDYTVLEPFGVSAHVVPWNFPLSMIGRSLSCSFATGNSTIIKTA

SEQ ID NO: 91938 - protein, 161 aa, Unknown
  Bacterial polypetide isolated from the Sargasso Sea
MKLIEHFVGGKIIPGTSKKKGKVFNPATGEQEKEVRLASSADLDQAVIIAKKAFETWSLKPSLQRARIMFKFKELIEKNSDELTQLIVSEHGKVYEDAKGSLTRGLEVVEFACGIPHLLKGEFSENVGTDVDSWSMRQPLGVVAGITPFNFPAMVPMWMFP

SEQ ID NO: 91939 - protein, 302 aa, Unknown
  Bacterial polypetide isolated from the Sargasso Sea
KAFETWSLKPPIQRARIMFKFKELIEKNSDELTKMIVSEHGKVYEDAKGSLIRGLEVVEFTCGIPQVLKGEFTENVGTDIDSWSIRQPLGVCAGITPFNFPAMVPMWMFPMAIACGNTFILKPSEKDPSISIKLAELFKEAGLPDGVFNVINGDKEVVDAILTNNDIKAVSFVGSTPIAKYIYENAAKNEKRVQALGGAKNHCVVMPDCDLDQAVNGLMGAAYGSAGERCMAQSVAVAVGNIGDNLVNKLTKKVEALKVGPGMDKKSEMGPLVTKEHLEKVRGYVDLGVKEGAKLVVDGRNL

SEQ ID NO: 91940 - protein, 249 aa, Unknown
  Bacterial polypetide isolated from the Sargasso Sea
EDFIFRLKEFNFEKHFDPKSNNHISYEPIGVCGLITPWNWPINQIALKVVPALATGCTMLLKPSEIAPISGMLFAEMIDEAGFPSGVFNLVNGDGAGVGTLMSSHPDIDMISFTGSTRAGKLISKNAADTIKRVCLELGGKGGNIVFADSYPNAVRDGIRNVMSNSGQSCDAPTRMLVEKSIYEKAIKEAADEANKIKVDIASKKGDHIGPVVSKVQYNKIIKLIESGIEEGATLAAGGPEIPNNLKKG

SEQ ID NO: 91941 - protein, 105 aa, Unknown
  Bacterial polypetide isolated from the Sargasso Sea
EGVAMRVPTPNVSLIELVFCTKKDLSIEKINSAFENFSKKNKIIEITKEKLVSIDFNHNPASSIIDASLTNVVGKNMGKISAWYDNEWGFSNRMCDIAEYLHKIS

SEQ ID NO: 91942 - protein, 179 aa, Unknown
  Bacterial polypetide isolated from the Sargasso Sea
MENKKNFYIDGKWVTAISKEEIKVINPATEEECAVISLGSKEDVDLAVNAAKKAYNSWAFSPKEERIRLLEKLYENYKKRWADIANAITVEMGAPKDFATKLQAGTGAAHLKSFIRYLKNFEFEKPLGEHAPNQRLIYEPKGVCALITPWNWPMNQVCLKVMPAIASGCTMVLKPSELA

SEQ ID NO: 91943 - protein, 76 aa, Unknown
  Bacterial polypetide isolated from the Sargasso Sea
NSKYGLHASVFTQDINRAFHLAKSLPCGTVSVNTFSEGDIKTPFGGYKQSGSLSRDQGTEALNSFLQTKTIWISHN

SEQ ID NO: 91944 - protein, 227 aa, Unknown
  Bacterial polypetide isolated from the Sargasso Sea
DNKSNNHIYYEPIGVCGLITPWNWPINQIALKVVPAFATGCTMILKPSEIAPISGILFAEMIDEAGFPKGVFNLVNGDGAGVGTDISSHPDIDMVSFTGSTRAGRLISKNAAETIKRVCLELGGKGGNIVFADSYKDAVRDGIRNVMSNSGQSCDAPTRMLVEKSIYERAVEEAVDEANKIKVDQASKKGDHIGPVISKIPYDKIINLIESGISEGATLAAGGPELP

SEQ ID NO: 91945 - protein, 284 aa, Unknown
  Bacterial polypetide isolated from the Sargasso Sea
DIANDLNFHQCTEWKNTPVSERADVFYRIADNLEKDSTKFLYYLIHEAGKTYKDSYDEIREAVDFLRYYADNAKSLLSEPNNLNGPTGESNELFYQSKGTFVCISPWNFPLAIFAGQIAAALVTGNSVISKPSEHTPIIATMMIELFYKNGVPKSALKLIQGDGPIGSKLISFDQISGVAFTGSSATAKKINLQLAKKDGPISSLIAETGGLNAMFIDSSSLHEQVVDDIMRSSFNSAGQRCSALRLAIIHESIFDDLVEMIKDAMAELTVGNPEDFHCDVGPI

SEQ ID NO: 91946 - protein, 162 aa, Unknown
  Bacterial polypetide isolated from the Sargasso Sea
TNNDKIISAASCTTNCLAPVLDILNTEYEIERGFMTTIHSITTDQRMLDNSHKDPRRARSAVQSIVPTTTGATKSIGEIIPSLKGKIEGVAMRVPTPNVSLIELVFCTKKELSVDEINKSFLKASKKSHKGILDITNEKLVSIDFNHNQFSAVVDASLTTVI

SEQ ID NO: 91947 - protein, 172 aa, Unknown
  Bacterial polypetide isolated from the Sargasso Sea
MELKNKSLFKQECFIGGKWVNSINGETIEVENPAIQETIGIVPKCDAQETKTAIESANIAFKDWKNKTAKERSIILKKWHDLILENIDDLAHIMTVEQGKPLVEAKGEILMGTTYIEFYAEEAKRVYGDIIPDPMPDRRIVVIKQPVGVIGAITPWNFPSTMITRKCAPALA

SEQ ID NO: 91948 - protein, 266 aa, Unknown
  Bacterial polypetide isolated from the Sargasso Sea
MTIKIGINGMGRIGRMVVRAIVESKNKKIIIKHINNRTNSEITSALLKYDSIHGKFDANLSYNSNNLFINKKKISFSQESNIDDINWKKFDVDYVFECTGKFNSKEKLITHIKNGAKKVIVSAPCKNADKTIVFGVNEKKITKKDQIISAASCTTNCLAPVVNVLNENFIIEKGFMTTVHAFTSDQKILDNSHKDIRRARSATQSIVPTSTGASKSIGEIIPSLKGKLEGIALRVPTPNVSLIEFVFCTKNTLTKEKINKSLKKHL

SEQ ID NO: 91949 - protein, 243 aa, Unknown
  Bacterial polypetide isolated from the Sargasso Sea
DEKGLSAHLKSKGANKVLLTAPTKSPLKNIVYGVNENDLDDKDKIVGAASCTTNAIVPLLKALDDDYGITNGHVETIHSYTNDQNLIDNYHSKSRRGRSAALNMVITETGAASAVSQILPNLKGKLTANAIRVPTPNVSLAILKLSLNKSLSDKETANEYFRQLAFHSIYKDQIDFTNSSEIVSSDLVGSRYACVIDSEATICDDKQVVIYAWYDNELGYCVQLLRVIKSLAGIKYNRLPYFL

SEQ ID NO: 91950 - protein, 62 aa, Unknown
  Bacterial polypetide isolated from the Sargasso Sea
TGDMDRARRVAAQWRAGMIQVNGASRISGSPFGGYKQSGVGREGGMWGIEEFLEIKTISGIV

SEQ ID NO: 91951 - protein, 53 aa, Unknown
  Bacterial polypetide isolated from the Sargasso Sea
QENLRLGKIYVNSWFTGSVATPFGGYKQSGYSREKGQEAIKSYLQVKNVGIQL

SEQ ID NO: 91952 - protein, 176 aa, Unknown
  Bacterial polypetide isolated from the Sargasso Sea
MSSGNKYKAISNKLKFEGRAFINGKYVNAIDGKKFETINPATGQKLCAVAKCNHKDVDLAVKVSRKAFISGVWSKSSPEHRKEVLLKFAELLRKQGDENSVLECIDTGKLIADCINEVANDAPMHFQWYGELIDKVFGKVGPTEPSITSLIVKEPIGVVAGIVPWNFPLNLLLVVQ

SEQ ID NO: 91953 - protein, 154 aa, Unknown
  Bacterial polypetide isolated from the Sargasso Sea
FTNDQRMLDNSHKDPRRARSAGQSIVPTSTGASKTIGEIIPSLKGKLEGVAMRVPTPNVSLIEFIFNVKKNITTKELNKSLLLASQKKLKNILNFTNEKLVSIDFNHNNASAIIDASLTNVIGNKMGKISAWYDNEWGFSNRMCDIARYVSKIK

SEQ ID NO: 91954 - protein, 237 aa, Unknown
  Bacterial polypetide isolated from the Sargasso Sea
MKDKKKFYINGQWVNPIKAKDFDVINPSTEEVCAIISLGSSEDTNLAVKSAKSSFETWKETSKQERIKLLEKLLEIYKSRWDEMTDAISTELGCPKDWCSANQTASGAGHIEDFIKRLKEFNFEPGFDKGSVNHIVYEPIGVCGLITPWNWPINQIALKVVPALATGCTMVLKPSEIAPLSAMLFAEMIHDAKFPAGVFNLVNGDGPGVGTDLSGHPDVDMVSFTGSTRAGKLITKN

SEQ ID NO: 91955 - protein, 311 aa, Unknown
  Bacterial polypetide isolated from the Sargasso Sea
IAEYENRYDDLVQVITEDMGAPIWLSEKAQASTGIKNLHETLDALKEYEFEKKEGDYTLIREPIGVIGMITPWNWPMNQITTKASAALAAGCSMVLKPSEISPYCALLLAEIFDRAGVPAGVFNVVNGYGPIVGAALSDHPDVAMMSFTGSTEAGIAVAQASAVSVKRVHQELGGKSSNIILDDVADLEKSVKGGAGHCFLNSGQSCNAPTKMLVSEKNYEKAVEVAVQTANSTTIGDPQGEFRIGPIANKPQYEKILRMIKIGIEEGATLVAGGVEKPEGYEKGYYVKPTVFANVTNDMTIAREEIFGSV

SEQ ID NO: 91956 - protein, 238 aa, Unknown
  Bacterial polypetide isolated from the Sargasso Sea
VVHLLENKQLDSEKYVDKCLAEQKRTKRSYPLRPKDIVIYGFGRIGRILTRILISDTGAGAKWRLRAIVLRDSGHDDDLIKRAGLLRNDSVHGAFPGTIRVNKQNNSLIINGNEVSFIYSDNPKKVKYKDFDIKRATVIDSTGVWRDEEGLSQHVKNPSVERVLLTAPGKGKIKNIVFGVNDDKASPEDKMLAAASCTTNAIVPALKLIDDNFKIVNGHIETVHSFTNDQNLIDNFHP

SEQ ID NO: 91957 - protein, 298 aa, Unknown
  Bacterial polypetide isolated from the Sargasso Sea
EHKDNLVRLQAREIGKTLKECGGEIQEAIDTCLFFQSEGRRLYGQTVNSELPNKELFTYRRPLGVCGIINSCNFPSAVPFWKMIPAIMCGNTCVWKSPQDSPLLSFALARVMHEAGLPDGVINLVHGNGSGAGQALVDSADLGMVDKISFTGSTAVGKMIGETCGRNLVSASLELGGKNPLVIMPSANMENAVEGAYWAGFGTAGQRCTSLGNLIIHEDIYDEFVERFMEKVKSTSIGDSMRHEGVLYGPMLSERYAVDFMQGVDMCENSGANKIWGEGRITNDNKPDSFHGDASEGI

SEQ ID NO: 91958 - protein, 86 aa, Unknown
  Bacterial polypetide isolated from the Sargasso Sea
MNLIEHFVNGKIIPGSSDRKGKVFNPATGEQESEVRLASKSDLDQAVEAAKKAFETWSAKPPLQRARIIFKFKELIEKNSDELTKL

SEQ ID NO: 91959 - protein, 299 aa, Unknown
  Bacterial polypetide isolated from the Sargasso Sea
MLPMIGRIYRDNVHLLLYGKPLVNLSVSEIMNAHRFVRETENNEMSEFETYQVIVALSDLELGPAEVDIGIIAATYLFDDKDLSIEDFVKESVNDLIGTKGSILEQAQDVVLYGFGRIGRLLTRMLIQDSGGGDNLRLRAIVVRKAVDDDIIKRANLMRTDSVHGPFKGTIRVIEEENKLIINGNEVKIIYANDPSEIDYTDFGINKALLIDNTGVWRTKEGLNTHLSCNGISKVLLTAPAKEGIKNIVHGINNEIIDNDEILGAASCTTNAIVPTLKVPNDEFNIISGHIESVHSYTN

SEQ ID NO: 91960 - protein, 200 aa, Unknown
  Bacterial polypetide isolated from the Sargasso Sea
MQQYKNFINGKWISSESKETIKVDDPSNGKVIGEISCAKKNDVDLAVEAAKNSYNNRVLVDMPLLTRAKLMRKIAEETRKVAKEGGELLCYENGKNIASAIKEFNDVADMFDYYAGLTDKLEGKTIPVAKNIFDYTVLEPFGVSAHVVPWNFPLSMIGRSLSCSFATGNSTIIKTAELTPLSATIFAKARQNADVPDGLI

SEQ ID NO: 91961 - protein, 208 aa, Unknown
  Bacterial polypetide isolated from the Sargasso Sea
MENKKNFYIDGKWVAPKSKKEIKVINPATEENCAVISLGNKEDVDLAVTSAKKAYNNWAFSTKEKRVQLLEKLYENYKKRWADIAKAITTEMGAPKDFATKLQAGTGAAHLKSFIRYLKNFEFEKSLGDHAPNQRIIYEPKGVCALITPWNWPMNQVCLKVMPALASGCTMVLKPSELAPLSSMILAELIDETKFTAGVFNLVNGDGA

SEQ ID NO: 91962 - protein, 306 aa, Unknown
  Bacterial polypetide isolated from the Sargasso Sea
MAFHKKRRKIELLEKLYVIYKKRWAEMAKLITLEMGAPMKFSTEMQAATGASHIKSFKNILKDFKFEKDLGEEKNNQKLLYEPKGVCALITPWNWPINQVNLKVIPALAASCTVVLKPSEIAPLSSMLLAEMIDEVKFPAGVFNLVNGNGAVTGDALTSHPDVNMISFTGSTRAGALISQNAAKDFKRISLELGGKGANIIFKDADSDAIARGVLRCFRNSGQSCNAPTRMLVEKSIYDKTVEKVKELANNTKVDSPQKDGDHIGPVVSEVQFKKIQTLIQKGIDEGAKLVAGGTGKPKGLEKGYY

SEQ ID NO: 91963 - protein, 299 aa, Unknown
  Bacterial polypetide isolated from the Sargasso Sea
SVLKNLHRLMLEHQEDLARIITHEGGKPLSESMGEIAYAASFFEWFSEEAKRVYGDVIPGHQQDRRTLVIKQPIGVVGCITPWNFPSAMLARKIAPAIAVGCTVVAKPAPETPYSATAMAYLSELAGIPKGVFNVVTGDAEKIGSVMTTHKEVKKITFTGSTAVGKQLLKQSADTVKKVSLELGGHAPFIVFEDANLEDAVDGALIAKYRNSGQTCVCANRIYVQSSIYDDFSKRFTEKSSQLVVGDGLAESTEQGPLISEDAMKKASKHVEDAKNKGATIATGGNPHSLGGLFLSPLY

SEQ ID NO: 91964 - protein, 173 aa, Unknown
  Bacterial polypetide isolated from the Sargasso Sea
MYSKFGQFIDGKWQESQKKETYEVINPATEEILGNASKAAPADVEKALKSAEKGLEVWKNTAPWQRSYIIRRIADLMREKKDVLAKWLTLEVGKPFAEGIGEVGGSADIFEWNAEETKRIYGQTVESRFPDTRVHVYYQPVGVVAALVPWNFPPCISFKKNFYSLSSWLLCDL

SEQ ID NO: 91965 - protein, 319 aa, Unknown
  Bacterial polypetide isolated from the Sargasso Sea
EEAKRIYGEPLQGRSPDTKIHVYYQPVGVVAALVPWNFPVTLASRKISTALSAGCSVIVKPDVITPGSVMELVDICREAGVPPGVVNLLSGDPAFISDKLLSSDIIKKVSITGSTRVGKLILKKAAEKVQRVTMELSGHSPFIVFDDVNLDKVTDIAVFAKFRNNGQVCISPSRFYIHEKKKDDFTKLMVEKTKKLKIGNGIEKGTILGPLTTKKRLEEIEKLVELTKKEGAKVLCGGRKPAGFNKGYFYEPTIFDGIKDDFTIMNEEPFGPLVPILSFKDFDEVVYRANKNDLGLASYIYTNNLKKVIKPRSLWRQEL

SEQ ID NO: 91966 - protein, 227 aa, Unknown
  Bacterial polypetide isolated from the Sargasso Sea
EKVILTAPAIGKIKNIVYGINDGKAKPEEKILAAASCTTNAIAPVLKLVDDNFKIVNGHIETVHAYTNDQNLIDNYHSSDRRGRSAALNLVITDTGAAKAVSEVLPDLKGKLTANAIRVPTPNVSLAILNLTLKRGVGVEELNDCFRKAAFRSKLRETIDYTNSLDAVSSDFYSNEFAVVYDSQATISNFNSVTIYCWYDNEYGYTKQVVRLLKKVIGANLTRYPKQ

SEQ ID NO: 91967 - protein, 118 aa, Unknown
  Bacterial polypetide isolated from the Sargasso Sea
MLRIAINGFGRIGRMVLRALYENNYKGLKVVAINNRASTETSAFLLERDTVHGKFNNSIKYTKDEIIIGKDIIQCYHEDDPINCPWDDDKIDIVLECTGKFNSKDESFRHIEAGAKKV

SEQ ID NO: 91968 - protein, 289 aa, Unknown
  Bacterial polypetide isolated from the Sargasso Sea
VDIDLAVEKAQKAFLDWSRKPPAQRARVIFKFKELIEKNYDELTKLIVSEHGKVYEDAKGSLTRGLEVVEFACGIPHLLKGEFTENVGTDVDSWSIRQPLGVCGGITPFNFPAMVPMWMFPIAIACGNTFVLKPSEKDPSCSIKLAQLFKEAGLPDGVFNVVNGDKEAVDALLTNKDVVAISFVGSTPIAKYIYENAAKNEKRVQALGGAKNHCIVMPDCDLDQAVNGLMGAAYGSAGERCMAQSVAVAVGKIGDNLVNKLKQKVQSLKVGPGLDKNSEMGPLVTKEHL

SEQ ID NO: 91969 - protein, 176 aa, Unknown
  Bacterial polypetide isolated from the Sargasso Sea
MELKNKSLFKQQCFIGGKWVKSQSGETIEVDNPASQETIGVVPKCGAEETKQAIDSANLAFKSWKSKTAKERSIILKKWHDLILENIDDLAHIMTVEQGKPLAEAKGEITMGTTYIEFYAEECKRVYGDIIPDPLPDRRIVVIKQPVGVVGAITPWNFPSTMITRKCAPALGVGCP

SEQ ID NO: 91970 - protein, 259 aa, Unknown
  Bacterial polypetide isolated from the Sargasso Sea
MYEKFGQFIDGRWQKSSDEGTYEVINPANEEVLGKASKATTQDVERALKSAAKGLEVWKKTAPWQRSYIIRRIADKMREKQDVLAKWMTLEVGKPFAEAKGEVNGAADIFEWNAEETKRIYGQTVESRFEDTRVHVYYQPVGVVAALTPWNFPAVLSARKISTALAAGCSVIVKPDVITPGIVMEMVDICNECGVPPGVVNLLSGDPPSIAQQLIASDIVKKISITGSSRVGKLILKQAADKVQRVTMELSGHSPFIVF

SEQ ID NO: 91971 - protein, 55 aa, Unknown
  Bacterial polypetide isolated from the Sargasso Sea
KRVSKKLRSGIVYINGNSPDSGTPFGGYKQSGNGREGGSWGLEEYLEVKTITGWK

SEQ ID NO: 91972 - protein, 62 aa, Unknown
  Bacterial polypetide isolated from the Sargasso Sea
MGRAIQAGIVWTNCYHAYPAHSPFGGYKQSGVGRETHKMMLSHYRQNKNLHVSYAEKKLGFF

SEQ ID NO: 91973 - protein, 310 aa, Unknown
  Bacterial polypetide isolated from the Sargasso Sea
RSRLASVKDVNEAIANAKNAFESWSNKPPLQRARIMFKFKELIEKNSDELTKIIVSEHGKVYEDAKGSLTRGLEVVEYACGIPQMLKGEFTENVGTNVDSWSIRQPLGVCAGITPFNFPAMVPMWMFPMAIACGNTFVLKPSEKDPSCSIRLAELLKEAGLPDGVFNVVNGDKEAVDALIDSKDVVAMSFVGSTPIAKYIYENCAKNEKRVQALGGAKNHCVVMPDCDLDQAVNGLMGAAYGSAGERCMAQSVAVAVGGIGDKLVSSLAKKVEALKVGPGMDKQSEMGPLVTKEHLAKVKGYVDIGEKES

SEQ ID NO: 91974 - protein, 227 aa, Unknown
  Bacterial polypetide isolated from the Sargasso Sea
SPNLIFADCKDLESAINMAAFGIFFNQGEVCSANSRLLVERTVQEEFVERLSLIAKDTQPGHPLNPASKMGAIVNEVQTKKIVSYINKGKENADLVIGGEQIKIEGKGCYVQPTIFNNVNANDIIAKEEIFGPLLSVIPFDTEEEALSIANDSVYGLAASVWTDDLSRALRVSDHLHAGTVSVNTVDALNTITPFGGVKQSGYGKDLSLHSFNKYTSLKTRWIKYKA

SEQ ID NO: 91975 - protein, 173 aa, Unknown
  Bacterial polypetide isolated from the Sargasso Sea
MLDEKLALIEAQKRFEQAKKRLEFSNIRSPISGIVSKVNSRNIGQIVQEGGLLAEIVPENNILQIEAGVNPKDIAYVKVGQKAKVSFTAFDMAIFGQVDGTVTKIAANSTANEDGTSFYQTIIEVDSKSIAEEQNIIIQSGMQCDVSIIGQERTVLSYIANPITKLSMRALQE

SEQ ID NO: 91976 - protein, 187 aa, Unknown
  Bacterial polypetide isolated from the Sargasso Sea
MTDLTKNPDLRLRDKPDDFFGDWKWREGLAELMVPIIGRLYRNGVNVLMYGHSLINQSPLEIMKSHRFIRRVEDTEISELETYPFLQRIELQDIKDCEIDLGEIVVDFMSENKSLDDLQIDSHIKSYILDPLDKVDQQRPSKPQDIVLYGFGRIGRLVSRIMAQMTGPGNYYRLRAIVVRKGSDTND

SEQ ID NO: 91977 - protein, 248 aa, Unknown
  Bacterial polypetide isolated from the Sargasso Sea
MALRAGVPAGLFSVLTGNDTRILGNELTTHPLVRKITFTGSTEVGRVLLQQAASTVKKCSMELGGNAPVLVFDDADLDTAVEGVIASKFRNTGQACISANRIYVQDGIYDAFAQRMAERVAQLKVGNGLADGVQQGPLIDDGAVTKVEEHIADAVAGGARVKLGGKRHALGGCFFEPTILVDVQPSMMVAREETFGPVAPLFRFHTEDEALRLANDTEFGLAAYLYSRDASRIWRVSAGIESGMVGIN

SEQ ID NO: 91978 - protein, 240 aa, Unknown
  Bacterial polypetide isolated from the Sargasso Sea
MLEHQEDLARIITHEGGKPLSESMGEIAYAASFFEWFSEEAKRVYGDVIPGHQQDRRTLVIKQPIGVVGCITPWNFPSAMLARKIAPAIAVGCTVVAKPAPETPYSATAMAYLSELAGIPKGVFNVVTGDAEKIGSVMTTHKEVKKITFTGSTSVGKQLLKQSADTVKKVSLELGGHAPFIVFEDANLEDAVDGALIAKYRNSGQTCVCANRIYVQSSIYDDFSKRFTEKASQLVVGDGL

SEQ ID NO: 91979 - protein, 294 aa, Unknown
  Bacterial polypetide isolated from the Sargasso Sea
KEERINLLKKLLNIYKKRYSEMVEAISMEMGAPMDWSRDSQTSSGQSHLEDFIVRLKEFKFDEQFSPGSNNRICYEPIGVCGLITPWNWPINQIALKVVPAFATGCTMIHKPSEIAPISAMLFAEMIDEADFPPGVFNLVNGDGLGVGTDISTHPDIDLVSFTGSTRAGKLILKNGADTVKRVCLELGGKGGNIVFADSYPNAVRDGVRNVMSNSGQSCDAPTRMLVEKPIYERAVKEATEEANLIKVDHASKEGDHIGPVVSKVQYDKIISLIQSGIDEGATLAAGGPELPNG

SEQ ID NO: 91980 - protein, 212 aa, Unknown
  Bacterial polypetide isolated from the Sargasso Sea
MKIKIGINGMGRIGRMIVRSIIENKYKNIEIKHINNRTNSEACSNLLKYDSIHGKFDAEIGFDKKHLIINKNKITFSQETDLNNIKWKKYNVDYVFECTGKFNSKDKLLLHLNNGARKVIVSAPCKNADKTIIFGVNESELKKNDNIISAASCTTNCLAPVAHVINENFEIERGFMTTIHAFTSDQRILDNSHKDPRRARSASQSIVPTSTG

SEQ ID NO: 91981 - protein, 218 aa, Unknown
  Bacterial polypetide isolated from the Sargasso Sea
MNLIQHFVNGKIIPGKSDRRGKVFNPAIGEQESEVILGSKSDLDNAVEVAKKAFDTWSLKPPIQRARIMFKFKELIEKNSDELTKMIVSEHGKVYEDAKGSLIRGLEVVEFTCGIPQVLKGEFTENVGTDIDSWSIRQPLGVCAGITPFNFPAMVPMWMFPMAIACGNTFVLKPSEKDPSISIKLAELFQEAGLPDGVFNVINGDKEVVDAILINKEY

SEQ ID NO: 91982 - protein, 223 aa, Unknown
  Bacterial polypetide isolated from the Sargasso Sea
MKKYQHYINGEWTDASSKDLIPVINPATEEVIGEVTCAKDEDINQAVESAKKAYESRILVDMNPMERAKLMRRIAEELRKVSKEGGALLCAENGKLLAASEYEFVDAANYFDYYSGLTDKIEGQTIPVNSQVMDYTIYEPYGVSGHIVPWNFPISMIARSLACSFAAGNSTVIKPAELTPLATTSFFAEAIHNAEVPKGLINIVTGYGSEAGAALTAHPDVAQ

SEQ ID NO: 91983 - protein, 150 aa, Unknown
  Bacterial polypetide isolated from the Sargasso Sea
MNLIQHFVGGKLIAGSSNKKGKVFNPATGEQQSEVILANTSDLDEAVSIAKKAFETWSEKPALQRARVMFKFKELIEKNSKELTELIVSEHGKVYEDAKGSLNRGLEVVEFACGIPQVLKGEFSENVGTNVDSWSLRQPLGVVAGITPFN

SEQ ID NO: 91984 - protein, 217 aa, Unknown
  Bacterial polypetide isolated from the Sargasso Sea
RLKNFKFDEQFDSKSNNQIFYEPIGVCGLITPWNWPINQIALKVIPALATGCTMILKPSEIAPVSAMLFAEMIHEAGFPPGVFNLVNGDGAGVGTYISGHPDIDMVSFTGSTRAGKLITKNAAETIKRVCLELGGKGGNIVFADSYPNAVRDGIKNVMSNSGQSCDAPTRMLVEKSIYERAVSEAVDEANKIKVDIASKKGDHIGPVVSKVQYDKII

SEQ ID NO: 91985 - protein, 265 aa, Unknown
  Bacterial polypetide isolated from the Sargasso Sea
MLDKRKFYINGKWVDPIEKNDFEVINPCNEDPFAIISLGSKKDTDNAVKAAKNAFETWKETDKKERLDLLEKLLVVYKKRFSEMAEAISLEMGAPMDWASDVQTGSGQAHLEDFILRLKEFNFDEQFDKKSNNHICYEPIGVCGLITPWNWPINQIALKVVPAFATGCTMILKPSEIAPISGMLFAEMIDEVGFPDGVFNLVNGDGAGVGTQMSSHPDIDMVSFTGSTRAGRLISKNAAETIKRVCLELGGKGGNIVFADSYKNA

SEQ ID NO: 91986 - protein, 47 aa, Unknown
  Bacterial polypetide isolated from the Sargasso Sea
TSPWNFPLAIFLGQVAAAIVMGNTVIAKPAEQTSLIALCTIELMLSV

SEQ ID NO: 91987 - protein, 290 aa, Unknown
  Bacterial polypetide isolated from the Sargasso Sea
PSRARVMFKFKELIEKNSDELTKLIVSEHGKVYEDAKGSLNRGLEVVEYACGIPQMLKGEFTENVGSSVDSWSIRQPLGVCAGITPFNFPAMVPMWMFPMAIACGNTFVLKPSEKDPSCSMKLAELLKQAGLPDGVFNVINGDKEAVDALINNQDVAAVSFVGSTPIAKYIYENCAKNEKRVQALGGAKNHCVVMPDCDLDQAVNGLMGAAYGSAGERCMAQSVAVAVGGIGDKLVSSLEKKVEALKVGPGMDKQSEMGPLVTKDHLAKVKGYVDLGEKEGAKLVVDGRN

SEQ ID NO: 91988 - protein, 160 aa, Unknown
  Bacterial polypetide isolated from the Sargasso Sea
MKIKVGINGMGRIGRMILRSIIESKNKNIVIKHINNRTNSQTCSMLLKYDSIHGKFNANLNFDKNNIIINKKKISFSQETDIKNIKWKRYDVDYVFECTGKFNSKDKLLPHLKNGAKKVIVSAPCKKADKTIVFGVNETKLNKKDQIISAASCTTNCLAP

SEQ ID NO: 91989 - protein, 286 aa, Unknown
  Bacterial polypetide isolated from the Sargasso Sea
VDNAVTGCKKSFLKIVAFTKKEERLELLEKLYVIYKKRWAEMAKLITLEMGAPMKFSTEMQAATGASHIKSFKNILKDFKFERDIGEEKNNQKLLYEPKGVCALITPWNWPINQVNLKVIPALASACTVVLKPSEIAPLSSMLLAEMIDEVKFPAGVFNLVNGDGAVTGDALTSHPDVDMISFTGSTRAGALISQNAAKDFKRISLELGGKGANIIFKDADSEAVARGVLRCFRNSGQSCNAPTRMLVEKSIYNETVEKVKELANNTKVDFPGKRRRSYWTSCFRS

SEQ ID NO: 91990 - protein, 246 aa, Unknown
  Bacterial polypetide isolated from the Sargasso Sea
ILKQAADKVQRVTMELSGHSPFIVFDDADIKKAADMAVASKFRNNGQVCISPNRFYIQENKKDEFVNLFVEKTKKLKIGNGMEPDVQLGPITTKKRLNEIEELVETTKKEGAKVLLGGKRPSGFNKGYFYEPTIFDDVKDDFTIMKVEPFGPLVPMLSFKTFDEVVERANKHELGLASYICTSSMEKAHRASELMETGTVAVNTPVVAIAEAPFGGIKQAGYGREGGSMAIKDYLNVKYTHLGLKG

SEQ ID NO: 91991 - protein, 33 aa, Unknown
  Bacterial polypetide isolated from the Sargasso Sea
INNKFCRILSWYDNEWGFSNRMIETAIDLKKFI

SEQ ID NO: 91992 - protein, 173 aa, Unknown
  Bacterial polypetide isolated from the Sargasso Sea
MPIKVGINGLGRIGRMLVRTIFETKNKNIKISHINNRSSSEVSCSLLKYDSIHGKFNEDVKFDNNSLIINKEKISYSQEVDIKNINWKKFNVDYVFECTGKFNSKEQLLTHIKNGAKNVIVSAPCKNADKTIVYGVNENILSKKDQIISAASCTTNCLAPVANVLNENFEMKK

SEQ ID NO: 91993 - protein, 52 aa, Unknown
  Bacterial polypetide isolated from the Sargasso Sea
MVKLGISGFGRIGRLVCRAACEKDGAEVTAVNDPVRRRARTAHGARAHAARL

SEQ ID NO: 91994 - protein, 276 aa, Unknown
  Bacterial polypetide isolated from the Sargasso Sea
STSKEERLEMLEKLYEIYKSRWNKMAESISLEMGSPIDWAIEEQSSSGANHIKNFIKTLKNFEFESEFNSESNNHISYEPIGVCALITPWNWPINQITLKVIPALAAGCTMILKPSEIAPLSAIVFAEMIHDAGFPPGVFNLVNGNGDGVGTQLAKHTDVDMISFTGSTRAGKLISKNSADTIKRVCLELGGKGGNIVFADSDPDAVKRGIKHVMGNSGQSCNHPTRMLVEKSIYDRAVKEAVEEAENTNVDISSKKGDHIGPVVSKIQYDKRQNL

SEQ ID NO: 91995 - protein, 275 aa, Unknown
  Bacterial polypetide isolated from the Sargasso Sea
MLDKRNFYINGQWVKPSQPQDLNVIDPSTEENCAIISLGSKEDVDIAVKSAKESFTHWSRIEKKYKVSLIQNLYDIYKSRWEEMTKMISLEMGAPLDWSSSAQTASGADHIKDFIKRLNEFEFESEFSKDSNNFIAYEPIGVCGLITPWNWPINQITLKVIPALAAGCTMILKPSEIAPLSGMLFAEMIHDAGFPPGVFNLINGDGSGVGTHLSGHPDIDMISFTGSTRAGRLITKNSADTIKRVCLELGGKGGNIVFADSHPNAVREGVKKRHE

SEQ ID NO: 91996 - protein, 246 aa, Unknown
  Bacterial polypetide isolated from the Sargasso Sea
FKNILKDFKFEKDLGEEKNNQKLLYEPKGVCALITPWNWPINQVNLKVIPALASACTVVLKPSEVAPLSSMLLAEMIDEVKFPSGVFNLVNGDGAVTGDALTSHPDINMISFTGSTRAGALISQNAAKDFKRISLELGGKGANIIFKDADSEAVARGVLRCFRNSGQSCNAPTRMLVEKSIYSETVQKVKELANNTKVDSPEKDGDHIGPVVSEVQFNKIQTLIQKGIDEGAKLIAGGTGKPKGFE

SEQ ID NO: 91997 - protein, 112 aa, Unknown
  Bacterial polypetide isolated from the Sargasso Sea
HLNGKIHGMAFRVLTPTGSVTDLVANLDAKVTVEDINNAYSKASEGDLSGVVQYTDEPLVSSDFVRNPNSVIIDGLSTIILEDNMVKVVGWYDNEWGYSCRTADLAEYISAS

SEQ ID NO: 91998 - protein, 196 aa, Unknown
  Bacterial polypetide isolated from the Sargasso Sea
MENKKNFYIDGKWVAPKSKKEIKVINPATEENCAVISLGNKEDVDLAVTSAKKAYNNWAFSTKEKRVQLLEKLYENYKKRWADIAKAITTEMGAPKDFATKLQAGTGAAHLKSFIRYLKNFEFEKSLGDHAPNQRIIYEPKGVCALITPWNWPMNQVCLKVMPALASGCTMVLKPSELAPLSSMILAELIDETKFP

SEQ ID NO: 91999 - protein, 191 aa, Unknown
  Bacterial polypetide isolated from the Sargasso Sea
MEKLDFYIDGSWVTPSGVKTLDVINPASEEKVTKISLGDVSHVNEAVQAARKAFETYSQTPVEQRIDLLTTIREIYKRRLDDVADAIQTEMGAPTYLAKGAQAMVGLGHLKAAIRSLTNHNFEYEHGNFIIRHEPIGVCGLITPWNWPVNQVVSKLAPCLAAGCTAILKPSEIAPLSSMIIAEILDEAKVP

SEQ ID NO: 92000 - protein, 244 aa, Unknown
  Bacterial polypetide isolated from the Sargasso Sea
WSLGTARGLRRHNSFFFPAMVPMWMFPIAIACGNTFVLKPSEKDPSCSIKLAELFKQAGLPDGVFNVVNGDKEAVDALLTNKDVVAISFVGSTPIAKYIYENAAKNEKRVQALGGAKNHCVVMPDCDLDQAVNGLMGAAYGSAGERCMAQSVAVAVGKVGDNLVSKLEKKVRSLKVGPGLDKNSEMGPLVTKQHLEKVKGYVDLGMKEGAKLVVDGRNIKLQGYEKGFYIGGCLFDNVNKNMRI

SEQ ID NO: 92001 - protein, 264 aa, Unknown
  Bacterial polypetide isolated from the Sargasso Sea
KITTGSSKKTSKVFNPATGEQSAEVNLASKSDVDFAVEKAKKAFTDWSGKPPVQRARVIFKFKELIEKNSDEITKLIVSEHGKVYEDAKGSLTRGLEVVEFACGIPHLLKGEFTENVGTDVDSWSIRQPLGVCAGITPFNFPAMVPMWMFPIAIACGNTFILKPSEKDPSCSMKLAQLFKEAGLPDGVFNVVNGDKEAVDALLTNKDVAAISFVGSTPVAKYIYENAAKNEKRVQALGGAKNHCVVMPDCDLDQAVNGLMGAAY

SEQ ID NO: 92002 - protein, 176 aa, Unknown
  Bacterial polypetide isolated from the Sargasso Sea
MKTIEHFQNGKSFSGDSKRLGKVFNPATGEQSAQVKLASTNDVNATVAKAKRAFEVWANTPPLQRSRIMFKFKELIEKNSDELTKIIVSEHGKVYEDAKGSLIRGLEVVEYACGIPQMLKGEFTENVGSNVDSWSIRQPLGVCAGITPFNFPAMVPMWMFPMAIACGNTFVLKPSE

SEQ ID NO: 92003 - protein, 260 aa, Unknown
  Bacterial polypetide isolated from the Sargasso Sea
MKLIEHFVNGKIIPGTSDKKGKVFNPATGEQESEVRLASKSDLDSAVEVAKKAFETWSLKPALQRARIIFKFKELIEKNSDELTKLIVSEHGKVYEDARGSLTRGLEVVEFACGIPHLLKGEFSENVGTNVDSWSIRQPLGVVAGITPFNFPAMVPMWMFPIAIACGNTFILKPSEKDPSCAIRLAELLSEAGLPEGVFNVINGDKEAVDAILENKDIKAVSFVGSTPIAKYIYENSAKNEKRVQALGGAKNHLVVMPAL

SEQ ID NO: 92004 - protein, 234 aa, Unknown
  Bacterial polypetide isolated from the Sargasso Sea
EVGKPFAEAKGEVGGAADIFEWNAEETKRIYGQTVESRFEDTRVHVYYQPVGVVAALTPWNFPAVLSARKISTALAAGCSVIVKPDVITPGIVMEMVDICRECGVPPGVVNLLSGDPPSIAQQLIASDIVKKISITGSSRVGKLILKQAADKVQRVTMELSGHSPFIVFDDANIKKAADMAIAAKFRNNGQVCISPNRFYIHESKKDEFVNLFIEKTKKLKIGDGMDPTTKLGP

SEQ ID NO: 92005 - protein, 200 aa, Unknown
  Bacterial polypetide isolated from the Sargasso Sea
NFEFEKPLGEHAPNQRLIYEPKGVCALITPWNWPMNQVCLKVMPAIASGCTMVLKPSELAPLSSMILAELIDDTKFPAGVFNLVNGDGATTGNALTSHPDINMISFTGSTRAGALISQNAAKDFKRVSLELGGKGANIIFKDADPEAIERGALRCFRNSGQSCNAPTRMLVEKSMYSDAVERLKKYTENFEVGDPKKEGE

SEQ ID NO: 92006 - protein, 221 aa, Unknown
  Bacterial polypetide isolated from the Sargasso Sea
MFKKADAPDNLVQVLIGDGQVGADLINLKPDKVSFTGSIKTGKLIARQCGESLIPFSLELGGKDAMIVCDDADIDDAAKGAVIGSCMNAGQYCCGTERIYVQESIYESFLEKVVEYTKELKQSDDKYADVGPTFWDKQIDIIEDHIEDAKSKGAKILIGGKRNPNFDGLYFEPTVIVDVTHDMKIMTDETFGPIISIMKVSSEDEAIRLANDSFYGFNGNV

SEQ ID NO: 92007 - protein, 292 aa, Unknown
  Bacterial polypetide isolated from the Sargasso Sea
AGCSVIIKPDVITPGVVMEMVDICRECGVPSGVVNLLSGDPPSIAQQLIASDIVKKISITGSSRVGKLILKQAADKVQRVTMELSGHSPFIVFDDADIKKAADMAIAAKFRNNGQVCISPNRFYIHESKKDEFVNLFVDKTKKLKIGNGMDPDIQLGPLTTEKRLNEVEELVEKTKKEGAKVLLGGKRPAGFNKGFFYEPTIFDNVKDDFTIMKQEPFGPLVPMLSFKTFDEVIKRANNHELGLCSYVCTNSMETAHIASEQLETGSVAVNTGVVAIAEAPFGGIKQSGYGR

SEQ ID NO: 92008 - protein, 157 aa, Unknown
  Bacterial polypetide isolated from the Sargasso Sea
MENQRTMEEVLKLQRDHYLNEGPPSYELRIDRLDRVKDMVIQNKERITEALDADFGARSPNQSLISDVYGVLPAFSHAKKHLKSWMKDEKRKSNFPFGLMGAKSYIHREPLGVVGMISPWNFPMYLSLAPLAGIFSAGNQVMHKPSEFTPITSELLK

SEQ ID NO: 92009 - protein, 186 aa, Unknown
  Bacterial polypetide isolated from the Sargasso Sea
MSDASTAEEYRSQAAALSIRRQAFIAGSYVDSADGATFNCISPIDGSVLAPVAACDEEDVNRAVGAARKAFDDGAWSGLAPAKRKRTLKKFADLMAANRGELALLETLDMGKPIRYSQAVDIGGAANCIAWYAEAIDKLYDEVAPTDPSALALLRREPVGVVAAVVPWNFPLLITCWKLGPALAAG

SEQ ID NO: 92010 - protein, 274 aa, Unknown
  Bacterial polypetide isolated from the Sargasso Sea
EAAQAKTGIKNIHETLDALKDYEFERPEGDYTLIREPIGVIGMITPWNWPMNQITTKVSAALAAGCSMVLKPSEISPYCAMLLAEVFDKAGVPNGVFNVVNGYGPTVGAALSEHPDVAMMSFTGSTRAGIAVAQASAASVKRVHQELGGKSSNIILDDVADLEKSVKGGAGHCFLNSGQSCNAPTKMLVSAKNYDKAVEVAVATANNTTVGDPNGEFRIGPIANKTQYEKIIKLIEIGIEEGATLVAGGVEKPEGCEKGYYVRPTVFANVTNDR

SEQ ID NO: 92011 - protein, 258 aa, Unknown
  Bacterial polypetide isolated from the Sargasso Sea
KIQHINNRSNSEATGKLIKYDSIHGKFDADIKFDENNLIINKKKISFSQEPKIEKINWKKYDVDYVLECTGKFNSREKLEAHIKNGAKKVIVSAPCKNADKTIVFGVNDNTLSKKDKIISAASCTTNCLAPVVDVIHKKFEIEKGFMTTIHSFTSDQRILDNSHKDPRRARSASQSIVPTSTGASKAIGEIIPSLRGKLEGVAMRVPTPNVSLVELVFCTKKEINIKNINNEFELASKRELKRILEVTYEKLVSVISI

SEQ ID NO: 92012 - protein, 284 aa, Unknown
  Bacterial polypetide isolated from the Sargasso Sea
RLNSNGFDLNEMDCIEDLMSKVNKFSELSFHACSISPHNPLNNAPIKITSKCNAKIIGIVETCDFKSIDINSINPSEQWINYSIESRNEILISVADRLEDEQAKFVYLLMHEAGKTIEDALDEIREAVDFLRYYSQQALNLEPLPQRGPTGEDNILEYGPKGTVLCISPWNFPLAITIGQIAAALAGGNTVISKPSEHTPIIAFEAINLFFKKGLPEDALHLFLGNGELGKSIILNQAIDLVAFTGSLPTAKEIHKNLSLKPGKIIPLIAETGGLNAMIGIRAR

SEQ ID NO: 92013 - protein, 230 aa, Unknown
  Bacterial polypetide isolated from the Sargasso Sea
SQPMASEADIDATVVYGVNQQCLSGAERLVSNASCTTNCGVPLLKLLDEVVGLEYVSITTIHSAMNDQPVIDAYHHEDLRRTRSAFQSVIPVSTGLARGIERLLPELAGRIQAKAIRVPTVNVSCLDITLQTARDTSAEEINRVLRQAAESGPLKGLLAYTELPHASCDFNHDPHSAIVDGSQTRVSGPRLVNLLAWFDNEWGFANRMLDVAEHFLAVSTSSVQPAFVKD

SEQ ID NO: 92014 - protein, 256 aa, Unknown
  Bacterial polypetide isolated from the Sargasso Sea
DIFEWNAEETKRIFGQTVESRFEDTRVQVIYQPVGVVAALVPWNFPIILASRKISTALAAGCSVIVKPDVITPGAVMELMNIINDAGIPPGVVNLLSGDPEEISNELISSNIVKKVSITGSTRVGKLILKKAADKVQRVTMELSGHAPFIVFEDSNIDKVTDMAITSKYRNNGQVCISPSRFYIHESKKNEFAKTFVAKTKKLKLGDGMKDGVNLGPITTKKRLEEIEKLVEKTKKEGGKVLYGGKRPAGFNKGYF

SEQ ID NO: 92015 - protein, 233 aa, Unknown
  Bacterial polypetide isolated from the Sargasso Sea
QSHLEDFILRLKEFKFDHQFDPKSNNHICYEPIGVCGLITPWNWPINQIALKVVPAFATGCTMIHKPSEIAPLSAMLFAEMIDEAGFPPGVFNLVNGDGVGVGTDISSHPDINLVSFTGSTRAGKLILKNGAETIKKVCLELGGKGGNIVFADSYPNAVRDGIRNVMSNSGQSCDAPTRMLVERSIYDRAVKEAVDEANLIKVDHASKKGDHIGPVVSKVQYNKIINLIQSGI

SEQ ID NO: 92016 - protein, 57 aa, Unknown
  Bacterial polypetide isolated from the Sargasso Sea
DRKERVSAKLKAGAVHINGGGIEYGTPFGGYKQSGNGREGGLMGLEDYLETKTLHGL

SEQ ID NO: 92017 - protein, 298 aa, Unknown
  Bacterial polypetide isolated from the Sargasso Sea
GSKEDTDGAVNAAKNAFNSWKESSKVERINFLEKLLKIYKKRFNEMAEAMSIEMGAPIDYAMSTHAASGQSHIEDFILRLKEFEFEEHFDSKSNNHIAYEPIGVCGLITPWNWPINQIALKVIPAFAAGCTMILKPSEIAPISAMLFAEMIDEAEFPAGVFNLVNGDGAGVGTQISVHPNIDMVSFTGSTRAGKLITKNAADTIKKVCLELGGKGGNIVFSDSYPNAVKDGIRNVMSNSGQSCDAPTRMLVEKSIYDRAVKEAVDEANNIKVNLASIKGDHIGPVVSKIQYDKITNLI

SEQ ID NO: 92018 - protein, 138 aa, Unknown
  Bacterial polypetide isolated from the Sargasso Sea
RARSASQSIVPTSTGASKAIGEIIPSLKGKLEGVAMRVPTPNVSLVELVFCTKKDLSIEKINSAFKNFSEKQKIKVLEIIEEKLVSIDFNHNPASSIVDTTLTNVVGKNMGKISAWYDNEWGFSNRMCDIAEYLHKIS

SEQ ID NO: 92019 - protein, 134 aa, Unknown
  Bacterial polypetide isolated from the Sargasso Sea
TLLAGGSRLTEGGLDRGCFYGATLLSDVTPEMLIYREETFGPVAAVVPFDDEDDVIAMANDTDYGLAAYVYTQNLARALRTFEQLQFGIIGINDINPTSAAAPFGGMKESGLGREGAREGIEEYLETKLGGLSI

SEQ ID NO: 92020 - protein, 320 aa, Unknown
  Bacterial polypetide isolated from the Sargasso Sea
LLNKLLVVYKKRFGEMAEAISLEMGAPMDWATDVQTGSGQTHLEDFILRLKDFEFDEHFDQKSNNHIYYEPIGVCGLITPWNWPINQIALKVVPAFATGCTMILKPSEIAPISGMLFAEMIDEVGFPKGVFNLVNGDGEGVGTQISSHPDIDMVSFTGSTRAGRLISKNAAETIKRVCLELGGKGGNIVFADSYKDAVRDGIRNVMSNSGQSCDAPTRMLVEKSIYKRAVNEAVDEANKIKVDQASKKGDHIGPVISKTQYDKIINLIESGISEGATLAAGGPELPNGLNKGYFIKPTIFTNVTNEMRIAKEEILVQCFL

SEQ ID NO: 92021 - protein, 229 aa, Unknown
  Bacterial polypetide isolated from the Sargasso Sea
MGLGGVSVASDYPEVSKDELERILNSLKKRFQNGDYPNYKERIDRINRLKLLVEENSEDFHKALQNDFGTRHEQLSLLSDTLPIIASAKHISKNLSKWMKPEKRKPNFPLGLLGAKAFIHNQPYGVVGIISPWNFPLNLSLGPLVEVFAAGNNAMMKLSEFVPETSDLTEKLVKEYFNDDEVVVINGGPQTSQSFAGLAFDHLLFTGSTHIAKKIAYEASENLVPLTLE

SEQ ID NO: 92022 - protein, 222 aa, Unknown
  Bacterial polypetide isolated from the Sargasso Sea
MNLIEHYINGKIVPGVSERKGKVFNPAIGKQESEVRLGTKQDLDLAVLKAKKAFETWSNVTPIQRARIIFKYKEIIEKNSDLIAKMIVSEHGKVYEDAKGSLTRGLEVVEFACGIPQMLKGDFTENVGTNIDSWSVRQPLGVCAGITPFNFPAMVPMWMFPMAIACGNTFVLKPSEKDPSCPLKLAELFSEAGLPDGVLNVVNGDKEVVDAILEHKDISAVS

SEQ ID NO: 92023 - protein, 310 aa, Unknown
  Bacterial polypetide isolated from the Sargasso Sea
AEEQKRIYGQTVESRFEDTRVHVYYQPVGVVAALSPWNFPAVLSSRKISTALAAGCSVIIKPDVITPGVVMEMVDICKDCGVPPGVVNLLSGDPPSIAQQLIASDIVKKISVTGSSRVGKLILKQAADKVQRVTMELSGHSPFIVFEDADIKKATEMAIAAKFRNNGQVCISPNRFYIQESKKDEFVNLFVEKTKKLKIGNGMDPDTQLGPLTTQKRLNEVEALVEKTKKEGAKVLLGGKRPAGFNKGFFYEPTVFDDVKDDFTIMKEEPFGPLVPMLSFKSFDEVIERANNHELGLSSYVCTNSRKKPI

SEQ ID NO: 92024 - protein, 109 aa, Unknown
  Bacterial polypetide isolated from the Sargasso Sea
KLEGVAMRVPTPNVSLVELIFCSKKEININKINTAFEIASQNELNKILEVTHEKLVSIDFNHHSASAIVDASLTNVVGTNMGKISAWYDNEWGFSNRMCDIAENLNKIS

SEQ ID NO: 92025 - protein, 292 aa, Unknown
  Bacterial polypetide isolated from the Sargasso Sea
LGSKEDLDKAVQAAKIAFKSWKKTSKEERLKLLEKLLKIYKKRFNEMAKAISDEMGAPMDWATDVQTGSGQAHLEDFILRLKEFKFEEHFDSKSNNHICYEPIGVCGLITPWNWPINQIALKVVPALAAGCTMILKPSEIAPISGMLFAEMIDEADFPDGVFNLVNGDGAGIGTNISGHPDIDMVSFTGSTRAGRLISKNAADTIKRVCLELGGKGGNIVFADSYPNAVRDGIRNVMSNSGQSCDAPTRMLVEKSIYQKAVDEAVDEANKIKVDIGSKKGDHIGPGFQKFNT

SEQ ID NO: 92026 - protein, 248 aa, Unknown
  Bacterial polypetide isolated from the Sargasso Sea
LALCIKEAGKTVGDSMAEVREAVDFCRYYAAEASKNLQASQARGVVLCISPWNFPLAIFLGQVSAALVAGNTVVAKPAEQTSLIAVRTLALMKAAGFPDHVVQLVIAPGRQVGEVIVPDTRIQAVMFTGSTETGAWIARKLAERGGEPVPLIAETGGQNCMIVDSTALPEQVVDDVISSGFQSAGQRCSALRVLFLQEDVADKIITMIKGAMKELHVGDPAWLSTDLGPVIDTKALERLNQHVQYLEG

SEQ ID NO: 92027 - protein, 119 aa, Unknown
  Bacterial polypetide isolated from the Sargasso Sea
KAIGEVIPSLKGKLEGVAMRVPTPNVSLIELVFCTKKDLSIKKINSAFEDFSKKNKVIEITKEKLVSIDFNHNPASSIIDASLTNVVGKNMGKISAWYDNEWGFSNRMCDIAEYLHKIS

SEQ ID NO: 92028 - protein, 114 aa, Unknown
  Bacterial polypetide isolated from the Sargasso Sea
MKLIKHFVDGKIISGSSDRKGKVTNPATGEQKSEVRLASKSDLDQAVEVAKKAFETWSQKPALQRARIIFKFKELIEKNSDELTELIVSEHGKVYEDARGSLIRGLEVVEFACG

SEQ ID NO: 92029 - protein, 215 aa, Unknown
  Bacterial polypetide isolated from the Sargasso Sea
MEKIQNYINGKLCDPIKGEYIENYNPSTGQVYCLIPDSSKEDVDVAVESASCAFKEWSTLGIEKRSELLMKVADLLEQRMEEFVIAESKDNGKPESLSRSVDIPRAVSNIRFFSTAILHFASESHYMEKVGVNFTTRKPIGVVGCISPWNLPLYLFTWKIAPALASGNCVVAKPSEVTPYTAFLLSKVFIDAGFPPGVINIIHGLGSNAGDSIVK

SEQ ID NO: 92030 - protein, 142 aa, Unknown
  Bacterial polypetide isolated from the Sargasso Sea
DLRRARAASANIIPTTTGAAKAVTKVIPDLEGKIDGMAYRVPVITSSVTDLTVKLNSDESIEKINELYKQSASKELNGILDCADEELVSSDFIGNSYSCTIDLASTSKIPGTGLYKIVGWYDNEWGYASRTSDLANLIGKNL

SEQ ID NO: 92031 - protein, 249 aa, Unknown
  Bacterial polypetide isolated from the Sargasso Sea
ANSSDIQKALKSAERGLQIWKNTSPWERSKIIRKISDLIRKRVDVLSKWLTLEVGKPLTEGPGEIGGAADIFEWNSEETKRIFGEINQSRFPNTQIHVMYQPVGVVAALVPWNFPVILASRKISTALAAGCSVIVKPDVITPGSVMEIIDICREAGVPPGVVNLLSGDPAGISEELIKSDIIKKISITGSTRVGKLILKQAADKVQRVTMELSGHSPFIVFDDVDLNKVTDMAITSKFRNNGQVCISPK

SEQ ID NO: 92032 - protein, 284 aa, Unknown
  Bacterial polypetide isolated from the Sargasso Sea
ILAKWLTIEVGKPLAESIGEVTAAADIFEWNAEETKRIYGQTVESRFENTRIHVYYQPVGVVAALVPWNFPIILASRKISTALAAGCSVICKPDVITPGSVMEMMNIMNEAGVPPGVVNLLSGDPESISSQLISSDTIKKISITGSTRVGKLILKQAAEKVQRVTMELSGHAPFIVFEDVNIEKVSDMAIAAKFRNNGQVCISPSRFYIHESKKDAFTKSFVEKTKKLKIGNGLNEGVQLGPMTTKKRLQEIEELVEKTKKEGAKVLCGGKRPAGFNKGYFYEP

SEQ ID NO: 92033 - protein, 312 aa, Unknown
  Bacterial polypetide isolated from the Sargasso Sea
GERVSSLPWASEQEVDSAIALAEQGYRQWRTVSLEQRADALRKVGNALRARAEEMAQMISLEMGKPIAQARGEVTKSANLCDWYAEHGPAMLATEATQVENNNAVIEYRPLGAILAIMPWNFPLWQVLRGAVPILLAGNSYLLKHAPNVMGSAALIGEIFNQAGLPAGVFGWVNATNDGVSRMIDDSRIAAVTVTGSVRAGKAIGAQAGAALKKCVLELGGSDPFIVLNDADLDEAVKAAVIGRYQNTGQVCAAAKRFIVEAGIAEAFSKKFVAAVEALKMGDPRDEANYLGPMARFDLRDELHQQVTTTLA

SEQ ID NO: 92034 - protein, 277 aa, Unknown
  Bacterial polypetide isolated from the Sargasso Sea
MKIESKKPFYINGEWVDPVNKNDFEVINPSNEEVCAIISLGSQADTDSAVKAARDSFLSWWHTPKEKKLTLLNNLLKIYIKRSDEMAKAISIEMGAPIDWATNEQSKSGEDHIETFIKKFEEFNFENYYDENVGNYISKEPIGVCGLITPWNWPINQIALKVLPAFAAGCTMILKPSEIAPLSGMLFAEMIHESGFPNGVFNLLNGDGPGVGTQLSTHPGIDMISFTGSTRAGKLITKNAADSIKRVSLELGGKGANIVFADADEKAVKRGVRRVFN

SEQ ID NO: 92035 - protein, 192 aa, Unknown
  Bacterial polypetide isolated from the Sargasso Sea
EDKIISAASCTTNCLAPVAHVLNENFEIEKGFMTTIHSFTSDQRILDNSHKDIRRARTASQSIVPTSTGASKAIGEIIPSLKGKLEGIAMRIPTPNVSLIELIFCSKKDLSVEKINSAFKNFSKKQKIKVLEITEEKLVSIDFNHNPASSIVDASLTTVIGKNMGKISAWYDNEWGFSNRMCDIAAYLHKIS

SEQ ID NO: 92036 - protein, 149 aa, Unknown
  Bacterial polypetide isolated from the Sargasso Sea
DQRILDNSHKDLRRARSASQSIVPTSTGASKALGEIIPSLKGKLEGVAMRVPTPNVSLVELVFCTKKDLSVEKINLAFENFSKKNKVIQISKEKLVSIDFNHNPASSIIDASLTNVVGKNMGKISAWYDNEWGFSNRMCDLAEYLHKIS

SEQ ID NO: 92037 - protein, 252 aa, Unknown
  Bacterial polypetide isolated from the Sargasso Sea
SRVEKLILKQAADKVQRVTMELSGHSPFIVFDDADIKKAADMAVASKFRNNGQVCISPNRFYIQESKKDEFVNLFVEKTKKLKIGNGMDTDVQLGPITTKKRLNEIEDLVETTKKEGAKVLLGGKRPSGFNKGYFYEPTVFDNVKDDFTIMKIEPFGPLVPMLSFKTFDEVVERANNHELGLASYICTNSMEKAHRASELMETGTVAVNTPVVAIAEAPFGGIKQAGYGREGGSMAIKDYLNVKYTHLGIKG

SEQ ID NO: 92038 - protein, 74 aa, Unknown
  Bacterial polypetide isolated from the Sargasso Sea
NDTPYGLTNYIQTQDKEKVQRVARKLRSGMVDVNGVGIAVASPFGGYKHSGIGREAGTEGLIEFLEVKTVGGWN

SEQ ID NO: 92039 - protein, 187 aa, Unknown
  Bacterial polypetide isolated from the Sargasso Sea
MTIKIGINGMGRIGRMVLRSIIEGKNKNLKINHINNRSNSEVTSKLIKYDSIHGKLNAHLDFDPSHLIIDKRKITFSQETKIQDINWKKYDVDYVFECTGKFNSKEKLVAHIKNGAKKVIVSAPCKNADKTIVFGVNENIITKKDKIISAASCTTNCLAPVVSVLNENFKIEKGFMTTIHAITSDQR

SEQ ID NO: 92040 - protein, 97 aa, Unknown
  Bacterial polypetide isolated from the Sargasso Sea
IINLSSGMGQLIDMESGSSAYRISKASLNAITKILSNELSEWKIKVNSICPGWVKTDMGGQNATLTVQESVNEIIKFALDTNFPNGKFLRHGQIIPW

SEQ ID NO: 92041 - protein, 91 aa, Unknown
  Bacterial polypetide isolated from the Sargasso Sea
AISLANKTEYGLTASIFSTNTRNALRAARELRAGTVTVNSYGEGDITTPFGGYKQSGFGGRDNGIHAHEQYCEVKTIWIDLTDPASQDKIE

SEQ ID NO: 92042 - protein, 280 aa, Unknown
  Bacterial polypetide isolated from the Sargasso Sea
VLKKWHNLILENIDDLAHIMTVEQGKPLAEAKGEILMGTTYIEFYAEESKRVYGDIIPDPLPDRRIVIIKQPIGVVGAITPWNFPSTMITRKCAPALGVGCPVVIKPASQTPFSALALAVLAEEAGFPKGIFNVITGSASEIGKELTQNPIVKKISFTGSTEVGKILLKQSSSTVKKVSMELGGHAPFIVFDDANIDEAVSGAIISKFRNSGQTCICANRLFVHEKIYDEFLKKFVNEVSKIKVGNGLESSINSGPLIDQYSLEKVKDHVNDAVNTGAKV

SEQ ID NO: 92043 - protein, 122 aa, Unknown
  Bacterial polypetide isolated from the Sargasso Sea
MVVKVGINGMGRIGRMIVRSIYENHKGKILIKHINNKSNSDVCANLLKNDSIHGEFKVDIKSNSDYLKINKKNISYSQHSKIDDIEWKKYDVDYVFECTGKFNSKIQLQPHINNGAKKVVVS

SEQ ID NO: 92044 - protein, 37 aa, Unknown
  Bacterial polypetide isolated from the Sargasso Sea
NHATPFGGYKQSGYSREKGIDGLKSYLQVKNVGISLS

SEQ ID NO: 92045 - protein, 290 aa, Unknown
  Bacterial polypetide isolated from the Sargasso Sea
MLDKRNFYINGKWVKPIKPNDFKVINPSNEEAFAVISLGSKGDTDVAVKAAKKAFEKWKETSKEERIYFLEKLLKIYKKRYNEMAEAMSVEMGAPIDYAISTHASSGQSHLEDFILRLKNFEFERHFDSKSNNYITYEPIGVCGLITPWNWPINQIALKVVPALATGCSMILKPSEIAPISAMLFAEMIDETGFPSGVFNLVNGDGDGVGTNMSCHPDIDMISFTGSTRAGKLISKNASDTIKRVCLELGGKGGNIVFADAHPNAVRDGIKNVMSNSGQSCDAPTRMLVE

SEQ ID NO: 92046 - protein, 202 aa, Unknown
  Bacterial polypetide isolated from the Sargasso Sea
MNIKNKTLFKQKCYINGSWVGSKDNKIIEVNNPADLQIIGHVPKYGTDETKLAIEAANRALPEWRSKTAKERSILLRKWFDLIMLNQEDLAQIMTIEQGKPINESRGEIAYGASFIDLYAEEGKRVYGETIPDPLPDRRIVIIKQPIGVVGAITPWNFPSSMITRKAGPALAVGCTIVIKPASQTPYSALALGVLAEEAGIP

SEQ ID NO: 92047 - protein, 139 aa, Unknown
  Bacterial polypetide isolated from the Sargasso Sea
DPRRDRTASQSIVPTSTGASKAIGEIIPSLKGKLEGVAMRVPTPNVSLVELIFCTKKDLSIEKINSAFQNFSKKNKILEITEEKLVSIDFNHNSSSSIVDASLTSVVGKNMGKISAWYDNEWGFSNRMCDIAEYLHKIS

SEQ ID NO: 92048 - protein, 183 aa, Unknown
  Bacterial polypetide isolated from the Sargasso Sea
MKLIEHFVNGKIIPGSSDKKGKVFNPATGEQESEVRLASKSDLDSAVQVAKKAFETWSLKPPLQRARIIFKFKELIEKNSDELTKLIVSEHGKVFEDARGSLTRGLEVVEFACGIPHLLKGEFSENVGTNVDSWSMRQPLGVVAGITPFNFPAMVPMWMFPIAIACGNTFILKPSEKDPSCAI

SEQ ID NO: 92049 - protein, 63 aa, Unknown
  Bacterial polypetide isolated from the Sargasso Sea
ILATNSAPLVSKDFNHNPHSSIFDLTQTQVIKGKFSRVLSWYDNEWGFSNRMCDTTIQIAGLI

SEQ ID NO: 92050 - protein, 263 aa, Unknown
  Bacterial polypetide isolated from the Sargasso Sea
IDYTKYDIDDALLIDNTGIWREKEALAQHIKCKGISKVLLTAPGKKGVKNIVYGINNQDLPENEEIVGAASCTTNAIVPVLKALNDEFIIQQGHIETVHAYTNDQNLIDNYHKKARRGRSAALNLVITETGAGKAVGEVLPELQGKLTANAIRVPTPNVSLAIMKLTFENEHSKEELNSFLRNKAFHSELKDQIDFTSSPEMVSNDFVGSRYACIVDSAATLSQSNNAVFYVWYDNEFGYSVQLLRVAKQMAGIKYPRFPKYS

SEQ ID NO: 92051 - protein, 285 aa, Unknown
  Bacterial polypetide isolated from the Sargasso Sea
NCGSNETFEAIKAAKEAHKVWSKTDTKERSSVLKNLHRLMLEHQEDLARIITHEGGKPLSESMGEIAYAASFFEWFSEEAKRVYGDVIPGHQQDRRTLVIKQPIGVVGCITPWNFPSAMLARKIAPAIAVGCTVVAKPAPETPYSATAMAYLSELAGIPKGVFNVVTGDAEKIGSVMTTHKEVKKITFTGSTSVGKQLLKQSADTVKKVSLELGGHAPFIVFEDANLEDAVDGALIAKYRNSGQTCVCANRIYVQSSIYDDFSKRFTEKASQLVVGDGLAESTQQ

SEQ ID NO: 92052 - protein, 69 aa, Unknown
  Bacterial polypetide isolated from the Sargasso Sea
KKMQNILSVNNLPLVSIDFNHSPHSSIFDLTQTQVINKKFCRVLSWYDNEWGFSNRMVDTLINLKKYFK

SEQ ID NO: 92053 - protein, 120 aa, Unknown
  Bacterial polypetide isolated from the Sargasso Sea
MKINIAINGFGRIGRLILRAIYEKNNNNINVKAINDLGSIESNAHLFNYDTTHGQLNNKIESNKSGFIINNKLIKIFNKKNPEELPWKKLGIDIVLECTGIFASKEKSMKHVIAGAKKVI

SEQ ID NO: 92054 - protein, 79 aa, Unknown
  Bacterial polypetide isolated from the Sargasso Sea
AAGVWTSDMGRALRMSELLKAGTVWVNTYRAVSFTSPFGGYKRSGEGRESGKDAIKEFLQVKSVWIAQQTTAANPFVMR

SEQ ID NO: 92055 - protein, 284 aa, Unknown
  Bacterial polypetide isolated from the Sargasso Sea
ISKEEKLKLLEKLLEIYKKRFNEMAKAISDEMGAPMDWATDVQTGSGQAHLEDFILRLKKFNFDEHFDSKSNNHICYEPIGVCGLITPWNWPINQIALKVVPALATGCTMILKPSEIAPISGMLFAEMIDEAGFPSGVFNLVNGDGAGVGTNLSGHPDIDMVSFTGSTRAGKLISKNAADTIKRVCLELGGKGGNIVFADSYPNAVRDGIRNVMSNSGQSCDAPTRMLVEKSIYQRAVDEAVDEANKIQVDVGSKKGDHIGPVISKTQYDKIINLIESGISEGA

SEQ ID NO: 92056 - protein, 146 aa, Unknown
  Bacterial polypetide isolated from the Sargasso Sea
DNSHKDLRRARSASQSIVPTSTGASKAIGEIIPSLKGKLEGIAMRVPTPNVSLIEFIFNVKKNITVKKLNNSLFSASKTKLKNILNVTDEKLVSVDFNHNSASAIIDSSLTNVVGNKMGKISAWYDNEWGFSNRMCDIAKYVSKIK

SEQ ID NO: 92057 - protein, 243 aa, Unknown
  Bacterial polypetide isolated from the Sargasso Sea
LKMLLQHGKNTSVEERITLLKKLLNIYKRRFDEMTQAISTELGAPLDWASSAQTASGESHIEDFILRLKKFEFETKFDENSNNYIVYEPIGVCGLITPWNWPINQIALKVIPAFATGCTMILKPSEMAPLSGLLFAEMIHEAGFPAGVFNLVNGDGAGVGSQISSHPDIDMVSFTGSTRAGKLISKSAADTIKRVCLELGGKGGNIVFADAYPNAVRDGVRNIMSNSGQSCDAPTRMLVEKSI

SEQ ID NO: 92058 - protein, 195 aa, Unknown
  Bacterial polypetide isolated from the Sargasso Sea
MYEKFGQFINGKWQQSSDKSSYEVINPANEEILGKASKATPDDVSLALKSAEKGLEVWKQTPPWQRSNVIRRIADKMREKQDVLAKWMTLEVGKPFAEAKGEVGAAADIFEWNSEETKRIYGQTVESRFVDTRVHVYYQPIGVVAALTPWNFPLVLSSRKISTALAAGCSVIVKPDVITPGTVMQLVDICRECGV

SEQ ID NO: 92059 - protein, 274 aa, Unknown
  Bacterial polypetide isolated from the Sargasso Sea
QQAEKKETYDVINPATEEVIGKASKASSIEVQKALKSAEKGLEVWKNTAPWQRAYVLRKIADMMRERKDIIAKWLTLEVGKPLTEAVGEVGGGADIFEWNAEETKRIYGQTQQSRFPDTRVHVYYQPVGVVAALVPWNFPIVLASRKISTALAAGCSVICKPDVITPGAVMELVNICKEAGVPDGVVSLLSGDPAEISNELMESDIIKKVSVTGSTRVGKIILKKAADKVQRVTMELSGHSPFIVCEDVDMNKVADIAITGKFRNNGQVCISPK

SEQ ID NO: 92060 - protein, 301 aa, Unknown
  Bacterial polypetide isolated from the Sargasso Sea
GSSSKDERIALLESIITNYEDSSEELAAIISEEMGAPLWLSKVAQVTSGLQHFKDTLEVLKEFDFEEDGESFLIRKEPIGVIGMITPWNWPMNQMSTKVASAIAAGCTMVLKPSEISPFCGIHLAKVIEKSDLPNGVFNLVNGLGPVVGDALSTHPDVDMMHFTGSTRAGIAVAQSSAPTVKRVAQELGGKSANIILDDADLEKAVSAGVNLCFLNTGQSCNAPTRMLVHASQYDDAVKIAKAAAEATVVGYPNEDGTKIGPISNRTQYEKVKRLIDLGVEEGAKLVTGGSELPDGFEKGF

SEQ ID NO: 92061 - protein, 291 aa, Unknown
  Bacterial polypetide isolated from the Sargasso Sea
FNPATGEQESEVILASKADLDGAVEIAQKAFETWSLNPPLQRARIMFKFKELIEKNFDELAKLIVSEHGKVYEDAKGSLIRGLEVVEFACGIPHLLKGEFSENVGTNVDSYSMRQPLGVAAGITPFNFPAMVPMWMFPLAIACGNSFILKPSEKDPSCPMKLAELLHEAGLPEGVFNVVNGDKEVVDAILTNQNIKSVSFVGSTPIAKYIYENAAKNEKRVQALGGAKNHLVVMPDCDLDGAVNGLMGAAYGSAGERCMAQSVAVAVGDVGDELVSRLSKKAEALKIGPGM

SEQ ID NO: 92062 - protein, 62 aa, Unknown; identical to SEQ ID NO: 91823
  Bacterial polypetide isolated from the Sargasso Sea

SEQ ID NO: 92063 - protein, 261 aa, Unknown
  Bacterial polypetide isolated from the Sargasso Sea
ILGNELTTHPLVRKITFTGSTEVGRVLLQQAASTVKKCSMELGGNAPVLVFDDADLDTAVEGVIASKFRNTGQACISANRIYVQDGIYDAFAQRMAERVAQLKVGNGLADGVQQGPLIDDGAVTKVEEHIADAVAGGARVKLGGKRHALGGCFFEPTILVDVQPSMMVAREETFGPVAPLFRFHTEDEALRLANDTEFGLAAYLYSRDASRIWRVSAGIESGMVGINCGLISNEVAPVWRRPAERPPGAKGSQYGASKSSF

SEQ ID NO: 92064 - protein, 114 aa, Unknown
  Bacterial polypetide isolated from the Sargasso Sea
PSLKGKLEGVAMRVPTPNVSLVELVFCTKKEINIKNINNEFELASKRELKRILEVTYEKLVSVDFNHNSASAIVDASLTSVVGANMGKISAWYDNEWGFSNRMCDIAETLHKIS

SEQ ID NO: 92065 - protein, 249 aa, Unknown
  Bacterial polypetide isolated from the Sargasso Sea
GKNRDISIKHINNRSNLETTCSLLKYDSIHGKFNSNIKVNGKNLIINKNKISFSQETSLENIDWKKYGVDYVFECTGKFNSKEKLLHHLKNGAKKVIVSAPCKNADKTIVFGVNQNTIKKNDQIISAASCTTNCLAPVANVLNNNFEIEKGFMTTIHAFTSDQRILDNSHKDPRRARSASQSIVPTSTGASKSIGEIIPSLKGKLEGIAMRIPTPNVSLIELVFCTKKEITKEKIISSFLKASKKESKG

SEQ ID NO: 92066 - protein, 321 aa, Unknown
  Bacterial polypetide isolated from the Sargasso Sea
KRKFYINGEWIEPSKKNDFEVINPSNEEKFAVISLGTKADVDLAVKVSKEAFESWKETTKEERIKLLENLLSVYKKRFSEMTEAISKEMGAPMDWSSNVQNASGQAHLEDFIIRLKNFKFDEQFDSKSNNQIFYEPIGVCGLITPWNWPINQIALKVIPALATGCTMILKPSEIAPVSAMLFAEMIHEAGFPPGVFNLVNGDGAGVGTFISGHPDIDMVSFTGSTRAGKLITKNAADTIKRVCLELGGKGGNIVFADSYPNAVRDGIRNVMSNSGQSCDAPTRMLVEKSIYKRAVEEAVDEANKIKVDVASKKGGHIGPVV

SEQ ID NO: 92067 - protein, 143 aa, Unknown
  Bacterial polypetide isolated from the Sargasso Sea
HKDPRRARSASQSIVPTSTGASKAIGEIIPNLKGKLEGVAMRVPTPNVSLVELVFCTKKDVNIKKINDAFEQASKNKLKNILEVTHEKLVSIDFNHHSASAIVDASLTNVVGSNMGKISAWYDNEWGFSNRMCDIAETLHKIS

SEQ ID NO: 92068 - protein, 55 aa, Unknown
  Bacterial polypetide isolated from the Sargasso Sea
KRVAKKLRSGMVDVNGAGIAIDTPFGGFKHSGIGREAGEHGLQEFLEVKSVGGWN

SEQ ID NO: 92069 - protein, 203 aa, Unknown
  Bacterial polypetide isolated from the Sargasso Sea
PATEEILGHASTACREDVKKALLSSESGFKKWRNTTPWERSKVLRRIADKIREKKDILAKWMTLEVGKPLAEGVGEAGGAADIFEWNSEETKRIYGQTVESRFSDTRVHVYYQPVGVVAALVPWNFPLILASRKISTALAAGCSVICKPDVITPGTVMELVDICKECGVPDGVVNLLSGDPPSISEQLLESDIIKKVSITGST

SEQ ID NO: 92070 - protein, 221 aa, Unknown
  Bacterial polypetide isolated from the Sargasso Sea
IVFDDADMDEAVAGAMQSKFRNSGQTCICTNRIFVHEKIYDEFLNKFIEEVDKITVGNGLEEGIVSGPLIDKSSLEKVIDHVQDAVNTGAKIAIGGDIHSIGGNFYQPTVLSNVSRKAKITFEETFGPVAPLYKFSSDEEVIEMANDTPYGLASYFFSRDIGRIWRVAEALEYGIVSINNGLPTIAEVPFGGVKESGMGREGSRYGLDDYLTIKYISMGGI

SEQ ID NO: 92071 - protein, 165 aa, Unknown
  Bacterial polypetide isolated from the Sargasso Sea
MTIKVGINGLGRIGRMVLRSIFENKNKKILVKHINNRTGTDVVSSLLKYDSIHGKFDANINYNSNSITINNNKISFTQKTKIEDINWKKLNVDYVLECTGKFNSKEILLKHIKNGAKKVIVSAPCKNSDKTIVYGVNEKTIRKNDKIISAASCTTNCLAPSCQMF

SEQ ID NO: 92072 - protein, 282 aa, Unknown
  Bacterial polypetide isolated from the Sargasso Sea
VFPCDITPHGRARRIYTMREPLRLVSAITPFNHPMNQVVHKVAPAIAVGTPVVLKPSEKTPLSAYWLGQLALDCGLPANALNVINGPLAEIAPLLVQHERVEMVTFTGSSDIGRQIAEQAGYKRLILELGGSSPLLVLEDADVEAAVEIAMAGIFKNSGQRCTAIRRLVVHRSLADRFAESLAAATAQLTCGDPYDEATDMGTVIDEDAARLLESRVNGAVKAGARVLTGNRREGALYWPTVVDQVENDYNLVRSESFGPIASILRFDDLSEALAIANDTEY

SEQ ID NO: 92073 - protein, 243 aa, Unknown
  Bacterial polypetide isolated from the Sargasso Sea
FEKTLDEEKNQTILYEPKGVCALITPWNWPINQVNLKVIPALAAGCTVVLKPSEIAPLSSMLLAEMMHDAGFPKGVFNLVNGDGAVTGDALTSHPDIDMISFTGSTRAGALISQNAAKDFKRISLELGGKGANIVFKDAGPDAISWSVQRCFRNSGQSCNAPTRMLVEKSIYNETIEKVREFANKTKVDSPNKNGNHIGPVISETQFNKIQTLIQKGIDEGAKLVAGGVGKQEGLEKGYYVKP

SEQ ID NO: 92074 - protein, 308 aa, Unknown
  Bacterial polypetide isolated from the Sargasso Sea
SKAISDEMGAPIDWSSEVQTSSGQTHLEDFILRLKEYKFEKQFDSNSNNYICYEPIGVCGLITPWNWPINQIALKVVPALAAGCTMILKPSEIAPLSGMIFADMIHEAGFPKGVFNLVNGDGKGVGTYFSSHKNIDMISFTGSTRAGKLISKNAADTIKRVCLELGGKGGNIVFEDAYPEAVRDGIRNVMSNSGQSCDAPTRMLVQKSIYERSVKEAIDEANKIKVDLASKKGGHIGPVVSKVQYDKIINLIKRGIEEGATLAAGGPEKPEHLKNGYFIKPTIFTDVTNDMKIASEEIFGDCLSIIPF

SEQ ID NO: 92075 - protein, 220 aa, Unknown
  Bacterial polypetide isolated from the Sargasso Sea
MSIFDEKSNNYIYYEPIGVCGLITPWNWPINQIALKVVPAFATGCTMILKPSEIAPISAMLFAEMIDEVGFPKGVFNLVNGDGVGVGTQISSHPDIDMVSFTGSTRAGRLISKNAAETIKRVCLELGGKGGNIVFADSYKNAVRDGIRNVMSNSGQSCDAPTRMLVEKSIYQRAVDEAVDEANKIGVDQASKKGDHIGPVISKTQYDKIINLIESGIKEG

SEQ ID NO: 92076 - protein, 300 aa, Unknown
  Bacterial polypetide isolated from the Sargasso Sea
KRSEELAETISKKMGAPIWLSQVAQVASGLTHFKDTLNVLKGYDFEYEKDGYLVRKEPVGVVGMITPWNWPMNQMCTKVASGIAAGCTMVLKPSEITPFCGIILAEIIHDAGVPAGIFNLVNGMGPVVGASMSEHKDIDMMHFTGSTRAGVAVAQASAPTVKRVAQELGGKSANIVLDDADIEKAVSAGVSSCFLNTGQSCNAPTRMLVSSKNYDKAVEVAANTANAIKVGDPFDADTKMGPISNKTQYEKVQRMIQIGIDEGATLSAGGVGLPDGCESGYYVKPTIFSDVTNDMTIARE

SEQ ID NO: 92077 - protein, 81 aa, Unknown
  Bacterial polypetide isolated from the Sargasso Sea
IDDAVAIANDTEYGLAAYVSGEDKETLTSIARRLRAGQIHVNYGSGGADAPFGGYKQSGNGREKAEWGLEEFLEVKAIMGA

SEQ ID NO: 92078 - protein, 248 aa, Unknown
  Bacterial polypetide isolated from the Sargasso Sea
MAEAISLEMGAPIDFSTQLQAGTGASHIKSYIKVLKDYKFEKILGDHAPNNKILYEPKGVCALITPWNWPMNQVCLKVIPALATGCTMVLKPSEIAPLSSMLLAEMIDEIKFPDGVFNLVNGDGAVTGNALTSHPEVNMISFTGSTRAGALISKNAANDFKRVSLELGGKGANIIFKDADAEAVERGAMRCFRNTGQSCNAPTRMLVEKSIYNKTIDKVKEVAEKVKIDLASKKGEHIGPVVSKLNLI

SEQ ID NO: 92079 - protein, 278 aa, Unknown
  Bacterial polypetide isolated from the Sargasso Sea
RHLLNAVTGFFGVVGVFFFARYLTGSYTIGLLAAVLLVLTPRYYGHSFNNPKDIPFAAFYLWSVYLLAKAGDRWRSGEISKIADWKLGLAMGACMGIRPPGLVMMFYLILLFFAVRRLDNADGHTLLSLIQLVRTRLLHPVLVAVGVMFIFWPYSHLNPIINIPHTIKLLSHFPWNFPLMFDGQKIMATDVPWNYILKWYGIATPLPHLAGFGLFLIFGVIRVFYSRTDKYIPIILILFSMAFPLGLSIVMQSTLYDGLRHFLFLTPLMAVSGAWGFF

SEQ ID NO: 92080 - protein, 306 aa, Unknown
  Bacterial polypetide isolated from the Sargasso Sea
SMKPPAQRARVIFKFKELIEKNSDELIKLIVSEHGKVYEDAKGSLTRGLEVVEFACGIPHLLKGEFTENVGTDVDSWSIRQPLGVCAGITPFNFPAMVPLWMFPIAIACGNTFVLKPSEKDPSCSIKLAQLFKEAGLPDGVFNVVNGNKEAVDALLTNKDVVAISFVGSTPVAKYIYENAAKNEKRVQALGGAKNHCVIMPDCDLDQAVNGLMGAAYGSAGERCMAQSVAVAVGKVGNQLVNKLAKKVEALKVGPGMDKNSEMGPLVTKEHLEKVKGYVDLGVQEGAKLVVDGRNIKLQGYEKGFY

SEQ ID NO: 92081 - protein, 53 aa, Unknown
  Bacterial polypetide isolated from the Sargasso Sea
MRIAINGFGRIGKLVFRAFLEKKLKNIEVVAINELGSLDSSIHLLKYDSIHGT

SEQ ID NO: 92082 - protein, 32 aa, Unknown
  Bacterial polypetide isolated from the Sargasso Sea
DGKFGRVLSWYDNEWGFSNRMCDTAVAMKRSK

SEQ ID NO: 92083 - protein, 185 aa, Unknown
  Bacterial polypetide isolated from the Sargasso Sea
MELKNKSLFREECYIGGEWVRSLNGQTISVDNPATQSSIGNVPKCGSSETKTAIKSANEAFKNWKNKTAKERSIILKKWHDLILDNIEDLAHIMTVEQGKPLAESKGEILMGATYIEFYAEEAKRVYGDIIPDPLPDRRIVVIKQPVGVVGAITPWNFPSTMITRKCAPALGVGCPVVIKPASQT

SEQ ID NO: 92084 - protein, 158 aa, Unknown
  Bacterial polypetide isolated from the Sargasso Sea
MNHEKLRIGINGFGRIGRAIFRINEKLKLFDIAIINDINPDINNIVYNLNYDTTYGRLNPKAHYKDNDLISNNCTSKIFNQENISDVPWENYQVELIIDSSGKSLSALEVEKLRKKVKNIVVTNSQNNIDQTIIFGVNEHNIDPKNNFVISSSICDAI

SEQ ID NO: 92085 - protein, 292 aa, Unknown
  Bacterial polypetide isolated from the Sargasso Sea
VIPGHQQDRRTLVIKQPIGVVGCITPWNFPSAMLARKIAPAIAVGCTVVAKPAPETPYSATAMAYLSELAGIPKGVFNVITGDAEKIGSVMTSHKEVKKITFTGSTAVGKQLLKQSADTVKKVSLELGGHAPFIVFEDANLGDAVDGALIAKYRNSGQTCVCANRIYVQSSIYDEFSKRFTEKASQLVVGDGLLESTQQGPLISEDAMKKASKHVEDAKNKGATITTGGNPHSLGGLFFEPTVLTGVSDEMLIAQEETFGPVAPIFSFDSEKEVLERANNTPYGWQLIFIRL

SEQ ID NO: 92086 - protein, 98 aa, Unknown
  Bacterial polypetide isolated from the Sargasso Sea
MKLIEHFVGGKIIPGTSEKKGKVFNPATGEQEKEVKLASTSDLDQAVVIAKKAFETWSLKPSLQRARIMFKFKELIEKNSDELTQLIVSEHGKVYEDA

SEQ ID NO: 92087 - protein, 215 aa, Unknown
  Bacterial polypetide isolated from the Sargasso Sea
FGVNDVALQKADQIISPASCTTNAIVPVLKLISDHYGISNGHIETVHSYTNDQNLIDNFHKGDRRGRSAPLNMVITSTGAVKAVSKAIPELKDKLTGNAIRVPTPNVSLAVLVLNLENAVDKDELNEFLKKSAFASKYREIIGYTNSPEAVSTDFYSSPYATIIDSQATIADGKQITLYCWYDNEYGYTKQVLNLTKKVASIDLPRFPEAIEDSV

SEQ ID NO: 92088 - protein, 299 aa, Unknown
  Bacterial polypetide isolated from the Sargasso Sea
MVRRGTKRVYGDTIPGHQPDKRLIVTKEPIGVTAAITPWNFPAAMITRKAGPALAAGCAMVLKPAPQTPFSALALAVLAERAGIPAGLFSVLPADAERSREVGAELCANPIVRKLSFTGSTGVGIKLMEQCAPTLKKLSLELGGNAPFIVFEDADLDAAVEGALVAKYRNAGQTCVCANRLYVHEAVYDAFAEKLAAAVAKLRVGPGDETGVVIGPLIDGNAVAKVQAHLADALEKGAKVLQGGKAHELGGHFFEPTVITDVTPDMRVAREETFGPLAPLFRFHDEAEVVRQANDTEFG

SEQ ID NO: 92089 - protein, 188 aa, Unknown
  Bacterial polypetide isolated from the Sargasso Sea
MKIKVGINGMGRIGRMVLRSIFENNLKDIEIKHINNKSNSEICTNLIKHDSVHGKFNADVNFNEKSLIINKKKISYSQHTHLEDIKWKKLDVDYVFECTGKFNSREKLQAHLKNGAKKVIVSAPCKNADKSIVYGVNQNMLNDNDQIISAASCTTNCLAPIANIVHENFKIEKGFMTTIHSFTSDQRV

SEQ ID NO: 92090 - protein, 51 aa, Unknown
  Bacterial polypetide isolated from the Sargasso Sea
RQLRSGMVEINGVGFAEGSPFGGYKQSGNGREGGTWGIEDFLEVKSISGWK

SEQ ID NO: 92091 - protein, 88 aa, Unknown
  Bacterial polypetide isolated from the Sargasso Sea
SHIKSYILDPLDKVDQHRPSKPKDIVLYGFGRIGRLVSRIMAQMTGPGNYYRLRAIVVRKGSDTNDLLSRASLLGRDSVHGSFPGPIR

SEQ ID NO: 92092 - protein, 96 aa, Unknown
  Bacterial polypetide isolated from the Sargasso Sea
MAIACGNTFVLKPSEKDPSISIKLAELFQEAGLPDGVFNVINGDKEVVDAILTNKDIKAVSFVGSTPIAKYIYENAAKNEKRVQASGGAKNHCVVM

SEQ ID NO: 92093 - protein, 322 aa, Unknown
  Bacterial polypetide isolated from the Sargasso Sea
MTFLKWNAEETKRIFGQTVKSRLEDTRVQVIYQPVGVVAALIPWNFPIILASRKISTALAAGCSVIVKPDVITPGAVMELMNVINDAGIPPGVVNLLSGDPEQVSNELISSNIVKKVSITGSTRVGKLILKKAADKVQRVTMELSGHAPFIVFEDSNIDKVTDMAITSKYRNNGQVCISPSRFYIHESKKNEFAKTFVEKTKKLKLGDGMKEGVNLGPITTKKRLEEIEKLVEKTKKEGGKVLYGGKRPAGFNKGYFYEPTIIDNIKDDFTVMTEEPFGPITAITTFKNFDEVIKRANKHDCGLAGYVCTNSMEKALKHRSN

SEQ ID NO: 92094 - protein, 193 aa, Unknown
  Bacterial polypetide isolated from the Sargasso Sea
MKVYNCFINNKWVKPETGKWLYSENPANAENWAKVPDCNFNDVNKAVKSAKKAFYDGEWSKISQAQRGRYLRKIGEVISKYSDHLGEIETRDNGKLPKNITPSLKDGEWLVDSWHYYGGMCDKFEGKLLPSEVPNMHNYMNWEPFGVVAQILPWNSPLGTLFWKLAPCLAAGNTVVLKPSEHASCSILELMEV

SEQ ID NO: 92095 - protein, 258 aa, Unknown
  Bacterial polypetide isolated from the Sargasso Sea
MYEKFGQFINGKWQQSSDQGTYEVINPANEEALGHASKATSKDVEAALQSAAKGLEVWKKTAPWQRSYIIRRIADRIREKQDVLAKWMTLEVGKPLAEAKGEINGAADIFEWNAEETKRIYGQTVESRFEDTRVHVYYQPVGVVAALSPWNFPAVLSARKISTALAAGCSVIIKPDVITPGVVMEMVDICRECGVPPGVVNLLSGDPPSIAQQLIASDIVKKISITGSSRVGKLILKQAADKVQRVTMELSGHSPFIV

SEQ ID NO: 92096 - protein, 280 aa, Unknown
  Bacterial polypetide isolated from the Sargasso Sea
LRCSTGSGQAHLEDFILRLKEFNFDEHFDQKSNNHICYEPIGVCGLITPWNWPINQIALKVVPAFATGCTMILKPSEIAPISGMLFAEMIDEVGFPNGVFNLVNGDGSGVGTQISSHPDIDMVSFTGSTRAGRLISKNAAETIKRVCLELGGKGGNIVFADSYKNAVRDGIRNVMSNSGQSCDAPTRMLVEKSIYKRAVEEAVDEANKIKVDQSSKKGDHIGPVISKTQYEKIINLIESGISEGATLAAGGPELPNGLNKGYFIKPTIFTNVTNNMRIAK

SEQ ID NO: 92097 - protein, 151 aa, Unknown
  Bacterial polypetide isolated from the Sargasso Sea
MYKADKFYINGEWVSPSTNDECEVINPATEEVIGTVAMGNENDVNNAVAAAKKAFETFSKTSIEERMALLDRIIAAYKAKMEKIAACVSQEMGAPISMSNAAQAPAGLGHLLFAKTAVEKFKFSEEVGTSHVVREPIGVCGLITPWNWPVN

SEQ ID NO: 92098 - protein, 300 aa, Unknown
  Bacterial polypetide isolated from the Sargasso Sea
EAFISFSKSSKEDRVALLKNIIKEYENRYKDLAEVITKEMGAPQWLSDRAQANTGLINFKETLEALEEFEFEKEDGGYTIRKEAIGVIGMITPWNWPMNQITTKVSAAIASGCTMVLKPSEISPYCSMLLAEIMHDAGVPKGVFNLVNGFGPIVGAALSEHKKVDMMSFTGSTRAGIAVAQASAETVKRVQQELGGKSANIILDDVADLEKSVKGGAGHCFLNSGQSCNAPTRMLVSSNNYEKAVEIAATTANNTTVGDPNGEFRMGPISNKTQYEKVVKMIEIGIEEGARLVAGGVDKP

SEQ ID NO: 92099 - protein, 231 aa, Unknown
  Bacterial polypetide isolated from the Sargasso Sea
MNLSRENVNALKSNLNFPSQLFINGKYQKSISEKSFDNISPIDGKIINKVYFAQQDDIDIAVSKAKDVFNKGYWSKLSPGERKKILLKFATLLERDRLELSLLDTIDMGKTINDTYNADLPTSIDNIEWYAEIIDKLFDDISPSSKEYMGLITKEPIGVVAAIVPWNYPLWMAIWKIAPALITGNSVILKPAEQSPMSAIKIGALLSEAGIPDGVFSVLPGDGPITGKSLC

SEQ ID NO: 92100 - protein, 276 aa, Unknown
  Bacterial polypetide isolated from the Sargasso Sea
MIDKRKFYINGVWVDPVNKNDCDVIDPSTEEPYVTISLGSAVDTNKAVEAAKNSFLTWKNTSKEERIELLEKLLKIYRNRSEEMTNAISKELGAPLDWASSAQMGSGESHIEDFIKRLKEFEFESNFDENSDNYIVYEPIGVCGLITPWNWPINQIALKVIPAFATGCTMILKPSEMAPLSGLLFAEMIHEAGFPAGVFNLVNGDGAGVGSQISSHPDIDMVSFTGSTRAGKLISKNAADTIKRVCLELGGKGGNIIFADAYPDAVRDGVRNIMSN

SEQ ID NO: 92101 - protein, 235 aa, Unknown
  Bacterial polypetide isolated from the Sargasso Sea
MYDKFGQFIDGKWVKSSSGETYEVINPATEELIGNASKASKKDIDKALKSAEKGLEVWKNTSPWERSKIIRKISDIMRKKVDILSKWLTLEVGKPLSEGAGEVGGAADIFEWNSEETKRIYGETLQSRFPNTRIHVYYQPVGVVAALVPWNFPIILASRKISTALAAGCSVIVKPDVITPGSVMELVNICKEAGVPDGVINLLSGDPAFISEELLSSDIIKKVSITGSTRVGKLI

SEQ ID NO: 92102 - protein, 90 aa, Unknown
  Bacterial polypetide isolated from the Sargasso Sea
LSIIPFENEDEAISIANDTPYGLTNYIQTQDKEKVKRVARKLRSGMVDVNGVGIAVASPFGGYKHSGIGREAGTEGLIEFLEVKTVGGWN

SEQ ID NO: 92103 - protein, 121 aa, Unknown
  Bacterial polypetide isolated from the Sargasso Sea
MNLIEHFVNGKIIPGSSDKKGKVFNPATGEQESEVRLASKSDLDEAVEVAKKAFETWSLKPALQRARVIFKFKELIEKNSEELTKMIVSEHGKVFEDARGSLTRGLEVVEFACGIPHLLKG

SEQ ID NO: 92104 - protein, 90 aa, Unknown
  Bacterial polypetide isolated from the Sargasso Sea
MTLRVAINGFGRIGRNVMRGWLSRGADTGIEIVGMNSTSDPKTSAHLLTYDSILGKLDPSVQIETTDETMIVNGKEIKFFADRNPLNCPG

SEQ ID NO: 92105 - protein, 298 aa, Unknown
  Bacterial polypetide isolated from the Sargasso Sea
KVAHKVWSKTDAKERSSVLKNLHRLMLEHQEDLARIITHEGGKPLSESMGEIAYAASFFEWFSEEAKRVYGDVIPGHQQDRRTLVIKQPIGVVGCITPWNFPSAMLARKIAPAIAVGCTVVAKPAPETPYSATAMAYLSELAGIPKGVFNVVTGDAEKIGSVMTTHKEVKKITFTGSTSVGKQLLRQSADTVKKVSLELGGHAPFIVFEDANLEDAVDGALIAKYRNSGQTCVCANRIYVQSSIYDDFSKRFTEKASQLVVGDGLAESTQQGPLISEDAMKKASKHIEDAKNKGATIT

SEQ ID NO: 92106 - protein, 132 aa, Unknown
  Bacterial polypetide isolated from the Sargasso Sea
KGYYLEPTAVLMPHNRTRACQEEIFGPFATLQIFDDFDEALAIANDSEFGLVSYLWSNDLSQTQRAVCEIEAGVVLVNTPMILDLRFPFGGYKNSGLGREGIDGMRHFYTEEKTVTLALKRPAMTRLGADAD

SEQ ID NO: 92107 - protein, 160 aa, Unknown
  Bacterial polypetide isolated from the Sargasso Sea
GADHINDFIIRLKNFEFESKFNKNSNNYIVYEPIGVCGLITPWNWPINQITLKVIPALAAGCTMILKPSEIAPLSGMLFAEIIHEAGFPAGVFNLINGDGAGVGTDLSTHNDIDMISFTGSTRAGKLISKNAADTIKRVCLELGGKGGNIVFSDSHPSAV

SEQ ID NO: 92108 - protein, 86 aa, Unknown
  Bacterial polypetide isolated from the Sargasso Sea
PFENEEEAISIANDTPYGLTNYIQTQDKEKVKRVARKLRSGMVDVNGVGIAVASPFGGYKHSGIGREAGTEGLIEFLEVKTVGGWN

SEQ ID NO: 92109 - protein, 239 aa, Unknown
  Bacterial polypetide isolated from the Sargasso Sea
MYEKFGQFIEGKWQQSLSGETYNVINPATEELIGKASKANKNDIDLCLKSAEKGFKIWKDTPPWERSKIIRNISDLIRKRTETLAKWLTLEVGKPLKEGAGEASGAADIFEWSSEEAKRIYGETLQGRSKDTKIQVSYQPVGVVAALVPWNFPITLASRKISTALSAGCSVIVKPDVITPGAVMELVDICKEAGVPTGVVNLLSGDPAYISDQLLSSDIIKKVSITGSTRVGKLILKKA

SEQ ID NO: 92110 - protein, 86 aa, Unknown
  Bacterial polypetide isolated from the Sargasso Sea
ALRAGVPAGLFSVLTGNDTRILGNELTTHPLVRKITFTGSTEVGRVLLQQAASTVKKCSMELGGNAPVLVFDDADLDTAVEGVIAS

SEQ ID NO: 92111 - protein, 198 aa, Unknown
  Bacterial polypetide isolated from the Sargasso Sea
SGAETYDVINPANEEIIGKASKANKKDIDLALQSAQKGYEIWKNTSPWERSKIIRKISDVIRDKKDVLAKWLTLEVGKPLAESTGEVLGAADIFEWSSEEAKRIYGETLQGRSPDTKIHVYYQPVGVVAALVPWNFPITLASRKISTALSAGCSVIVKPDVITPGAVMELVNICHEAGVPPGVVNLLSGDPSFISDSL

SEQ ID NO: 92112 - protein, 195 aa, Unknown
  Bacterial polypetide isolated from the Sargasso Sea
MNNDLKFYINGEWVKSESNELIDVINPATEEVIGQVTAGTKEDIDKAVSAALEAFSTFQQTTKEQRIELLNNIISEYENRYDDFVQIITKEMGAPIWLSEAAQAKTGIKNIHETLDALKDYEFERPEGDYTLIKEPIGVIGMITPWNWPMNQITTKVSAALAAGCTMVLKPSEISPYCAMLLAEVFDKAGRAKWC

SEQ ID NO: 92113 - protein, 180 aa, Unknown
  Bacterial polypetide isolated from the Sargasso Sea
MKTIQHFVGGKSFSGQSKRTSKVFNPATGEQSAEVKLASTKDVNDAVSNAHKAFVSWSEKPPLQRARVMFKFKELIEKNYDELTKIIVSEHGKVYEDAKGSLTRGLEVVEYACGIPQMLKGEFTENVGSNVDSWSIRQPLGVCAGVTPFNFPAMVPMWMFPMAIACGNTFVLKPSEKDPT

SEQ ID NO: 92114 - protein, 55 aa, Unknown
  Bacterial polypetide isolated from the Sargasso Sea
RVARRLRSGMVDINGAGLAPDAPFGGYKHSGIGREAGKLGLEEFLEVKAVSGWND

SEQ ID NO: 92115 - protein, 242 aa, Unknown
  Bacterial polypetide isolated from the Sargasso Sea
MNLIQHFINGKIIAGNSKRKGKVFNPATGDQKSEVNLGTKSDLNEAAEIAKKAFETWSLKPPIQRARIMFKFKELIEKNSDELTKMIVSEHGKVYEDAKGSLVRGLEVVEFACGIPQVLKGEFTENVGTDIDSWSIRQPLGVCAGITPFNFPAMVPMWMFPMAIACGNTFILKPSEKDPSCSIKLAELFKEAGLPDGVFNVVNGDKEVVDAILTNKDIQAVSFVGSTPIAKYIYENAAKKKK

SEQ ID NO: 92116 - protein, 245 aa, Unknown
  Bacterial polypetide isolated from the Sargasso Sea
MGKLDQKVAIVTGATSGIGRETAILLSREGASVVFTGRNKDAAEETSDLISKEGGKSLFVQHDVADENNWIEVIKTTKDHFGSLDILVNNAGQFFLKPIMETSLEDFNQICSVNIDGAWLGMKHCLPEMNDGGAIVNVSSLMGQMGLPDASGYCASKGAVTSMTKAAALEVADRNIKINALHPGVIWTPMVGAGSEGDNDLKSFFELETPLREVGLPKIWQMLFYFYVLPSTYRIRLKCRWVKIC

SEQ ID NO: 92117 - protein, 192 aa, Unknown
  Bacterial polypetide isolated from the Sargasso Sea
MNSIEHFIDGKIVKGSSKRTGKVFNPATGEISSNVNLANTADLDKAVKAAKKAFSSWSEKTPLYRARVLFKFKELIEKNYDELTKIIVSEHGKVYEDAKGSLTRGLEVVEFATGIPQLLKGEFTENVGTNVDSWSMRQPLGICAGITPFNFPAMVPMWMFPIAIACGNTFVLKPSEKDPSCSMKLAELFLKA

SEQ ID NO: 92118 - protein, 315 aa, Unknown
  Bacterial polypetide isolated from the Sargasso Sea
TWAFVSKEEKIDLLERLYTLYKKRWDDFANAITLEMGAPKEFASKLQVGAGAAHIKTFIKYLKDFKFDRPVNDQLQNQKIIYEPKGICALITPWNWPMNQVCLKVIPALASGCTMVLKPSEIAPLSSMILAEIIHEVKFPKGVFNLVNGDGPTTGEALTSHPDIDMISFTGSTRAGALISQNAAKDFKRISLELGGKGANIIFKDAKPDAIEKGASRCFKNSGQSCNAPTRMLVEKSIYNEAIEKIRKYTNELKVGDPNKDGNHIGPVVSNQQFEKVQKLIKKGIDEGARLVAGGTGKPEGLDKGYYVKPTALQM

SEQ ID NO: 92119 - protein, 214 aa, Unknown
  Bacterial polypetide isolated from the Sargasso Sea
MVGTTVFYITFMFWGMSLVQNDYPMRSEFLALNTVILVDTVGNDVFMALCVYGNMATALDLTSRAMAAILAKEEEEAAAYAEKRGQLALVATPEPVRAQLLKLEEAVNAAEGTEVEAQAFDAYKFAAQEEQDRLLRLMSACLLACQGPPLGSPWRVGTLLCPCAGAISRSSRASATGASSTCGARGGVHSAAPPPRFGKRAEALCRYTESLERK

SEQ ID NO: 92120 - protein, 272 aa, Unknown
  Bacterial polypetide isolated from the Sargasso Sea
NFLYYKNHKISVSNFSSIDDIDFKGEKNVLVIDCTGKNKALNLLNPYINKYAKYILVSAPIESKSVQNIVYGVNHNDVDTKNFQIFTSASCTTNCLAPIVKVLEEQIGIEHGSITTIHNITNSQNLVDSPKANLRRSRSGINSLIPTTTGSAKAISLIYPELKGRLNGHAVRVPLLNASLTDCVFEMKKPVSVEEINKLFIEASASYLKNILSFEERPLVSSDYVNNSHSAIIDGLSTMVVNRTQLKVYAWYDNEWGYACRMVDLISHIMNK

SEQ ID NO: 92121 - protein, 295 aa, Unknown
  Bacterial polypetide isolated from the Sargasso Sea
MLDKKKFYINGKWVPPFKKSDFEVINPSSEEVFAIISLGGKEDVNIAVKAAKDAFDNWKDTKKEERIIFLEKLLKIYKKRFNEMAEAMSKEMGAPIDYATTVHASSGQSHIEDFILRLKNFKFEESFDSKSNNHIAHEPIGVCGLITPWNWPINQIALKVIPALATGCTMILKPSEISPISAMLFAEMIDEAGFPVGVFNLVNGDGAGTGTEISGHSDIDMISFTGSTRAGKLITKNAANTIKRVCLELGGKGGNIVFADSYPNAVRDGIRNVMSNSGQSCDAPTRMLVEKSIYK

SEQ ID NO: 92122 - protein, 346 aa, Unknown
  Bacterial polypetide isolated from the Sargasso Sea
MQAQFQHARQFYIDGQWVDPLNTPGAATLDVIDPSTATPFAQISLGSAADVDLAVAAAKRAFPAYSETTIAQRIDLLQAILDVYRKRYDDMVHAISREMGAPLQYANDAQAWTGVAHLETMIRTLDTFEFEYVKSSILIRKEAVGVCGLITPWNWPALQIATKVVPALAAGCTMVLKPSELAPLSGMIFAEILDEAGVPAGVFNLVNGEGATVGEAMSRHPDIDMMSFTGSTRAGVLVAKAAADTVKRVHQELGGKSANLILEDADLKHAVMRGARACFDNSGQSCDAPTRMFVPRARLAEALTYAKEAADALVVGPADAQGVDLGPVISEQQFDKIQRLIGVGIE

SEQ ID NO: 92123 - protein, 475 aa, Unknown
  Bacterial polypetide isolated from the Sargasso Sea
LVPRLKQLAIAAKAYDISFTVDAEEADRLDLSLDIIEAVFSDPELNGWEGFGLAVQAYSKRGLFVIEWLRELTVKVGRKMMVRLVKGAYWDTEVKVSQTEGLSDFPVFSRKPSTDVSYQACAKKMLEYRDSMYPMFATHNAYTVATILEMAPDRTGYEFQRLHGMGDALYDQVVADDKVPCRIYAPVGEHSDLLAYLVRRLLENGANSSFVNNIVDENIPVESLLKDPVETVRAWSKKRNNSIPLPDQLYGAARLNSKGQDFTDIDQITAMREAMDTWLASVSQIEVPAGAFAVTNPANTKEVIGFHHHSNSAQMEQTVTNAEAAFPAWSATAVTERAALLNKLADQLELHRDELLALCIKEAGKTVGDSMAEVREAVDFCRYYAAEATKNLQASQARGVVLCISPWNFPLAIFLGQVSAALVSGNTVVAKPAEQTSLIAVRTLELMKAAGFPDNVVQLVIAPGRQVGEVIVPDT

SEQ ID NO: 92124 - protein, 244 aa, Unknown
  Bacterial polypetide isolated from the Sargasso Sea
MLQLDASELVKNGSYINGRWHNSDNTFSVKNPADLQPLADVADAGKTQAEQAVQAASDSFAGWAAKPAAERSALLLDWYQLVMKHQDDLARLMTLEQGKPLAEAKGEIAYGASYLQWFAEEAKRLYGDTIPAPSADKRIIVQRQPVGVVAAITPWNFPNAMLARKAAAALAAGCTFVVKPAHQTPLSALALAELSQQAGIPPGVFNVVCGTDAKAIGEVLTQDPRVAKFSLTGSTAVGKVLAKQ

SEQ ID NO: 92125 - protein, 214 aa, Unknown
  Bacterial polypetide isolated from the Sargasso Sea
MILTFENIKKTKSNLNYPSQLFINGKYQKSISEKSFENISPIDGSIVNQVFFAEQEDVDLAVSKAKETFNKGYWSNLSPGERKKILLKFAILLERDRLELSLLDTIDMGKTINDTYNADLPTSIDNIEWYAEIIDKLFDDISPSSKEYLGLITKEPIGVVAAIVPWNYPLWMAIWKIAPALITGNSVILKPAEQSPMSAIKIGALLSEAGIPDG

SEQ ID NO: 92126 - protein, 192 aa, Unknown
  Bacterial polypetide isolated from the Sargasso Sea
MNLIQHFVNGKIIPGKSDRRGKVFNPAIGEQESEVILGLKSDLDGAVDLAKKAFETWSLKPPIQRARVMFKFKELIEKNADELTKMIVSEHGKVYEDAKGSLIRGLEVVEFTCGIPQVLKGEFTENVGTDIDSWSIRQPLGVCAGITPFNFPAMVPMWMFPMAIACGNTFVLKPSEKDPSISIKLAELFKKR

SEQ ID NO: 92127 - protein, 382 aa, Unknown
  Bacterial polypetide isolated from the Sargasso Sea
MTHVLETGFEQLNRENPNGSPAIRGYNIVDGELKSSSSGATFESRNPAWVDDCLGEFPLSTEEDVHEALKSARKAFPSWSSTPAPTRGQVIGNMGRLLMDYKEDLVRLQAREIGKTLKECGGEIQEAIDTCLFFQSEGRRLYGQTVNSELQDKELFTYRRPLGVCGIINACNFPSAVPFWKMIPAIMCGNTCVWKSPQDSPMLSFALARIMHEAGLPNGVINLVHGNGSGAGQSLVDSADLGMVNKISFTGSTSVGKMIGEICGRNLVSASLELGGKNPLVVMPSADIDNAVEGAYWAAFGTAGQRCTSLGNLILHQDIYAEFMEKFMEMVENTRIGDSMRHEDVLYGSMLSEKYAVDFLKGVEICDSDGAEKLFGDRGDHR

SEQ ID NO: 92128 - protein, 245 aa, Unknown
  Bacterial polypetide isolated from the Sargasso Sea
MAPMVLNKSLPELIKAAKENGVAVLSITNSHHMAAMWPETEAIAEEGLVAFACTSYKPAVAPAGSIKPLFGTNPISFAWPRKNKPPVVYDMATASMAMGEVQVAKREGHKVPLGTGLTKEGKDTTDPAEIADGGVLLPFGGYKGSGIAMMVELLAGALVGDNFSYETAEKDNNDGGPPSGGEFILAISPEKLSNSDWDTHSSKFFEKMKSMGDVRLPGERRHKNRLDKGPRHINEDLVNKIKSLS

SEQ ID NO: 92129 - protein, 252 aa, Unknown
  Bacterial polypetide isolated from the Sargasso Sea
MNTIQHFVNGKKFFGESKRVGKVFNPATGEQSAEVKLATAKDVNEAVESAKKAFESWSNKPPLQRARVMFKFKELIEKNSDELTKIIVSEHGKVYEDAKGSLTRGLEVVEYACGIPQMLKGEFTENVGSNVDSWSIRQPLGVCAGITPFNFPAMVPMWMFPMAIACGNTFVLKPSEKDPSCSLRLAELLKDAGLPDGVLNVVNGDKEAVDALINNKDIVAMSFVGSTPIAKYIYENCAKNEKRVQALGGAKN

SEQ ID NO: 92130 - protein, 432 aa, Unknown
  Bacterial polypetide isolated from the Sargasso Sea
VSERADIFYRIANNLEKDSTKFLYYLIHEAGKTYKDSYDEIREAVDFLRYYADNAKTLLSEPNNLNGPTGESNQLFYQSKGTFVCISPWNFPLAIFAGQIAAALVTGNSVISKPSEHTPIIATMMIELFYENGVPKSALKLIQGDGSIGSKLISFDHISGVAFTGSSLTAKKINLQLAKKDGPISSLIAETGGLNAMFIDSSSLHEQVVDDIMRSSFNSAGQRCSALRLAIIHESIFDDLVEMIKDAMAELTVGNPEDFHCDVGPIIDEGSRNMLLEYISECSNNGYQVFSHNQAPDGNFVSPTLIELNSIDEINEEKFGPILHVIKYKTDELEQILTALKNKQYGLTMGVHSRIESKADDIINKSIAGNTYINRDIVGAVVGSQPFGGTGLSGTGFKAGGPNYLLQFVDERSITKNTVAFGGNAEILNLED

SEQ ID NO: 92131 - protein, 463 aa, Unknown
  Bacterial polypetide isolated from the Sargasso Sea
MKSLDKLFGKYGIDQLTNGCSTGNNWFGSGEVIESISPVDGKLIREVSCGSKKDFDDIIKISKKAFDDFRKIPAPKRGELVRQFGNKLREEKELLGTLVSYEMGKSYQEGLGEVQEMIDICDFAVGLSRQLHGLTMHSERPTHRMYEQYHPLGVIGIISAFNFPVAVWSWNVALAWVCGNVTIWKPSEKTPLCSIICQKLISEVFKENNISEGVSCLINGDYKIGELLSESKNIPLLSATGSTRMGKIVAEKVGARLGKTLLELGGNNAIIVTPDADLKMTIMGTVFGAVGTCGQRCTSTRRLIVHEKVYEKVKDALVKAYSQIRIGDPLDANIHVGPLIDLDSVKSYQKALSQIEKEGGNWLVKGGVLSGNQYDSGCYVKPVIAEVDHSLKIVHTETFAPILYLIKYSGDIKNAIKIQNEVDQGLSSAIMTNNLKDAELFLSHWGSDCGIANVNIGNFWCRN

SEQ ID NO: 92132 - protein, 370 aa, Unknown
  Bacterial polypetide isolated from the Sargasso Sea
MLDKKNFYINGAWIKPNSAEEIKVIDPATEENCAVITLGNKADVDLAVSAAKDAYESWAFSSKEERITLLEKLYENYKKRWADIAEAITLEMGAPKDFATKLQAGTGASHIKSFIRYLKNFEFEKPLGEHAPNQRLIYEPKGVCALITPWNWPMNQVCLKVMPAIAAGCTMVLKPSELAPLSSMILAEIIDEVKFPKGVFNLVNGDGATTGDTLTSHPDINMISFTGSTRAGALISQNAAKDFKRVSLELGGKGANIIFKDADPEAIERGALRCFRNSGQSCNAPTRMLVEKSMYNEAIERLKKYTENFEVGDPKKEGEHIGPVISETQYDKIQTLIQKGIDEGAKLVAGGTGKPDGLDKGYFVKPTVFA

SEQ ID NO: 92133 - protein, 289 aa, Unknown
  Bacterial polypetide isolated from the Sargasso Sea
MLNKKDFYINGKWVKALEPRNYKVIDPSNEETCAEISLGGKKDIDVAVNAAKKAFETWAFSKKEERLELLEKLYVIYKKRWAEMAKLITLEMGAPMKFSTEMQAATGASHIKSFKNILKDFKFEKDLGEEKNNQKLLYEPKGVCALITPWNWPINQVNLKVIPALASACTVVLKPSEIAPLSSMLLAEMIDEVKFPPGVFNLVNGDGAITGDALTSHPDVDMISFTGSTRAGALISQNAAKDFKRISLELGGKGANIIFKDADTDAVARGVQRCFRNSGQSCNAPTRML

SEQ ID NO: 92134 - protein, 232 aa, Unknown
  Bacterial polypetide isolated from the Sargasso Sea
MIQYKSFGDCGNWVNNAYSESSSGNRISVTSPYFDKEIATIPDSGKTDLDIAVSKAKSAFPNWSGTNIRDRAQIMFKFKSIIENDMEDLAALIALDNGKTIADAKGSILRGIEVVEYATSLPNVLKGESSDVSEGINCTMTHEPLGVVAGITPFNFPVMVPLWMIPLAITAGNTFILKPSEQTPLSGMRLAEYLKEAGLPDGVFNVVNGAKTIVESLCDHPDIKALAFVGSS

SEQ ID NO: 92135 - protein, 483 aa, Unknown
  Bacterial polypetide isolated from the Sargasso Sea
MELKNKSLFKQECFIGGKWVKSLNNDTIQVDNPATLKSIGNVPKCGKEETKNAIEAANDAFLNWKNKTAKERSIILKQWQDLIIKNVDDLAHIMTVEQGKPLAESKGEILMGASYIEFYAEEVKRVYGDIIPDPLPDRRIVVIKQPVGVVGAITPWNFPSTMITRKCAPALGVGCPVVIKPASQTPFSALALAVLAEEAGFPPGVFNVLTGSASEIGKELTENPIVKKISFTGSTEVGKILLKQSASTVKKVSMELGGHAPFIVFEDANIDEAVSGAIMSKFRNSGQTCICANRLFVHEKVYEEFLEKFVKKVAEIKVGNGLEESTNSGPLIDQYSLEKVKDHVQDAVKTGAKIAIGGDIHKLGGNFYQPTVLSDVTNKAKITYEETFGPVAPIYKFSSDEEVINLANDTPYGLASYFYARDIGKIWKVAEALEYGIVSVNTGLPTKAEIPFGGVKESGLGREGSKYGLDDYLEIKYISMAGI

SEQ ID NO: 92136 - protein, 306 aa, Unknown
  Bacterial polypetide isolated from the Sargasso Sea
MDIKNSELFKNQCYINGSWVNADDGSTSNIVNPANSKQLGTVPNCGSNETLKAIKAAKEAHKVWSKTDAKERSSVLKNLHRLMLEHQEDLARIITHEGGKPLSESMGEIAYAASFFEWFSEEAKRVYGDVIPGHQQDRRTLVIKQPIGVVGCITPWNFPSAMLARKIAPAIAVGCTVVAKPAPETPYSATAMAYLSELAGIPKGVFNVVTGDAEKIGSVMTTHKEVKKITFTGSTAVGKQLLKQSADTVKKVSLELGGHAPFIVFEDANLEDAVDGALIAKYRNSGQTCVCANRIYVQSSIYDDFS

SEQ ID NO: 92137 - protein, 222 aa, Unknown
  Bacterial polypetide isolated from the Sargasso Sea
MEINKFYIDGKFVDPDGSEKIDIVNPATEEAVGHVISGSPKDVDIAVAAANKAFPSAMELTLEQKKKILEEIITGMEERREDFAQIISEEMGSPIQMARKAQYGAGVIHFKNTLSVIDRFDFNEVHGNITINKLPIGPVGMITPWNWPLNQMCTKIASAIAAGTSCVLKPSEITPGAAHIFAEVIDKTSMPKGMFNLIHGFGVTVGKAMSSHSDLEMISFTG

SEQ ID NO: 92138 - protein, 218 aa, Unknown
  Bacterial polypetide isolated from the Sargasso Sea
MNLIKHFVGGKVISGSSERKGKIFNPATGEQESEVILASKADLDGAVEIAQKAFETWSLNPPLQRARIMFKFKELIEKNFDELAKLIVSEHGKVYEDAKGSLIRGLEVVEFACGIPHLLKGEFSENVGTNVDSYSMRQPLGVAAGITPFNFPAMVPMWMFPLAIACGNSFILKPSEKDPSCPMKLAELLHEAGLPEGVFNVVNGDKEVVDAILTNQNI

SEQ ID NO: 92139 - protein, 231 aa, Unknown
  Bacterial polypetide isolated from the Sargasso Sea
MTDLTKNPDLRFRDKPDDFFGDWKWREGLAELMVPIIGRLYRNGVNVLMYGHSLINQSPIEIMKSHRFIRRVEDTEISELETYPFLQRIELQDIKDCEIDIGEIVVDFMRENNSLDDSKIDSHIKSYILDPLDKVDQQRPSKPQDIVLYGFGRIGRLVSRIMVQMTGPGNYYRLRAIVVRKVSDTNDLLKRASLLRRDSVHGSFHGTIRVDNETETLVINGNPVKIIYANE

SEQ ID NO: 92140 - protein, 368 aa, Unknown
  Bacterial polypetide isolated from the Sargasso Sea
MLDRKKFYIDGKWVIPIEPRNYQVIDPSNEEICAEISLGGKKDVDKAVSAAKKAFETWAFSKKEERLDLLEKLYVIYKKRWAEMAKLISLEMGAPMKFSTEMQAATGASHIKSFKNILKDFKFEKDLGEEKNNQKLLYEPKGVCALITPWNWPINQVNLKVIPALASACTVVLKPSEIAPLSSMLLAEMIDEVKFPSGVFNLINGDGETTGDALTSHPDVNMISFTGSTRAGALISQNAAKDFKRISLELGGKGANIIFKDADSEAVARGVLRCFRNSGQSCNAPTRMLVEKSIYNETVEKVKELANNTKVDAPQKEGDHIGPVVSEVQYNKIQNLIQKGIDEGAKLIAGGTGKPKGFEKGYYVKPTV

SEQ ID NO: 92141 - protein, 329 aa, Unknown
  Bacterial polypetide isolated from the Sargasso Sea
MLDKRKFYINGKWVSPSKPNDLDVINPSTEEAFATISLGSKEDTNAAVSAAKKALVTWSESSKEERVKLLEKLLDIYKKRYSEMTEAISMEMGAPMDWSNDAQTSSGQSHLEDFIVRLKEFKFDEQFSPESNNRICYEPIGVCGLITPWNWPINQIALKVVPAFATGCTMIHKPSEIAPISAMLFAEMIDEAGFPAGVFNLVNGDGVGVGTDISTHPDIDLVSFTGSTRAGKLILKNGADTIKRVCLELGGKGGNIVFADSHPNAVRDGIRNVMSNSGQSCDAPTRMLVEKSIYERAIKEAAEEANLIKVDHASKKGDHIGPVFQKFNT

SEQ ID NO: 92142 - protein, 230 aa, Unknown
  Bacterial polypetide isolated from the Sargasso Sea
MSDNRDINLQSTKRQKRILPEDSFGDWKWREGLAELMVPIIGSLYRNGINILIYGKSLVNESPVAIMKAHRFARQSDNNELSELETYPILKYIETLDLADCEIDVGEIAVKCPFFEDIKNDDTKVGEFIDAELEFVINKKSNRPSEPANIVLYGFGRIGRLVARMMTQTTGPGNYFKLRAIVIRKATDDDIFKRASLLTKDSVHGPFDGTVRVDEENSSLVINGNPVKVI

SEQ ID NO: 92143 - protein, 275 aa, Unknown
  Bacterial polypetide isolated from the Sargasso Sea
MYSKFGQFIDGKWQEAEKKETYDVINPATEEVIGKASKASSADVQKALKSAEKGLEVWKNTAPWQRAYVLRKIADLMREKKDIIAKWLTLEVGKPLSEAVGEVGGGADIFEWNAEETKRIYGQTQQSRFPDTRVHVYYQPVGVVAALVPWNFPIVLASRKISTALAAGCSVICKPDVITPGAVMELVNICKEAGVPDGVVSLLSGDPAEISNELMESDIIKKVSVTGSTRVGKIILKKAADKVQRVTMELSGHSPFIVCEDVDMNKVADIAITGK

SEQ ID NO: 92144 - protein, 164 aa, Unknown
  Bacterial polypetide isolated from the Sargasso Sea
MSSSLDTSHLKVKFPFKAKYGNYINGKFVEPKSGKYFDNTTPITNEVICKVPRSNEKDIDFALDAAHAAFPTWGKTSITERSNILNKIADKIEQNLNLLATAECLDNGKPIRECMAADLPLVIDHWRYFAGVIRAEEGSVAEISNSEYSYHIPEPLGVVGQIIP

SEQ ID NO: 92145 - protein, 484 aa, Unknown
  Bacterial polypetide isolated from the Sargasso Sea
MSLDGRAFIAGERSAAASGETFATLNPASGKVLAEVARCNERDVDRAVAAARDAFESGVWSKAAPAHRKAVLLRVAQLIDEHAEELALLEAMEAGKPIGECLGLDIPESAACIRWHAEVTDKRYDALSPSGSGVVSMITREPIGVVGAVLPWNFPALMLAWKIGPALSVGNSVVVKPAEQTSLSTLRIADLAREAGVPPGVFSVVTGFGGEAGEAIGRHPDVDLVAFTGSTATGKRFLHYSADTNLKRVVLECGGKNPQVILPDVANLDAVAEQAVAAAFWNMGENCSAGSRILVPSSLKAELLEKVLAVLDGWKTGDPLDPDVKLGALIEQKHYDKVLGHIEKAKAEGAHVVCGGQAMLAETGGWFVEPTIFDQVTPGMSIARDEVFGPVVCFIEYDDVDDAVRIANDTCYGLAASLWTDNVNSAHKVAARIRAGTVTVNCFGEGDLSTPFGGFRQSGFGGRDKSVYAHDQYCELKTTWLKLD

SEQ ID NO: 92146 - protein, 289 aa, Unknown
  Bacterial polypetide isolated from the Sargasso Sea
MSNDLNFYINGDWVKSDSNELIDVINPANEEVVGQVTAGTKKDIDKAVAAALEAFDSYQCTSKEQRIELLNNIITEYKNRYDDFVQIITKEMGAPIWLSERAQASTGIKNIQETLDALREYQFEKPEGDYTLIKEPIGVIGMITPWNWPMNQITTKVSAALAAGCTMILKPSEISPYCAMLLAEVFDKAGVPDGVFNVVNGYGPIVGAALSEHPDIAMMSFTGSTKAGIAVAQASAVSVKRVHQELGGKSSNIILDDVADLEKSVKGGAGHCFLIQDNRVMHNKNVSFC

SEQ ID NO: 92147 - protein, 966 aa, Unknown
  Bacterial polypetide isolated from the Sargasso Sea
LGTGNDTTPTISGTTDIAPGSTVSISVTDSAGNTQTFGAIVQANGTFSVDVPAALSEGNYSVTASATDGAGNTATANENGGVIDTTAPAAPTVDAGNGTEITGTAEAGAVVNVDVDGDGTPDFTVIADGDGNWSVTPTTPLADGVVVTATATDEAGNTSSPASDTVDAVAPIVAFNDLTTNDTTPALTGSVDDPTAIVVVTINGTDYTATNNGDGSWTLANDIVAALAEGSYTATVTATDADGNTGTNSGTVVIDTTTPAAPTVDAGNGTEITGTAEAGATVNVDVDGDGTPDFTVIADGDGNWSITPTTPLADGAVVTATAVDEAGNVSAPASDTVDAGAPVVTINDLTTNDATPELTGTVDDPNAIVVVTIDGVDYTATNNGDGSWTLADDAVATLADGSYTATVTATDADGNVGSNSGTVVIDTTPPAIPTVDAGNGTEITGTAEAGATVNVDVDGDGTPDFTVIADGDGNWSITPDTPLADGVIVTVTAIDEAGNISNPASDTVDAAAPVVAFDDLTTNDTTPALTGSVDDPTATVVVTINGADYTATNNGDGTWTLADDAVAALAEGSYTATVTATDPEGNVGTNTGTVVIDTTAPAAPTVEAGNGTEITGTAEAGATVNVDVDGDGTPDFTVIADGNGNWSVTPDTPLADGVVVTATATDEAGNTSGPASDTVDAVAPVVTINDVTTNDTTPALTGTVDDPTATVVVTIDGVDYTATNNGDGTWTLADNAVATLAEGSYPTSVSATDADGNTGTNSGTVVIDTTAPAAPTVDAGNGTEITGTAEAGATVNVDVDGDGTPDFTVIADGDGNWSVTPTTPLADGVVVSATAADEAGNVSAPASDTVDAVAPVVAINDLTTNDATPELTGTVDDPSAIVVVTIDGVDYTATNNGDGSWTLPGDAVATLADGSYTATVTATDADGNVGSNSGTVVIDTTPPAIPTVDAGNGTEITGTAEAGATV

SEQ ID NO: 92148 - protein, 66 aa, Unknown
  Bacterial polypetide isolated from the Sargasso Sea
MIQTQDQEKANRVAKKLRSGMVDINGTGLATGAPFGGYKHSGIGREAGKLGLEEYLEVKVVSGWND

SEQ ID NO: 92149 - protein, 367 aa, Unknown
  Bacterial polypetide isolated from the Sargasso Sea
MELKNKSLFRQECFIGGKWVKSSNGEKIEVDNPATQKSIGSVPKCGKNETKNAIDSANNAFINWKNKTAKERSIILKNWQDLIIKNLDDLAYIMTVEQGKPLAESKGEILMGASYIEFYAEEVKRVYGDIIPDPLPDRRIVVIKQPVGVVGAITPWNFPSTMITRKCAPALGVGCPVVIKPASQTPFSALALAVLAEEAGFPSGVFNVITGSASEIGGELTENPIVKKISFTGSTEVGKILLKQSASTVKKVSMELGGHAPFIVFEDADIDEAVNGAIMSKFRNSGQTCICANRLFVHEKIYNIFLKKFVDQVSKIKVGNGLENATNSGPLIDQYSLKKVIDHVQDAVNTGAKIAIGGDIHSLGGNF

SEQ ID NO: 92150 - protein, 423 aa, Unknown
  Bacterial polypetide isolated from the Sargasso Sea
AKGAFKTWSVLSYEQRQSYLDAYADALLEHRDELARLLTLEQGKPLKTMAEPEVDQAISWIRQIAARRIPVEIVEENDNHIVELHHTPLGVVGAITPWNFPVLLALWKVAPALITGNTMVIKPSPFTPLTSLRFGQIAQSVLPAGVLSVVSGGNELGPQMTAHPDIAKISFTGSTETGKHVIRSAAGTVKRLTMEMGGNDAAIVMPDADWQAIIPQLYWGAVGNSGQWCVGIKRLYVHSSYRNEFVAAFVEYARQQVMGDGLDPNVTVGPVQNKMQYDKVRSFLDDIKANGYKVVLGGEVDESRPGYFIPVTVVDNPPESSMIVQQEQFGPIVPIIAYDDVDDVVARANDSPFGLGGSVWGRDTQAAVAVANRLETGMVWVNEIHTQGVDIPFGGHKQSGIGTEHGHEGRLLFTNPKTVLIKK

SEQ ID NO: 92151 - protein, 226 aa, Unknown
  Bacterial polypetide isolated from the Sargasso Sea
MNLIEHFVDGNKISGTSKRTGKIYNPATGEQESEVKLGTKSDLDLAVEVAKNAFETWSLKPALQRARIMFKFKELIEKNFDELTKLIVSEHGKVYEDAKGSLIRGLEVVEFACGIPHVLKGEFSENVGTNVDSYSMRQPLGVAAGITPFNFPAMVPMWMFPLAIACGNTFILKPSEKDPSCPMRLAELLHEAGLPDGVFNIVNGDKEVVDAILTNKDIKAVSFVGS

SEQ ID NO: 92152 - protein, 196 aa, Unknown
  Bacterial polypetide isolated from the Sargasso Sea
MYEKFGQFIDGKWQQAEKKETYNVINPATEEVIGKASKASSIEVQKALKSAEKGLEIWKNTPPWQRAYVLRKIADLMREKKDLLAKWLTLEVGKPLTEAVGEVGGGADIFEWNAEETKRIYGQTQQSRFPDTRVHVYYQPVGVVAALVPWNFPIVLASRKISTSLAAGCSVICKPDVITPGAVMELVNICKEAGVP

SEQ ID NO: 92153 - protein, 103 aa, Unknown
  Bacterial polypetide isolated from the Sargasso Sea
FGPVVSVIKFKDEAEALKIANDTLYGLGAAVWTRNGNIAHRMGRAIQAGIVWTNCYHAYPAHSPFGGYKQSGVGRETHKMMLNHYRQNKNLHVSYAEKKLGFF

SEQ ID NO: 92154 - protein, 86 aa, Unknown
  Bacterial polypetide isolated from the Sargasso Sea
AARDTTVEEVNAIMKEASEGALKGILGYNEAPLVSIDFNHNPASSTFDATLTKVSGRLVKVSSWYDNEWGFSNRMLDTAVALANAK

SEQ ID NO: 92155 - protein, 246 aa, Unknown
  Bacterial polypetide isolated from the Sargasso Sea
MDNNFIYSDVAQVPVNGDEVFYKDNDVSPGFSPWTYRAKYIDSCGNQGTFTQEVTTMHLSGTADEIEMINTISWTPYVGFDGAIVEYRIYRALEGVFDPIPIATVPDGQYTYVDNAYGLQTNGNICYRIEAVEALNFYNFSEQSSSNDLCLYYKPYIYVPNAFTPGGINPIFIPVISNASPEGYQFEIFSRWGQRIFESSDLSVGWDGFISNSGQMATNDVYLYTVSFEDGNGNRIFKRGFVSLLK

SEQ ID NO: 92156 - protein, 351 aa, Unknown
  Bacterial polypetide isolated from the Sargasso Sea
MELKNKSLFKQQCFIGGKWVKSLSGETIEVDNPALQITIGVVPKCGAEETKQAIESANTAFKNWKSKTAKERSIILRKWHDLILENIDDLAHIMTVEQGKPLAEAKGEITMGTTYIEFYSEECKRVYGDIIPDPLPDRRIVVIKQPVGVVGAITPWNFPSTMITRKCAPALGVGCPVVIKPASQTPFSALALAVLAEEAGFPAGVFNVVTGTASEIGKELTENPIVKKISFTGSTEVGKILLKQSSTTVKKVSMELGGHAPFIVFDDANIDEAVAGVMMSKFRNSGQTCICANRIFVHEKVYDEFLEKFVKEVAKINVGNGLEESTNSGPLIDQHSLEKVKDHVNDAVNTG

SEQ ID NO: 92157 - protein, 186 aa, Unknown
  Bacterial polypetide isolated from the Sargasso Sea
MTLSYQLVKEKKLKLNFPSDLFINGNYQKSISEKSFDNISPIDGKIINQISFANQADIDIAVTSARETFCKGYWSNLPPSQRKKILLKFAQLIERDRLELSLLDTIDMGKTINDTYNADLPTSIDNIEWYAEIIDKLFDDISPSSKEFMGLISKEPIGVVVAIVPWNYPLWMAIWKIAPALITGNS

SEQ ID NO: 92158 - protein, 461 aa, Unknown
  Bacterial polypetide isolated from the Sargasso Sea
LCDNLLNPEVSPNDLAEDPVKSVKKAIDKLQHEKIVNPSDIFSPRVNSSGYDLSEPKNLLNLKSDLLKFDNLKVEAKNFCNEINGSKNEKRYSIANGNEIGDCSFADIANELNFQQCTEWKNTPVSDRADIFYGIADNLEIDSTKFLYYLIHEAGKTYKDSYDEIRETVDFLRYYADNAKSLLSEPNNLNGPTGESNQLFYQSKGTFVCISPWNFPLAIFAGQIAAALVTGNSVISKPSEHTPIIATMMIELFYKNGVPKSALKLIQGDGSIGSKLISFDHISGVAFTGSSATAKKINLQLAKKDGPISSLIAETGGLNAMFIDSSSLHEQVVDDIMRSSFNSAGQRCSALRLAIIHESIFDDLVEMIKDAMAELTVGNPEDFHCDVGPIIDERSRNMLLEYISECSNNGYEVFSHNQAPDGNFVSPTLIELNSIDDINEEKFGPILHVIKYKTDELDQIL

SEQ ID NO: 92159 - protein, 156 aa, Unknown
  Bacterial polypetide isolated from the Sargasso Sea
MKLIEHFVGGKIISGSSDRKGKVTNPATGEQESEVRLASKSDLDQAVEVAKKAFETWSQKPALQRARIIFKFKELIEKNSDELTKLIVSEHGKVYEDARGSLVRGLEVVEFACGIPQMLKGEFSENVGTSVDSWSMRQPLGVVAGITPFNFPAMVP

SEQ ID NO: 92160 - protein, 111 aa, Unknown
  Bacterial polypetide isolated from the Sargasso Sea
LKGKLQGLAIRVPTPNVSLIDFVFNSKNNLSIKKINDSFIKASKKELHNILEATKEKLVSTDFNHNPNSAIVDLSLTNLASKKMGKVSAWYDNEWGFASRMCDLAEYIHKI

SEQ ID NO: 92161 - protein, 480 aa, Unknown
  Bacterial polypetide isolated from the Sargasso Sea
MYNKFGQFIDGKWQQSEKKETYDVINPATEEIIGSASKASSIEVQKALKSAEKGLKVWSNTTPWQRSYVLRKIADLMREKKDVLAKWLTLEVGKPLTEGVGEVGGAADIFEWNAEETKRIYGQTVQSRFPETRVHVYYQPVGVVAALIPWNFPIVLAARKISTALAAGCSVICKPDVITPGAVMELVDICKQAGVPDGVVNLLSGDPAEISNELLESDIVKKVSITGSTRVGKLILKKAADKVQRVTMELSGHSPFIVCDDVNIDNVADIAIAAKFRNNGQVCISPNRFYIQENVKDEFINAFINRAKKLKIGNGMDEGVNLGPLTTAKRLDEIEKLVDTTKKEGAEVLMGGKRPSGFNKGFYYEPTVFDKVEDNFTIMKEEPFGPLVPMLAFKSFDEVIERANDNDLGLCSYLYTNSMDKANRGSELLETGCVAVNTGAVAIAEAPFGGIKQTGYGREGGSMAIKDYLNVKYTHMALKA

SEQ ID NO: 92162 - protein, 409 aa, Unknown
  Bacterial polypetide isolated from the Sargasso Sea
MYSNFGQFIDGQWQQAEKKETYKVINPATEEVLGEASKASSVDVQKALKSAEKGLETWKNTTPWQRSYVIRKIADLMRERKDVLAKWLTLEVGKPLKEAIGEVGGGADIFEWNAEETKRIYGETLQSRFPETRVHVYYQPVGVVAALVPWNFPIVLASRKISTALAAGCSVICKPDVITPGAVMELVNICKDAGVPDGVVNLLSGDPAEISNELLESDIIKKVSITGSTRVGKLILKKAADKVQRVTMELSGHSPFIVFDDVDMNKVADMAITAKFRNNGQVCISPNRFYIQETRKEEFVNAFVDRAKKLKIGNGMDEGTDLGPLTTAKRLEEIEKLVETTKSEGAKVVLGGGRPSGFNKGYYFEPTVFDEVQDNFTIMKEEPFGPLVPVLTFKDFDEVVERANNNDLG

SEQ ID NO: 92163 - protein, 874 aa, Unknown
  Bacterial polypetide isolated from the Sargasso Sea
GKQFVLGRTMKEALKNSEDKRKLGYTHSYDMLGEAALTRKDAEKYFTDYANAITELGAQSYNESESPRPTISIKLSALHPRYEVANEDRVLTELYDTVIRLIKLARGLNIGISIDAEEVDRLELSLKLFQKLFNSDATKGWGLLGIVVQAYSKRALPVLVWLTRLAKEQGDEIPVRLVKGAYWDSELKWAQQAGEAAYPLYTRKAGTDVSYLACARYLLSDATRGAIYPQFASHNAQTVAAISDMAGDRNHEFQRLHGMGQELYDTILSEAGAKAVRIYAPIGAHKDLLPYLVRRLLENGANTSFVHKLVDPKTPIESLVVHPLKTLTGYKTLANNKIVLPTDIFGSDRKNSKGLNMNIISEAEPFFAALDKFKSTQWQAGPLVNGQTLTGEHKTVVSPFDTTQTVGQVAFANKAAIEQAVSSAHAAFASWTRTPVEVRASALQKLADLLEENREELIALCTREAGKSIQDGIDEVREAVDFCRYYAVQAKKLMSKPELLPGPTGELNELFLQGRGVFVCISPWNFPLAIFLGQVSAALAAGNTVVAKPAEQTSIIGYRAVQLAHQAGIPTDVLQYLPGTGATVGNALTADERIGGVCFTGSTGTAKLINRTLANREGAIIPLIAETGGQNAMVVDSTSQPEQVVNDVVSSSFTSAGQRCSALRVLFLQEDIADRVIDVLQGAMDELVIGNPSSVKTDVGPVIDATAKANLDAHIDHIKQVGKLIKQMPLPAGSENGHFVAPTAVEIDSIKVLEKEHFGPILHVIRYKASELAHVIDEINSTGFGLTLGIHSRNEGHALEVADKVNVGNVYINRNQIGAVVGVQPFGGQGLSGTGPKAGGPHYLTRFVTEKTRTNNITAIGGNATLLSLGDSEE

SEQ ID NO: 92164 - protein, 555 aa, Unknown
  Bacterial polypetide isolated from the Sargasso Sea
VNNLLNPEVSPDDLAENPVKSVKKAIDKLQHEKIVNPSEIFSPRVNSSGYDLSEPENLLDLKSDLLKCDNLKVEAKNFCSEVNDSKNEKRYSIANGNEIGSCSFADIANELNFKQCSEWKNTSVIERADIFYKIADNLEKDSTKFLYYLIHEAGKTYKDSYDEIREAVDFLRYYADNAKTLLSESNNLNGPTGESNQLFYQSKGTFVCISPWNFPLAIFAGQIAAALVTGNSVISKPSEHTPIIATMMIKLFYKNGVPKSALKLIQGDGSIGSKLISFDHISGVAFTGSSATAKKINLQLAKKDGPISSLIAETGGLNAMFIDSSSLHEQVVDDIMRSSFNSAGQRCSALRLAIIHESIFDDLVEMIKDAMAELTVGNPEDFHCDLGPIIDERSRNMLLEYISECSNNGYLVFSHNQAPDGNFISPTLIELNSIDDINEEKFGPILHVIKYKTDELDQILTALKNKQYGLTMGVHSRIESKADDIINKSIAGNTYINRDIVGAVVGSQPFGGTGLSGTGFKAGGPNYLLQFVDERSITKNTVAFGGNAEILNLED

SEQ ID NO: 92165 - protein, 1054 aa, Unknown
  Bacterial polypetide isolated from the Sargasso Sea
MFKATQVLAADYVPSDLAALREAITQNYVVDENAYLAELSAMLPGDGASLERVTQRARTLVTKVRKESGSGDGIDAFLQEYSLDTQEGIILMCLAEALLRIPDAETADALIKDKLSGANWSSHFRKSDSTLVNASTWGLMLTGKIIKLDKKLDGNPANLLGRMVNKLGEPVVRSAMYAAMKIMGKQFVLGRDMKEALKASRKSREKGYTHTYDMLGESALTLADADKYFGDYQRAIEAVGNERISDGGPAPSISIKLSALHPRYDVANRERVLGEMCERLVGLVRLARDKDVAISIDAEEMDRLELSLDLFEQLYRSEANRGWGKLGMVVQAYSKRALPVLCWLTGLAREQGDLIPVRLVKGAYWDSELKYAQQAGLPGYPLFTRKAGTDISYLACARYLLSEPTRGFISPQFATHNANTVVSILEMAGDRQFEFQRLHGMGEELHNAVLSEYPGLHCRIYAPVGAHKDLLPYLVRRLLENGANTSFVHKLVDPNTPVDSLAEHPLRTLKRYSSLANDRIPQPVNLFSDRKNSSGVNMNIVSIQRPFFTKLKELESKHWLAGPIVDGETLKRNEARVVLSPQDVSQLVGKIHWADEQAVEQALASAHAAFPRWRETPVSERAAALEKLADLLEANREQFISLCTREAGKLLQDGIDEVREAVDFCRYYAVQARGLMGQATLLPGYTGEMNELFLQGRGVFVCISPWNFPLAIFLGQVAAALATGNTVIAKPAEQTGLIAHLAVTLAHQAGIPGDVLQLLPGDGATVGAKLTADARIGGVCFTGSTETAKLINMTLAQRDGAILPLIAETGGQNAMIVDSTALPEQVVRDVVSAAFQSAGQRCSALRVLYLQEEIAPRVLEILTGALQELKVGNPAEHNTDVGPVIDAEAKAGLDAHLVHMIPRARLIAQAPMPAVTLGGHFVQPTALEIGSIRELTREQFGPILHVVRYAARDLDKVISDINGTGYGLTLGIHSRNESHAEELASRINVGNVYINRNQIGAMVGVQPFGGQGLSGTGPKAGGPHYLSRFITEKTRTINTTAVGGNASLLAMGDA

SEQ ID NO: 92166 - protein, 301 aa, Unknown
  Bacterial polypetide isolated from the Sargasso Sea
MENKIYWIFGFVGIYWAYCIFWGIKGARTSKTSEDYFVAGRSIGTWVFVLAATATSFSGWTFVGHPGKILTDGLPYAFASFYALTIPFTGVLFLRRQWVLGRTFNYITPGEMYSDYYGGNIIRGLTVLVAFLFSVPYLGIQLRASGALFNVLTDGMVSTNIGMILLSTVVVIYVASGGLKSVAYVDCAQAILLALGIVILGVITISFIGGWDLFILGIGDLVKNDLLNGSRLTLDGYSNRVSIPGSIQWVSSGSLATGGVWTGMMCMTYMFALMGIQSSPAFSMWAYANKTSKPFRWQQVV

SEQ ID NO: 92167 - protein, 298 aa, Unknown
  Bacterial polypetide isolated from the Sargasso Sea
MLNKRKFYIDGQWVEPVKKNDLEVINPCNEDPFAIISLGSKEDTDNAVKAAKIAFESWKNVSKQERLDLLEKLLAVYKKRFGEMAEAISLEMGAPMDWSTDVQTASGQTHLEDFIIRLKEFKFDEHFDKKSNNHIYYEPIGVCGLITPWNWPINQIALKVVPAFATGCTMILKPSEIAPISGMLFAEMIDEVGFPKGVFNLVNGDGAGVGTHISSHPDIDMVSFTGSTRAGRLISKNAAETIKRVCLELGGKGGNIVFADSYKKAVRDGIRNVMSNSGQSCDAPTRMLVEKSIYQRAV

SEQ ID NO: 92168 - protein, 182 aa, Unknown
  Bacterial polypetide isolated from the Sargasso Sea
MLTDKELKIYQRDGLVVPHYRLDHKTVQTLRQALDILLKNNPDADQNIMICPHLKSYGPQAIQGDAIWLDIAKRSDILDLISQVAGNDIILWGTTLFGKPANSGQIIPWHQDALHWPIEPKATTTVWIAVDECTKENGCLRFIPGSHRSQMPHIETSNLDEGKNAAVKLVLDQATVSENCAR

SEQ ID NO: 92169 - protein, 383 aa, Unknown
  Bacterial polypetide isolated from the Sargasso Sea
SSEEIKVIDPATEENCAVITLGNKTDVDIAVNAAKDAYESWAFSSKEERIGLLEKLYENYKKRWADIAEAITLEMGAPKDFATKLQAGTGASHIKSFIRYLKNFEFEKPLGDHAPNQRLIYEPKGVCALITPWNWPMNQVCLKVMPAIAAGCSMVLKPSELAPLSSMILAEIIDEVKFPKGVFNLVNGDGAKTGDALTSHPDINMISFTGSTRAGALISQNAAKDFKRVSLELGGKGANIIFKDADPEAIERGALRCFRNSGQSCNAPTRMLVEKSMYEEAIERLKKYTESFEVGDPKKEGEHIGPVISETHYNKIQTLIQKGMDEGAKLVAGGIGKPDGLDKGYFVKPTVFADVNNDMEVARTEIFGPGLSVIPFETEEDAN

SEQ ID NO: 92170 - protein, 214 aa, Unknown
  Bacterial polypetide isolated from the Sargasso Sea
MSIKIGINGMGRIGRMIVRSIIENNYSNIEIKHINNRSNSETCSNLLKYDSIHGKFNAEIKFNNNNITINKKKISYGRETDLNNINWKKYNVDYVFECTGKFNSKEKLLPHLMNGAKKIIVSAPCKNADKTIVFGVNEKEIKKNDNIISAASCTTNCLAPVAHVLNENFEIETGFMTTIHAFTSDQRILDNSHKDPRRARSASQSIVPTSTGAS

SEQ ID NO: 92171 - protein, 178 aa, Unknown
  Bacterial polypetide isolated from the Sargasso Sea
CLAPVVKVIHEQLGIKHGSITTIHDLTNTQSILDTPHKDLRRARACGSSLIPTTTGSATAITEIFPELKGRLNGHAVRVPLANASLTDCVFEVERATTAEEVNQLLKTASENELNGILGYEERPLVSVDYKTDPRSSIIDALSTMVVNGTQVKIYAWYDNEWGYANRTVELARMVGKA

SEQ ID NO: 92172 - protein, 68 aa, Unknown
  Bacterial polypetide isolated from the Sargasso Sea
LTNYIQSQDSEKIRRLARKLRSGMVDVNGAGIAVDAPFGGFKHSGIGREAGKEGLLEFLEVKSVGGWS

SEQ ID NO: 92173 - protein, 109 aa, Unknown
  Bacterial polypetide isolated from the Sargasso Sea
RWYSCQSSTPNVSMIDLVFNSKKKIDANTINNAMIKASKGELKGVLGVEDKPLVSIDYNHNPLSSIFDLSQTQVIKGRLGRILSWYDNEWGFANRMGDTASLIGKLIKS

SEQ ID NO: 92174 - protein, 307 aa, Unknown
  Bacterial polypetide isolated from the Sargasso Sea
MVDKKDINFQSTERQKRILPEDSFGDWKWREALAELMVPLIGTLYRNGINIMIYGKSLVNESPVAIMKAHRFARQVDNNELSEFETYPMIEYISTLDLKDCEIDIGEVAVKCPFFNEIKDDQSKISNYINEELKTVININSDRPKEPKNIVLYGFGRIGRLVARMMTQTTGPGNYFLLKAIVIRKGSDDDIYKRASLLTRDSVHGPFDGTVRVDEKSSSLIINGNPVKVIYASGPESISYKDLGITNPIVIDNTGVWRDEEGLSKHIKSGADKVILTAPAKGNLKNIVYGINDDILDDEDNIISAAS

SEQ ID NO: 92175 - protein, 197 aa, Unknown
  Bacterial polypetide isolated from the Sargasso Sea
MIDTRNFYIDGAWVAPLEGTDLPVFNPATEEPFATISLGGAADAEAAIAAARRTFPSWSMTTPAERGEVLRAILAVYEARAADMAEAISTEMGAPIDMALSDQAGAGRSHLKAFIRALDAFEWQRPMRPGTEGQDLVFEAAGVAGLITPWNWPMNQVVLKVGAALAAGCTMVLKPSEIAPMSSILFAEIMHEAGVPA

SEQ ID NO: 92176 - protein, 338 aa, Unknown
  Bacterial polypetide isolated from the Sargasso Sea
MNSIEHFINGKTVKGSSKRTAKVFNPATGEVSSNVNLANTNDLNKAVDAANKAFTSWSQKTPLFRARVLFKFKELIEKNYDELTKIIVSEHGKVYDDARGSLTRGLEVVEFACGIPQLLKGEFTENVGTNVDSWSMRQPLGVCAGITPFNFPAMVPMWMFPIAIACGNTFVLKPSEKDPSCSMKLAELFLEAGLPPGVFNVVNGDKEAVDAIINNKDISAVSFVGSTPIAKYIYENCAKNEKRVQALGGAKNHCVVMPDCDLEQAVNGLMGAAYGSAGERCMAQSVAVAVGKIADPLVKSLSKKVESLKIGPGLDKKSQKGPLVTKEHLEKVKGYVDM

SEQ ID NO: 92177 - protein, 125 aa, Unknown
  Bacterial polypetide isolated from the Sargasso Sea
TSTGASKAIDEIIPSLKGKLEGVAMRVPTPNVSLIEFVFCTKKDVTIDKINLAFQNFSKKNKILKTTKEKLVSIDFNHNPASSIIDESLTKVVSKNMGKISAWYDNEWGFSNRMCDIVEYLHKNS

SEQ ID NO: 92178 - protein, 79 aa, Unknown
  Bacterial polypetide isolated from the Sargasso Sea
AIKIANDTSYGLTNYIQTQDPEKVKRVARKLRSGMVDVNGAGIAVDAPFGGFKHSGIGREAGEHGLEEFLEVKAVGGWS

SEQ ID NO: 92179 - protein, 337 aa, Unknown
  Bacterial polypetide isolated from the Sargasso Sea
MLDRKNFYINGEWRKPSKPNNFDVINPSNEKPFATISLGSKEDVDFAINSAKKSFTKWSETTKETRINLLEKLLKIYKKRFNEMAESMSMEMGAPIDYATSVHAASGQSHLEDFILRLKEFKFEKHFDEKSNNHIALEPIGVCGLITPWNWPINQIALKVIPAFATGCTMILKPSEIAPISAMLFAEMIDEAGFPAGVFNLVNGDGAGVGTHISGHPDVDMISFTGSTRAGKLITKNAADTIKRVCLELGGKGGNIVFADSAPNAVRDGIKNVMSNSGQSCDAPTRMLVEKSIYKRAIDEAADEANKIKVDIASKKGEHIGPVVSKIQYDKIINLIN

SEQ ID NO: 92180 - protein, 480 aa, Unknown
  Bacterial polypetide isolated from the Sargasso Sea
MYEKFGQFIDGKWQQAEKKETYDVINPATEEVIGKASKASSIEVQKALKSAEKGLEVWKNTAPWQRAYVLRKIADMMREKKDVIAKWLTLEVGKPLAEAVGEVGGGADIFEWNAEETKRIYGQTQQSRFPDTRVHVYYQPVGVVAALVPWNFPIVLASRKISTALAAGCSVICKPDVITPGAVMELVNICKEAGVPDGVVSLLSGDPAEISNELMESDIIKKVSVTGSTRVGKIILKKAADKVQRVTMELSGHSPFIVCEDVDMNKVADIAITGKFRNNGQVCISPNRFYIQENRKEDFVNAFIERAKKLKIGNGMDEGVDLGPLTTAKRLEEIEKLVETTKKEGAKVLMGGQRPSGFNKGYYYEPTVFDDVKDNFTIMKEEPFGPLVPILTFKTFDEVIERANDNDLGLCSYLYTNSMDKAHIGSEKLESGCVAVNTGVVAIAEAPFGGIKQTGYGREGGSGAIKDYLNVKYTHMGLKI

SEQ ID NO: 92181 - protein, 94 aa, Unknown
  Bacterial polypetide isolated from the Sargasso Sea
PVLSVLEYEDQEEAIKIANDTEYGLGAGVFTKDLKKASWTASKLESGQVYVNKWFTGNHATPFGGYKQSGYSREKGVDGLKSYLQVKNVGISLG

SEQ ID NO: 92182 - protein, 54 aa, Unknown
  Bacterial polypetide isolated from the Sargasso Sea
VSKDFNHDSHSSIFDVTQTQVVKNKFSRVLSWYDNEWGFSNRMCDTSIQISKLI

SEQ ID NO: 92183 - protein, 239 aa, Unknown
  Bacterial polypetide isolated from the Sargasso Sea
MIEKKQFYINGKWVDPINKNELEVIDPSNEEVCAVISLGDSEDTNLAVESAKKAFPMWSSTSKEERIKLLENLYEIYKSRWNKMAESISLEMGAPIDWSIEEQSSSGANHIKNFIKTLKNFEFESAFNSESNNHITYEPIGVCALITPWNWPINQITLKVIPALAAGCTMVLKPSEIAPLSAIVFAEMIHDAGFPPGVFNLVNGNGDGVGTQLAKHTDIDMISFTGSTRAGKLISKNSA

SEQ ID NO: 92184 - protein, 480 aa, Unknown
  Bacterial polypetide isolated from the Sargasso Sea
MEFNQDIKLLIDGKWIQSSERDSLPLINPATEEILSNVPIANDKDLDNSLISSHKAFKIWSKFPPLKRQSIMLKAVEIIKSRQEEIAKTLTMEMGKTLRESRQEINQVIETTVWCAEEGKRTYGRIIPSRDSQARQMVFKEPIGPVVAFVAWNFPGGNFIRKVASALAAGCTIIIKPSEETPATAVALGECFMEAGLPSGVLNIIFGIPDKISRYLLESPIPKAVTFTGSVEVGKHLQSLSSNTLKKCTLELGGHAPVIICDDVDVDKVLAKIAPWKFRNSGQVCISPSRFFVQDEIYKKFVDGFVNIARQIKLGNGLEDSTDMGPLIFEKQLRKMEILVEDAKSKGSSINLGGKKIGNKGYFYEPTVLTNLSSKSRVLNEEPFGPLVPILPFKNIEEATEKSNSLSVGLASYVFTENQKNAHFLGSNLNVGIVCVNHTIVSVPEAPFGGVDESGYGKENGIEGLESFLKTKYISEIPSI

SEQ ID NO: 92185 - protein, 475 aa, Unknown
  Bacterial polypetide isolated from the Sargasso Sea
MNTIASNQVPTVKLLINGEFVESKTTEWRDIVNPATQEVLARVPFATANEVNEAIQSAHTAFKTWKDTPVGARMRIMLKFQALIREHSPRIAKTLSAEQGKTIPDAEGDIFRGLEVVEHACSIGTLQQGEFAENVAGGVDTYTLRQPIGVCAGITPFNFPAMIPLWMFPMAIVCGNTFVLKPSEQDPLSTMQLVELALEAGVPKGVLNVVHGGKDVVDALCTHDLVKAISFVGSTAVGTHVYRLGSEHGKRVQSMMGAKNHAVVLPDANREQTLNALAGAGFGAAGQRCMATSVVVLVGAAQQWLPDLVAKAKTLKVNAGSEPNTDIGPVVSRTAKQRILGLIEQGVKEGATLALDGRDVKVPGYEQGNFIGPTVFTDVTTDMEIYRQEIFGPVLVVLNAATLDDAIALVNRNPFGNGVGLFTQSGAAARKFQSEIDIGQVGINIPIPVPVPFFSFTGSRGSKLGDLGPYGKQVV

SEQ ID NO: 92186 - protein, 504 aa, Unknown
  Bacterial polypetide isolated from the Sargasso Sea
MNANSKDVPTVKLLIDGAFVESATNEWRDIVNPATQQVLARVPFATVAEVDAAVQAAHTAFATWKNTPIAARMRIMLKFQDLVRTNQQRIAKTLTAEQGKTIPDAEGDIFRGLEVVEHACSIGSLQLGEFAENVAGGVDTYTLRQPLGVCAGITPFNFPAMIPLWMFPMAIVCGNTFVLKPSEQDPLSTMQLVELAIEAGVPKGVLNVVHGGKEVVDAICTHPLVKAISFVGSTAVGTHVYNLGSAHGKRVQSMMGAKNHAVVLPDANREQAINALVGAGFGAAGQRCMATSVAVLVGNARDWLPDIVAKAKALKVNAGAEAGTDVGPVVSKAAKERILSLIDAGVKEGAKLELDGRDVKVAGYEQGNFVGPTIFSGVKTNMSVYTHEIFGPVLVVMEADTLDDAIALVNANPFGNGVGLFTQSGAAARKFQSEIDVGQVGINIPIPVPVPFFSFTGSRGSKLGDLGPYGKQVVQFYTQTKTVTARWFDDDTTAGPVNTTIRLH

SEQ ID NO: 92187 - protein, 500 aa, Unknown
  Bacterial polypetide isolated from the Sargasso Sea
MGNIGHYINGNNVEGKSGLNKPVFNPATGTSEKNVDLASVEEVNQAVENSKSAWKEWSNQPPLRRARVLDKFKYILDQRREELAKCISSEHGKTHEDALGEVTRGLEVVEFAVGAPHLLKGDYTENVGSEVDSFNVRQSLGVVAGITPFNFPAMVPMWMFPVALVCGNCFILKPSERDPSPSLLIAKWLSEAGLPDGVFNVVQGDKVAVDAILHHKDVKAVSFVGSTPIARYIYTTGTSTGKRVQALGGAKNHMVIMPDADLDMATNALMGAAFGSAGERCMAISVAVPVTDKVADALVEKLVPKIEALKIGPSVDPSAEMGPLITSEHLNKVTGYIDEGVNEGAKLVVDGRNTKPSMQGYENGYFIGGSLFDNVTKDMSIYKNEIFGPVLSVVRAQDYNSAVDLIHGHEYANGVAVFTRDGDVARGFSNEIEVGMVGVNVPIPVPMAFHSFGGWKSSLFGDHHMHGMEGVRFYTRLKTTTVRWPRGQRSDPQFTMPTLG

SEQ ID NO: 92188 - protein, 290 aa, Unknown
  Bacterial polypetide isolated from the Sargasso Sea
MTSPKINFSPKGLFIGGKWVDSYKGERFSTINPSNGQHLGEVPLAEKEDVNRAVIAAKQAFHDWGKMPLKERAGFLIKLADKLLENRDELGMMDCVDSGNALNGMKGDVDWSSDSLKYFAGLISEIKGETFSEKPGHLNFTRRQPYGVVAKINPFNHPLRFCAEKSAAALAAGNTVIVKASEQAPLSSLRFAEICEEILPEGVVNVLTGDAVCGDAMVRHEDVRRVGVVGSVSTGKIIAKAAAKDLTHVSLELGGKNPIIIFPDADPKKAANFAVKGMNMNRQGQSCSST

SEQ ID NO: 92189 - protein, 480 aa, Unknown
  Bacterial polypetide isolated from the Sargasso Sea
MYSNFGQFIDGKWQQAEKKETYDVINPATEEVIGKASKASSVDVQKALKSAQKGLEVWKNTTPWQRSYVIRKIADLMRERKDVLAKWLTLEVGKPLSEGAGEVGGGADIFEWNAEETKRIYGQTVQTRFPDTRAHIYYQPVGVVAALIPWNFPIILASRKISTALAAGCSVICKPDVITPGAVMELVNICKEAGVPDGVVNLLSGDPAEISNELLESDIIKKVSITGSTRVGKLILKKAADKVQRVTMELSGHSPFIVCDDVDINKVADIAIGAKFRNNGQVCISPNRFYIQENRKDEFVGAFMDRAKKLKIGNGMDDGVELGPLSTAKRLEEIEKLVETTKQEGAKVLMGGKRPSGFNKGYYYEPTVFDDVKDNFTIMKEEPFGPLVPVLTFKSFDEVIERANDNDLGLCSYLYTNSMDQANRGSEMLESGCVAVNTGAVAVAEAPFGGIKQTGYGREGGSMAIKDYLNVKYTHMALKV

SEQ ID NO: 92190 - protein, 1024 aa, Unknown
  Bacterial polypetide isolated from the Sargasso Sea
LSELIKLVPSSDEAIERVTRRAHELVNKVRQFDKKGLMVGIDAFLQQYSLETQEGIILMCLAEALLRIPDAATADALIEDKLSGAKWDEHLSKSDSVLVNASTWGLMLTGKIVKLDKKIDGTPSNLLSRLVNRLGEPVIRQAMMAAMKIMGKQFVLGRTMKEALKNSEDKRKLGYTHSYDMLGEAALTRKDAEKYFNDYANAITELGAQSYNENESPRPTISIKLSALHPRYEVANEDRVLTELYDTVIRLIKLARGLNIGISIDAEEVDRLELSLKLFQKLFNADATQGWGLLGIVVQAYSKRALPVLVWLTRLAKEQGDEIPVRLVKGAYWDSELKWAQQAGEAAYPLYTRKAGTDVSYLACARYLLSDATRGAIYPQFASHNAQTVAAISDMAGDRNHEFQRLHGMGQELYDTILSEAGAKAVRIYAPIGAHKDLLPYLVRRLLENGANTSFVHKLVDPKTPIESLVVHPLKTLTGYKTLANNKIVLPTDIFGSDRKNSKGLNMNIISEAEPFFAALDKFKSTQWQAGPLVNGQTLTGEHKTVVSPFDTTLTVGQVAFADKAAIEQAVASADAAFATWTRTPVEVRASALQKLADLLEENREELIALCTREAGKSIQDGIDEVREAVDFCRYYAVQAKKLMSKPELLPGPTGELNELFLQGRGVFVCISPWNFPLAIFLGQVSAALAAGNTVVAKPAEQTSIIGYRAVQLAHQAGIPTDVLQYLPGTGATVGNALTADERIGGVCFTGSTGTAKLINRTLANREGAIIPLIAETGGQNAMVVDSTSQPEQVVNDVVSSSFTSAGQRCSALRVLFLQEDIADRVIDVLQGAMDELVIGNPSSVKTDVGPVIDATAKANLDAHIDHIKQVGKLIKQMSLPAGTENGHFVSPTAVEIDSIKVLEKEHFGPILHVIRYKAAELAHVIDEINSTGFGLTLGIHSRNEGHALEVADKVNVGNVYINRNQIGAVVGVQPFGGQGLSGTGPKAGGPHYLTRFVTEKTRTNNITAIGGNATLLSLGDSEA

SEQ ID NO: 92191 - protein, 233 aa, Unknown
  Bacterial polypetide isolated from the Sargasso Sea
MYSKFGQFIHGKWQPSEKNETYDVINPATEDVIGKASKATKVDVTKALKSAEEGFKVWKKTPPWQRSYKIRKIADLMRERKKELAKWLALEVGKPLVEGEGEVGGGADIFEWNSEETKRIFGQTVESRFENTRVQVNYQPVGVVAALIPWNFPIILASRKISTALAAGCSVIVKPDVITPGAVMELMNIINDAGIPPGVVNLLSGDPEEVSNELISSNIIKKVSITGSTRVGK

SEQ ID NO: 92192 - protein, 298 aa, Unknown
  Bacterial polypetide isolated from the Sargasso Sea
MTIKIGINGMGRIGRMVLRAIIESKNKNIIIKHINNRTNVEITSNLLKYDSIHGKFASNISFNRNNLIINKNKISFSQHSNIEEIKWKKVGVDYVFECTGKFNSKEKLLSHIKNGAKKVIVSAPCKNADKTIVFGVNEKNITKDDKIISASSCTTNCLAPVVKVLNENFKIDKGFMTTIHAFTTDQRILDNSHKDPRRARSASQSIVPTTTGASKSIGEIIPSLKGKIEGVSMRVPTPNVSIIELIFCTNKEITINKINNAFIKTSKKQLKNVLKVTSEKLVSVDFNHNPASAIVDLN

SEQ ID NO: 92193 - protein, 505 aa, Unknown
  Bacterial polypetide isolated from the Sargasso Sea
MKHDSNVTSTVGHLIDGKRVDGGSRVQPVFDPATGESHKSVALADKLTVEAAIASAQAAFPAWRNTPPLKRARVMSRFKTLLEEHADELCALITAEHGKVLADAMGELQRGIENVEYATYVPELLKGEHSKNVGPAIDSWSEFQALGVAAGITPFNFPVMVPLWMWPMAVACGNTFVLKPSERTPSSTLRMAELALEAGLPPGVLNVVNGDKEAVDTILTDPRVKAVSFVGSTPIAEYIYSTGCAHGKRVQALGGAKNFAVVMPDADIGNAVNALMGAAYGSCGERCMAIPLVVAIGDETGDQVVAGLKAEIEKMKVGPGNGAGVDMGPLVTQQHFEKVTGFVEAGVEAGATLVVDGRSVKVDGHDGGYYLGPCLFDNVKPGMPIYQHEIFGPVLGVIRLKSLDEAMALIDAHEYGNGTCLFTRDGEAARYFSDNIQIGMVGINVPLPVPVAYHSFGGWKRSLFGDLHAYGPDAVRFYTKRKTITQRWPSAGVREGTVFSFPSNR

SEQ ID NO: 92194 - protein, 141 aa, Unknown
  Bacterial polypetide isolated from the Sargasso Sea
HKDPRRARSASQSIVPTSTGASKAIGEIIPSLKEKLEGIAMRVPTPNVSLVELVFCTKKDLSIEKINSAFHNFSKKNKILEITKEKLVSIDFNHNPASAIVDASLTNVVGKNMGKISAWYDNEWGFSNRMCDIAEYLHKIS

SEQ ID NO: 92195 - protein, 84 aa, Unknown
  Bacterial polypetide isolated from the Sargasso Sea
SKNISIESLTELLIDHEAQNPKIIKNNFDPLVSNDFIRSDYSVIIDHRFLTVSNGYIKCLSWYDNEWGYSSKVIDLVKYINNPL

SEQ ID NO: 92196 - protein, 728 aa, Unknown
  Bacterial polypetide isolated from the Sargasso Sea
MKDFTKFHSDKEIAKYLISEFDNSKEKEIFSATKKIITECRKNKSGRTLLDKFLSEYGLTNDEGVALMCLAESVLRIPDDNTKDELISEKITNSNWIDHINQADSLFVNAATWGLLIAGKVIQPPRALFDNPLEWIGKLTQKTGETSVRQAIMTAMQILSKEFVMGNDFDSVIKSSNLKKSIHSFDMLGEAARTKSQAEGFYNSYVEAIERVAKLNREFGINHGVSIKLSALHPRYETLKYELTKKEILNSILSLVNLAYQNDVEITIDAEEQHRLSISQDLIEEVAMSKRIKDWNGLGFAIQAYGKRASNVVNWANELCSKREKMHVRLTKGAYWDGEIKFSQAGGHEGFPVLINKSLTDLNYLFIASKLLGSDNLKPKFATHNAHSVASIYFMAEEKEYEFQRLFGMGELLYKSADKVLGGIPSAGIYAPIGPYKDLLPYLVRRLLENGANSSFVNNLLNPEVSPDDLAEDPVKSVKKAIDKLQHEKIVNPSDIFSPRVNSSGYDLSEPKNLLDLKSDLLKFDNLKVEAKNFCSEINESKNEKRYSIANGNEIGDCSFADIANELNFQQCTEWKNTPVSERADIFYRIADNLEKDSTKFLYYLIHEAGKTYKDSYDEIREAVDFLRYYADNAKSLLSEPNNLNGPTGESNQLFYQSKGTFVCISPWNFPLAIFAGQIAAALVTGNSVISKPSEHTPIIATMMIELFYKNGIPKSALKLIQGDGSIG

SEQ ID NO: 92197 - protein, 203 aa, Unknown
  Bacterial polypetide isolated from the Sargasso Sea
MGLGNISITGNYPEVSKDIMLSKLNILKEPFLENFNPNINDRIDRIKRIQKLVEENIDAFHKSLREDFGSRHEQLSLMADTMPVINNAKHALKNIKKWVKQDNRKPNFPLGLLGSKAYVQFQPYGVVGIISPWNFPLTLSIAPLIEIFAAGNNAMIKLSEFVPATSELTEKLINKYFTEKEVVIINGGPQTSQSFAGLPFDHL

SEQ ID NO: 92198 - protein, 332 aa, Unknown
  Bacterial polypetide isolated from the Sargasso Sea
AITPWNFPNSMITRKCAAALAVGCTTVVKPASQTPFSALAVAELAKAAGFPNGVFNIITGSAKEIGMELTKNPKIKKISFTGSTEVGKILMEQSASTVKKLSMELGGHAPFIVFEDANIDEAVTGALQSKFRNSGQTCICTNRLFVHEKVYDSFLEKFTNEVKKIKVGNGLNDGIVSGPLIDKSSLDKVIDHVQDAVNTGAKIAVGGEVHSLGGNFYQPTVLSNVSTEAKITFEETFGPVAPLYKFSSDDEVIKMANDTPYGLASYFYSRDIGRIWKVAEALEYGIVSINNGLPTIPEIPFGGVKESGMGREGSRYGLDDYLIIKYISMGGI

SEQ ID NO: 92199 - protein, 171 aa, Unknown
  Bacterial polypetide isolated from the Sargasso Sea
MSVKKILDSMDYGVAPESAGEAKKWLLKHNSSFGHFIGGALTSPKHGFKSVNPSNGETIASLSQATNKDVNKAVKAAKNAFKSWSVVNPHERAKVLYSIARLLQKNSRLFSVLESIDNGKPIRESRDIDIPLAQRHFYYHAGIAQIYKSKIQNMEPIGVCGQIIPLELPHC

SEQ ID NO: 92200 - protein, 276 aa, Unknown
  Bacterial polypetide isolated from the Sargasso Sea
MIDKKNFYINGKWVKPAKANDYNVVNPSNEEVFAVISLGSKDDTDSAVKSAKRAFDQWKETLVGERINFLEKLLKVYKKRFNEIAEAMSMEMGSPIDYATMVHAASGQTHLEDFILRLKNFKFGEDFNSKSNNYIAREPIGVCGLITPWNWPINQIALKVIPAFATGCTMILKPSEIAPISAMLFAEMIDEAGFPPGVFNLVNGDGAGVGTDISGHPDIDMISFTGSTRAGKLITKNAADTIKRVCLELGGKGGNIVFADSYPNAVRDGIRNVMSN

SEQ ID NO: 92201 - protein, 155 aa, Unknown
  Bacterial polypetide isolated from the Sargasso Sea
MVNWEYSESVESQEIVNIKDKYQNFINGKFQQPNSKKYINTISPSTEEVLSKIVISNEKDVDNAVQSAQLGFEKWSNTSPHERSKHLFKLARLIQERSREFAVLESMDGGKPIKESRDFDLPQVAANFFYFAGWADKIDLSWGAKSLKPHGVVGQ

SEQ ID NO: 92202 - protein, 194 aa, Unknown
  Bacterial polypetide isolated from the Sargasso Sea
MPEDSFGDWKWREALAELMVPLIGSLYRKGINIMIYGKSLVNESPVAIMKAHRFARQTDNNELSELETYPILQHISTLELQDCEIDIGEIAVRCPFFDDIKDDSSKIPNFINSELESVINVDSKRPKVPANIVLYGFGRIGRLVTRMMTQTTGPGNYFRLKAIVIRKAADDDIFKRASLLTRDSVHGPFDGTVK

SEQ ID NO: 92203 - protein, 132 aa, Unknown
  Bacterial polypetide isolated from the Sargasso Sea
MTSVINHWINGELQPSTSERYGDVFNPATGEVSASVSMGNSDDLNKAVEAASEAFETWSQTSVTKRAQIFFKYKELLESNREELIDLITAEHGKVTADAAGSLQRGIEVVDFVCGIPHLLKGEFSEQVGTGH

SEQ ID NO: 92204 - protein, 127 aa, Unknown
  Bacterial polypetide isolated from the Sargasso Sea
MNNIGINGFGRIGRSILRIIVESNSDLNVIAINDLGDKETLSYLFKHDSIMGILNMNVELEDDSLIVGDRKIKLISHSDPAEIPWSDLGVDLVVESTGFFRDKDSLDKHISSGAKKVVLTVPPKDEI

SEQ ID NO: 92205 - protein, 342 aa, Unknown
  Bacterial polypetide isolated from the Sargasso Sea
MLDKRKFYINGKWEEPSKKNDFEVINPSNEEKYAVISLGSKADVDLAVKASKDAFESWKETTKEERIKLLENLLSIYKKRFNEMTEAISSEMGAPIDWSSNVQNASGQTHLEDFIIRLKNFKFNEQFDSKSNNQIFYEPIGVCGLITPWNWPINQIALKVIPALATGCTMILKPSEIAPISAMLFAEMIHEAGFPPGVFNLVNGDGAGVGTFISGHPDIDMVSFTGSTRAGKLITKNAADTIKRVCLELGGKGGNIVFADSYPDAVRDGIRNVMSNSGQSCDAPTRMLVEKSIYERAVNEAVDEAKKIKVDIASKKGDHIGPVVSKIQYDKIINLIKDGIKE

SEQ ID NO: 92206 - protein, 353 aa, Unknown
  Bacterial polypetide isolated from the Sargasso Sea
MLDKKKFYINGEWVDPKNPNNFEVINPSTEEVCAVINLGSSDDTNSAVKAAKKAFETWKETTKDERLKLLEKLLTIYKARWDDMTDAITTELGCPKDWCSANQTSSGAGHIEDFIKRLKEFNFEPGFDKGSVNHIVYEPIGVCGLITPWNWPINQIALKVIPAFATGCTMILKPSEIAPLSGMLFAEMIHEAGFPAGVFNLVNGDGPGVGTDLSGHPDVDMVSFTGSTRAGKLITKNAADTIKRVCLELGGKGGNIVFADSYPDAVRDGIRNVMSNSGQSCDAPTRMLVEKSIYKRAVEEAADEANKIKVDLASKVGEHIGPVISKTQFDKIQSLIKSGIDEGATLVAGGPDK

SEQ ID NO: 92207 - protein, 258 aa, Unknown
  Bacterial polypetide isolated from the Sargasso Sea
MKLIEHFVDGKIIPGSSDRKGKVFNPATGEQESEVRLASKSDLDQAVEAAKKAFETWSAKPPLQRARIIFKFKELIEKNSDELTKLIVSEHGKVFEDARGSLTRGLEVVEFACGIPHLLKGEYSENVGTNVDSWSMRQPLGVVAGITPFNFPAMVPMWMFPIAIACGNTFILKPSEKDPSCPIRLAELLSEAGLPEGVLNVVNGDKEAVDAILENKDIKAVSFVGSTPIAKYIYENSAKNEKRVQALGGAKNHLVVMP

SEQ ID NO: 92208 - protein, 457 aa, Unknown
  Bacterial polypetide isolated from the Sargasso Sea
MTDKIKPNSYAALDAAHHFHPYSNAKRIEKQGPMVIAKGKGIKVWDDQGNEYIEAMAGLWSVAVGFGEERLVEAAKKQLETLPYYHSFTHKSHPAVAQLSQKLTEIVGLNMTHAHYTNSGSEANDSAMKMIWYYNNALNRPEKKKIISRFKAYHGITIASGSLTGIPMMHNDFDLPIKQVLHTRCPHYWREGKEGETEEEFATRCANELEDLIISEGPETVAAFFGEPVMGAGGLIVPPKTYWQKIQEVCKKYDILIVADEVINGFGRTGKRFACELYGIEPDLIILSKQITSNYIPMGVVLMTDKIYEPIAENTVKNNLYGSGFTSAGHPVACAVALENIKILEEEGLMERVSSLEPIFQERLKNLEKKELVGEARGVGLMGAVELVSDKDSSAPFDPLGSAGPILAETGHSEGIILRAIGDVLAVCPPLIIEENEIHELFDRFENTLDKGLEAVK

SEQ ID NO: 92209 - protein, 480 aa, Unknown
  Bacterial polypetide isolated from the Sargasso Sea
MYEKFGQFIDGKWQQAEKKETYDVINPATEEVIGKASKASSIEVQKALKSAEKGLEVWKNTAPWQRAYVLRKIADLMREKKDVLAKWLTLEVGKPLTEAVGEVGGGADIFEWNAEETKRIYGQTQQSRFPDTRVHVYYQPVGVVAALVPWNFPIVLASRKISTSLAAGCSVICKPDVITPGAVMELVNICKEAGVPDGVVNLLSGDPAEVSNELMESDIIKKVSVTGSTRVGKLILKKAADKVQRVTMELSGHSPFIVCEDVDMNKVADIAITGKFRNNGQVCISPNRFYIQENRKDEFVNAFIERAKKLKIGNGMDDGVDLGPLTTAKRLEEIEKLVDTTKKEGAKILMGGQRPSGFNKGYYYEPTVFDDVKDNFTIMKEEPFGPLVPILTFKTFDEVIERANDNDLGLCSYLYTNSMDKAHIGSEKLESGCVAVNTGVVAIAEAPFGGIKQTGYGREGGSGAIKDYLNVKYTHMGLKI

SEQ ID NO: 92210 - protein, 298 aa, Unknown
  Bacterial polypetide isolated from the Sargasso Sea
ARAEELAEDQRLLPRGVVLCISPWNFPLAIFLGQVAAALVTGNTVIAKPAEQTSIIAQRAVDIMHSVGLPEDALKLIVSPGKEVGETLLPDERIKAVMFTGSTQTGTLISQVLAERGGEQVPLIAETGGQNCMIVDSTALPEQVVDDVIHSGFQSAGQRCSALRVLFVQDEIADDLIEMLTGAMKELTVGDPTQLATDVGPVIDEKALKSLTDHQEYMEDKAKLLYRNEMPAGFENGTFFAPTLYEIKNIDVLEKEVFGPVVHIVRFKSKDLDSVLEQINGTGYGPNYGHSLAYERAC

SEQ ID NO: 92211 - protein, 218 aa, Unknown
  Bacterial polypetide isolated from the Sargasso Sea
MPQDSFGDWKWREALAELMVPLIGTLYRNGINIMIYGKSLVNESPVAIMKAHRFARQADNNELSEFETYPMIQYISTLELKDCEIDIGEIAVKCPFFNEIKNDQSKIADYINNELKTVINKNSNRPKEPKNIVLYGFGRIGRLVARMMTQTTGPGNYFLLKAIVIRKGSDDDIYKRASLLTRDSVHGPFDGTVRVDEENSSLIINGNQVKIIYTSGPE

SEQ ID NO: 92212 - protein, 857 aa, Unknown
  Bacterial polypetide isolated from the Sargasso Sea
MLINDTLHTTSPLRQRIRDYYRISESVAVDQILPIAEVNPRARSRAWERARKMVLQIRREQEGHGGVDALLNEYSLSTAEGVVLMCLAEALLRVPDKATQDELIRDKLSQGQWTPHLGNSESLFVNASAWGLLFTGNMVNYADKRKKEQFGLLKQTLGRLGEPVIRRAMNIAMRVMGRQFVMGETIEDAVDRAKEKETKGYVYSYDMLGEGARTMRDAERYYDAYVKAIKVIGKAANGRGPKRSPGISVKLSAIHPRFEFSHRERAMADIPPRLKALCMMAKEYDIGLTVDAEEADRLELSLDIIEAVFRDEDLNGWTGFGLAVQAYQKRAIHVIEHLRELTLEVGRPLMVRLVKGAYWDTEIKLTQQAGLEEFPVFTRKSSTDVSYHACANRLLEYRDTIYPQFATHNAYTASVIVELAGDDKEGFEFQCLHGMGDTLYDQVVTQDKIQCRVYAPVGEHEDLLAYLVRRLLENGANSSFVNAIVDDEKPVESLLEDPVEKTQRLKVRYNKLIKTPRGLYAPERDNSRGLDLTDTNAVTALKHELERWQDYYKVTGEVPEGATAVLSPTNHNDVVGYHHYATPDDMRKALDEAEAGFEAWSKRDVSERAEILNRTADALERHMAELIAICMREAGKVAQDSIDEVREAVDFCRYYAARAEELAEDQRLLPRGVVLCISPWNFPLAIFLGQVAAALVTGNTVIAKPAEQTSIIAQRAVDIMHSVGLPEDALKLIVSPGKEVGETLLPDERIKAVMFTGSTQTGTLISQVLAERGGEQVPLIAETGGQNCMIVDSTALPEQVVDDVIHSGFQSAGQRCSALRVLFVQDEIADDLIEMLTGAMKELTVGDPTQLATDVGP

SEQ ID NO: 92213 - protein, 206 aa, Unknown
  Bacterial polypetide isolated from the Sargasso Sea
MDITNKKLFKQQCFIDGEWINSQNKQIIKVNNPANQEIIGTIPNCGKEETIIAIKAAENSWPSWKSKTAKERSAILKKWFHLIEENKEDLARIMTLEQGKPIVESRGEISYGASFVEWFAEECRRVYGDTIPDILPDRRAFVIKQPVGVVGAITPWNFPSSMITRKCAPALAVGCPVVIKPASQTPYSAFALAVLAEEAGFPKRYN

SEQ ID NO: 92214 - protein, 381 aa, Unknown
  Bacterial polypetide isolated from the Sargasso Sea
MLDKRKFYINGQWVDPIKKNDFDVINPCNEDPFAVISLGSKEDTDLAVKSAKNAFNTWKETSKKERLSLLEKLSSVYKKRFNEMAEAISLEMGAPMDWATDVQTASGKDHLDDFILRLKNFKFDEHFDNKSNNHIYYEPIGVCGLITPWNWPINQIALKVVPAFATGCTMILKPSEIAPISGMLFAEMIDEAGFPKGVFNLVNGDGAGVGTHISSHPDIDMVSFTGSTRAGRLISKNAAETIKRVCLELGGKGGNIVFADSYKDAVRDGIRNVMSNSGQSCDAPTRMLVEKSIYERAVKEAVDEANKIKVDQASKKGDHIGPVISKIQYDKIINLIESGISEGATLAAGGPELPNGLNKGYFIKPTIFTDVTNDMRIAKEE

SEQ ID NO: 92215 - protein, 333 aa, Unknown
  Bacterial polypetide isolated from the Sargasso Sea
GTQLRLKAIVVRKSGADDLMKRAGLLRRDSVHGSFQGTIRVDEENQCIIANGNVIRVIYASNPDEVDYAVYGISDAIIIDNTGAWKDEEGLSRHLKSNGASRVILTAPGSGTVKNIVAGINNDQIEPGDNILAAASCTTNAIVPVLKAVNDQFGIVNGHMETVHAYTNDQNLIDNFHKKNRRGRGAPLNMVITETGASSAVTKLLPELEGKLTGNAIRVPTPNVSLAILNLTLSQVTTTEEISDFLRESALHGKLQRQIDFTTSPDIVSSDLVGNRHACIVDGEATIVKEDRVVLYVWYDNEFGYSCQVVRVVQKMAGIKYPLIPEDAEEMGF

SEQ ID NO: 92216 - protein, 480 aa, Unknown
  Bacterial polypetide isolated from the Sargasso Sea
MYEKFGQFIDGKWQQAEKKETYDVINPATEEVIGKASKASSIEVQKALKSAEKGLEVWKNTAPWQRAYVLRKIADIMREKKEVIAKWLTLEVGKPLTEAVGEVGGGADIFEWNAEETKRIYGQTQQSRFPDTRVHVYYQPVGVVAALVPWNFPIVLASRKISTALAAGCSVICKPDVITPGAVMELVNICKEAGVPDGVVSLLSGDPAEISNELMESDIIKKVSVTGSTRVGKIILKKAADKVQRVTMELSGHSPFIVCEDVDMNKVADIAITGKFRNNGQVCISPNRFYIQENRKDEFVDAFIERAKKLKIGNGMDKGVDLGPLTTAKRLEEIEKLVETTKKEGAKVLMGGQKPSGFNKGYYYEPTVFDDVKDNFTIMKEEPFGPLVPILTFKTFDEVIERANDNDLGLCSYLYTNSMDKAHIGSEKLESGCVAVNTGVVAIAEAPFGGIKQTGYGREGGSGAIKDYLNVKYTHMGLKI

SEQ ID NO: 92217 - protein, 329 aa, Unknown
  Bacterial polypetide isolated from the Sargasso Sea
MKKEHRFYINGEWIDSSSTELIEIENPSTEEVIGTISAGTKEDIDHAVAAAKNAFQSFGFTSKEDRIAILEEIIKNYEASSEDLALCISEEMGAPLWLSQVAQVASGLGHFKDTLAVLKDFEFELSEDHYLVRKEPIGVVGMITPWNWPMNQMCTKIASALAAGCTMVLKPSEITPFCAVMLTDILDKSNLPNGVFNLVHGYGPVVGAALSEHPDVDMMHFTGSTRAGVAVAQASAPTVKRVAQELGGKSANIILQDANLEKAVAAGANHCFLNTGQSCNAPTRMLVHSSQYDEAVEIAKNVANSIVVGKPNDEGVRIGPISNRTQYEK

SEQ ID NO: 92218 - protein, 69 aa, Unknown
  Bacterial polypetide isolated from the Sargasso Sea
NKSFKNILTTNKLPLVSIDFNHNSSSSVFDLTQTQVINGTFCRVLSWYDNEWGFSNRMIETMFDLKKLL

SEQ ID NO: 92219 - protein, 601 aa, Unknown
  Bacterial polypetide isolated from the Sargasso Sea
MQPTDTKNPDYYHKVVDCQWGCPAHTDVPGYIRHIAQGEYTQAYLLNRESNVFPGILGRVCDRPCEPVCRRARVDEEPVAICRLKRVAGDLKGDFKSHLPAVPSNKNGKKVAIIGAGCASLTVANDLLPLGYEMDVFESLPEMGGLIRSNIPKFRLPPEVIDEEFDVIIEQGINLHLNHPIESMKNLLQEDYDAVLVGTGAPKGRELDLPGRHETDQIHVGIAWLESVAFDHIDQVGEKVLIIGGGNTAMDCCRTSLRLGGKDVKVIYRGERHTMKSSDWELEPALEENVDLVLCHSPEEYIVEDGKLTGMRFSIMEYSVDDEGKRQSKKVDETIIPCDTVILAIGQENSFPWVERDLGIEFDQWEVPVVDPVTYESTLKGVFFAGDAAFGPKNIIEAVEQGHQAAISIHKYCNNESLKERLPHGMNLVTAKMGIHEWSYSNDYDYDDRYEVPTVPMDNRFKDINIEVELGYEPGQFKREVERCLNCDIQTDFEAGLCIECDACIDICPVNCLTITENDEESEIRKKIKTPADNYDQALYVSEDLPQTGRVMVKDEDVCIHCGLCAERCPTAAWDMKKFTLQIPYATEEAIDATQKTKKAV

SEQ ID NO: 92220 - protein, 276 aa, Unknown
  Bacterial polypetide isolated from the Sargasso Sea
GDPPSIASHLIASDIVKKISITGSSRVGKLILKQAADKVQRVTMELSGHSPFIVFDDADIKKAADMAIASKFRNNGQVCISPNRFYIQENKKDEFVNLFVEKAKKLKIGNGMDPDVQLGPITTKKRLNEIEQLVETTKKEGAKVLLGGKRPSGFNKGYYYEPTIFDDVKDDFTIMKIEPFGPLVPMLSFKTFDEVVERANKHELGLASYICTNSMEKAHRASELMETGTVAVNTPVVAIAEAPFGGIKQAGYGREGGSMAIKDYLNVKYTHLGLKG

SEQ ID NO: 92221 - protein, 92 aa, Unknown
  Bacterial polypetide isolated from the Sargasso Sea
PVLSIIPFENEEDAISIANDTPYGLTNYIQTQDKEKIKRVARKLRSGMVDVNGVGIAVASPFGGYKHSGIGREAGTEGLIEFLEVKTVGGWN

SEQ ID NO: 92222 - protein, 305 aa, Unknown
  Bacterial polypetide isolated from the Sargasso Sea
MAIKIGINGLGRIGRMVIRSLYEKNYKNIEIKHINNRSNPETASQLLKYDSIHGKFNCEINSNNNCLIIKNKKITYTQHTKIEDINWKKYGVDFVLECTGKFNSKEKLIPHITNGAKKVIVSAPCKKTDKTVVFGVNENVIQKADKIISAASCTTNCLAPVASVINNNFIIEKGFMTTIHSFTTDQRLLDNSHKDPRRARSAVQSIVPTSTGASKSIGEIIPDLKGKLEGVAMRVPTPNVSLIELVFCTKKNLTVNKINNSLIESSKKTLKGILEVTKEKLVSTDFNHNPNSAIVDSSLTNVVGQ

SEQ ID NO: 92223 - protein, 208 aa, Unknown
  Bacterial polypetide isolated from the Sargasso Sea
MYEKFGQFIDGKWQASSDNATYEVINPATEELLGKASKANIKDVHLALKSAEKGLEVWKKYSPWERSKIIRKISDLIRKKKDILSKWLTLEVGKPISESPGEVEGAADIFEWNSEETKRIFGETNQSRFTNTRIHVYYQPVGVVAALVPWNFPIVLASRKISTALAAGCSVIVKPDVITPGSVMELVNICNEAGVPPGVINLLSGDPS

SEQ ID NO: 92224 - protein, 304 aa, Unknown
  Bacterial polypetide isolated from the Sargasso Sea
MQYKNKLFIDGKWLDGEGGATFDVINPASEEVITKVASAGIEDAKKAINAAEIAFESWAKVSPRDRSVILRKAYELFMDKIEHFAELITLENGKAYGDAKGEALYSAEFFRWYSEEAVRGIGQISHAPATGARIVVQYKPIGISVLVTPWNYPAAMGTRKIAPAIAAGCPVIIKPASETPLTMLELMPLLEEAGVPKGLVSVLPSRNTSKLVDHLLHDNRVRLVSFTGSTEVGRKLLKVASDQVLKTSMELGGNAPLIVFDDADMETAVNGCMVAKMRNLGEACTAANRIYVHENVAEDFKDKF

SEQ ID NO: 92225 - protein, 260 aa, Unknown
  Bacterial polypetide isolated from the Sargasso Sea
MKLIEHFVNGKIIPGSSDKKGKVFNPATGEQESEVRLASKSDLDNAVEVAKKAFETWSLKPALQRARIIFKFKELIEKNSDELTKLIVSEHGKVYEDARGSLTRGLEVVEFACGIPHLLKGEFSENVGTNVDSWSIRQPLGVVAGITPFNFPAMVPMWMFPIAIACGNTFILKPSEKDPSCAIRLAELLTEAGLPEGVFNVINGDKEAVDAILENKDIKAVSFVGSTPIAKYIYENSAKNEKRVQALGGAKNHLVVMPEL

SEQ ID NO: 92226 - protein, 480 aa, Unknown
  Bacterial polypetide isolated from the Sargasso Sea
MYEKFGQFIDGKWQQAEKKETYDVINPATEEVIGKASKASSIEVQKALKSAEKGLEVWKNTAPWQRAYVLRKIADMMREKKDVIAKWLTLEVGKPLTEAVGEVGGGADIFEWNAEETKRIYGQTQQSRFPDTRVHVYYQPVGVVAALVPWNFPIVLASRKISTALAAGCSVICKPDVITPGAVMELVNICKEAGVPDGVVSLLSGDPAEISNELMESDIIKKVSVTGSTRVGKIILKKAADKVQRVTMELSGHSPFIVCEDVDMNKVADIAITGKFRNNGQVCISPNRFYIQENRKDEFVDAFIERAKKLKIGNGMDKGVDLGPLTTAKRLEEIEKLVETTKKEGAKVLMGGQKPSGFNKGYYYEPTVFDDVKDNFTIMKEEPFGPLVPILTFKTFDEVIERANDNDLGLCSYLYTNSMDKAHIGSEKLESGCVAVNTGVVAIAEAPFGGIKQTGYGREGGSGAIKDYLNVKYTHMGLKI

SEQ ID NO: 92227 - protein, 499 aa, Unknown
  Bacterial polypetide isolated from the Sargasso Sea
MTELIGNYIKGTQITTTQGDYQDVFNPATGSVSAQVCMSTTEEVDQAVNVATEAAKDWGRTPSPKRAQVMFRFKRLLEENSDKLARIISSEHGKTHDDALGEVVRGLEVVEFACGIPQLIKGTFSEQVADGIDVYSFPQPLGVVAGITPFNFPAMVPMWMYPNALVCGNSFVLKPSERDPSASMFMAELLKQAGLPDGVFNVVQGGKEAVDAILDHPGISAVSFVGSTPIAKYIYTRATSTGKRVQALGGAKNHMVVLPDADMQQVTDALMGSAFGSAGERCMAISVAVPVGDQVADELMERMTPLVKELQVGPPDDKNAAMGALITRDSLNRIEGLIQSGVDQGAELLVDGRGYKVQGYENGFFLGGTLFDKVRPEMEIYKEEVFGPVLSTVRVNDYQEALDLIHNNPYGNGTAIFTRDGDAARDFVSRIEVGMVGVNVPIPVPVAFHSFGGWKQSLFGDHHIYGPETIHFYTRMKAVTSRWPTGIKSGAVYNFPTLN

SEQ ID NO: 92228 - protein, 77 aa, Unknown
  Bacterial polypetide isolated from the Sargasso Sea
MRSHREGGLGASVWTNDLSAALSLTDSIEAGTVWINTHNMVDPNLPFGGFKSSGIGWEHGAAAIDAYTTPKSISIAY

SEQ ID NO: 92229 - protein, 238 aa, Unknown
  Bacterial polypetide isolated from the Sargasso Sea
SANIIFSDADFERALDAAMVAIFSNNGQQCLAGSRILVEKPIAKEFKKRMVERARNLIIGDPFDSKTEIGPLISKEQIEKVMSFAQTAEESNDTNILCGGKRCESFQKGYYFEPTIVETKSNQNTVCQEEIFGPFATILEFDGIDEAIELANDSEFGLVSYVWSTDIKKIMRAQAEIRAGVVWVNTPLMRELRAPFGGYKNSGIGRDGGEWSRNLFTEEKTVSIPLKDFPITKLGEND

SEQ ID NO: 92230 - protein, 164 aa, Unknown
  Bacterial polypetide isolated from the Sargasso Sea
MYEKFGQFIDGKWQQSSSGETFEVINPATEEIIGKASKANSNDIQKALKSAEKGLEIWRNTSPWERSKIIRKISELMRKKVDTLSKWLTLEVGKPLSEGGGEVGGAADIFEWNSEETKRIFGEINQSRFPNTKIHVIYQPVGVVAALVPWNFPVILASRKIQLL

SEQ ID NO: 92231 - protein, 310 aa, Unknown
  Bacterial polypetide isolated from the Sargasso Sea
CGQPAEATPLCAKAVFQIFEKASFPPGVVNLVTAENPKPIGEMFINDTRIRKITFTGSTKIGKMLAEGAGRGLKRISLELGGHAPFIVCADADPIHAAKGLSLVKFLNSGQACISPNRIYVHAQQEKAFLDELKSRVSKLKAGPGLEQDSKIGPLINQEALEKVETQVQDALKKGAELISGGERIRDDSCADGFFYAPTILSRVTPEMLIYREETFGPVAPVIIYQDEDDLLEMANDTHYGLASYVYTQNLKSAMRLFEGLEFGIVGINDINPTSAAAPFGGIKDSGIGREGASEGIHEYLETKLGGFSI

SEQ ID NO: 92232 - protein, 155 aa, Unknown
  Bacterial polypetide isolated from the Sargasso Sea
MHRVLELQKSLNIKEGAPSLELRSDRLDRVVAMVTKYKSETISALQDDFGNRDPVMSAATEVDSVIGPMMHARKNLKKWMKTEKRKAAIAPLGSALSLLGAKAEIRYQPKGVVGTISPWNFPLNLALAPLAGILSAGNRVMLKPSELTPASSDLT

SEQ ID NO: 92233 - protein, 192 aa, Unknown
  Bacterial polypetide isolated from the Sargasso Sea
MSNDATVIVSDAVRAFVQRDFGLFIGGTQQRAHSERRLDVFNPASGERLATVADADATDVDHAVSNARAAFDARVWSGLRPADRERILLRFADLLEANAEDLAQLETLNQGKSINIARAVEVGATIEYVRYMAGWATKITGETLDVSIPFPPGTRYTAFTRKEPIGVVAGIVPWNFPLMIAVWKLVPALAAG

SEQ ID NO: 92234 - protein, 312 aa, Unknown
  Bacterial polypetide isolated from the Sargasso Sea
MDFGNLKMYINGELTSSHNTMTKDIISPLNDEKIATLAWGSSNDSIRALESAKEGFKLWSNTPTKKRKEWMLLFREKILENEEILRKSISYEMGKPYSATAEDIESITNSLKYYSDIIEDYQSDKEIIDNENTHKHYLISKPIGVVVAYLAWNFPLLNAGFKLGPALASGCSIILKPSELSPLSLYIIGQILDEIDFPKGVVNIICGEPNQVATTLSKSTIPNLITMIGSTETAKKVISDSSTSIKKYSMELGGNAPFIVFDDADIDLAADIGAAIKFGNCGQICVAANRFYIHQNIFDFFLNKLISKAKIL

SEQ ID NO: 92235 - protein, 170 aa, Unknown
  Bacterial polypetide isolated from the Sargasso Sea
MTIKVGINGLGRIGRMIVRAITENKYKDIEIKHINNRSNSEVSSLLLKHDSIHGKLKEDLKFDKNSITLNNKKISFSQETNIEDIKWNKHNVDYVFECTGKFNSKEKLSDHLKNGAKKVIVSAPCKNADKTIVYGVNEKSLNKNDKVISGASCTTNCLAPVVNILNDNLK

SEQ ID NO: 92236 - protein, 349 aa, Unknown
  Bacterial polypetide isolated from the Sargasso Sea
MLDKRKFYINGEWVDPVKKNDFEVINPCNEDPCAIISLGSKEDTDNAVKAAKTAFESFKETTKEERLDLLEKLLAIYKRRFGEMAEAISLEMGAPMDWAAEVQTASGQAHLEDFIIRLKEFEFDEHFDEKSNNHIYYEPIGVCGLITPWNWPINQIALKVVPAFATGCTMILKPSEIAPISAMLFAEMIDEVGFPKGVFNLVNGDGVGVGTQISSHPDIDMVSFTGSTRAGRLISKNAAETIKRVCLELGGKGGNIVFADSYKNAVRDGIRNVMSNSGQSCDAPTRMLVEKSIYQRAVDEAVDEANKIGVDQASKKGDHIGPVISKTQYDKIINLIESGIKEGATLAAG

SEQ ID NO: 92237 - protein, 238 aa, Unknown
  Bacterial polypetide isolated from the Sargasso Sea
MDTINHFIEGKKFTDKNSRKGKVFNPATGEQIAEVELASKDIVNMAVESSSKAFVKWSKTTPITRARIFSKYKDLLVQNMSEIAELVSKQHGKTIPDAKGSIQRGIEVVEYVTGITSSLKGEHSSNVGTNVDSHTLRQPLGVCAGITPFNFPAMVPMWMFPVAIACGNTFVLKPSEKDPSCPIRLGELAIEAGFPPGVLNVVNGDKESVDALLENKDVQAISFVGSTPIAEYVYHTRN

SEQ ID NO: 92238 - protein, 474 aa, Unknown
  Bacterial polypetide isolated from the Sargasso Sea
MRTERNYVNGRFVAPESDTFIVVHNPATEAPFARVPAATPADARAAVDAAAAAQKAWRKLPSAERAAYLHRFADALTARASEIGAALAQESGKSVEDASNEAVYAGQITRYHAEWARRIEGEIIPSDTPDENLFLQREPIGVVACLIPFNYPVYTLLRKVAPALIAGNTVVVRPSNHTPVSAFEIAKAADDAGFPPGVVNILAMDHATAEALCTHPAVGMITLTGSVNAGRKVLDYCKANIAKPSLELGGKTPAIIEPDADLERAAAALVASKTTHCGQLCTAIERVYVHDSVHDRFVALLKEKMAAVRIGDRAEDASRMGPLVSASARAHIHEMVERAIAAGATLETGGAIPAGPGFFYPATLLTGVRQDMEIVQEETFGPIMPVLRYTTIDEAIALANDHQFGLSSVLYTERYRTAMTVANAIEAGELYVNRTPADPYQGFHAGWKRSGLGGDDGKHGMLEFTQTRLVVMKY

SEQ ID NO: 92239 - protein, 296 aa, Unknown
  Bacterial polypetide isolated from the Sargasso Sea
NWVKQQGCVIVSQSGELAPADRRLYLIRDVTATVESIPLITASILSKKLAAGLQALTMDVKIGSGAIMKNVADASALAKSIVNTAKGAGVPTQALLTDMNQTLGATAGNALEILETLDYLTGKYREPRLHQVTLELGASMLQLGGLFNDKASAIAALEQSLTSGKAAEIFSKMVAAQGGPADLLEKPELYLAKAKVVLDIKAPVAGYLNKADTTAIGMAVVRLGGGRAHPDQVINMAVGFSEVKALGEKVAAGDLLARVHADTMEAAEHAKNEYLAALTIEATAVTIDPIIHLVID

SEQ ID NO: 92240 - protein, 295 aa, Unknown
  Bacterial polypetide isolated from the Sargasso Sea
HGPFNGSITVDHERNALKANGSYIQVIYANSPDEVDYTQYGIDNAIIVDNTGIWRDRDGLGLHLKAKGAAKAILTAPGKGDIKNIVHGVNDEEVTPEDTIVSAASCTTNAITPVLKALDEEYGIENGHVETVHSYTNDQNLIDNYHKGDRRGRSAPLNMVITETGAAKAVAKAYPKLAGKLTGNAIRVPTPNVSLAILNLNLKTPVDRIAVNEFLRDTALFSKLQHQIDYTASKEIVSTDLVGSRAASVVDSQATIAADNRLTLYVWYDNEFGYSCQVLRVVRDMAGLSFPTLPL

SEQ ID NO: 92241 - protein, 652 aa, Unknown
  Bacterial polypetide isolated from the Sargasso Sea
IGPAARSRAWEKARQLVVNIREAQVGKGGVDALLNEFSLSTEEGLVLMCLAEALLRVPDKHTADLLIRDKLSNGDWSSHLGNSESLFVNISAWGLLLTGKLVNYSDDQKKAQFGLLKRTCGRMGEPVIRQAVRYAMQIMGTQFVMGTSIEKAVERAVELESKGFTYSYDMLGEGARTMDDANRYFDSYMMAIKVIGTAAKKRGPLKSPGISVKLSAIHPRYEFTHRDRVISELVPRLKQLAIAAKAYDISFTVDAEEADRLDLSLDIIEAVFSDPELNGWEGFGLAVQAYSKRGLFVIEWLRELTVKVGRKMMVRLVKGAYWDTEVKISQTEGLSDFPVFSRKPSTDVSYQACAKKMLEYRDSIYPMFATHNAYTVATILEMAPDRTGYEFQRLHGMGDALYDQIVADDKVPCRIYAPVGEHSDLLAYLVRRLLENGANSSFVNNIVDETIPVESLLKDPVETVRAWSKKRNNSIPLPHQLYGAARLNSKGQDFTDIDQVTAMREAMDTWLASVSQIEVPAGAFAVTNPANTKEVIGFHHHSTAEQMQQTVALAEAAFPAWSATAVTERALLLNKLADQLELHRDELLALCIKEAGKTVGDSMAEVREAVDFCRYYAAEATKNLQAAQARGVVLCISPWNFPLAIFLGQVSA

SEQ ID NO: 92242 - protein, 296 aa, Unknown
  Bacterial polypetide isolated from the Sargasso Sea
MNLIQHFVNGKIIPGKSDRRGKVFNPAIGEQESEVILGLKSDLDEAVDVAQKAFETWSLKPPIQRARIMFKFKELIEKNSDELTKMIVSEHGKVYEDAKGSLIRGLEVVEFTCGIPQVLKGEFTENVGTDIDSWSIRQPLGVCAGITPFNFPAMVPMWMFPMAIACGNTFVLKPSEKDPSISIKLAELFQEAGLPNGVFNVINGDKEVVDAILTNKDIKAVSFVGSTPIAKYIYENAAKNEKRVQALGGAKNHCVVMPDCDLDQAVNGLMGAAYGSAGERCMAQSVAVAVGNIGDN

SEQ ID NO: 92243 - protein, 304 aa, Unknown
  Bacterial polypetide isolated from the Sargasso Sea
MIKPSEYTPATSQLIKDLLEEAYSPEEVVVVLGGPDVGKAFAEMPFDHLLYTGSGSVAKHIMRSAAENLVPLTLELGGKSPVIIGESADLEVATNNIMAGKTLNAGQICLAPDYVFLPEGRKEEFLQHASNSVSEMFPNLKDNPDYTSVINQSHFERLNELVSDAKEKGAEVIKLNPADEDFSQQENFRIAPTLIFNPGEEMKIMQEEIFGPLLPVKEYKQVEETITYVNSKDRPLGLYYFGTDDEEQRKVLDKTTSGGVTINDVIMHVTQEDLPFGGVGPSGMGSYHGQDGFKTFSHLKSIYT

SEQ ID NO: 92244 - protein, 230 aa, Unknown
  Bacterial polypetide isolated from the Sargasso Sea
MKRQIAYFIVIFVGFLALIGHFINYAPLNNFIDNDATQWFDIISGFAAFLGVISLLNLHIKKIIYKRPNWQYSIITTLSFLIMLFFGFIYIGIDVPRGAHLKAEGSAFYWMFNNIYLPLASSMFALLAFFVASASYRAFKIRNFEATLLLISGVLLMLGRVPIGQIIPWWFSVELYILILFAVIAGLFSNKRTLVLFMVFSMVTFPVLIYSFDLTALKLFSIPDGTGVDF

SEQ ID NO: 92245 - protein, 284 aa, Unknown
  Bacterial polypetide isolated from the Sargasso Sea
AALAAGCTMVLKPSEISPYCAMLLAEVFDKAGVPNGVFNVVNGYGPTVGAALSEHPDVAMMSFTGSTRAGIAVAQASAVSVKRVHQELGGKSSNIILDDVADLEKSVKGGAGHCFLNSGQSCNAPTKMLVSAKNYDKAVEVAVATANNTTVGDPNGEFRIGPIANKTQYEKIIKLIEIGIEEGATLVAGGVEKPEGCEKGYYVRPTVFANVTNDMTIAKEEIFGPVLVMIKYESEDEAISVANDTEYGLAGYVQGEPEHAREVAGKIRAGQVIINGGARGTGAP

SEQ ID NO: 92246 - protein, 189 aa, Unknown
  Bacterial polypetide isolated from the Sargasso Sea
MIFKNFINNEWCDAQNCKTFEVINPFTEKVITNVPASDEKDVAIAVEAAKNAFYDWSNLTAGERRDHLRALANRSREHAEEIAKTISSEMGKPYKDALTEIDDLAEYLEYYSELARDQVGRMVAPVDQKSMSLVRYEPYGVVGCIIPWNYPLSLMGWKLAPALAAGNTIIMKPSEITSLSILHWAELVV

SEQ ID NO: 92247 - protein, 191 aa, Unknown
  Bacterial polypetide isolated from the Sargasso Sea
RLLVEKSIYERAVKEAIEVAEKTEVDVANKPGKHIGPVVSKVQYDKIQNLIHKGIEEGAKLVAGGPDRPSHLKKGYFVKPTVFANVNNEMTIAKEEIFGPVVSIIPFTTEEEAIKISNDTAYGLTNYIQTNDTNKAHRVAKQLRSGMVEINGVGFADGSPFGGYKQSGNGREGGKWGIEEFLEVKSISGWK

SEQ ID NO: 92248 - protein, 330 aa, Unknown
  Bacterial polypetide isolated from the Sargasso Sea
TEEVIGHASKASPTDVDKALKSAEQGLEIWKKTSPWKRSSIIRNIADLIRAKQDVLAKWITLEVGKPFIEGKGEVGATADIFEWNSEETKRIYGQTVESRFEETRIHVYYQPIGVVAAMSPWNFPLVLSGRKISTALAAGCSVIIKPDVIAPGGTMELVDICREAGVPPGVVNLLSGDPPSIASQLISSDIIKKISITGSTRVGKLILKQAAEKVQRVTMELSGHAPFIVFDDANIEKATDMAIASKFRNNGQVCISPSKFYIQDKMKKDFINLFIEKAKKLKIGNGMDADVQLGPITTKKRLNEIEDLVDKTKKEGAKVLLGGKKPSGI

SEQ ID NO: 92249 - protein, 251 aa, Unknown
  Bacterial polypetide isolated from the Sargasso Sea
EVGRKILEYSSLSNLKRVYLELGGKSPNIVFADTPNIDTAVTQSLGGIFRNSGQVCVAGSRLIIEESIADEFTEKLINQSKDLVVGDPLNLNSNFGAVSSNEQLIKNLKYVNSAIDDGAKLRIGGKQINKNTGGFYMEPTIFSDVDNQMTIAKEEVFGPVLSVIKCKNEEDAVQIANDTNYGLAAAVWTSDLSKAHRMIKSIRAGVVHVNCYGGADITVPLGGVKQSGNGHDRSLHALEKYTDLKTAWISL

SEQ ID NO: 92250 - protein, 149 aa, Unknown
  Bacterial polypetide isolated from the Sargasso Sea
QFNKIQGLIQKGIDEGAKLVAGGIGKPNGLNDGYYVKPTVFADVKNEMEIARTEIFGPVLSVIPFETEEEAIKIANDTDYGLTNYIQTQDKEKVQRVARKLRSGMVDVNGAGIAVDAPFGGFKHSGIGREAGKEGLLEFLEVKSVGGWN

SEQ ID NO: 92251 - protein, 320 aa, Unknown
  Bacterial polypetide isolated from the Sargasso Sea
LATMKIAGAIAFGNSCILKPSELTPLGFVPFMNLLKKAGLPDGVINMVNGRGSVTGTAITQNENIDVIAFTGGTETGRVIGAESGKTLKKIVTELGGKSANIIFSDADFERALDAAMVAIFSNNGQQCLAGSRILVEKPIAKEFKKRMVERARNLIIGDPFDSKTEIGPLISKEQIEKVMSFAQTAEESDDTNILCGGKRCESFQKGYYFEPTIVETKSNQNTVCQEEIFGPFATILEFDGIDEAIELANDSEFGLVSYVWSTDIKKIMRAQAEIRAGVVWVNTPLMRELRAPFGGYKNSGIGRDGGEWSRNLFTEEKTV

SEQ ID NO: 92252 - protein, 273 aa, Unknown
  Bacterial polypetide isolated from the Sargasso Sea
MSEIKTYKYYAGNKWYEPSSGQYFESEDPSNGKVWAKLPDCNEVDINIAVKSAKKAYYEGPWGKIHSAERGRILNRIGDIIAKNAERIGQIETKDNGKLPKNITPSLTSWQTESFYYYAGMCDKFEGRLIPSEVPNMHNYLKWEPFGVVALVLPWNSPIGTLIWKLAPALAAGNTVIIKPSERASCSTLELMSILEEADLPEGLINVVTGFGKTTGAPLIEHDDVRMISFTGGTKGGSAASLSASKKVKPIIMELGGKSPQIIFKDADLNLAV

SEQ ID NO: 92253 - protein, 133 aa, Unknown
  Bacterial polypetide isolated from the Sargasso Sea
LLSGGISDIKQKGFYAKPTLFDGLKENMTIAQEEIFGPVLGVLTVKNDEEALKVASNSKYGLHASVFTQDINRAFHLAKSLPCGTVSVNTFSEGDIKTPFGGYKQSGSLSRDQGTEALNSFLQTKTIWISHNN

SEQ ID NO: 92254 - protein, 286 aa, Unknown
  Bacterial polypetide isolated from the Sargasso Sea
MYGFGRIGRLVSRIMAQMTGPGNYYRLRAIVVRKGSDTNDLLKRASLLRRDSVHGSFHGTIRVDNETETLVINGNPVKIIYANGPKDFNYSDYDIDNPIVIDNTGVWREEKDLSLHLESGASKVVLTAPAKGQIKNIVNGINNDILNESDNVISAASCTTNAIVPVLDILNKEYSITSGHIETVHAYTNDQNLIDNYHKKDRRGRSAALNMVITSTGAVKAVSKALPELDGKLTGNAIRVPTPNVSLAVMSLSVDKNDLNKDDVNEFLRKTAFNSKYREIVGFVNS

SEQ ID NO: 92255 - protein, 242 aa, Unknown
  Bacterial polypetide isolated from the Sargasso Sea
MDYKNYINGKWVEAKSGKTFPVENPFNQEIISHVPDSDNHDVNEAVSAANTAYSDWHKMSASERRDLMKELANKSRENANELAKTISMEMGKPFPEALDEIDTVADFLEYYGELARDEVGRIVAPVDRNTMSLVRYESIGVIGCIIPWNYPLALMGWKLAPALAAGNTVVMKPSEITPLSILHWCNVVDSVLPDGVINVITGFGQSAGEPIVNHPDVPVVTFTGSVATGKKIAKFAAENLKK

SEQ ID NO: 92256 - protein, 302 aa, Unknown
  Bacterial polypetide isolated from the Sargasso Sea
ERLVTAQSQETGQLRHFIEKEEIAASCDAIRFFAGAARCLEGKAAGEYSAGFTSTIRREPLGIVGQVTPWNYPFMMAVWKIAPALAAGNTVVLKPSDTTPVSTLLLAELAAPLFPRGAFNVVLGKASTGSLVVSNPKASLVSITGSVRAGLQVAASAAANLTRAHLELGGKAPAVVFADADMDKAIATITTAGFFNAGQDCTAATRILVEQSIYAEFLEKLIQKTKSIKFGPPEDQNALYGALNSRNQLEQVKGFIERLPAHAKIETGGRAGPGPGFYFEPTIVSGLHQNDEAIQHEVFGPV

SEQ ID NO: 92257 - protein, 141 aa, Unknown
  Bacterial polypetide isolated from the Sargasso Sea
IQKGIDEGAKLVAGGIGKPKGFEKGYYVKPTVFADVNNQMEIARTEIFGPVLSIIPFENEDDAISIANDTPYGLTNYIQTQDKEKIKRVARKLRSGMVDVNGVGIAVASPFGGYKHSGIGREAGTEGLIEFLEVKTVGGWN

SEQ ID NO: 92258 - protein, 273 aa, Unknown
  Bacterial polypetide isolated from the Sargasso Sea
MEKYKNYINGEFLDSKSGKTFKTINPYTEIEFAEVAEAEEFDVNLAVESAAKAFNGEWSKLLPNERAKYLRAIGDQLLQNAEKLGTIETQDTGKLFKETKFQANYIAEFYYYYAGLVDKVEGSTLPIDKEDMHVFTTRVPVGVIAAVIPWNSQMFLTAVKLAPALAMGNTIIIKASEVAPTPLLEFAKLIDKVNLPKGVVNIITGFAENCSKILTSHPKVDRIAFTGGVQTAKHIVKNSAKNLSQVTLELGGKSPVVIFKDARKDNAINGVLA

SEQ ID NO: 92259 - protein, 314 aa, Unknown
  Bacterial polypetide isolated from the Sargasso Sea
MLAELLKEAGLPDGVFNVINGDKEAVDLLITDPHIESVSFVGSTPVAEYIYHTSSKHNKRVQSLGGAKNHMVVMPDADLDQVIDGLIGAGYGSAGERCMALSVAVAVGDVGDRLIEKLTPRVQSLKVGPGTDPEVEMGPLISKVHLQKVQSYVDKGVSEGADLLVDGRSIALQGYEDGYFIGGCLFDNVKQDMTIYKEEIFGPVLSVVRQQSFDDALNLINDHEFGNGTTIYTRDGDTARSFTNQCKIGMVGVNVPIPVPMAFHSFGGWKRSLFGDHAMHGMDGVRFFTKLKTVTSRWPTGIRKGAEFIIPTMK

SEQ ID NO: 92260 - protein, 321 aa, Unknown
  Bacterial polypetide isolated from the Sargasso Sea
MWMFPMAIACGNTFILKPSEKDPSCSLRLAELLTEAGLPDGVFNVINGDKEVVDAIIENKKISAVSFVGSTPIAKYIYENCAKNEKRVQALGGAKNHCVVMPDCDLDQAVTGLMGAAYGSAGERCMAQSVAVAVGDIADNLVKKLTKKVEVLKVGPGMDKTSEMGPLVTKEHLNKVKNYVDIGVKEGAKLVADGRNLKLQGYENGFFMGGCLFDNVSSEMRIYREEIFGPVLSVVRVKNFEQALKLVNEHEYGNGVSIFTRDGDTARAFTNQAKIGMVGVNIPIPVPMAFHSFGGWKRSLFGDTHIHGPEGVKFYTKLKTI

SEQ ID NO: 92261 - protein, 282 aa, Unknown
  Bacterial polypetide isolated from the Sargasso Sea
VAQIGKEAGIPDGVLNVLPGYGDVGEALGRHKDVDAVSFTGSTEVGGYFLKYSSESNLKPVALEMGGKSPFIVLEDAKITDDLIDNAMNSAFWNGGQNCSANMRQIVHKKVKDEFLDKVIKKVKKLKVGDPLDLKSNMGSMISKGHLQTVDGYIQKGIDEGAKLLSGGISSKQQKGFYAKPTLFDGLKENMTIAQEEIFGPVLGVLTVKNDEEALKIASNSKYGLHASVFTQDINRAFHLAKSLPCGTVSVNTFSEGDIKTPFGGYKQSGSLSRDQGTEALN

SEQ ID NO: 92262 - protein, 296 aa, Unknown
  Bacterial polypetide isolated from the Sargasso Sea
GRIGRMIVRSIFENYKGKIVIKHINNRSGSEICANLLKYDSIHGNFSSLVKSGENYIKINKEKISYTQHSIINDIKWKKYGVDYVFECTGKFNSKDQLLPHIVNGVKKVIVSAPCKMADKTIVFGVNHKNVNKNDKIISAASCTTNCLAPVADVINKNFIILNGFMTTIHAFTSDQRILDNSHKDPRRARSASQSIVPTSTGASKAIGEIIPSLKGKLEGVAMRVPTPNVSLIEFIFNVKKNITIKKLNNSLFTASKSKLKNILNVTDEKLVSVDFNHNSASAIIDSSLTNVVGNK

SEQ ID NO: 92263 - protein, 297 aa, Unknown
  Bacterial polypetide isolated from the Sargasso Sea
KLAEGAQAATGLGHLKTAMRVLENHEFEYKHGDYIVREEPIGVCGLITPWNWPINQIVSKVAPAFAAGCTVILKPSEIAPLSAMIIAEIMHESKIPAGMFNLVNGLGNIVGEAMSAHKDIDMMSFTGSTRGGVAVATASAATVKRVSQELGGKSANIILDDDSFTKSITNGVTHVMSNTGQSCNAPTRMLVPLSRHDEALDIAKNSIENIKVGKPDDINTDLGPLVSITQYNKVQNLIEKGIEEGAQLVSGGKGKPDGFEKGYYVKPTIFGNVSNNMIIAKEEIFGPVLSIIPYDNI

SEQ ID NO: 92264 - protein, 350 aa, Unknown
  Bacterial polypetide isolated from the Sargasso Sea
SITTQHGKVLSDAQGEITRGLEVVEFACGIPHAQKGEFSLNVGREVDSFSLMQPLGVCVGITPFNFPVMVPMWMFPIALACGNTFVLKPSEKDPSPSLKIAELLLEAGLPEGVFNVVNGDKQAVDLLLQHKTVQAVSFVGSTPIAEYIYSESSCNGKRCQALGGAKNHLVIMPDAETSEVVNALTGSAFGSAGERCMAISVAVCVGEKTGDRIVESLKTASESLRIGPGLSTENEPDLGPLITGDHKRKVKSYIESGVEQGAKLVLDGREAEAAKSSSGFFIGPTIFDFVKPSMDIYLDEIFGPVLSVVRVDSLADAIGLINDHQFGNGTSIFTNDGGNARVFQEEIKVG

SEQ ID NO: 92265 - protein, 323 aa, Unknown
  Bacterial polypetide isolated from the Sargasso Sea
MSSGNKFKVIASKLKFEGRAFINGKYVNAIDGKKFETINPATGKKLCAVAKCNHKDVDLAVKVSRKAFNSGVWSKSSPEYRKEILLKFAELLRKHGDENSVLESIDTGKLITDCINEVANDAPMHFQWYGELIDKVFGKVGPTEPSITSLIVKEPIGVVAGIVPWNFPLMMAVWKMAPALAAGCSVIIKPAEDTPLTAIRVAQIGKEAGIPDGVLNVLPGYGDVGEALGRHKDVDAVSFTGSTEVGGYFLKYSSESNLKPVALEMGGKSPFIVLEDAKITDDLIDNAINSAFWNGGQNCSANMRQIIHKKVKDEFLDKVIKKV

SEQ ID NO: 92266 - protein, 109 aa, Unknown
  Bacterial polypetide isolated from the Sargasso Sea
TMLQTTMRIAKEEIFGPVLSIIPFETEDEAVNIVNDTSYGLGNYLQTEDREKAHRVAKKLRSGCVYINGNGADAGTPFGGYRQSGNGREGGVWGLEEYLEVKTVTGWKD

SEQ ID NO: 92267 - protein, 304 aa, Unknown
  Bacterial polypetide isolated from the Sargasso Sea
MVENHNAVIEYRPLGPILAVMPWNFPLWQVLRGAVPILLAGNSYLLKHAPNVLGSADLIGQIFADAGFPEGVFGWVNATNDGVSQAINDRRIAAVTVTGSVRAGAAIGAQAGAALKKCVLELGGSDPFIVLNDADLDLAVKAAVAGRYQNTGQVCAAAKRFIVEAGIADTFTRRFVDAVAALKMGAPEEEENYLGPMARFDLRDELHQQVQATLAEGATLLLGGEKISGEGNYYAPTVLTNVTPSMTAFRQELFGPVATVTVAKDAEHALTLANDSDFGLSATVFTADAALADKFSRETWSAAG

SEQ ID NO: 92268 - protein, 184 aa, Unknown
  Bacterial polypetide isolated from the Sargasso Sea
MDKVIKNFQNITYGPAPEDSKEVNSWIKNLKNPNNNFINGKFVKSSSSKKLNIINPSTNKKIATLSIASKKDVNTAVSAAKKAHIKWSKLSSFDRSKYLYALARLIQKNSRFISVLETIDNGKPIRETRDIDIPLVARHFYYHAGWAARNTNNSDNSIGIVGQIIPWNFPLLMLAWKIAPAIAL

SEQ ID NO: 92269 - protein, 343 aa, Unknown
  Bacterial polypetide isolated from the Sargasso Sea
RARVMFKFKELIEKNSDELTRIIVSEHGKVYEDAKGSLVRGLEVVEYACGIPQMLKGEFTENVGTGVDSWSTRQPLGVCAGITPFNFPAMVPMWMFPMAIACGNTFVLKPSEKDPSCSMRLAELLKEAGLPDGVLNVVNGDKEAVDALINNRDVVAMSFVGSTPIAKYIYENCAKNEKRVQALGGAKNHCVVMPDCDLDQAVNGLMGAAYGSAGERCMAQSVAVAVGSIGDKLVDSLAKKVEALKVGPGMDKQSEMGPLVTKEHLSKVKSYVDIGEKEGAKLVVDGRNFKMQGYENGYYIGGCLFDHVKKDMRIYKEEIFGPVLSVVRAKDFNEALKLVNDHE

SEQ ID NO: 92270 - protein, 116 aa, Unknown
  Bacterial polypetide isolated from the Sargasso Sea
ETNNSSRISQEEIFGPVVSVIKFKDEAEALEIANDTLYGLGAGVWTRNGNIAYRMGRAIQAGIVWTNCYHAYPAHSPFGGYKQSGVGRETHKMMLSHYRQNKNLHVSYAEKKLGFF

SEQ ID NO: 92271 - protein, 118 aa, Unknown
  Bacterial polypetide isolated from the Sargasso Sea
EKGLLCKTQQVFANVTNDMTIAKEEIFGPVLSIIKYENEDEAIELANDTEYGLAGYVQGEPSHAKEVARKIRAGQIIINGGARGTGAPFGGYKSSGNGREHGLHGLEECLETKAVISP

SEQ ID NO: 92272 - protein, 149 aa, Unknown
  Bacterial polypetide isolated from the Sargasso Sea
LSDVYHTDVRRARAAAMSMIPTQTGAAAAVGLVVPELKGKFDGLAVRVPTLNVSLVDLSFIAGRNTTVEEVNDIIRKAAAQSPMNQVLAVNDLPLVSVDFNHNPMSSIFDASETRVNGRLVKVMAWYDNEWGFSNRMLDNTVELMKHSQ

SEQ ID NO: 92273 - protein, 183 aa, Unknown
  Bacterial polypetide isolated from the Sargasso Sea
DFINKVVQLSKKMQPSDPLNPDSFAGAIVNTEQLEKIHKYVNIGKKEGANIEVGGNITMKETGGCYFEPTIFKNVKNNMKIAQEEIFGPVLTTLSFSNFEEAVSIANDSEYGLAAGVWTNDINKAIRASREIRAGTVYINNYEEGVDSTIPLGGYKQSGIGRDNGAQALENYLQVKSTWIKIT

SEQ ID NO: 92274 - protein, 314 aa, Unknown
  Bacterial polypetide isolated from the Sargasso Sea
SHQSCTNEVCGTCAAGNEKDIDKAVAAAKESFKAKTWRKMAPRKRMGIMMKFADLLQANTAELALMDSMNMGKPISDCLNVDVPASAVNIRFMAECIDKMYGKVANTHEKALNLSVREPYGVVGLISPWNYPLLMGVWKIAPALAAGNSIVLKPDEHSPHSCIKMAELFVEAGGPPGVFNVVTGHGEEAGQSLALHQDVSKIGFTGSTEVGKLLLQYAGQSNMKKVSLETGGKSPMIYFADLPDMELAVSTAYDSIYANMGEVCNAGSRIYVERAIYADFVDQFIAEGQGAYTPGDPLDPETNMGPLMSAQAQK

SEQ ID NO: 92275 - protein, 252 aa, Unknown
  Bacterial polypetide isolated from the Sargasso Sea
MEQLNFYINGSWVKPNGVETLDVINPASEEKVTKISLGTANHVNEAVAAARTAFETYSQTPVEQRIDLLTTIREIYKRRLDDVADAIQTEMGAPTYLAKGAQAMVGLGHLKAAIRSLTNHNFEYEHGSFIIRHEPIGVCGLITPWNWPVNQVVSKLAPCLAAGCTAILKPSEIAPLSSMVIAEILDEAKVPAGVFNLINGMGPVVGEAMSAHPDIDMMSFTGSTRGGVAVAKASADSVKRVSQELGGKSANI

SEQ ID NO: 92276 - protein, 306 aa, Unknown
  Bacterial polypetide isolated from the Sargasso Sea
STEMQAATGASHIKSFKNILKDFKFEKDLGEEKNNQKLLYEPKGVCALITPWNWPINQVNLKVIPALASACTVVLKPSEIAPLSSMLLAEMIDEVKFPPGVFNLINGDGAVTGDALTSHPDINMISFTGSTRAGALISQNAAKDFKRISLELGGKGANIIFKDADSEAVARGVLRCFRNSGQSCNAPTRMLVEKSIYNETVEKVKELANNTKVDSPQKDGDHIGPVVSEVQFNKIQTLIQKGIDEGAKLIAGGTGKPKGFEKGYYVKPTVFADVNNQMEIARTEIFGPVLSIIPFENEDEAISIAN

SEQ ID NO: 92277 - protein, 333 aa, Unknown
  Bacterial polypetide isolated from the Sargasso Sea
HSLWNSFILKPSEKDPSCSIKLAQLFSDAGLPDGVFNVIQGDKRIVDQILSSPEISAVSFVGSTPVAKYIYEESAKNLKRVQALGGAKNHLIVMPDANLNQAVDGVIGAGYGSAGERCMAVSVAVAVGDIADDLVEKINIQSQKLKVAPWTDAESDMGPVISKEHKEKIENYISSGVKEGAKLVADGRNYKIQGYENGYFLGPTLFDNVTKDMKIYKEEIFGPVVSVVRAKNYDEALNLVNKHNFGNGTSIYTSDGEIARHFTTNAKIGMVGVNVPIPVPMAFHSFGGWKQSLFGDHSMHGMEGIHFYTKLKTVTSRWPKSISEGPEFVYQQI

SEQ ID NO: 92278 - protein, 189 aa, Unknown
  Bacterial polypetide isolated from the Sargasso Sea
TSKSIKDEFLEKVVSYSQPWMPGNPFDPNTLMGSIVDKTQTERIMNYIDKGKSEGANVITGGDQVLQDSGGYYVSPTVFKDVQNSMTVAKEEIFGPVLCAIDFENEDEALQIANDTHYGLNAMIWSNDLNKVHKLAKRIKSGKVLINSLSDGDMSLPHGGYKQSGSGRDKSLEALGQYTQTKLTLIEVK

SEQ ID NO: 92279 - protein, 174 aa, Unknown
  Bacterial polypetide isolated from the Sargasso Sea
MKVSSALDTSHLKVKYPFKPKYGNFINGKFVEPKSGKYFDNPSPITNETICSVARSNEQDVEAALDAAHAAFPKWGKTSITERSIMLNKIADVLEANAQLLATAETMDNGKPIRETAGADIPLTIDHFRYFASVIRAEEGSVAEISNDMYAYHIPEPLGVVAQIIPWNFPLLMA

SEQ ID NO: 92280 - protein, 314 aa, Unknown
  Bacterial polypetide isolated from the Sargasso Sea
MGKASKASPEDVDRALKSAEKGLQVWKKTPPWQRSYIIRRIADKMREKQDILAKWMTLEVGKPLAEAKGEINGAADIFEWNAEETKRIYGQTVESRFEDTRVHVYYQPVGVVAALTPWNFPAVLSARKISTALAAGCSVIIKPDVITPGVVMQMVDICRECGVPPGVVNLLSGDPPSIAQQLISSDIIKKVSITGSSRVGKLILKQAADKVQRVTMELSGHSPFIVFDDADIKKASDMAIAAKFRNNGQVCISPNRFYIHESKKDEFVNLFIEKTKKLKIGDGMDPSTQLGPLTTKKRLNEIEELVEKTKQEGA

SEQ ID NO: 92281 - protein, 262 aa, Unknown
  Bacterial polypetide isolated from the Sargasso Sea
MDKLLRFRKDFKEIYVGGRWWPIEASFEDINPSDNSLWATVPDVEVKDVQNAITSADHAFENWSNLKFNERSHYMIKIAEVLEENKMDIVKALRAEAGGWFGKAMFEAGYLPELFHAAAAANYQAIGEVIPSDSGKFSMAVRRPIGVISVISPWNFPCILTARGMAFALAAGNTVVLKPSEETPYTGGLLWAEIFEEAGVPGGVLNVVTCSRENVAEVGTELVENPLVKGVSFTGSTPVGREIAARAGAHLKKCCVELGGKD

SEQ ID NO: 92282 - protein, 158 aa, Unknown
  Bacterial polypetide isolated from the Sargasso Sea
TDLTPVISENQLQKVEGYARSGIQEGAEAAYGGKRLEREGYFMEPTVLNNVKQSMTVAREEIFGPVLSVLEYEDQEEAIDIANDTEYGLGAGVFTKDLKKASWTASKLEAGQVYVNKWFTGNHATPFGGYKQSGYSREKGVDGLKSYLQVKNVGISLV

SEQ ID NO: 92283 - protein, 306 aa, Unknown
  Bacterial polypetide isolated from the Sargasso Sea
KFEGRAFINGKYVNAIDGKKFETINPATGKKLCVVAKCNHKDVDLAVKVSRKAFNSGIWSRSSPEHRKEVLLKFAELLRKHGDENSVLECIDTGKLITDCINEVANDAPMHFQWYGELIDKVFGKIGPTEPSVTSLIVKEPIGVVAGIVPWNFPLMMAVWKMAPALAAGCSVIIKPAEDTPLTAIRVAQIGKDAGIPDGVLNVLPGYGDVGEALGRHKDVDAVSFTGSTEVGGYFLKYSSESNLKPVALEMGGKSPFIVLEDAKITDDLIDNAINSAFWNGGQNCSANMRQIVHKKVKDEFLDKSY

SEQ ID NO: 92284 - protein, 105 aa, Unknown
  Bacterial polypetide isolated from the Sargasso Sea
MTIAQEEIFGPVLGVLTIKNDEEALKIASNSKYGLHASVFTQDINRAFHLAKSLPCGTVSVNTFSEGDIKTPFGGYKQSGSLSRDQGTEALNSFLQTKTIWISHN

SEQ ID NO: 92285 - protein, 121 aa, Unknown
  Bacterial polypetide isolated from the Sargasso Sea
DQGAFVMPTIWTGLSDDARCVKEEIFGPVCHIAPFDSEDEVIGRVNDSAYGLAASIWTTQLSRGHRVARQIETGIVWVNAWFVRDLRTPFGGTKLSGIGREGGRHSLDFYSELTNVCVRIA

SEQ ID NO: 92286 - protein, 298 aa, Unknown
  Bacterial polypetide isolated from the Sargasso Sea
EGFAVISLGSKEDTDKAVSAAKVAFETWKETSKEERIKLLEKFCEIYNRRWDEMVEAQSMEMGAPLDFASETHTKMGADISKNVIEILKDFNFEHQFDPKSNNQIRYEPIGVCGLITPWNYPMNQIVLKVIPALAAGCTMILKPSEVAPVSGVLFAEIIDEAGFPPGVFNLINGNGEVVGNHISGHPDIDMVSFTGSTRAGKLIQKNAADTIKKVTLELGGKGGNIVFEDSYPDAVRDGVRTIMSNTGQSCDAPTRMLVQRSIYDRAVKEAVDEANKIKVDVASKKGDHIGPLVSKVQ

SEQ ID NO: 92287 - protein, 290 aa, Unknown
  Bacterial polypetide isolated from the Sargasso Sea
CRYSDDVDKAVAAAKAAFVDFSFSTKEERVEILENIITEYEKRSEELAETISKEMGAPIWLSQVAQVASGLTHFKDTLNVLKGYDFEYEKDGYLVRKEPVGVVGMITPWNWPMNQMCTKVASGIAAGCTMVLKPSEITPFCGIILAEIIHDAGVPAGIFNLVNGMGPVVGASMSEHKDIDMMHFTGSTRAGVAVAQASAPTVKRVAQELGGKSANIVLDDADIEKAVSAGVSSCFLNTGQSCNAPTRMLVSSKNYDKAVEVAANTANAMKVGDPFDADTKMGPISNKTQY

SEQ ID NO: 92288 - protein, 158 aa, Unknown
  Bacterial polypetide isolated from the Sargasso Sea
MGSMISEGHLKTVDGYIQKGIDEGAKLLSGGVSNNKQKGFYAKPTLFDGLKENMTIAQEEIFGPVLGVLTVKNDEEALKIASNSKYGLHASVFTQDINRAFHLAKSLPCGTVSVNTFSEGDIKTPFGGYKQSGSLSRDQGTEALNSFLQTKTIWISHN

SEQ ID NO: 92289 - protein, 210 aa, Unknown
  Bacterial polypetide isolated from the Sargasso Sea
MIKIGINGFGRIGRAIFKNALLFDDIQIVAINDINPEVENLGYLLKYDSFYGRFKGDIKIESNKIVIDQKSIDIYQQSNIGNVPWVELGCDIVIEAAGVHSLLDELPGIIKSGVKKVVVTYSPDHKVDNSIVLGANDEQYDPIKHNIISSSICDVVALAPVYKIIDDNYSVLNGFLTTLHPWLAYQNLLDGPPQSWGYPGSLYGHYSLGR

SEQ ID NO: 92290 - protein, 195 aa, Unknown
  Bacterial polypetide isolated from the Sargasso Sea
MRQQECSVEKSMYDEAIDRLKKYTENFEVGDPKKEGEHIGPVISETQYNKIQTLIQKGIDEGAKLVAGGTGKPDGLDKGYFVKPTVFADVNNDMDVARTEIFGPVLSVIPFETEEEAIKIANDTSYGLTNYIQTQDSEKVQRVARKLRSGMVDVNGAGIAVDAPFGGFKHSGIGREAGEHGLEEFLEVKAVGGWS

SEQ ID NO: 92291 - protein, 295 aa, Unknown
  Bacterial polypetide isolated from the Sargasso Sea
ASHIKDFIKRLKNFEFESNFDNKSDNYIAYEPIGVCGLITPWNWPINQITLKVIPALAAGCTMILKPSEIAPLSGMLFADMIHNAGFPKGVFNLVNGDGNGVGTQISGHPDIDMVSFTGSTRAGKLITKNSADTIKRVCLELGGKGGNIVFADSYPDAVRDGIRNVMSNSGQSCDAPTRMLVENSIYERAVNEAKDEANSIKVDLASKKGNHIGPVVSEAQFNKIQNLIQSGIDEGATLVAGGPNRPEGLEKGYFIKPTIFTDVSNKMRIAREEIFGPVLSIIPFATEEEAVSIT

SEQ ID NO: 92292 - protein, 257 aa, Unknown
  Bacterial polypetide isolated from the Sargasso Sea
MYEKFGQFIDGKWQPSEKNETYEVINPATEEILGHASKATPKDVDKALKSAEKGLKVWKQTPPWQRSYIIRRIADKMREKQDVLAKWMTLEVGKPFAEAKGEVGGAADIFEWNAEETKRIYGQTVESRFADTRVHVYYQPIGVVAALTPWNFPLVLSSRKISTALAAGCSVIVKPDVITPGTVMELVEICRECGVPPGVVNLLSGDPPSISQRLIASDIVKKISVTGSTRVGKLILKQAADKVQRVTMELSGHSPIY

SEQ ID NO: 92293 - protein, 234 aa, Unknown
  Bacterial polypetide isolated from the Sargasso Sea
MYEKFGQFINGKWQESSSGETYEVINPATEEIIGKASKANKDDINLSLKSAEKGLVIWKNTSPWERSKIIRKISDIIRKKTDVLSKWLTLETGKPLAEGMNEANGAADIFEWSAEESKRIYGETLQGRLPNTRIHVYYQPVGVVAALVPWNFPITLASRKISTALSAGCSVIVKPDIITPGSVMELVNICNEAGVPPGVVNLLSGEPSYISDKLLSSEIIKKVSITGSTRVGKL

SEQ ID NO: 92294 - protein, 234 aa, Unknown
  Bacterial polypetide isolated from the Sargasso Sea
MYEKYGQFTDGKWHQSSSGETYEVLNPANEEIIGHASKASPEDVERALRSAEKGLEVWKKTPPWQRAYILRRIADKMREKQDILAKWMTLEVGKPFAEAKGEVNGAADIYEWNAEETKRIYGQTVESRFEDTRVHVYYQPVGVVAALVPWNFPLVLSARKISTALAAGCSVIVKPDVITPGVVMEQVEICRECGVPPGVVNLLSGDPPSIAQQLIASDIVKKISITGSSRVGKL

SEQ ID NO: 92295 - protein, 275 aa, Unknown
  Bacterial polypetide isolated from the Sargasso Sea
MAHFYKNPFELKGESIDIVSSSKTDLLVGSIIFGTKEDAERAIEASSNYYNQGGWSKTRWQERSSILLKVAELLTLRRNEFASLIVYEAGKTILEALGDVDEAMDFLDFYAREEGVIQKREKGEVLSRGVTVVISPWNFPLAIPCGMVSAPLVAGNTVILKSAEQTPLVAQKMIDLFHEAGVPKEALIHCPGEGEIVGDALVNNPLTAAIVFTGSRAVGSSIFKRASQRMIKNELHGNVYPVKVITEMGGKNAIIVTANAELDETVSGILYSAFG

SEQ ID NO: 92296 - protein, 223 aa, Unknown
  Bacterial polypetide isolated from the Sargasso Sea
ANLVFADCDLEERVIASVDECMFNTGQSCDAPTRLLVERACYDDVLSIAKRAAEQTNVGNPAEEGDHIGPLFDKLQFERVQRMIKVGIDEGATLLAGGLGKPEGIDKGWFVKPTIFSDVSNDMRIAQEEIFGPVLVIIPFENESDAVAIANDTPYGLAAYLQTGDPDRKERVSAKLKAGAVHINGSGIEYGTPFGGYKQSGNGREGGLMGLEDYLETKTLHGL

SEQ ID NO: 92297 - protein, 239 aa, Unknown
  Bacterial polypetide isolated from the Sargasso Sea
MREVLEIQKQAFIKNGPPTYKERIDSLRRCIALIEAHEGLLIETLNQDFSHRSKDEIKISEIDQTIRNLLFTIKNLKKWMKPKRRSPSLGTGLLGAKSIMNPTPLGTVGIIAPWNFPVGMVFYPAASILASGNKIMAKPSEITPNTANLIKEAVGKYFDPSEFSVFLGGPEVGEEFSSLPLDHLLYTGSNTIAKKVLRNTAKNLVPTTLELGGKSPTIISGDANLNLCAKRILFAKTMN

SEQ ID NO: 92298 - protein, 281 aa, Unknown
  Bacterial polypetide isolated from the Sargasso Sea
FAEMIHEAGFPAGVFNLVNGDGQGVGTDLSGHPDVDMVSFTGSTRAGKLITKNAADTIKRVCLELGGKGGNIVFADSYPDAVRDGIRNVMSNSGQSCDAPTRMLVEKSIYKRAVEEAADEANKIKVDIASKDGEHIGPVISKTQFDKIQSLIKSGIDEGATLVAGGPDKPENFKKGYFIKPTVFTDVNNDMRIAKEEIFGPVLSIIPFENEEEAIKITNDTEYGLGNYLQTEDNEKAKRVSKKLRSGIVYVNHKPADSGTPFGGYRQSGNGREGGTWGLHE

SEQ ID NO: 92299 - protein, 127 aa, Unknown
  Bacterial polypetide isolated from the Sargasso Sea
LVAGGVEKPDGCEKGYYVRPTVFANVTNDMTIAKEEIFGPVLVMIKYNNEEEAINIANDTEYGLAGYVQGDPDHAREVARKIRAGQVIINGGARGTGAPFGGYKASGNGREHGLHGLEECLETKAII

SEQ ID NO: 92300 - protein, 195 aa, Unknown
  Bacterial polypetide isolated from the Sargasso Sea
LSNDDKIISAASCTTNCLAPVVNVLNNNFEIEKGFMTTIHAFTSDQRILDNSHKDPRRARAASQSIVPTSTGASKAIGEIIPSLKGKLEGVAMRVPTPNVSLVELIFCSKKEISIKKINDAFEAASKNELNKILEVTHEKLVSIDFNHHSASAIVDASLTNVVGTNMGKISAWYDNEWGFSNRMCDIAKNLNKIS

SEQ ID NO: 92301 - protein, 243 aa, Unknown
  Bacterial polypetide isolated from the Sargasso Sea
EDLARIMTAEQGKPLIESRGEVAYAASFLEWFAEEGKRVYGDVVPASTTGSRIMAIKQPVGVTAAITPWNFPLAMITRKAGAALAAGCTMVVKPSEETPLSAFALGALAEEAGCPDGVLQFIVGDPAAIGEALCASPVVRKITFTGSTRVGKLLMKQSAETSKRVSMELGGNAPFIVCADADVDAAVQGAMASKFRNSGQTCVCAQRFIVHESVEAEFVRKLTEAASALVMANGLEDENATQG

SEQ ID NO: 92302 - protein, 283 aa, Unknown
  Bacterial polypetide isolated from the Sargasso Sea
ISSWSFHLVNGDGVTTGDALTSHPDVNMISFTGSTRAGALISQNAAKDFKRISLELGGKGANIIFKDADSEAVARGVLRCFRNSGQSCNAPTRMLVEKSIYSETVEKVKELANNTKVDAPQKEGDHIGPVVSEVQYNKIQNLIQKGIDEGAKLIAGGTGKPKGFEKGYYVKPTVFADVNNQMEIARTEIFGPVLSIIPFENEEEAISIANDTPYGLTNYIQTQDKEKVKRVARKLRSGMVDVNGVGIAVASPFGGYKHSGIGREAGTEGLIEFLEVKTVGGWN

SEQ ID NO: 92303 - protein, 257 aa, Unknown
  Bacterial polypetide isolated from the Sargasso Sea
LCTKNSGQFINGKWQQSSGGETYDVINPATEEIIGKASKANKDDINACLKSAEQGFKVWKNTSPWERSKIIRKISDLIRKKNDVLSKWLTLEVGKPLKEGSGESSGAADIFEWSAEEAKRIYGETLLGRSPETRIHVYYQPVGVVAALVPWNFPITLASRKISTALSAGCSVIVKPDIITPGAVMELVDICNESGVPPGVVNLLSGDPAYISDQLLSSDIIKKVSITGSTRVGKLILKKAADKVQRVTMELSGHSPF

SEQ ID NO: 92304 - protein, 249 aa, Unknown
  Bacterial polypetide isolated from the Sargasso Sea
ARKVALSAAENLVPLTLELGGKSPSIISQNAKIKKTVDQIMTGKLLNSGQICISPDYVFAPSNKVSEFVEHAKNHVSERYPTIKNNPDYTSIIHLNHYDRLNNLINDAREKGAEIIEINPANEDLSQQQYHKIAPTLVLNPTDDMKIMQEEIFGPLLPVKTYDKFSDVISYVNKLPKALALYYFGNEKSEIDELLNKTSSGQIAINDLISQFAMHDLPFGGVGPSGMGSYHGYDGFKNFSHKRAVLKGQ

SEQ ID NO: 92305 - protein, 170 aa, Unknown
  Bacterial polypetide isolated from the Sargasso Sea
MKVKFPFKAKYGNYINGKFVEPKSGKYFDNTSPITNEVICKVPRSNEKDVDFALDAAHAAFPAWGTTSIGERSNILLKIADVIEKNLNVLATAECLDNGKPIRECMAADLPLVIDHWRYFAGVIRAEEGSVAEISNSEYSLHIPEPLGVVGQIIPWELSHYYGNMETLHS

SEQ ID NO: 92306 - protein, 291 aa, Unknown
  Bacterial polypetide isolated from the Sargasso Sea
LAYLVRRLLENGANSSFVNQLLDQDVPATEVVSDPLDQMLEVAQTPSHPNIALPPDLYQPQRRNSAGRDLEDRFAVAGLEEDMSAFLDRLWKFSYNAIADLKGTVREVRNPARPEEQVGDLKEASVEDIGPTIHKARTALGNWQALPAETRAAVLNKTADLYETHFAELMTLAGREAGKTLLDGVAEIREAVDFLRYYASQVRALPAESTPRGVFACVSPWNFPLAIFTGQISAALAAGNCVIAKPAEQTPLIALRAVDLMHEAGVPGDVLQCLPGPGETVGAALTASPGI

SEQ ID NO: 92307 - protein, 231 aa, Unknown
  Bacterial polypetide isolated from the Sargasso Sea
MDNKKFYIGGEWVEPVNQEDINVINPATEEVVSIVSNGNSADLDKAVNFARNAFKSFSQSTKEERLKLLHRICENYEKRIKDIAEIIRLEMGAPVKLANGSQSKLGLQHLKTAIRVLEEHEFEFKHNNLLIRHEPIGVCGLITPWNWPVNQIMAKLGPSLAAGCTSILKPSEIAPGSAMIIAEILDASDPPPGVFNLINGYGNGIGEAISSHPDIDMVSFTGSTRAGIAVL

SEQ ID NO: 92308 - protein, 294 aa, Unknown
  Bacterial polypetide isolated from the Sargasso Sea
MLLAEMIDEVKFPAGVFNLVNGDGAITGDALTSHPDIDMISFTGSTRAGALISQNAAKDFKRISLELGGKGANIIFKDADSDAVARGVLRCFRNSGQSCNAPTRMLVEKTIYNATVEKVKELANNTKVDSPQKDGDHIGPVVSEVQFNKIQTLIQKGIDEGAKLIAGGTGKPKGFEKGYYVKPTVFADVNNQMEIARTEIFGPVLSIIPFENEEEAISIANDTPYGLTNYIQTQDKEKVKRVARKLRSGMVDVNGVGIAVASPFGGYKHSGIGREAGTEGLIEFLEVKTVGGWN

SEQ ID NO: 92309 - protein, 248 aa, Unknown
  Bacterial polypetide isolated from the Sargasso Sea
EQGKPLEAATTEVFGMAAFCRYFTSLDLPVEVLEDSEGRKVESHRNPLGVVGAIVPWNFPLMLMAFKLPPALIAGNTIVLKPAPTTPLSSLRFAELIKDVVPAGVVNFVTDANDLGAALTAHPDVRKVSFTGSTATGAKVMAGAAGLLKRITLELGGNDAGIVLNDVDPKEAAPKLFDSAFQNTGQVCIAMKRLYVHEDIYDEMCAELATIADETPIGNGLDQGTKLGPLNNKMQYERVKELIEEAKQ

SEQ ID NO: 92310 - protein, 297 aa, Unknown
  Bacterial polypetide isolated from the Sargasso Sea
QRSYIIRRIADKMREKQEVLAKWMTLEVGKPFAEAKGEVNGAADIFEWNAEETKRIYGQTVESRFEDTRVHVYYQPVGVVAALSPWNFPAVLSARKISTALAAGCSVIIKPDVITPGVVMEMVDICNECGVPPGVVNLLSGDPPSIAQQLIASDIVKKISITGSSRVGKLILKQAADKVQRVTMELSGHSPFIVFDDADIKKAADMAIAAKFRNNGQVCISPNRFYIHEKKKDEFINLFVEKTKKLKIGNGMDPETQLGPLTTKKRLNEVETLVEKTKQEGAKVLLGGRRPSGFNKG

SEQ ID NO: 92311 - protein, 303 aa, Unknown
  Bacterial polypetide isolated from the Sargasso Sea
ENVGTDVDSWSIRQPLGVCAGITPFNFPAMVPMWMFPISIACGNTFILKPSEKDPSCSIRLAELFKEAGLPDGVFNVINGDKEAVDALLLNKDIVAISFVGSTPIAKYIYENAAKNEKRVQALGGAKNHCVIMPDCDLDQAVNGLMGAAYGSAGERCMAQSVAVAVGNIGNDLVSKISKKVMSLKVGPGMDKNSDMGPLVTKEHLEKVKGYVDLGIKEGAKLVVDGRNIKLQGYEKGFYLGGCLFDHVEKNMKIYKEEIFGPVLSVVRVKDFESAINLINDHEFGKGTSIYTRDGDVGRTFAS

SEQ ID NO: 92312 - protein, 190 aa, Unknown
  Bacterial polypetide isolated from the Sargasso Sea
MERITDRTLVKTQSYVDGAWVGAADGATFPVYDPATNAHLTDVANLGHAETLRAIDAANAAWPAWRELTGKERAGLMRRWFDLLIANADDLATLMTAEQGKPLAEAKGEIVYGASFIEWFAEEAKRVSGDVMASTWRDKRMVVLKQPVGVCASITPWNFPLAMITRKVAPAMAAGCTIVIKPAEQTPLSA

SEQ ID NO: 92313 - protein, 261 aa, Unknown
  Bacterial polypetide isolated from the Sargasso Sea
MEKILNYINGELVEPINGNYFDNYNPSNGNAYSLVPDSEKADIDHAVAAAKEAFKTWSKTSKQERSDILMKLADTIEKHSEELIIAESKDNGKTESLARAVDIPRAPANFRFFATAILHDHSEIHEMDGVALNYTLRQPIGVAACISPWNLPLYLLTWKIAPALAAGNTVVAKPSEITPMTAFLLSKICIEAGLPKGILNIVHGHGAKVGDSLTTHPDTPIISFTGGTVTGKHIASVTAPMFKKISLELGGKNPNIIFADA

SEQ ID NO: 92314 - protein, 192 aa, Unknown
  Bacterial polypetide isolated from the Sargasso Sea
TRMLVEKSMYEEAVERLKKYANEFQVDDPNKEGEHIGPVISETQFNKIQTLIKKGIDEGAKLVSGGPGKPNGLNKGYYVKPTVFADVKNDMEIARTEIFGPVLSVMPFETEEEAIKIANDTPYGLTNYIQTQDPEKVKRVARKLRSGMVDVNGAGIAVDAPFGGFKHSGIGREAGSEGLVEFLEVKSVGGWN

SEQ ID NO: 92315 - protein, 188 aa, Unknown
  Bacterial polypetide isolated from the Sargasso Sea
VEKSIYNQTVEKVKELANNTKVDSPEKDGDHIGPVVSETQFNKIQTLIQKGIDEGAKLIAGGTGKPKGLEKGYYVKPTVFADVNNQMEIARTEIFGPVLSIIPFENEEEAISIANDTPYGLTNYIQTQDREKVKRVARKLRSGMVDVNGVGIAVGSPFGGYKHSGIGREAGTEGLIEFLEVKTVGGWS

SEQ ID NO: 92316 - protein, 169 aa, Unknown
  Bacterial polypetide isolated from the Sargasso Sea
NPVNNLGALVDKEHFTKVCNYLDKGKNEGAKIVLGGETMDGVYVEPTIFDEASADASIAREEIFGPLLSVLTVKSNDKAISLANDTNYGLAASVFSANAKRAIRTARAIRAGTITVNCYGEGDISTPFGGYKQSGFGGRDNSIHAHDQYTELKTIWVDLSDRTSEEVIE

SEQ ID NO: 92317 - protein, 112 aa, Unknown
  Bacterial polypetide isolated from the Sargasso Sea
PTIFSDVNNDMKIARTEIFGPVLSIIPFETEEEAIAITNDTSYGLGNYLQTEDKEKAKRVARKVRAGTVYINGQATDTGMPFGGYKQSGNGREGGVWGFTEFLEVKAITGWN

SEQ ID NO: 92318 - protein, 282 aa, Unknown
  Bacterial polypetide isolated from the Sargasso Sea
MYEKFGQFIDGKWQQSSDKKTYEVINPASEEIIGHASKATTADVDKALKSAEKGLEVWKKTSPWKRSSVIRKIADLIRAKQDVLAKWITLEVGKPFLEGKGEVGATADIFEWNSEETKRIYGQTVESRFEDTRIHVYYQPIGVVAAMSPWNFPLVLSGRKISTALAAGCSVIIKPDVIAPGGVMELVDICREAGVPPGVVNLLSGDPPSIASQLISSDIVKKISITGSTRVGKLVLKQAAEKVQRVTMELSGHAPFIVFSDANIEKATDMAIASKFRNNGQV

SEQ ID NO: 92319 - protein, 242 aa, Unknown
  Bacterial polypetide isolated from the Sargasso Sea
MFSNALGKFNSKEKLLAHIENGAKKVIVSAPCKNADKTIVFGVNENIITKEDKIISAASCTTNCLAPVISVLDQNFEIEKGFMTTIHAFTSDQRILDNSHKDPRRARSASQSIVPTSTGASKAIGEIMPNLKGKLEGIAMRVPTPNVSLVELVFCTKKEINIKKINNAFEQASKNKLKNILEVTNEKLVSIDFNHHPASAIVDASLTNVVGSNMGKISAWYDNEWGFSNRMCDIAETLHKIS

SEQ ID NO: 92320 - protein, 184 aa, Unknown
  Bacterial polypetide isolated from the Sargasso Sea
IYDRAVKEAEEEANNIKVDLAKKQGDHIGPVVSKIQYDKIQDLIKSGIDEGATLIAGGPDKPNGLEKGYFIQPTIFTDVSNKMRIAKEEIFGPVLSIIPFETEEEAISIVNDTSYGLGNYVQTDDLEKARRVAKKFRSGGVYINGKSADPGTPFGGYRQSGNGREGGTWGLEEYLEVKTICGWK

SEQ ID NO: 92321 - protein, 267 aa, Unknown
  Bacterial polypetide isolated from the Sargasso Sea
MRKLETFNPATGERIAELEITTSKEIQAMVGKAKKAQIKWAEKSIRDRANIIIKAYEEIKNRTKQMADIIHNEMGKICEEALGEVESSIKKIPGIADDVVNALLSEEINDGFTRTISYWDPMGVCASITPWNFPMGMPQTLIIPSLIAGNTVLFKPSEEVPLVGKEYADILNKTLPEDVLQVVIGEGEQGRELVQSDVQLITFTGSQSTGKHILEKAVKEFKRVILELGGKDPLIILDDADLETAAEFAANNSFRNTGQVCVSTENI

SEQ ID NO: 92322 - protein, 244 aa, Unknown
  Bacterial polypetide isolated from the Sargasso Sea
DHASRVNFRSKAFIDGEFVSSVSGKTMNSINPANGRILTKIAECDEKDINKAVSSARRSFEKGSWSCMSPVDRKVILLRLSELIRENLIELALLDSLDMGKLVTDAANVDVPGSAMFFQWYAEAIDKIYDEIAPTGLGDLAMVSREPLGVVGAVVPWNFPLDMATWKASAALAAGNSIVLKPAEQSPLSALRLAELAMEAGVPKGVFNVVPGYGETAGKALGLHNDVDCLAFTGSTAVGKLFQQ

SEQ ID NO: 92323 - protein, 250 aa, Unknown
  Bacterial polypetide isolated from the Sargasso Sea
MKTEIVNQSSSYVNGEWSASDEKITLKNPANLSSNIKEIYFASPQNAKKSILSADVAFANWKSTSIDYRIGFLKGLMSSLEKNKKSFSHLITLENGKTIKESMSEVDAAILEGNYQIEFLMHNLCESIENNKLYYEPLGVALLITPWNFPLSTVIRKMIPALICGNTIVLKPSEFSSLTSIFLFELIDNISLPNGVANLVLGEGSVVGPPLMESSALKIVSFTGSTDTGESIQNEIGSNDIRYQAEMGGS

SEQ ID NO: 92324 - protein, 280 aa, Unknown
  Bacterial polypetide isolated from the Sargasso Sea
FNAEVKFDKKHIIINKKKISFGQETDLNKINWKKFNVDYVFECTGKFNSKEKLLPHLKNGAKKVIVSAPCKNADKTIVFGVNERVLKKNDNIISAASCTTNCLAPVAHLLNENFKIEKGFMTTIHAFTSDQRILDNSHKDPRRARSASLSIVPTSTGASKAIGEIIPSLKGKLEGIAMRVPTPNVSLIELVFCTKKELSVKKINSAFQKYVSKQKKKVLEISNDKLVSIDFNHNSASSIVDASLTNVVGKNMGKISAWYDNEWGFSNRMCDIAEFIHKNS

SEQ ID NO: 92325 - protein, 172 aa, Unknown
  Bacterial polypetide isolated from the Sargasso Sea
NKIKVDQASKKGDHIGPVISKTQYDKIINLIESGISEGATLAAGGAELPNGLNKGYFIKPTIFTNVTNEMRIAKEEIFGPVLSIIPFESEDEAVNIVNDTSYGLGNYLQTEDRAKARRVAKKLRSGCVYINGNAADAGTPFGGYRQSGNGREGGVWGLEEYLEVKTVTGWKD

SEQ ID NO: 92326 - protein, 139 aa, Unknown
  Bacterial polypetide isolated from the Sargasso Sea
IEIGINEGATLVAGGLEKPEGYDKGYYVKPTVFANVTNDMTIAKEEIFGPVLSIIKYDSEEEAIEIANDTEYGLAGYVQGEPEHANKVARKIRAGQVIINGGARGTGAPFGGYKSSGNGREHGIHGLEECLETKAVIMP

SEQ ID NO: 92327 - protein, 276 aa, Unknown
  Bacterial polypetide isolated from the Sargasso Sea
LVNGDGATTGDALTSHPDINMISFTGSTRAGALISQNAAKDFKRVSLELGGKGANIIFKDADPEAIERGALRCFRNSGQSCNAPTRMLVEKSMYNEAIERLKKYTENFEVGDPKKEGEHIGPVISETQYNKIQTLIKKGVDEGAKLVAGGPGKPDGLEKGYFVKPTVFADVNNNMEIARTEIFGPVLSVMPFETEEEAIAIANDTPYGLTNYIQTQDKEKVKRVARKLRSGMVDVNGAGIAVDAPFGGFKHSGIGREAGEHGLEEFLEVKAVGGWS

SEQ ID NO: 92328 - protein, 130 aa, Unknown
  Bacterial polypetide isolated from the Sargasso Sea
AAGGPELPNGLNKGYFIKPTIFTDVTNEMRIAKEEIFGPVLSIIPFETEDEAVNIVNDTSYGLGNYLQTEDREKAHRVAKKLRSGCVYINGNGADAGTPFGGYRQSGNGREGGVWGLEEYLEVKNVTGWS

SEQ ID NO: 92329 - protein, 276 aa, Unknown
  Bacterial polypetide isolated from the Sargasso Sea
TGSAGAIGGEIAENPIVRKLTFTGSTEIGKVLMKQCANTVKKVSMELGGNAPFIVFDDADLDAAVQGAMASKFRNTGQTCVCANRIYVQEAVYEDFAERLSEAVSKMKVGNGLEGETHQGPLIEAAAVEKVEEHIADALNKGAVVAVGGERHSLGGNFFKPTIIKNVSQDMKIAREETFGPVAPLFPFKTEEEVIAYANDTEFGLASYFYSRDIGRIWRVMEALEYGIVGVNEGIISTEVAPFGGVKESGIGREGSKYGIDDFVEIKYALMGGIDR

SEQ ID NO: 92330 - protein, 205 aa, Unknown
  Bacterial polypetide isolated from the Sargasso Sea
TIVFGVNENILTKKDQIISAASCTTNCLAPVLNVLNKNFEIEKGFMTTIHAFTSDQRILDNSHKDPRRARAASQSIVPTSTGASKTIGEIIPKLKGKLEGIAMRVPTPNVSLVELVFCTKKNINIKKINNAFKLETKIQSKKILEFTTEKLVSIDFNHNSSSAILDTSLTNVVGKNMGKISAWYDNEWGFSNRMCDIVEHIHKIS

SEQ ID NO: 92331 - protein, 202 aa, Unknown
  Bacterial polypetide isolated from the Sargasso Sea
MITVRNAFKKMDYEEALESNIESLEWIAEHKGQFGHFIGGRFTKPKNLFKTINPFNKKEIAKISQGTVADIKRSVQAARSGLEKWQSIGPFQRSKYLYAIARYIQKESRTISVLESMENGKSIRESRDIDIPLAARHFYYHAGWAQLLDEEFQDYSAIGVCGQIIPWNFPILMLAWKVAPAIAARHSVILKPAEQTSLTALY

SEQ ID NO: 92332 - protein, 102 aa, Unknown
  Bacterial polypetide isolated from the Sargasso Sea
VAREEIFGPVLSVLEYEEQDEAIEIANDTDFGLGAGVFTKDLKKASWTASKLEAGQVYVNKWFTGSHATPFGGYKQSGYSREKGIDALKAYVQIKNVGISLD

SEQ ID NO: 92333 - protein, 152 aa, Unknown
  Bacterial polypetide isolated from the Sargasso Sea
SKIQYDKIINLIESGISEGATLAAGGPELPNGLNKGYFIKPTIFTNVTNEMRIAKEEIFGPVLSIIPFETEDDAVKIVNDTSYGLGNYLQTEDREKAHRVAKKLRSGCVYINGNGADAGTPFGGYRQSGNGREGGVWGLEEYLEVKNVTGWS

SEQ ID NO: 92334 - protein, 184 aa, Unknown
  Bacterial polypetide isolated from the Sargasso Sea
MAVNYKSIAKKLKFEGRAFINGKYVNAIDGKKFETINPATGEKLCTVAKCNHKDVNLAVKVSRKAFNSGVWSKSSPEHRKEVLLKFAELLRKHGDENSVLECVDTGKLVTDCINEVANDAPMHFQWYGELIDKVFGKVGPTEPSITSLIVKEPIGVVAGIVPWNFPLMMAVWKMAPALAAGCSV

SEQ ID NO: 92335 - protein, 221 aa, Unknown
  Bacterial polypetide isolated from the Sargasso Sea
AGLPDGVFNVINGDKEVVDLLITDPAVDSVSFVGSTPVAEYIYHTSSKYNKRVQSLGGAKNHMVVMPDADLDQVVDGLIGAGYGSAGERCMALSVAVAVGDVGDKLIEKLTPRVQNLKVGPGTDPEVEMGPLISDVHLAKVKSYVDAGVSEGAELIVDGRSISLQGYENGYFIGGCLFDHVKEDMKIYREEIFGPVLSVVRQPTFNDALKMVNDHEFGNGT

SEQ ID NO: 92336 - protein, 149 aa, Unknown
  Bacterial polypetide isolated from the Sargasso Sea
MIKFQSLINSGIEEGATLVAGGPDKPEDLKKGYFIKPTVFTDVNNNMRIAKEEIFGPVLSIIPFENEEEAIQITNDTEYGLGNYLQTEDNEKAKRVSKKLRSGIVYVNHKAADSGTPFGGYRQSGNGREGGTWGLHEYLEVKTITEWKN

SEQ ID NO: 92337 - protein, 284 aa, Unknown
  Bacterial polypetide isolated from the Sargasso Sea
ENADDLAKIMTVEQGKPLAEAKGEILMGVTYIDFYAEEGKRVYGDIIPDPMPDRRIVVIKQPVGVVGAITPWNFPSTMITRKCAPALAVGCTVVIKPASQTPYSALALGVLAKEAGFPNGVINIITGSASAIGKEMTENSLVKKISFTGSTEVGKILLQQSALTVKKVSMELGGHAPFVVFDDANIDEAVTGAIQSKFRNSGQTCICANRIFVHEKVYDEFLNKFIQEVNKIKVGNGLEKGIISGPLIDKQSLLKVLDQVKDAVNEGAKEEVGGDVHSLGGNFF

SEQ ID NO: 92338 - protein, 229 aa, Unknown
  Bacterial polypetide isolated from the Sargasso Sea
MDAEQDTPVNSGGGVGGLPPAEWDVVYRRDPIGIVGLISAWNYPLNVAFRKVAPALVAGNCAILKPSEIAGLSCMFLGKLAKDVGIPEGVFSVVTGDRETGAALVASPSVSMVSFTGSSLTGSKIMEASAPKLSQVALELGGKSAMVIFEDTDIERAVEATIKGCLTNGGQICTAHTRLIVQEGIKDDLLKKMKNALEKIPYCKDPITERKRGDRAWETGLTDVIQPVV

SEQ ID NO: 92339 - protein, 125 aa, Unknown
  Bacterial polypetide isolated from the Sargasso Sea
MRVAINGFGRIGKLVFRAFLEKKLRNVDIVAINELGNLDSSFHLTQFDSVHGILKHKLDKTKNGLKYNNKSITFFSEKNPNNLPWKKMKVDIVLECSGVFTSKETASSHLNAGAKKVIISAPGKN

SEQ ID NO: 92340 - protein, 125 aa, Unknown
  Bacterial polypetide isolated from the Sargasso Sea
GKPKGLEKGYYVKPTVFADVNNQMEIARTEIFGPVLSIIPFENEEEAISIANDTPYGLTNYIQTQDKEKVKRVARKLRSGMVDVNGVGIAVASPFGGYKHSGIGREAGTEGLIEFLEVKTVGGWN

SEQ ID NO: 92341 - protein, 280 aa, Unknown
  Bacterial polypetide isolated from the Sargasso Sea
AMVPMWMFVMSIACGNSFILKPSEKDPTVPYMMGDLLREAGLPDGVFNVVNGDKEAVDLLITDPEVASVSFVGSTPVAEYIYHTSSKHNKRVQSLGGAKNHMVVMPDADLDQVVDGLIGAGYGSAGERCMALSVAVAVGDVGDKLIEKLTPRVQGLKVGPGTDPEVEMGPLISDVHLSKVKSYVDSGVAEGADLIVDGRSISLQGYENGYFIGGCLFDHVKEDMQIYREEIFGPVLSVVRQPTFDDALKMVNDHEFGNGTTIYTRDGDTARAFANQCKIG

SEQ ID NO: 92342 - protein, 100 aa, Unknown
  Bacterial polypetide isolated from the Sargasso Sea
MTIRIAINGFGRIGRMVTREATKNPNFEIVAINDLVPSENLAYLLKFDSTHGKFDGEVVTGQNSIEINGNKIECLSKKNPLDLPWSDLNINYVIESTGLF

SEQ ID NO: 92343 - protein, 298 aa, Unknown
  Bacterial polypetide isolated from the Sargasso Sea
SVLGVITAGNSDDVDKAVAAAKAAFVDFSFSTKEERIQILENIITEYEKRSEELAETISKEMGAPIWLSQVAQVASGLTHFKDTLNVLKGYDFEYEKDGYLVRKEPVGVVGMITPWNWPMNQMCTKVASGIAAGCTMVLKPSEITPFCGIILAEIIHDAGVPAGIFNLVNGMGPVVGASMSEHKDIDMMHFTGSTRAGVAVAQASAPTVKRVAQELGGKSANIVLDDADIEKAVSAGVSSCFLNTGQSCNAPTRMLVSSKNYDKAVEVAANTANAMKVGDPFDADTKMGPISNKTQYE

SEQ ID NO: 92344 - protein, 185 aa, Unknown
  Bacterial polypetide isolated from the Sargasso Sea
TIYNETVEKVKELANNTKVDSPQKDGDHIGPVVSEVQFNKIQTLIQKGIDEGAKLIAGGTGKPKGFEKGYYVKPTVFADVNNQMEIARTEIFGPVLSIIPFENEEEAISIANDTPYGLTNYIQTQDKEKVKRVARKLRSGMVDVNGVGIAVGSPFGGYKHSGIGREAGTEGLIEFLEVKTVGGWN

SEQ ID NO: 92345 - protein, 291 aa, Unknown
  Bacterial polypetide isolated from the Sargasso Sea
QLAADAVENQKEVLAHLLSLDTGNAIRTQSRPEMASTIDLTRMFGGLAGELKGETYPSPSPGVMQFTRRDPVGVVAGIIPWNAPMFLFAAKVAPALIAGNTIVIKTAEQAPLCVLALAEVMACQFPEGVLNVISGYGEECGKPLAEHEVVNKVTFTGSMPVGQKIAKYVAPKLCPITLELGGKNPAIILPDADPDIAIPGIIDGMRYTRQGQACTAATRVFIHKGIYDKIIDGVISKLSQLKVGDPMSDKTDMGCIISDEQFNRTLHYMEIVQGTKGRRILFGGERPTDDY

SEQ ID NO: 92346 - protein, 229 aa, Unknown
  Bacterial polypetide isolated from the Sargasso Sea
KLLSHLKTGAKKVIVSAPCKNADKTIVFGVNEKIITKDDKIISAASCTTNCLAPVVNVLNKNFEIEKGFMTTIHAFTSDQRILDNSHKDSRRARSASQSIVPTSTGASKAIGEIIPSLKGKLEGVAMRVPTPNVSIIELVFCTRKVIDVKKINKAFELESKNKLKKILDITHEKLVSIDFNHNPASAIVDASLTNVVGKKMGKISAWYDNEWGFANRMCDIAENIHKIS

SEQ ID NO: 92347 - protein, 292 aa, Unknown
  Bacterial polypetide isolated from the Sargasso Sea
NTFVLKPSEKDPSCSMKLAELFLEAGLPPGVFNVVNGDKEAVDAIINNKDISAVSFVGSTPIAKYIYENCAKNEKRVQALGGAKNHCVVMPDCDLDQAVNGLMGAAYGSAGERCMAQSVAVAVGKIADPLVKSLSKKVESLKIGPGLDKKSQMGPLVTKEHLEKVKGYVDIGVKEGAKLVVDGRNLKLQGYENGFYMGGCLFDNVKKNMRIYKEEIFGPVLSVVRAKDYSEALSLVNDHEFGNGTSIFTRDGDTGRSFASNVKIGMVGVNIPIPVPMAFHSFGGWKRSLFGD

SEQ ID NO: 92348 - protein, 313 aa, Unknown
  Bacterial polypetide isolated from the Sargasso Sea
CRAPQLLKGEHSKNVGPRIDSWSEFQPLGVVAGNTPFNFPAMVPLWMFPLAIVCGNTFVLKPSERDPSCAIYLAKLLKEAGLPDGVFNVINGDKEAVDQILDDERIKAVSFVGSTPIAEYIYSKANTNGKRCQALGGAKNHAIVMPDADIDNAVNQLLGAAFGSSGERCMALSVVVAVGDKVADEIVDKMQSAMKSLKVGAFDDATNDFGPLITLQHKEKVEGYITSAAEQGADVVVDGRNPSVEGYETGFFLGATLIDKVTPEMASYKAEIFGPVLQVIRVKSMEQAMQLIDSHEYGNGTCIFTPRWRGCPL

SEQ ID NO: 92349 - protein, 244 aa, Unknown
  Bacterial polypetide isolated from the Sargasso Sea
QDIVLYGFGRIGRLVSRIMAQMTGPGNYYRLRAIVVRKGSDTNDLLKRASLLRRDSVHGSFHGTIRVDNETETLVINGNPVKIIYTNGPKDLNYSDYDIDNPIVIDNTGVWREEKDLSLHLESGASKVVLTAPGKGKIKNIVNGINNDILNESDNVISAASCTTNAIVPVLDILNKEYSIKSGHIETVHAYTNDQNLIDNYHKKDRRGRSAALNMVITSTGAVKAVSKALPELDGKLTGNAIRV

SEQ ID NO: 92350 - protein, 188 aa, Unknown
  Bacterial polypetide isolated from the Sargasso Sea
MAVNYKSIAKKLKFEGRAFINGKYVNAVDGKKFETINPATGEKLCTVAKCNHKDVNLAVKVSRKAFNSGVWSKSSPEHRKEVLLKFAELLRKHGDENSVLECVDTGKLVTDCINEVANDAPMHFQWYGELIDKVFGKVGPTEPSITSLIVKEPIGVVAGIVPWNFPLMMAVWKMAPALAAGCSVIIKP

SEQ ID NO: 92351 - protein, 279 aa, Unknown
  Bacterial polypetide isolated from the Sargasso Sea
VQSRFEDTRVIINYEPVGVVAALSPWNFPLILASRKISTALAAGCSVICKPDVITPGTVMELVNIINQCGVPAGVVNLLSGDPAAIASQLISSDIIKKISLTGSTRVGKIVLKQAAEKIQRVTMELSGHAPFIVHEDANVEKATDIAMAAKYRNNGQVCISPSRFYIHESKKKEFTELFVNKTLKLKIGNGMDENVQLGPITTKKRLDEIEKLVEVTKKEGAKVLCGGKRPSGFNKGYFYEPTIFDNVKEDFKIMIEEPFGPLTPLLTFKKFDEVIKKA

SEQ ID NO: 92352 - protein, 272 aa, Unknown
  Bacterial polypetide isolated from the Sargasso Sea
KQDVLAKWLTIEVGKPLAEGIGETGGAADIFEWNAEETKRIYGQTVQSRFPETRVHVYYQPVGVVAALVPWNFPLVLAARKISTALAAGCSVICKPDVITPGTVMELIDICKEAGVPPGVVNLLSGDPESISNELLESDIIKKVSITGSTRVGKLILKKAADKVQRVTMELSGHSPFIVFDDVDINKVADMAITAKFRNNGQVCISPNRFYIQEKRKEEFIKAFVDKTKKLKIGNGLDKDVQLGPLTTAKRLSEVETLVEITKKEGAKVLLG

SEQ ID NO: 92353 - protein, 120 aa, Unknown
  Bacterial polypetide isolated from the Sargasso Sea
CEKGYYVKPTVFADVTNDMTIAKEEIFGPVLCVMKYETEEEAIQIANDTEYGLAGYVQGELSHAIEVGNQIRAGQITINGGARGNAAPFGGYKASGNGREHGKHGIEECLETKAIIAPAS

SEQ ID NO: 92354 - protein, 174 aa, Unknown
  Bacterial polypetide isolated from the Sargasso Sea
MKVSSVLDTSHLKVKFPYKAKYGNYINGKFVEPLSGKYFDNVSPISNEKICSVARSNEKDVEAALDAAHAAFPEWGKTDITTRSNILYKIADVLEKNLNLLAVAECLDNGKPIRECMAADLPLVIDHWRYFAGVIRAEEGSIAEISNSQYSYNIPEPLGVVGQIVPWNFPLLMA

SEQ ID NO: 92355 - protein, 286 aa, Unknown
  Bacterial polypetide isolated from the Sargasso Sea
WPINQIALKVVPAFATGCTMILKPSEIAPLSGTLFAEMIDEVGFPNGVFNLVNGDGAGVGTQISSHPDIDMVSFTGSTRAGRLISKNAAETIKRVCLELGGKGGNIVFADSYKDAVRDGIKNVMSNSGQSCDAPTRMLVEKSIYERAVNEAVDEANKIKVDQASKKGDHIGPVISKTQYDKIINLIESGISEGATLAAGGPELPNGLNKGYFIKPTIFTNVTNEMRIAKEEIFGPVLSIIPFESEDEAVNIVNDTSYGLGNYLQTEDREKAHRVAKKLRSGCVYIN

SEQ ID NO: 92356 - protein, 176 aa, Unknown
  Bacterial polypetide isolated from the Sargasso Sea
MSLLTRDEYAAIAAGLTLPTGAFIDGGYRPAISGRTFATLNPATGETLAEVAACGAEDVEFAVTKARAAYQDGRWSRLHPSARKEVLIRLARLMTRNAREFAVLESLDSGKTIYDCETVDIPETIHCLKWHAEAIDKIYDQVSPASDDHIAMIVREPIGVVGLVLPWNFPLLMLAW

SEQ ID NO: 92357 - protein, 239 aa, Unknown
  Bacterial polypetide isolated from the Sargasso Sea
MKTIHHFVDGKGFSGDSKRLGKVFNPATGEQSAEVKMASNKDVNDAVANAKKAFESWSNKPPLQRARVMFKFKELIEKNSEELTKIIVSEHGKVFEDARGSLTRGLEVVEYACGIPQMLKGEFTENVGSNVDSWSIRQPLGVCAGITPFNFPAMVPMWMFPMAIACGNTFVLKPSEKDPSCSIRLAELLKEAGLPDGVFNVINGDKEAVDALINNKDVVAMSFVGSTPIAKYIYENCAK

SEQ ID NO: 92358 - protein, 292 aa, Unknown
  Bacterial polypetide isolated from the Sargasso Sea
PKAGFPSGVLNIVPGLGEEAGEALLKHPGVSHYSFTGSTEIGVKVQQEAAKRAVPVTLELGGKSPQLVFSNADIDKALPFLVNAAIQNAGQTCSAATRVLIEKPIFQELTARLAKGISSLRSGPALQDLECGPLISRVQKDRFEGFLQRARQDGVEFLAEGSIVEDAPQGGNYVAPCMVGSVPPKHTLAQEEVFGPLLVTMPFEGEEEGIELANNTVYGLVSGVWTKDGGRQLRVARRLKSGQVFINNYGAGGGVELPFGGVKLSGHGREKGFEALYGFSVTKTVAIHHGAS

SEQ ID NO: 92359 - protein, 112 aa, Unknown
  Bacterial polypetide isolated from the Sargasso Sea
TAFADVNNQMEIARTEIFGPVLSIIPFENEEDAINIANDTDYGLTNYIQTKDKEKANRVARRLRSGMVDVNGAGIAVDAPFGGFKHSGIGREAGKEGLLEFLEVKSVGGWAN

SEQ ID NO: 92360 - protein, 263 aa, Unknown
  Bacterial polypetide isolated from the Sargasso Sea
CTLELGGKSPVVIGKSADLKTSAKRIMFGKTMNAGQICLAPDYVIVHKDKKDDFIKETKDAVTEYFPDIKNNEDYTSIINQKHYDRLKDLLDDAVAKGANVDEINPANEDFSQQEFYKIPPTIVTNTTDDMKIMQEEIFGPILPVVEYEEIDEATKLINSKDRPLGLYYFGTDKKEEDNVLNNTSSGGVTVNNVISHLQQNDLSFGGVGPSGMGRYKSFDGFKNFSNPRAYFKDVSFKLDKFFDAVRPPYKGNIEKVLQQLMK

SEQ ID NO: 92361 - protein, 177 aa, Unknown
  Bacterial polypetide isolated from the Sargasso Sea
APVTSVLDQNFEIEKGFMTTIHAFTSDQRILDNSHKDPRRARSASQSIVPTSTGASKAIGEIIPNLKGKLEGVAMRVPTPNVSLVELVFCTKKDISIKKINNAFEKASKNKLKNILEVTNEKLVSIDFNHHPASAIVDASLTNVVGSNMGKISAWYDNEWGFSNRMCDIAETLHKIS

SEQ ID NO: 92362 - protein, 120 aa, Unknown
  Bacterial polypetide isolated from the Sargasso Sea
KKGYFIKPTVFTDVKNNMRIAKEEIFGPVLSIIPFENEDEAIQITNDTEYGLGNYLQTEDNEKARRVSKKLRSGIVYVNHKPADSGTPFGGYRQSGNGREGGTWGLHEYLEVKTVTGWTD

SEQ ID NO: 92363 - protein, 240 aa, Unknown
  Bacterial polypetide isolated from the Sargasso Sea
MRDSSLFRQQVYINGKWSDADNGESNEITNPSNGKVLGTVPNCGATEAKKAIEAANNAWPKWRSKTSKERALILRRWYELMMENQEDLARLMTAEQGKPLTESIGEIAYAASFVEWFGEEGKRLYGDTIPAHASDKRIIVIKQPIGVTVAITPWNFPAAMITRKAAPALAAGCPMVIKPAPDTPFSAFALCELAERAGVPPGILSTITGDAVEIGGEFTSNPIVRKLSFTGSTGVGKLLM

SEQ ID NO: 92364 - protein, 173 aa, Unknown
  Bacterial polypetide isolated from the Sargasso Sea
SCDAPTRMRVEKSIYKKAIDEAADEANKIKVDIASKNGNHIGPVISQNQYDKIIDLIKSGIKEGATLLAGGPEKPNGLEKGYFVKPTIFTDVTNDMRIAKEEIFGPVLSIIPFEDEDEAVSIVNDTSYGLGNYVQTQDKEKAKRVARKFRSGGVYINGNSAEPGTPFGGYRQS

SEQ ID NO: 92365 - protein, 250 aa, Unknown
  Bacterial polypetide isolated from the Sargasso Sea
MEINKFYIDGNFVEPDGSEKIDIVSPVTEEVVGHVISGSPKDVDIAVAAANKAFPSAMALTLEQKKKILEEIIAGMEERREDFAQIISEEMGSPIKMARKAQYGAGVIHFKNTLSVIDKFDFNEVHGNITINKLPIGPVGMITPWNWPLNQMCTKIASAIAAGTSCVLKPSEITPGAAHIFAEVIDKTSIPKGMFNLIHGLGVTVGKAMSSHSDLEMISFTGSTRAGIDIQKSAADNIKRVSLELGGKSP

SEQ ID NO: 92366 - protein, 313 aa, Unknown
  Bacterial polypetide isolated from the Sargasso Sea
NRELVTLNSFKNILKDFKFEKDLGEEKNNQKLLYEPKGVCALITPWNWPINQVNLKVIPALASACTVVLKPSEIAPLSSMLLAEMIDEAKFPAGVFNLVNGDGAVTGNALTSHPDINMISFTGSTRAGALISQNAAKDFKRISLELGGKGANIIFKDADKEAVARGVLRCFRNSGQSCNAPTRMLVEKSIYNETVEKVKELANNTKVDSPQKDGDHIGPVVSEVQFNKIQTLIQKGIDEGAKLVAGGTGKPKGLEKGYYVKPTVFADVNNQMEIARTEIFGPVLSIIPFENEDEAISIANDTPYGLTNYIQTQ

SEQ ID NO: 92367 - protein, 258 aa, Unknown
  Bacterial polypetide isolated from the Sargasso Sea
MSINYPDTHLFLNGEWRESIAKESLEIINPATEEVIGKVSHARKEDLDIALSAAEKAFDSWKNVSAYERSKILRKAADIVRSKAEHIATLMTMEQGKPITEAKMETMGAADSIDWYAEEGRRAYGRIIPSRAPEGVYQFVFKEPVGVVAAFTPWNFPLNQVVKKVAAAFAAGCTAIVKGPEETPASVAELIKAFDEAGMPKGSINLVYGVPAEISEYLIAHPVVRKVTFTGSTAVGKLLASQAGTYMKRVTMELGGHS

SEQ ID NO: 92368 - protein, 307 aa, Unknown
  Bacterial polypetide isolated from the Sargasso Sea
EMGSPIDYSISTHTTSGQTHLEDFILRLKEFNFEEHFDSKSNNHISYEPIGVCGLITPWNWPINQIALKVVPAFAAGCTMILKPSEIAPISGMLFAEMIDEAGFPPGVFNLVNGDGAGVGTNISGHPDIDMISFTGSTRAGKLISKNAADTIKRVCLELGGKGGNIVFADSYPNAVRDGIRNVMSNSGQSCDAPTRMLVEKSIYEKAIKEAADEANKIKVDIASKKGDHIGPVVSKVQYDKIINLIKSGIDEGATLATGGPELPNNLNKGYFIKPTIFTNVTNDMEIAKKEIFGPVLSIIPFETEEE

SEQ ID NO: 92369 - protein, 254 aa, Unknown
  Bacterial polypetide isolated from the Sargasso Sea
MLNKKNFYINGEWIKPNSSEEITVVDPATEENCAVITLGDKIDVDKAVKAAKNAYESWAFSSKEDRLRLLEKLYENYKKRWADIAKAITLEMGAPKDFASKLQAGTGASHIKSFIRYLKNFEFEKPLGDHAPNQRLIYEPKGVCALITPWNWPMNQVCLKVMPAMAAGCTMVLKPSELAPLSSMILAEIVDEVKFPKGVFNLVNGDGVTTGDALTSHPDINMISFTGSTRAGALISQNAAKDFKRVSLELGGKG

SEQ ID NO: 92370 - protein, 272 aa, Unknown
  Bacterial polypetide isolated from the Sargasso Sea
NFLEMEDEVLSALSSDLGKSKTEALLAEIYGVKSEAKFAIKNIHKWMKTKRVASPLAISFSKSWVKPEPKGNILIISPWNYPIMLCLNPLIAAISSGNTAIIKPSELTPASGEFMKKLIEKTFSSDEVAVFLGEKDVAEKLLDLPFNHIMFTGSPKVGKLVMSAASKHLAGVTLELGGKSPVIVDKSANISDAAWKISFFKFANAGQTCTAPDYILCDEAVHNDLVTALQKNMAQFFPGGVDAATKDYCSIANEHHFNRLKVALEGALSGGA

SEQ ID NO: 92371 - protein, 111 aa, Unknown
  Bacterial polypetide isolated from the Sargasso Sea
TVFTDVNNEMTIAKEEIFGPVVSIIPFSTEEEAIKISNDTAYGLTNYIQTNDTNKAHRVARQLRSGMVEINGVGFADGSPFGGYKQSGNGREGGKWGIEEFLEVKSISGWK

SEQ ID NO: 92372 - protein, 166 aa, Unknown
  Bacterial polypetide isolated from the Sargasso Sea
MNSKGFMTTIHAFTSDQRILDNSHKDPRRARSASQSIVPTSTGASKTIGEILPNLKGKLEGVAMRVPTPNVSLVELVFCTKKDINIKKINDAFEKASKNKLKNILEVTHEKLVSIDFNHHPASAIVDASLTNVVGNNMGKISAWYDNEWGFSNRMCDIAETLHKVS

SEQ ID NO: 92373 - protein, 124 aa, Unknown
  Bacterial polypetide isolated from the Sargasso Sea
KPNGLDKGYYVKPTVFADVNNNMEIAKTEIFGPVLSVMPFETEEEAISIANDTPYGLTNYIQTQDPEKVKRVARKLRSGMVDVNGAGIAVDAPFGGYKHSGIGREAGNEGLTEFLEVKSVGGWN

SEQ ID NO: 92374 - protein, 271 aa, Unknown
  Bacterial polypetide isolated from the Sargasso Sea
YGPTVGAALSEHPDVAMMSFTGSTRAGIAVAQASASSVKRVHQELGGKSSNIILDDVPDLEKSVKGGAGHCFLNSGQSCNAPTKMLVSSKNYDKAVEIAAATANSTTVGDPNGEYRLGPIANKVQYEKIIKLIEIGIEEGATLVAGGVEKPDGCEKGYYIRPTVFANVTNDMTIAKEEIFGPVLVMIKYNSEEEAINIANDTEYGLAGYVQGDPDHAREVARKIRAGQVIINGGARGTGAPFGGYKASGNGREHGLHGLEECLETKAIIAP

SEQ ID NO: 92375 - protein, 187 aa, Unknown
  Bacterial polypetide isolated from the Sargasso Sea
EKSIYERAVKEAVDEANKIKVDQASKKGDHIGPVISKVQYDKIINLIESGISEGATLAAGGPELPNGLNKGYFIKPTIFTDVTNEMRIAKEEIFGPVLSIIPFETEDEAVNIVNDTSYGLGNYLQTEDREKAHRVAKKLRSGCVYINGNGADAGTPFGGYRQSGNGREGGIWGLEEYLEVKNVTGWS

SEQ ID NO: 92376 - protein, 281 aa, Unknown
  Bacterial polypetide isolated from the Sargasso Sea
GVIRTFEYYAGLATKIKGTSQVINKELLSLTIKEPIGVVGQILPWNFPLLLASWKIAPALASGCTVVIKPSELTPHGTIELAKIISDCGVPDGAINVCPGSGEEAGDALVKNKKIAKISFTGSSMVGKSIVRNSSDNLTKLSLELGGKAPNIIFDDANLGSCLEANLRGGFFNQGENCTAVTRLFVHKKIYNKFVSLYKKRIAEINMDEPDKNNTEMGSLISKAHLKKVTSCVDKSIKQGSKIIFQGKIKKGLNGHYFPPTLIEILDTKNILFKEEVFGPV

SEQ ID NO: 92377 - protein, 123 aa, Unknown
  Bacterial polypetide isolated from the Sargasso Sea
NGLDKGYFVKPTVFADVNNNMEIARTEIFGPVLSVMPFETEEEAIEIANDTPYGLTNYIQTQDKEKVKRVARKLRSGMVDVNGAGIAVDAPFGGFKHSGIGREAGEHGLEEFLEVKAVGGWNN

SEQ ID NO: 92378 - protein, 223 aa, Unknown
  Bacterial polypetide isolated from the Sargasso Sea
MTIKVGINGMGRIGRMIVRSIYENYKGKIIIKHINNRTSSEICTNLLKYDSIHGSFSSIVKSGKNYIKINKEKISYTQHSMINDIKWKKYGVDYVFECTGKFNSKDQLLPHIENGVKKVIVSAPCKMADKTIVFGVNHKKINKNDRIISAASCTTNCLAPVANVINKNFIILNGFMTTIHAFTSDQRILDNSHKDPRRARSASQSIVPTSTGASKAIGEIIPS

SEQ ID NO: 92379 - protein, 287 aa, Unknown
  Bacterial polypetide isolated from the Sargasso Sea
DEVKFPAGVFNLVNGDGALTGDALTSHPDINMISFTGSTRAGALISQNAAKDFKRISLELGGKGANIIFKDADSEAVARGVQRCFRNSGQSCNAPTRMLVEKSIYKETVEKVKELANNTKVDSPEKNGDHIGPVVSEVQFNKIQTLIQKGIDEGARLVAGGVGKPKGLEKGYYVKPTVFADVNNQMEIARTEIFGPVLSIIPFESEDEAISIANDTPYGLTNYIQTQDKEKVKRVARKLRSGMVDVNGVGIAVSSPFGGYKHSGIGREAGTEGLIEFLEVKTVGGWS

SEQ ID NO: 92380 - protein, 280 aa, Unknown
  Bacterial polypetide isolated from the Sargasso Sea
GVFNLVNGDGAETGDALTSHPDINMISFTGSTRAGALISQNAAKDFKRISLELGGKGANIIFKDADSEAVSRGVLRCFRNSGQSCNAPTRMLVEKSIYNETVEKVKELANNTKVDSPEKDGDHIGPVVSEIQFNKIQTLIQKGIDEGAKLVAGGTGKPKGLEKGYYVKPTVFADVNNQMEIARTEIFGPVLSIIPFENEDEAISIANDTPYGLTNYIQTQDKAKIKRVARKLRSGMVDVNGVGIAVSSPFGGYKHSGIGREAGTEGLIEFLEVKTVGGWN

SEQ ID NO: 92381 - protein, 157 aa, Unknown
  Bacterial polypetide isolated from the Sargasso Sea
IGPVISETQFNIIQNLIQKGIDEGAKLVAGGPGKPNGIKDGYYIKPTVFADVNNNMEIARTEIFGPVLSVIPFETEEEAIEIANDTDYGLTNYIQTQDNKKVQRVARKLRSGMVDVNGAGIAVDAPFGGYKHSGIGREAGKEGLIEFLELKSVGGWN

SEQ ID NO: 92382 - protein, 204 aa, Unknown
  Bacterial polypetide isolated from the Sargasso Sea
MYEKFGQFIDGKWQASSNKETYEVINPANEEVIGLASKATPEDVDRALKSAEKGLEVWKKTSPWKRSSVIRKIADLIRAKQDVLAKWITLEVGKPFLEGKGEVGATADIFEWNSEETKRIYGQTVESRFEDTRIHVYYQPIGVVAAMSPWNFPLVLSGRKISTALAAGCSVIIKPDVIAPGGVMELVDICREAGVPPGVVNLLS

SEQ ID NO: 92383 - protein, 173 aa, Unknown
  Bacterial polypetide isolated from the Sargasso Sea
KVSRKAFNSGVWSKSSPEHRKEVLLKFAELLRKHGDENSVLECVDTGKLVTDCINEVANDAPMHFQWYGELIDKVFGKVGPTEPSITSLIVKEPIGVVAGIVPWNFPLMMAVWKMAPALAAGCSVIIKPAEDTPLTAIRVAKIAQEAGIPDGVLNVLPGYGDVGEALGRHKDV

SEQ ID NO: 92384 - protein, 281 aa, Unknown
  Bacterial polypetide isolated from the Sargasso Sea
MNSVLIKQKEYFVKNGAPSIELRIDRLERLKSLIMDNRYDFVETLNSDFGNRSKNASMLSDVYGIMPAINLAIKNVKKWSKDEKKSSNFPFGLLGAKSYIRYEPLGTVGMISPWNFPVNLAFVPLVSIFAAGNQVMHKPSEHTPLTSALLKDLCDKVYDEVEFATFLGGPEVGAAFTKLNFDHLLYTGGGSVAKHVMNAASENLVPLTLELGGKSPVVLGKSADLKTSAKRIMFGKTLNAGQICLAPDYVVVHKDQKNDFIKETKDAVSRVLSQKLKTNDD

SEQ ID NO: 92385 - protein, 232 aa, Unknown
  Bacterial polypetide isolated from the Sargasso Sea
MKIKVGINGMGRIGRMIVRSIIENNYPNIEIKHINNRANTEICSNLLKYDSIHGKFNAEIKFDDSNLIINNNKITFSQETDVNKINWKKFGVEYVFECTGKFNSKDKLLAHLNNGAKKVIVSAPCKGADKTIVFGVNETNIKKDDNIISAASCTTNCLAPVTYVLNEEFEIEKGFMTTIHAFTSDQRILDNSHKDPRRARAASQSIVPTSTGASKAIGEIIPSLEGKLEGIA

SEQ ID NO: 92386 - protein, 236 aa, Unknown
  Bacterial polypetide isolated from the Sargasso Sea
MIEKKNFYINGKWISPSIPNDFEVIDPSTEEPFAVISLGSVEDADKAISAAKNAFETWKETTKEERLDLLEKFDQIYNRRWEEMVKAQSTEMGAPLDFASETHTKMGADISKNTIKILKDFNFEHQFDPESNNHIRYEPIGVCGLITPWNFPMNQIVLKVVPALAAGCTMILKPSEIAPISGVLFAEIIDEAGFPPGVFNLVNGNGEVVGNHISGHPYIDMVSFTGSTRAGKLIKK

SEQ ID NO: 92387 - protein, 54 aa, Unknown
  Bacterial polypetide isolated from the Sargasso Sea
MAINIGINGFGRIGRLVFRSAINNDDFNLVSVNDLLDIDHLAYLLKYDSVPWSF

SEQ ID NO: 92388 - protein, 98 aa, Unknown
  Bacterial polypetide isolated from the Sargasso Sea
IVCASDLTIQLKTKIVKKDIFNHFKNLAKSKSKIFGFQEESLVSLDHLGTSKSVIVDANFINLLDSNLLKMVIWYDNEWGYSNRVVDIAKFVLKKNKI

SEQ ID NO: 92389 - protein, 197 aa, Unknown
  Bacterial polypetide isolated from the Sargasso Sea
QICTAMSRLVVHKSVKDELITKLVDLSKSLKVGPGYKEDTGLTPIISEKQLEKVEGYARSGIQQGAEAVHGGKRADREGYFMEATVLNNVKQDTSVAREEIFGPVLSVLEYEDQDEAIHIANDTDFGLGAGVFTKDLKKASWTASKLESGQVYVNKWFAGNHATPFGGYKQSGYSREKGVDALKSYLQVKNVGISLD

SEQ ID NO: 92390 - protein, 42 aa, Unknown
  Bacterial polypetide isolated from the Sargasso Sea
MTKIGINGFGRIGRLILRALLENYKDKIQVVAINDLGSMKPT

SEQ ID NO: 92391 - protein, 120 aa, Unknown
  Bacterial polypetide isolated from the Sargasso Sea
MVIKIGINGFGRIGRMVLRSIVENNRKDIEVVAINNRGSSEVSSFLLKHDTIHGKLKAKISHSENAIEINGKKINIIHESEISKINWKKYNVDIVLECTGKFNTKEKSSLHLSSGAKKVL

SEQ ID NO: 92392 - protein, 285 aa, Unknown
  Bacterial polypetide isolated from the Sargasso Sea
TGKSYNQAISEIKYCYKLWLHASETIQKIKEKKIFINKKTFCKISYEPIGVTAVIVPWNFPFIVLSERLPYILASGCVGIIKPSEYASGTLIKFVDLVMKIGKVPKGLINLITGGSEIGSKITTNKKVKCISFTGSSFTGRKVMRAASRDLKRISLELGGKNPIIIFNEANLKNAAKNVFTSFTHNSGQCCVGASRIFVEDQVYEQFLKYFKEILNKNSKYFQMSNFMQYEKVLNFLRKKKINKNQIFHGKIPDKKNKNLKIKPIVFHNLSQTDKIHTTELLDPS

SEQ ID NO: 92393 - protein, 168 aa, Unknown
  Bacterial polypetide isolated from the Sargasso Sea
MNILSSLNPATGDVLGEVLVTQTDKVQNSVDRARDAQLGWSALGLQGRADILGQAAVIFSEREQKHARLMTREQGKPLKESRAEAHGLGSRLEEEITEIVDALQPDIVEHGGNRSTIYHDPLGVVGAITPWNFPMSMPNWMVLPSLMAGNTVVLKPSEETPLCGQAYA

SEQ ID NO: 92394 - protein, 277 aa, Unknown
  Bacterial polypetide isolated from the Sargasso Sea
MISGEIAVKCPFFNDIKDDTSKIPDYINGELKSVINKKSNRPNNPKNIVLYGFGRIGRLVARMMTQTTGPGNYFRLKAIVIRKATDDDIFKRASLLTRDSVHGAFDGTVRVDEENSTLVINGNPVKIIYASSPDEIKYKDFDIIDPIVIDNTGVWRDEDSLSKHLKSGASKVILTAPAKGDLKNIVYGINDNILKDNDSIISAASCTTNAIVPVLKAVNDEYKIKGGHIETVHAYTNDQNLIDNFHKGDRRGRGAPLNMVITTTGAVKAVAKALPEL

SEQ ID NO: 92395 - protein, 65 aa, Unknown
  Bacterial polypetide isolated from the Sargasso Sea
MVKVAINGFGRIGKLVFRAIVEKNLKNVQIVAINELGSLESSLHLVNFDSTHGELKTKLYKSNKG

SEQ ID NO: 92396 - protein, 215 aa, Unknown
  Bacterial polypetide isolated from the Sargasso Sea
IIVSAPCKNADKTIVFGVNEKILKKGDKIISAASCTTNCLAPLTHVLNENFQIEKGFMTTIHAFTSDQRILDNSHKDPRRARSASQSIVPTSSGASKAIGEIIPSLKGKLEGIAMRVPTPNVSLVELVFCTKKDLNIDKINSAFEDFSKKNKILEVSREKLVSIDFNHNPASSIVDASLTNVVGKNMGKISAWYDNEWGFSNRMCDIVEYLHKIS

SEQ ID NO: 92397 - protein, 282 aa, Unknown
  Bacterial polypetide isolated from the Sargasso Sea
KYFILKPSEKDPSCPMRLAELLHEAGLPAGVFNVVNGDKEVVDAILSNNDINAVSFVGSTPIAKYIYENAAKNEKRVQALGGAKNHLVVMPDCDLEGAVNGLMGAAYGSAGERCMAQSVAVAVGDIGDELVSRLVKKAEALKIGPGMDKSSEMGPLVTKQHLEKVKGYVDLGVKEGAKLALDGRGLKLQGYENGFYIGGCLFDHVTTDMRIYKEEIFGPVLSVVRVKTFEEATKMINEHEYGNGVSIYTRDGDAGRTFASKIQVGMVGINVPIPVPMAFHSF

SEQ ID NO: 92398 - protein, 310 aa, Unknown
  Bacterial polypetide isolated from the Sargasso Sea
TSSSQRRITENVGTDVDSWSIRQPLGVCAGITPFNFPAMVPMWMFPIAIACGNTFVLKPSEKDPSCSIKLAQLFKEAGLPDGVFNVVNGSKEAVDALLTNKDVVAISFVGSTPIAKYIYENAAKNEKRVQALGGAKNHCVVMPDCDLDQAVNGLMGAAYGSAGERCMAQSVAVAVGKIADNLVSKLKQKVQSLKVGPGLDKNSEMGPLVTKEHLEKVKGYIDLGVKEGANLVVDGRNIKLQGYEQGFYIGGCLFDNVNKNMRIYKEEIFGPVLSVVRVKDFDSAVQLVNDHEFGNGTSIYTRDGDVGRTL

SEQ ID NO: 92399 - protein, 266 aa, Unknown
  Bacterial polypetide isolated from the Sargasso Sea
MKIKIGINGMGRIGRMILRTIIENNYKNIEIKHINNRTNSEACSTLLKYDSIHGKFNANIGFDKNHLIINKNKISFSQETDIKNINWKKFNVDYVFECTGKFNSKDKLLDHLNNGAKKVIVSAPCKNADKTIVFGVNEKELKKEDNIISAASCTTNCLAPVANILNENFEIEKGFMTTIHAFTSDQRILDNSHKDPRRARSASQSIVPTSTGASKAIGEIIPSLKGKLEGIAMRVPTPNVSLIELVFCTKKNLSIEKINSSFQNFC

SEQ ID NO: 92400 - protein, 285 aa, Unknown
  Bacterial polypetide isolated from the Sargasso Sea
LPTSIDNIEWYAEIIDKLFDDISPSSKEYLGLITKEPIGVVAAIVPWNYPLWMAIWKIAPALITGNSVILKPAEQSPMSAIKIGALLSEAGVPDGVFSVLPGDGPITGKSLCLHNDIDCVAFTGSGEVGKLVLQYSGQSNMKRVQLECGGKSPNIIFADCDDLDRAAEASAYAIFGNQGEVCSAGSRLIIQKDIEKDFINKVVQLSKKMQPSDPLNPDSFAGAIVNTEQLEKINKYVNIGKKEGADIEVGGNITMKETGGCYFEPTIFKNVKNNMKIAQEEIFGP

SEQ ID NO: 92401 - protein, 269 aa, Unknown
  Bacterial polypetide isolated from the Sargasso Sea
PLGVFGIITPYNFPVMIPLWFWPYAVATGNTVVLKPSEQDPLTHQKIVDLAREAGLPDGVLNVVHGGREVVETMCDHPDIEGVSFVGSSDVAKIVYTRAGAAGKRVQTLGGAKNFLIVMPDADMDATLDACAGSIFGSSGQRCLAGSVVVGIGDAHHQIRERILDYASSIRIGDGLESTTQMGPVISGTHRDRVKEFINQGVADGATLALDGRSATVEGLEDGYWVGPTVFENVAPGMSIASEEIFGPVASINRADSVEGAIEMMHSQS

SEQ ID NO: 92402 - protein, 228 aa, Unknown
  Bacterial polypetide isolated from the Sargasso Sea
LKYDSIHGKFNAKLKFEENELIINENKITFSQESKIENINWKKYNVDYVFECTGKFNSKEKLLIHIKNGAKKVIVSAPCKNADKTIVVGVNEKIISKDDRIISAASCTTNCLAPVVNVLHNHFEIEKGFMTTIHAFTSDQRILDNSHKDPRRARAASQSIVPTSTGASKAIGEIIPSLKGKLEGVAMRVPTPNVSLVELVFCTKKEIDIKKINDVFESASKSELNKIL

SEQ ID NO: 92403 - protein, 190 aa, Unknown
  Bacterial polypetide isolated from the Sargasso Sea
MTIFISAASCTTNCLVPIAHVLNENFIIEKGFMTTIHAFTSDQRILDNSHKDPRRARSASQSIVPTSTGASKTIGEIMPSLKGKIEGIAMRVPTPNVSLIELVFCTKKDLSIEKINSAFMNFSKKNKVLEITKEKLVSVDFNHNPASSIIDASLTNVVGKNMGKISAWYDNEWGFSNRMCDIAVYLHKLS

SEQ ID NO: 92404 - protein, 128 aa, Unknown
  Bacterial polypetide isolated from the Sargasso Sea
VAGGVEKPDGCDKGYYVRPTVFADVTNDMTIAKEEIFGPVLVMIKYNNEEEAINIANDTEYGLAGYVQGDPDHARDVARKIRAGQVIINGGARGTGAPFGGYKASGNGREHGLHGLEECLETKAIIAP

SEQ ID NO: 92405 - protein, 266 aa, Unknown
  Bacterial polypetide isolated from the Sargasso Sea
NGKRTADILPGLQSWLAESFWYYAGLADKIHGDVIPANVSGILNYTRREPFGVVASITAWNSPLLIAIWKIAPALAAGNTMVIKPSEHASASTLALMNVLSELAPPGVLNVVTGFGKEVGEPLVDHPEVRMISFTGSISGGRRVAEVAARQIKPVLMELGGKSPQIVFPDVKMDDAAHGVALGIFPPAGQSCVAGSRLLVHREMQDELVQKICDVASQARLGPPLAPDTQIGPMANEPHFERVIGYIEQARNEGAECVLGGKAVKP

SEQ ID NO: 92406 - protein, 133 aa, Unknown
  Bacterial polypetide isolated from the Sargasso Sea
EGATLVARGIEKPDGCDKGYYVRPTVFADVTNDMTIAKEEIFGPVLVMIKYNNEEEAINIANDTEYGLAGYVQGDPDHAREVAQKIRAGQVIINGGARGTGAPFGGYKASGNGREHGLHGLEECLETKAIIAP

SEQ ID NO: 92407 - protein, 181 aa, Unknown
  Bacterial polypetide isolated from the Sargasso Sea
MDKVIKNFQNISYGPAPEDSKEVINWIKNLKNPNNLFINGKFVKSFSSKKLNIINPSTNKKIATLSVASKKDVNSAVSAAKKAHVKWSKLSSFDRSKYLYALARLIQKNSRFISVLETIDNGKPIRETRDIDIPLVARHFYYHAGWAARNTINTDNSIGVVGQIIPWNFPLLMLAWKIAPA

SEQ ID NO: 92408 - protein, 293 aa, Unknown
  Bacterial polypetide isolated from the Sargasso Sea
MYDKYGQFIDGKWQKSASGETYDVINPATEEVIGKASKANSSDVQKALKSAEKGLQIWKNTSPWERSKIIRKISDLIRKRVDVLSKWLTLEVGKPLTEGPGEIGGAADIFEWNSEETKRIFGEINQSRFPNTQIHVMYQPVGVVAALVPWNFPVILASRKISTALAAGCSVIVKPDVITPGSVMEIVDICREAGVPPGVVNLLSGDPARISEELIKSDIIKKISITGSTRVGKLILKQAADKVQRVTMELSGHSPFIVFDDVDLNKVTDMAITSKFRNNGQVCISPNRFYIHE

SEQ ID NO: 92409 - protein, 226 aa, Unknown
  Bacterial polypetide isolated from the Sargasso Sea
MPAERGRCLREIGDVISKNAERIGKVETTDNGKLPKNITPSLQKNSWQVDSWNYYSGMCDKFEGSLIPAEVPNIHNYLQWEPFGVVAQILPWNSPIGTLIWKLAPCLAAGNTVVLKPSEFASCSTLELMDVLLEANLPPGVINVVTGFGNKIVEPLVDHEDVRMVSFTGGTNGGRIVAGIAAKSAKPTVMELGGKSPQIVLPDCDLELAVNGIISGIFPAAGQSCI

SEQ ID NO: 92410 - protein, 263 aa, Unknown
  Bacterial polypetide isolated from the Sargasso Sea
KPQDIVLYGFGRIGRFVSRIMAQTTGPGNYYRLKAIVVRKGSNTNDLLKRASLLRRDSVHGSFHGTIRVDNESKTLVINGNPVKIIYANGPKDFKYSDYGIDNPIVIDNTGVWREDKDLSLHLESGASKVVLTAPAKGKVKNIVNGINNNILNESDNIISAASCTTNAIVPVLDILNKKYSITSGHIETVHAYTNDQNLIDNYHNKDRRGRSAALNMVITSTGAVKAVSKALPELDGKLTGNAIRVPTPNVSLAVMSLTVEKS

SEQ ID NO: 92411 - protein, 321 aa, Unknown
  Bacterial polypetide isolated from the Sargasso Sea
QPLGVCAGVTPYNFPAMVPLWMFPIAIACGNTFILKPSEKDPSCAIKLAQLFKEAGLPDGVFNVVNGNKEAVDALLTNKEVAAISFVGSTPIAKYIYENAAKNEKRVQALGGAKNHCVVMPDCDLDQAVNGLIGAAYGSAGQRCMAQSVAVAVGKIGDQLVSNLAKKVESLKIGPGLDKNSEMGPLVTKEHLEKVKGYVDLGVKEGAKLVVDGRNIKLQGYEKGFYMGGCLFDNVEQKMRIYKEEIFGPVLSVVRVEDFESAIKLVNEHEFGNGTSIYTRDGDVGRTFASKIKIGMVGINIPIPVPVAYHSFGGWKRIVVW

SEQ ID NO: 92412 - protein, 186 aa, Unknown
  Bacterial polypetide isolated from the Sargasso Sea
MSSGNKYKSIANKLKFEGRAFINGKYVNAIDGKKFETINPATGKKLCAVAKCNHKDVDLAVKVSRKAFNSGVWSKSSPEHRKEVLLKFAELLRKHGEENSVLECIDTGKLIGDCINEVANDAPMHFQWYGELIDKVFGKVGPTEPSITSLIVKEPIGVVAGIVPWNFPLMMAVWKMAPALAAGCSV

SEQ ID NO: 92413 - protein, 190 aa, Unknown
  Bacterial polypetide isolated from the Sargasso Sea
LVEKSIYKRAVEEAADEANKIKVDLASKAGEHIGPVISKTQYDKIQSLIKSGIEEGATLVAGGPEKPQDLKNGYFIKPTVFTDVNNDMRIAKEEIFGPVLSIIPFENEEEAIKITNDTEYGLGNYLQTEDKEKAKRVSKKLRSGIVYVNHKPADSGTPFGGYRQSGNGREGGTWGLHEYLEVKTITEWKN

SEQ ID NO: 92414 - protein, 294 aa, Unknown
  Bacterial polypetide isolated from the Sargasso Sea
IALGSSEDVNAAVDAAKNAFATFSSSEKDERVGYLEKIIEIYMKRSSEMAEAISSEMGAPMSLASKAHSPSGLGHFMTALETLKNYDFEQQKDGLFIRKEPVGVVGMITPWNWPINQIACKVAPALAAGCTMILKPSEIAPFNAMLMAEIIHEAGIPDGVFNLINGDGPTVGEAMSSHPDIDMMSFTGSTRAGIQVAKGSADSVKRVHQELGGKSPNIILDDADFENAVIRGTRHMFNNSGQSCNAPSRMLVPESRQDEAKAAAKKAADETKVGDPNAEDTVIGPVVSEVQFNK

SEQ ID NO: 92415 - protein, 280 aa, Unknown
  Bacterial polypetide isolated from the Sargasso Sea
MGRIGRMIVRSIYENYKGKIIIKHINNRSSSEICANLLKYDSIHGNFSSLVKSGGNYIKINKEKISYTQHSMINDIKWKKYGVDYVFECTGKFNSKDQLLPHIENGAKKVIVSAPCKMADKTIVFGVNHKKINKNDRIISAASCTTNCLAPVADVINKNFIILNGFMTTIHAFTSDQRILDNSHKDPRRARSASQSIVPTSTGASKAIGEIIPSLKGKLEGIAMRVPTPNVSLIEFIFNVKKNITLKKLNNSLFSASKMKLKNILNVTDEKLVSVDFNHQ

SEQ ID NO: 92416 - protein, 283 aa, Unknown
  Bacterial polypetide isolated from the Sargasso Sea
LLAEMIDEAKFPPGVFNLVNGDGAVTGDALTSHPDINMISFTGSTRAGALISQNAAKDFKRISLELGGKGANIIFKDADSEAVARGVLRCFRNSGQSCNAPTRMLVEKSIYNETVEKVKELANNTKVDSPDKDGDHIGPVVSETQFNKIQTLIQKGIDEGAKLVAGGIGKPKGLEKGYYVKPTVFADVNNQMEIARTEIFGPVLSIIPFENEDEAISIANDTPYGLTNYIQTQDKEKVKRVARKLRSGMVDVNGVGIAVASPFGGYKHSGIGREAGTEGLIEF

SEQ ID NO: 92417 - protein, 248 aa, Unknown
  Bacterial polypetide isolated from the Sargasso Sea
EDTRVHVYYQPVGVVAALSPWNFPAVLSARKISTALAAGCSVIIKPDVITPGVVMEMVDICNECGVPPGVVNLLSGDPPSIAQQLIASDIVKKISITGSSRVGKLILKQAADKVQRVTMELSGHSPFIVFDDADIKKAADMAIAAKFRNNGQVCISPNRFYIHEKKKDEFVNLFIEKTKKLKIGNGMDPDTKLGPLTTQKRLNEVETLVEKTKQEGAKVLLGGKRPAGFNKGFFYEPTIFDDVKDNFT

SEQ ID NO: 92418 - protein, 316 aa, Unknown
  Bacterial polypetide isolated from the Sargasso Sea
IGRTIGGALLMGNTCVLKPGEEASLTSLKIGDLSLKAGFPPGVLNIVPGLGEEAGEALLKHPGVSHYSFTGSTEIGVKVQQEAAKRAVPVTLELGGKSPQLVFSDADIDQALPFLVNAAIQNAGQTCSAATRVLIEKPIFQELTARLAKGISSLRSGPALQDLECGPLISKIQKDRVEGFLQRARQDGVEFLAEGSIVEDAPQGGNYVAPFMVGSVPPKHTLAQDEVFGPLLVTMSFEGEEEGIELANNTVYGLVSGVWTKDGGRQLRVARRLKSGQVFINNYGAGGGVELPFGGVKLSGHGREKGFEALYGFSVT

SEQ ID NO: 92419 - protein, 270 aa, Unknown
  Bacterial polypetide isolated from the Sargasso Sea
MDELTIFIGGHWRHGGGNLMHSYFPADGTVNATLRAASLDDLQEAMTCAERAWREPTWRNMLPHLRAKILHKVADLIESRLDELARMQSRDNGKPLAEARGLVMSAAASARYFAAACELLEGELPTPRQADLLTLSRYEPLGVVAAITPWNSPIASEMQKVAPAIAAGNAVILKPAEATPLMALELARIFEQAGLPAGLLSVLPGKGSVIGDALARHPLVRKISFTGGTRTGRHLAHVAAEKLIPASLELGGKSPTIVLEDADIEQAARG

SEQ ID NO: 92420 - protein, 264 aa, Unknown
  Bacterial polypetide isolated from the Sargasso Sea
LLGGTDTAKKIIQNSSNNFAATNLELGGKSPMIIFDDADLESAANGIIAGNFGASGQSCVAGSRVIVDKKISKKIIDLIVQKSKSIIVGDPENSKTNLGPLCTKNQIQKIEQTLKKSIQQGGKIIIGGNKISGEGNYFEPTLIHCPNSEIETLKIEMFGPVISIIEFENEAEAVNIANSSKYGLGSGIFTKNLARAHRVSRQIQAGICWINTYRAISPIAPFGGFNQSGYAREAGKQSILDYTRTKTTWINISDDPMTNPFIMR

SEQ ID NO: 92421 - protein, 98 aa, Unknown
  Bacterial polypetide isolated from the Sargasso Sea
EEIFGPVLSILPYKDEEEAVEIANDTEYGLYGYVSSGDVEHAKKVANRIRAGSIAINGAGADFTTPFGGYKQSGNGREWGLFGFEEFLEVKAVVGFTS

SEQ ID NO: 92422 - protein, 281 aa, Unknown
  Bacterial polypetide isolated from the Sargasso Sea
ALYWVAILVAKKVLKNTAKNLVPTTLELGGKSPTIISGDANLNLAAKRILFAKTMNAGQICLAPDYIFLEKKLQEKFVEQLQNIFESYYPKGHEDDHTSMVNDKHYERMNLYIEDARSKGAQIVEIGRGKPKNQNTILTKVILGVNDDMDVMKNEIFGPLLPIMLYEDLNEVVEYINAHDNPLGLYFFGDRKSEQDFVINNTRSGGVTINDSLFHILQSRLPFGGVGESGYGCYHGYEGFLNFSNLRSIYYQTRYDALLSMMRPPRGKNFSLLSKILRRLG

SEQ ID NO: 92423 - protein, 174 aa, Unknown
  Bacterial polypetide isolated from the Sargasso Sea
MYEKYGQFIDGKWQPSENNETYEVINPATEEIIGEASKATHVDVDKALKSAEKGLEVWKKTPPWQRSYIIRRIADKMREKQDVLAKWMTLEVGKPFAEAKGEVGGSADIFEWNAEETKRIYGQTVESRFVDTRVHVYYQPVGVVAALTPWNFPLVLSARKISTALAAGCSVIIK

SEQ ID NO: 92424 - protein, 306 aa, Unknown
  Bacterial polypetide isolated from the Sargasso Sea
RTESNGKDVKEFLAEELASLNGEAGDSENRDVVLYGFGRIGRLLARILIEKEGGGNGLRLRAIVVRRGKGDDLVKRASLLRRDSVHGTFRGSISIDHENEAIIANGTYIKIIYANNPAEIDYTEFGIENALVIDNTGVWRDEAGLAQHLEAKGTARVLLTAPGKGDLKNIVYGINNKDIDASDKILSAASCTTNAITPVLKVMNDQYGIENGHVETVHSYTNDQNLIDNYHKGDRRGRSAPLNMVITETGAASAVAKALPELKGLLSGNAIRVPTPNVSMAILSLNLKKETSAEEVNDFLRDQALH

SEQ ID NO: 92425 - protein, 163 aa, Unknown
  Bacterial polypetide isolated from the Sargasso Sea
PTLDGDHLGPLFDKIQFDRVQNMIQVGIDEGAKLLVGGLGKPDGHEKGWFVKPTIFSDVNNNMRVAQEEIFGPVLVIIPFDDEDEAIRIANDTPYGLAAYLQTGDKERAERVSRQLRAGGVHVNGGGYNYGSPFGGYKESGNGREGGDMGLEDYLETKALHIA

SEQ ID NO: 92426 - protein, 184 aa, Unknown
  Bacterial polypetide isolated from the Sargasso Sea
SAKNYDKAVEIAVATANSTTVGDPNGEFRLGPIANKVQYEKIIKLIEIGIEEGATLVAGGVEKPDGCDKGYYVRPTVFANVTNDMTIAKEEIFGPVLVMIKYDNEEEAINIANDTEYGLAGYVQGDADHAKEVARKIRAGQVIINGGARGTGAPFGGYKASGNGREHGLHGLEECLETKAIIAP

SEQ ID NO: 92427 - protein, 309 aa, Unknown
  Bacterial polypetide isolated from the Sargasso Sea
RVVEEREEAFTQAISTDFGQRSAFETANYDITVTLADIKYQIRNLARWMRIRKRSVPLHLMPGRARIVPQPLGVVGVISPWNFPVFLSLSPVAGAIAAGNRVMLKPSEWTPKTSVLIAELASEAFEPDEFVVFEGGIKTGRAFAELPFDHLLFTGSTRVAKEVSNSAAKNLTPLTLELGGKSPALVCPDANLKRAAERIVFGKLANAGQICIAPDYVFVERAKFHDFIEMLQTYTKKAYPRLNNNPDYTSIISSDHFSRLNRMIEEAREDGAEIISINPDGETLEPSARKIPPTLILRPNPTLRVMQEE

SEQ ID NO: 92428 - protein, 92 aa, Unknown
  Bacterial polypetide isolated from the Sargasso Sea
LSVIEYEDTEEAISIANDTDYGLGGGVFTKDLNKAAWTANQLQSGQVYVNKWFTGSHATPFGGYKQSGYSREKGIQALNAYLQIKNVGISLN

SEQ ID NO: 92429 - protein, 111 aa, Unknown
  Bacterial polypetide isolated from the Sargasso Sea
TVFADVTNDMTIAKEEIFGPVLCIMKYETEEEAIQIANDTEYGLAGYVQGELSHAIEVGNQIRAGQITINGGARGNAAPFGGYKASGNGREHGKHGIEECLETKAIIAPAS

SEQ ID NO: 92430 - protein, 263 aa, Unknown
  Bacterial polypetide isolated from the Sargasso Sea
MTIKIGINGLGRIGRMVIRSIIESKNKNIKIQHINNRSNIEISSKLIRYDSNHGKFCAELKVKKNNLIINKNKISFSQKPNIEDIKWDKHKVDYVFECTGKFNSKEKLLPHINNGAKKVIVSAPCKGSDKTIVFGVNENMLTKNDQIISAASCTTNCLAPVVNVINKNFGIEKGFMTTIHAFTSDQRILDNSHKDPRRARSASQSIVPTSTGASKAIEQIIPSLKGKLEGIAMRVPTPNVSLIELVFCTKKNINIKKINDAFL

SEQ ID NO: 92431 - protein, 321 aa, Unknown
  Bacterial polypetide isolated from the Sargasso Sea
ALSKDDWAKMAGDADSIFEGRCFINGEYVDAADGGKIEVINPATNEACGTCAAGNEKDIDKAVAAAKESFKAKTWRKMAPRKRMGIMMKFADLLQANTAELALMDSMNMGKPISDCLNVDVPASAVNIRFMAECIDKMYGKVANTHEKALNLSVREPYGVVGLISPWNYPLLMGVWKIAPALAAGNSIVLKPDEHSPHSCIKMAELFVEAGGPPGVFNVVTGHGEEAGQSLALHQDVSKIGFTGSTEVGKLLLQYAGQSNMKKVSLETGGKSPMIYFADLPDMELAVSTAYDSIYANMGEVCNAGSRIYVERAIYADFVDQ

SEQ ID NO: 92432 - protein, 115 aa, Unknown
  Bacterial polypetide isolated from the Sargasso Sea
FVKPTIFTDVSNNMRIAKEEIFGPVLSIIPFESEDEAISIVNETSYGLGNYVQTQDIEKARRVARKFRSGGVYINGNTADPGTPFGGYRQSGNGREGGNWGLEEYLEVKTICGWD

SEQ ID NO: 92433 - protein, 217 aa, Unknown
  Bacterial polypetide isolated from the Sargasso Sea
FVMFNLNQGEVCTCPSRALIQESIYDKFMERAIKRTKAVKQDNPLKMETMIGAQASVEQMEKIKSYLELGKKEGAKVLTGGSVAKLNSGLEKGNYIQPTIFEAKNNMRISQEEIFGPVVSVIKFKDEAEALKIANDTLYGLGAAVWTRDGNTAHRMGRAIQAGIVWTNCYHAYPAHSPFGGYKQSGVGRETHKMMLNHYRQNKNLHVSYAEKKLGFF

SEQ ID NO: 92434 - protein, 166 aa, Unknown
  Bacterial polypetide isolated from the Sargasso Sea
MYNRFGQFIDGRWQQSEKKETYDVINPATEEVIGKASKASTKDVDKALKSAEKGFAVWKKFSPWDRSAIIRKIADSMRKKNNELAKWMTLETGKPMAESLAEVSGSADIFEWNAEETKRIYGQTVQSRFENTRVIINYEPVGVVAALSPWNFPLVLASRKISTALA

SEQ ID NO: 92435 - protein, 280 aa, Unknown
  Bacterial polypetide isolated from the Sargasso Sea
INLGSSFPDATVNDVNNAVAAAKNAFKSWSASDVKIRAQYLRAIGDQLKNNAEYIGKIETIDSGKLLKETKFQAEYMKDYFYYYAELAEKMENTKIISDIDKPDMEVTEVSEPIGVIACIIPWNSQMFLTATKVAPALAAGNTVVIKSSELAPAPLAEFVKLTEKAELPKGVINLVSGGAEVGKNLTSHKDIGKVLFTGGTETGSHVIRNTAENFAQLTLELGGKSPVIVFADADIENALNNITTAIFSGNGCSCIAGSVLILHDKIYDEFLNQLKNRAE

SEQ ID NO: 92436 - protein, 235 aa, Unknown
  Bacterial polypetide isolated from the Sargasso Sea
VDFAVEAANKAFPEVMALTLDQRKKILEEVLEGMEERREDFAQIISEEMGSPITMARRAQYGSGTIHFKNTLSIIDRFDFQEVHGNITINKLPIGPVGMITPWNWPLNQMCTKVASAIAAGTTFVIKPSEITPGAAHILAEVIDKTSMPKGMFNLIHGHGITVGKAMSSHPDLEMISFTGSTRAGIDIQKNAADNIKRVSLELGGKSPNIILEDVDLENAVTMGMKQCFLNTGQS

SEQ ID NO: 92437 - protein, 206 aa, Unknown
  Bacterial polypetide isolated from the Sargasso Sea
MSNSDPEVLVGEIQFANESDVNKAVETANEAYTNTDWARRAWIERSAILLKVATELLLRRMELACKIVKESGKTMIEALGDVDEAIDFCQFYARQQGDFVKKNPSHHSRGVLAIVTPWNFPLAIPSGMVAAGLVAGNAVILKSAEQTPLITDELVEIFHRAGVESNLLIHLPGKGETVGQQLVAHPAISGVIFTGSKSVGMKIAHL

SEQ ID NO: 92438 - protein, 295 aa, Unknown
  Bacterial polypetide isolated from the Sargasso Sea
MSILHWCNVVESVLPSGVINVITGFGQSAGEPIVKHPDVPVVTFTGSVATGKKIAKFAAENLKKVSLELGGKDPMIICDDADIEIAAQGASWGGFVNAGQVCTSIERVYVFENVIDQFTEAIIEEAKKVVLGDPMKKDTHIGPMASKLQQEKAIEKVNQAIKDGARLLAGGSAPENLDKGYFYQPTVLDNIEPNMEIITEEAFSPVLPIQKVSSIQEAIQLSNDSVYGLGCSIFTNDIDRALTAADDIKSGTVCINSPLMENIAAPFGGMKQSGIGREHGKEALDEFREAKHIFI

SEQ ID NO: 92439 - protein, 193 aa, Unknown
  Bacterial polypetide isolated from the Sargasso Sea
RQIVHKKVKDEFLYKVIKKVKKIKVGDPLDLKSNMGSMISKGHLQTVDGYIQTGIDEGAKLLSGGISDIKQKGFYAKPTLFDGLKENMTIAQEEIFGPVLGVLTVKNDEEALKVASNSKYGLHASVFTQDINRAFHLAKSLPCGTVSVNTFSEGDIKTPFGGYKQSGSLSRDQGTEALNSFLQTKTIWISHNN

SEQ ID NO: 92440 - protein, 212 aa, Unknown
  Bacterial polypetide isolated from the Sargasso Sea
AIERGALRCFRNSGQSCNAPTRMLVEKSMYDEAVKRLKKYADDFKVDDPNKEGEHIGPVISETQFNKIQGLIQKGIDEGAKLVSGGTGKPDGLKDGYYVKPTVFADVNNSMNIARTEIFGPVLSVIPFETEEEAIEIANDTDYGLTNYIQTQDGKKVQRVARKLRSGMVDVNGAGIAVDAPFGGYKHSGIGREAGKEGLIEFLEVKSVGGWS

SEQ ID NO: 92441 - protein, 158 aa, Unknown
  Bacterial polypetide isolated from the Sargasso Sea
MGPLVSDEQFQKVSGYIESGKSEGGEVVAGGKYDNSSGGHFVHPTVFAKTNADMTLVKEEIFGPVVCAQPFSDENLEKIANEANNTTFGLAASVWTKNISVAHKLASKIRAGTVWINCHNIFDASLPFGGFKESGWGREMGHEVLKNYTEVKAVTVNL

SEQ ID NO: 92442 - protein, 55 aa, Unknown
  Bacterial polypetide isolated from the Sargasso Sea
GRVWTNCYHAYPAHAPFGGYKQSGIGRETHKMMLNHYRQVKNLHVSYSEKKLGFF

SEQ ID NO: 92443 - protein, 320 aa, Unknown
  Bacterial polypetide isolated from the Sargasso Sea
FEKGSWSRMAPSKRKKILFNFADLMKKNILELGILETLNMGKPISNATGDIAACINCTRWYAEAIDKIYDDVAPTSDNLLATITREPLGVVGAVTPWNYPLLMACWKFAPALATGNSFILKPAEQSPLSALRVAELAIEAGMPEGVFNVVPGYGPTAGKALGMHMDVDKLGFTGSTEVGRYFLSYSGQSNMKRVSLECGGKSPNIIFADAPDLDHAAKMAANGMFGNSGQVCDAPSRLLVQKSIKDEFLEKVVNYSKPWMPNDPFNPETLMGTIVDKTQTEKILNYIDTGKSEGASVITGGDQVKRIQVVIILVQLYSKM

SEQ ID NO: 92444 - protein, 203 aa, Unknown
  Bacterial polypetide isolated from the Sargasso Sea
MKDLSLFRQQAYIAGNWSDADSGEKDDVLNPATGEVFGTVPRCGQQETRKAIEAANQAMPAWKATPAKERGKILRRWYELMIENKEDLAILMTAEQGKPLAESHGEILYASSFFEWFAEEAKRMYGETIPTHMPDRRLLVVKEGVGVTAAITPWNFPAAMITRKAGPALAAGCPMIIKPAPDTPFSALALCELGERAGVPKGI

SEQ ID NO: 92445 - protein, 169 aa, Unknown
  Bacterial polypetide isolated from the Sargasso Sea
STPIVIPSGEFRLGPISNKTQYEKIIKLIEIGIEEGARLVAGGVERPEGYDKGYYIKPTVFADVTNDMTIAKEEIFGPVLCIMKYETEEEAIKIANDTEYGLAGYVQGELSHAIEVGRQIRAGQITINGGARGNGAPFGGYKASGNGREHGMHGLEECLETKAIIAPTS

SEQ ID NO: 92446 - protein, 190 aa, Unknown
  Bacterial polypetide isolated from the Sargasso Sea
MLIERSNYDQAVEKLKKYSEEIQVGDPNKEGEHIGPVVSETQFKKIQFLIQKGIDEGAKLIVGGLGKPTGLQKGYFVKPTVFVDVNNKMEIARTEIFGPVLSVIPFENEDEAIEIANDTFYGLTNYIQTKDQEKARRVAKKLRSGMVDVNGAGIAIDTPFGGFKHSGIGREAGEHGLQEFLEVKSVGGWS

SEQ ID NO: 92447 - protein, 229 aa, Unknown
  Bacterial polypetide isolated from the Sargasso Sea
ELGGKGANIIFKDADSDAVARGVQRCFRNSGQSCNAPTRMLVEKSIYNETVDKVKELANSTKVDLPGKDGEHIGPVVSETQFNKIQNLIQKGIDEGAKLIAGGTGKPKGFEKGYFVKPTVFADVNNQMEIARTEIFGPVLSIIPFENEEEAISIANDTPYGLTNYIQTQDKEKVKRVARKLRSGMVDVNGVGIAVASPFGGYKHSGIGREAGIEGLIEFLEVKTVGGWN

SEQ ID NO: 92448 - protein, 320 aa, Unknown
  Bacterial polypetide isolated from the Sargasso Sea
RYFAGLADKIEGSTLPIDKKDMHVYTTHHPIGVVAAVVPWNAQMFLTATKLAPALAAGCSVIIKASEIAPCAMFELSKLIHEAGFPKGVVSIVTGDAGNCSAPLTSHPDIDRIAFTGGTDTARKIIQNSSNNFAATNLELGGKSPMIIFDDADLESAANGIIAGNFGASGQSCVAGSRVIVDKKISKKIIDLIVQKSNSIIVGDPENSKTNLGPLCTKDQIQKIEQTLNKSIQQGGKIIIGGNKISGEGNYFEPTLIHCPNSEIETLKIEMFGPVISIIEFENEEEAVNIANSSKYGLGSGIFTKNLSRAHRVSRQIQAG

SEQ ID NO: 92449 - protein, 256 aa, Unknown
  Bacterial polypetide isolated from the Sargasso Sea
LKANAEELALLETLDMGKPISDSLNIDVPGAAQALSWSGEAIDKIYDEVAATPHDQLGLVTREPVGVVGAIVPWNFPLMMACWKLGPALSTGNSVILKPSEKSPLTAIRIAALAVEAGIPKGVFNVLPGYGHTVGNALAVHMDVDTLVFTGSTKIAKQLLIRSGESNMKRVWLEAGGKSPNIVFADAPNLQAAAESAASAIAFNQGEVCTAGSRLLVESSIKDTFLPLVIEALKGWKPGNPLDPATTVGALVDTQQ

SEQ ID NO: 92450 - protein, 319 aa, Unknown
  Bacterial polypetide isolated from the Sargasso Sea
MNGLYPTASVLAAGNRIMVKPSEFTPNTASLIKEAVGKYFDESEFAVFLGGPEVGAEFTALPLDHLLYTGSGAVARKVVANAATNLVPTTLELGGKSPTIISADADLKLAAKRIMFVKTLNAGQICLSPDYIMIKKGLEEKLVSELQQVFKSFYPESNTKDYTSMVNDHHHQRMQEYLQDAKEKGAKIQNLGEFDSNENNIMTTKVLLNVNDNMRVMQEEIFGPLLPVMVYEELSEVVDYINKHDHPLGLYFFGNNKSEQNFIINNTRSGGVTINDAMFHLMQSRLPFGGVGPSGYGHYHGHEGFLNFSNLRAIYYQTN

SEQ ID NO: 92451 - protein, 193 aa, Unknown
  Bacterial polypetide isolated from the Sargasso Sea
MTTNYPDTHLFLNGEWREAVAKESLEIINPATEEVIGKVSHARKEDLDIALSAAEKAFDSWKNVSAYERSKILRKAADIVRSKADHIATLMTMEQGKPVIEAKMETMGAADSIDWYAEEGRRAYGRIIPSRAPEGVYQFVFKEPVGVVAAFTPWNFPLNQVVKKVAAAFAAGCTAIVKGPEETPGSVAELIKA

SEQ ID NO: 92452 - protein, 165 aa, Unknown
  Bacterial polypetide isolated from the Sargasso Sea
GDPKNDSTTIGPLVSDVQFKKVQNLIQKGIDEGAELLIGGTGKPDGLENGYYAKPTVFADVKNDMAISREEIFGPVLSMLTYKNIDDAVAIANDTEYGLAAYVSGEDKETLTSIARRLRAGQIHVNYGSGGADAPFGGYKQSGNGREKAEWGLEEFLEVKAIMGA

SEQ ID NO: 92453 - protein, 306 aa, Unknown
  Bacterial polypetide isolated from the Sargasso Sea
ILKPSEIAPLSGMLFAEIIEQAGFPNGVFNLINGDGNGVGTSLSSHPDIDMISFTGSTRAGKLISKNASDNIKKVCLELGGKGGNIIFSDSHPDAVREGVRNVMSNSGQSCDAPTRMLVENSIYRRAIEEAADEAKKIKVDIASKKGDHIGPVISKKQYDKIIDLINSGIKEGAKLIAGGPEKPHGLKNGYFIKPTIFTEVSNNMRIAKEEIFGPVLSIIPFSNEEEAITIVNDTSYGLGNYVQTLNLEKAKRVARKFRSGGVYINGNSADPGTPFGGYRQSGNGREGGIWGMEEYLEVKTICGWE

SEQ ID NO: 92454 - protein, 303 aa, Unknown
  Bacterial polypetide isolated from the Sargasso Sea
IACGNTFVLKPSEKDPSCPMRLAELAIEAGLPPGVLNVVNGDKEAVDTLLENKTVQAISFVGSTPIAEYVYHTGTKNNKRVQALGGAKNHMVIMPDADINKTTDAIIGSAFGSAGERCMAISVAVCVGKQTKEKIKTKLLEETAKLNVGPYTDEKSDFGPLNNKAHFEKVLGYIDTGEKEGAKLLSDGRNFKKQGYENGYFVGPTIFDDVKPEMKIYKEEIFGPVLSMMTTETYEEALNLVNDHELGNGAAVFTKSGNIAKHFTENAKIGMIGVNVPIPVPVAYHSFGGWKRSLFGDHSMHGP

SEQ ID NO: 92455 - protein, 226 aa, Unknown
  Bacterial polypetide isolated from the Sargasso Sea
MTIKVGINGMGRIGRMIVRSIYENYKDKIIIKHINNKSSSEVCANLLKYDSIHGNFSYLVKSGGNYIKINKEKISYTQHSMINDIKWKKYGVDYVFECTGKFNSKDKLLPHLENGVKKVIVSAPCKMADKTIVFGVNHKKIKKNDRIISAASCTTNCLAPVADVINKNFIIINGFMTTIHAFTSDQRILDNSHKDPRRARSASQSIVPTSTGASKAIGEIIPRIEK

SEQ ID NO: 92456 - protein, 135 aa, Unknown
  Bacterial polypetide isolated from the Sargasso Sea
EGAKLVAGGPGKPDGLSNGYYVKPTVFADVNNNMEIARTEIFGPVLSVIPFESEEEAIEIANDTDYGLTNYIQSQDPEKVKRLARKLRSGMVDVNGAGIAVDAPFGGFKHSGIGREAGKEGLLEFLEVKSVGGWN

SEQ ID NO: 92457 - protein, 308 aa, Unknown
  Bacterial polypetide isolated from the Sargasso Sea
GVCGLITPWNWPINQIALKVVPAFATGCTMILKPSEIAPISGMLFAEMIDEVGFPNGVFNLVNGDGAGVGTQISSHPDIDMVSFTGSTRAGRLISKNAAETIKRVCLELGGKGGNIVFADSYKNAVRDGIRNVMSNSGQSCDAPTRMLVEKSIYKRAVDEAVDEANKIKVDQASKKGDHIGPVISKTQYDKIINLIESGISEGATLSAGGPELPNGLNKGYFIKPTIFTNVTNEMRIAKEEIFGPVLSIIPFENEDEAVNIVNDTSYGLGNYLQTEDRKKAHRVAKKLRSGCVYINGNAADAGTPFWR

SEQ ID NO: 92458 - protein, 200 aa, Unknown
  Bacterial polypetide isolated from the Sargasso Sea
MGQSCNAPTRMLVEKSIYNETVEKVKKLANDTKVDSPQKDGDHIGPVVSEVQFNKIQTLIQKGIDEGAKLVAGGTGKPKGLEKGYYVKPTVFADVNNQMEIARTEIFGPVLSIIPFENEEEAISIANDTPYGLTNYIQTQDKEKVQRVARKLRSGMVDVNGVGIAVASPFGGYKHSGIGREAGTEGLIEFLEVKTVGGWN

SEQ ID NO: 92459 - protein, 286 aa, Unknown
  Bacterial polypetide isolated from the Sargasso Sea
ITPFNFPAMVPMWMFPMAIACGNTFVLKPSEKDPSCSIKLAELLNEAGLPEGVLNVINGDKEAVDALINNKDVTAMSFVGSTPIAKYIYENCAKNEKRVQALGGAKNHCVVMPDCDLDQAVNGLMGAAFGSAGERCMAQSVAVAVGSIGDRLVNSLAKKVEALKVGPGMDKQSEMGPLVTKEHLSKVKGYVDIGEKEGAKLIVDGRNFKLQGYENGYYIGGCLFDHVTKDMKIYKEEIFGPVLSVVRARDFNEALQLVNNHEFGNGVSIFTRDGDTGRTFSNKAKI

SEQ ID NO: 92460 - protein, 213 aa, Unknown
  Bacterial polypetide isolated from the Sargasso Sea
DAVARGVKRCFRNSGQSCNAPTRMLVEKSIYNETVDKVKELANSTKVDLPEKDGEHIGPVVSETQFNKIQNLIQKGIDEGAKLIAGGTGKPKGFEKGYFVKPTVFADVNNQMEIARTEIFGPVLSIIPFENEEEAISIANDTPYGLTNYIQTQDKEKVKRVARKLRSGMVDVNGVGIAVASPFGGYKHSGIGREAGIEGLIEFLEVKTVGGWN

SEQ ID NO: 92461 - protein, 232 aa, Unknown
  Bacterial polypetide isolated from the Sargasso Sea
MYEKFGQFIDGKWQQSSSGETYEVINPATEEIIGKASKANSKDVQRALKSAEKGLEIWKNTSPWERSKVIRKISELMRKKVDTLSKWLTLEVGKPFTEGAGEVGGAADIFEWNSEETKRIFGEINQSRFPNTKIHVIYQPVGVVAALVPWNFPVILASRKISTALAAGCSVIVKPDVITPGSVMEIVEICKEAGVPPGVVNLLSGDPAAISSELIQSDIIKKISITGSTRVG

SEQ ID NO: 92462 - protein, 123 aa, Unknown
  Bacterial polypetide isolated from the Sargasso Sea
TSNLTVFEAKNNMRISQEEIFGPVVSVIKFKDEAEALKIANDTLYGLGAAVWTRNGNIAHRMGRAIQAGIVWTNCYHAYPAHSPFGGYKQSGVGRETHKMMLNHYRQNKNLHVSYAEKKLGFF

SEQ ID NO: 92463 - protein, 284 aa, Unknown
  Bacterial polypetide isolated from the Sargasso Sea
VGYVREATHSEVEQALQNAVNNAPIWFATPPQERAAILHRAAVLMEGQMQQLIGILVREAGKTFSNAIAEVREAVDFLHYYAGQVRDDFDNETHRPLGPVVCISPWNFPLAIFSGQIAAALAAGNSVLAKPAEQTPLIAAQGIAILLEAGVPPGVVQLLPGQGETVGAQLTSDERVRGVMFTGSTEVATLLQRNIATRLDAQGRPIPLIAETGGMNAMIVDSSALTEQVVVDVLASAFDSAGQRCSALRVLCLQDDVADHTLKMLRGAMAECRMGNPGRLTTDI

SEQ ID NO: 92464 - protein, 148 aa, Unknown
  Bacterial polypetide isolated from the Sargasso Sea
DKIQSLIQVGIDEGAKLIAGGPGKPEGLSKGYFVKPTAFADVNNQMQIARTEIFGPVLSIIPFETEEEAIEIANDTPYGLLNFIQTQDQKKANRVARKLRSGMVDINGAGLAPDAPFGGYKHSGIGREAGKLGLEEYLEVKAVSGWNN

SEQ ID NO: 92465 - protein, 184 aa, Unknown
  Bacterial polypetide isolated from the Sargasso Sea
IYERAVKEAVDEANKIKVDQSSKKGDHIGPVISKIQYDKIINLIESGISEGATLAAGGPELPNGLNKGYFIKPTIFTDVTNEMRIAKEEIFGPVLSIIPFETEDDAVKIVNDTSYGLGNYLQTEDREKAHRVAKKLRSGCVYINGNGADAGTPFGGYRQSGNGREGGVWGLEEYLEVKNVTGWS

SEQ ID NO: 92466 - protein, 236 aa, Unknown
  Bacterial polypetide isolated from the Sargasso Sea
GKLILKNGADTIKRVCLELGGKGGNIVFADSYPNAVRDGIRNVMSNSGQSCDAPTRMLVEKSIYERAVKEAVEEANLIKVDHASKKGDHIGPVVSKIQYNKIISLIQSGIDEGATLAAGGPELPNGMNKGYFIKPTIFTDVTNDMRIAKEEIFGPVLSIIPFETEEEAIQIVNETEYGLGNYLQTEDKEKAKRVAKKLKAGTIYVNGNGADPGAPFGGYRQSGNGREGGVWGLHEF

SEQ ID NO: 92467 - protein, 140 aa, Unknown
  Bacterial polypetide isolated from the Sargasso Sea
FVEVVVGKLNSGLEKGNYIQPTVFEAKNDMRISQEEIFGPVVSVIKFKDEADALRIANDTLYGLGAGVWTRNGNIAYRMGRAIQAGIVWTNCYHAYPAHSPFGGYKQSGVGRETHKMMLNHYRQNKNLHVSYAEKKLGFF

SEQ ID NO: 92468 - protein, 260 aa, Unknown
  Bacterial polypetide isolated from the Sargasso Sea
PDIDMISFTGSTRAGKLITKNAANTIKRVCLELGGKGGNIVFADSYPNAVRDGIRNVMSNSGQSCDAPTRMLVEKSIYQRAIKEAADEANKIQVDVASKKGDHIGPVVSKAQYDKIINLINSGIEEGATLAAGGPDLPNGLNKGYFIKPTIFTDVTNNMQIAKKEIFGPVLSIIPFESEEEAINVTNDTEYGLGNYLQTEDKEKAKRVSKKLRSGIVYINGKSPDSGTPFGGYKQSGNGREGGSWGLEEYLEVKTITGWD

SEQ ID NO: 92469 - protein, 141 aa, Unknown
  Bacterial polypetide isolated from the Sargasso Sea
IKKGIDEGANLIAGGPGKPDGLKDGYYVKPTVFADVNNNMEIARTEIFGPVLSVIPFETEEEAIEIANDTPYGLTNYIQTEDQEKVKRVARKLRSGMIVANTASLAVDAPFGGFKHSGIGREGGKEGLLEFLEVKSIGGWN

SEQ ID NO: 92470 - protein, 263 aa, Unknown
  Bacterial polypetide isolated from the Sargasso Sea
GVPSIDGCSFPVFNPATEDAFATIMLGGEKDAQAAIEAARGAFPDWSQTSPQDRAAYLQKLLDIYVSRNDEMGAVISTEMGAPIDMAVRDQAGSGSSHLKAFIRALGSMEFQRALRPGTEGQDIAYEAAGVAGLITPWNWPMNQVVLKVGAALAAGCTMVLKPSEIAPLSSVVFAEMVHEAGLPPGVFNMVNGDGVGVGSILSSHPGIDVVSFTGSTRAGILISKAAADTVKTVSLELGGKSPNLVFDDCDVEKAVRFGAAFC

SEQ ID NO: 92471 - protein, 256 aa, Unknown
  Bacterial polypetide isolated from the Sargasso Sea
MSTNYPDTHLFLNGEWREAAAKESLEIINPATEEVIGKVSHARKEDLDIALNAAESAFNSWKHVSAYERSKILRKAADIVRSKADQIATLMTMEQGKPLIEAKMETMGAADSIDWYAEEGRRAYGRIIPSRAPQGVYQFVFKEPVGVVAAFTPWNFPLNQVVKKVAAAFAAGCTAIVKGPEETPASVAELIKAFDEAGMPKGSINLVYGIPAEISEYLIAHPIVRKVTFTGSTAVGKLLASQAGTHMKRVTMELGG

SEQ ID NO: 92472 - protein, 277 aa, Unknown
  Bacterial polypetide isolated from the Sargasso Sea
MDKKIFKVKGTYVNGKWLNSKDRYDIYNPSNGEKLSDVPISDKKELELAVDSAKKAQLIWSKTSLIERANALEKLAKKILEKEEEFALIDTYDSGNALTGMRKDVKETVNNIRYFCGLVREVKGETFSMEKNHLNFTRYQPYGVVLKINPFNHPFRFCVEKIAAPLLMGNSLIIKNSEQAPISSLRFCELLEDIFPKGLINVVTGGPDNGKFLVEHPDIKRIAVIGSVNTGIAVAKSAAPLLKNISLELGGKNPIIVFDDADPDFAASLAIKGMNLS

SEQ ID NO: 92473 - protein, 255 aa, Unknown
  Bacterial polypetide isolated from the Sargasso Sea
MLDKRKFYINGSWANPVKPNDYEVINPSTEKVCATISLGSSDDTNSAVNSAKKAFKSWKETKKEERLKLLEKLLSIYKSKWDEMTDAITTELGCPKDWCSANQTASGAGHIEDFIKRLKEFNFEPGFDKGSVNHIIYEPIGVCGLITPWNWPINQIALKVVPALATGCTMVLKPSEIAPLSGMLFAEMIHDAGFPAGVFNLVNGDGVGVGTDLSGHPDVDMISFTGSTRAGKLITKNAADTIKRVCLELGGKGGN

SEQ ID NO: 92474 - protein, 271 aa, Unknown
  Bacterial polypetide isolated from the Sargasso Sea
DFLIINNNKISYSQESDLENINWKKFDVDYVFECTGRFNSKDQLLSHIKNGAKKVIVSAPCKNADKTIVFGVNETILDKTDKIISAASCTTNCLAPVAYILNKNFEIEKGFMTTIHAFTSDQRILDNSHKDPRRARSASQSIVPTSTGASKSIGEIIPDLKGKLEGIAMRVPTPNVSLIELVFCTKKDLSIEKINSAFENFVKIQSKKIIEINSEKLVSIDFNHNSASSIIDTTLTNVVGKNMGKISAWYDNEWGFSNRMCDIAEYLHKIS

SEQ ID NO: 92475 - protein, 230 aa, Unknown
  Bacterial polypetide isolated from the Sargasso Sea
MYEKFGQFIDGKWQQSSSGETYEVINPATEEIIGKASKANSKDIQRALKSAEKGLEIWKNTSPWERSKVIRRISELMRKKVDTLSKWLTLEVGKPLTEGPGEVGGAADIFEWNSEETKRIFGEINQSRFPNTKIHVVYQPVGVVAALVPWNFPVILASRKISTALAAGCSVIVKPDVITPGSVMEIVDICKEAGVPPGVVNLLSGDPAAISSELIQSDIIKKISITGSTR

SEQ ID NO: 92476 - protein, 300 aa, Unknown
  Bacterial polypetide isolated from the Sargasso Sea
APLSGMLFAEMIDEAGFPAGVFNLVNGDGPGVGTDLSGHPDIDMVSFTGSTRAGKLITKNAAETIKRVCLELGGKGGNIVFADSYPDAVRDGIRNVMSNSGQSCDAPTRMLVEKSIYKRAVDEAADEANKIKVDLASKNGDHIGPVISKTQFDKIQSLINSGIEEGATLVAGGPDKPEDLQKGYFIKPTVFTDVNNNMRIAKEEIFGPVLSIIPFENEDEAVQITNDTEYGLGNYLQTEDKEKARRVSKKLRSGIVYVNHKPADSGTPFGGYRQSGNGREGGTWGLHEYLEVKTVTGWTG

SEQ ID NO: 92477 - protein, 169 aa, Unknown
  Bacterial polypetide isolated from the Sargasso Sea
TKVDAPNKDGDHIGPVVSETQFNKIQTLIQKGIDEGAKLVAGGTGKPKGLERGYYVKPTVFADVNNQMEIARTEIFGPVLSIIPFENEDDAISIANDTPYGLTNYIQTQDKEKVKRVARRLRSGMVDVNGVGIAVGSPFGGYKHSGIGREAGTEGLIEFLEVKTVGGWN

SEQ ID NO: 92478 - protein, 267 aa, Unknown
  Bacterial polypetide isolated from the Sargasso Sea
TPFNFPAMVPMWMFPIAIAAGNTFILKPSPLDPSASLMIADLLTQAGLPDGVFNVVQGDKDSVEALIDHPHVKALSFVGSTPIANLIYERGAKHGKRVQALGGAKNHMVVMPDAHLDKAVDALIGAAYGSAGERCMAISVAVLVGDVADKVVPMLTERAKALKVKDGMQLDAEMGPIVTRQAHQRITGYIEKGVAEGAQLIVDGREFDSTQAGKGCADGFWMGGTLFDHVTPEMTIYKEEIFGPVLVCVRVPDVATAIQLINDHEFG

SEQ ID NO: 92479 - protein, 273 aa, Unknown
  Bacterial polypetide isolated from the Sargasso Sea
ATPQDVDEALKSAEKGLEVWKKTAPWQRSYIIRRIADKMREKQDILAKWMTLEVGKPFVEAKGEVNGAADIFEWNAEETKRIYGQTVESRFEDTRVHVYYQPVGVVAALSPWNFPAVLSARKISTALAAGCSVIIKPDVITPGVVMEMVDICNECGVPPGVVNLLSGDPPSIAQQLISSDIVKKISITGSSRVGKLILKQAADKVQRVTMELSGHSPFIVFDDADIKKAADMAIAAKFRNNGQVCISPNRFYIHEKKKDEFINLFVEKTKKLK

SEQ ID NO: 92480 - protein, 211 aa, Unknown
  Bacterial polypetide isolated from the Sargasso Sea
IHKMFLTAVKLAPALAMGNSIIIKASEVAPTPLLEFAKLIDKVKLPRGVVNIITGFPENCSKVLTSHPKIDRIAFTGGVQTAKQIVKNSAENLSHVTLELGGKSPVVIFKDARKDNAINGVMASIFGASGQSCIAGSRLYLQEEIYDEYLEEIKNKALQIKIGEPMEPSTQLGPLATLQQLTNIEKKISETLNQGGKIIMGGSKPTNISKG

SEQ ID NO: 92481 - protein, 260 aa, Unknown
  Bacterial polypetide isolated from the Sargasso Sea
LDQRKKILEEVLEGMEERREDFAQIISEEMGSPITMARRAQYGSGTIHFKNTLSIIDRFDFQEVHGNITINKLPIGPVGMITPWNWPLNQMCTKVASAIAAGTTFVIKPSEITPGAAHILAEVIDKTSMPKGMFNLIHGHGITVGKAMSSHPDLEMISFTGSTRAGIDIQKNAADNIKRVSLELGGKSPNIILEDVDLENAVTMGMKQCFLNTGQSCSSPTRMLLPEHMLDEATKYAIAAANDMSTGDPLDEEIYLGPNI

SEQ ID NO: 92482 - protein, 285 aa, Unknown
  Bacterial polypetide isolated from the Sargasso Sea
MNSTEKFRNYINGQWKNSISGKEYEVFNPADKNQLLGSIPFCSKKDADLAIDAASSSLHEWSNITAPERGEILFEVLRIMDSRKLDLAETITLEEGKVLSDSEAEVKRSMNIIQFSAGEGRRLLGNTSQSENENNVSYTMRKPLGVVGIITPWNFPLAIPAWKIAPALICGNTVIFKPAFSTPLSAIKLVEIFEEAGLPPGVINLVTGSGSEIGQSLVEDNRVQGISFTGSTEIGTKIYSDGASKLKKIQCEMGGKNAVIVLKDADIEKAAKDVVIGAFGSTGKD

SEQ ID NO: 92483 - protein, 228 aa, Unknown
  Bacterial polypetide isolated from the Sargasso Sea
MQTYQHYINGQFIDPKAGVWFDTENPYTGEVWAKIPRGDAGDVDHAVAAAKAAFDGVWGQTGPTQRGKLLVKLAEIIEREAVRLGEIEVRDNGKLIAEMGAQTKYLAEWYRYYGGLADKVEGAVIPSDKPGIFNFTRYEPLGVIGMITAWNSPLLLLAWKLAPALAAGNTAVIKPSEYTSASTLEFMKLVGEAGFPAGVVNTVTGFGLDVGAPLVDHRHVDKIAFTGS

SEQ ID NO: 92484 - protein, 186 aa, Unknown
  Bacterial polypetide isolated from the Sargasso Sea
MSSGNKYKVIASKIKFEGRAFINGKYVNAIDGKKFETINPATGKKLCAVAKCNHKDVNLAVKVSRKAFNSGVWSKSSPEHRKEVLLKFAELLRKHGDENSVLESIDTGKLITDCINEVANDAPMHFQWYGELIDKVFGKVGPTEPSITSLIVKEPIGVVAGIVPWNFPLMMAVWKMAPALAAGCSV

SEQ ID NO: 92485 - protein, 291 aa, Unknown
  Bacterial polypetide isolated from the Sargasso Sea
MIRYTGITIPYQNDFMVYALRERLGITAHIIPWNYPMQIIGRSICASLAMGNACILKPSEEACLTALAFGEIAREAGLSNGALNILPGLGSEVGKAIAKHKKVNHISFTGSLRTGQKVQKFASKNVTPTTLELGGKSPQIVFSDSNLDRAITYLVNAGIQNSGQTCSASSRILVEKSIFKKVLKRMSDRYEQLKVGSASEDLDLGPVISKKQMDIISEYEAQAENLKLLAKGKLVKDTNPDGFYKTPKLFTTEDFKHVLAQEEIFGPIQVIIPFNDEDEAIEIANSTDYGL

SEQ ID NO: 92486 - protein, 278 aa, Unknown
  Bacterial polypetide isolated from the Sargasso Sea
IGVCGLITPWNWPINQITLKVIPALATGCTMILKPSEITPLSGMLFAEIIDEAGFPPGVFNLINGDGSDVGTYLSSHIDIDMISFTGSTRAGKLISKNAADSIKRVCLELGGKGGNIIFADSHSEAVREGVRNIMSNSGQSCDAPTRMLVERSIYKRAIEEATDEANKIKVDIASKKGSHIGPVISKKQYEKIIDLINSGIEEGATLVAGGPDRPSELHKGYFIKPTIFTNVSNNMRIAKEEIFGPVLSIIPFENEEEAISIVNETSYGLGNYVQTQD

SEQ ID NO: 92487 - protein, 257 aa, Unknown
  Bacterial polypetide isolated from the Sargasso Sea
MKKNLKDKFDPFESNQLFSYSTYLNNFITLYKKGNLPKVLMLSGEKGLGKFTLAFHLFHFINTERDKEYRYNLDKQIFINNVSFISSLKSNTCENFYYLGNNHEVSVSINDVREIKKKLTNRPLNGFPRIIVFDDADLFNKNSANSLLKIIEEPTEFNYFILINNQRNYILDTLKSRSIEFKIFLKKNEKKIILSNLLKKNNINLSLDENIIYNLTPGILLRIHDTLIDYKIDLSNDYLSNIEILLDVYKKNKQYIF

SEQ ID NO: 92488 - protein, 280 aa, Unknown
  Bacterial polypetide isolated from the Sargasso Sea
MSNLKKYKMFINGEWVESESKKTFKSLNPENNEPWVEVPEANEKDVDKAVKAAQKAFEGKWPKLFPRERAKYLKAIAEQLRANAELLGKIETIDTGKLFKETKTQANYIAEYYDYYAGLADKVEGTVLPIDKANMQVITTRVPIGVVAAIIPWNSQMLLTAVKLAPALAMGNTIVIKSSELAPATLFEFAKLIEKTGIPKGVVNIVSGFGNPCGKALTSHNLVERVAFTGGPETARNIIKNSAENLSQVSLELGGKSPVCCFEDADQEKCLMEYRRNFWC

SEQ ID NO: 92489 - protein, 283 aa, Unknown
  Bacterial polypetide isolated from the Sargasso Sea
NSHEVADALTSSIFPQVITLIGSTQTGQHIMRTGASSIKRYSMELGGNAPVLVFDDADLDLAADIVTGVKFSNAGQICVAPNRVFVAENVKEKFTEKVVSRAKAALVGFNKNKDITTGPVIDKRAFQKIKGLIKDAVMNGAKLLVGGNRPKYLKKGYYISPTVLCDVTEEMQVYQQEIFGPIVSLISFSEETNLLNMANDCDEGGLTAYIFTTNQTRAEFYASKLRYGEIQINGVKYDIDLPHGGIGQSGIGHDCSSLALQDYLIQKRITCSNNTYELGKAIS

SEQ ID NO: 92490 - protein, 205 aa, Unknown
  Bacterial polypetide isolated from the Sargasso Sea
TEEAFAIISLGSAEDADKSNKCCQESHLRLGEKTTKEERLALLEKFDEIYNRRWDEMVEAQSKEMGAPLDFASETHTKMGADICRNNIEILKDFNFEHQFDPKSNNHIRYEPIGVCGLITPWNFPMNQIVLKVIPALAAGCTMILKPSEIAPVSAVLFAEMIDEAGFPAGVFNLVNGNGEVVGNHISGHPDIDMVSFTGSTRAGK

SEQ ID NO: 92491 - protein, 233 aa, Unknown
  Bacterial polypetide isolated from the Sargasso Sea
MSWEKDDDFFDKCIEGFVMFNLNQGEVCTCPSRALIQESIYDKFMERAIARTKAVKQDNPLKMETMIGAQASVEQMEKIKSYLELGKKEGAKVLTGGSVAKLNSGLEKGNYIQPTIFEAKNDMRISQEEIFGPVVSVIKFKDEAEALKIANDTLYGLGAAVWTRDGNKAHRMGRGIQAGIVWTNCYHAYPAHSPFGGYKQSGVGRETHKMMLNHYRQNKNLHVSYAEKKLGFF

SEQ ID NO: 92492 - protein, 327 aa, Unknown
  Bacterial polypetide isolated from the Sargasso Sea
FIRYLKNFDFEKPLGEHAPNQRLIYEPKGVCALITPWNWPMNQVCLKVMPAIASGCTMVLKPSELAPLSSMILAELIDETKIPAGVFNLVNGDGATTGDALTSHPDVNMISFTGSTRAGALISQNAAKDFKRVSLELGGKGANIIFKDADPDAIERGALRCFRNSGQSCNAPTRMLVEKSMYNDAVERLKKYTENFEVGDPKKEGEHIGPVISETQYNKIQTLIKKGIDEGAKLVAGGLGKPDGLEKGYFVKPTVFADVNNKMEIARTEIFGPVLSVMPFETEEEAIEIANDTPYGLTNYIQTTDKEKVKRVARKLRSGMVDVNGAG

SEQ ID NO: 92493 - protein, 187 aa, Unknown
  Bacterial polypetide isolated from the Sargasso Sea
MKTYNHYINDEWVEPSSGAYLDSENPFTGENWARIARGNSEDADLAVKAAKQAFENSEWAEMRPTQRGKLLVGLAEIIEREAVRLGEIEVRDNGKLIAEMGAQTKYLAEWYRYYGGLADKIEGAVIPSDKPGIFNFTRYEPLGVVGMITAWNSPLLLLAWKLAPALAAGNTAVVKPSEFTSASSLEF

SEQ ID NO: 92494 - protein, 244 aa, Unknown
  Bacterial polypetide isolated from the Sargasso Sea
MTIKIGINGMGRIGRMVVRSIIESKNKNLKINHINNRSNSETTSKLIKYDSIHGKLNADLEYDPNHLIINKNKITFSQETKIEDINWKKHDVDYVFECTGKFNSKEKLLSHIENGAKKVIVSAPCKNADKTIVFGVNENIITKEDKIISAASCTTNCLAPVISVLDQNFEIEKGFMTTIHAFTSDQRILDNSHKDPRRARSASQSIVPTSTGASKAIGEIIPNLKGKLEGVAMRVPTPNVSLVE

SEQ ID NO: 92495 - protein, 298 aa, Unknown
  Bacterial polypetide isolated from the Sargasso Sea
LWKMGDLVVENAAELSAVETQDNGKRTADILPGLQSWLAESFWYYAGLADKIYGDVIPANITGILNYTRLEPYGVVASITAWNSPLLIAIWKIAPALAAGNTMVIKPSEHASASTLALMKILSELVPPGVLNVVTGFGQEVGEPLVDHSEVRMVSFTGSISGGRRVAEVAARQIKPVVMELGGKSPQIVFQDLKLDDAAHGVALGLFPPAGQSCVAGSRLLVQRGIQDELVQKICDVASQARLGPPLEPETQIGPMANEQHFERVIGYIDQARNEGAECVLGGKAAKPEGTSGWFIEP

SEQ ID NO: 92496 - protein, 120 aa, Unknown
  Bacterial polypetide isolated from the Sargasso Sea
MGLSLVFFVKPTVFADVTRDMTIFREEIFGPVLCITSYSSEEEAVELANDSEYGLSGGVWSDDEERAMRVAKMLRTGQVSINGGAFNVTAPFGGYKQSGLGRELGVHGMEEFLEIKSIQR

SEQ ID NO: 92497 - protein, 212 aa, Unknown
  Bacterial polypetide isolated from the Sargasso Sea
AVKDGVRNIMSNSGQSCDAPTRMLVEKPIYERAVKDAVDEANNIKVDLASKKGNHIGPVVSKVQYDKVVNLIESGIKEGATLAAGGPDLPNGLDKGYFIKPTIFTDVNNDMRIAREEIFGPVLSIIPFETEEEAVSIVNDTSYGLGNYLQTEDREKAQRVARKLRAGTVYINGHGTETGAPFGGYKQSGNGREGGTWGLEEYLEVKAITGWK

SEQ ID NO: 92498 - protein, 308 aa, Unknown
  Bacterial polypetide isolated from the Sargasso Sea
AEAKGEILMGVTYIDFYAEEGKRVYGDIIPDPMPDRRIVVIKQPVGVVGAITPWNFPSTMITRKCAPALAVGCTVVIKPASQTPYSALALGVLAKEAGFPDGVINIITGSASEIGKELTENSLVKKISFTGSTEVGKILLKQSASTVKKVSMELGGHAPFIVFDDANIDEAVVGAMQSKFRNSGQTCICANRIFVHEKVYDDFLNKFIQEVKKIKVGNGLEEGIVSGPLIDQPSLMKVHDQVKDAVNQGAKIAVGGDIHELGGNFFQPTILSDVTSKAKITYEETFGPIAPLYKFSSDEEVIKLANDT

SEQ ID NO: 92499 - protein, 148 aa, Unknown
  Bacterial polypetide isolated from the Sargasso Sea
LSQVSLELGGNAPFIVFDDADLDAAVAGALASKFRNAGQTCVCANRILVQRGVYDAFAARLAAAVGALVAGVGTQPGVQIGPLIDGRAVDKTARHVDDALSKGATCLVGGARMPALGPNFYAPTVLAGATRDMAVFDEETFGPLAPLF

SEQ ID NO: 92500 - protein, 107 aa, Unknown
  Bacterial polypetide isolated from the Sargasso Sea
VTNNMRVAKEEIFGPVLSIIPFETEEEAIKIVNETEYGLGNYLQTEDKEKAKRVSRKLKAGTIYVNGNGADPGAPFGGYKQSGNGREGGVWGLHEFLEVKTITHWPK

SEQ ID NO: 92501 - protein, 293 aa, Unknown
  Bacterial polypetide isolated from the Sargasso Sea
IKYLRKFEFEKPWGEHAPNQRLIYEPKGVCALITPWNWPMNQVCLKVMPALAAGCTMVLKPSELAPLSSMILAELIDETKFPSGVFNLINGDGATTGDALTSHPDINMISFTGSTRAGALISQNAAKDFKRVSLELGGKGANIIFKDADPEAIERGALRCFRNSGQSCNAPTRMLVEKSIYKEAIERLKKYTENFEVGDPKKEGEHIGPVISETQYNKIQTLIKKGLDEGAKLIAGGPGKPKGFEKGYFVKPTVFADVKNSMDIARTEIFGPVLSVIPFENEDEAIIIANDTP

SEQ ID NO: 92502 - protein, 269 aa, Unknown
  Bacterial polypetide isolated from the Sargasso Sea
ETAGQAIGMHNDIDTVSFTGSTEVGRMFMRYSGESNLKSVGLEMGGKSPFIVLDDAVINDDLIEHAAMAAFWNGGQNCSANMRQIIAKPLVDDFLDKMLKRVAAFRLGDPLDPETTIGSMITPEHKAQVMSYIEKGTAEGAKLIVGGDVDGPGQFISPAVFDGVTNDMTIARDEIFGPVLGVMPVTSPDEALAIATDTDYGLHATVFTRDIDRAISMARRLPCGTVSVNGFSEGDIKTPFGGYKQSGSLARDNGTEALEQYLQTKTIWI

SEQ ID NO: 92503 - protein, 103 aa, Unknown
  Bacterial polypetide isolated from the Sargasso Sea
MKIARTEIFGPVLSIIPFETEEEAIEIANDTPYGLLNLIQTQDQEKANRVARKLRSGMVDINGAGLAKDAPFGGYKHSGIGREAGILGLEEYLEVKAVSGWND

SEQ ID NO: 92504 - protein, 262 aa, Unknown
  Bacterial polypetide isolated from the Sargasso Sea
HPDIDMVSFTGSTRAGRLISKNAAETIKRVCLELGGKGGNIVFADSYKNAVRDGIRNVMSNSGQSCDAPTRMLVEKTIYERAVNEAIDEANKIKVDQASKKGDHIGPVISKTQYDKIINLIESGISEGATLAAGGPDLPNGLNKGYFIKPTIFTNVTNEMRIAKEEIFGPVLSIIPFESEDEAVNIVNDTSYGLGNYLQTEDRKKAHRVAKKLRSGCVYINGNAADAGTPFGGYRQSGNGREGGVWGLEEYLEVKTVTGWKD

SEQ ID NO: 92505 - protein, 286 aa, Unknown
  Bacterial polypetide isolated from the Sargasso Sea
QAEKKETYDVINPATEEVIGKASKASSVDVQKALKSAEKGLQVWKNTTPWKRSYIIRKIADLMRQKQDVLAKWLTLEVGKPLAEGIGETGGAADIFEWNAEETKRIYGQTVESRFPDTRVHVYYQPVGVVAALVPWNFPLVLAARKISTALAAGCSVICKPDVITPGTVMELVDICREAGVPPGVVNLLSGDPAEISNELLESDIVKKVSITGSTRVGKLILKKAADKVQRVTMELSGHSPFIVFDDVDINKVADMAITAKFRNNGQVCISPNRFYIQEKKKDEFI

SEQ ID NO: 92506 - protein, 196 aa, Unknown
  Bacterial polypetide isolated from the Sargasso Sea
CTAGSRLLVESGVKDDLIALIAEELASWHPGHPLDPATVSGAVVDKQQLDTVLSYIKAGKDEGATLVHGGSQVMADTGGVYVQPTVFSNVNNQMKIASEEIFGPVLSVIEFNGMEEAISIANDTIYGLAAGVWTSDISKAHKTAKALRAGMVWINHYDGGDMTAPFGGYKQSGNGRDKSLHSFDKYTELKATWIVL

SEQ ID NO: 92507 - protein, 290 aa, Unknown
  Bacterial polypetide isolated from the Sargasso Sea
MPIKPESRAFLQRAPKMLIGADWTSASDGALMDLRNPATGEVLCQVPAGTVADVDRAVRAARQAFDDSAWSRTRPRERQNLLWKLASLMERDADLLAELECLNNGKSAAVARVMDVQLAIDFLRYMAGYATKIEGSTVDVSMPLMPDGDFHGYIRREAVGVVGAIVAWNFPLLLACWKLGPALATGCSVVLKPADETPLSALKLAELVLEAGYPAGMFNVVTGTGITAGAALSHHPLVDKLTFTGSTPVGKQIGKAAMDNMTRVTLELGGKRPTIVMADADLATAAAGAA

SEQ ID NO: 92508 - protein, 103 aa, Unknown
  Bacterial polypetide isolated from the Sargasso Sea
KMEIAKTEIFGPVLQFMPLKNEDEAIEIANDTPYGLTNYIQTRDPEKVKRVARKLRSGMVDVNGAGIAVDAPFGGYKHSGIGREAGKEGLIEFLEVKSVGGWN

SEQ ID NO: 92509 - protein, 295 aa, Unknown
  Bacterial polypetide isolated from the Sargasso Sea
PVFNPATGEEIAQVKLGNLKDLNQIVEKAQKAFYSWSNTPPLQRARVLFKYKELIEKNSDLLIKIIVSEHGKVYEDARGSLTRGLEVVEYACGIPQMLKGEFTENVGKNVDSWSLRQPLGICAGITPFNFPAMVPMWMFPMAIACGNTFILKPSEKDPSCSIKLAELFSEAGLPDGVFNVVNGDKEIVDAIIQNKNISAVSFVGSTPIAKYIYENCAKNEKRVQALGGAKNHCVVMPDCDLDQAVNGLMGAAYGSAGERCMAQSVAVAVGNIGDLLVKNLKTKVESLKIGPGMDK

SEQ ID NO: 92510 - protein, 294 aa, Unknown
  Bacterial polypetide isolated from the Sargasso Sea
MVPMWMFPVAIACGNTFVLKPSEKDPSCSMKLAELFLEAGLPPGVFNVVNGDKEAVDAIIKNKDIAAVSFVGSTPIAKYIYENCAKNEKRVQALGGAKNHCVVMPDCDLDQAVNGLMGAAYGSAGERCMAQSVAVAVGKIAEPLVKNLSKKVESLKVGPGLDKKSQMGPLVTKEHLEKVKGYVDIGVKEGAKLVVDGRNLKLQGYENGFYMGGCLFDYVKKNMRIYKEEIFGPVLSVVRAKDYNEALSLVNDHEFGNGTSIFTRDGDTGRSFASKVKNWNGWHKHTNSSSDGVS

SEQ ID NO: 92511 - protein, 240 aa, Unknown
  Bacterial polypetide isolated from the Sargasso Sea
AAKDFKRVSLELGGKGANFIFKDADPEAIERGALRCFRNSGQSCNAPTRMLVEKSMYNEAIERLKKYTENFEVGDPKKEGEHIGPVISETQYNKIQTLIKKGIDEGAKLVAGGPGKPKGLEKGYFVKPTVFADVNNNMDIARTEIFGPVLSVMPFETEEEAIQIANDTPYGLTNYIQTQDKEKVKRVARKLRSGMVDVNGAGIAVDAPFGGFKHSGIGREAGEHGLEEFLEVKSVGGWNN

SEQ ID NO: 92512 - protein, 171 aa, Unknown
  Bacterial polypetide isolated from the Sargasso Sea
INKNFIILNGFMTTIHASQSDQRILDNSHKDPRRARSASQSIVPTSTGASKAIGEIIPSLKGKLEGIAMRVPTPNVSLIEFIFNVKKNITVKKLNNSLFSASKTKLKNILNVTDEQLVSVDFNHNSASAIIDSSLTNVVGNKMGKISAWYDNEWGFSSRMCDIAEYVSKIK

SEQ ID NO: 92513 - protein, 227 aa, Unknown
  Bacterial polypetide isolated from the Sargasso Sea
MALAYNDVVEKRNAIDFKTQAFINGNYVDSQTGKTFESISPVDGKLITNVSECDIEDINKAVKAAREVFEKGSWSRMAPSKRKKILFNFADLMKKNILELGILETLNMGKPISNATGDIAACINCTRWYAEAIDKIYDDVAPTSDNLLATITREPLGVVGAVTPWNYPLLMACWKFAPALAAGNSFILKPAEQSPLSALRVAELAIEAGIPEGVFNVVPGFGPTAGK

SEQ ID NO: 92514 - protein, 202 aa, Unknown
  Bacterial polypetide isolated from the Sargasso Sea
QGEVCSAGSRLIVQKEIEKDFINKVAEISENMKPADPLDPSSFAGAIVSSEQLEKINKYVNTGKEEGAEIKVGGNITMKETGGCYFEPTIFKNVENSMKIAQEEIFGPVLTALSFNNFEEAISIANDTEYGLAAGVWTKDINKAIKASREIRAGTVYINNYEEGVDSTIPLGGYKQSGIGRDNGYQALENYLQVKSTWIKVS

SEQ ID NO: 92515 - protein, 269 aa, Unknown
  Bacterial polypetide isolated from the Sargasso Sea
KNQTILYEPKGVCALITPWNWPINQVNLKVIPALAAGCTVVLKPSEIAPLSSMLLAEMINEAGFPKGVFNLINGDGAITGEALTSHPDINMISFTGSTRAGALISQNAAKDFKRISLELGGKGANIVFKDAGPEAISWSVLRCFRNSGQSCNAPTRMLVEKSIYNETVEKVRDFANKTKVDKPNKNGDHIGPVISETQFNKIQNLIQKGIDEGAKLVAGGVGKPKGLEKGYYVKPTVFTDVNNQMEIARTEIFGPVLSIIPFETEDEAI

SEQ ID NO: 92516 - protein, 295 aa, Unknown
  Bacterial polypetide isolated from the Sargasso Sea
LDSLDMGKLINDAVTIDAPGSAAFFQWHAEAIDKMYDEIAPTGPGDLAMVTREPLGVVGAVVPWNFPLDMATWKASAALAAGNSIVLKPAEQSPLSSLRLAELAVEAGVPEGVFNVVPGFGEMAGKALGLHPDVDCIAFTGSTAVGKLFQQYAGQSNMKQVWLETGGKSPNLIFADCKDLEAAINMAAFGIFFNQGEVCSANSRLLVERTVQEEFVERLSSIAKDTQPGHPLNPESKMGAIVNEEQTKKIVSYIKKGKENADLVIGGEQIKIEGKGCYVQPTIFNNVNANDIIAK

SEQ ID NO: 92517 - protein, 273 aa, Unknown
  Bacterial polypetide isolated from the Sargasso Sea
EERISLLEKLLKIYKKRFNEMSDAISLEMGSPIDYSISTHTSSGQSHLEDFILRLKEFNFEEHFDKKSNNHIRHEPIGVCGLITPWNWPINQIALKVVPAFATGCTMILKPSEIAPISALLFAEMIDEAGFPPGVFNLVNGDGAGVGTHMSGHPDIDMISFTGSTRAGRLILKNAADTIKRVCLELGGKGGNIVFADSYSNAVRDGIRNVMSNSGQSCDAPTRMLVEKSIYERAIKEAADEANKIKVDVASKKGDHIGPVVSKVQYDKIINLI

SEQ ID NO: 92518 - protein, 138 aa, Unknown
  Bacterial polypetide isolated from the Sargasso Sea
GIDEGATLLAGGPEKPEGLKEGYFIKPTIFTNVSNDMRIAKEEIFGPVLSIIPFDNEEDAVSIVNDTEYGLGNYVQTQDKEKAKRIARKFRSGGVSINGNSADPGTPFGGYRQSGNGREGGFWGLEEYLEVKTISGWE

SEQ ID NO: 92519 - protein, 241 aa, Unknown
  Bacterial polypetide isolated from the Sargasso Sea
MNLSKFYIDGDWVDPIEPNSIPVINPASEESIGSVSIGSKEDVDIAVKAARYAFQSFSKTLVSERVELLTEIRNIYKKRFDDIAAAIQTEMGAPNSLARGSQATVGLSHLKTAIRVLENHKFEFKHGSYIVRHEPIGVCGLITPWNWPINQVVSKLAPCLASGCTAVLKPSEIAPLSSMVIAEIFHEAGVPKGVFNLVNGLGPVVGEAMSNHVGIDMMSFTGSTRGGIAVARASANSVKRV

SEQ ID NO: 92520 - protein, 323 aa, Unknown
  Bacterial polypetide isolated from the Sargasso Sea
NKWFNSENPANGKVWATVPDCSEKDIDIAVQAAKKAFYDGPWGKLMPAERGRVLRKIGDVISKNADRIGAIETRDNGKLPSQITPSLREGAWLLDSWYYYAGMCDKFEGKLIPAELPDMHNYMKWEPFGVVAQILPWNSPIGTLIWKLAPCLAAGNTVVLKPSEQASCSILELMDILLDADIPSGVLNVVTGYGLTTGEPLIDHPDVRMVSFTGGTNGGKAAAKIASQQVKPIVMELGGKSPQIVLPDADIDLAVKGVASGIFPAGGQSCISGSRLLIHSSIIDKFTEQLVKVCKRATVGDPLEGSTTIGPIANRVHYERILD

SEQ ID NO: 92521 - protein, 107 aa, Unknown
  Bacterial polypetide isolated from the Sargasso Sea
SLFTNVQPSYNMQREEIFGPVLTTLTFRTPEEAVEIANNTEYGLSAGVWTEKGSKILWTADRLDAGVIWANTFNKFDPSSPFGGYKESGFGREGGRHGLLSYLKVQS

SEQ ID NO: 92522 - protein, 241 aa, Unknown
  Bacterial polypetide isolated from the Sargasso Sea
MEMVNICKESGVPPGVVNLLSGDPPSIAQQLIASDIVKKISITGSSRVGKLILKQAAEKVQRVTMELSGHSPFIVFDDADIKKATEMAIAAKFRNNGQVCISPNRFYIHENKKEEFINLFIEKTKKLKIGNGMDPETQLGPLTTEKRLKEVEELVEKTKREGAKVLLGGKRPAGFNKGFFYEPTVFDNIKDDYTIMKQEPFGPLVPMLSFKSFDEVIERANNHELGLCSYVCTNSMETAHL

SEQ ID NO: 92523 - protein, 293 aa, Unknown
  Bacterial polypetide isolated from the Sargasso Sea
IDEAKGEIAYGASFIEFFAEEAKRIYGETIPGHQTDKRITVLKQPIGVAASITPWNFPNAMITRKAGPALAAGCAFVARPAAETPLSALAMGVLADRAGIPKGVLSVIPSSRSSDIGKEFCENPIIRKLTFTGSTEVGRILLKQASEQIMKCSMELGGNAPFIVFDDADIDAAVEGAIMCKFRNNGQTCVCANRIYVQSGVYKEFAKKLSLAVSKMKVGDGFANGTALGPLINSEAIEKVQEHIADAKSKGANVILGGETIQGPGNFLTPTIVTQATKEMLVSKEETFGPFAP

SEQ ID NO: 92524 - protein, 100 aa, Unknown
  Bacterial polypetide isolated from the Sargasso Sea
IAKEEIFGPVLSIIPFDNEEEAVKISNDTAYGLTNYIQTTNKEKAKRVAKQLRSGMVEINGTSFANGSPFGGYKQSGNGREGGSWGLEEFLEIKSISGWQ

SEQ ID NO: 92525 - protein, 80 aa, Unknown
  Bacterial polypetide isolated from the Sargasso Sea
KINEFVFSASKTKQLKNILTTNNQPLVSVDFNHNASSSVFDLTQTQVVNEKFCRVLSWYDNEWGFSNRMIDTMLDFKKFV

SEQ ID NO: 92526 - protein, 146 aa, Unknown
  Bacterial polypetide isolated from the Sargasso Sea
VDGYIQKGIDEGAKLLSGGVSNNKQKGFYAKPTLFDGLKENMTIAQEEIFGPVLGVLTVKNDEEALKIASNSKYGLHASVFTQDINRAFHLAKGLPCGTVSVNTFSEGDIKTPFGGYKQSGSLSRDQGTEALNSFLQTKTIWISHN

SEQ ID NO: 92527 - protein, 262 aa, Unknown
  Bacterial polypetide isolated from the Sargasso Sea
SGGEAEINAAVAAAKAAFPAWANTPAKQRAKLMRRLGELIEQNVPHLAALETMDTGLPIAQTSKQLIPRASENFHFFAAVCTQVNGRTYPVDDQMLNYTLYQPVGVCALISPWNVPFMTATWKVAPCLALGNTAVLKMSELSPLTADQLGRLALEAGIPPGVLNVVQGYGATAGDALVRHPDVRVVSFTGGTTTGKRIMERAGLKKFSMELGGKSPVLVFDDADLDRALDASLFTIFSINGERCTAGSRIFVQESVYDDFVR

SEQ ID NO: 92528 - protein, 216 aa, Unknown
  Bacterial polypetide isolated from the Sargasso Sea
EVSEPIGVIACIIPWNSQMFLTATKVAPALAAGNTVVIKSSELAPAPLAEFVKLTEQAELPKGVINLLSGGAEVGKSLTSHKYIGKVLFTGGTETGSHVIRNTAENFAQLTLELGGKSPVIVFEDADIENALNNITTAIFSGNGCSCIAGSVLLLHDKIYDEFLHQLKNRAESIKLGSPLEAETQMGPLNNLKQIEFIEKNIELSIKQGAKILCGG

SEQ ID NO: 92529 - protein, 137 aa, Unknown
  Bacterial polypetide isolated from the Sargasso Sea
QDEGANLVHGGQQVLAKTGGVYVQPTIFSQVHNKMKIASEEIFGPVLSVIEFNGMEEAIAIANDTIYGLAAGVWTADISKAHKTAKALRSGMVWINHYDGGDMTAPFGGYKQSGNGRDKSMHSFDKYTEIKATWIAL

SEQ ID NO: 92530 - protein, 218 aa, Unknown
  Bacterial polypetide isolated from the Sargasso Sea
SYGLHIAGEAVAAEPGRTFESFNPTTGRRWGDFAIAGADQVDRAVTAAAKAFRGPWSRMSATERGRLLMRWGDAIAENAMHIGALEATQNGKLASEMQTQARIVRDWLCYFGGMADKIEGAVIPVAQTSVLNYTLKEPLGVVAVIVPWNSPTLLMIESAAPALAAGNTIVVKPSEVTSASAIEIARLAESVGIPPGVLNVVTGLRETGEALVGHPQVR

SEQ ID NO: 92531 - protein, 287 aa, Unknown
  Bacterial polypetide isolated from the Sargasso Sea
MIWKKTSPWNRASIIRKIADLMRKKNNELAKWMTLETGKPLTESLAEVNGSADIFEWNAEETKRIYGQTVQSRFENTRAIINYEPVGVVAALSPWNFPLILASRKISTALAAGCSVICKPDVITPGTVMELVDIINQCGVPPGVVNLLSGDPASIASQLISSDIVKKISLTGSTRVGKIILKQAAEKIQRVTMELSGHAPFIVHEDADIEKSVDMAMAAKYRNNGQVCISPSRFYIHESKKEKFTKSFVDKTLKLKIGNGMHKDVQLGPLTTKKRLEEIEKLVEVTK

SEQ ID NO: 92532 - protein, 231 aa, Unknown
  Bacterial polypetide isolated from the Sargasso Sea
PINQIALKVIPALATGCTCILKPSEHTPISAMIYSEIIHEAGYPPGVFNLIHGLGETVGSAMSGHPDIQMMSFTGSTRAGRAVTQDAAETVKRVTLELGGKSPNLIFADCNLEERVTASIDECMFNTGQSCDAPTRLLVERSCYEEVLKIAKSAANSITVGDPAQEGDHIGPLFDQIQFERVQAMIQKGLDEGATLLTGGLGKPEGYKTGWYVKPTVFADVSNDMVIAQEE

SEQ ID NO: 92533 - protein, 183 aa, Unknown
  Bacterial polypetide isolated from the Sargasso Sea
IERSIKEAKEEANNIKVDLSHKKGDHIGPVVSKKQYDKILDLIQSGIDEGATLVSGGIDRPDGLTKGYFVKPTIFTNVSNDMRIAKEEIFGPVLSIIPFENEQEAISIVNDTTYGLGNYVQTQDKEKARRVARQFRSGGVYINGSGADPGTPFGGYRQSGNGREGGAWGLEEYLEVKTISGWK

SEQ ID NO: 92534 - protein, 250 aa, Unknown
  Bacterial polypetide isolated from the Sargasso Sea
LNRIGDIIAKNAERIGQIETKDNGKLPKNITPSLTSWQTESFYYYAGMCDKFEGRLIPSEVPNMHNYLKWEPFGVVALILPWNSPIGTLIWKLAPALAAGNTVVIKPSERASCSSLELMKVLEEADLPEGLINVITGFGTTTGVPLIEHDDVRMISFTGGTKGGSAASLAASKKVKPIIMELGGKSPQIVFEDADLNLSVNGVVSGIFPVTGHSCISGSRILVHKKIKDQFIKKLLDVVKKAKVGNPNDP

SEQ ID NO: 92535 - protein, 232 aa, Unknown
  Bacterial polypetide isolated from the Sargasso Sea
MTTSLPERTPTGLLIGSDWLTTATHLEVVNPATLGTLAEIGDASPAEGVQAVQAAHDAFADWGSSSARFRAEILRKAFEIMTAEIEDCARLISLENGKAWKDAMGEAMYAAEFFRWFSEEAAHVQGDFRYSPSGDKTIITDYRPMGVAYLITPWNFPAAMATRKLAPAMAAGCTSILKPAQETPLTALWVADVLERAGAPAGVVNVITTSTSGPVSQAILSDPRVATLSFTG

SEQ ID NO: 92536 - protein, 258 aa, Unknown
  Bacterial polypetide isolated from the Sargasso Sea
MVLKPSELAPLSSMILAELIDESKIPAGVFNLVNGDGATTGDALTSHPDVNMISFTGSTRAGALISQNAAKDFKRVSLELGGKGANIIFKDADPDAIERGALRCFRNSGQSCNAPTRMLVEKSMYNDAVERLKKYTENFEVGDPKKEGEHIGPVISETQYNKIQTLIKKGIDEGAKLVAGGPGKPDGLEKGYFVKPTVFADVNNQMAIARTEIFGPVLSVMPFETEEEAIEIANDTPYGLTNYIQTKDKEKVKRVARK

SEQ ID NO: 92537 - protein, 318 aa, Unknown
  Bacterial polypetide isolated from the Sargasso Sea
LDAAQDAFADWASRTPRARSEILRKAYELMIERQEEFARLITLENGKAGNDARGEAAYAAEFFRWFSEEAVRVDGLITHAPASGARIVVQHKPAGIAVLVTPWNYPAAMGTRKIAPALAAGCPVIIKPASETPLTMLALMPLLEEAGVPKGVVNVLPSKKTGPLVDRLLHDPRVRVVSFTGSTEIGRVLLRSAADQVLKPAMELGGNAPLIVFDDADIDIAVEGAMLAKMRNLGEACTAANRFYVHKKVFDDFVSKFTNAMANLKTGNGLDPETDVGPLVNQSTKDKVAFFVKDAVSKGAEIKLGGEDIEGPGFYYPP

SEQ ID NO: 92538 - protein, 219 aa, Unknown
  Bacterial polypetide isolated from the Sargasso Sea
MRKLETFNPATGERLAELNITPSKEIQAMVGRAKKAQITWAKKSNRDRANLIIKAYKEIKNRSKQMAEIIHKEMGKIHEEAANEVESSIKRIPRIAEDVVDALKSEETNDGVTRTISYWDPLGVCASITPWNFPMGMPQTLIIPSLIAGNTVLFKPSEEVPLVGIEYAQILNKTLPEDVLQVVIGTGDQGRELVESDIQLITFTGSQSTGKHILEQAAK

SEQ ID NO: 92539 - protein, 288 aa, Unknown
  Bacterial polypetide isolated from the Sargasso Sea
EIIDEANFPPGVFYLINGDGATTGDALTSHPDVNMISFTGSTRAGALISKNAAEDFKRVSLELGGKGANIIFNDADSEAVERGALRCFRNSGQSCNAPSRMLIEKSMYDEAIQRLKKFTNEFKVDNPNKEGDHIGPVISENQFNKIQNLIKKGINEGAKLLVGGPGKPEGLDQGYYVKPTVFIDVKNDMEIAKTEIFGPVLSVMPFESEEEAISIANDTPYGLTNYIQTQDSEKIKRVAKKLRSGMVDVNGAGIAVDAPFGGYKHSGIGREAGIEGLTEFLEIKTVGG

SEQ ID NO: 92540 - protein, 169 aa, Unknown
  Bacterial polypetide isolated from the Sargasso Sea
TKVDSPQKDGDHIGPVVSEVQFKKIQTLIQKGIDEGAKLVAGGIGKPKGLEKGYYVKPTVFADVNNQMEIARTEIFGPVLSIIPFENEDEAISIANDTPYGLTNYIQTQDKEKVKRVARKLRSGMVDVNGVGIAVASPFGGYKHSGIGREAGTEGLIEFLEVKTVGGWN

SEQ ID NO: 92541 - protein, 66 aa, Unknown
  Bacterial polypetide isolated from the Sargasso Sea
RKKIYDYQTESLVSIDHLKTTKSSIIDSNYIDTVNSNLIKMVIWYDNEWGYSNRVVDILDYISKRK

SEQ ID NO: 92542 - protein, 287 aa, Unknown
  Bacterial polypetide isolated from the Sargasso Sea
MYSNFGQFIDGKWQPSEDNDTYEVINPATEEIIGKASKASEKDVTKALKSAEKGFEIWKKTPAWERSAKIRKIADLIRKRKNDLAKWLALEVGKPLIEGVGEVMGAADIFEWNSEETKRIFGQTVESRFEDTRVQVIYQPIGVVAALVPWNFPIVLASRKISTALAAGCSVIVKPDVITPGSVMELMNIINDAGVPPGVVNLLSGDPEKISNQLILSDIIKKVSITGSTRVGKLILKKAADKVQRVTMELSGHAPFIVFEDSNIDKVTDVAIASKYRNNGQVCISPS

SEQ ID NO: 92543 - protein, 274 aa, Unknown
  Bacterial polypetide isolated from the Sargasso Sea
MFPVSIACGNTFVLKPSEKDPSCPMRLAEIAIEAGLPPGVLNVVNGDKEAVDTLLENKTVQAISFVGSTPIAEYVYHTGTKNNKRVQALGGAKNHMVIMPDADVNKTTDAIIGSAFGSAGERCMAISVAVCVGKETKEKIKTKLLEETAKLNVGPYTDERSDFGPLNNKAHFEKVLGYIDTGEKEGAKLLTDGRNFKKQGYENGYFVGPTIFDNVKPDMKIYKEEIFGPVLSMVTTETYEDALNLVNDHELGNGAAVFTKSGNIAKHFTENAKI

SEQ ID NO: 92544 - protein, 280 aa, Unknown
  Bacterial polypetide isolated from the Sargasso Sea
ATEEVIGKASKASSEDIEKALKSAEKGFLIWKKFSPWDRATIIRKVADLMRRKNNELAKWMTLETGKPFTEALAEVSGSADIFEWNAEETKRIYGQTVQSRFENTRVIINYEPVGVVAALSPWNFPLVLAARKISTALAAGCSVICKPDVITPGTVMELVDIINQCGVPPGVVNLLSGDPSSIASQLISSDIVKKISLTGSTRVGKIILKQAAEKIQRVTMELSGHAPLIVYEDANVEKAVDIAMAAKYRNNGQVCISPSRFYIHESKKKQFTESFVKKT

SEQ ID NO: 92545 - protein, 261 aa, Unknown
  Bacterial polypetide isolated from the Sargasso Sea
CNDKIRKLTFTGSTEVGKKLLKQGADQVLKMSMELGGNAPFIVFDDADIDKAVEGAIISKFRNNGQTCVCANRIYVQDGVYDLFAKKLEVAVSKMIVGDGFSTSSTLGPLITNDALNKVEEHIEDALKKGATVRCGGKRHSIGGTFFEPTVLTNVDKSMQISEEETFGPVAPLFRFKDEDDVIEQANNTIFGLASYFYASDLKRVWKVAEALEYGMVGINTGLISTEVAPFGGVKQSGLGREGSHHGIDEYLELKYLCLSL

SEQ ID NO: 92546 - protein, 159 aa, Unknown
  Bacterial polypetide isolated from the Sargasso Sea
TTIHAYTNDQVLTDVMHSDLRRARSATQSMIPTKTGAAAAVGLVLPELDGKLDGFSVRVPTINVSLVDLSFIASRETSVDEINEVVKAASDGALKGVLDYNDGPLVSIDFNHNPASSTYDATMTKVQEGTLVKVCSWYDNEWGFSNRMLDTTLALVNAD

SEQ ID NO: 92547 - protein, 325 aa, Unknown
  Bacterial polypetide isolated from the Sargasso Sea
EKIKVDNPANVKIIGNVPKCSTSETKKAIEVAQVAFSSWKNKTAKERSLILQKWARLIEKNADDLAKIMTVEQGKPLAEAKGEILMGVTYIDFYAEEGKRVYGDIIPDPMPDRRIVVIKQPVGVVGAITPWNFPSTMITRKCAPALAVGCTVVIKPASQTPYSALALGVLAKEAGFPDGVINIITGSASAIGKELTENPLVRKISFTGSTEVGKILLQQSAATVKKVSMELGGHAPFVVFDDANIEEAVTGAMQSKFRNSGQTCICANRIFVHEKVYDEFLNKFTQEVSKIKVGNGLEEGIISGPLIDQLSLMKVHDQVKDALIK

SEQ ID NO: 92548 - protein, 169 aa, Unknown
  Bacterial polypetide isolated from the Sargasso Sea
MNIAINGFGRIGRSVFRILNGKENVNIVAINDIFDKEALTYLLKYDTVMGRFPEQINLKGDTLNTKSQKVKLLAEKNPETLPWEDLAVDIVVESTGIFRKRAQLDKHLIAGAKRVVLTVPSKDEIDYTVVLGVNDHGLNSKHKIISNASCTTNCLAPMAKVLNDAFGIE

SEQ ID NO: 92549 - protein, 297 aa, Unknown
  Bacterial polypetide isolated from the Sargasso Sea
TKRIYGQTVESRFPDTRVHVYYQPVGVVAALVPWNFPIALASRKISTALAAGCSVICKPDVITPGAVMELVDICKEAGVPPGVVNLLSGDPASISEQLINSDIIKKVSITGSTRVGKLILKQAANKVQRVTMELSGHSPFIVFDDADINKATDMAITSKFRNNGQVCISPNRFYIQEKKKEEFINSFIRKAKKLKIGNGMDKDVQLGPLTTEKRLNEVEQLVETTKKEGAKVLMGGKRPAGFNKGYFYEPTVFDNVQDNFTIMKEEPFGPLVPILSFNDFDEIIERSNKNDLGLCSY

SEQ ID NO: 92550 - protein, 273 aa, Unknown
  Bacterial polypetide isolated from the Sargasso Sea
LEGYTVLTLREPHGVTGHIIPWNYPMQIIGRTIGGALTMGNACVLKPGEEASQTSLKIGDLSLKAGFPPGVLNIVPGLGEEAGEALLKHPGVSHYSFTGSTEIGVKVQQEAAKRAVPVTLELGGKSPQLVFSDADIEKALPFLVNAAIQNAGQTCSAATRVLIEKPIFQELTERLAKKISSLRSGPALQDLECGPLISKVQKDRVEGFLLRARQDGVEFLAEGSIVEDAPQGGNYVAPCMVGGVPPKHTLAQDEVFGPLLVTMPFEGEEEGIE

SEQ ID NO: 92551 - protein, 234 aa, Unknown
  Bacterial polypetide isolated from the Sargasso Sea
MKIKVGINGMGRIGRMIVRTIIENNNKNIEIKHINNRTNSETCSSLLKYDSIHGKFNANVSFDNNHLIVNKNKISFSQETDLKNINWKKFGVDFVFECTGKFNSKDKLLPHIKNGAKKVIVSAPCKNADKTIIFGVNETEIKKEDSIISAASCTTNCLAPVAYVLNENFEIEKGFMTTIHAFTSDQRILDNSHKDPRRARSASQSIVPTSTGATKTIGEIIPSLKGKIEGVAMR

SEQ ID NO: 92552 - protein, 224 aa, Unknown
  Bacterial polypetide isolated from the Sargasso Sea
IVLEDAKITDDLIDNAMNSAFWNGGQNCSANMRQIVHKKVKDEFLDKIFKKVKKLKVGDPLDLKSNMGSMISKGHLQTVDGYIQKGIDEGAKLLSGGVSDNKQKGFYAKPTLFDGLKENMTIAQEEIFGPVLGVLTVKNDEEALKIASNSKYGLHASVFTQDINRAFHLAKSLPCGTVSVNTFSEGDIKTPFGGYKQSGSLSRDQGTEALNSFLQTKTIWISHN

SEQ ID NO: 92553 - protein, 246 aa, Unknown
  Bacterial polypetide isolated from the Sargasso Sea
MNTIQHFVNGNKFSGDSKRVGKVYNPATGDQSAEVKLASAKDVNDAVESAKKAFETWSNKPPLQRARVMFKFKELIEKNSDELTKIIVSEHGKVYEDAKGSLTRGLEVVEYACGIPQMLKGEFTENVGSNVDSWSIRQPLGVCAGITPFNFPAMVPMWMFPMAIACGNTFVLKPSEKDPSCSVRLAELLKEAGLPDGVFNVVNGDKAAVDALINNKDVVAMSFVGSTPIAKYIYEECAKNEKKSAS

SEQ ID NO: 92554 - protein, 285 aa, Unknown
  Bacterial polypetide isolated from the Sargasso Sea
FNPATEEVLGKASKADEEDVNKALKSAEKGLEVWRNTPPWQRSKIIRRIADLMRERTDVLAKWLTLEVGKPLSEAKGEVGGAADIFEWNSEETKRIYGQIVESRFEHTRMYVKYEPVGVVAGLIPWNFPIMLSSRKISTALAAGCSVICKPDVITPGSVMELMNIINDAGVPPGVVNLLSGDPAKISSQLMSSDIVKKVSITGSTRVGKLILKQAAEKVQRVTMELSGHSPFIVFDDVDINKVTDMAITAKFRNNGQVCISPARFYIHESKKDEFAKTLVEKVTK

SEQ ID NO: 92555 - protein, 300 aa, Unknown
  Bacterial polypetide isolated from the Sargasso Sea
RISLLEKLLNIYKKRFDEMANAISMEMGAPIDWSTNVQTASGQSHLEDFIIRLKEFNFEKNFDPKSNNYIRHEPIGVCGLITPWNWPINQIALKVIPAFATGCTMILKPSEIAPISGVIFAEMIDEADFPNGVFNLVNGTGDVVGNQISGHPDIDMVSFTGSTRAGKLILKNSAETIKRVCLELGGKGGNIVFADSYPNAVRDGIKNVMSNSGQSCDAPTRMLVEKSIYEKAIKEAADEASKMNVDLASKKGDHIGPVVSKVQYDKIINLINSGIEEGATLAAGGPELPNNLNKGYFINQ

SEQ ID NO: 92556 - protein, 311 aa, Unknown
  Bacterial polypetide isolated from the Sargasso Sea
FVPLVSIFAAGNQVMHKPSEHTPLTSALLKDLCDKAYDEVEFATFLGGPEVGAAFTKLNFDHLLYTGGGSVAKHVMNAASENLVPLTLELGGKSPVVLGKSADLKTSAKRIMFGKTLNAGQICLAPDYVVVHKDQKNDFIKETKDAVSEYFPKIKDNDDYTSIINESHYNRLKDMIDDAIEKGATVEEINPANEDFSQQEFYKIPPTIVSNTTDDMKIMQEEIFGPLLPVVEYDEIDEATQLINSKDRPLGLYYFGNDKTEEDNLLNKTSSGGVTVNNVISHLQQNDLSFGGEGPSGMGRYKSFEGFKNFQ

SEQ ID NO: 92557 - protein, 300 aa, Unknown
  Bacterial polypetide isolated from the Sargasso Sea
MFPIAIACGNTFILKPSEKDPSCSIMLAQLLKEAGLPDGVFNVVNGDKESVDAILENKNIKAVSFVGSTPIAKYIYENAAKNEKRVQALGGAKNHLVVMPDCDIDGAVNGLMGAAYGSAGERCMAQSVAVAVGDIGDELVSRLSKKAEALKVGPGMDKNSEMGPLITKEHLEKVKGYVDLGVKEGADLVVDGRNIKLQGYENGFFIGGCLFDNVKKDMRIYKEEIFGPVLSVVRVKTFEDATKLINDHEYGNGVSIYTRDGDAGRTFASKIQVGMVGINVPIPVPMAFHSFGWLEKIIIW

SEQ ID NO: 92558 - protein, 129 aa, Unknown
  Bacterial polypetide isolated from the Sargasso Sea
LAGGLGKPEGMDKGWFVKPTIFSDVSNDMSIAQEEIFGPVLVIIPFENESDAVAIANDTPYGLAAYLQTGDPDRKERVSAKLKAGAVHINGGGIEYGTPFGGYKQSGNGREGGLMGLEDYLETKTLHGL

SEQ ID NO: 92559 - protein, 269 aa, Unknown
  Bacterial polypetide isolated from the Sargasso Sea
NPSNQQHLGDVPLADEKDVNRAVIAAKNAFPDWSRMPIKERAGFLINLADRLMDYRDELGMMDCVDSGNALSGMKGDVNWSSDSLKFFANLITEIKGQTHSEKSGHLNFTRRHPYGVVAKINPFNHPLRFCAEKSAAALAAGNTVVVKASEQAPLSSLRFAEICEEVLPQGVVNVLTGDKICGDAMVRHPDVRRVGVVGSVATGKIIAKSAAEDLTHVTLELGGKNPIIIFPDANPKQAASYAVKGMNMNRQGQSCSSTSRVLVHQESP

SEQ ID NO: 92560 - protein, 242 aa, Unknown
  Bacterial polypetide isolated from the Sargasso Sea
KSPNIFSLKISWEKDDDFFDKCIEGFVMFNLNQGEVCTCPSRALVQESIYDKFMERAVARTKAVVQDNPLKMETMIGAQASVEQMEKIKSYLELGKKEGAKVLTGGSVGKLNSGLEKGNYIQPTIFEANNQMRISQEEIFGPVVSVIKFKDEAEALKIANDTLYGLGAAVWTRNGNIAHRMGRAIQAGIVWTNCYHAYPAHSPFGGYKQSGVGRETHKMMLNHYRQNKNLHVSYAEKKLGFF

SEQ ID NO: 92561 - protein, 259 aa, Unknown
  Bacterial polypetide isolated from the Sargasso Sea
MNASQRGELLNNLANLMQQNASELGKIEVRDNGKLFIEMKAQVIYAASILRYYAGLADKIEGAVIPSDKDALIYTRYEPLGVCAAIVPWNSPIICAVFKIAPALSAGNTVIIKPSEYTSASILELMKLVGKAGFPKGVINVVTGFGKDVGAALVAHPLVKKLSFTGSSQTGAAIYSDAAKSIKHVGLELGGKSPNIVFEDANLDNAIKGAIAGIYAASGQTCIAGSRLLVQSSIHDEFVERLKEFAQHAIMGDPMDIKT

SEQ ID NO: 92562 - protein, 298 aa, Unknown
  Bacterial polypetide isolated from the Sargasso Sea
MIIKIGINGMERIGRMVFRSIVESKNKNLKINHINNRSNSETTSKLIKYDSIHGKLNAHLGFDANHLIINKNKISFSQETKIEEIDWKIHDVDYVFECTGKFNSKEKLVAHLKNGAKKVIVSAPCKNADKTIVFGVNENIITKEDKIISAASCTTNCLAPVANVLNENFEIEKGFMTTIHAFTSDQRILDNSHKDPRRARSANQSIVPTSTGASKAIGEIIPSLKGKLEGIAMRVPTPNVSLVELVFCTKKKIDIKKINNAFEQASKNKLKKILKVTNEKLVSIDFNHDPASAIVDAS

SEQ ID NO: 92563 - protein, 123 aa, Unknown
  Bacterial polypetide isolated from the Sargasso Sea
MKIAINGFGRIGKLVFRAFLEKNIKGCKIVAINELGSIESSFHLLKHDSNHGILGKKIKKKHNSIQYDNNIVKFFSEKNPIKLPWKKLGIDVVLECSGVFTSKDKAYAHINAGAKKVIISAPA

SEQ ID NO: 92564 - protein, 302 aa, Unknown
  Bacterial polypetide isolated from the Sargasso Sea
MLVVYHNYLRGEFTENVGTNVDSWSMRQPLGVCAGITPFNFPAMVPMWMFPIAIACGNTFVLKPSEKDPSCSMKLAELFLEAGLPPGVFNVVNGDKEAVDAIINNKDIAAVSFVGSTPIAKYIYENCAKNEKRVQALGGAKNHCVVMPDCDLDQAVNGLMGAAYGSAGERCMAQSVAVAVGKIADPLVESLSKKVESLKIGPGLDKKSQMGPLVTKEHLEKVKGYVDIGVKEGAKLVVDGRNLKLQGYENGFYMGGCLFDNVKKDMRIYKEEIFGPVLSVVRVKDYGEALSLVNDHEFGNGT

SEQ ID NO: 92565 - protein, 113 aa, Unknown
  Bacterial polypetide isolated from the Sargasso Sea
KPTIFSDVNNDMKIARTEIFGPVLSIIPFETEEEAIAITNDTSYGLGNYLQTEDKEKAKRVARKVRAGTVYINGQATDTGMPFGGYKQSGNGREGGVWGFTEFLEVKAITGWN

SEQ ID NO: 92566 - protein, 233 aa, Unknown
  Bacterial polypetide isolated from the Sargasso Sea
MFPMAIACGNTFVLKPSEKDPSISIKLAELFKEAGLPDGVFNVINGDKEVVDAILTNKDIKAVSFVGSTPIAKYIYENAAKNEKRVQALGGAKNHCVVMPDCDLDQAVNGLMGAAYGSAGERCMAQSVAVAVGNIGDNLVNELSKKVEALKVGPGMDKKSEMGPLVTKEHLEKVKGYVDLGVKEGAKLVVDGRNLKLQGYENGYYIGGCLFDHVKKNMRIYKEEIFGPVLFCS

SEQ ID NO: 92567 - protein, 164 aa, Unknown
  Bacterial polypetide isolated from the Sargasso Sea
SKKGDHIGPVVSKVQYDKIISLIQSGIDEGATLAAGGPELPKGMNKGYFIKPTIFTDVTNDMRVAKEEIFGPVLSIIPFETEEEAIKIVNETEYGLGNYLQTEDKEKAKRVSKRLKAGTIYVNGNGADPGAPFGGYKQSGNGREGGTWGLHEFLEVKTITHWPK

SEQ ID NO: 92568 - protein, 253 aa, Unknown
  Bacterial polypetide isolated from the Sargasso Sea
EALGRHKDIDAVSFTGSTEVGGYFLKYSSESNLKPVALEMGGKSPFIVLEDAKITDDLIDNAMNSAFWNGGQNCSANMRQIVHKKVKDEFLDKVIKKVKKLKVGDPLDLKSNMGSMISKGHLQIVDGYIQKGIDEGAKLLSGGVSSKKQKGFYAKPTLFDGLKENMTIAQEEIFGPVLGVLTVKNDEEALKIASNSKYGLHASVFTQDINRAFHLAKSLPCGTVSVNTFSEGDIKTPFGGYKQSGSLSRDQGT

SEQ ID NO: 92569 - protein, 289 aa, Unknown
  Bacterial polypetide isolated from the Sargasso Sea
KEAQPTTGAWLEKRDPHTGQTMSLVADSSSEDVSLALDAAEAAFMEWSCMTPIARGQVLADIVASMKIKKVELAACIASETGKPPQDAEGEVSGAIQQGSFFAGEGMRLYGRTLTSAMPGKQSFTVRQPRGIAGLIVPANTPIANIAWKAFPALITGNTVVMKAAEDAPAIANLFAQLAQEAGLPDGVFNVIQGNGQPAGSSLVEDPRVDIISFTGSSDVGRWIAEVAGRRLARVSLELGGKNPFVVCNDADMEQAIHWASLSAFSNAGQRCAAGSRIIVFKEYIRFIS

SEQ ID NO: 92570 - protein, 186 aa, Unknown
  Bacterial polypetide isolated from the Sargasso Sea
MSSGNKYKVIANKLKFEGRAFINGKYVNAIDGKKFETINPATGKKLCVVAKCNHKDVDLAVKVSRKAFNSGVWSRSSPEHRKEVLLKFAELLRKHGDENSVLECIDTGKLITDCINEVANDAPMHFQWYGELIDKVFGKIGPTEPSITSLIVKEPIGVIAGIVPWNFPLMMAVWKMAPALAAGCSV

SEQ ID NO: 92571 - protein, 269 aa, Unknown
  Bacterial polypetide isolated from the Sargasso Sea
NHLTINKKKITFSQETDLNNINWKKFNVDYVFECTGKFNSKENLLPHLKNGAKKVIVSAPCKNADKTVVFGVNENKIKKNDNIISAASCTTNCLATVAYVLNENFEIEKGFMTTIHSFTSDQRILDNSHKDPRRARSASQSIVPTSTGASKAIGEIIPSLKGRLEGIAMRVPTPNVSIVELVFCTKKDINIEKINNAFKKFSKKQKKKVLEITNEKLVSIDFNHNAASSIVDASLTKVVGKNMGKISAWYDNEWGFSNRMCDIVDYIHK

SEQ ID NO: 92572 - protein, 259 aa, Unknown
  Bacterial polypetide isolated from the Sargasso Sea
MYEKFGQFIDGKWQQSSSGETYEVINPATEEIIGKASKANSTDIQNALKSAQRGLEIWRNTSPWERSKVIRRISELMRNKVDTLSKWLTLEVGKPLSEGPGEVGGAADIFEWNSEETKRIFGEINQSRFPNTKIHVVYQPVGVVAALVPWNFPVILASRKISTALAAGCSVIVKPDIITPGSVMEIVNICKEAGVPPGVVNLLSGDPAAISSELIQSDIIKKISITGSTRVGKLILKQAADKVQRVTMELSGHSPIYCV

SEQ ID NO: 92573 - protein, 285 aa, Unknown
  Bacterial polypetide isolated from the Sargasso Sea
NYIAYEPIGVCALITPWNWPINQITLKVIPALAAGCTMILKPSEIAPLSGMLFAEMIDEAGFPPGVFNLINGDGAGVGTELSGHLDIDMVSFTGSTRAGKLISKNAASNIKRVCLELGGKGGNIVFEDSYPDAIREGVRNVMSNSGQSCDAPTRMLVQKTIYERAVKEAAEEANKIKVDLAEKNGDHIGPVVSKKQYDKIIDLIQSGIDEGATLVAGGIERPSGLKKGFFIQPTIFTNVTNNMKIAKEEIFGPVLSIIPFENEEEAISIVNNTSYGLGNYVQTQN

SEQ ID NO: 92574 - protein, 218 aa, Unknown
  Bacterial polypetide isolated from the Sargasso Sea
KVIVSAPCKNADKTIVFGVNENEIKKEDNIISAASCTTNCLAPVAHVLNESFEIEKGFMTTIHSFTSDQRILDNSHKDPRRARSASQSIVPTSTGASKAIGEIIPSLKGKLEGVAMRVPTPNVSLIELVFCTKKDLSIENINSAFENFCKKQKIKVLEITKEKLVSIDFNHNPASAIVDATLTNVVGKNMGKISAWYDNEWGFSNRMCDIAEYLRKIS

SEQ ID NO: 92575 - protein, 284 aa, Unknown
  Bacterial polypetide isolated from the Sargasso Sea
KDPSCSIKLAHLLTEAGLPDGVFNVVNGDKESVDAILENSDIKAVSFVGSTPIAKYIYENSAKNEKRVQALGGAKNHLVVMPDCDLDGAVNGLMGAAYGSAGERCMAQSVAVAVGDIGDELVSRLSKKAEALKVGPGMDKASEMGPLVTKEHLERVRGYVDLGVKEGAKLVIDGRDLKLQGYENGFYIGGCLFDHVNKDMRIYKEEIFGPVLSVVRVKTFEEAAKLINDHEYGNGVSIYTRDGDAGRTFASKIQVGMVGINVPIPVPMAFHSFGGWKRSLFGDS

SEQ ID NO: 92576 - protein, 126 aa, Unknown
  Bacterial polypetide isolated from the Sargasso Sea
EHKNISKIAFTGSDISGQKIYETAAKKIMPVSLELGGKSPNIVFEDADFEAAIMGVISGIFAATGQTCIAGSRLLVQDSIYEKFVERLVKVASEAKIGDPMSLDTHVGPVTTKPQFEKIMSYIDIA

SEQ ID NO: 92577 - protein, 289 aa, Unknown
  Bacterial polypetide isolated from the Sargasso Sea
MLKKQKEFIGQTIQSRFKNTRVIINYEPVGVVAALSPWNFPLVLASRKISTALAAGCSVISKPDVITPGTVMELVDIINQSGVPPGVVNLLSGDPPSIASQLISSDIVKKISLTGSTRVGKIILKQAAEKIQRVTMELSGHAPFIVYGDANVEKAVDMAMSAKYRNNGQVCISPSRFYIHESIKKEFTESFVKKTLKLKIGNGMDKDVQLGPITTKKRLEEIEKLVEVTKKEGAKILCGGKRPSGFNKGYFYEPTIFDNVQDDFKIMTEEPFGPLTPLLTFNNFDEVIK

SEQ ID NO: 92578 - protein, 274 aa, Unknown
  Bacterial polypetide isolated from the Sargasso Sea
MELSLLDTIDMGKTINDTYNADLPTSIDNIEWYAEIIDKLFDDISPSSKEYLGLITKEPIGVVAAIVPWNYPLWMAIWKIAPALITGNSVILKPAEQSPMSAIKIGALLSEAGIPDGVFSVLPGDGPITGKSLCLHNDIDCVAFTGSGEVGKLVLQYSGQSNMKRVQLECGGKSPNIIFADCDDLDRAAEASAYAIFGNQGEVCSAGSRLIIQKDIEKDFINKVVQLSKKMQPSDPLNPDSFAGAIVNTEQLEKINKYVNIGKKEGADIEVGGN

SEQ ID NO: 92579 - protein, 103 aa, Unknown
  Bacterial polypetide isolated from the Sargasso Sea
IAQEEIFGPVLGVLTVKNDEEALKIASNSKYGLHASVFTQDINRAFHLAKSLPCGTVSVNTFSEGDIKTPFGGYKQSGSLSRDQGTEALNSFLQTKTIWISHN

SEQ ID NO: 92580 - protein, 314 aa, Unknown
  Bacterial polypetide isolated from the Sargasso Sea
MQLNYIANASVPSSSGRTIPVIDPSDGQPFDEIQRSNADDIDAAVHAARQCYHAVWQKLAPVERGRLLQKLSAKILEHADELTALEQRDCGKPTKQARADAIALARYFEFYAGACDKFHGETIPYPDGYSVLTWREPHGVTGHVIPWNYPMQIFGRSVGGALAAGNVCVVKPAEDACLSLIRVAQLAAEVGFPAGALNIVTGYGHEVGDALARHPGIDHISFTGSPKIGTLIQQVAAERHCPVTLELGGKSPQIIFADADLDAAIPVVINAIVQNAGQTCSAGSRVLIDSLIYEPLLERLGKAFEKLRVGPAAM

SEQ ID NO: 92581 - protein, 228 aa, Unknown
  Bacterial polypetide isolated from the Sargasso Sea
GLVATITPWNFPLAMFARKASAALAAGCSVITKPAEDTPLTTLAMISLARETGLIPEILDAIVVPRSKVSEIGKLLCTNQKISKISFTGSTAVGKQLVLQGAGTLQKFSLELGGNAPFIVREDADLELASDELILSKFRNAGQTCVCANRIFVNSLVFDNFVSIFLNKVKAIKTGCGFEAGVQIGPLINHAAANRYEGLISDLKLSGAKFLYQKEKGDKGLIFEPTVA

SEQ ID NO: 92582 - protein, 307 aa, Unknown
  Bacterial polypetide isolated from the Sargasso Sea
EVLEKLADLLSEMSEPLGKIETIDTGKMLKETRWQAKYIAEFFNFYAGCADKISGETLPIDKPDLLVFTEREPLGVVAAVVPWNSQLFLVAVKLGPALAAGNTVVLKASEHASAAMLEFGKLIEKAGFPNGVVNIITGHGDPCGKKLTSHPKVSRISFTGGPRSAQHIIRNSAENFAEVSLELGGKSPFIVFDDANLESAVNGSIAGIFGATGQSCVAGSRLYLHEDITDQFLEKMMDIVSTINMGDPLEENTQMGPLCTTGQIENIERELEIAQSQGGQILCGGERPEDLDGYFFKPTIISCQTSH

SEQ ID NO: 92583 - protein, 294 aa, Unknown
  Bacterial polypetide isolated from the Sargasso Sea
MEQVEICRECGVPPGVVNLLSGDPPSIAQQLIASDIIKKISITGSSRVGKLILKQAADKVQRVTMELSGHSPFIVFDDADIKKATDMAIAAKFRNNGQVCISPNRFYIQENKKDEFINLFVEKTKKLKIGDGMDPSVQLGPLTTKKRLNEVEELVETTKKEGAKVLIGGKRPSGFNKGFYYEPTIFDNVKDDYTIMKVEPFGPLVPMLSFKSFDEVIERANNHELGLSSYICTNSMERAHKASELMETGTVAVNTHLVAIAEAPFGGIKQAGYGREGGSMAIKDYLNVKYTHLG

SEQ ID NO: 92584 - protein, 101 aa, Unknown
  Bacterial polypetide isolated from the Sargasso Sea
QEEIFGPVLGVLTVKNDEDALKVASNSKYGLHASVFTQDINRAFHLAKSLPCGTVSVNTFSEGDIKTPFGGYKQSGSLSRDQGTEALNSFLQTKTIWISHN

SEQ ID NO: 92585 - protein, 237 aa, Unknown
  Bacterial polypetide isolated from the Sargasso Sea
NKIKLPIGPVGMITPWNWPLNQMCTKIASAIAAGTSFVLKPSEITPGAAHIFAEVIDKTSMPKGMFNLIHGLGVTVGKAMSSHSDLEMISFTGSTRAGIDIQKSAADNIKRVSLELGGKSPNIILEDVDLENAVTMGIKQCFLNTGQSCSSPTRMLLPEHMLDKATKYAIAAANDMSTGDPLDEKIYLGPISNKTQYAKVQDLIQKGIDEGATLACGGTGRPNGLEKGFFVKPTSIY

SEQ ID NO: 92586 - protein, 151 aa, Unknown
  Bacterial polypetide isolated from the Sargasso Sea
KTQYDKIIDLINSGINEGATLLAGGTEKPNGLEKGYFVKPTIFTDVTNDMRIAKEEIFGPVLSIIPFEDEDEAISIVNDTSYGLGNYVQTQDKEKAKRVARKFRSGGVYINGNSAEPGTPFGGYRQSGNGREGGDWGLEEYLEIKTICGWE

SEQ ID NO: 92587 - protein, 193 aa, Unknown
  Bacterial polypetide isolated from the Sargasso Sea
PTRLLVEKSIYERAVKEAIEVAGKTDVDVAEKKGKHIGPVVSKVQFDKIQNLINKGIEEGATLSAGGPNRPEGLDKGYFVKPTVFSDVNNEMTIAKEEIFGPVVSIIPFSNEEEAISISNDTSYGLTNYIQTTDKEKAKRVARKLRSGMVEINGESFANGAPFGGYKQSGSGREGGTWGLEEYLEIKSISGWK

SEQ ID NO: 92588 - protein, 161 aa, Unknown
  Bacterial polypetide isolated from the Sargasso Sea
RVGNPLDKNTDIGAINSKEQLDKITSLVNEGVEDGGELFQTQCELPGNGFWFRPTLFTNVQPSYSIAREEIFGPVLTTLTFRTPEEAVEIANNTEYGLSAGVWTEKGSKILWTADRLEAGVVWANTFNKFDPSSPFGGYKESGFGREGGRHGLLSYLKASS

SEQ ID NO: 92589 - protein, 278 aa, Unknown
  Bacterial polypetide isolated from the Sargasso Sea
TKRIYGQTVESRFPDTRVHVYYQPVGVVAALVPWNFPLVLAARKISTALAAGCSVICKPDVITPGTVMELVDICKEAGVPAGVVNLLSGDPAEISNELLESDIVKKVSITGSTRVGKLILKKAADKVQRVTMELSGHSPFIVFDDVDINKVADMAITAKFRNNGQVCISPNRFYIQEKKKDEFIKAFIDRAKKLKIGNGLDKDVQLGPLTTSKRLGEIEELVEITKKEGGKVLLGGKRPSGFNKGYFYEPTIFDDVKDDFTIMKQEPFGPLVPMLSFK

SEQ ID NO: 92590 - protein, 289 aa, Unknown
  Bacterial polypetide isolated from the Sargasso Sea
PWNWPLNQVSCKVAPALAVGCTMVLKPSEIAPLSAYLYAEIMDEAGVPAGVFNLVNGDGPTVGEALSRHPDVDMMSFTGSTRAGSLVAQNAAPTVKRVTQELGGKSPNIILADADLEAAVTRGVTHMYNNTGQSCNAPSRMLVPRDLLSEAEAIAAKVTEGVVIGPTAEDSTTMGPVVSKVQWDKIQVLIEGGIAEGAKVVCGGPGLPDGIDRGYYVRPTVFSDVTNDMSIAEQEIFGPVLVMIPYNSEEEAIQIANDTPYGLAGYVQSGDLDHARQVASRIRAGNVHI

SEQ ID NO: 92591 - protein, 287 aa, Unknown
  Bacterial polypetide isolated from the Sargasso Sea
HFVGGKSFSGSSKRTGKVFNPATGEQSAEVKLGNLEDINNAVSNAKKAFETWSNKPPLQRARVMFKFKELIEKNSDELTKIIVSEHGKVYEDAKGSLTRGLEVVEYACGIPQMLKGEFTENVGSNVDSWSLRQPLGVCAGITPFNFPAMVPMWMFPMAIACGNTFVLKPSEKDPSCSIRLAELLKEAGLPDGVFNVVNGDKEAVDALINNKDVVAMSFVGSTPIAKYIYENCAKNEKRVQALGGAKNHCVVMPDCDLDQAVNGLMGAAYGSAGERCMAQSVAVAVGG

SEQ ID NO: 92592 - protein, 283 aa, Unknown
  Bacterial polypetide isolated from the Sargasso Sea
QTVNEVAVAEIEDLDIALNACARGFSVWRKTPAIKRADVLLEAARLIRERLESLAQTLSLEQGKPLPEARMEINSCAELLQWYAEEGRRACGRLVPARDSKVINMVRRDPVGPVAAFSPWNFPASQAVRKLAPALAAGCSIILKGPEEAPGALIGVVQALVDAGLPDGVLALVFGRPAEISAHLIASPIIRKVSFTGSVPVGKLIATQAAQNVKPCTLELGGHAPVLVFEDVDILDCAQKLAQAKFRNAGQVCVSPTRFYIQQSVFAEFTQAFVEAVQRITIG

SEQ ID NO: 92593 - protein, 241 aa, Unknown
  Bacterial polypetide isolated from the Sargasso Sea
MYEKYGQFIDGKWHKSSTGETYEVINPANEEIIGKASKASPEDVDKALLSAQKGLEVWKKTPPWQRAYILRRIADKMREKQDILAKWMTLEVGKPFAEAKGEVNGAADIYEWNAEETKRIYGQTVESRFEDTRVHVYYQPVGVVAALVPWNFPLVLSARKISTALAAGCSVIVKPDVITPGVVMEQVEICRECGVPPGVVNLLSGDPPSIAQQLIASDIVKKISITGSSREWEINFKTGSR

SEQ ID NO: 92594 - protein, 173 aa, Unknown
  Bacterial polypetide isolated from the Sargasso Sea
TEKFEVGDPKKEGEHIGPVISETQYNKIQTLIKKGINEGAKLIAGGPGKPEGLEKGYFVKPTVFADVNNKMEIARTEIFGPVLSVMPFETEEEAIQIANDTPYGLTNYIQTQDKEKVKRVARKLRSGMVDVNGAGIAVDAPFGGFKHSGIGREAGQHGLDEFLEVKSVGGWNN

SEQ ID NO: 92595 - protein, 292 aa, Unknown
  Bacterial polypetide isolated from the Sargasso Sea
RDVGKPLRQSRVDVRACARYFEFYAGSVDKIHGQTIPYLEGYTVLTLREPHGVTGHIIPWNYPMQIIGRTIGGALTMGNACVLKPGEEASLTSLKIGDLSLKAGFPPGVLNIVPGLGEETGEALLKHPGLSHYSFTGSTEIGVKVQQEAAKRAVPVTLELGGKSPQLVFSDADIDKALPFLVNAAIQNAGQTCSAATRVLIEKPIFQELTERLAKEISSIRSGPALQDLECGPLISKVQKDRVEGFLQRARQDGVEFLAEGSIVEDAPQGGNYVAPCMVGSVPPKHTMAQDE

SEQ ID NO: 92596 - protein, 259 aa, Unknown
  Bacterial polypetide isolated from the Sargasso Sea
MKIKIGINGMGRIGRMILRSIIESNKENIEIKHINNRTNSEACSALLKYDSIHGKFKADVSFDDDHLIINQNKISFSQETDLNKINWKKYNVDYVFECTGKFNSKDKLETHLNNGAKKVIVSAPCKNADKTIVFGVNESELKKDDKIISAASCTTNCLAPVAHVINENFEIEKGFMTTIHAFTTDQRILDNSHKDPRRARSASQSIVPTSTGASKSIGEIIPSLKGKLEGIAIRVPTPNVSLIELVFCTKKDLSIEKIN

SEQ ID NO: 92597 - protein, 110 aa, Unknown
  Bacterial polypetide isolated from the Sargasso Sea
VFADVNNDMDIARTEIFGPVLSVIPFETEEEAIKIANDTAYGLTNYIQTQDSEKVQRVARKLRSGMVDVNGAGIAVDAPFGGFKHSGIGREAGEHGLEEFLEVKAVGGWS

SEQ ID NO: 92598 - protein, 252 aa, Unknown
  Bacterial polypetide isolated from the Sargasso Sea
IRRIADKMREKQDLLAKWMTLEVGKPLAEAKGEINGAADIFEWNAEETKRIYGQTVESRFEDTRVHVYYQPVGVVAALTPWNFPAVLSARKISTALAAGCSVIIKPDVITPGVVMQMVDICRECGVPPGVVNLLSGDPPSIAQQLIASDIIKKVSITGSSRVGKLILKQAADKVQRVTMELSGHSPFIVFDDADIKKAADMAIAAKFRNNGQVCISPNRFYIHENKKDEFVNLFVDKTKKLKIGDGMDPSTQ

SEQ ID NO: 92599 - protein, 268 aa, Unknown
  Bacterial polypetide isolated from the Sargasso Sea
QFIDGKWQQSQNNETYDVINPATEEVIGKASKAGEEDVNKALKSAEKGLEVWRNTPPWERAKIIRKIADLMREKKETLGKWLTLEVGKPLSEGIGEVGGAADIFEWNSEETKRIYGQIVESRFENTRMYVKYEPVGVVAGLIPWNFPIVLASRKISTALAAGCSVICKPDVITPGSVMELMNIINEAGVPPGVVNLLSGDPAKISEQLISSDIVKKVSITGSTRVGKLILKQAAEKVQRVTMELSGHSPFIVFDDVDLNKVTDMALTA

SEQ ID NO: 92600 - protein, 314 aa, Unknown
  Bacterial polypetide isolated from the Sargasso Sea
WKYVYLKPSEKDPSCSIKLAELFTEAGLPDGVFNVVNGDKEIVDAIIENKNISAVSFVGSTPIAKYIYENCAKNEKRVQALGGAKNHCVVMPDCDLDQAVNGIMGAAYGSAGERCMAQSVAVAVGNIGDLLVKNLKAKVESLKIGPGMDKNSEMGPLVTKAHLEKVKDYVNIGIQEGAELVVDGRNLKLQGYEKGFYMGGCLFDKVKKNMRIYKEEIFGPVLSVVRAKNFEEALSLVNDHEFGNGVSIFTRDGDVGRSFSSKAQIGMVGINIPIPVPMAFHSFGGWKRSLFGDQHMHGPEGVRFYTKLKTITSR

SEQ ID NO: 92601 - protein, 269 aa, Unknown
  Bacterial polypetide isolated from the Sargasso Sea
MNLIQHFVNGKIIPGKSDRKGKIFNPATGEQESEVKLGSKSDLDEAVDIAKKAYETWSLKTPIQRARIMFKFKELIEKNSDELTKMIVSEHGKVYEDAKGSLIRGLEVVEFACGIPQVLKGEFTENVGTDIDSWSIRQPLGVCAGITPFNFPAMVPMWMFPMAIACGNTFVLKPSEKDPSCSIRLAELLKESGLPDGVFNVVNGDKEVVDSILINKDIKAVSFVGSTPIAKYIYENAAKNEKRVQALGGAKNHCVVMPDCDLDQAVNGL

SEQ ID NO: 92602 - protein, 290 aa, Unknown
  Bacterial polypetide isolated from the Sargasso Sea
KIFEEAGLPAGVFNLVYGVPSEISDYLIPHPTIKKVTFTGSTAVGKQLAAKAGEYMKLVTMELGGHSPAIVFEDADLDVALNVLSSNKYRNAGQVCISPTRFLVHESVYDKFVDGFKEASENLIVGDGLLPETKMGPLAHDRRLEAIDDFVKDAVKRGGKIETGGERKGNKGYFYEPTVLTDVPLDAKIMNEEPFGPVAPITRFKSFDDVVEEANRLPYGLAAYAYTNSNKTAEAIGSALASGMVSINHHGLAMPETPFGGIGESGYGKEGGVEGIEAYLQTKFITQASL

SEQ ID NO: 92603 - protein, 315 aa, Unknown
  Bacterial polypetide isolated from the Sargasso Sea
MKIKVGINGMGRIGRMIVRSIVENNFSNFEIKHINNRTNAETCSNLLKYDSIHGKFNAEVKFDQNNLIINNNKITFSQETDINKINWKKFGVDYVFECTGKFNSKDKLIPHLKNGAKKVIVSAPCKNADKTIVFGVNEKEIKIEDKIISAASCTTNCLAPVAYVLNENFGIDKGFMTTIHAFTSDQRILDNSHKDPRRARSASQSIVPTSTGASKAIGEIIPSLKGKLEGVAMRVPTPNVSLIELVFLSNKEVSIETINSAFKKFIKNQNKKIIEITNEKLVSIDFNHNSASSIIDTSLTNVVEKIWVKFLLGMI

SEQ ID NO: 92604 - protein, 107 aa, Unknown
  Bacterial polypetide isolated from the Sargasso Sea
DVKNNMEIAQTEIFGPVLSVIPFETEEEAILIANDTSYGLTNYIQTQDQKKVHRVARKLRSGMVDVNGAGIAVDAPFGGFKHSGIGREAGQDGLLEFLEVKSVGGWS

SEQ ID NO: 92605 - protein, 295 aa, Unknown
  Bacterial polypetide isolated from the Sargasso Sea
MELVDICREAGVPPGVVNLLSGDPPTIAEHLLKSDIIKKISITGSTRVGKLILKQAADKVQRVTMELSGHSPFIVFDDADINKATDIAITTKFRNNGQVCISPNRFYIQESKKADFINSFIAKAKKLKIGNGMDKDVQLGPLTTEKRLKEVEQLVEITKKEGAKVLMGGKRPAGFNKGYFYEPTVFDNVDDSFTIMKEEPFGPLVPMLSFKSFDEVIDRANNNDLGLCSYICTSSMDKAHRASELMETGTVAVNTPVVAIAEAPFGGIKQTGYGREGGSMAIKDYLNVKYTHLGI

SEQ ID NO: 92606 - protein, 159 aa, Unknown
  Bacterial polypetide isolated from the Sargasso Sea
DHIGPVVSKVQYDKIINLIKDGINEGATLAAGGPEMPNGLNKGYFIKPTIFTDVTNDMQIAKKEIFGPVLSIIPFETEEEAISVTNDTEYGLGNYLQTEDKEKAKRVSKKLRSGIVYINGNSPDSGTPFGGYKQSGNGREGGSWGLEEYLEVKTITGWK

SEQ ID NO: 92607 - protein, 250 aa, Unknown
  Bacterial polypetide isolated from the Sargasso Sea
MKIKVGINGLGRIGRMVIRSIIENNIKNIEIKHINNKTNSEGSFALLKYDSIHGKFDADLGFDEKHLIINKNKITFGQETDLNNINWKKYGVDYVFECTGKFNTKDKLQPHLNNGAKKVIVSAPCKNADKTIVFGVNELELKENDKIISAASCTTNCLAPVAHVLNENFEIERGFMTTIHAFTSDQRILDNSHKDPRRARSASQSIVPTSTGASKAIGEIIPSLKGKLEGVSIRVPTPNVFLVELVFCTK

SEQ ID NO: 92608 - protein, 206 aa, Unknown
  Bacterial polypetide isolated from the Sargasso Sea
MYSKFGQFINGKWQQSSDKQTYEVINPANEEIIGHASKASSKDVDDALKSAQKGLEVWKNTPPWQRSYTLRKIADKMREKQDVLAKWMTLEVGKPFVEAKGEVGGSADIFEWNAEETKRIYGQTVESRFKDTRVHVYYQPVGVVAALSPWNFPLVLSSRKISTALAAGCSVIIKPDVITPGTVMELVDICRECGVPAGVVNLLSGD

SEQ ID NO: 92609 - protein, 306 aa, Unknown
  Bacterial polypetide isolated from the Sargasso Sea
FEKDLGEEKNNQKLLYEPKGVCALITPWNWPINQVNLKVIPALASACTVVLKPSEIAPLSSMLLAEMIDEAKFPAGVFNLINGDGALTGDALTSHPDINMISFTGSTRAGALISQNAAKDFKRISLELGGKGANIIFKDADSEAVARGVSRCFRNSGQSCNAPTRMLVEKSIYNQTVEKVKELANNTKVDSPHKEGDHIGPVVSEIQFNKIQTLIQKGIDEGAKLVAGGTGKPKGLEKGYYVKPTVFADVNNKMEIARTEIFGPVLSIIPFENEDEAISIANDTPYGLTNYIQTQDKEKVKRVQEN

SEQ ID NO: 92610 - protein, 204 aa, Unknown
  Bacterial polypetide isolated from the Sargasso Sea
CFLNSGQTCSALTRLLVPSSKMEEAAELAAQAAAGFTVGPADDETSKLGPLVSQMQWDRVQSYIQTGIDEGATLVTGGLGKPDGLDSGYFVQPTVFANVKNSMKIAQEEIFGPVLSIIGYEDDDDAIQIANDSDYGLSGGVWSSDNERALKVAKKLRTGEVDMNGSFLNTDAPFGGYKKSGNGRELGRFGMDEFVEAKQINLPL

SEQ ID NO: 92611 - protein, 105 aa, Unknown
  Bacterial polypetide isolated from the Sargasso Sea
TNDMQIAKKEIFGPVLSIIPFETEEEAISVTNDTEYGLGNYLQTEDKEKAKRVSKKLRSGIVYINGNSPDSGTPFGGYKQSGNGREGGSWGLEEYLEVKTITGWK

SEQ ID NO: 92612 - protein, 297 aa, Unknown
  Bacterial polypetide isolated from the Sargasso Sea
MKFADLLQANTAELALMDSMNMGKPISDCLNVDVPASAVNIRFMAECIDKMYGKVANTHEKALNLSVREPYGVVGLISPWNYPLLMGVWKIAPALAAGNSIVLKPDEHSPHSCIKMAELFVEAGGPPGVFNVVTGHGEEAGQSLALHQDVSKIGFTGSTEVGKLLLQYAGQSNMKKVSLETGGKSPMIYFADLPDMELAVSTAYDSIYANMGEVCNAGSRIYVERAIYADFVDQFIAEGQGAYTPGDPLDPETNMGPLMSAQAQKRVLGFIESGKNEGAKLKFGGNIPTGLESGCFV

SEQ ID NO: 92613 - protein, 278 aa, Unknown
  Bacterial polypetide isolated from the Sargasso Sea
MYSRFGQFIDGKWQASEKKETYDVINPATEEIIGKASKASPVDVEKALKSAAKGFATWKKFSPWKRAEIIRKIADLMRKKNNELAKWMTLETGKPLAEGLAEVSGSADIFEWNAEETKRIYGQTVQSRFENTRVIINYEPVGVVAALSPWNFPLILAARKISTALAAGCSVICKPDVITPGTVMELVDIINQCGVPPGVVNLLSGDPPSISSQLISSDIVKKISLTGSTRVGKIVLKQAAEKIQRVTMELSGHAPFIVHADANIEKAVDMAMTAKYRN

SEQ ID NO: 92614 - protein, 215 aa, Unknown
  Bacterial polypetide isolated from the Sargasso Sea
MAVNYKSIAQKLKFEGRAFINGKYVNAIDGKKFETINPATGDKLCTVAKCNEKDVNLAVKVSRKAFNSGVWSRSSPEHRKEILLKFAELLRKHGNENSVLECVDTGKLITDCINEVANDAPMHFQWYGELIDKVFGKVGPTEPSITSLIVKEPIGVVAGIVPWNFPLMMAVWKMAPALAAGCSVIIKPAEDTPLTAIRVAKIAQEAGIPDGVLNV

SEQ ID NO: 92615 - protein, 296 aa, Unknown
  Bacterial polypetide isolated from the Sargasso Sea
GKFNADISFDDKHLIINKNKISFSQETDLNKINWKKFDVDYVFECTGKFNSKEKLKPHLKNGAKKVIVSAPCKKADKTIVFGVNETKLNKNDQIISAASCTTNCLAPVAHVLNENFEIERGFMTTIHAFTTDQRLLDNSHKDPRRARSASQSIVPTSTGASKAIGEIIPSLKGKLEGIAMRVPTPNVSLVELVFCTKKDLSVEKINLAFHNFSKKNKILEITKEKLVSIDFNHNQASSIIDSNLTNVIGKNMGKISAWYDNEWGFSNRMCDIAGIHSQKFLMKNIKDEENLSQKRV

SEQ ID NO: 92616 - protein, 172 aa, Unknown
  Bacterial polypetide isolated from the Sargasso Sea
ANKIKVDQASKKGDHIGPVISKTQYDKIINLIESGITEGATLAAGGPELPNGLNKGYFIKPTIFTNVKNEMRIAKEEIFGPVLSIIPFETEEEAVSIVNDTSYGLGNYLQTEDKEKAHRVAKKLRSGCVYINGNAADAGTPFGGYRQSGNGREGGVWGLDEYLEVKTVTGWK

SEQ ID NO: 92617 - protein, 137 aa, Unknown
  Bacterial polypetide isolated from the Sargasso Sea
MKEQNFYLGGVSSKKQKGFYAKPTLFDGLKEDMTIAQEEIFGPVLGVLTVKNDEEALKVASNSKYGLHASVFTQDINRAFHLAKSLPCGTVSVNTFSEGDIKTPFGGYKQSGSLSRDQGTEALNSFLQTKTIWISHN

SEQ ID NO: 92618 - protein, 226 aa, Unknown
  Bacterial polypetide isolated from the Sargasso Sea
EKEQNIIFKDADSEAIERGALRCFRNSGQSCNAPTRMLIEKSMYEEAVERLKKYADEFKVDDPNKEGDHIGPVISEIQYNKIQTLIKKGIDEGAKLISGGPGKPNGFDNGYYVKPTVFADVNNNMEIAKTEIFGPVLSVIPFETEEEAISIANDTEYGLTNYIQTQDTEKVQRVARKLRSGMVDVNGAGIAVDAPFGGFKHSGIGREAGKEGLLEFLEVKSVGGWN

SEQ ID NO: 92619 - protein, 267 aa, Unknown
  Bacterial polypetide isolated from the Sargasso Sea
CRREDLVPVTLELGGKSPVLVGDTADIAHAAERIAVGKSLNSGQLCVSPDEVWVHESRLQALAEGIAAQYQSLYPSVSGNADMTPVINERHHARVKAYVDDAKARGLSVLEVGAAQAGSDRRLPLALVINPPADAEISLHEIFGPALVLRSFHNIRDAVAAINAGERPLALYYFGNDETEQGWVLDNTLSGGVSINDVVMHPALEDAPFGGVGASGMGHYHGREGFLEFSHARSVYKAGSHDPRREWGMLPPYNEQFAQMLQAAVTP

SEQ ID NO: 92620 - protein, 271 aa, Unknown
  Bacterial polypetide isolated from the Sargasso Sea
GGIDNWNLRQALGVVAGITPFNFPVMVPMWMFPVALAGGNTFVLKPSERDPSASLRIAELLKEAGLPDGVFNVVNGDKVAVDALIEHPDVAALSFVGSTPIAEYIYTEASKRGKRVQALGGAKNHLVVMPDADLDQAVDALIGAAYGSAGERCMAISVAVAVGNVADELIERLVPRVKSLVIKNGENLDAEMGPLVTAEHKAKVAGYIDAGVAEGAKLIVDGRAHPVAQEAGFFIGGTLFDQVGTGMKIYKEEIFGPVLAVVRVPDFASAV

SEQ ID NO: 92621 - protein, 124 aa, Unknown
  Bacterial polypetide isolated from the Sargasso Sea
ETWRETTKEERLALLEKFDEIYNRRWDEMVEAQSKEMGAPLDFASETHTKMGADICRNNIEILKDFNFEHQFDPKSNNHIRYEPIGVCGLITPWNFPMNQIVLKVIPALAAGCTMILKPSEIAP

SEQ ID NO: 92622 - protein, 37 aa, Unknown
  Bacterial polypetide isolated from the Sargasso Sea
MSINIGINGFGRIGRMVLRAGINNPNIRFVAINDLVP

SEQ ID NO: 92623 - protein, 233 aa, Unknown
  Bacterial polypetide isolated from the Sargasso Sea
RVSLELGGKGANIIFKDADPDAIERGALRCFRNSGQSCNAPTRMLVEKSMYNDAVERLKKYTENFEVGDPKKEGEHIGPVISETQYNKIQTLIKKGIDEGAKLVAGGPGKPDGLEKGYFVKPTVFADVNNKMEIARTEIFGPVLSVMPFETEEEAIEIANDTPYGLTNYIQTKDKEKVKRVARKLRSGMVDVNGAGIAVDAPFGGFKHSGIGREAGEHGLEEFLEVKSVGGWS

SEQ ID NO: 92624 - protein, 305 aa, Unknown
  Bacterial polypetide isolated from the Sargasso Sea
RSGCITPWNFPLVLSARKISTALAAGCSVIVKPDVITPGTVMELVDICRECGVPNGVINLLSGDPPSIAQQLISSDIIKKISITGSTRVGKLILKQAADKVQRVTMELSGHSPFIVFEDADIKKATDMAISAKFRNNGQVCISPNRFYIQESKKDEFVNLFVEKTKKLKIGDGMDPSVQLGPLTTKKRLNEVEELVETTKKEGAKVLMGGKRPAGFNKGFYYEPTVFDNVKDDFTIMRVEPFGPLVPMLSFKSFDEVIERANNNDLGLSSYICTNSMEKAHRASELMETGTVAVNTPLVAIAEAP

SEQ ID NO: 92625 - protein, 288 aa, Unknown
  Bacterial polypetide isolated from the Sargasso Sea
MNLIEHFVGGKLFSGSSDIKGKVFNPATGEQESEVKLASKSDLDQVVGIAKKAFETWSLKPALQRARVMFKFKELIEKNSDELTKLIVSEHGKVFEDARGSLTRGLEVVEFACGIPHLLKGEFSENVGTNVDSWSMRQPLGVVAGITPFNFPAMVPMWMFPIAIACGNTFILKPSEKDPSCSIMLAQLLTEAGLPDGVFNVVNGDKESVDAILENSDIKAVSFVGSTPIAKYIYENSAKNEKRVQALGGAKNHLVVMPDCDLDGAVNGLMGAAYGSAGERCMAQSVAG

SEQ ID NO: 92626 - protein, 260 aa, Unknown
  Bacterial polypetide isolated from the Sargasso Sea
MFSEAGLPDGVFNVLNGNKDNVDMLLDDENIQSISFVGSTPVAKYIYERSAQKGKRVQALGGAKNHLVVMPDANLDQAVDGIMGAAYGSPGERCMAVSVAVAVGDIADKLVENINNKAESLIVAPWTDSSSQMGPVISKEHKDKIENYISSGVEEGAKLVLDGRNLKIQGYENGFFVGPTLFDNVNKNMKIYKEEIFGPVLSVVRAKTYDEALKLVNDHSFGNGTSIYTSDGEVSRNFTTNCKIGMVGVNVPIPVPMAFH

SEQ ID NO: 92627 - protein, 319 aa, Unknown
  Bacterial polypetide isolated from the Sargasso Sea
HIIPWNYPMQIIGRTIGGALTMGNACVLKPGEEASLTSLKIGDLSLKAGFPSGVLNIVPGLGEEAGEALLKHPGVSHYSFTGSTEIGVKVQQEAAKRAVPVTLELGGKSPQLVFSDADIDKALPFLVNAAIQNAGQTCSAATRVLIEKPIFQELTERLARGISSLRSGPALQDLECGPLISKVQKDRVEGFLQRARQDGVEFLAEGSIVEDAPQGGNYVAPCMVGSVPLQHTLAQDEVFGPLLVTMPFEREEEGIELANNTVYGLVSGVWTKDGGRQLRVARKLKSGQVFINNYGAGGGVELPFGGVKLSGHGREKGFE

SEQ ID NO: 92628 - protein, 151 aa, Unknown
  Bacterial polypetide isolated from the Sargasso Sea
MITRDAIYIDGKWVPASGGEKIEVINPATEEIVGTVPVGTEVDVNDAILAARSAFPSWSKSSIEERQGYLNAISAAISERGDQIAEVITSEVGTPINYSKMAMVGTPRVVARSYAKILDSFEWEEEVRNSLIVKEPIGVVGMITPWNFPLH

SEQ ID NO: 92629 - protein, 140 aa, Unknown
  Bacterial polypetide isolated from the Sargasso Sea
LLGGSQAKLNSGLEKGNYIQPTVFEAKNNMRISQEEIFGPVVSVIKFKDEADALKIANDTLYGLGAGVWTRNGNIAYRMGRAIQAGIVWTNCYHAYPAHSPFGGYKQSGVGRETHKMMLNHYRQNKNLHVSYAEKKLGFF

SEQ ID NO: 92630 - protein, 196 aa, Unknown
  Bacterial polypetide isolated from the Sargasso Sea
CNAPQEWLVEKSIYNETVEKVKELANNTKVDSPQKDGDHIGPVVSEVQFNKIQTLIQKGIDEGAKLIAGGTGKPKGFEKGYYVKPTVFADVNNQMEIARTEIFGPVLSIIPFENEDEAISIANDTPYGLTNYIQTQDKEKVKRVARKLRSGMVDVNGVGIAVASPFGGYKHSGIGREAGTEGLIEFLEVKTVGGWN

SEQ ID NO: 92631 - protein, 283 aa, Unknown
  Bacterial polypetide isolated from the Sargasso Sea
ICRECGVPPGVVNLLSGDPPSIASQLIASDIVKKISITGSSRVGKLILKQAADKVQRVTMELSGHSPFIVFDDADIKKAADMAVASKFRNNGQVCISPNRFYIQESKKDEFVNLFVEKTKKLKIGNGMDPDVQLGPVTTKKRLNEIEDLVETTKKEGAKVLLGGKRPSGFNKGYFYEPTIFDDVKDNFTIMKIEPFGPLVPMLSFKSFDEVVERANNHELGLASYICTNSMERAHRASELMETGTVAVNTPVVAIAEAPFGGLNKLDMEREGGSMAIKDYLNV

SEQ ID NO: 92632 - protein, 209 aa, Unknown
  Bacterial polypetide isolated from the Sargasso Sea
KVHVQEIFSVQGQICTAMSRLVVHKSIKDELLDKLVDMSKSLKIGPGIEKDTDLTPVISENQLQKVEGYARSGIQEGAEAAYGGKRLDREGYFMEPTVLNNVKQNMTVAREEIFGPVLSVLEYEDQEEAIDIANDTEYGLGAGVFTKDLKKASWTASKLEAGQVYVNKWFTGNHATPFGGYKQSGYSREKGVDGLKSYLQVKNVGISLG

SEQ ID NO: 92633 - protein, 240 aa, Unknown
  Bacterial polypetide isolated from the Sargasso Sea
NAADTIKRVCLELGGKGGNIVFSDSHSEAVREGVRNIMSNSGQSCDAPTRMLVEKSIYKRAIEEAADEANKIKVDIASKHGNHIGPVISQTQYDKIIDLIRSGIKEGATLVAGGPDKPNGLDKGYFVKPTIFTDVTNDMRIAKEEIFGPVLSIIPFEDEDEAVSIVNDTSYGLGNYVQTQDKEKAKRVARKFRSGGVYINGNTADPGTPFGGYRQSGNGREGGDWGLEEYLEIKTICGWE

SEQ ID NO: 92634 - protein, 299 aa, Unknown
  Bacterial polypetide isolated from the Sargasso Sea
GFEPSEIAPLSSMLLAEMIDEVKFPAGVFNLVNGDGAVAGNALTSHPDVNMISFTGSTRAGALISKNAANDFKRVSLELGGKGANIIFKDADAEAVERGALRCFRNTGQSCNAPTRMLVEKSIYKKTIDKVKEVAAKTKVDLASKKGEHIGPVVSKTQFDKIQALIQKGIDEGAKLVAGGIGKPKGLDKGYFVKPTAFADVNNNMQIARTEIFGPVLSIIPFETEDEAISIANDTPYGLLNFIQTQDQKKANRVARKLRSGMVDINGAGLAADAPFGGYKHSGIGREAGVLGLEEFLEV

SEQ ID NO: 92635 - protein, 120 aa, Unknown
  Bacterial polypetide isolated from the Sargasso Sea
GLEKGWFTKPTIFINVNNSMRVAQEEIFGPVLVIIPFEDEKEAIEIANDTPYGLAAYLQTGDTERAERVSRQLRAGGVHVNGGGYNYGSPFGGYKESGNGREGGDMGLEDYLETKALHIA

SEQ ID NO: 92636 - protein, 221 aa, Unknown
  Bacterial polypetide isolated from the Sargasso Sea
IIFKDADTEAVERGALRCFRNSGQSCNAPTRMLVEKSMYEEAIERLKKYANEFKVDDPNKEGEHIGPVISETQFNKIQKLIQKGIDEGAKLVAGGTGKPDGLSNGYYVKPTVFADVNNNMEIARTEIFGPVLSVIPFENENEAIKIANDTDYGLTNYIQSQDKEKIQRVARKLRSGMVDVNGAGIAVDAPFGGYKHSGIGREAGKEGLLEFLEVKSVGGWN

SEQ ID NO: 92637 - protein, 250 aa, Unknown
  Bacterial polypetide isolated from the Sargasso Sea
KWKKFGVDYVFECTGKNNSKEKLISHIKNGAKKVIVSAPCKNADKTIVYGVNDNLLSKSDQIISAASCTTNCLAPVVHVLNENFHIEKGFMTTIHAFTSDQRILDNSHKDPRRARSASQSIVPTSTGASKAIAEIIPSLKGKLEGIAMRVPTPNVSLVEFVFCSKKEINKENINKSFEIASKKQLKNVLKITYEKLVSIDFNHNAASAIIDGSLTNTVGKNMGKISAWYDNEWGFSNRMCNIAEKLHKVS

SEQ ID NO: 92638 - protein, 228 aa, Unknown
  Bacterial polypetide isolated from the Sargasso Sea
MSKLLTHEEYTSLGASLDFPQSPFIDGKYYKGSGELMTTINPSTGMEITSITTASDEDVDLAVEKAREAFDQGRWCRLHPSERKDILIKLCKLLTRNQKELAVMESLDSGKPIRDCVQIDLPETIHTIQWHAELIDKIYDQTAPSGDEALSIIMREPIGVVAAILPWNFPLLMLAWKIGPALASGCSVIVKPAEQTSLTALRVAELAAEAGIPRGVLQVLPGSGPIVG

SEQ ID NO: 92639 - protein, 196 aa, Unknown
  Bacterial polypetide isolated from the Sargasso Sea
KINKSDRIISAASCTTNCLAPVADVINKKFIILNGFMTTIHAFTSDQRILDNSHKDPRRARSASQSIVPTSTGASKAIGEIIPSLKGKLEGVAMRVPTPNVSLIEFIFNVKKNITVKELNNSLFSASRTKLKNILNVTDEKLVSVDFNHNSSSAIIDSSLTNVVGNKMGKISAWYDNEWGFSNRMCDIADYVSKIK

SEQ ID NO: 92640 - protein, 267 aa, Unknown
  Bacterial polypetide isolated from the Sargasso Sea
EAGIPDGVLNVLPGYGDVGEALGRHKDVDAVSFTGSTEVGGFFLKYSSESNLKPVALEMGGKSPFIVLEDAKITDDLIDNAINSAFWNGGQNCSANMRQIVHKKVKDEFLDKVIKKVKKLKVGDPLDLKSNMGSMISKGHLQTVDGYIQKGIDEGAKLLTGGVSNNKQKGFYAKPTLFDGLKENMTIAQEEIFGPVLGVLTVKNDEEALKVASNSKYGLHASVFTQDINRAFHLAKSLPCGTVSVNTFSEGDIKTPFGGYKQSGSLS

SEQ ID NO: 92641 - protein, 285 aa, Unknown
  Bacterial polypetide isolated from the Sargasso Sea
MALDGEWGRMIPAERGRLLYSLGQLILDHEDELAELESRDVGKPLRQSRVDVRASARYFEFYAGAVDKIYGQTIPYLEGYTVLTLREPYGVTGHIIPWNYPMQIIGRTIGGALTIGNACVLKPGEEASLTSLKIGDLSLKAGFPPGVLNIVPGLGEEAGEALLKHPGVSHYSFTGSTEIGIKVQQEAAKRAVPVTLELGGKSPQLVFSDADIDKALPFLVNAAIQNAGQTCSAATRVLIEKPIFQELTERLAKGISSLRSGPALQDLECGPLISKIQKDRVEGFL

SEQ ID NO: 92642 - protein, 296 aa, Unknown
  Bacterial polypetide isolated from the Sargasso Sea
EVINPATNEACGTCAAGNEKDIDKAVAAAKESFKAKTWRKMAPRKRMGIMMKFADLLQANTAELALMDSMNMGKPISDCLNVDVPASAVNIRFMAECIDKMYGKVANTHEKALNLSVREPYGVVGLISPWNYPLLMGVWKIAPALAAGNSIVLKPDEHSPHSCIKMAELFVEAGGPPGVFNVVTGHGEEAGQSLALHQDVSKIGFTGSTEVGKLLLQYAGQSNMKKVSLETGGKSPMIYFADLPDMELAVSTAYDSIYANMGEVCNAGSRIYVERAIYADFVDQFISEGQGAYTPG

SEQ ID NO: 92643 - protein, 318 aa, Unknown
  Bacterial polypetide isolated from the Sargasso Sea
KWQPSEKNETYEVINPATEEVIGKASKATKNDVQKALKSAEKGFQTWKKTPAWQRSYKIRKIADLMRERKKDLAKWLALEVGKPLVEGEGEVGGAADIFEWNAEETKRIFGQTVESRFEDTRVQVIYQPVGVVAALIPWNFPIILAARKISTALAAGCSVIVKPDVITPGAVMELMNIINDAGLPPGVVNLLSGDPEEVSNELISSNIIKKVSITGSTRVGKLILKKAADKVQRVTMELSGHAPFIVFEDSNIDKVTDMAITSKYRNNGQVCISPSRFYIHESKKNEFAKTFIEKTKKLKLGDGMKEGTNLGPITTKK

SEQ ID NO: 92644 - protein, 137 aa, Unknown
  Bacterial polypetide isolated from the Sargasso Sea
IFEGANLIAGGPGKPDGFKDGYYVKPTVFADVNNNMEIARTEIFGPVLSVIPFETEEEAIEIANDTPYGLTNYIQTEDQEKVKRVARKLRSGMIVVNTASLAVDAPFGGFKHSGIGREGGKEGLLEFLEVKSIGGWN

SEQ ID NO: 92645 - protein, 109 aa, Unknown
  Bacterial polypetide isolated from the Sargasso Sea
LKENMTIAQEEIFGPVLGVLTVKNDEEALKIASNSKYGLHASVFTQDINRAFHLAKSLPCGTVSVNTFSEGDIKTPFGGYKQSGSLSRDQGTEALNSFLQTKTIWISHS

SEQ ID NO: 92646 - protein, 272 aa, Unknown
  Bacterial polypetide isolated from the Sargasso Sea
FDDDHLIINKNKITFTQETDLKNIDWKKHEVDYVFECTGKFNSKKKLEAHLTNGAKRVIVSAPCKNADKTVVFGVNEKELKKSDKIISAASCTTNCLAPLAHVLNENFQIEKGFMTTIHAFTSDQRILDNSHKDPRRARSASQSIVPTSTGASNAIGEIIPSLKGKLEGIAIRVPTPNVSLIEFVFCTKKDLSVEKINSAFLNFSKKNKILEVIKEKLVSIDFNHNPSSSIVDTNLTNVVGKNMGKISAWYDNEWGFSNRMCDIAEYLHKIS

SEQ ID NO: 92647 - protein, 227 aa, Unknown
  Bacterial polypetide isolated from the Sargasso Sea
MREAQLADPMPGLETRRDRLQRLMKGLEEREEAFTLAISEDFGQRSAFETANYDITVTLADIKYQIRNLARWMRIRKRSVPLHLMPGRARIVPQPLGVVGVISPWNFPVFLSLSPVAGAIAAGNRVMLKPSEWTPKTSALLAELASEAFEPDEFAVFEGGIEAGRAFSELPFDHLLFTGSTRVAKEVSNSAAKNLTPLTLELGGKSPALVCPDANLKRAAERIVFGK

SEQ ID NO: 92648 - protein, 217 aa, Unknown
  Bacterial polypetide isolated from the Sargasso Sea
VIVSAPCKNSDKTIVFGVNENILTNDDEIISAASCTTNCLAPIAKVLNENFEIEKGFMTTIHAFTSDQRILDNSHKDPRRARSASQSIVPTSTGASKAIGEIIPSLKGKLEGVAMRVPTPNVSLIELVFCTKKDIDKEKINEAFKLASKTQLKKVIEITSEKLVSVDFNHNSSSAIVDSSLTNVVGKNMGKISAWYDNEWGFSNRMCDIVEHLHKIS

SEQ ID NO: 92649 - protein, 275 aa, Unknown
  Bacterial polypetide isolated from the Sargasso Sea
KPSEKDPSCSIRLAELFSEAGLPDGVFNVIQGDKQIVDLIIESPEISSISFVGSTPVAKYIYEQSSKNFKRVQALGGAKNHLVIMPDANIDQAVDGIIGAAYGSAGERCMAISVAVAVGDIADELVEKVEKNIEKLKVSPWTDNESDMGPVISKEHKEKIENYISIGVNEGAKLIRDGRNFTIQGYENGYFVGPTLFDNVTREMKIYKEEIFGPVLSVVRAKNYEEALSLVNDHPFGNGTTIYTSDGEVARNFTSNSKIGMVGVNVPIPVPMAFL

SEQ ID NO: 92650 - protein, 305 aa, Unknown
  Bacterial polypetide isolated from the Sargasso Sea
AFETFSKTSVAERLELLTAIRNIYKQRYDEIANAIMIEMGAPINLASGAQASVGLSHLKTAIRVLESQKFEYTHNNMIIRKEPIGVCGLITPWNWPINQVVSKLAPCIAAGCTSVLKPSEIAPLSSILLTEIIHEAGVPPGVFNMVNGYGPVVGEAMSRHKDIDMMSFTGSTRGGIAVATASAQSVKRVSQELGGKSPNIVIDDEKFTESIERGVRGCMSNTGQSCNAPTRMLVPASRHNEALEIAKKTAESMKTGNPTLRDTDIGPLVSETQFNKVQTLLESGLKSGAKLVTGGPGRPSGLDKG

SEQ ID NO: 92651 - protein, 289 aa, Unknown
  Bacterial polypetide isolated from the Sargasso Sea
MIEKKNFYINGKWVAPVKPNDFDVIDPSTEEAFAVISLGSIEDTDKAVSAAKLAFETWRETSKEERVKLLEKFCEIYNRRWDEMVEAQSMEMGAPLDFASEIHTKMGADISKNVIDILKDFNFEHQFDSKSNNQIRYEPIGVCGLITPWNYPMNQIVLKVIPALAAGCTMILKPSEVAPVSGVLFAEIIDEAGFPPGVFNLVNGNGEVVGNHISGHPDIDMVSFTGSTRAGKLIQKNAADTIKKVTLELGGKGGNIVFEDSYPDAVRDGVRNIMSNTGQSCDAQTRMLV

SEQ ID NO: 92652 - protein, 310 aa, Unknown
  Bacterial polypetide isolated from the Sargasso Sea
IIVSEHGKVFEDAKGSLARGLEVVEYACGIPQVLKGEFTENVGSNVDSWSIRQPLGVCAGITPFNFPAMVPMWMFPMAIACGNTFILKPSEKDPTCSMRLAELLKEAGLPDGVFNVVNGDKESVDALINNKDIAAMSFVGSTPIAKYIYENCAKNEKRVQALGGAKNHCVVMPDCDLDQAVNGLMGAAYGSAGERCMAQSVAVAVGSIGDQLVKSLAKKVEALKVGPGMDKDSEMGPLVTKEHLEKVKGYVDIGVKEGAKLVVDGRNFKIQGYEKGFYIGGCLFDNVTKNMRIYKEEIFGPVLSVVRANS

SEQ ID NO: 92653 - protein, 126 aa, Unknown
  Bacterial polypetide isolated from the Sargasso Sea
GQRVGDRGFFVEPTVFTEVHDEMAIARDEIFGPVLSVLRFSDIDELVRRANATTFGLAAAVWTRDVSKAHMLAERLRAGTVWVNCYDVFDAAAPFGGFKQSGFGRELGQRGLDAYLEDKTVTVSLG

SEQ ID NO: 92654 - protein, 280 aa, Unknown
  Bacterial polypetide isolated from the Sargasso Sea
HNTHCRIYAPVGAHRDLLAYLVRRLLENGANSSFVNQIVDEDVPPETVAADPFDKVKPTKLRTGTTLFAPERQNSTGFDLAHRPTLAMIDEARGRFESHRWKAGPIIAAEAPAGETAEISNPARQHDVVGTVSWASVETVDAACAAARPWEADAATRRKVLEKAADLYEQNFGEIFALVAREAGKTLPDAVAELREAVDFLRYYAAQAEGAPPIGVFACISPWNFPLAIFTGQIAAALAAGNAVLAKPAEQTPLIAWRACQLLHEAGVPETALQLLPGAG

SEQ ID NO: 92655 - protein, 319 aa, Unknown
  Bacterial polypetide isolated from the Sargasso Sea
ESHPILEEMAKLNLGPSHIDVGKLATKYMEEAESQQVDIASFVKKECQDVIDSDALPLNEPQDVVLYGFGRIGRLLARLLIEKTGSGQQLRLRAVVVRKGGADDLAKRASLLRRDSVHGSFQGTIRVDEENSCIIANGNVIRFLYANSPDELNYEDYEISRAILIDNTGVWRDRDGLSKHLDSNGVAKVVLTAPGKGDLKNVVSGVNSNLIDAEDEIIAAASCTTNAIVPPLKAINEEFSIVSGHMETVHAFTPDQNLIDNYHKSNRRGRSAPLNMVITETGASSAVTKLLPELDGKLTGNAIRVPTPNVSLAILNLTV

SEQ ID NO: 92656 - protein, 304 aa, Unknown
  Bacterial polypetide isolated from the Sargasso Sea
AFNSWKNVSAYERSKILRKAADIVRSKADQIATLMTMEQGKPLIEAKMETMGAADSIDWYAEEGRRAYGRIIPSRAPQGVYQFVFKEPVGVVAAFTPWNFPLNQVVKKVAAAFAAGCTAIVKGPEETPASVAELIKAFDEAGMPKGSINLVYGIPAEISEYLIAHPIVRKVTFTGSTAVGKLLASQAGTHMKRVTMELGGHSPAIVCEDADVKAAVKILSANKFRNAGQVCISPTRFLVHDSVYEEFVDGFVKQAESLNVGNGLDEGVKMGPLAHDRRLTAIEGFVADAVENGAKVLTGGKRRG

SEQ ID NO: 92657 - protein, 271 aa, Unknown
  Bacterial polypetide isolated from the Sargasso Sea
MKIKIGINGMGRIGRMILRSIIESNNNNIEIKHINNRTNSEACCNLLKYDSIHGKFKADISFDDEHLIINQNKISFSQETNLNNIKWKKNNVDYVFECTGKFNSREKLEPHLNNGAKKVIVSAPCKNADKTIVFGVNESQLKKSDKIISAASCTTNCLAPVAYVLNENFGIEKGFMTTIHAFTSDQRILDNSHKDPRRARSAGQSIVPTSTGASKTIGEIIPSLKGKLEGVAMRVPTPNVSLIELVFCTKKDLSINKINSAFGNFSKKNKV

SEQ ID NO: 92658 - protein, 317 aa, Unknown
  Bacterial polypetide isolated from the Sargasso Sea
GTGASHIKSFIRYLKEFKFEKPLGEHAPDQRIIYEPKGVCALITPWNWPMNQVCLKVIPALSAGCTMVLKPSELAPLSSMILAEIIDEAKFPSGVFNLVNGDGAITGDALTSHPEVNMISFTGSTRAGALISQNAAKDFKRVSLELGGKGANIIFKDADPEAIERGALRCFRNSGQSCNAPTRMLVEKSMYEEAVERLKKYANEFQVDDPNKEGEHIGPVISETQFNKIQTLIKKGIDEGAKLVSGGPGKPNGLNKGYYVKPTVFADVKNDMEIARTEIFGPVLSVMPFETEEEAIKIANDTPYGLQIIYKPKILRK

SEQ ID NO: 92659 - protein, 111 aa, Unknown
  Bacterial polypetide isolated from the Sargasso Sea
DPQVFANVTNDMTIAKEEIFGPVLVMIKYNNEEEAINIANDTEYGLAGYVQGDPNHAREVARKIRAGQVIINGGARGTGAPFGGYKASGNGREHGLHGLEECLETKAIIAP

SEQ ID NO: 92660 - protein, 282 aa, Unknown
  Bacterial polypetide isolated from the Sargasso Sea
YYYYAGLTDKIEGSTLPIDKPDMQVFTTREPVGVIAAVIPWNSQQLLSAVKLAPALAMGNTIIIKASEAAPAPLLELAKLIDKVGLPKGVVNIITGFPEECSKILTSHKKINRIAFTGGKETARHIIRNSAENLSQVTLELGGKSPVAVFNDANINNALSGVTASIFGASGQSCIAGSRLYLQEGIYNDFIEKISEKAGNIIIGPPMNDETQMGPLATIDQLKNIQKNVDQTIKQGGRLIIGGEKPKDMKQGWFYKPTIIECDHHNLPAAENELFGPSFIKL

SEQ ID NO: 92661 - protein, 234 aa, Unknown
  Bacterial polypetide isolated from the Sargasso Sea
MNTTQNIDAIFKSQIKNTLPTTYQDRIDYLSRIERWIELNRDSIIEAHFSDLHKPESETELAEIWYVLSEIKLAKNNLRKWMRSKRMGASTLTLLTAQSWVHYEPRGVVLIIAPWNFPFNLTIGPLISALAAGNRVIIKPSEMTPHVSSLISEMINELFEPNRVAIFQGDQRVAQSLLKYPFHHIFFVGSPSVGKIVMAEAAKHLSSITLELGGKTPTIIDKTANIKMAINKLA

SEQ ID NO: 92662 - protein, 296 aa, Unknown
  Bacterial polypetide isolated from the Sargasso Sea
KSIAQKLKFEGRAFINGKYVNAIDGKKFETINPATGKKLCSVAKCNYKDVDLAVKVSRKVFNSGVWSKSSPEHRKEVLLKFAELLRKHGDENSVLECVDTGKLVTDCINEVANDAPMHFQWYGELIDKVFGKVGPTEPSITSLIVKEPIGVVAGIVPWNFPLMMAVWKMAPALAAGCSVIIKPAEDTPLTAIRVAKIAQESGIPDGVLNVLPGYGDVGEALGRHKDVDAVSFTGSTEVGGYFLKYSSESNLKPVALEMGGKSPFIVLEDAKINDDLIDNAINSAFWNGGQNCFSKT

SEQ ID NO: 92663 - protein, 305 aa, Unknown
  Bacterial polypetide isolated from the Sargasso Sea
NGGDWPALTATARGHMIRKFADLIAEKADELAEIEVRDNGKLIAEMSAQCKYLTQWYYYYAGLCDKVEGSVIPIDKPGHFNYTVWEPLGVCACIVPWNSPLLLLAWKLAPLLAAGNTAVIKPSEYTSASTLEFMKIAEQVFPPGVVNVVTGFGAEAGSPLVDHPKVAKVAFTGSDVTGAAIYAQAAKHMKKVTMELGGKSPNIVFGDAHIDNAVKGVISGIFAATGQTCIAGSRLLVQESIHDEFVEKLVDLGKSARIGDPSSFETEVGPVTNIPQYEKVLNYIDVAKGEGAEAVLGGGTPAGPE

SEQ ID NO: 92664 - protein, 299 aa, Unknown
  Bacterial polypetide isolated from the Sargasso Sea
MYPISIACGNTFVLKPSEKDPSCPMRLAEIAIEAGLPAGVLNVVNGDKEAVDTLLENKTVQAISFVGSTPIAEYVYHTGTKNNKRVQALGGAKNHMVIMPDADVNKTTDAIIGSAFGSAGERCMAISVAVCVGKQTKEKIKKKLLEEAAKLNVGPYTDEKSDFGPLNNKAHFEKVLGYIDTGEKEGAKLLTDGRNFKKQGYENGYFVGPTIFDEVKPDMKIYKEEIFGPVLSMMTTDTYEEALNLVNDHELGNGAAVFTKSGNIAKHFTENAKIGMIGVNVPIPVPVAYHSFGGWKRSL

SEQ ID NO: 92665 - protein, 132 aa, Unknown
  Bacterial polypetide isolated from the Sargasso Sea
RLGGNITMKETGGCYFEPTIFKNVENSMRIAQEEIFGPVLTALSFNNFEEAISIANDTEYGLAAGVWTKDINKAIKASREIRAGTVYINNYEEGVDSTIPLGGYKQSGIGRDNGYQALENYLQVKSTWIKVS

SEQ ID NO: 92666 - protein, 287 aa, Unknown
  Bacterial polypetide isolated from the Sargasso Sea
GHSLINQSPIEIMKSHRFIRRVEDTEISELETYPFLQRIELQDIKDCEIDLGEIVVDFMKENKSLDNSEIDSHIKSYILDPLDKVDQQRPSKPQDIVLYGFGRIGRLVARIMAQMTGPGNYYRLRAIVVRKVSDTNDLLKRASLLRRDSVHGSFHGTIRVDNETETLVINGNPVKIIYANGPKDFNYSDYDIDNPIVIDNTGVWREEKDLSLHLESGASKVVLTAPGKGQIKNIVNGINNDILNESDNVISAASCTTNAIVPVLDILNKEYSIISGHIETVHAYTND

SEQ ID NO: 92667 - protein, 234 aa, Unknown
  Bacterial polypetide isolated from the Sargasso Sea
MKTIHHFVDGKSFSGNSKRTGKVFNPATGEQSAEVKLATTKDVDHAVANAKKAFESWSNKPPLQRARVMFKFKELIEKNSEELTKIIVSEHGKVFEDARGSLTRGLEVVEYACGIPQLLKGEFTENVGSNVDSWSTRQPLGVCAGITPFNFPAMVPMWMFPMAIACGNTFVLKPSEKDPSCSLRLAELLKDAGLPDGVFNVINGDKESVDALINNKDVVAMSFVGSTPIAKYIT

SEQ ID NO: 92668 - protein, 101 aa, Unknown
  Bacterial polypetide isolated from the Sargasso Sea
QANYKIATEEIFGPVLTTLTFRTPDEAVEIANNTEYGLSAGIWTEKGSKILWTADRLDAGVVWANTFNKFDPASPFGGYKESGFGREGGRHGLLSYLKASS

SEQ ID NO: 92669 - protein, 270 aa, Unknown
  Bacterial polypetide isolated from the Sargasso Sea
SSELAQLLTEEQGKPLEAATTEVFGMAAFCRYFTSLDLPVEVLEDSEGRKVESHRNPLGVVGAIVPWNFPLMLMAFKLPPALIAGNTIVLKPAPTTPLSSLRFAELIADVVPAGVVNFVTDANDLGAALTAHPDVRKVSFTGSTATGAKVMAGAAGLLKRITLELGGNDAGIVLNDVDPKEAAPKLFDSAFQNTGQVCIAMKRLYVHEDIYDEMCAELASIADETPIGNGLDQGTKLGPLNNKMQYERVKELIEEAKRDGNIIAGRGRPP

SEQ ID NO: 92670 - protein, 284 aa, Unknown
  Bacterial polypetide isolated from the Sargasso Sea
NWPMNQVCLKVMPAIASGCTMVLKPSELAPLSSMILAEIIDEVKFPKGVFNLVNGDGETTGDALTSHPDINMISFTGSTRAGALISQNAAKDFKRVSLELGGKGANIIFKDADPEAIERGALRCFRNSGQSCNAPTRMLVEKSMYDEAIERLKKYTENFEVGDPKKEGEHIGPVISETQYNKIQTLIQKGINEGAKLVAGGTGKPDGLDKGYFVKPTVFADVNNDMEVARTEIFGPVLSVIPFETEEDAIKIANDTAYGLTNYIQTQDSEKVQRVARKLRSGMV

SEQ ID NO: 92671 - protein, 288 aa, Unknown
  Bacterial polypetide isolated from the Sargasso Sea
VLGVMPWNFPFWQVFRFSVPALIAGNGAILKHASNVQGCAFAIESSFLEAGFPANIFRNISISGKNVKEVIKNKAISAVTITGSTPAGSSVAQTAGKYLKKTVLELGGSDPYIILDDADLDKAIKACINGRILNTGQSCISAKRLIVTKLLYHDFLKKLNVELAKMIMGDPIDNVDIGPMVSINARNEIHDQVTRSIDSGATLELGGEIPDLKGCFYPVTLLSNVKPGMPAFDEEIFGPVFSLIMAKDEDHAIRLGNQTPFGLGAALFTKDIKKGEEIAKARLNAGLC

SEQ ID NO: 92672 - protein, 268 aa, Unknown
  Bacterial polypetide isolated from the Sargasso Sea
GRHKDVDAVSFTGSTEVGGYFLKYSSESNLKPVALEMGGKSPFIVLEDAKINDDLINNAINSAFWNGGQNCSANMRQIVHKKVKDEFLDKVIKKVKKIKVGDPLDLKSNMGSMISKGHLQTVDGYIQKGIDEGAKLLSGGISDIKQKGFYAKPTLFDGLKENMTIAQEEIFGPVLGVLTVKNDEEALQVASNSKYGLHASVFTQDINRAFHLAKSLPCGTVSVNTFSEGDIKTPFGGYKQSGSLSRDQGTEALNSFLQTKTIWISHNS

SEQ ID NO: 92673 - protein, 240 aa, Unknown
  Bacterial polypetide isolated from the Sargasso Sea
NAAKDFKRVSLELGGKGANIIFKDADPEAIERGALRCFRNSGQSCNAPTRMLVEKSMYEEAIERLKKYTESFEVGDPKKEGEHIGPVISETQYNKIQTLIQKGIDEGAKLIAGGTGKPDGLDKGYFVKPTVFADVNNDMEVARTEIFGPVLSVIPFETEEDAIKIANDTAYGLTNYIQTQDSQKVQRVARKLRSGMVDVNGAGIAVDAPFGGFKHSGIGREAGEHGLEEFLEVKAVGGWS

SEQ ID NO: 92674 - protein, 309 aa, Unknown
  Bacterial polypetide isolated from the Sargasso Sea
KWQQSSSGETYEVINPATEEIIGKASKANSKDVQRALKSAKKGLEIWKKTSPWERSKVIRRISELMRKKVDTLSKWLTLEVGKPLTEGPGEVGGAADIFEWNSEETKRIFGEINQSRFPNTKIHVIYQPVGVVAALVPWNFPVILASRKISTALAAGCSVIVKPDVITPGSVMEIVDICKEAGVPPGVVNLLSGDPAAISSELIQSDIIKKISITGSTRVGKLILKQAADKVQRVTMELSGHSPFIVFDDVDLNKVTDMAITAKFRNNGQVCISPNRFYIHEKKKDEFADLMVQKTKKLKMGNGRIRIL

SEQ ID NO: 92675 - protein, 169 aa, Unknown
  Bacterial polypetide isolated from the Sargasso Sea
VGDPMADDVQMGALISEPHLQKVLDYVASGTAEGATLAVGGSRLHPQGFEAGYFMEPTILTNCRDEMRHVREEIFGPVMSVLTFETEEEAVQRANATSFGLGAGLMTGDLARAHRVAAQLESGNVWVNSYNILPPGLPFGGVKQSGFGRENSAYSLEAYSEIKATYIQL

SEQ ID NO: 92676 - protein, 193 aa, Unknown
  Bacterial polypetide isolated from the Sargasso Sea
MKIKVGINGMGRIGRMVLRSIVEKHSNLIKIQHINNRSDLESTCSLLKYDSIHGKFNANINYSKKHLIVNKNRISFSQESKLEDIKWKKFDVDYVFECTGKFNSKQKLILHIKNGAKKVIVSAPCKNADKTIVYGVNDDKILKKDQIISAASCTTNCLAPVVKIINENFEIEKGFMTTIHAFTSDQRILDNSH

SEQ ID NO: 92677 - protein, 273 aa, Unknown
  Bacterial polypetide isolated from the Sargasso Sea
MQDKKNFYINGQWVSPIEPRSFAVINPATEEPCAEISLGGKKDVDAAVISAKKAFETWGFTTKEERLNLFEKLYEIYKKNWDQMAKTISLEMGAPIDFSTELQTKTGASHIKSFKNILKNFKFEKTLDEEKNQTILYEPKGVCALITPWNWPINQVNLKVIPALAAGCTVVLKPSEIAPLSSMLLAEMMHDAGFPKGVFNLVNGDGAVTGDALTSHPDIDMISFTGSTRAGALISQNAAKDFKRISLELGGKGANIVFKDAGPDAISWSVKDV

SEQ ID NO: 92678 - protein, 288 aa, Unknown
  Bacterial polypetide isolated from the Sargasso Sea
MFRVVAQLKEKINFLSLINTQETGKPIKESTLVELGGVIRTFEYYAGLATKIKGTSQVINKELFSLTIKEPIGVVGQILPWNFPLLLASWKIAPALASGCTVVIKPSELTPHGTIELAKIISDCGVPDGVINVCPGSGEEAGDALVKNKKIAKISFTGSSMVGKSIVRNSSDNLTKLSLELGGKAPNIIFDDANLGSCLEANLRGGFFNQGENCTAVTRLFVHKKIYNKFISLYKKRIAEINMDEPDKNNTEMGSLISKAHLKKVTSCVDKSIKQGSKIIFQGKIKKG

SEQ ID NO: 92679 - protein, 164 aa, Unknown
  Bacterial polypetide isolated from the Sargasso Sea
GSKKGDHIGPVVSKVLYDKIINLIDSGISEGATLAAGGPDRPNGLNKGYFIKPTIFTDVTNEMRIAKEEIFGPVLSIIPFEKEEEAIKIVNDTSYGLGNYLQTDDKEKAHRVARELRSGCVYINGKGADAGTPFGGYRQSGNGREGGVWGLEEFLEVKTITGWK

SEQ ID NO: 92680 - protein, 284 aa, Unknown
  Bacterial polypetide isolated from the Sargasso Sea
IILAMNLIQHFVNGKIISGKSERRGKVFNPAIGEQESEVILGLKSDLDEAVDVAKKAFETWSLKPPIQRARIMFKFKELIEKNSDELTKMIVSEHGKVYEDAKGSLIRGLEVVEFTCGIPQVLKGEFTENVGTDIDSWSIRQPLGVCAGITPFNFPAMVPMWMFPMAIACGNTFVLKPSEKDPSISIKLAELFQEAGLPDGVFNVINGDKEVVDAILVNKDIKAVSFVGSTPIAKYIYENAAKNEKRVQALGGAKNHCVVMPDCDLDQAVNGLMGAAYGSAGER

SEQ ID NO: 92681 - protein, 152 aa, Unknown
  Bacterial polypetide isolated from the Sargasso Sea
SKTQYDKIINLIESGISEGATLAAGGPERPNGLNKGYFIKPTIFTDVTNDMRIAKEEIFGPVLSIIPFDKEEEAIKIVNDTSYGLGNYLQTEDKEKAHRVAKELRSGCVYINGKGADAGTPFGGYRQSGNGREGGVWGLEEYLEVKTVTGWK

SEQ ID NO: 92682 - protein, 205 aa, Unknown
  Bacterial polypetide isolated from the Sargasso Sea
MKKISNYIAGKHCEPHNNEYIDNVDPATGEVYSLIPNSSSEDIEKAVLASQEAFPLWSSMGIEKRSAILMNVADKIESRLEEFIAAESKDNGKPLSLARNVDIPRAISNFRFFATSILHFSSESHYMEGVGINYTTRKPIGIVGCISPWNLPLYLFSWKIAPALAAGNCVIAKPSEVTPYTAYLLSTVLEEAGVPAGVLNIVHGL

SEQ ID NO: 92683 - protein, 293 aa, Unknown
  Bacterial polypetide isolated from the Sargasso Sea
LRSRIVELEEELIFAVSKDFGYRTAFDTLLGDILPTVQGLSHIIKKLPKWSKPSKRSVGLSLWPSKVSVTYQPKGVVGVIAPWNYPIQLAVVPVITAIAAGNKVMLKLSEFTPHTNAVLEKLFDDKMSQHVCVVQGGSNVASEFSSLPFAHLLFTGSTGVGKLVMKAASKNLTPVTLELGGKSPVIITEQADVAKAAHALLFGKMANAGQICVAPDYVFVPKTLESQLIKQLCELYKKHFKQGVEGKNLTSIISDSHYARLAGYLVQAQELGANVIKPLEQNQQDADKHRMGL

SEQ ID NO: 92684 - protein, 310 aa, Unknown
  Bacterial polypetide isolated from the Sargasso Sea
EVVKYACGIPQMLKGEFTENVGTNVDSWSIRQPLGVCAGITPFNFPAMVPMWMFPMAIACGNTFVLKPSEKDPSCSMRLAELLKEAGLPDGVFNIVNGDKEAVDALIKNKDVVAMSFVGSTPIAKYIYENCAKNEKRVQALGGAKNHCVVMPDCDLDQAVNGLMGAAYGSAGERCMAQSVAVAVGGIGDKLVSSLAKKVEVLKVGPGMDKQSEMGPLVTKEHLAKVKGYVDIGEKEGAKLVVDGRNFKLQGYEKGYYIGGCLFDHVKKDMRIYKEEIFGPVLSVIRAKDFDEALQLVNDHEFGNGVSIFT

SEQ ID NO: 92685 - protein, 194 aa, Unknown
  Bacterial polypetide isolated from the Sargasso Sea
MKHYQHYINGAFCDPVSGSYFDSENPYTGQVWAKVAKGNASDVDAAVKAARAAFDGEWGAIGPTARGKLLVKLAEIIEREAVRLGEIEVRDNGKLIAEMGAQTKYLAEWYRYFGGLADKIEGSVIPSDKPGIFNFTRYEPLGVIGMITAWNSPLLLLAWKLAPALAAGNTAVIKPSEYTSASTLEFMELVEEAG

SEQ ID NO: 92686 - protein, 311 aa, Unknown
  Bacterial polypetide isolated from the Sargasso Sea
MQQKRKIGIVALGSTIDVDKAVYSAKKAFSVSSKLSKKDRLDILETIRENYKKRYRDISEAIRLEMGAPVKLAEGAQTATGLGHLKTAMRVLEKHEFEYTHEDYIVREEPIGVCGLITPWNWPINQIVSKFAPAFAAGCTVVLKPSELAPLSAMIIAEIIHESQIPPGMFNLVNGLGNVVGEAMSSHKDIDMMSFTGSTRGGVAVAKASATNVKRVSQELGGKSPNLILDDNSFNTSITNGVIHVMGNSGQSCNAPTRMLVPKSRHDEAITIAQSALEKVKVGDPLDLNSDLGPLVSQNQFDKVQKLIKKE

SEQ ID NO: 92687 - protein, 141 aa, Unknown
  Bacterial polypetide isolated from the Sargasso Sea
LKKGIDEGATLVAGGPVKPDGLKKGYFVKLTVFTDVNNDMDIARTEIFGPVLSVMPFETEEEAIKIANDTPYGLTNYIQTQDKEKVKRVARKLRSGMVDVNGAGIAVDAPFGGFKHSGIGREAGQHGLDEFLEVKSVGGWS

SEQ ID NO: 92688 - protein, 286 aa, Unknown
  Bacterial polypetide isolated from the Sargasso Sea
MYDKFGQFIDGKWQKSASGETYDVINPATEELLGKASKANNSDVQRALKSAEKGLEIWRNTSPWERAKVIRKISELMRKKVDILSKWLTLEVGKPLTEGPGEVGGAADIFEWNSEETKRIFGEINQSRFPNTRIHVIYQPVGVVAALVPWNFPVVLASRKISTALAAGCSVIVKPDVITPGCVMEIVDICREAGVPPGVVNLLSGDPAGISEELIKSDIIKKISITGSTRVGKLILKQAADKVQRVTMELSGHSPFIVFDDVDLNKVSDMAITAKFRNNGQVLFSK

SEQ ID NO: 92689 - protein, 173 aa, Unknown
  Bacterial polypetide isolated from the Sargasso Sea
EANKIKVDLASQKGDHIGPLVSKVQYDKVVNLINEGIKEGATLAAGGPDLPNGLNKGYFVKPTIFSDVNNEMKIARTEIFGPVLSIIPFETEEEAIAITNDTSYGLGNYLQTEDKEKAKRVARKVRAGTVYINGQSTDTGMPFGGYKQSGNGREGGVWGFTEFLEVKAITGWN

SEQ ID NO: 92690 - protein, 253 aa, Unknown
  Bacterial polypetide isolated from the Sargasso Sea
LAEGIGEVGGSADIFEWNAEETKRIYGQTVESRFPDTRVHVYYQPVGVVAALVPWNFPLVLASRKISTALAAGCSVICKPDVITPGCVMELVDICREAGVPDGVVNLLSGDPPAIAEQLIKSDIIKKISLTGSTRVGKLILKQAADKVQRVTMELSGHSPFIVFDDADINKATDMAITSKFRNNGQVCISPNRFYIQEKKKDEFINTFISKVKKLKIGNGMDKDVQLGPLTTKKRLEEVEKLVDITKKEGAKV

SEQ ID NO: 92691 - protein, 222 aa, Unknown
  Bacterial polypetide isolated from the Sargasso Sea
MSSGNKYKLIASKLKFEGRAFINGKYVNAIDGKKFETINPATGKKLCAVAKCNHKDVNLAVKVSRKAFNSGVWSKSSPEHRKEVLLKFAELLRKHGDENSVLESVDTGKLITDCINEVANDAPMHFQWYGELIDKVFGKVGPTEPSITSLIVKEPIGVVAGIVPWNFPLMMAVWKMAPALAAGCSVIIKPAEDTPLTAIRVAQIGKEAGIPDGVLNVLPRLW

SEQ ID NO: 92692 - protein, 218 aa, Unknown
  Bacterial polypetide isolated from the Sargasso Sea
MNLIEHFVNGEITKGSSKKKSKVFNPATGEQTAEVILASKADVDLAVEKAKKAFTDWSRKPPAQRAKIIFKFKELVEKNSDEIIKLIVSEHGKVYEDAKGSLARGLEVVEFACGIPHLLKGEFTENVGTDVDSWSLRQPLGVCAGITPFNFPAMVPMWMFPIAIACGNTFVLKPSEKDPSCSIKLAKLFKEAGLPDGVFNVVNGDKESVDALLTNKDV

SEQ ID NO: 92693 - protein, 159 aa, Unknown
  Bacterial polypetide isolated from the Sargasso Sea
HIGPVISKTQYDKIINLIESGISEGATLAAGGPELPNGLNKGYFIKPTIFTNVTNEMRIAKEEIFGPVLSIIPFENEAEAVKIVNDTSYGLGNYLQTEDREKAHRVSKKLRSGCVYINGNAADAGTPFGGYRQSGNGREGGVWGLEEYLEVKTVTGWKD

SEQ ID NO: 92694 - protein, 182 aa, Unknown
  Bacterial polypetide isolated from the Sargasso Sea
MYSKFGQFIDGKWQPSSNNETYDVINPATEEIIGQASKATPADVDKALKSAEKGFNVWRKFSPWDRSAIIRRIADLMRKKNNELAKWMTLETGKTLAESLAEVSGSADIFEWNAEETKRIYGQTVQSRFENTRVIINYEPVGVVAALSPWNFPLVLASRKISTALAAGCSVICKPRCYYSQV

SEQ ID NO: 92695 - protein, 237 aa, Unknown
  Bacterial polypetide isolated from the Sargasso Sea
MYDKYGQFIDGKWQKSASGETYDVINPATEEVLGKASKANSTDVQKALKSAEKGLITWRNTSPWERAKIIRRISELMRQRVDVLSKWLTLEVGKPLSEGPGEIGGAADIFEWNSEETKRIFGEINQSRFPNTRIHVIYQPVGVVAALVPWNFPVVLASRKISTALAAGCSVIVKPDVITPGSVMEIVDICKEAGVPPGVVNLLSGDPAGISEELIKSDIIKKISITGSTRVGKLILK

SEQ ID NO: 92696 - protein, 116 aa, Unknown
  Bacterial polypetide isolated from the Sargasso Sea
WYVKPTILPDVESHMRVAREEIFGPVLAITPFESEEEAISIANDTPYGLAAYVQTSDAGRAERVAARLRAGAVHINGAAVGYGTPFGGYKQSGNGREGGMMGLEDYLETKTLHGMF

SEQ ID NO: 92697 - protein, 221 aa, Unknown
  Bacterial polypetide isolated from the Sargasso Sea
MADYKLLIGGQLVAGDAVMDVINPATEEVLAVCPRASEAQLDAAVAAGKAAFPAWAHTPIAERRAMLLKLADALSARIDEFARLLTQEQGKPLSESTAEIAYTEAFVRHLAMLELEARLIEDGESRRVVMRRRPLGVVGAIIPWNFPVLIVAFKLPLALLAGNTIVVKPAPTTPLTTLLFGELCAEIFPAGVVNIITDQNDLNTRLTCHPDIAKVTSPGST

SEQ ID NO: 92698 - protein, 276 aa, Unknown
  Bacterial polypetide isolated from the Sargasso Sea
GYGDVGEALGRHKDVDAVSFTGSTEVGGYFLKYSSESNLKPVALEMGGKSPFIVLEDAKITDDLIDNAINSAFWNGGQNCSANMRQIVHKKVKDEFLDKVIKKVKKLKVGDPLDLKSNMGSMISKGHLQTVDGYIQKGIDEGAKLLSGGVSNNKQKGFYAKPTLFDGLKENMTIAQEEIFGPVLGILTIKNDEEALKVASNSKYGLHASVFTQDINRAFHLAKSLPCGTVSVNTFSEGDIKTPFGGYKQSGSLSRDQGTEALNSFLQTKTIWISHN

SEQ ID NO: 92699 - protein, 236 aa, Unknown
  Bacterial polypetide isolated from the Sargasso Sea
MYEKYGQFIDGKWHKSSSGETYEVINPANEEIIGKASKASSEDVDKALLSAQKGLEVWKKTPPWQRAYILRRIADKMREKQDILAKWMTLEVGKPIAEAKGEVNGAADIYEWNAEETKRIYGQTVESRFEDTRVHVYYQPVGVVAALVPWNFPLVLSARKISTALAAGCSVIVKPDVITPGVVMEQVEICRECGVPPGVVNLLSGDPPSIAQQLIASDIVKKISITGSSRVGKLIL

SEQ ID NO: 92700 - protein, 255 aa, Unknown
  Bacterial polypetide isolated from the Sargasso Sea
ISFTGSTRAGALISQNAAKDFKRVSLELGGKGANIIFKDADPEAIERGALRCFRNSGQSCNAPTRMLVEKSMYDEAIQRLKKYTENFEVGDPKKEGEHIGPVISETQYNKIQTLIQKGIDEGAKLVAGGTGKPDGLGKGYFVKPTVFADVNNDMEVARTEIFGPVLSVIPFETEEDAIRIANDTTYGLTNYIQTQDSEKVQRVARKLRSGMVDVNGAGIAVDAPFGGFKHSGIGREAGEHGLEEFLEVKAVGGWS

SEQ ID NO: 92701 - protein, 141 aa, Unknown
  Bacterial polypetide isolated from the Sargasso Sea
GGIAEGAKVVCGGPGLPEGIDRGYYVRPTVFSGVSNGMSIAEQEIFGPVLVMIPYDSEEEAIQIANDTPYGLAGYVQSGDLDHARQVASRIRAGNVHINGASPGMDVPFGGYKQSGNGREWGAHGFTDYLEIKAISGFEAA

SEQ ID NO: 92702 - protein, 287 aa, Unknown
  Bacterial polypetide isolated from the Sargasso Sea
ASAQDVDKAVKAAQKAFEGEWSKLLPRDRGNYLRAIANKLRENAELLGKIETIDTGKLFRETNKQANYIAEYYDYYAGLADKVEGSVLPIDKPNIQAITTRIPIGVIAAIIPWNSQMLLTVTKLAPALAMGNTVVIKSSELAPAVMFEFAKLVEETGIPKGVVNVITGFGDPCGKALTTHNLVEKIAFTGGPETARHIIRNSAENLSEVSLELGGKSPVAVFDDAHQENAINGITAGIFGASGQSCIAGSRLYLQDGIYNEFLDKLAIRANKIKLELLWIQKVKWAL

SEQ ID NO: 92703 - protein, 289 aa, Unknown
  Bacterial polypetide isolated from the Sargasso Sea
NARNSVWLYMVLKPSELAPLSSMILAELIDETKFPAGVFNLINGDGATTGDALTSHPDVNMISFTGSTRAGALISQNAAKDFKRVSLELGGKGANIIFKDADPEAIERGALRCFRNSGQSCNAPTRMLVEKSIYKEAVERLKKYTENFEVGDPEKGGEHIGPVISETQYNKIQTLIKKGIDEGATLVAGGPGKPEGLEKGYFVKPTVFTDVNNDMDIARTEIFGPVLSVMPFETEEEAIEIANDTPYGLTNYIQTQDKEKVKRVARKLRSGMVDVNGAGIAVDAPFGGL

SEQ ID NO: 92704 - protein, 240 aa, Unknown
  Bacterial polypetide isolated from the Sargasso Sea
MYSKFGQFIDGKWQASQNNETYDVLNPATEEVLGKASKAGEEDVNKALKSAEKGLEVWRNTPPWQRSKIIRKIADLMRERTDVLAKWLTLEVGKPLSEAKGEVGGAADIFEWNSEETKRIYGQIVESRFEHTRMYVKYEPVGVVAGLIPWNFPIVLSSRKISTALAAGCSVICKPDVITPGSVMELMNIINDAGVPPGVVNLLSGDPAKISSQLISSDIVKKVSITGSTRVGKLILKTSC

SEQ ID NO: 92705 - protein, 260 aa, Unknown
  Bacterial polypetide isolated from the Sargasso Sea
MKLDFPPGVFNLINGDGLGVGSELSGHKDIDMISFTGSTRAGKLITKNAADTIKRVCLELGGKGGNIIFADAQLEAVREGVRNIMSNSGQSCDAPTRMLVEKSIYERAIREAADEASKIKVDIAEKKGDHIGPVVSKTQYNKIIDLIQSGIDEGATLIAGGTEKPEKLKEGYFVQPTIFTNVTNDMRIAKEEIFGPVLSIIPFEDEEEAVSIVNDTEYGLGNYVQTQDKAKAKRVARKFRSGGVSINGNSAVPGTPFGGY

SEQ ID NO: 92706 - protein, 276 aa, Unknown
  Bacterial polypetide isolated from the Sargasso Sea
AEPEGDAISRRAKNASCCTQNLQLKQTDWSNCDVVIEASGQMKTAQLLSEYLNQGVKQVVATAPIKEPEILNLVFGVNHELFEQEKPSIITASSCTTNCIAPAIKVVHEQFGIVHGSITTVHDITNTQVVLDQGHKDLRRARSSGNNLIPTTTGSAKAIAQIFPELEGKLNGHAIRVPLANASLTDCVFELNKKTNAEEVNRALEQAATGSLKGILGFEEKPLVSTDYIGDSRSSVVDALSTMVVNNTQLKLYLWYDNEWGYSNRVIDLVEYISNA

SEQ ID NO: 92707 - protein, 303 aa, Unknown
  Bacterial polypetide isolated from the Sargasso Sea
EIVAINASGSLEGCAMLLQRDSIHGEFKHKVEVNKNCLRINSENIKYISDRDPSNLPWKSLDIDIVLECTGKFTTHDSASKHIDSGAKKVLVSAPVKNADKTIVYGVNHQQLTSGDRVVSNSSCTTNCLAPLAYVLNNHVGIQKGFMTTVHAYTSDQRSLDNNHSDPRRARSCHTSIVPTSTGAAKSLSLIIPELRGKLDGTAVRVPIPNVSMVDMTFLSEQPTTIEDINLSVKTAAETKLKGILGYNNLPLVSIDFNHDSHSSYFDSTQTQVIGENFVRVLSWYDNEWGFSNRMVDTAIAMT

SEQ ID NO: 92708 - protein, 110 aa, Unknown
  Bacterial polypetide isolated from the Sargasso Sea
VFADVNNKMEIARTEIFGPVLSVMPFETEEEAIEIANDTPYGLTNYIQTKDKEKVKRVARKLRSGMVDVNGAGIAVDAPFGGFKHSGIGREAGEHGLEEFLEVKSVGGWS

SEQ ID NO: 92709 - protein, 317 aa, Unknown
  Bacterial polypetide isolated from the Sargasso Sea
HVEYIYLKLSEKDPSCSIRLAELFSEAGLPDGVFNVIQGDKKVVDLILNSEQISAISFVGSTPVAKYIYEESAKNGKRVQALGGAKNHLVVMPDANLDQAVDGIIGAGYGSAGERCMAISVAVAVGDIADELVNKIQNEAQKLKVAPWTDLESDMGPVISKEHKEKIENYISVGVKEGATLIEDGRNYKIQGYENGYFVGPTLFDNVTEEMTIYKEEIFGPVVSVVRAKTYDEALNLVNNHAYGNGTSIYTSDGEISRHFTTNSRIGMVGVNVPIPVPMAFHSFGGWKQSLFGDHSVHGMENVHFYTKLKTITSRGQ

SEQ ID NO: 92710 - protein, 297 aa, Unknown
  Bacterial polypetide isolated from the Sargasso Sea
KMREKQDILAKWMTLEVGKPLAEAKGEIGGAADIFEWNAEETKRIYGQTVESRFEDTRVHVYYQPVGVVAALTPWNFPAVLSARKISTALAAGCSVIIKPDVITPGVVMEMVDICRECGVPPGVINLLSGDPPSIAQQLISSDIIKKISITGSSRVGKLILKQAADKVQRVTMELSGHSPFIVFDDADIKKAADMAIAAKFRNNGQVCISPNRFYIHESKKDEFVNLFVDKTKKLKIGNGMDADTQLGPLTTEKRLNEIEELVEKTKQEGAKVLLGGKRPAGFNKGFFYEPTEYLMM

SEQ ID NO: 92711 - protein, 263 aa, Unknown
  Bacterial polypetide isolated from the Sargasso Sea
YSHPDINMISFTGSTRAGALISQNAAKDFKRVSLELGGKGANIIFKDADPEAIERGALRCFRNSGQSCNAPTRMLVEKSMYDEALERLKKYTENFEVGDPKKEGEHIGPVISETQYNKIQSLIQKGIDEGAKLVAGGIGKPDGLDKGYFVKPTVFADVNNDMEVARTEIFGPVLSVIPFETEEDAIKIANDTSYGLTNYIQTQDSQKVQRVARKLRSGMVDVNGAGIAVDAPFGGFKHSGIGREAGEHGLEEFLEVKAVGGWS

SEQ ID NO: 92712 - protein, 308 aa, Unknown
  Bacterial polypetide isolated from the Sargasso Sea
MKDKKKFYINGEWVNPINAKNFNVINPSTEEVCAIISLGSSEDTDLAVKSAKLSFETWKETSKQERINLLEKLLEIYKSRWDEMTDAISTELGCPKDWCSANQTASGAGHIEDFIKRLKEFNFEPGFDKGSVNHIVYEPIGVCGLITPWNWPINQIALKVVPALATGCTMVLKPSEIAPLSAMLFAEMIHDAKFPSGVFNLVNGDGPGVGTDLSGHPNVDMVSFTGSTRAGKLITKNAADTIKRVCLELGGKGGNIVFADAYPDAVRDGIRNVMSNSGQSCDAPTRMLVEKSIYKRAVDEAADEANKI

SEQ ID NO: 92713 - protein, 174 aa, Unknown
  Bacterial polypetide isolated from the Sargasso Sea
KFANEYKVDIPQKEGDHIGPVISETQYNKIQGLIKKGIDEGANLIAGGPGKPEGFEDGYYVKPTVFADVNNNMEIARTEIFGPVLSVIPFESEEEAIEIANDTPYGLTNYIQTEDQEKVKRVARKLRSGMIVANTASLAVDAPFGGFKHSGIGREGGKEGLLEFLEVKSIGGWN

SEQ ID NO: 92714 - protein, 271 aa, Unknown
  Bacterial polypetide isolated from the Sargasso Sea
MYEKFGQFIDGKWQQSSDKKTYEVINPATEEIIGHASKASPADVDKALKSAEKGLGVWKKTPPWKRSSIIRNIADLIRKKQDVLAKWMALEVGKPLAEGKAEAGGSADIFEWNSEETKRIYGQTVESRFEDTRVHVYYQPIGVVAALTPWNFPLVLSARKISTALAAGCSVIVKPDVITPGTVMELVDICRESGVPPGVVNLLSGDPPSIASQLISSDIIKKISLTGSTRVGKLILKQAADKVQRVTMELSGHAPFIVFDDANIEKATDMA

SEQ ID NO: 92715 - protein, 307 aa, Unknown
  Bacterial polypetide isolated from the Sargasso Sea
MIEKKNFYINGKWVAPVKPNDFDVIDPSTEEAFAVISLGSKEDTDKAVIAAKEAFETWKETSKEERVELLEKFCEIYNRRWDEMVEAQSMEMGAPLDFASETHTKMGADISKNVIDILKNFNFEHQFDPKSNNQIRYEPIGVCGLITPWNYPMNQIVLKVIPALAAGCTMILKPSEVAPVSGVLFAEIIDEAGFPPGVFNLINGNGEVVGNHISGHPDIDMVSFTGSTRAGKLIQKNAADTIKKVTLELGGKGGNIVFEDSYPEAVRDGVRTIMSNTGQSCDAPTRMLVQRSIYDRAVKEAVDEAIK

SEQ ID NO: 92716 - protein, 289 aa, Unknown
  Bacterial polypetide isolated from the Sargasso Sea
SSMILAEIIHEAKFPSGVFNLVNGDGATTGDALTSHPEVNMISFTGSTRAGALISQNAAKDFKRVSLELGGKGANIIFKDADPEAIERGALRCFRNSGQSCNAPTRMLVEKSMYDEAVERLKKYANEFQVDDPNKEGEHIGPVISETQFNKIQTLIKKGIDEGAKLVSGGPGKPNGLDKGYYVKPTVFADVKNDMEIARTEIFGPVLSVMPFETEEEAIKIANDTPYGLTNYIQTQDPEKVKRVARKLRSGMVDVNGAGIAVDAPFGGFKHSGIGREAGSEGLVEFLEV

SEQ ID NO: 92717 - protein, 286 aa, Unknown
  Bacterial polypetide isolated from the Sargasso Sea
FEDTRVHVYYQPVGVVVALSPWNFPAVLSARKISTALAAACSVIIKPDVITPGVVMEIVDICKECGVPPGVINLLSGDPPSIAQQLIASDIVKKISITGSSRVGKLILKQAADKVQRVTMELSGHSPFIVFDDADIKKATDMAIAAKFRNNGQVCISPNRFYIQETKKDEFINLFVEKTKKLKIGDGMDPSVNLGPLTTKKRLNEVEELVETTKKEGAKVILGGKRPKGFNKGFYYEPTIFDDVKDDFTIMKVEPFGPLVPMLSFKTFDEVIERANNHELGLSSYI

SEQ ID NO: 92718 - protein, 274 aa, Unknown
  Bacterial polypetide isolated from the Sargasso Sea
LWLSKAAQAATGAGHLGTFLEILKNYEFEEDRGNTRIRKEAVGVCGFITPWNWPINQITCKVAPALAAGCTMVLKPSEIAPLNAILFAEILDEAGVPAGVFNLVNGDGPTVGEAMSSHKDIDMMSFTGSTRAGIAVAKASADTVKRVAQELGGKSANIILDDADFGSAIAGGVTSCFMNSGQSCNAPTRMLVPADRQDEAIAIAKETAENTIVGNPAEVAAGGIGPVVSELQYDKIQALIEKGIEEGATLVAGGPGKPEGLNAGYFVNLLFLPM

SEQ ID NO: 92719 - protein, 146 aa, Unknown
  Bacterial polypetide isolated from the Sargasso Sea
RDVRTGGVGRPDGLDKGYFVKPTVFSNVSNDMTIAREEIFGPVLSLIPYEDEDHAVEIANDTVYGLSAYVSSGDIDHARTIGARLRAGNVHLNGAPLDINSPFGGYKQSGNGREFSEWGLEEFLEKKAVLGFVPVEAAPAESKTLF

SEQ ID NO: 92720 - protein, 181 aa, Unknown
  Bacterial polypetide isolated from the Sargasso Sea
DHLLFTGSGNIGKHVMRAASENLVPLTLELGGKSPVIVSDSSNIDITARRVMFNKTLNAGQICLAPDYVYVHETEKDNFVEACKNQVNEFYSDLKYNPDYTSVINKKHYDRLNGLLSDAKDHGAELVEINPANEDFSQQESHKIPPTLVLNPTDEMQIMKEEIFGPLLPIKTYKDINEPIN

SEQ ID NO: 92721 - protein, 210 aa, Unknown
  Bacterial polypetide isolated from the Sargasso Sea
MDVRSAKEYSKDDWAKLASEAESKVEGRLFINGEYVDAEDGGKIDVINPSTNEVFGTCAAGTGKDIDKAVAAAKESYKAKTWLKMAPRKRMGIMMKFADLISKNAAELALMETMNMGKPISDCLNIDVPASAVNLKFMAECIDKMYGKVANTHEKALNLSVREPFGVVGCISPWNFPLLMGIWKIAPALAAGNSVVLKPDEHSPHSLIKI

SEQ ID NO: 92722 - protein, 172 aa, Unknown
  Bacterial polypetide isolated from the Sargasso Sea
VATLVREHTHELAVLESLDTGKTINDCMEEIGGEVVNFFQWYAELADKSFGKIAPTGPSALALIVKEPAGVAGAVLPWNFPLVMAAWKIAPSLSVGCSAVIKPAEQTPLSTIRLAELMREAGVPDGVINIVPGYGETAGKAIGMHNDIDTVSFTGSSEVGRMFMRYSGDSNV

SEQ ID NO: 92723 - protein, 331 aa, Unknown
  Bacterial polypetide isolated from the Sargasso Sea
MQAATGASHIKSFKNILKDFKFEKDLGEEKNNQKLLYEPKGVCALITPWNWPINQVNLKVIPALASACTVVLKPSEIAPLSSMLLAEMIDEAKFPSGVFNLVNGDGAITGDALTSHPDIDMISFTGSTRAGALISQNAAKDFKRISLELGGKGANIIFKDADSEAIARGVLRCFRNSGQSCNAPTRMLVEKSIYNETVEKVKKLANDTKVDSPQKDGDHIGPVVSEVQFNKIQTLIQKGIDEGAKLVAGGTGKPKGLEKGYYVKPTVFADVNNQMEIARTEIFGPVLSIIPFENEEEAISIANDTPYGLTNYIQTQDKDKVQRVARKLRSG

SEQ ID NO: 92724 - protein, 158 aa, Unknown
  Bacterial polypetide isolated from the Sargasso Sea
MEKIKSYLELGKKEGAKVLTGGSVAKLNSGLEKGNYIQPTVFEAKNDMRISQEEIFGPVVSVIKFKDEAEALKIANDTLYGLGAAVWTRNGNIAHRMGRAIQAGIVWTNCYHAYPAHSPFGGYKQSGVGRETHKMMLNHYRQNKNLHVSYAEKKLGFF

SEQ ID NO: 92725 - protein, 133 aa, Unknown
  Bacterial polypetide isolated from the Sargasso Sea
TLAAGGPELPNGMNKGYFIKPTIFTDVTNDMRVAKEEIFGPVLSIIPFETEEEAIKIVNETEYGLGNYLQTEDKEKAKRVSKKLKAGTIYVNGNGADPGAPFGGYKQSGNGREGGVWGLHEFLEVKTITHWPK

SEQ ID NO: 92726 - protein, 290 aa, Unknown
  Bacterial polypetide isolated from the Sargasso Sea
MDKALIKNKSYINGKWTCEGNKTFKVSNPANGKTIGYVNDGGIEITKKGIESAYKAYKYWSQYTAKDRSMILEKWNNLIQEKSDSLAEIITLECGKPINESKTEVTYAASFVKWFAEEGKRTYGDIIPSHTKDRRINVIKQPIGVVAAITPWNFPLAMITRKVSPALAVGCTVVIKPADETPFSALALAHLADKAGFPPGVFNLIVGKDSARIGKTMCENNLVKKISFTGSTKIGQLLMSQSSKTLKKLSLELGGNAPFIVFEDANIDSAVEGAILSKFRNSGQTCVCVN

SEQ ID NO: 92727 - protein, 332 aa, Unknown
  Bacterial polypetide isolated from the Sargasso Sea
MKIKIGINGMGRIGRMILRSIYEGNKKIEVMHINNRTNSETCSTLLKYDSIHGKFKAEISYDENNLIVNKNKISFGQEADLNRIDWKKYGVDYVFECTGKFNSKDKLETHLNNGAKKVIVSAPCKNADKTVVFGVNESELNKEDKIISAASCTTNCLAPVAHVLNENFGIEKGFMTTIHAFTSDQRILDNSHKDPRRARSASQSIVPTSTGASKAIGEIIPSLKGKLEGVAMRVPTPNVSLIELIFCTKKELNIEKINSAFENFSKKNKIIEITKEKLVSIDFNHNPASSIIDASLTNVVGKNMGKISAWYDNEWGFSNRMCDIAEYLHKIS

SEQ ID NO: 92728 - protein, 183 aa, Unknown
  Bacterial polypetide isolated from the Sargasso Sea
RTKAVVQDNPLKMETMIGAQASVEQMEKIKSYLDLGKKEGAKVLTGGSVAKLNSGLEKGNYIQPTVFEAKNDMRISQEEIFGPVVSVIKFKDEAEALKIANDTLYGLGAAVWTRNGNIAYRMGRAIQAGIVWTNCYHAYPAHSPFGGYKQSGVGRETHKMMLNHYRQNKNLHVSYAEKKLGFF

SEQ ID NO: 92729 - protein, 332 aa, Unknown
  Bacterial polypetide isolated from the Sargasso Sea
MKIKIGINGMGRIGRMILRSIYEGNKKIEIIHINNRTNSETCSTLLKYDSIHGKFKADISYDENNLIVNKDKISFSQETDLNKINWKKYGVDYVFECTGKFNSKDKLQPHLNNGAKKVIVSAPCKNADKTIVFGVNESELEKEDKIVSAASCTTNCLAPVAHILNENFGIEKGFMTTIHAFTSDQRILDNSHKDPRRARSASQSIVPTSTGASKAIGEIIPSLKGKLEGIAMRVPTPNVSLIEFVFCTKKDLNVEKINSAFKDFSKKNKIIEITKEKLVSIDFNHNPASSIIDASLTNVIGKNMGKISAWYDNEWGFSNRMCDIAEYLHKTS

SEQ ID NO: 92730 - protein, 643 aa, Unknown
  Bacterial polypetide isolated from the Sargasso Sea
VQEATPADVDQALAHAQAAAAPWAATPPAERAAALLRTADLLEERMQPLLGLLMREAGKSASNAVAEVREAVDFLRYYAAQVQSTFDNTTHIPLGPVACISPWNFPLAIFMGQVAATLAAGNPVLAKPAEQTPLIAAEAVSLLWQAGVPRAAVQLLPGQGETVGARLIGDERVMGVMFTGSTEVARILQRTVAGRLDAADRPIPLIAETGGQNAMIVDSSALVEQVVGDAVSSAFDSAGQRCSALRVLCVQEEAADRVVEMLQGAMGELRVGNPAELRVDVGPVIDAEAQAGITQHIEKFKAQGHRVFQHPNHVSAVSAPGTFVPPTLIELNHIGELQREVFGPVLHLVRYARNDLNQLLDQINATGYGLTQGVHTRIDETIARVVNRAHAGNVYVNRNIVGAVVGVQPFGGEGLSGTGPKAGGPLYLLRLLSQRPADALARTLAEADRTSPPDTERRERQLAPLGTLQQWAHNQGNLALAGHCQRFAQKTQSGTARTLPGPTGERNVYTLAPRARVLCMAQSADDLLVQTAAVLASGGTALWPSAHAGLRAKLPTHVQAQVMLQDNALSDGAVALDAVLHHGDAASLQAVCTSLAHRPGPIVGVTALQPGATDIPLERLLIERALSVNTAAAGGNASLMTIG

SEQ ID NO: 92731 - protein, 157 aa, Unknown
  Bacterial polypetide isolated from the Sargasso Sea
IGPVVSETQFNKIQSLIQKGMDEGAKLVAGGLGKPAGLEKGYFVKPTVFADVDNKMEIARTEIFGPVLSVIPFETEDEAIKIANDTSYGLTNYIQTKDKEKARRVAKKLRSGMVDVNGAGIAIDTPFGGFKHSGIGREAGEHGLQEFLEVKSVGGWN

SEQ ID NO: 92732 - protein, 335 aa, Unknown
  Bacterial polypetide isolated from the Sargasso Sea
MTIKIGINGMGRIGRMVVRSIFEANNKSLEISHINNRSNSEATCKLIKYDSIHGKFHADLKFGENELIINKNKITFSQESKIENIDWKKYNVDYVFECTGKFNSKEKLIAHIKNGAKKVIVSAPCKNVDKTIVFGVNENIISKDDKIISAASCTTNCLAPVVNVLNNNFEIEKGFMTTIHAFTSDQRILDNSHKDPRRARAASQSIVPTSTGASKTIGEIIPSLKGKLEGVAMRVPTPNVSLIELVFCTKKEVDVKKINAAFETASKNELNKILEVTYEKLVSIDFNHHSASAIVDASLTSVVGTNMGKISAWYDNEWGFSNRMCDIAENLHKIS

SEQ ID NO: 92733 - protein, 292 aa, Unknown
  Bacterial polypetide isolated from the Sargasso Sea
VKLIRYDSIHEKFDADIKFDSNNLIINKKKISFSHEPKIEKINWKKYDVDYVLECTGKFNSREKLVAHIKNGAKKVIVSAPCKNADKTIVFGVNENTLTKKDEIISAASCTTNCLAPVVDVIHKKFEIEKGFMTTIHSFTSDQRILDNSHKDPRRARSASQSIVPTSTGASETIGEIIPSLKGKLQGVAMRVPTPNVSLIELVFCTKKEINIKSINNEFELASKKELKRILEVTYEKLVSIDFNHNSASAIVDASLTSVVGGNMGKISAWYDNEWGFSNRMCDIAENLHKIS

SEQ ID NO: 92734 - protein, 475 aa, Unknown
  Bacterial polypetide isolated from the Sargasso Sea
MKEVLALQKKAYIDEGPASYELRLDRLNRLSQMLKKYSDEIVDTISEDYGTRDKNSTFLSEVMSSLGSVDYSIKNLKKWMKSETRQSNSSQPFVARLMMRLLGAKTEIQYQPLGTIGMIKPWNFPINLIISPIAQAFAAGNRVMIKPSEITPKTSDLTKKMFNEFYDKAEVEVFLGGPDVAEAFGNLDFDHLLFTGSTNNGRKVMQSAAGNLVPVTLELGDKSPVIMDETADVSLSATRLMRGKTMNAGQICIAPDYMMMPKGKVDEFINESTKAVSEMYPDMKYNDHYTSIVNQRHFERINSLIEDAKEKGAEIKTINPANEDFEQQEGHKIPPTFVLNPTDDMKIMQEEIFGPVMPIKEYEDIDETISYVNSKPRPLALYYFGKNKDTQNKILNRTTSGGATINDVVWHYGQEDMPFGGVGDSGIGSYHGHEGFKRFSHQKSVLTQFSSDLLKNMMPPYKGKMFESAKKNALK

SEQ ID NO: 92735 - protein, 248 aa, Unknown
  Bacterial polypetide isolated from the Sargasso Sea
WEFDVDYVFECTGKFNSKDKLLPHLKNGAKKVIVSAPCQNADKTIVFGVNEKELKKEDKIISAASCTTNCLAPVAYVLNENFEIEKGFMTTIHAFTTDQRILDNSHKDPRRARSASQSIVPTSTGASKAIGEIIPSLKGKLEGIAMRVPTPNVSLVELIFCTKKDLSIEKINSAFTNFSKKQKDKILEITHEKLVSIDFNHNPSSSIVDANLTNVIGKNMGKISAWYDNEWGFSNRMCDIAEYIHKIS

SEQ ID NO: 92736 - protein, 481 aa, Unknown
  Bacterial polypetide isolated from the Sargasso Sea
MYDKYGQFIDGKWQKSTSGETYDVINPATEEVIGKASKANSSDVQKALKSAEKGLKIWKNTSPWERSKIIRKISDLIRKRVNVLSKWLTLEVGKPLTEGPGEIGGAADIFEWNSEETKRIFGEINQSRFPNTQIHVMYQPVGVVAALVPWNFPVILASRKISTALAAGCSVIVKPDVITPGSVMEIVDICREAGVPPGVVNLLSGDPAGISEELIKSDIIKKISITGSTRVGKLILKQAADKVQRVTMELSGHSPFIVFDDVDLNKVTDMAITSKFRNNGQVCISPNRFYIHEKKKDEFANLMVEKTKKLKIGNGMDKDTLLGPLCTKQRLEGVEKLVETTKKEGGKVLLGGKRAANFNKGYFYEPTIFDNIKDNFTVMKEEPFGPIVPILTFKDFDEVMERANNNDLGLCSYVYTTDLKKANKASEQLETGCVAVNTPVVAVAEAPFGGIKQTGYGREGGSMAIKDYLNIKYTHFGISYE

SEQ ID NO: 92737 - protein, 444 aa, Unknown
  Bacterial polypetide isolated from the Sargasso Sea
LGQVPSGGKDDALAAIDSASKALPSWSSLTAYQRSKFLIDAHRLMMESQQEIAEIMTQEQGKPIRAAMNEVQYAADFLIWFAEEAKRVYGRTIPSSRSDQRFLVLNQPVGVVGAITPWNYPVSMITRKVAPALAAGCTIVVKPAEATPLCAKAVFQIFEKASFPPGVVNLVTAENPKPIGEMLINDERIRKITFTGSTKIGKMLAEGAGRGLKRISLELGGHAPFIVCADADPVHAAKGLSLVKFLNSGQACISPNRIYVHAQQEKAFLDELKSRVSNLKAGPGLEQDSKIGPLINQQALEKVETQVQDALKKGAELISGGERVRDDSCANGFFYAPTILNRVTPEMLIYREETFGPVAPVIIYQDEYDLLEMANDTHYGLASYVYTQNLKSAMQLFEGLDFGIVGINDINPTSAAAPFGGIKDSGIGREGASEGIHEYLKPNS

SEQ ID NO: 92738 - protein, 242 aa, Unknown
  Bacterial polypetide isolated from the Sargasso Sea
AAEKVQRVTMELGGHAPFIVFDDADLEKATDMAMAAKYRNNGQVCISPSRFYIHENKKDQFAKIFVEKTSKLKIGNGLDKDTNLGPITTQKRLEEIENLVEETKASGAKVLCGGKRPAGFNKGYFFEPTIFDDVKDDFKIMKEEPFGPLSPITTFKSFEEVIERANNHEVGLAGYVCTASMETAQRSSELMQTGMVAVNTPFISSAETPFGGIKQSGYGREGGSFGIKDYLNIKYTHLGISG

SEQ ID NO: 92739 - protein, 365 aa, Unknown
  Bacterial polypetide isolated from the Sargasso Sea
MTELKKYKMFIGGEWVESDTNKTFETLNPENNKPWAIVPEASASDVDKAVKAAQKAFEGEWSKLLPRERGNYLRAIANKLRENAELLGKIETIDTGKLFRETNKQANYIAEYYDYYAGLADKVEGTVLPIDKPNIQAITTRIPIGVIAAIIPWNSQMLLTVTKLAPALAMGNTVVIKSSELAPAVMFEFAKLVEETGIPKGVVNVITGFGDPCGKALTTHNLVEKIAFTGGPETARHIIKNSAENLSEVSLELGGKSPVAVFNDAHQENAINGITAGIFGASGQSCIAGSRLYLQDGIYNEFLDKLTARAEKIKIGAPMDPESEMGPLSNFKQLEIIEKNIKLTVDQGGKIKCGGKRHAFSNEGY

SEQ ID NO: 92740 - protein, 145 aa, Unknown
  Bacterial polypetide isolated from the Sargasso Sea
EGAKVLTGGSEAKLNSGLEKGNYIQPTVFEAKNDMRISQEEIFGPVVSVIKFKDEAEALKIANDTLYGLGAAVWTRNGNIAHRMGRAIQAGIVWTNCYHAYPAHSPFGGYKQSGVGRETHKMMLNHYRQNKNLHVSYAEKKLGFF

SEQ ID NO: 92741 - protein, 413 aa, Unknown
  Bacterial polypetide isolated from the Sargasso Sea
YIIRRIADRMREKQDVLAKWMTLEVGKPFTEAKGEVNGAADIFEWNAEETKRIYGQTVESRFEDTRVHVYYQPVGVVAALSPWNFPAVLSARKISTALAAGCSVIIKPDVITPGVVMEMVDICNECGVPPGVVNLLSGDPPSIAQQLIASDIVKKISITGSSRVGKLILKQAADKVQRVTMELSGHSPFIVFDDADIKKAADMAIAAKFRNNGQVCISPNRFYIHEKKKDEFVNLFVEKTKKLKIGNGMDPDTKLGPLTTQKRLNEVETLVEKTKQEGAKVLLGGKRPAGFNKGFFYEPTIFDDVKDNFTIMKEEPFGPLVPMLSFKSFDEVIKRANDHELGLCSYVCTNSMEKAHLASEQLETGTVGVNTGFIAIAEAPFGGIKQSGYGREGGSGAIKDYLNVKYTHLGIKG

SEQ ID NO: 92742 - protein, 497 aa, Unknown
  Bacterial polypetide isolated from the Sargasso Sea
MNLIQHFINGKIVSGNSKRKGKVFNPATGDQKSEVNLGTKSDLNEAVEIAKKAFETWSLKPPIQRARIMFKFKELIEKNSDELTKMIVSEHGKVYEDAKGSLVRGLEVVEFACGIPQVLKGEFTENVGTDIDSWSIRQPLGVCAGITPFNFPAMVPMWMFPMAIACGNTFILKPSEKDPSCSIKLAELFKEAGLPDGVFNVVNGDKEVVDAILTNKDIQAVSFVGSTPIAKYIYENAAKNEKRVQALGGAKNHCVVMPDCDLDQAVNGLMGAAYGSAGERCMAQSVAVAVGDIADNLVNQLSKKVEALKIGPGMDKSSEMGPLVTKEHLEKVKGYVDLGVKEGAKLVVDGRKIKLQGYENGFYIGGCLFDNVKKNMRIYKEEIFGPVLSVVRVKDFDEATKLINDHEFGNGTSIYTRDGDVGRTFASKIKVGMVGINIPIPVPVAFHSFGGWKRSLFGDQHMHGIEGVRFYTKLKTITSRWPSGIRSNPEFVMPTMK

SEQ ID NO: 92743 - protein, 297 aa, Unknown
  Bacterial polypetide isolated from the Sargasso Sea
FNWKNKTAKERSIILKKWQDLIIKNVDDLAHIMTVEQGKPLAESKGEILMGASYIEFYAEEVKRVYGDIIPDPLPDRRIIVIKQPVGVVGAITPWNFPSTMITRKCAPALGVGCPVVIKPASQTPFSALALAVLAEEAGFPPGVFNVLTGSASEIGKELTENPIVKKISFTGSTEVGKILLKQSASTVKKVSMELGGHAPFIVFDDADIDEAVSGAIMSKFRNSGQTCICANRIFVHEKIYEEFLEKFVKKVADIKVGNGLEKSTNSGPLIDKYSLKKVKDHVEDAVRTGAEIAIGW

SEQ ID NO: 92744 - protein, 437 aa, Unknown
  Bacterial polypetide isolated from the Sargasso Sea
MIQYKSFGDCGNWVNNAYSESSSGDRISVTSPYFDKEIATIPDSGKTDLDIAVSKAKSAFPNWSGTNIRDRAQIMFKFKSIIENDMEDLAALIALDNGKTIADAKGSILRGIEVVEYATSLPNVLKGESSDVSEGINCTMTHEPLGVVAGITPFNFPVMVPLWMIPLAITAGNTFILKPSEQTPLSGMRLAEYLKEAGLPDGVFNVVNGAKTIVESLCDHPDIKALAFVGSSSVAKIVYTRCSQNSKRSICLGGAKNHMIVVPDADKDSTAKGLLASSMGSAGQRCMAASVAVGVSDIDHIIEQLIEEAKNFKLGVDMGTIISKDALNRINGYIDEAEKMGAKVLVDGRNMSPPDDYKDGYWLGATILDNVDPEWPSAKEEIFGPVLSIIRADTIEDAMKIENDNPYGNAAAVFTTSGQIAKVVSEKASAGMIGVNI

SEQ ID NO: 92745 - protein, 352 aa, Unknown
  Bacterial polypetide isolated from the Sargasso Sea
GKVYEDARGSLTRGLEVVEFACGIPQMLKGEFTENVGSNVDSWSIRQPLGVCAGITPFNFPAMVPMWMFPMAIACGNTFVLKPSEKDPSCSMRLAELLKEAGLPDGVFNVVNGDKEAVDALINNKDVVAMSFVGSTPIAKYIYENCAKNEKRVQALGGAKNHCVVMPDCDLDQAVNGLMGAAYGSAGERCMAQSVAVAVGGIGDKLVESLAKKVEVLKVGPGMDKQSEMGPLVTKEHLAKVKSYVDIGEKEGAKLVVDGRNFKLQGYENGYYIGGCLFDHVTKNMRIYKEEIFGPVLSVIRAKDFDEALRLVNDHEFGNGVSIFTRDGDSGRTFSSKAKIGMVGINIPIPVP

SEQ ID NO: 92746 - protein, 336 aa, Unknown
  Bacterial polypetide isolated from the Sargasso Sea
MRKVLNEQKQFFIKNGPPSIELRIDRLERLRTLIIDNKNQFVEALNNDFGVRSRNSSMLADVYGILPAITHAVKNIKKWNKIEKKSSNFPFGLIGAKSYIKYEPLGTVGMISPWNFPVNLAFMPLVCIFAAGNQVMHKPSEHTPLTASLLKDLCDKAYDQNEFATFLGGPEVGAAFTQLQFDHLIYTGGNVVAKHVYNSASKNLVPCTLELGGKSPVIIGKTADIKTTAKRIMFGKTLNAGQICLAPDYVVVHKDQKDDFIKEVKEAVSEYYPEIKNNEDYTSIINQAHYERLTDLLEDAIEKGANVEAINPANEDFSQQEFYKIPPTLVTNTTDN

SEQ ID NO: 92747 - protein, 381 aa, Unknown
  Bacterial polypetide isolated from the Sargasso Sea
MPVFDPSTGEEISKVVLSNEEDFDIAIKNSKESQKEWADFTPLKRSRILSNYKSLIEKNLQEIAELVSKEHGKTLDDAKGSVTRGLEVVEFACGIPHLLKGEFSQNVGSNIDSWSIRQPLGVCSGITPFNFPAMVPMWMFPISIACGNSFILKPSEKDPSCSIKLAELFSKAGLPDGVFNVIQGDKEIVDLILQSPHISSVSFVGSTPVAKYIYEQAAKNLKRVQALGGAKNHLVVMPDANLDQAVDGIMGAAYGSAGERCMAVSVAVAVGDIADELVNNINIQCQKLKVAPWTDPDSNMGPVISKEHKEKIENYISKGIDEGAELIADGRNYKIQGYENGYFVGPTLFDKVTKDMTIYKEEIFGPVLSVVRAKDYDEALS

SEQ ID NO: 92748 - protein, 213 aa, Unknown
  Bacterial polypetide isolated from the Sargasso Sea
APCRNADKTIVFGVNQKKIGKNDNIISAASCTTNCLAPIADVVNKNFTIQNGFMTTIHAFTTDQRILDNSHKDPRRARSASQSIVPTSSGASNAIGEIIPSLKGKLEGIAMRVPTPNVSLVEFVFNVKKNISKEKLNNSFSEASNSYLKNILDITKEKLVSIDFNHNSSSAILDSSLTNVVGSKMGKISAWYDNEWGFSNRMCDIARHLSKTN

SEQ ID NO: 92749 - protein, 310 aa, Unknown
  Bacterial polypetide isolated from the Sargasso Sea
ETEFATFLGGPEVGAAFTQLKFDHLLFTGSGNIGKHVMRAASENLVPLTLELGGKSPVIVSDSSDIDITARRVMFNKTLNAGQICLAPDYVYVHETEKDNFVEACKNQVNKFYSDLKYNPDYTSVINEKHYDRLNGLLSDAEDHGAELVEINPANEDFSQQESHKIPPTLVLNPTDEMQIMKEEIFGPLLPIKTYKDINEPINYINKNDKPLGLYYFGNNKNEEAKVINSTTSGGVTVNDIMGHIQQNELGFGGVGPSGMGKYDGFDGFTNFSNNKPIYKQIGFGLDKLLDAIRPPYKSSIEDVLKKLLK

SEQ ID NO: 92750 - protein, 171 aa, Unknown
  Bacterial polypetide isolated from the Sargasso Sea
NNTKVDSPQKDGDHIGPVVLEVQFNKIQTLIQKGIDEGAKLVAGGTGKPKGLEKGYYVRPTVFADVNNQMEIARTEIFGPVLSIIPFESEDEAISIANDTDYGLTNYIQTQDKEKVKRVARKLRSGMVDVNGVGIAVSSPFGGYKHSGIGREAGTEGLIEFLEVKTVGGWN

SEQ ID NO: 92751 - protein, 400 aa, Unknown
  Bacterial polypetide isolated from the Sargasso Sea
DELSELESRDVGKPLRQSRVDVRACARYFEFYAGAVDKIHGQTIPYLEGYTVLTLREPHGVTGHIIPWNYPMQIIGRTIGGALTMGNACVLKPGEEASLTSLKIGDLSLKAGFPPGVLNIVPGLGEEAGEALLKHPGVSHYSFTGSTEIGVKVQQEAAKRAVPVTLELGGKSPQLVFSDADIDKALPFLVNAAIQNAGQTCSAATRVLIEKPIFQELTERLAKEISSLRSGPALQDLECGPLISKVQKDRVEGFLQRARQDGVEFLAEGSIVKDAPQGGNYVAPCMVGSVPPKHTLAQDEVFGPLLVTMPFEGEEEGIELANNTVYGLVSGVWTKDGGRQLRVARRLKSGQVFINNYGAGGGVELPFGGVKLSGHGREKGFEALYGFSVTKTVAIHHGAS

SEQ ID NO: 92752 - protein, 192 aa, Unknown
  Bacterial polypetide isolated from the Sargasso Sea
HESIHDDFLGKLVDKLKGLKVGNPLDEATHMGSIINEKQFNRVCSYIEDGLGQEGSEIVLGGMPPSHGPLAEGYYVTPTVITRANNDWRVAREEIFGPVLVVVPWSDEEDVIRMANDSHYGLAAYVWCKNIKQALNAAHKIESGWVQVNRGLGQLPGHSYGGYKMSGIGREFSLEGMLDSFTQRKSVTVNLE

SEQ ID NO: 92753 - protein, 347 aa, Unknown
  Bacterial polypetide isolated from the Sargasso Sea
AKNQRILYEPKGVCALITPWNWPMNQVCLKVIPALASGCTMILKPSELAPLSAMVLAELIDEAKFPNGVFNLVNGDGATTGDALTSHPDVNMISFTGSTRAGSLISQNAAKDFKRVSLELGGKGANIIFKDADNEAVERGALRCFRNSGQSCNAPTRMLVEKSMYSEAIERLKKYANEFKVDDPNKEGEHIGPVISHTQFNKIQSLIQKGIDEGAKLIAGGPGKPDGLSNGYYVKPTVFADVNNNMEIARTEIFGPVLSVIPFENEEEAIEIANDTEYGLTNYIQSQDSEKVKRLARKLRSGMVDVNGAGIAVDAPFGGFKHSGIGREAGKEGLLEFLEVKSVGGWN

SEQ ID NO: 92754 - protein, 401 aa, Unknown
  Bacterial polypetide isolated from the Sargasso Sea
MELKNNELFKENCFIGGKWIESNSGEKIDVDNPANGEIIGKVPKCSTSETSKAIDEAQKAFPAWRDKTAKERSVVLQKWARLIEENVDDLAKIMTVEQGKPLAEAKGEILMGVTYIDFYAEEGKRVYGDIISDPMPDRRIVVIKQPVGVVGAITPWNFPSTMITRKCAPALAVGCTVVIKPASQTPYSALALGVLAKEAGFPDGVVNIITGSANAIGKELTENPIVRKISFTGSTEVGKILLQQSASTVKKVSMELGGHAPFVVFDDADIDEAVTGAMQSKFRNSGQTCICANRIFVHEKIYDDFLNKFIQEVNKIKVGNGLDEGIASGPLIDQPSLMKVHDQVKDAVNQGAKIAVGGDVHPLGGNFYQPTVLSDVTKKAKITYEETFGPVAPLYKFKSDE

SEQ ID NO: 92755 - protein, 312 aa, Unknown
  Bacterial polypetide isolated from the Sargasso Sea
MRNTDKFYINGEWVAPLTNETCEVINPATEEPIATIALGGKQDVDAAVSAAKTAFTTFSQTSVEERLDLLGRIIDAYKAKMGEIAKTVSMEMGAPMGLANAAQAPAGLGHLIFAQKALENFEFTEDVGTSRVIREPIGVCGLITPWNWPVNQITAKVGPALAAGCTMVLKPSEIAPLNALLFAEVMEEAGTPPGVFNLVNGDGPTVGVALSSHPDIDMMSFTGSTRAGISVAQESATTVKRVTQELGGKSANIILEDADFEKAIARDTFGVCMNTGAELQCANKNAGASKQNGRGCRNCKSHGRTNRRRRPK

SEQ ID NO: 92756 - protein, 470 aa, Unknown
  Bacterial polypetide isolated from the Sargasso Sea
NGKWSDADNGEINEITNPSNGKVLGTVPNCGATEAKKAIEAANNAWPKWRSKTSKERALILRRWYELMMENQEDLARLMTAEQGKPLTESIGEIAYAASFVEWFGEEGKRLYGDTIPAHASDKRIVVIKQPIGVTVAITPWNFPAAMITRKAAPALAAGCPMVIKPAPDTPFSAFALCELAERAGVPPGILSTITGDAVEIGGEFTSNPIVRKLSFTGSTGVGKLLMKQCSGTVKKLALELGGNAPFIVFNDADLEAAVLGALASKFRNAGQTCVCANRIMAQNKVYDKFCDMLAEAANNIKVADGFEDGSQQGPLINEAAVEKVESHVKDALSKGAKLLAGGQRHQLGGTFFEPTVLSGVTKGMLVAKEETFGPMAPVFKFETEEEAIETANDTEFGLAAYFYSRDIGRIWRVSEALEYGIVGVNEGIISTEMAPFGGVKESGTGREGSKYGIEDYLEIKYLCMGGINN

SEQ ID NO: 92757 - protein, 193 aa, Unknown
  Bacterial polypetide isolated from the Sargasso Sea
KEDKIISAASCTTNCLAPVISVLDEKFEIEKGFMTTIHAFTSDQRILDNSHKDPRRARSASLSIVPTSTGASKAIGEIIPNLKGKLEGVAMRVPIPNVSLVELVFCTKKDINIKKINDTFEQASKKKLKNILEVTHEKLVSIDFNHHPASAIVDASLTNVVGSNMGKISAWYDNEWGFSNRMCDIAETLHKIS

SEQ ID NO: 92758 - protein, 329 aa, Unknown
  Bacterial polypetide isolated from the Sargasso Sea
MYSKFGQFIDGKWQQAEKKETYDVINPATEEIIGQASKASSADVQKALKSAEKGLEVWKNTLPWQRSYIIRKIADLLRKKQDVLAKWLTIEVGKPLAEGIGETGGAADIFEWNAEETKRIYGQTVESRFPDTRVHVYYQPVGVVAALVPWNFPLILAARKISTALAAGCSVICKPDVITPGTVMELVDICKEAGVPPGVVNLLSGDPESISNELLESDIIKKVSITGSTRVGKLILKKAADKVQRVTMELSGHSPFIVFDDVDINKVADMAITAKFRNNGQVCISPNRFYIQENKKDEFINAFIERTKKLKIGNGLDEGVQLGPLTTAK

SEQ ID NO: 92759 - protein, 307 aa, Unknown
  Bacterial polypetide isolated from the Sargasso Sea
MNSIEHFINGKIVKGLSKRTAKVFNPATGDVSSNVNLANTEDIDKAVNAAKKAFPAWSEKTPLFRARILFKFKELIEKNYDELTKIIVSEHGKVYEDAKGSLTRGLEVVEFACGIPQLLKGEFTENVGSNVDSWSMRQPIGVCAGITPFNFPAMVPMWMFPIAIACGNTFVLKPSEKDPSCSIKLAELFSEAGLPAGVFNVVNGDKEAVDAIINNKDISAVSFVGSTPIAKYIYENCAKKEKRVQALGGAKNHCVIMPDCDLDQAVNGLIGAAYGSAGERCMAQSVAVAVGKIADPLVKNLSKKVES

SEQ ID NO: 92760 - protein, 492 aa, Unknown
  Bacterial polypetide isolated from the Sargasso Sea
MTEIKKYQMYINNEFVEAEDGKRFDSLNPENNQPWASFPEANTNDVNKAVQAAKDAFQGWSKLEVKERAQYLRSIGDLLKENAELLGRTETIDSGKLLKETKFATEYVREYFYFYADLAEKMENEFPIPKIDKPDMDVVEVREPIGVVACIIPWNQQMFLMTTKLAPALAAGNTIVIKSSEFAPAPLIEFARLLDSIGLPKGVVNIISGGIEAGEALTSHKSIGKILFTGGSVTGSHVIKNSSHNFAQLTLELGGKSPVIVFDDCDQDNALNNIMTAIFSGNGCSCIAGSLLILNENIYDTFLEKLVSRAKDIKLGSPLDDQSQMGPLNNLNQVEFIEKNIQATIKQGGKVLCGGERPKDLSDGCYFLPTVIECPNRNVDTAKIELFGPVLSVVKFKTEEEAIQIANDNDYGLSSGVFTEDAERCDRVSRSLEAGICFKNCYRFISYAASFGGRKQSGYGRESGYDAISAMQIKKTIWTSNSRVTVDPFKIR

SEQ ID NO: 92761 - protein, 480 aa, Unknown
  Bacterial polypetide isolated from the Sargasso Sea
MYSKFGQFIDGKWQEAEKKETYEVINPATEEIIGKASKASKIDVQKALKSAEKGLEVWKNTSPWKRSYVIRKIADLMRQKQDVLAKWLTLEVGKPIAEGIGETGGAADIFEWNAEETKRIYGQTVQSRFPETRVHIYYQPVGVVAALVPWNFPLVLAARKISTALAAGCSVICKPDVITPGTVMELIDICKEAGVPPGVVNLLSGDPAEISNELLESDIVKKVSITGSTRVGKLILKKAADKVQRVTMELSGHSPFIVFDDVDINKVADMAITAKFRNNGQVCISPNRFYIQEKKKDEFIKAFIDKTKKLKIGNGLDQDVQLGPLTTAKRLSEVEALVEKTKKEGAKVLLGGKRPSGFNKGYFYEPTIFDNVKDNFTIMKEEPFGPLVPMLSFKTFDEVIERANNNDLGLCSYIYTNSMDQAHRASELMETGTVAVNTPAVAVAEAPFGGIKQTGYGREGGSMAIKDYLNIKYTHLGLKI

SEQ ID NO: 92762 - protein, 476 aa, Unknown
  Bacterial polypetide isolated from the Sargasso Sea
MLDKRKFYIKGEWITPHKPNDLKVINPSNEDPFAVISLGSKEDVNKAVDAAKSAFKDWKDTNKEFRVDLLEKLLQIYKKRFDEMAKAISDEMGAPIDWASEVQTASGQTHLEDFIFRLKEYKFEKNFNEKSNNYICCEPIGVCGLITPWNWPINQIALKVVPALATGCTMILKPSEISPLSGMIFAEMIHEAGFPKGVFNLVNGDGNGVGTILSSHKDIDMISFTGSTRAGRLISKNSADTIKRVCLELGGKGGNIVFEDAYPEAVRDGIRNVMSNSGQSCDAPTRMLVQKSIYSKAVNEAVDEANKIHVDLASKKGNHIGPVVSKVQYDKIINLIKSGIEEGATLAAGGPEMPENLKSGYFIKPTIFTDVTNDMKIAKEEIFGPVLSIIPFETEDEAVNIVNDTSYGLGNYLQTSDKERAKRVSKKLRSGCVYINGNSADPGTPFGGYRQSGNGREGGIWGLEEYLEVKTVTGWK

SEQ ID NO: 92763 - protein, 497 aa, Unknown
  Bacterial polypetide isolated from the Sargasso Sea
MNLIQHFIDGKVYAGSSNKKGKIFNPATGKQESEVILGSKSDLDLAVEKAKIAFETWSNVPAIQRARIIFKFKELIEKNSDELTKLIVSEHGKVYEDAKGSLTRGLEVVEFACGIPQMLKGEFTENVGTNIDSWSTRQPLGVCAGITPFNFPAMVPMWMFPMAIACGNTFVLKPSEKDPSCAMKLAHLFKEAGLPDGVFNIVNGDKEVVDAILQNKDIPAVSFVGSTPIAKYIYENAAKNEKRVQALGGAKNHCVVMPDCDLDQAVNGLMGAAYGSAGERCMAQSVAVAVGNIGDDLVNQISKKVENLKVGPGMDKTSEMGPLVTKEHLERVRGYVDLGVKEGAKLVVDGRDIKLQGYENGYYIGGCLFDHVTKDMRIYKEEIFGPVLSVVRVDNFDEALQLVNDHEFGNGTSIYTRDGDAGRTFANKIKVGMVGINIPIPVPVAYHSFGGWKRSLFGDQHMHGPEGVRFYTKLKTITSRWPSGVRSNPEFIMPVMK

SEQ ID NO: 92764 - protein, 496 aa, Unknown
  Bacterial polypetide isolated from the Sargasso Sea
MTSIINHWINGELQPSASERYGDVFNPATGEVSASVSMGNSDDLEKAVESASKAFETWSQTSVTKRAQIFFKYKELLESNREELIDLITAEHGKVAADAAGSLQRGIEVVDFVCGIPHLLKGEFSEQVGTGIDCYSTRQPIGVCSGVTPFNFPAMVPMWMFPIAIACGNTFILKPSEKDPSCAMKLAELLQEAGLPKGVLNVLNGDKEIVDAILDHPSIKTFSFVGSTPVAQYVHEKASANGKRVQALGGAKNHAIVLEDASLDQTANAIIGAAYGSAGERCMAISVVVAVESVADELCGLLTKKAESLRIGPGNEPENEMGPLITDDHKNKVIDYIQQGEDAGATILLDGRDHEVTSKPGFFLGPTLFDHVNPEMSIYKEEIFGPVLVVLRVKDFNAAIKLANEHQFGNGVAIFTNQGSKAREFVHSVEVGMVGINVAIPVPLSFYTFGGWKDSIFGSSNIYGMDGIRFFTRTKTVTARWVDDDGSINLSMPTVK

SEQ ID NO: 92765 - protein, 315 aa, Unknown
  Bacterial polypetide isolated from the Sargasso Sea
GNSVILKPAEQSPMSAIKIGALLSEAGLPDGVFSVLPGDGPITGKSLCLHNDIDCVAFTGSGEVGKLVLQYSGQSNMKRVQLECGGKSPNIIFADCPDLDAAAEASAYAIFGNQGEVCSAGSRLIVQKEIEDEFVDKVAKLSKNMHPADPFDPESFAGAIVNTEQLDKINKYVNIGKEEGASVKVGGNITMKETGGCYFEPTIFKNVKNNMKIAQEEIFGPVLTSLTFSNFQEAISIANDTEYGLAAGVWTKDINKAIKASREIRAGTVYINNYEEGVDSTIPLGGYKQSGIGRDNGYQALENYVQVKSTWIKIT

SEQ ID NO: 92766 - protein, 320 aa, Unknown
  Bacterial polypetide isolated from the Sargasso Sea
MVVRSIVESKNKNLKINHINNRSNSETTSKLIKYDSIHGKLNADLDYDPNHLIINKNKITFSQETKIEDINWKKHDVDYVFECTGKFNSKEKLLAHIENGAKKVIVSAPCKNADKTIVFGVNENIITKEDKIISAASCTTNCLAPVTSVLDEKFEIEKGFMTTIHAFTSDQRILDNSHNDPRRARSASQSIVPTSTGASKAIGEIIPSLKGKLEGIAMRVPTPNVSLIELIFCTKKDINIKKINDAFEQASKNKLKNILEVTHEKLVSIDFNHHPASAIVDASLTNVVGSNMGKISAWYDNEWGFSNRMCDIAKTLHKIS

SEQ ID NO: 92767 - protein, 324 aa, Unknown
  Bacterial polypetide isolated from the Sargasso Sea
MKIKIGINGMGRIGRMIVRSIVENDYSNIEIKHINNRTNSERCSTLLKYDSIHGKFDADISFDEKHLIINKNKISFGQETDLENINWKKHDVDYVFECTGKFNSKDKLISHLKNGAKKVIVSAPCKDADKTIVYGVNETELKNDDKIISAASCTTNCLAPVAHVLNENFEIEKGFMTTIHAFTSDQRILDNSHKDPRRARSASQSIVPTSTGASKAIGEIIPSLKGKLEGVAMRVPTPNVSLIELIFCTKKDLSIEKINSAFQNFSKKNKVLEITKEKLVSIDFNHNSSSSIVDASLTNVVGKNMGKISAWYDNEWGFSIECVT

SEQ ID NO: 92768 - protein, 482 aa, Unknown
  Bacterial polypetide isolated from the Sargasso Sea
MPEDSFGDWKWREALAELMVPLIGSLYRNGINIMIYGKSLVNESPVSIMKAHRFVRQVDNNELSESETFPIIKYISTLDLKDCEIDIGEIAVKCPFFNEIKDDQSKIPDYINSELNSVINKKSNRPKEPKNIVLYGFGRIGRLVARMMTQTTGPGNYFILKAIVIRKGSDDDIFKRASLLARDSVHGSFDGTVRVDEENSNLVINGNVVNVIYASAPEDVNYSDYAIKDPIVIDNTGVWRNEEGLSKHIKSGASKVILTAPAKGDLKNVVHGINDDILDAGDSIISAASCTTNAIVPILKVINDEYGIESGHIETVHAYTNDQNLIDNFHKGDRRGRGAPLNMVITTTGAVKAVSKALPELEGKLTGNAIRVPTPNVSLAILSLSLDKSITTDVVNEYLRGIAFHSKYREIIGFVNSPEIVSTDFYSSSFASVIDSQATIVSDKRLTLYCWYDNEYGYTKQVIGLTKKVANIDLPRLPTPIS

SEQ ID NO: 92769 - protein, 219 aa, Unknown
  Bacterial polypetide isolated from the Sargasso Sea
MDYKNYINGKWVEAKSGKTFPVENPYNQQIISHVPDSDKHDVNEAVSAANTAYNDWHKMSASERRDLMKELANKSRENANELAKTISMEMGKPFSEALDEIDTVADFLDYYGELARDEVGRIVAPVDRNTMSLVRYESIGVIGCIIPWNYPLALMGWKLAPALAAGNTVVMKPSEITPLSILHWCNVVESVLPSGVINVITGFGQSAGEPIVKTPGCAG

SEQ ID NO: 92770 - protein, 391 aa, Unknown
  Bacterial polypetide isolated from the Sargasso Sea
MNLIQHFVGGELFLGSSNKKGKVFNPATGEQESEVLLANKSDLNKAVDIAKKAFESWSLKPALQRARVMFKFKELIEKNSEELTKLIVSEHGKVYEDAKGSLTRGLEVVEFACGIPQVLKGEFSENVGTNVDSWSMRQPLGVVAGITPFNFPAMVPMWMFPIAIACGNTFILKPSEKDPSCSIKLAKLLKDAGLPDGVFNVVNGDKEAVDAILENKEIQAVSFVGSTNIAKYIYENSAKNEKRVQALGGAKNHLVVMPDCDIDGAVNGLMGAAYGSAGERCMAQSVAVAVGNIGDELVSRLSKKVELLKVGPGMDKNSEMGPLVTKEHLEKVKGYVDLGVKEGANLVVDGRNLKLQGYENGFFIGGCLFDNVKKDMRIYKEEIFGPVLSVV

SEQ ID NO: 92771 - protein, 309 aa, Unknown
  Bacterial polypetide isolated from the Sargasso Sea
CTMILKPSEIAPISGMLFAEMIDEVGFPDGVFNLVNGDGAGVGTQISCHPDIDMVSFTGSTRAGRLISKNAAETIKRVCLELGGKGGNIVFADSYKNAVRDSIRNVMSNSGQSCDAPTRMLVEKSIYKRAVDEAVDEANKINVDQASKKGDHIGPVISKTQYDKIINLIESGISEGATLAAGGPELPNGLNKGYFIKPTIFTNVTNDMRIAKEEIFGPVLSIIPFETEDEAVNIVNDTSYGLGNYLQTEDREKAHRVAKKLRSGCVYINGNAADAGTPFGGYRQSGNGREGGVWGLDEYLEVKTVTGWK

SEQ ID NO: 92772 - protein, 480 aa, Unknown
  Bacterial polypetide isolated from the Sargasso Sea
MYSKFGQFIDGKWQQAEKKETYEVINPATEEIIGKASKASSLDVQKALKSAEKGLEVWKNTSPWKRSYIIRKIADLMREKQDVLAKWLTIEVGKPLAEGIGETGGAADIFEWNAEETKRIYGQTVQSRFPETRVHVYYQPVGVVAALVPWNFPLVLAARKISTALAAGCSVICKPDVITPGTVMELVDICKEAGVPPGVVNLLSGDPESISNELLESDIIKKVSITGSTRVGKLILKKAADKVQRVTMELSGHSPFIVFDDVDINKVADMAITAKFRNNGQVCISPNRFYIQEKRKEEFIEAFIDKTKKLKIGNGLDEDVQLGPLTTAKRLSEVEALVEITKKEGAKVLLGGKRPSGFNKGYFYEPTIFDDVKDNFTIMKEEPFGPLVPVLSFKSFEEVVDRANNNDLGLCSYIYTNSMDQANRASELMETGTVAVNTAAVAVAEAPFGGIKQTGYGREGGSSAIKDYLNVKYTHLGLKI

SEQ ID NO: 92773 - protein, 447 aa, Unknown
  Bacterial polypetide isolated from the Sargasso Sea
MSNDLNFYIDGEWVKSDSNELIDVINPANEEVIGQVTAGTKDDIDNAVNAASKAFQTFSKSSQKERIELLKSIIQEYENRYKDFVEVITKEMGAPNWLSERAQANTGLINFKETLEALEEYEFQKEEGGYILRREPIGVIGMITPWNWPMNQITTKVSAAIASGCTMILKPSEISPYCSMLLAEVMHDAGLPKGVFNLVNGYGPVVGAALSEHEKVDMMSFTGSTRAGIAVAQASAATVKRVQQELGGKSANIILDDVADLEKSVKGGAGHCFLNSGQSCNAPTRMLVSSKNYDKAVEVAVATANSTTVGDPNGEFRIGPISNKTQYEKIIKLIEIGVKEGAKLVAGGPEKPDGCEKGYYVKPTVFADVTNDMTIAKEEIFGPVLCMMKYETEDEAIEIANDTEYGLAGYVQGELSHAIEVGNQIRAGQITINGGARGNAAPFGGYK

SEQ ID NO: 92774 - protein, 209 aa, Unknown
  Bacterial polypetide isolated from the Sargasso Sea
MYEKFGQFIDGNWSPSENKETYEVINPATEEVLGHASKASSADVQRALQSAEQGLKVWRKIPPWQRSYVLRKIADKIREKKDLLAKWMTLENGKPLAEGIGETNGAADIFEWNAEETKRIFGQTIESRFEDTRVHVYYQPVGVVAALSPWNFPLILAARKISTALAAGCSVIIKPDTITPGIVMELVDICRECGVPPGVINLLSGDPPV

SEQ ID NO: 92775 - protein, 214 aa, Unknown
  Bacterial polypetide isolated from the Sargasso Sea
MSSGNKYKVIANKLKFEGRAFINGKYVNAIDGKKFETINPATGKKLCVVAKCNHKDVDLAVKVSRKAFNSGVWSRSSPEHRKEVLLKFAELLRKHGDENSVLECIDTGKLITDCINEVANDAPMHFQWYGELIDKVFGKIGPTEPSITSLIVKEPIGVIAGIVPWNFPLMMAVWKMAPALAAGCSVIIKPAEDTPLTAIRVAQMEKRLEYQMGV

SEQ ID NO: 92776 - protein, 459 aa, Unknown
  Bacterial polypetide isolated from the Sargasso Sea
MNLIEHYIDGKSYSGSSDKKGKIFNPATGKQESEVILGSKADLYLAVEKAKKAFESWSNVTPLQRARIIFKFKELIEKNSDELTKLIVNEHGKVYEDAKGSLTRGLEVVEFACGIPQMLKGEFTENVGTNIDSWSTRQPLGVCAGITPFNFPAMVPMWMFPMAIACGNTFVLKPSEKDPSCAMMLAKLFKEAGLPDGVFNIVNGDKEVVDAILENKDIPAVSFVGSTPIAKYIYENAAKNEKRVQALGGAKNHCVVMPDCDLDQAVNGLMGAAYGSAGERCMAQSVAVAVGNIGDELVNQMSKKVEALKVGPGMDKSSEMGPLVTKEHLEKVKGYVDLGVKEGAKLVVDGRDINLQGYENGYYIGGCLFDHVKKDMRIYKEEIFGPVLSVVRVKNFDEALQLINEHEFGNGTSIYTRDGDVGRTFANKIKVGMVGINIPIPVPVAYHSLEAEEIIIGDQ

SEQ ID NO: 92777 - protein, 496 aa, Unknown
  Bacterial polypetide isolated from the Sargasso Sea
MSAKTKAEWEKLSLNLNFHNEAFIDGKFVKAKSEKTFDCFNPSNGKLLTKVSSCDETDVDNAVKSCRKAFDNGHWSRMSPSERKKILLKLSDLILKNHNELALLDSMDMGKTVSDAFTYDIPGAADLLSWNAEAIDKIMDEIAPTEKNNLAMIRRVPLGVVGAVVPWNYPLDMAMWKCAPALATGNSIILKPAEQSPLSALRFAELAAEAGLPDGVLNVVPGYGETAGKAIGMHNDIDCVSFTGSTEVGKYFFEYSAKSNMKLIWTECGGKSPNIIFEKSKKLDLAAQLSANGGFFNQGEVCSANSRVLVHENVLNEFIDLLKKEASNWVTGDPFDPNSNIGCLVSEDHAAKVKNFINNAKNETELLFEGKIESKENVGTFVAPTIFKDDTGKKEISTDEVFGPVLSIIPFSSDEEAIKIAHDSKYALAASIWTDDLSQAHDISDKLHVGTVSVNTVDAFSTMTPFGGFKQSGTGNDLSIHAFDKYTGLKTVWIKY

SEQ ID NO: 92778 - protein, 335 aa, Unknown
  Bacterial polypetide isolated from the Sargasso Sea
MAIKIGINGMGRIGRMIVRSIFESRNKNLKIQHINNRSNSEATSKLIRYDSIHGKFDADTKFDENNLIINKQKISFSQEPKIEKINWKKYHVDYVLECTGKFNSREKLEAHIKNGAKKVIVSAPCKNADKTIVFGVNENTLSKKDKIISAASCTTNCLAPVVNVIHKKFEIEKGFMTTIHSFTSDQRILDNSHKDPRRARSASQSIVPTSTGASKAIGEIIPSLKGKLEGVAMRVPTPNVSLVELVFCTKKQINIKNINNEFELASKKELKSILEVTYEKLVSVDFNHHPASAIVDASLTSVVGANMGKISAWYDNEWGFSNRMCDIAENLHKIS

SEQ ID NO: 92779 - protein, 454 aa, Unknown
  Bacterial polypetide isolated from the Sargasso Sea
MIKIEFKDFGERKNWISGKLEDSSSGKKISIISPYYDKEIATVPDSNSNDLDIAVQAAESIFPDWKRTNIRDRAEIMFRFKTLLESNIDELAHLISLDNGKTIEDAKASINRGKEVVEFATSLPNILKGDSSQVADGITCTMTHEPLGVVAGITPFNFPAMVPLWMIPLAITSGNCFILKPSEKTPLSTLKIAEYLKEAGLPDGVFQILNGSQEAVEAICDHPDIKAVAFVGSSKVAKIVYTRTTAQGKRALCLGGAKNHMIVVPDADLDSTAKGLLASSMGSAGQRCMAASVAVGVANVDPIINQLIEEANKFVLGLDMGTIISKSAFDRIKGYIDEAENMGAKVLVDGRNPVPPAGYENGYWLGPTILDGVDPDWPCAKEEIFGPVLSIIRTDTIDEAMKIENNNIYGNAAAVFTTSGEVAKTISETASSGMVGVNIGVPVPREPYSFWGLE

SEQ ID NO: 92780 - protein, 497 aa, Unknown
  Bacterial polypetide isolated from the Sargasso Sea
MNIVNHFINGKEYVSKSDRFGDVYNPANGEKIREVNFANKEDVSVAISCAVKAGKEWAATPSLTRSRVLFKFKDLILRDMDKLALELTTEHGKILSDSVGSITRGMEVVEFACGIPHLLKGEYSENVGSNIDSWSMRQPLGVCVGISPFNFPAMVPMWMFVMSIACGNSFILKPSEKDPTVPYMMGDLLKEAGLPDGVFNVVNGDKEAVDLLITDPEVASVSFVGSTPVAEYIYHTSSKHNKRVQSLGGAKNHMVVMPDADLDQVVDGLIGAGYGSAGERCMALSVAVAVGDVGDKLIEKLTPRVQGLKVGPGTDPEVEMGPLISDVHLSKVKSYVDSGVAEGADLIVDGRSISLQGYENGYFIGGCLFDHVKEDMKIYREEIFGPVLSVVRQPTFDDALKMVNDHEFGNGTTIYTRDGDTARAFANQCKIGMVGVNVPIPVPMAFHSFGGWKRSLFGDHAMHGMDGVRFFTRLKTVTSRWPTGIRKGAEFTIPTMK

SEQ ID NO: 92781 - protein, 497 aa, Unknown
  Bacterial polypetide isolated from the Sargasso Sea
MNLIEHFIDGKIVSGTSDRKGKVFNPAIGKQESEVRLGTKQDLDLAVQKAKKAFETWSNVTPIQRARIIFKYKEIIEKNSDLLAKMIVSEHGKVYEDAKGSLTRGLEVVEFACGIPQMLKGDFTENVGTNIDSWSVRQPLGVCAGITPFNFPAMVPMWMFPMAIACGNTFVLKPSEKDPSCPLKLAELFSEAGLPDGVLNVVNGDKEVVDAILEHKDISAVSFVGSTPIAKYIYENAAKNEKRVQALGGAKNHCVVMPDCDLDQAVNGLMGAAYGSAGERCMAQSVAVAVGNVGDKLVDELSKKVEALKIGPGMDKNSEMGPLVTKEHLERVRGYVDLGIKEGADLVVDGRDIKLQGYEDGYYIGGCLFDNVKKDMRIYKEEIFGPVLSVVRAKDFNEALNLINDHEFGNGTSIYTRDGDAGRTFANQIKVGMVGINIPIPVPVAFHSFGGWKRSLFGDQHMHGPEGVRFYTKLKTITSRWPSGVRSDPEFIMPTMK

SEQ ID NO: 92782 - protein, 483 aa, Unknown
  Bacterial polypetide isolated from the Sargasso Sea
MQSISMLIAGAAVQASNGATFERRNPLDGEVATRAPAATVADAVAAADAAAAAFPAWSALGPGERRALLMKAAHALEARSEAFASVMAAETGASAMWAGFNVHLAAGGLMEAAALTTQIGGELIPSDVPGSLAMGVRQPAGVVLGIAPWNAPVILAVRAIALPLACGNTVVLKGSEICPGTHGLIIEVLQEAGLPKGVVNFVTNAPADAGAVVEALIAHPKVRRVNFTGSTHVGKIIAATCARYLKPSVLELGGKAPLIVLDDADLDAAVNAAAFGAFANSGQICMSTERIIVDERIADQFVAKLARKARGLPLGDPRKGPVVLGSVVDMATVERCNALIDDALAKGATLVCGGKVDSTLMPATLLDHVTPAMRIYGEESFGPVKGIVRVNGEDEAVACANDNEYGLSSAVFSRDVARAMNVARRIESGICHVNGPTVHDEAQMPFGGVKGSGFGRFGGQAGVAEFTDLRWMTVQTTPRHYPF

SEQ ID NO: 92783 - protein, 397 aa, Unknown
  Bacterial polypetide isolated from the Sargasso Sea
MSDLNENIKKLKKHLDIIKEQGVLNVVDGELKNSNSRKKFSNFSPVDETYICEVAQSNAEDIDEASSSSKDAFKEWSKTSPATRKKILHKIADKIVERSEEIALCETWDTGQAIRFMSKAAIRGSENFRYFADKAISAQDGLTLPSGSLLNITKRYPIGPVGIITPWNTPFMLSTWKVAPALAAGCTVVHKPAELSPVTAKILNEIALEAGLPPGVWNLVNGFGEEAGVALTKNKDIKAVAFVGESKTGSAIMRQGSETLKRVHFELGGKNPVIVFDDADLERALDAVIFMIYSLNGERCTSSSRLLIQKNIAEEFISKLVDRVNKIKVGNPLDPNTEVGPLISENHLEKVVSYFDIAKREGAEIAVGGNAHKKLGWFVSPTLFKNAKPEMRISQEE

SEQ ID NO: 92784 - protein, 223 aa, Unknown
  Bacterial polypetide isolated from the Sargasso Sea
NNGAKKVIVSAPCKNADKTIVFGVNEEELTTNDQIISAASCTTNCLATVANTLHKNFEIENGFMTTIHAFTSDQRILDNSHKDPRRARSASQSIVPTSTGASKAIGEIIPSLKGKLEGIAMRVPTPNVSLIELVFCTKKDIDKEKINNAFKEVSKNQSKKVLEITSEKLVSIDFNHNSSSAIVDSSLTSVVGKNMGKISAWYDNEWGFSNRMCDIVEYVNKIS

SEQ ID NO: 92785 - protein, 363 aa, Unknown
  Bacterial polypetide isolated from the Sargasso Sea
MGAPIWLSQVAQVASGLTHFKDTLNVLKGYDFEYEKDGYLVRKEPVGVVGMITPWNWPMNQMCTKVASGIAAGCTMVLKPSEITPFCGIILAEIIHDAGVPAGIFNLVNGMGPVVGASMSEHKDIDMMHFTGSTRAGVAVAQASAPTVKRVAQELGGKSANIVLDDADIEKAVSAGVSSCFLNTGQSCNAPTRMLVSSKNYDKAVEVAANTANAMKVGDPFDADTKMGPISNKTQYEKVQRMIQIGIDEGATLSAGGVGLPEGCESGYYVKPTIFSDVTNDMTIAREEIFGPVLCLIKYETEEEAIEIANDTPYGLAGYIQGEHAHAVEVASKIRAGQITINKGARVRSAPFGGYGSSGNGRE

SEQ ID NO: 92786 - protein, 403 aa, Unknown
  Bacterial polypetide isolated from the Sargasso Sea
MYSKFGQFIDGKWQPSQNNETYDVLNPATEEVIGKASKAGEEDVNKALKSAEKGLEVWRNTPPWQRSKIIRKIADLMRERTDVLAKWLTLEVGKPLSEAKGEVGGAADIFEWNSEETKRIYGQIVESRFEHTRMYVKYEPVGVVAGLIPWNFPIVLSSRKISTALAAGCSVICKPDVITPGSVMELMNIINDAGVPPGVVNLLSGDPAQISSQLISSDIVKKVSITGSTRVGKLILKQAAEKVQRVTMELSGHSPFIVFDDVDINKVTDMAITAKFRNNGQVCISPARFYIHEKKKDEFAKTLVEKVSKLKIGNGMDDDTILGPLTTEKRLNEIEALVEKTKKEGATVLCGGKRPSGFNKGYFYEPTVFDNVQDNFTIAKEEPFGPLVPLLTFKDTDEVVKEL

SEQ ID NO: 92787 - protein, 143 aa, Unknown
  Bacterial polypetide isolated from the Sargasso Sea
LIEKGIEEGAELVSGGPGKPEGLNAGYYVRPTVFANVNNDMTIAREEIFGPVLSILPYKDEEEALEIANDTEYGLYGYVSSGDVEHAKKVANRIRAGSIAINGAQADFTAPFGGYKQSGNGKEWGPFGFEEFLETKAVVGYSD

SEQ ID NO: 92788 - protein, 294 aa, Unknown
  Bacterial polypetide isolated from the Sargasso Sea
MAVLAEKAGIPAGVFNIVSGDAIEIGGVLTASEVVRKLSFTGSTRVGKLLAKQSADTLKKLSLELGGNAPFIVFDDADLDAAVQGAMASKFRNTGQTCVCVNRFYVQDGIYDAFTQALTAAVRKMRVGNALQGDVEQGPLINQSALRKVEAHVADALQKGATVLTGGKPHPLGGTFYEPTVLANASASMLIASEETFGPVAACFRFHTEEEAIAAANDTPFGLSAYFYTRDLARAWRVGEALESGMVGINEGILSTEVAPFGGVKQSGLGREGSKYGLDEYTELKYMMMGGLRG

SEQ ID NO: 92789 - protein, 320 aa, Unknown
  Bacterial polypetide isolated from the Sargasso Sea
MIVRSIIESQNKNLKISHINNRSNAEITCKLLKYDSIHGKFNAELKFYENELIINKNKISFSQQSKIENIDWQKYDIDYVFECTGKFNSKEKLLAHIKNGAKKVIVSAPCKNADKTIVFGVNENILSKNDKVISAASCTTNCLAPIVKVLNDNFEIEKGFMTTIHAFTSDQRILDNSHKDPRRARAASLSIVPTSTGASKAIGEIVPSLKGKLEGVAMRVPTPNVSLIELVFCTKKKIDIKKINDVFETASKNELNKILEVSHQKLVSIDFNHHSASAIVDASLTNVVGANMGKISAWYDNEWGFSNRMCDIAESLHKIS

SEQ ID NO: 92790 - protein, 335 aa, Unknown
  Bacterial polypetide isolated from the Sargasso Sea
MTIKIGINGMGRIGRMVVRSIIESENKNLKINHINNRSNSETTSKLLKYDSIHGKLNADLDYDPNHLIINKNKITFSQKTKIEEINWKKQDVDYVFECTGKFNSKDKLLAHIENGAKKVIVSAPCKNADKTIVFGVNENIITKEDKIISAASCTTNCLAPVISVLDKKFEIEKGFMTTIHAFTSDQRIIDNSHKDPRRARSASLSIVPTSTGASKAIGEIIPNLKGKLEGVAMRVPTPNVSLVELVFCTKKDINIKKVNDAFEQASKNKLKNILEVTHEKLVSIDFNHHPASAIVDASLTNVVGSNMGKISAWYDNEWGFSNRMCDIAETLHKIS

SEQ ID NO: 92791 - protein, 191 aa, Unknown
  Bacterial polypetide isolated from the Sargasso Sea
MLVEKSIYKRAVDEAVDEANKIKVDQASKKGDHIGPVISKTQYDKIINLIESGISEGATLSAGGPELPNGLNKGYFIKPTIFTNVTNEMRIAKEEIFGPVLSIIPFESEDEAVNIVNDTSYGLGNYLQTEDREKAHRVAKKLRSGCVYINGNAADAGTPFGGYRQSGNGREGGVWGLEEYLEVKTVTGWKD

SEQ ID NO: 92792 - protein, 497 aa, Unknown
  Bacterial polypetide isolated from the Sargasso Sea
MKVINQFINGKEHISKSERFGDIFNPANGEKTKKVSFANSEDVKLAIECAVEAGKRWAATPPLTRSRVFFRFKNLILRDMDKLALELTSEHGKILSDSAGSITRGMEVVEFACGIPHLLKGEYSENVGSDIDSWSMRQPLGVSVGISPFNFPAMVPMWMFVISIACGNSFILKPSEKDPTVPYMLAELLKEAGLPDGVFNVINGDKEAVDLLITDPAVDSVSFVGSTPVAEYIYHTSSKHNKRVQSLGGAKNHMVVMPDADLDQVVDGLIGAGYGSAGERCMALSVAVAVGDVGDKLIEKLTPRVQNLKVGPGTDPEVEMGPLISDVHLAKVKSYVDAGVSEGAELIVDGRSISLQGYENGYFIGGCLFDHVKEDMKIYREEIFGPVLSVVRQPTFNDALKMVNDHEFGNGTTIYTRDGDTARAFSNQCKIGMVGVNVPIPVPMAFHSFGGWKRSLFGDHAMHGMDGVRFFTRLKTVTSRWPTGMREGAEFTIPTMK

SEQ ID NO: 92793 - protein, 480 aa, Unknown
  Bacterial polypetide isolated from the Sargasso Sea
MYSKFGQFIDGKWQQAEKGETYEVVNPATEEIIGKASKASSLDVQKALKSAEKGLEIWKNTAPWQRSYTIRKIADLLREKKKVMAKWLTLEVGKPLLEGEGETNGAADIFEWNAEETKRIYGQTVESRSPDTRVHVYYQPVGVVAALVPWNFPLILAARKISTALAAGCSVICKPDVITPGTVMELVDICKEAGVPPGVVNLLSGDPPSISNELLESDIIKKVSITGSTRVGKLILKKAADKVQRVTMELSGHSPFIVFDDVDINKVADMAITAKFRNNGQVCISPNRFYIQEKRKEEFINAFIERTKKLKIGNGMDDGVQLGPLATAKRLSEVEELVDITKKEGAKVLLGGKRPSGFNKGYFYEPTVFDEVKDNYTIMKQEPFGPLVPMLSFKTFDEVIERANNNDLGLCSYIYTDSMKQAHKASELMETGTVAVNTPVVAIAEAPFGGIKQTGYGREGGSMAIKDYLNIKYTHLGLKT

SEQ ID NO: 92794 - protein, 364 aa, Unknown
  Bacterial polypetide isolated from the Sargasso Sea
MSLTFENIKKTKSNLNYPSQLFINGKYQKSISEKSFENISPIDGSIVNQVFFAEQEDIDLAVSKAKETFNKGYWSNLSPGERKKILLKFAILLERDRLELSLLDTIDMGKTINDTYNADLPTSIDNIEWYAEIIDKLFDDISPSSKEYLGLITKEPIGVVAAIVPWNYPLWMAIWKIAPALITGNSVILKPAEQSPMSAIKIGALLSEAGVPDGVFSVLPGDGPITGKSLCLHNDIDCVAFTGSGEVGKLVLQYSGQSNMKRVQLECGGKSPNIIFADCDDLDRAAEASAYAIFGNQGEVCSAGSRLIIQKDIEKDFINKVVQLSKKMQPSDPLNPDSFAGAIVNTEQLEKINKYVNIGKKEGA

SEQ ID NO: 92795 - protein, 462 aa, Unknown
  Bacterial polypetide isolated from the Sargasso Sea
MSETINTYNPATGEKIDHYHLMSAEDAEQAVTRSQEAYLNWRRTSFETRADLFNNLANLMEERIDDLASLMTREMGKVTAQGKQEVQLCAEICRYTAEHGASILEDEHRIFEGGRAIITYQPIGVILGIQPWNFPLYQVIRYSASNIMAGNTTVLKHAKNVFGMAQAIQQMYEDAGFPKNVYQSLLIDGSTASDLIKHKYVRGVTFTGSDEVGKEVAKEAASLSKKTVMELGSNDAFLVLEDADIDHAVEMCIQGRVINNGETCVAAKRFVIVDSVYEEFRDKFVAQCKKLKVGDPTNENTDLGPMAREDLRDELHEQVKKSLENGATLSLGGEIPDSDGYFYPITVLEDVSPGMPAYDDELFGPVASLIRVRDDKQAMEVANDSRYGLGGGIFSTDTDKAIALAKDEFDTGMVNINGYSLAQPNLPFGGVKDSGYGREHGGYGMREFVNIKTIMVAEKSAE

SEQ ID NO: 92796 - protein, 224 aa, Unknown
  Bacterial polypetide isolated from the Sargasso Sea
MYSKFGQFIDGKWQQAEKKETYDVINPATEELIGKASKASSVDIEKALKSAEKGLKIWRNTAPWQRSYIIRKIADLMRERKEILAKWLTLEVGKPLAEGIGEVGGAADIFEWNAEETKRIYGQTVESRLPDTRVHVYYQPVGVVAALVPWNFPLVLASRKISTALAAGCSVICKPDVITPGCVMELVDICKEAGVPAGVVNLLSGDPPTIAEQLIKSDIIKKIS

SEQ ID NO: 92797 - protein, 354 aa, Unknown
  Bacterial polypetide isolated from the Sargasso Sea
MAEGVGEVGGAADIFEWNAEETKRIYGQTVESRFPDTRVHVYYQPVGVVAALVPWNFPIVLASRKISTALAAGCSVICKPDVITPGAVMELVDICKEAGVPPGVVNLLSGDPASISEQLINSDIIKKVSITGSTRVGKLILKQAANKVQRVTMELSGHSPFIVFDDADINKATDIAITSKFRNNGQVCISPNRFYIQEKKKEEFINSFIGKAKKLKIGNGMDKDVQLGPLTTEKRLNEVEQLVETTKKEGAKVLMGGKRPAGFNKGYFYEPTVFDNVLDNFTIMKEEPFGPLVPILSFKDFDEVIERSNKNDLGLCSYICTNSMDQAHRASELMETGTVAVNTPVVALAEAPFG

SEQ ID NO: 92798 - protein, 497 aa, Unknown
  Bacterial polypetide isolated from the Sargasso Sea
MNLIKHFVGGKVISGNSERKGKIFNPATGEQDSEVILASKADLDGAVEIAQKAFQTWSLNPPLQRARIMFKFKELIEKNFDELAKLIVSEHGKVYEDAKGSLIRGLEVVEFACGIPHLLKGEFSENVGTNVDSYSMRQPLGVAAGITPFNFPAMVPMWMFPLAIACGNSFILKPSEKDPSCPMKLAELLHEAGLPEGVFNVVNGDKEVVDAILTNQNIKAVSFVGSTPIAKYIYENAAKNEKRVQALGGAKNHLVVMPDCDLDGAVNGLMGAAYGSAGERCMAQSVAVAVGDVGDELVSRLSKKAEALKIGPGMDKSSEMGPLVTKEHLEKVKGYVDLGVKEGAKLVLDGRNLKLQGYENGFYIGGCLFDHVTTDMRIYKEEIFGPVLSVVRVKTFEEATKMINEHEYGNGVSIYTRDGDAGRTFASKIQVGMVGINVPIPVPMAFHSFGGWKRSLFGDSGTHGMEGVKFYTKLKTITSRWPSGIRSNPEFIMPTMK

SEQ ID NO: 92799 - protein, 349 aa, Unknown
  Bacterial polypetide isolated from the Sargasso Sea
MYEKFGQFIDGKWQQSSDKGTYEVINPANEEILGHASKATSKDVNAALQSAEKGLEVWKRTAPWQRSYIIRRIADKMREKKDVLAKWMTLEVGKPLAEAKGEIGGAADIFEWNAEETKRIYGQTVESRFEDTRVHVYYQPVGVVAALTPWNFPAVLSARKISTALAAGCSVIIKPDIITPGIVMEMVDICRECGVPPGVVNLLSGDPPSIAQQLIASDIIKKISITGSSRVGKLILKQAADKVQRVTMELSGHSPFIVFDDADIKKAADMAISAKFRNNGQVCISPNRFYIHETKKDEFVNLFIDKTKKLKIGDGMDPNTQLGPLTTKKRLNEIEELVEKTKQEGAKFY

SEQ ID NO: 92800 - protein, 483 aa, Unknown
  Bacterial polypetide isolated from the Sargasso Sea
MQTVSMLIGGERRHSSSGATFVRRNPLDGEVASEAPACTVDDARAAADAAARAFPGWAALGPGARRALLLKAAAALEAKHEQFVAAMAAETGASALWAGFNVHLAASGLVEAASLTTQIGGELIPSDVPGSLAMGVRQPAGVVLGIAPWNAPVILATRALALPLACGNTVVLKGSELCPVTHGLIVEALQEAGLPPGVVNFVTNAPEDAGTIVDALIAHPAVRRVNFTGSTRVGRIVAEACARHLKPSVLELGGKAPFVVLDDADLDAAVAAAAFGAFANSGQICMSTERIVVDASIADAFVAKLADKAASLPLGDPRQGPVVLGSLIDTKAVERCNALIDDALAHGATLVCGGKADSTLFPATLLDHVTPAMRIYAEESFGPVKGIVRADGEDAAIRCANDNAFGLSSAVFSRDVARAMRVAARIESGICHVNGPTVHDEAQMPFGGVKDSGFGHFGGNAGIAAFTDLRWITVQTAPRHYPF

SEQ ID NO: 92801 - protein, 425 aa, Unknown
  Bacterial polypetide isolated from the Sargasso Sea
MLDKKNFYINGKWTAPIEPRNYKVIDPSNEEPCAEISLGGKKDIDNAVGSAKKAFQTWAFSQKEERLELLEKLYVVYKKRWAEMAKLISLEMGAPMKFSTELQAATGASHIKSFKNILKDFKFEKDLGEEKNNQKLLYEPKGVCALITPWNWPINQVNLKVIPALASACTVVLKPSEIAPLSSMLLAEMIDEVKFPAGVFNLVNGDGAITGDALTSHPDIDMISFTGSTRAGALISQNAAKDFKRISLELGGKGANIIFKDADSEAVARGVLRCFRNSGQSCNAPTRMLVEKTIYNATVEKVKELANNTKVDSPQKDGDHIGPVVSEVQFNKIQTLIQKGIDEGAKLIAGGTGKPKGFEKGYYVKPTVFADVNNQMEIARTEIFGPVLSIIPFENEEEAISIANDTPYGLTNYIQTQDKEKVREC

SEQ ID NO: 92802 - protein, 296 aa, Unknown
  Bacterial polypetide isolated from the Sargasso Sea
FWMLFAEMIDEAGFPKGLFNLVNGDGEGVGTDISSHPDIDMVSFTGSTRAGRLISKNAAETIKRVCLELGGKGGNIVFADSYKDAVRDGIRNVMSNSGQSCDAPTRMLVEKSIYERAVKDAVDEANKIKVDQASKKGDHIGPVISKIQYDKIINLIESGISEGATLAAGGPELPNGLNKGYFIKPTIFTNVTNEMRIAKEEIFGPVLCIIPFETEDEAVNIVNDTSYGLGNYLQTEDREKAHRVAKKLRSGCVYINGNGADAGTPFGGYRQSGNGREGGVWGLEEYLEVKNVTGWS

SEQ ID NO: 92803 - protein, 493 aa, Unknown
  Bacterial polypetide isolated from the Sargasso Sea
MSNLKKYNMFIDGEWVESESKKTFKSLNPENNEPWVEVPEASEKDVDKAVKAAQKAFEGKWPKLFPRERAKYLKAIAEQLRANAELLGKIETIDTGKLFKETKTQANYIAEYYDYYAGLADKVEGTVLPIDKTNMQVITTRVPIGVVAAIIPWNSQMLLTAVKLAPALAMGNTIVIKSSELAPATLFEFAKLIEKTGIPKGVVNIVSGFGDPCGKALTSHNLVERVAFTGGPETARNIIKNSAENLSQVSLELGGKSPVAVFEDADQENALNGITAGIFGASGQSCIAGSRLYIQNSIYENFLEKIVNKANKIKLGPPMDSDTQMGPLSSLKQLEIIEKNIKLTLDQGGKLKCGGKRHSFSNKGYYFPPTVIECENHNLPAAENELFGPVLSVMKFNDEKEVIDKMNDNQYGLSSGIYTKDINRGIRVSNSIRAGITFVNTYRLISPSAPFGGMKDSGYGKEAGIESIKDYTRIKTTWFNTSDKPMDDPFTMG

SEQ ID NO: 92804 - protein, 378 aa, Unknown
  Bacterial polypetide isolated from the Sargasso Sea
MLCTDVIPSGVIGLISAWNYPMNVAFRKVAPALVAGNCAILKPSEIAGLTCMFIGKLAKDAGIPPGVFNIVTGDRDAGAALANSPSVSMISFTGSSLTGSKIMEACAPKLSQVALELGGKSALVIFDDTDLDKAVETTMKGFLTNGGQICTAHTRLVVQDSFKAPLLKKLKEELEKLPFCNDPITEKDRGDRAWEDGMTDVVQPIVCESQHKKVLRFLDEAKSAGVEFLTGGNVPDAETVGNAGGYFIQPTVLVNVERDADVWQKEVFGPVLSVRTFSTEQEAVLEANSTAFGLASTVMSSDPAKAMRVANRIRAGAVYATSNGEGLLAEHPAVSRGGFGCSGVGRELGIGGLHEYTELKSINYTGFTLKDAKINRTS

SEQ ID NO: 92805 - protein, 281 aa, Unknown
  Bacterial polypetide isolated from the Sargasso Sea
MQTLGNYINGQHIASQSGRSQSVFNPATGEAQTQVSLASADETRDAIAAAATAFQSWSQVTPLNRSRVMFKFKALLEQHRDELALLITKEHGKVFSDAQGELTRGIEVVEFACGIPHLLKGEHSMNVGRGVDSYSLMQPLGVCAGISPFNFPAMVPLWMFPIALACGNSFVMKPSEKDPTVPLKLAELLTEAGLPAGVFNVVNGDKEAVDVLLTDSRVQAVSFVGSTPIAEYVYATGSAHGKRVQALGGAKNHMLVMPDADLEQVTSALMGAAYGSAGERC

SEQ ID NO: 92806 - protein, 479 aa, Unknown
  Bacterial polypetide isolated from the Sargasso Sea
MEEAKHFIAGEWALPAQLETIAVVDPSDGQPFASIARGTAPDIERAVAAARDAFAGPWGAASAAERGRVLMRLSARVAASIEELAAIEARDTGKPLKQARADAAALARYFEFYAGAADKLHGETLPYQAGYTVLTVREPHGVTGHIVPWNYPMQIFGRSVGAALAAGNACVVKPAEDACLSLLRVAELAVEAGLPAGALNIVTGYGHEAGAALARHPGIDHISFTGSPATGKLVTQMAAENHVPVTLELGGKSPQIVFADADLEAALPVLVSAIVQNGGQTCSAGSRVLIERAVYEPLVERLATAFSELRVGPSRADLDCGPLINAKQQQRVWDFLSDAQHDGIPMAAHGQVVADAPESGFYQAPALLRDVPPSHRLAQEEVFGPVLAAMRFVDEDEAVALANGTPYGLVAGIWTRDGARQMRLARRLRAGQVFINNYGAGGGVELPFGGVGHSGHGREKGFEALYGFTALKTIAIRHG

SEQ ID NO: 92807 - protein, 301 aa, Unknown
  Bacterial polypetide isolated from the Sargasso Sea
MLEKLQMYINGEWVDSHSTETIEVMNPSDDSVLGVITAGNSDDVDKAVAAAKAAFVDFSFSTKEERVQILENIIAEYEKRSEELAETISKEMGAPIWLSQVAQVASGLTHFKDTLNVLKSYDFEYEKDGYLVRKEPVGVVGMITPWNWPMNQMCTKVASGIAAGCTMVLKPSEITPFCGIILAEIIHDAGVPAGIFNLVNGMGPVVGASMSEHKDIDMMHFTGSTRAGVAVAQASAPTVKRVAQELGGKSANIVLDDADIEKAVSAGVSSCFLNTGQSCNAPTRMLVSSKNYDKAVEVAAN

SEQ ID NO: 92808 - protein, 480 aa, Unknown
  Bacterial polypetide isolated from the Sargasso Sea
MEIKDSKFYRDKCYINGEWVNADSGETISVNNPANLKEIGTVPKCGTSETRNAIEAANNAWPEWRAKSARQRSEILRKWFDLMIENKEELAQIMTVEQGKPINESRGEIGYGASFVEWFSEEAKRVYGDTIPDPMTDRRIVVLKQPVGVVASITPWNFPNAMITRKCAPALAVGCPVVIKPASQTPYSALALAVLAEEAGFPKGTLNVITGKASEIGEELATNPIVRKLSFTGSTEIGKILLQKCSGTVKKVSMELGGHAPFIVFNDANIDDAVAGAIQSKFRNTGQTCVCANRIYVQEKVHDEFCSKFVDAVSKIKVGDGLNEENASGPMIDEHSLSKVEEHVQDALQYGAKVAIGGSKHSLGMNFYQPTILTEVAPEAKITTEETFGPVAPIYKFKDEKEVIKLANNSPYGLASYFYSRDIGRIWRVAEALEYGMVGVNTGLTSKAEAPFGGIKESGLGREGSKYGIDDFIEIKYINM

SEQ ID NO: 92809 - protein, 890 aa, Unknown
  Bacterial polypetide isolated from the Sargasso Sea
MKYFDEEKLIENIINESNWLNDEEISINAESIVEKCRSDRNKTKLDNFFLEYGLSNQEGVALMCLAESLLRIPDNSTCDEIIEEKIGGKSWLNHLNNSPSLFVNATTFGLFLAEQVVELDPKIGSNPISWLSGMTSKIGEPVLREAIKKGMDILSEEFVSGTSIEKALTKFDSPNTPCSFDMLGEAARTKSDVDFFFEAYENAIRCVGEKNALLSKSFHEISIKLSALHPRYEALKEERVMNELYESVYELSLQAANQDIALTIDAEEQDRLELSLKIIEKLAENKKLKDWGGLGLAIQGYGRRSSSVVKFIDYLGGRRNGLMMRLVKGAYWDQEVKIHQTKGSIDLPVFTAKSFTDLNYLHTAKVISESKNLKPYFATHNAHTIAAIMSIFKGQEEKIEFQRIFGMGDLVYTNAKKCFKDFPTTRIYAPVGSKKELLPYLVRRLIENGANNSFVNKYLDKKIPITEVVKNPLLNCKDQLINKTFLNNVKRPKEIFKGRENSLGFDFGDLYEIKTLQNDVKNMRKRDYIASSILGNNEFTGESIKRLSPHELKNEIGSVTYLKTKDIKYVFEDFDNSDWSKTSLKKRIEILSKVGELLSNNRAMLFHLLINEAGKTLKDCDAELREAIDFINYYNAQAKKIFKRKRMPGPSGEENYLEHAPKGTFLCISPWNFPLAIFVGQITAALVTGNNVIAKPAEDTSIIGCEVVKIFHESGVPKSALKLVLGDKKIGNELTKNPLIAGVAFTGSSFAAKQINKNLADSNGPIKSLIAETGGQNAMIVDSSSLKEQVIDDVIRSAFLSAGQRCSALRVLYVQDEIADEYWDYLNEALQEYTIGDPNLPKVDIGPIINKNSKDRLLKHISALKKSAKRTIEHHHKQDKGNLFITPIGF

SEQ ID NO: 92810 - protein, 227 aa, Unknown
  Bacterial polypetide isolated from the Sargasso Sea
MGGKSSNIILDDVADLEKSVKGGAGHCFLNSGQSCNAPTKMLVSAENYDRAVEIAVSTANSTTVGDPNGEFRLGPIANKVQYEKIIKLIEIGIEEGATLVAGGVEKPDGCDKGYYVKPTVFANVTNDMTIAKEEIFGPVLVIIKYNNEEEAINIANDTEYGLAGYVQGDPDHAKEVARKIRAGQVIINGGARGTGAPFGGYKASGNGREHGLHGLEECLETKAIIAP

SEQ ID NO: 92811 - protein, 493 aa, Unknown
  Bacterial polypetide isolated from the Sargasso Sea
MPELKKYKMFIGGEWVDSDTKKTFETLNPEDNKPWAIVPEASASDVDKAVKAAQKAFEADWPKILPRERAKFLRAIGNKLRDNAELLGKIETIDTGKLYRETNKQANYIAEYYDYYAGMADKVEGTVLPIDKPNIQAITSRIPIGVIAAIVPWNSQMFLTATKLAPALAMGNTVVIKSSELAPAVMFEFAKLIEETGIPKGVVNVITGFGDPCGKALTTHNLVEKVAFTGGPETARHIIRNSAENLSEVSLELGGKSPVAVFDDAHQENAINGITAGIFGASGQSCIAGSRLYLQKGIYDEFLDKLTKRAEKIKIGAPMDPDTEMGPLSNYKQLEIIEKNIKKTTEQGGKIKCGGERHPFSNEGYYFPPTIIECDNHNLPTAENELFGPVLSVMKFDSEKEVIEKMNDNQYGLSSGVYTSDFSRGLRVSNAIRAGITFVNTYRLISPSAPFGGIKDSGYGKEAGMDSIKDYTRVKTTWYYTSDEPTLDPFSIR

SEQ ID NO: 92812 - protein, 264 aa, Unknown
  Bacterial polypetide isolated from the Sargasso Sea
MSSGNRYKVIASKLKFEGRAFINGKYVNAIDGEKFETINPATGKKLCTVAKCNHKDVNLAVKVSRKAFNSGVWSKSSPEHRKEVLLKFAELLRKHGEENSVLESVDTGKLITDCINEVANDAPMHFQWYGELIDKVFGKVGPTEPSITSLIVKEPIGVVAGIVPWNFPLMMAVWKMAPALAAGCSVIIKPAEDTPLTAIRVAQIGKEAGIPDGVLNVLPGYGDVGEALGRHKDVDAVSFTGSTEVGGYFLKYSSESNLKPVALE

SEQ ID NO: 92813 - protein, 474 aa, Unknown
  Bacterial polypetide isolated from the Sargasso Sea
MKIIKNYIDGKHLESLSGNFSEIFNPSTGEVIGKVNLSNSDDLKITIESSKKVMQQWQNTSPLKRSRIMFEFKNILNSNIEELAKTVSLEHGKTIEDAKGSITRGLEVVEFACGIPHLLKGEFSQNVGNEIDSWSVRQPLGICAGITPFNFPAMVPMWMFPISLACGNTFILKPSEKNPSCAIMLAELLTKSGLPDGVFNVINGDQNIVKNIMETEAISSISFVGSTPVAKLIYENSAKNNKRVQALGGAKNHLVVMPDANIDQAVDGIIGAAYGSAGERCMAVSVAVAVGDIADNLVNKIKTAAENLIVAPYMDSNSEMGPLISKDHLNKVKKYIDIGVEEGANLLLDGRNLQIQGYENGYFVGPSLFDNVDKSMRIYKEEIFGPVLSVVRASTYDEALSLVNEHEFGNGTSIYTSDGEVSRHFSTNCKIGMVGVNVPIPVPMAFHSFGGWKNSLFGDHAMHGIEGVKFYSRL

SEQ ID NO: 92814 - protein, 365 aa, Unknown
  Bacterial polypetide isolated from the Sargasso Sea
EDFILRLKNFKFEEHFDTKSNNHISYEPIGVCGLITPWNWPINQIALKVIPAFATGCTMILKPSEIAPISAMLFAEMIDEAGFPAGVFNLVNGDGAGVGTQISSHPDIDMISFTGSTRAGKLITKNAADTIKRVCLELGGKGGNIVFADSYPNAVRDGIRNVMSNSGQSCDAPTRMLVEKTIYKRAIKEAADEANKIKVDIASKKGDHIGPVVSKVQYDKIINLINSGIDEGATLAAGGPDLPNDLNKGYFIKPTIFTNVTNDMEIAKKEIFGPVLSIIPFETEEEAIKITNDTEYGLGNYLQTEDKEKAKRVAKKLRSGVVYINGNAADSGTPFGGYRQSGNGREGGVWGLEEYLEVKTVTGWK

SEQ ID NO: 92815 - protein, 390 aa, Unknown
  Bacterial polypetide isolated from the Sargasso Sea
MRNDLNFYINGEWIKSESNELIDVVNPANEEIIGQVTAGTKEDIDMAVNAASDAFKSFSKTTQNERIDLLKNIIKEYENRYQDFVEIITKEMGAPNWLSERAQANTGLINFKETLEALEEYKFEKEEGGYTLRKEPIGVIGMITPWNWPMNQITTKVSAAIATGCTMVLKPSEISPYCSMLLAEVMHDAGVPKGVFNLVNGYGPIVGAALSEHEKVDMMSFTGSTRAGIAVAQASATTVKRVQQELGGKSANIILDDVADLEKSVKGGAGHCFLNSGQSCNAPTRMLVSAKNYDKAVEVAVATANSTTVGDPNGEFRLGPIANKAQYEKIIKMIEIGIEEGARLVAGGTDKPDGYEKGYYVKPTVFADVTNDMTIAKEEIFGPSFVHHEV

SEQ ID NO: 92816 - protein, 382 aa, Unknown
  Bacterial polypetide isolated from the Sargasso Sea
PHLLKGEFSENVGTNVDSWSMRQPLGVVAGITPFNFPAMVPMWMFPIAIACGNTFILKPSEKDPSCAIKLAELLKEAGLPDGVFNVVNGDKEVVDAILTNKDIKAVSFVGSTPIAKYIYENSAKNEKRVQALGGAKNHLVVMPDCDLDGAVNGLMGAAYGSAGERCMAQSVAVAVGDIGDELVSRLSKKAEALKVGPGMDKSSEMGPLVTKEHLEKVKGYVDLGVKEGAKLVVDGRNLKLQGYEDGFYIGGCLFDHVKKEMRIYQEEIFGPVLSVVRVKTFEEATKLINDHEYGNGVSIYTRDGDAGRTFASKIQVGMVGINVPIPVPMAFHSFGGWKRSLFGDSAMHGMEGIKFYTKLKTITSRWPSGIRSNAEFIMPTMK

SEQ ID NO: 92817 - protein, 487 aa, Unknown
  Bacterial polypetide isolated from the Sargasso Sea
MTIKHWIDGREVESRERFTTLNPATGEVITDVASGGEAEVDAAVRAAKEAFPKWAGTPAKERAKLMRKLGELIEKNVPMLAALETQDTGLPIAQTSKQLIPRASENFNFFAEVCVQMNGRTYPVDDQMLNYTLYQPVGVCALVSPWNVPFMTATWKTAPCLALGNTAVLKMSELSPLTADQLGRLALEAGIPPGVLNVVQGYGATAGDALVRHPDVRAVSFTGGTVTGKRIMERAGLKKYSMELGGKSPVLIFDDADFDRALDASLFTIFSINGERCTAGSRIFVQRTIYDRFVQEFARRANNLVVGDPSDPATNLGAMITRQHWEKVTGYIRIGEQEGARVVAGGADKPAGLPDHLRNGNFVRPTVLADVDNRMRVAQEEIFGPVACLIPFEDEEEGLRLANDTSYGLASYIWTQDVGKVHRLARGIEAGMVFVNSQNVRDLRQPFGGVKESGTGREGGEYSFEVFAEIKNVCISMGSHHIPRWGV

SEQ ID NO: 92818 - protein, 314 aa, Unknown
  Bacterial polypetide isolated from the Sargasso Sea
MTIKIGINGMGRIGRMIVRSIIETQNRNLKIQHINNRTNAETTCKLIKYDSIHGKFNAELKFDENELIINKNKISFSKESKIENINWKKYDVDYVFECTGKFNSKEKLLTHIKNGAKKVIVSAPCKNADKTIVFGVNEKIISKDDRIISAASCTTNCLAPVVNVLHDHFEIEKGFMTTIHAFTSDQRILDNSHKDPRRARAAGQSIVPTSTGASKAIGEIIPSLKGKLEGVAMRVPTPNVSLVELVFCTKKEIDIKKINDVFEIASKNELNKILEVTHEKLVSIDFNHRSASAIIDASLTNVVGTKMGKISAWY

SEQ ID NO: 92819 - protein, 246 aa, Unknown
  Bacterial polypetide isolated from the Sargasso Sea
MSSGNKYKLIASKLKFEGRAFINGKYVNAIDGNKFETINPATGKKLCAVAKCNHKDVNLAVKVSRKAFNSGVWSKSSPEHRKEVLLKFAELLRKHGDENSVLESVDTGKLITDCINEVANDAPMHFQWYGELIDKVFGKVGPTEPSITSLIVKEPIGVVAGIVPWNFPLMMAVWKMAPALAAGCSVIVKPAEDTPLTAIRVAQIGKEAGIPDGVLNVLPGYGDVGEALGRHKDVDAVSFTGSTEVG

SEQ ID NO: 92820 - protein, 275 aa, Unknown
  Bacterial polypetide isolated from the Sargasso Sea
MIEKKNFYINGKWVSPTKPNDFEVIDPSTEESFAIISLGSKEDADKAINAAKIAFESWRETTKEERLKLLKKFDEIYNRRWDEMVKAQSTEMGAPLDFASEIHTKMGADISKNTIEILENFNFEHQFDTKSNNHIRYEPIGVCGLITPWNFPMNQIVLKVIPALAAGCTMILKPSEIAPISGVLFAEMIDEAGFPPGVFNLVNGNGEVVGNHISGHPDIDMVSFTGSTRAGKLIQKNAADTIKKVTLRIRRKRWKHSFCRLISRCSERWCEKYNE

SEQ ID NO: 92821 - protein, 187 aa, Unknown
  Bacterial polypetide isolated from the Sargasso Sea
MLVSAKNYDKAVEVAVATANNTTVGDPNGEFRIGPIANKTQYDKIIKLIEIGIEEGATLVAGGVEKPEGCEKGYYVRPTVFANVTNDMTIAKEEIFGPVLVMIKYESEDEAISLANDTEYGLAGYVQGEPEHAREVAGKIRAGQVIINGGARGTGAPFGGYKASGNGREHGIHGLEECLETKAIIAP

SEQ ID NO: 92822 - protein, 307 aa, Unknown
  Bacterial polypetide isolated from the Sargasso Sea
MNLIQHFVNGKIVPGKSKRKGKVFNPAIGEQESEVILGSQSDLDGAVDVAKKAFETWSLKPPIQRARIMFKFKELIEKNSDELTKMIVSEHGKVYEDAKGSLIRGLEVVEFTCGIPQVLKGEFTENVGTDIDSWSIRQPLGVCAGITPFNFPAMVPMWMFPMAIACGNTFVLKPSEKDPSISIKLAELFQEAGLPDGVFNVINGDKEVVDAILTNKDIKAVSFVGSTPIAKYIYENAAKNEKRVQALGGAKNHCVVMPDCDLDQAVNGLMGAAYGSAGERCMAQSVAVAVGNIGDNLVNELSKKVEA

SEQ ID NO: 92823 - protein, 452 aa, Unknown
  Bacterial polypetide isolated from the Sargasso Sea
KVKSITQQLGEQESEVRLASKSDLDQAVEVAKKAFETWSSKPSLQRARVMFKFKELIEKNSDELTRLIVSEHGKVYEDAQGSLTRGLEVVEFACGIPHLLKGEFSENVGTNVDSWSMRQPLGVVAGITPFNFPAMVPMWMFPLAIACGNTFILKPSEKDPSCAIKLAELLKEAGLPDGVFNVVNGDKETVDAILENKDITAVSFVGSTPIAKYIYENSAKNEKRVQALGGAKNHLVVMPDCDLDGAVNGLMGAAYGSAGERCMAQSVAVAVGDIGDELVSRLSKKAEVLKVGPGMDKTSEMGPLVTKEHLEKVKSYVDLGVKEGAKLVVDGRNLKLQGYESGFYIGGCLFDHVSKDMRVYKEEIFGPVLSVVRVKTFEEAAKLINDHEYGNGVSIYTRDGDAGRTFASKIQVGMVGINVPIPVPMAFHSFGGWKRSLFGDSAMHGMEGIKFY

SEQ ID NO: 92824 - protein, 336 aa, Unknown
  Bacterial polypetide isolated from the Sargasso Sea
MIKIAINGYGRIGRNVLRALYESGRDKNIKIVAINELAAPEAMVHLTRFDTSHGRFHHPVQLAGNSMLVGEDLISLFAERDPSRLPWRALGVDVVLDCTGVFGSRADAELHLAAGAGKVLFSHPAEADVDATIVYGVNHQVLTGRERIVSNASCTTNCVVPVIETLHREFEINCGTITTIHSAMHDQQVIDAYHSDLRRTRAASQSIIPVDTKLAKGLERILPHFAGKFEAIAVRVPTINVTAMDLSITVRKKVTVTDVNQALQRASRGTLSGILDYTEEPLVSVDFNHDAHSCIIDGTQTRVSDANLVKMLMWCDNEWGFANRMLDTTRAMMAAG

SEQ ID NO: 92825 - protein, 480 aa, Unknown
  Bacterial polypetide isolated from the Sargasso Sea
MYEKFGQFIDGKWQQSSDNGTYEVINPATEEVIGKASKATPQDVDRALNSAKKGLEVWRKTAPWQRSYIIRRIADKMREKQDVLAKWMTLEVGKPLAEAKGEINGAADIFEWNAEETKRIFGQTVESRFEDTRVHVYYQPVGVVAALSPWNFPAVLSARKIATALAAGCSVIIKPDVITPGVVMEMVDICNECGVPPGVVNLLSGDPPSIAQQLIASDIIKKISITGSSRVGKLILKQAADKVQRVTMELSGHSPFIVFKDADIKKATDMAIAAKFRNNGQVCISPNRFYIQEEKKDEFVNLFVEKTKKLKIGNGMDPDTQLGPLTTQKRLNEIEALVEKTKKEGAKVLLGGKRPAGFNKGFFYEPTVFDDVKDNFTIMKEEPFGPLVPMLSFKSFDEVIERANNHELGLSSYVCTNSMETAHLASEQLETGTVGVNTGFIAIAEAPFGGIKQSGYGREGGSMAIKDYLNVKYTHMGIKG

SEQ ID NO: 92826 - protein, 480 aa, Unknown
  Bacterial polypetide isolated from the Sargasso Sea
MYSKFGQFIDGRWQASQNNETYDVLNPATEEVLGKASKAGEEDVNKALKSAEKGLEVWRNTPPWQRSKIIRKIADLMRERTDVLAKWLTLEVGKPLSEAKGEVGGAADIFEWNSEETKRIYGQIVESRFEHTRMYVKYEPVGVVAGLIPWNFPIVLSSRKISTALAAGCSVICKPDVITPGSVMELMNIINDAGVPPGVVNLLSGDPAKISSQLISSDIVKKVSITGSTRVGKLILKQAAEKVQRVTMELSGHSPFIVFDDVDINKVTDMAITAKFRNNGQVCISPARFYIHESKKDEFAKTLVEKVTKLKVGNGMDEDTILGPLTTEKRLNEIEALVEKTKSEGATVLCGGKRPAGFNKGYFYEPTIFDNVKDNFTIAKEEPFGPLVPLLTFKDTDEVVERANDNDLGLASYIYTNSLEKAHKVSEKMETGTCAVNHPTIAFAEVPFGGIKQTGYGREGGSMAIKDYLNVKYTHFGLNY

SEQ ID NO: 92827 - protein, 279 aa, Unknown
  Bacterial polypetide isolated from the Sargasso Sea
MNLIQHFVDGKIIPGKSDRRGKVFNPAIGEQESEVILGLKSDLDQAVDVAKKAFETWSIKPPIQRARIMFKFKELIEKNSDKLTKMIVSEHGKVYEDAKGSLIRGLEVVEFTCGIPQVLKGEFTENVGTDIDSWSIRQPLGVCAGITPFNFPAMVPMWMFPMAIACGNTFVLKPSEKDPSISIKLAELFQEAGLPDGVFNVINGDKEVVDAILTNKDIKAISFVGSTPIAKYIYENAAKNEKRVQALGGAKNHCVVMPDCDLDQAVNGLMGAAYGSAGE

SEQ ID NO: 92828 - protein, 256 aa, Unknown
  Bacterial polypetide isolated from the Sargasso Sea
MTIKIGINGMGRIGRMVIRSIVESKNKNLKINHINNKSNSEATSKLIKYDSIHGKLNVDLDFDPNHLIINKNKITFSQEAKIEDINWKKYDVDYVFECTGKFNSKEKLLAHIKNGAKKVVVSAPCENADKTIVFGVNENIITKEDKIISAASCTTNCLAPVTSVLDENFEIEKGFMTTIHAFTSDQRILDNSHKDPRRARSASQSIVPTSTGASKAIGEIIPNLKGKLEGVAMRVPTPNVSLVELVFCTKKDINIK

SEQ ID NO: 92829 - protein, 695 aa, Unknown
  Bacterial polypetide isolated from the Sargasso Sea
NNGDGTWTLADDVVATLAEGSYPTSVTATDNAGNTDTDTGTVVIDTTAPTVAINDLTTNDTTPELTGTVNDPNAVVVVTIDGNDYTATNNGDGTWTLADNVVATLAEGSYPTSVTATDAAGNTVTNTGTVVIDTTAPTVAINDLTTNDTTPELTGTVNDPNAVVVVTIDGNDYTATNNGDGTWTLADNAVAALAEGSYPTSVTATDAAGNTVANTGTVIIDTTAPTVAINDLTTNDTTPELTGTVNAPNAVVVVTIDGNDYTATNNGDGTWTLADNIVALLAEGNYTAVVTATDAVGNVATDTGTVVIDTSIDENNNGQTVTFDSISNDSGVAGDFITSDSTLIFNGTVDLGDNTTLTVTVDGTSYTFGTDPELTIDGSGNWSLDLTGTALTAGTYAVVATVTDEAGNSASTASQNVVVQALDAINDGNTVDMGEPVVTVNPPETTSDVQVIGLAESTGGVDASASFTVSPNHVGEVLVEVDQIALVAVADAYIVEVYDESGQLVYKGVSANSQLADVGGLDIFDVTGDETISFALAGLDAGNYSVVVRNDENLLEDLLDNDNSNDVNLQELGSAGVVLGPDNQAVVLDTIETTLNTGVLGIPIGTVGTQVRGVLETLLEATTVIGAGQLVNLLTAPLDAIGLTGFLDDILSVIADALLSNTLTLLQDTDITTTLTEYTYTGDLVAQGNLIDGDI

SEQ ID NO: 92830 - protein, 261 aa, Unknown
  Bacterial polypetide isolated from the Sargasso Sea
HPDINMISFTGSTRAGALISQNAAKDFKRISLELGGKGANIIFKDADSEAVSRGVLRCFRNSGQSCNAPTRMLVEKSIYNETVEKVKELANNTKVDSPEKDGDHIGPVVSEIQFNKIQTLIQKGIDEGAKLVAGGTGKPKGLEKGYYVKPTVFADVNNQMEIARTEIFGPVLSIIPFENEDEAISIANDTPYGLTNYIQTQDKEKIKRVARKLRSGMVDVNGVGIAVSSPFGGYKHSGIGREAGTEGLIEFLEVKTVGGWN

SEQ ID NO: 92831 - protein, 475 aa, Unknown
  Bacterial polypetide isolated from the Sargasso Sea
ILKKLFETLNPEDNKPWAVVPEASANDVDKAVKAAQKAFEGDWPKILPRERAKFLRAIGKKLRDNAELLGKIETIDTGKLFRETNKQANYIAEYYDYYAGMADKVEGTVLPIDKPNIQAITSRIPIGVIAAIVPWNSQMFLTATKLAPALAMGNTVVIKSSELAPAVMFEFAKLIEETGIPKGVVNVITGFGDPCGKALTTHDLVEKVAFTGGPETARHIIRNSAENLSEVSLELGGKSPVAVFDDAHQENAINGITAGIFGASGQSCIAGSRLYLQKGIYDEFLDKLTKRAERIKIGAPMDPDTEMGPLSNFKQLEIIEKNIKKTIEQGGKVRCGGKRHPFSNEGYYFPPTIIECDNHNLPTAENELFGPVLSVMKFNDEKEVIEKMNDNQYGLSSGVYTSDFARGLRVSNAIRAGITFVNTYRLISPSAPFGGIKDSGYGKEAGMESIKDYTRVKTTWYYTSDEPTLDPFSIR

SEQ ID NO: 92832 - protein, 365 aa, Unknown
  Bacterial polypetide isolated from the Sargasso Sea
DIDLAVEAAKEAFKTFGFSSKEERIELIERIISEYEKRSEELAKTISEEMGAPLWLSNVAQVTSGLSHFKDTLEVLKTFEFEGTENNYLVRKEPIGVIGMITPWNWPMNQMCTKVASAIASGCTMVLKPSEITPFCGIIFTEILDAAKVPAGVFNLVNGMGPIVGAALSEHQDIDMMHFTGSTRAGVAVAIASAPTVKRVAQELGGKSANIILDDADIEKAAAAGANHCFMNTGQSCNAPTRMLVSSKNYEKAVEAAANVANSTVVGSPEEEGVKIGPISNKVQYEKVQRLIQIGIDEGAKLVAGGLGRPEGISEGYFVKPTVFANVTNDMTIAREEIFGPVLCILKYESEDEAIEIANDTEYGL

SEQ ID NO: 92833 - protein, 157 aa, Unknown
  Bacterial polypetide isolated from the Sargasso Sea
EKIKSYLELGKKEGAKVLTGGSVAKLNSGLEKGNYIQPTIFEANNSMRISQEEIFGPVVSVIKFKDEAEALKIANDTLYGLGAAVWTRNGNIAHRMGREIQAGIVWTNCYHAYPAHSPFGGYKQSGVGRETHKMMLNHYRQNKNLHVSYAEKKLGFF

SEQ ID NO: 92834 - protein, 351 aa, Unknown
  Bacterial polypetide isolated from the Sargasso Sea
NFNSKSNNHIALEPIGVCGLITPWNWPINQIALKVIPAFATGCTMILKPSEIAPISAMLFAEMIDEAGFPAGVFNLINGDGAGVGTQISGHPDIDMVSFTGSTRAGKLITKNAADTIKRVCLELGGKGGNIVFADSYPDAVRDGIRNVMSNSGQSCDAPTRMLVEKSIYKRAVKEATDEANKIKVNVASKKGDHIGPVVSKVQYDKIINLIKDGINEGATLAAGGPELPSGLEKGYFIKPTIFTDVTNTMQIAKKEIFGPVLSIIPFETEEEAISITNETEYGLGNYLQTEDKEKAKRVAKKLRSGCVYINGNGADPGTPFGGYRQSGNGREGGNWGLEEYLEVKTITGWK

SEQ ID NO: 92835 - protein, 239 aa, Unknown
  Bacterial polypetide isolated from the Sargasso Sea
MELNKKSLFREKCFVNGQWSDSKKGNTIKVNNPATLEIIGKVPNFSAEETKSAINDADEAFQSWKNTTAKERSIILKKWSDLIIENVDDLAKIMTIEQGKPLAEAKGEILMGASYIEFYAEEAKRVYGDIVPDPRPGKRIVIIKQPVGVVGAITPWNFPNSMITRKCAAALAVGCTTVVKPASQTPFSALAVAELAKEAGFPNGVFNIITGSAKEIGLELTKNPKIKKISFTGSTEVGK

SEQ ID NO: 92836 - protein, 195 aa, Unknown
  Bacterial polypetide isolated from the Sargasso Sea
MHQQEWLVEKSMYNEAIERLKKYTENFEVGDPKKEGEHIGPVISETQFNKIQTLIQKGIDEGAKLVAGGTGKPDGLDKGYFVKPTVFADVNNDMEVARTEIFGPVLSVMPFETEEDAIKIANDTAYGLTNYIQTQDSEKVQRVARKLRSGMVDVNGAGIAVDAPFGGFKHSGIGREAGEHGLDEFLEVKAIGGWS

SEQ ID NO: 92837 - protein, 131 aa, Unknown
  Bacterial polypetide isolated from the Sargasso Sea
MKSLAGGKPVDLPGYYVRPTVIADVPHDAAIVRDEVFGPVLAIVPFDDPLEALRLANDSQYGLAASLWSNDLKTVMNLVPQMEAGTVWVNCHVPLDPGMPFGGFKQSGIGREFGKYAIEGFTETKSVCIAH

SEQ ID NO: 92838 - protein, 349 aa, Unknown
  Bacterial polypetide isolated from the Sargasso Sea
KNITPSLTSWQTESFYYYAGMCDKFEGRLIPSEVPNMHNYLKWEPFGVVALVLPWNSPIGTLIWKLAPALAAGNTVVIKPSERASCSTLELMSILEEADLPEGLINVVTGFGKTTGAPLIEHEDVRMISFTGGTKGGSAASLSASKKVKPIIMELGGKSPQIIFKDADLNLAVNGVVSGIFPVTGHSCISGSRILVHKDIKQKFTKKLLEVVRKAKVGHPNDSSTQIGPIANKEQYEFILSKIDDAEKRGLKLLIDGRSEKRTEGYYIGPTIFDNVPNEDDLAQNEVFGPVASLQSWDNENEVINIANDSIYGLAAGIWSKDVNKAIRTADKIEAGTVYINNYFNASTQ

SEQ ID NO: 92839 - protein, 365 aa, Unknown
  Bacterial polypetide isolated from the Sargasso Sea
SHTLRQPLGVCAGITPFNFPAMVPMWMFPVAIACGNTFVLKPSEKDPSCPMRLAELAIEAGLPAGVLNVVNGDKEAVDTLLENKTVQAISFVGSTPIAEYVYHTGTKNNKRVQALGGAKNHMVIMPDADVNKTTDAIIGSAFGSAGERCMAISVAVCVGKQTKEKIKKKLLEETAKLNVGPYTDEKSDFGPLNNKAHFEKVLGYIDTGEKEGAKLLADGRNFKKQGYENGYFVGPTIFDDVKPEMKIYKEEIFGPVLSMMTTETYEEALNLVNDHELGNGAAVFTKSGNIAKHFTENAKIGMIGVNVPIPVPVAYHSFGGWKRSLFGDHSMHGPEGVRFYTKLKTATITWVEDNAGPEFTIPVLS

SEQ ID NO: 92840 - protein, 276 aa, Unknown
  Bacterial polypetide isolated from the Sargasso Sea
MYEKFGQFIDGKWCQSSDKSTYEVINPANEETLGHASKATPKDVDRALKSAEKGLQVWKKTPPWQRSYIIRRIADKIREKQDVLAKWMTLEVGKPFVEAKGEVNGAADIFEWNAEETKRIYGQTVESRFEDTRVHVYYQPVGVVAALSPWNFPAVLSARKISTALAAGCSVIIKPDVITPGVVMEMVNICSECGVPPGVVNLLSGDPPSIAQQLIASDIIKKISITGSSRVGKLILKQAADKVQRVTMELSGHSPFIVFDDADIKKATDMAIAAKF

SEQ ID NO: 92841 - protein, 358 aa, Unknown
  Bacterial polypetide isolated from the Sargasso Sea
LGVVAGITPFNFPAMVPLWMFPLAIVCGNTFVLKPSERDPSCAIFLAKLLKEAGLPDGVFNVINGDKEAVDQILDDERIKAVSFVGSTPIAEYIYSKANANGKRCQALGGAKNHAIVMPDADIDNAVNQLLGAAFGSSGERCMALSVVVAVGDKVADEIVDKMQSAMESLKVGAFDDATNDFGPLITLQHKEKVEGYITSAAEQGADVVVDGRNPSVKGYETGFFLGATLIDKVTPEMASYKAEIFGPVLQVMRVKSMEQAMQLIDSHEYGNGTCIFTRDGEAARYFSDNIQVGMVGINVPLPVPVSYHSFGGWKRSLFGDLHAYGPDGVRFYTKRKTITQRWPSSGIREGVSFSFPS

SEQ ID NO: 92842 - protein, 497 aa, Unknown
  Bacterial polypetide isolated from the Sargasso Sea
MNLIKHFVGGKITPGNSERKGKVFNPATGEQESEVILASKSDLDGAVEIAQKAFETWSLNPPLQRARIMFRFKELIEKNFDELAKLIVSEHGKVYEDAKGSLIRGLEVVEFACGIPHLLKGEFSENVGTNVDSYSMRQPLGVAAGITPFNFPAMVPMWMFPLAIACGNSFILKPSEKDPSCPMKLAELLHEAGLPEGVFNVVNGDKEVVDAILTNQNIKAVSFVGSTPIAKYIYENAAKNEKRVQALGGAKNHLVVMPDCDLDGAVNGLMGAAYGSAGERCMAQSVAVAVGDIGDELVSRLSKKAEALKIGPGMDKSSEMGPLVTKEHLEKVKGYVDIGVKEGAKLVLDGRNLKLQGYENGFYIGGCLFDHVTTDMRIYKEEIFGPVLSVVRVKTFEEATKMINEHEYGNGVSIYTRDGDAGRTFASKIQVGMVGINVPIPVPMAFHSFGGWKRSLFGDSGTHGMEGVKFYTKLKTITSRWPSGIRSNPEFIMPTMK

SEQ ID NO: 92843 - protein, 432 aa, Unknown
  Bacterial polypetide isolated from the Sargasso Sea
MNLIEHYIDGKSYSGSSDKKGKIFNPATGKQESEVILGLKADLDLAVEKAKKAFESWSNVTPLQRARIIFKFKDLIEKNSDELTKLIVNEHGKVYEDAKGSLTRGLEVVEFACGIPQMLKGEFTENVGTNIDSWSTRQPLGVCAGITPFNFPAMVPMWMFPMAIACGNTFVLKPSEKDPSCAMMLAKLFKEAGLPDGVFNIVNGDKEVVDAILENKDIPAVSFVGSTPIAKYIYENAAKNEKRVQALGGAKNHCVVMPDCDLDQAVNGLMGAAYGSAGERCMAQSVAVAVGNIGDDLVNQMSKKVETLKVGPGMDKSSEMGPLVTKEHLERVKGYIDLGVKEGAKLVVDGRDINLQGYENGYYIGGCLFDHVKKDMRIYKEEIFGPVLSVVRVKNFDEALQLINDHEFGNGTSIYTRDGDVGRTFANKIKVE

SEQ ID NO: 92844 - protein, 103 aa, Unknown
  Bacterial polypetide isolated from the Sargasso Sea
VRVPTINVSLVDLSFVASRETSVDEINEVVKAASEGALKGVLDYSDGPLVSIDFNHNPASSTYDATMTKVQEGTLVKVCSWYDNEWGFSNRMLDTTLALVNAE

SEQ ID NO: 92845 - protein, 198 aa, Unknown
  Bacterial polypetide isolated from the Sargasso Sea
QSCNAPTRMLVEKSMYDEAIDRLKKYTENFEVGDPKKEGEHIGPVISETQYNKIQTLIQKGIDEGAKLVAGGTGKPDGLDKGYFVKPTVFADVNNDMDVARTEIFGPVLSVIPFETEEEAIKIANDTSYGLTNYIQTQDSEKVQRVARKLRSGMVDVNGAGIAVDAPFGGFKHSGIGREAGEHGLEEFLEVKAVGGWS

SEQ ID NO: 92846 - protein, 220 aa, Unknown
  Bacterial polypetide isolated from the Sargasso Sea
IFKDADPKAIERGALRCFINSGQSCNAPTRMLVEKSMYTQAVERVKQFANEMKVGDPNKEGEHIGPVVSEVQYKKIQSLIQKGIDEGATLVAGGIGKPDGIEKGYFVKPTAFADVNNNMEIARTEIFGPVLSIIPFENEEEAIEIANDTDYGLTNYIQTQDKEKANRVARKLRSGMVDVNGAGIAVDAPFGGFKHSGIGREAGKEGLLEFLEVKSVGGWN

SEQ ID NO: 92847 - protein, 294 aa, Unknown
  Bacterial polypetide isolated from the Sargasso Sea
MLLAEMIDEAKFPPGVFNLVNGDGAVTGDALTSHPDIDMISFTGSTRAGALISQNAAKDFKRISLELGGKGANIIFKDADSEAIARGVLRCFRNSGQSCNAPTRMLVEKSIYNETVEKVKKLANDTKVDSPQKDGDHIGPVVSEVQFNKIQTLIQKGIDEGAKLVAGGTGKPKGLEKGYYVKPTVFADVNNQMEIARTEIFGPVLSIIPFENEEEAISIANDTPYGLTNYIQTQDKEKVQRVARKLRSGMVDVNGVGIAVASPFGGYKHSGIGREAGTEGLIEFLEVKTVGGWN

SEQ ID NO: 92848 - protein, 266 aa, Unknown
  Bacterial polypetide isolated from the Sargasso Sea
MRKITHLIDAQSVESTSGNVGPVYNPATGEQTGEVDLASVAEVDLAVESSKNAFQEWGNVSIARRVKLLHNFRNLVIENEMEIASRLTQEHGKVADDARGEVARGIENIEFACGFADSLKGTYSEHASTGVDVYTVRQPLGVCAGITPFNFPAMVPLWMIPNAVACGNTFVLKPSERDPSAPRFLIELIQEAGFPPGVVNLVNGDKTAVDRLLEHPDIAAVSFVGSTPIAKYVYSTGTSTGKRIQALGGAKNHKLVLPDADLDLQR

SEQ ID NO: 92849 - protein, 313 aa, Unknown
  Bacterial polypetide isolated from the Sargasso Sea
MAELLSEAGLPDGVFNVINGDKEAVDAILENKDIKAVSFVGSTPIAKYIYENSAKNEKRVQALGGAKNHLVVMPDCDLDGAVNGLMGAAYGSAGERCMAQSVAVAVGDIGDELVSRLSKKAEALKVGPGMDKTSEMGPLVTKEHLEKVTSYVDLGVKEGAKLVVDGRGLKLQGYENGFYIGGCLFDHVKKDMRIYKEEIFGPVLSVVRVKTFEEAAKLINDHEYGNGVSIYTRDGDAGRTFASKIQVGMVGINVPIPVPMAFHSFGGWKRSLFGDSGMHGMEGIKFYTKLKTVTSRWPSGVRSNVEFVMPTMK

SEQ ID NO: 92850 - protein, 363 aa, Unknown
  Bacterial polypetide isolated from the Sargasso Sea
HFIDGQITKGSSKKKSKVFNPATGEQSAEVNLASKTDIDLAVQKAKKAFIDWSRKPPAQRARIIFKFKELIEKNSDEITKLIVSEHGKVYEDAKGSLNRGLEVVEFACGIPHLLKGEFTENVGTDVDSWSIRQPLGVCAGITPFNFPAMVPMWMFPIAIACGNTFVLKPSEKDPSCSIKLAKLFKEAGLPDGVFNVVNGDKEAVDALLTNKDVVAISFVGSTPVAKYIYENAAKNEKRVQALGGAKNHCVVMPDCDLDQAVNGLMGAAYGSAGERCMAQSVAVAVGKIGDQLVNKISKKVESLKIGPGLDKNSEMGPLITKQHLEKVKGYVDLGVQEGAKLVVDGRNIKLQGYEKGFYIGGCL

SEQ ID NO: 92851 - protein, 98 aa, Unknown
  Bacterial polypetide isolated from the Sargasso Sea
RTEIFGPVLSVMPFETEEEAIEIANDTPYGLTNYIQTKDKEKVKRVARKLRSGMVDVNGAGIAVDAPFGGFKHSGIGREAGEHGLEEFLEVKSVGGWS

SEQ ID NO: 92852 - protein, 480 aa, Unknown
  Bacterial polypetide isolated from the Sargasso Sea
MNPQTFLNWIDGRWVAGETVVENRSPSDTDDLIGCYTQATSGQVHAAIAAAAVAQPVWAATGLEKRHDVLRAIGDELIARSQELGRLLAREEGKTLAEGVGEVTRSGQFFHYFAAEVLRQLGGKADSVRAGIEIDIQREALGVVGVITPWNFPMATASWKIAPALAFGNAVLFKPANLTPASAWALTEIISRQALPAGTFNLLMGAGASVGNELAASQSVNGISFTGSVDTGRRLAGVAAPNLIKLQMEMGSKNALVVLDDADLDLAVECAFQGAYSGTGQKCTASSRLVVTHAVHRPFVERLTAKLRSVKVGRSLDDGVQMGPVVDARQLEQNLRYIEIGKREGARLVHGGEHLAQPERAYCMSPALFDDGRNDMQLNRDEVFGPIACVIPVRDYDEALAVSNDTPFGLTAGIVTQSLKHATHFRRNAQAGCVMVNLPTAGTDYHVPFGGRKSSSYGPREQGPNAAEFYTTLKTSYTRA

SEQ ID NO: 92853 - protein, 185 aa, Unknown
  Bacterial polypetide isolated from the Sargasso Sea
KKCYNEVIDIAKKTAEEINVGDPTLDGDHLGPLFDKIQFDRVQNMIQVGIDEGAKLLVGGLGKPDGHEKGWFVKPTIFSDVNNNMRVAQEEIFGPVLVIIPFNDEDEAIRIANDTPYGLAAYLQTGDKERAERVSRQLRAGGIHVNGGGYNYGSPFGGYKESGNGREGGDMGLEDYLETKALHIA

SEQ ID NO: 92854 - protein, 262 aa, Unknown
  Bacterial polypetide isolated from the Sargasso Sea
SHPDINMISFTGSTRAGALISQNAAKDFKRVSLELGGKGANIIFKDADPEAIERGALRCFRNSGQSCNAPTRMLVEKSMYEEAIERLKKYTESFEVGDPKKEGEHIGPVISETQYNKIQTLIQKGIDEGAKLVAGGTGKPDGLDKGYFVKPTVFADVNNDMEVARTEIFGPVLSVIPFETEEDAIKIANDTAYGLTNYIQTQDSQKVQRVARKLRSGMVDVNGAGIAVDAPFGGFKHSGIGREAGEHGLEEFLEVKAVGGWS

SEQ ID NO: 92855 - protein, 380 aa, Unknown
  Bacterial polypetide isolated from the Sargasso Sea
MNLIEHFVNGKIIPGSSDKKGKVFNPATGEQESEVRLASRSDLDSAVEAAKKAFETWSLKPALQRARIIFKFKELIEKNSDELTKLIVSEHGKVYEDARGSLTRGLEVVEFACGIPHLLKGEFSENVGTNVDSWSMRQPLGVVAGITPFNFPAMVPMWMFPIAIACGNTFILKPSEKDPSCGLRLAELLSEAGLPDGVFNVINGDKEAVDAILENKDIKAVSFVGSTPIAKYIYENSAKNEKRVQALGGAKNHLVVMPDCDLDGAVNGLMGAAYGSAGERCMAQSVAVAVGDIGDELVSRLSKKAEALKVGPGMDKTSEMGPLVTKEHLEKVTSYVDLGVKEGAKLVVDGRGLKLQGYENGFYIGGCLFDHVNKDMRIYK

SEQ ID NO: 92856 - protein, 420 aa, Unknown
  Bacterial polypetide isolated from the Sargasso Sea
MTELKKYKMFIGGEWVDSDTKKTFETLNPENNKPWAVVPEASANDVDKAVKAAQKAFEGEWSKLLPRDRGNYLRAIANKLRENAELLGKIETIDTGKLFRETNKQANYIAEYYDYYAGLADKVEGTVLPIDKPNIQAITTRIPIGVIAAIIPWNSQMLLTVTKLAPALAMGNTVVIKSSELAPAVMFEFAKLVEETGIPKGVVNVITGFGDPCGKALTSHNLVEKVAFTGGPETARHIIRNSAENLSEVSLELGGKSPVAVFDDAHQENAINGITAGIFGASGQSCIAGSRLYLQDGIYNEFLDKLAVRANKIKIGAPMDPESEMGPLSNFKQLEIIEKNIKLTVDQGGKIKCGGKRHAFSNEGYYFSPTIIECSNHNLPVAENELFGPVLSVMKFKTEDEVIEKMNDNQYGLSSGVYTS

SEQ ID NO: 92857 - protein, 174 aa, Unknown
  Bacterial polypetide isolated from the Sargasso Sea
PLKMETMIGAQASVEQMEKIKSYLDLGKKEGAKVLAGGAVGKLNSGLEKGNYIQPTIFETNNKSRISQEEIFGPVVSVIKFKDEAEALEIANDTLYGLGAGVWTRNGNIAYRMGRAIQAGIVWTNCYHAYPAHSPFGGYKQSGVGRETHKMMLSHYRQNKNLHVSYAEKKLGFF

SEQ ID NO: 92858 - protein, 383 aa, Unknown
  Bacterial polypetide isolated from the Sargasso Sea
ELQYVLSQVAQVASGLTHFKDTLNVLKNYDFEYEKDGYLVRKEPVGVVGMITPWNWPMNQMCTKVASGIAAGCTMVLKPSEITPFCGIILAEIIHEAGVPAGIFNLVNGMGPVVGASMSEHKDIDMMHFTGSTRAGVAVAQASAPTVKRVAQELGGKSANIVLDDADIEKAVSAGVSSCFLNTGQSCNAPTRMLVSSKNYDKAVEVAANTANAIKVGDPFDADTKMGPISNKTQYEKVQRMIQIGIDEGATLSAGGVGLPEGCESGYYVKPTIFSDVTNDMTIAREEIFGPVLCLIKYETEEEAIEIANDTPYGLAGYIQGEHAHAVEVASKIRAGQITINKGARVRSAPFGGYGSSGNGREHGTHGLEECLETKAVIGALVE

SEQ ID NO: 92859 - protein, 369 aa, Unknown
  Bacterial polypetide isolated from the Sargasso Sea
MYSKFGQFIDGKWQASQNNETYDVFNPATEEVLGKASKAGEEDVNKALKSAEKGLEVWRNTPPWQRSKIIRKIADLMRERTDVLAKWLTLEVGKPLSEAKGEVGGAADIFEWNSEETKRIYGQIVESRFEHTRMYVKYEPVGVVAGLIPWNFPIVLSSRKISTALAAGCSVICKPDVITPGSVMELMNIINDAGVPPGVVNLLSGDPAKISSQLISSDIVKKVSITGSTRVGKLILKQAAEKVQRVTMELSGHSPFIVFDDVDINKVTDMAITAKFRNNGQVCISPARFYIHESKKDEFAKKLVEKVTKLKVGNGMDEDTILGPLTTEKRLNEIEALVEKTKSEGATVLCGGKRPAGFNKGYFYEPTVF

SEQ ID NO: 92860 - protein, 237 aa, Unknown
  Bacterial polypetide isolated from the Sargasso Sea
MEDIKNYQMLIDGDWVDASDGGVFDSVNPNTDNVWSQVPEATEADVNRAVSSAHKALNEGPWSKFTPTERGKCLRKLGDLLADNSESLGRIETIDTGKMLKETRWQAKYIAEFFHFFAGCADKVSGETLPIDKPDMFVFTKREPLGVVAAVVPWNSQLFLVAVKIGPALAAGNTVVLKASEHASAAMLEFGKLIEQAGIPPGVVNIVTGHGEPCGRVLTSHPHVARVLSLAALTPPA

SEQ ID NO: 92861 - protein, 331 aa, Unknown
  Bacterial polypetide isolated from the Sargasso Sea
MQQYKNFIDGKWIISESKETIKVDDPSNGKIIGEISCAKKNEVDLAVEAAKNSYNSRVLVDMPLLSRAKLMRKIAEETRKVSKEGGELLCYENGKNIASAIKEFNDVADMFDYYAGLTDKLEGKTIPVAKNVFDYTVLEPFGVSAHVVPWNFPLSMIGRSLSCSFATGNSTIIKTAELTPLSATIFAKAIQNADVPEGLINIICGYGNEAGSYLVSHEDVNHVVFTGSVATGKKILHACADKAIPAVVELGGKSAGIVYPDADLNEVLESARSGIFSVAGQICTAMSRLVVHKSIKDELVDKLVDMSKSLKIGPGIEKRYRSSATNDEIKK

SEQ ID NO: 92862 - protein, 237 aa, Unknown
  Bacterial polypetide isolated from the Sargasso Sea
MTNYSFEEWKKAASKINFRNKAFINGKFVEAKSGKTFDSINPATDEVLTSVAECGQEDVDFAVEIARKSFQKGSWSKMPPAERKAVLLKLADLIRENLEEFALLDSLDMGKLITDAVTIDSPGSAAFFQWHAEAIDKMYDEIAPTGPGDLAMVTREPLGVVGAVVPWNFPLDMATWKASAALAAGNSLVLKPAEQSPLSALRLAELAIEAGVPEGVFNIVPGFGETAGKALGLHQDV

SEQ ID NO: 92863 - protein, 493 aa, Unknown
  Bacterial polypetide isolated from the Sargasso Sea
MSELKKYKMFIGGEWVDSDTKKTFETLNPEDNKPWAVVPEASANDVDKAVKAAQKAFEGDWPKILPRERAKFLRAIANKLRDNAELLGKIETIDTGKLFRETNKQANYIAEYYDYYAGMADKVEGTVLPIDKPNIQAITSRIPIGVIAAIVPWNSQMFLTATKLAPALAMGNTVVIKSSELAPAVMFEFAKLIEETGIPKGVVNVITGFGDPCGKALTTHNLVEKVAFTGGPETARHIIRNSAENLSEVSLELGGKSPVAVFDDAHQENAINGITAGIFGASGQSCIAGSRLYLQKGIYDKFLDKLIKRAEKIKIGAPMDPETEMGPLSNFKQLEIIEKNIKKTVEQGGKIKCGGKRHPFSNDGYYFPPTIIECDNHNLPTAENELFGPVLSVMKFNDEKEVIEKMNDNQYGLSSGVYTSDFARGLRVSNAIRAGITFVNTYRLISPSAPFGGIKDSGYGKEAGMDSIKDYTRVKTTWYYTSDEPTLDPFSIR

SEQ ID NO: 92864 - protein, 493 aa, Unknown
  Bacterial polypetide isolated from the Sargasso Sea
MTEIKKYKMLINGNWTSGSENKFFESLNPYTGEIWSSIPTASVSDVNSAVEAAHHAFSEGPWSKMTPTQRGSCLRKLAELLSEKSEPLGKTETIDTGKMLKETRWQAKYISEFFQFYAGCADKISGETLPIDKPDLLVLTEREPLGVIAAIVPWNSQLFLVAVKLGPALAAGNTVVLKASEHASAAMLEFGELIEIAGFPPGVVNIITGHGDPCGKELTSHPLVARVSFTGGPKSAQNIINNSANNFAEVSLELGGKSPFIVFDDANIESAVNGSIAGIFGASGQSCVAGSRLYLHEKIADKFLHKMMNVVNSIKLGDPLEEDTQMGPLCTLNQIENIEREIAFARSEGAEILCGGKRPSNLQGFFFNPTIISCPKQALRIVDTELFGPVLSVLTFRDEQEVIKLANDTKHGLAAGIFSENSARSLRVARSVRAGIVWVNTYRVVSPIAEFGGFKGSGYGRESGFQAMYDYTRPKTIWLNTSNESMSNPFVMR

SEQ ID NO: 92865 - protein, 315 aa, Unknown
  Bacterial polypetide isolated from the Sargasso Sea
MNYKDISQSDFSLDYTTGFSGEIFDVVEPATGKVLGSINAATTEEANKVIEHCKKAQPEWATSTFEVRAGILRKFAKALEDNAELIHTWNARECGSIRPKSEWELQACIEQSHTAASLAQAPSGELYPSTMPTRKNMRVRIPVGVVGVIAPWNFPLLLSLRAVLPALAMGNTVVLKPDPQSYFTGGVIIQELMKIAGLPDGVLGLLPGGAEPGQAVVEHPATGMIAFTGSTAVGRSIAQHCAKTFKKTSLELGGNNAFIVLEDADITSAASCAAWGAFLHQGQICMQSGRHIVHEDIADAYIEALAQRANNLHVG

SEQ ID NO: 92866 - protein, 1320 aa, Unknown
  Bacterial polypetide isolated from the Sargasso Sea
MVSEEGNMASTTLGVKVDDLLRSRLKDAATRLERTPHWLIKQAIFAYLEKIEHGQLPPELSGHTGSADLADGAAVEHDEESASHPFLEFAQNVQPQSVLRAAITAAYRRPEPECVPFLLGQARLPANLAGDVQAMAGKLVETLRTKSKGGGVEGLIHEFSLSSQEGVALMCLAEALLRIPDRATRDALIRDKISKGDWKSHVGQAPSLFVNAATWGLMITGKLVGTNSEASLSSALTRLIGKGGEPLIRKGVDMAMRLMGEQFVTGENISEALANSRKYEARGFRYSYDMLGEAATTEADAQRYYASYEQAIHAIGKAAGGRGIYEGPGISIKLSALHARYSRSQQERTMSELLPRVRSLAILARRYDIGLNIDAEEADRLEISLDLLEALCFDPELAGWNGIGFVVQAYQKRCPFVIEYLIDLARRSRHRIMVRLVKGAYWDTEIKRAQVDGLEGYPVYTRKIYTDVSYLACAKKLLGAPDAVYPQFATHNAHTLSAIYHLAGNNYYPGQYEFQCLHGMGEPLYEEVTGRDKLNRPCRVYAPVGTHETLLAYLVRRLLENGANTSFVNRIADESVAIKDLIADPVDEASKIVLLGAPHAKIPLPRNLFGAERLNSMGLDLSNEHRLASLSSALLASAHHPWRAAPMLEDNEIAVGVARDVRNPADHRDLVGTVVEATPEHVSAALAHAVAAAPIWQATPVEARADCLARAADLLEAQMHTLMGLVVREAGKSLANAVAEIREAIDFLRYYSTQIRNEFSNDTHRPLGPVVCISPWNFPLAIFMGQVAAALAAGNTVLAKPAEQTPLIAAQAVRILREAGVPAGAVQLLPGDGETVGAALVADPRTRAVMFTGSTEVARLINKTLSSRLDPEGKPIPLIAETGGQNAMIVDSSALAEQVVADVLQSSFDSAGQRCSALRVLCLQEDVADRTLEMLTGAMRELSVGNPDRLSIDVGPVIDLDAKRGIDAHVAAMREKGRKVEQLPMPEGGAQGTFVPPTLIELDSIDELKREVFGPVLHVVRYRRSQLDKLLEQIRATGYGLTLGIHTRIDETIAHVISRAHVGNIYVNRNVIGAVVGVQPFGGEGLSGTGPKAGGALYLQRLLATRPAGLPKSLAQSLIADVPQAGPNGDNRGDNPSAALTALRDWLISEQQPVLAARCDGYLSHMPAGATAVLSGPTGERNTYTLGARGTVLCIAATASGARVQFAAALATGNRALFEGAAGEQLVSQLPAALKSYASVKKSADTPFDAVLFEGDSDELLALVKEVAKRPGPIVSVQGVAARALESGDEDYALERLLTERSVSVNTAAAGGNANLMTIG

SEQ ID NO: 92867 - protein, 399 aa, Unknown
  Bacterial polypetide isolated from the Sargasso Sea
LRHRAEEMAQCISREMGKPIKQARAEVAKSAALCDWYAEHGPAMLSPEPTLVENNQAVIEYRPVGTILAIMPWNFPLWQVMRGAVPILLAGNGYLLKHAPNVTGCAAIIAQVFADAGVHAGVYVWVNADNAGVSQMINDPRITAVTVTGSVRAGAAIGAQAGAALKKCVLELGGSDPFIVLNDADLDLAVKAAVAGRYQNTGQVCAAAKRFIIEEGIAAEFTSRFVAAASALKMGDPLNEENDLGPMARFDLRDELHQQVEATLAEGARLLLGGEKIAGHGNYYTVTVLGDVTPEMTAFRQELFGPVAAITVAKNAEHALALANDSDFGLSATVFTADEVLAQKMASRLECGGVFINGYSASDARVAFGGVKKSGFGRELSHFGLHEFCNVQTVWKNRL

SEQ ID NO: 92868 - protein, 208 aa, Unknown
  Bacterial polypetide isolated from the Sargasso Sea
MYEKYGQFTDGKWHQSSSGETYEVLNPANEEIIGHASKASPEDVERALRSAEKGLEVWKKTPPWQRAYILRRIADKMREKQDILAKWMTLEVGKPFAEAKGEVNGAADIYEWNAEETKRIYGQTVESRFEDTRVHVYYQPVGVVAALVPWNFPLVLSARKISTALAAGCSVIVKPDVITPGVVMEQVEICRECGVPPGVVNLLSGDPP

SEQ ID NO: 92869 - protein, 199 aa, Unknown
  Bacterial polypetide isolated from the Sargasso Sea
QSCNAPTRMLVEKSMYSEAVERLKKYTETFEVGDPKKEGEHIGPVISETQYNKIQSLIKKGIDEGAKLIAGGTGKPKGFEKGYFVKPTVFADVNNNMDIARTEIFGPVLSVMPFETEEEAIQIANDTPYGLTNYIQTQDKEKVKRVARKLRSGMVDVNGAGIAVDAPFGGFKHSGIGREAGEHGLEEFLEVKSVGGWNN

SEQ ID NO: 92870 - protein, 480 aa, Unknown
  Bacterial polypetide isolated from the Sargasso Sea
MSIPYPNTSLYINGKWRPADSGDTLEVINPATEEVIGTVARAGTSDLDEALDAADKAFKIWKTTSPFDRYHVLRKAAELLRKRADIIAEIMTMEQGKPLAESKGETLIGADRIDWMAEEGRRTYGRVIPARTDSVYQFTVKEPVGPVAAFTPWNFPLNQILQKVPAAIAAGCSIIVKGPEEAPACCAELAKIFEEAGLPPGVLNLIYGIPAEISDYLIPHPVIKKVTFTGSTAVGKQLAAKAGEYMKLVTMELGGHSPAIVFEDADLDVALNVLSMNKYRNAGQVCVSPTRFLVHESVYDKFVSGFKEVSQNLTVGDGLLPDTKMGPLAHDRRLEAIDEFVKDAVKRGGRIQTGGERKGNKGYFYEPTVLTDVPLDARIMNEEPFGPVAPITPFKSFDDVVEEANRLPYGLAAYAYTNSNKTAEAIGSALSSGMVSINHHGLAMPETPFGGIGESGYGKEGGVEGIEAYLQTKFITQANI

SEQ ID NO: 92871 - protein, 493 aa, Unknown
  Bacterial polypetide isolated from the Sargasso Sea
MSELKKYKMFIDGEWVDSESKKTFQTLNPENNEPWAEVPEASEKDVDKAVKAAQKAFEGTWPSLFPKERAKYLKAIAEQLRKNAELLGKIETIDTGKLFKETKTQANYIAEYYDYYAGLADKVEGTVLPIDKPDMQVITTRVPIGVVAAIIPWNSQMLLTAVKLAPALAMGNTVVIKSSELAPATLFEFGKLIEKTGIPKGTINIISGFGDPCGKALTSHNLVERVAFTGGPETARHIIRNSAENLSQVSLELGGKSPVAVFEDADQENALNGITAGIFGASGQSCIAGSRLYIQNSIYDNFLEKIINKANKIKLGSPMDTNTQMGPLNSLKQLEVIEKNIKLTIDQGGKLRCGGKRHNMSNKGYYFPPTVIECENHNLPTSENELFGPILSVMKFNTEEEVIDKMNDNKYGLSSGIYTKNINKALRVSKAIRAGITFVNTYRLISPTAPFGGIKDSGYGKEAGIESIKDYTRIKTTWFNTSDKPMDDPFTMG

SEQ ID NO: 92872 - protein, 458 aa, Unknown
  Bacterial polypetide isolated from the Sargasso Sea
AVVPEANAKDVDKAVKAAQAAFEGEWPKLLPRERAKFLRAIGDKLRDNAELLGKIETIDTGKLFRETNKQANYIAEYYDYYAGLADKVEGTVLPIDKPNIQAITTRIPIGVIAAIVPWNSQMFLTATKLAPALAMGNTVVIKCSELAPAVMFEFAKLIEETGIPKGVVNVVTGFGDPCGKALTAHPLVEKIAFTGGPETARHIIRNSAENLSEVSLELGGKSPVAVFDDAKQENAINGITAGIFGATGQSCIAGSRLYLQKGIYNEFLDKLSARAEKIKIGAPMDPDTEMGPLSNFKQLEVIEKNIKLTIEQGGKIKCGGKRHSFSNEGYYFPPTIIECDNHNLPTAENELFGPVLSVMKFNTEEEVIEKMNDNQYGLSSGVYTSDLARGLRVSKAIRAGITFVNTYRLISPSAPFGGIKDSGYGKEAGIDSIKDYTRVKTTWYYTSDEPTLDPFSIR

SEQ ID NO: 92873 - protein, 102 aa, Unknown
  Bacterial polypetide isolated from the Sargasso Sea
MKVAINGFGRIGRSVFRILNSQQNIDVVAINDIADNEAMAYLLKYDTVMGPFKDSVEINGDILKTSYNEIKMLAEREPGHLPWGEMGVDVVIESTGIFRTKK

SEQ ID NO: 92874 - protein, 483 aa, Unknown
  Bacterial polypetide isolated from the Sargasso Sea
MELKNNALFKENCLIGGKWIESNSGEKIDVDNPANGEIIGKVPKCSTSETSKAIDEAQKAFPAWRDKTAKERSIILQKWARLIEDHVDDLAKIMTVEQGKPLAEAKGEILMGVTYIDFYAEEGKRVYGDIIADPMPDRRIVVIKQPVGVVGAITPWNFPSTMITRKCAPALAVGCTVVIKPASQTPYSALALGVLAKEAGFPDGVINIITGSAGAIGKELTENPIVRKISFTGSTEVGKILLQQSASTVKKVSMELGGHAPFVVFDDADIDEAVTGAMQSKFRNSGQTCICANRIFVHEKVYDDFLNKFIQEVNKIKVGNGLEEGIVSGPLIDQPSLIKVHDQVKDAVNQGAKIAVGGDVHPLGGNFYQPTILSDVTTKAKITYEETFGPVAPLYKFKTDEEVIKLANDTPYGLASYFYSRDIGRIWRVAEALEYGMVGVNTGLTTKAEIPFGGVKESGLGREGSRYGLDDYLNIKYISMAGI

SEQ ID NO: 92875 - protein, 426 aa, Unknown
  Bacterial polypetide isolated from the Sargasso Sea
MLDKKNFYINGKWVKPLKPKDFEVINPSNEEPFAVISLGSKDDTDAAVNAAKKAFLKWKETSKEERIKLLEKLLSIYKKRFNEMAEAISMEMGAPMDWASDVQTASGQTHLEDFILRLKNFNFEKQFDTKSNNHICYEPIGVCALITPWNWPINQIALKVIPAFATGCTMILKPSEIAPVSAMIFAEMVDQAGFPPGVFNLVNGDGAGVGTHLSGHNGIDMVSFTGSTRAGKLISKNAADTIKRVCLELGGKGGNIVFADSYPNAVRDGIRNVMSNSGQSCDAPTRMLVEKSIYEKATKEATDEANKIKVDIASKKGNHIGPVVSKVQYDKIINLIKDGINEGATLAAGGPDLPNNLNKGYFIKPTIFTNVTNEMQIAKKEIFGPVLSIIPFETEEEAVAITNDTEYGLGNYLQTEDKEKAKRVAK

SEQ ID NO: 92876 - protein, 193 aa, Unknown
  Bacterial polypetide isolated from the Sargasso Sea
MSSGNKYKVISNKLKFEGRAFINGKYVNAIDGKKFETINPATGKKLCAVAKCNHKDVDLAVKVSRKAFNSGVWSKSSPEHRKEVLLKFAELLRKHGDENSVLECIDTGKLIADCINEVANDAPMHFQWYGELIDKVFGKVGPTEPSITSLIVKEPIGVVAGIVPWNFPLMMAVWKMAPALAAGCSVIIKPAED

SEQ ID NO: 92877 - protein, 366 aa, Unknown
  Bacterial polypetide isolated from the Sargasso Sea
MEDFILRLKEFNFDEQFDKKSNNHIYYEPIGVCGLITPWNWPINQIALKVIPALATGCTMILKPSEIAPISGMLFTEMIDEVGFPKGVFNLVNGDGAGVGTNISSHPDIDMVSFTGSTRAGKLISKNAAETIKRVCLELGGKGGNIVFADSYKNAVRDGIRNVMSNSGQSCDAPTRMLVEKSIYQRAVNEAIDEANKINVDQASKKGDHIGPVISKVQYDKIINLIKSGISEGATLAAGGPELPDGLNKGYFIKPTIFTDVTNDMRVAKEEIFGPVLSIIPFENEDEAVKIVNDTSYGLGNYLQTEDKEKAHRVAKKLRSGCVYINGKAADSGTPFGGYRQSGNGREGGVWGLEEYLEVKTITGWK

SEQ ID NO: 92878 - protein, 155 aa, Unknown
  Bacterial polypetide isolated from the Sargasso Sea
MISKGHLQTVDGYIQKGIDEGAKLLTGGVSDNKQKGFYAKPTLFDGLKENMTIAQEEIFGPVLGVLTVKNDEEALKVASNSKYGLHASVFTQDINRAFHLAKSLPCGTVSVNTFSEGDIKTPFGGYKQSGSLSRDQGTEALNSFLQTKTIWISHN

SEQ ID NO: 92879 - protein, 164 aa, Unknown
  Bacterial polypetide isolated from the Sargasso Sea
MDPETNMGPLMSAQAQKRVLGFIESGKNEGAKLKFGGSIPTGLESGCFVEPTMFADVNNDMTIGREEIFGPVASIIPFDSEEEAIEMANDTIYGLCASVWTSNVSRAHNMAKAIESGMVYVNCYDVGDMTFEFGGYKQSGNTKDSCFESVLGYTQSKSIWYNLG

SEQ ID NO: 92880 - protein, 488 aa, Unknown
  Bacterial polypetide isolated from the Sargasso Sea
MSKTVDFSTKLIIGGRPLPGSEGKTFETINPANGKVLASIAEASGEDVNKAVSAARKAFEEGPWSKMAPAERKKVLLRFATVIEAHAEELAMMEAMEAGKPITDCLEIDMPETVNTIRWHAEAIDKLYDQISPSDPSILSMIVREPMGVVAAILPWNFPAMMAAWKLGPILATGNTVVLKPAEQTSLSTIRIGELAAEAGIPDGVINIVCGFGETVGKALGEHPDVDCVAFTGSTETGRMFLRYSADTNLKRVLLECGGKNPFIVMGDTEDLDTAADHATNSIFWNMGENCSSNSRLLVHQSIKDELLELIVEKSKEWVVGDPLDASTKIGPMIEQAHLDKVMGFIDQANQDKNKLVIGGKRTREDTGGYFVQPTIFDDVKPENTLFSEEVFGPVLGITTFKNPEEGIALANQNKYGLAASVFTSSNKTAHVAARKIKAGTVAVNCYGEGDITTPFGGYKLSGFGGRDKSLAAHDQYCELKTIWIDLT

SEQ ID NO: 92881 - protein, 438 aa, Unknown
  Bacterial polypetide isolated from the Sargasso Sea
MVKRFNPDKRRRPKVDDHFGDWKWREALAESMVPMIGKLYRNGVRLLMYGRPLINCSAIEIMKLHRFVREVEGNELSELETYPVIEQISKMKLMPCEIDVGEVVVHLLDNDKLDPVKHVKNMLKEQIRTKRSHPLRPKDIVLYGFGRIGRILTRILVSETGPGVNWRLRAVVVRDSENPEDLIKRASLLRNDSVHGTFPGTIRVNRKNNSLIVNGNEIVFIYASDPRKVDYKKYGIKKATIIDNTGVWRDEDGLKKHVKNPSVERVVLTAPGKGKIKNIVYGINDHKVSEEDKILGAASCTTNAIVPALKVVDDNFKILSGHIETVHAYTNDQNLIDNYHSADRRGRSAALNLVITDTGAAKAISGILPELKGKITANAIRVPTPNVSLAIMHLNIKKGVSVEDLNQCFRNAAFHSNLRTTIDYSNSLDAVSSDFYSQ

SEQ ID NO: 92882 - protein, 496 aa, Unknown
  Bacterial polypetide isolated from the Sargasso Sea
MLIEHFVDGKLFSGSSDRKGKVFNPATGEQASEVKLASKSDLDQAVKIAKKAFETWSLKPALQRARVMFKFKELIEKNSDELTKLIVSEHGKVFEDARGSLTRGLEVVEFACGIPHLLKGEFSENVGTNVDSWSMRQPLGVVAGITPFNFPAMVPMWMFPIAIACGNTFILKPSEKDPSCSIMLAQLLTEAGLPEGVFNVVNGDKESVDAILENSDIKAVSFVGSTPIAKYIYENSAKNEKRVQALGGAKNHLVVMPDCDLDGAVNGLMGAAYGSAGERCMAQSVAVAVGDIGDELVSRLSKKAEALKVGPGMDKASEMGPLVTKEHLERVKGYVDLGVKEGAKLVVDGRDLKLQGYENGFYIGGCLFDHVNKDMRIYKEEIFGPVLSVVRVKTFEEAAKLINDHEYGNGVSIYTRDGDAGRTFASKIQVGMVGINVPIPVPMAFHSFGGWKRSLFGDSAMHGMEGIKFYTKLKTVTSRWPSGIRSNAEFVMPTMK

SEQ ID NO: 92883 - protein, 156 aa, Unknown
  Bacterial polypetide isolated from the Sargasso Sea
GPVISETQYNKIQTLIQKGIDEGAKLIAGGTGKPDGLDKGYFVKPTVFADVNNDMEVARTEIFGPVLSVIPFETEEDAIKIANDTAYGLTNYIQTQDSQKVQRVARKLRSGMVDVNGAGIAVDAPFGGFKHSGIGREAGEHGLEEFLEVKAVGGWS

SEQ ID NO: 92884 - protein, 485 aa, Unknown
  Bacterial polypetide isolated from the Sargasso Sea
YSDKKSGKGPIFNPAIGEQIAEVELASKATVEMAIESSAKAFLKWSKTTPINRARILSKYKDLLIKNMEELAVLVSEQHGKTIPDAKGSVQRGIEVVEYATGITDSLKGDHSANVGTNVDSHTLRQPLGVCAGITPFNFPAMVPMWMYPVSIACGNTFVLKPSEKDPSCPIRLAELAIEAGLPAGVLNVVNGDKEAVDTLLENKTVQAISFVGSTPIAEYVYHTGTKNNKRVQALGGAKNHMVIMPDADVNKTTDAIIGSAFGSAGERCMAISVAVCVGKQTKEKIKTKLLEETAKLNVGPYTDEKSDFGPLNNKAHFEKVLGYIDTGEKEGAKLLADGRKFKKQGYENGYFVGPTIFDDVKPDMKIYKEEIFGPVLSMMTTETYEDALKLVNDHELGNGAAVFTKSGNIAKHFTENAKIGMIGVNVPIPVPVAYHSFGGWKRSLFGDHSMHGPEGVRFYTKLKTATVTWVEDNAGPEFTIPVLS

SEQ ID NO: 92885 - protein, 335 aa, Unknown
  Bacterial polypetide isolated from the Sargasso Sea
MKIKIGINGLGRIGRMVIRSIYEKNYKNIEIKHINNRSNSETASQLLKYDTIHGKFNCQIKSDKNYLIINNKKITYTQHTNIDDINWKKYGADIVLECTGKFNSKEKLIPHIKNGAKKVIVSAPCKKTDKTVVFGVNENVIKKEDKIISAASCTTNCLAPIANIINDSFIIEKGFMTTIHSFTTDQRLLDNSHKDPRRARSAVQSIVPTSTGASKSIGDIIPDLKGKLEGVAMRVPTPNVSLIELVFCTKKNLTIDKINNSLINSSKKKLKGILDVTKEKLVSTDFNHNPNSAIVDSSLTNVVGKNMGKISAWYDNEWGFSNRMCDLVEFINKKI

SEQ ID NO: 92886 - protein, 331 aa, Unknown
  Bacterial polypetide isolated from the Sargasso Sea
RAALGGVERDDSCPQRDTRLDVVHVNEISGGAETTAHLLEFDSLQGRWRANIETESEDAISIGGKRIGFTDAADPGSVPWGELGCDVVLECTGKFRSRETLKGYFERGVKRVIVAAPVKGVDVLNIVMGVNDDRYDRVSHDLVTAASCTTNCLAPVVKVVHEAFGIRHGQITTIHNPTNTNVVIDAHHRDLRRARSAMLSLQPTTTGSATAIGLIFPELVGKLNGHAVRVPVMNASLTDCVFELNRETDSDEVNNLFWEAAAGPLAGILGFESRPLVSADFARDSRSSIIDGPSTMVTDGTLLKVYAWYDNELGYSCRMVDLAKKLIAEGP

SEQ ID NO: 92887 - protein, 405 aa, Unknown
  Bacterial polypetide isolated from the Sargasso Sea
GTKEDIDKAVSAALEAFSTFQQTTKEQRIELLNNIIGEYENRYDDFVQIITKEMGAPIWLSEAAQAKTGIKNIHETLDALKDYEFERPEGDYTLIKEPIGVIGMITPWNWPMNQITTKVSAALAAGCTMVLKPSEISPYCAMLLAEVFDKAGVPNGVFNVVNGYGPTVGAALSEHPDVAMMSFTGSTRAGIAVAQASAISVKRVHQELGGKSSNIILDDVADLEKSVKGGAGHCFLNSGQSCNAPTKMLVSAKNYDKAVEVAVATANNTTVGDPNGEFRIGPIANKTQYEKIIKLIEIGIEEGATLVAGGVEKPEGCEKGYYVRPTVFANVTNDMTIAKEEIFGPVLVLIKYESEDEAISVANDTEYGLAGYVQGEPEHAREVAGKIRAGQVIINGGARGTGAPF

SEQ ID NO: 92888 - protein, 412 aa, Unknown
  Bacterial polypetide isolated from the Sargasso Sea
LIVSDHGKVYEDAKGSLTRGLEVVEFACGIPQVLKGEFSENVGTNVDSWSMRQPLGVVAGITPFNFPAMVPMWMFPIAIACGNTFILKPSEKDPSCSIKLAQLLKEAGLPDGVFNVINGDKESVDAILENKDIKAVSFVGSTPIAKYIYENAAKNEKRVQALGGAKNHLVVMPDCDIDGAVNGLMGAAYGSAGERCMAQSVAVAVGSIGDELVSRLSKKAEALKVGPGMDKNSEMGPLVTKEHLEKVKGYVDLGVKEGANLVVDGRNLKLQGYENGFFIGGCLFDNVKKNMRIYKEEIFGPVLSVVRVKTFEEATKLINEHEYGNGVSIYTRDGDAGRTFASKIQVGMVGINVPIPVPMAFHSFGGWKRSLFGDSAMHGVEGVRFYTKLKTITSRWPSGIRSDAEFVMPTMK

SEQ ID NO: 92889 - protein, 480 aa, Unknown
  Bacterial polypetide isolated from the Sargasso Sea
MYSKFGQFIDGKWQPSEKKETYDVINPATEELIGKASKATKADVLKALKSAEKGFQIWKKTPAWKRSYKIRKIADLMRERKKELAKWLALEVGKPLVEGEGEVGGGADIFEWNAEETKRIFGQTVESRFEDTRVQVIYQPVGVVAALIPWNFPIILASRKISTALAAGCSVIVKPDVITPGAVMELMNIMNDAGIPPGVVNLLSGDPEEVSNELISSNIVKKVSITGSTRVGKLILKKAADKVQRVTMELSGHAPFIVFEDSNIDKVTDMAITSKYRNNGQVCISPSRFYIHESKKNEFAKTFVEKTKKLKLGDGMKEGVNLGPITTKKRLEEIEKLVEKTKKEGGKVLYGGKRPAGFNKGYFYEPTIIDNVQDDFTVMTEEPFGPITAITTFKNFDEVIKRANKHDCGLAGYVCTNSMEKAFKASEQLETGVVAVNTPVVATAETPFGGIKQTGYGREGGSVGIKDYLNIKYTHLGLSG

SEQ ID NO: 92890 - protein, 270 aa, Unknown
  Bacterial polypetide isolated from the Sargasso Sea
LELETCISGHPDIDMVSFTGSTRAGKLITKNAAETIKRVCLELGGKGGNIVFADSYPNAVRDGIKNVMSNSGQSCDAPTRMLVEKSIYERAVSEAVDEANKIKVDIASKKGDHIGPVVSKVQYDKIINLIKDGINEGATLAAGGPEMPNGLNKGYFIKPTIFTDVTNDMQIAKKEIFGPVLSIIPFETEEEAIRVTNDTEYGLGNYLQTEDKEKAKRVSKKLRSGIVYINGNSPDSGTPFGGYKQSGNGREGGSWGLEEYLEVKTITGWK

SEQ ID NO: 92891 - protein, 490 aa, Unknown
  Bacterial polypetide isolated from the Sargasso Sea
MSEIKTYKYYAGNKWYEPSSGEYFESEDPSIGKVWAKLPDCNEVDINIAVKSAKKAFYEGPWGKIHSAERGRVLNRIGDIIAKNAERIGQIETKDNGKLPKNITPSLTSWQTESFYYYAGMCDKFEGRLIPSEVPNMHNYLKWEPFGVVALVLPWNSPIGTLIWKLAPALAAGNTVVIKPSERASCSTLELMSILEEADLPEGLINVVTGFGTTTGAPLIEHDDVRMISFTGGTKGGTAASLSASKKVKPIIMELGGKSPQIIFKDADLNLAVNGVVSGIFPVTGHSCISGSRILVHKDIKEKFTKKLLRVVRKAKVGHPNDSSTQIGPIANKEQYEFILSKINDAEKRGLKLLIDGRSEKRTEGYYIGPTIFDNVPNEDDLAQNEVFGPVASLQSWDNENEVVNIANDSIYGLAAGIWSKDVNKAIRTADKIEAGTVYINNYFNASTQSPVGGFKQSGYGRENGWEGMQCYMQTKSTWLSTEPSQPDPF

SEQ ID NO: 92892 - protein, 281 aa, Unknown
  Bacterial polypetide isolated from the Sargasso Sea
MYSKFGQFIDGKWQPSQNNETYDVLNPATEEVIGKASKADEEDVNKALKSAEKGLEVWRNTPPWQRSKIIRKIADLMRERTDVLAKWLTLEVGKPLSEAKGEVGGAADIFEWNSEETKRIYGQIVESRFEHTRMYVKYEPVGVVAGLIPWNFPIVLSSRKISTALAAGCSVICKPDVITPGSVMELMNIINDAGVPPGVVNLLSGDPAQISSQLISSDIVKKVSITGSTRVGKLILKQAAEKVQRVTMELSGHSPFIVFDDVDINKVTDMAITAKFRNNGQ

SEQ ID NO: 92893 - protein, 335 aa, Unknown
  Bacterial polypetide isolated from the Sargasso Sea
MAIKIGINGMGRIGRMIVRSIFENRNKNLKIQHINNRSNSETAGKLIKYDSIHGKFNADIKFDENNLIINKQKISFSQELKIEKINWKKYDVDYVLECTGKFNSREKLEAHIKNGAKKVIVSAPCKNPDKTIVFGVNDSTLSKRDKIISAASCTTNCLAAVVDVIHKKFEIEKGFMTTIHSFTSDQRILDNSHKDPRRARSASQSIVPTSTGASKAIGEIIPSLKGKLEGVAMRVPTPNVSLVELVFCTKKEINIKNINNEFELASKRELKRILEITYEKLVSVDFNHHSASAIVDASLTSVVGTNMGKISAWYDNEWGFSNRMCDIAENLHKIS

SEQ ID NO: 92894 - protein, 157 aa, Unknown
  Bacterial polypetide isolated from the Sargasso Sea
WTTSFKVQYDKVINLINAGIKEGATLAAGGPDLPDGLNKGYFVKPTIFTDVNNDMRIAREEIFGPVLSIIPFETEEEAIAIVNDTSYGLGNYLQTEDKEKAQRVARKVRAGTVYINGQGTDVGAPFGGYKQSGNGREGGVWGFNEFLEIKAITGWKH

SEQ ID NO: 92895 - protein, 310 aa, Unknown
  Bacterial polypetide isolated from the Sargasso Sea
LLKDAGLPDGVFNVINGDKEAVDAILTNQNIKAVSFVGSTPIAKYIYENAAKNEKRVQALGGAKNHLVVMPDCDLDGAVNGLMGAAYGSAGERCMAQSVAVAVGDIGDELVARLSKKAEALKVGPGMDKNSEMGPLVTKEHLEKVKGYVDLGVKEGAKLVVDGRNLKLQGYENGFYIGGCLFDHVNKDMRIYKEEIFGPVLSVVRVKTFDEATKLINEHEYGNGVSIYTRDGDAGRTFASKIQVGMVGINVPIPVPMAFHSFGGWKRSLFGDSGMHGAEGVKFYTKLKTITSRWPSGILFNAEFVMPTMK

SEQ ID NO: 92896 - protein, 139 aa, Unknown
  Bacterial polypetide isolated from the Sargasso Sea
IDEGAKLLSGGISDIKQKGFYAKPTLFDGLKENMTIAQEEIFGPVLGILSVKNDEEALQVASNSKYGLHASVFTQDINRAFHLAKSLPCGTVSVNTFSEGDIKTPFGGYKQSGSLSRDQGTEALNSFLQTKTIWISHNS

SEQ ID NO: 92897 - protein, 123 aa, Unknown
  Bacterial polypetide isolated from the Sargasso Sea
RVDRKGFFFEPTIYSDVKPNMTIAQEEIFGPFLSVLDYEDHEEAIHIANDTDYGLAAGVFTKDVDMATKTASRLNGGQVYVNSWFTGSIATLFGGYKQSGYSREKGQQAIKSYLQLKNVGIQL

SEQ ID NO: 92898 - protein, 497 aa, Unknown
  Bacterial polypetide isolated from the Sargasso Sea
MNLIQHFVNGNLSKGDSNRRGKVFNPATGEQTSEVILGSKKDLDNTVLIAKKAFESWSLKPPLQRARVMFKFKELIEKNSDEITKMIVEEHGKVYEDAKGSLTRGLEVVEFACGIPQILKGEFTENVGSEVDSWSIRQPLGVCAGITPFNFPAMVPMWMFPMAIACGNTFILKPSEKDPSCSIKLAELFKEAGLPDGVFNVVNGDKEVVDAILVNEDIQAVSFVGSTPIAKYIYENAAKNEKRVQALGGAKNHCVVMPDCDLDQAVNGLMGAAYGSAGERCMAQSVAVAVGGIGDKLVEKLSRKVEALKVGPGMDKNSEMGPLVTKEHLDKVKGYVDLGVKEGAKLVVDGRNLKLQGYEKGFFIGGCLFDDVKKDMRIYNEEIFGPVLSVVRANDFSEATQLVNDHEFGNGVSIFTRDGDAARSFSSKIKVGMVGINIPIPVPMAFHSFGGWKRSLFGDQHMHGPEGVRFYTKLKTVTSRWPSGIRSNPEFVMPTMK

SEQ ID NO: 92899 - protein, 222 aa, Unknown
  Bacterial polypetide isolated from the Sargasso Sea
MTIKVGINGMGRIGRMIVRSIYENYKGKIVIKHINNRSGSEICANLLKYDSIHGNFSSLVKSGENYIKINKEKISYTQHSIINDIKWKKYGVDYVFECTGKFNSKDQLLPHIVNGVKKVIVSAPCKMADKTIVFGVNHKKINKNDRIISAASCTTNCLAPVADVINKNFIILNGFMTTIHAFTSDQRILDNSHKDPRRARSASQSIVPTSTGASKAIGEIIP

SEQ ID NO: 92900 - protein, 192 aa, Unknown
  Bacterial polypetide isolated from the Sargasso Sea
DDEVISAASCTTNCLAPVVNVLNNNFKIEKGFMTTIHAFTSDQRILDNSHKDPRRARAASQSIVPTSTGASKAIGEIIPSLIGKLEGVAMRVPTPNVSLIELVFCTKKEIDVQKINDVFETASKNELNKILEITHEKLVSIDFNHHSASAIVDASLTSVVGTNMGKISAWYDNEWGFSNRMCDIAENLHNNS

SEQ ID NO: 92901 - protein, 382 aa, Unknown
  Bacterial polypetide isolated from the Sargasso Sea
KDFASKLQTVQGASHTKSFIKYLKAFDFEKPLGDHAQDQRIIYEPKGVCVLITPWNWPMNQVCLKVIPALAAGCTMILKPSELAPLSSMILAELIDEAGFPKGVFNLVNGDGETTGNALTSHKDVNMISFTGSTRAGALISQNAAKDFKRVSLELGGKGANIIFKDADTEAIERGAARCFRNSGQSCNAPTRMLVEKSIYHDAVNRLKKFANEYKVDIPQKEGDHIGPVISETQYNKIQGLIKKGIDEGANLIAGGPGKPEGFEDGYYVKPTVFADVNNNMEIARTEIFGPVLSVIPFESEEEAIEIANDTPYGLTNYIQTEDQEKVKRVARKLRSGMIVANTASLAVDAPFGGFKHSGIGREGGKEGLLEFLEVKSIGGWN

SEQ ID NO: 92902 - protein, 470 aa, Unknown
  Bacterial polypetide isolated from the Sargasso Sea
NPRTGDYDFEIKITDSDRLSEQAKNSRAAQQKWSSKTLDERILALQELKNSLIRNGELIVQALSIDTGRTTISKRELDGLCGSIDRWCEEAILYIDDSERQSKAIPSISIKKHRDPYPLLGVISPWNFPLLLSFIDAVPALLAGCTVIIKPSEITPRFVEPLMMAISEVEELENVISFVHGDGSTGANLIKYVDIVAFTGSVSTGKKVAAAAAKKFIPVCLELGGKDPAIVMKDSDIDRATTSILRASTIATGQACQSLERIYVDAVICDEFTNLLTEKSKKIELSLNEGDGGMIGPLIFEKQAETISEHIKDAKNKGAKIHCGGEIENHHGGLWIRPTVMSHVTHDMKIMTDETFGPIMPIMSFNSTQEAIDLANDSRYGLSAAVFGKNHEEITEIAKKINCGGISINDAGLTSMIFEEEKNTYKNSGMGPSRNGPEGFTRFFRKKALFLNKGNVFSMEDIFKANNPRK

SEQ ID NO: 92903 - protein, 481 aa, Unknown
  Bacterial polypetide isolated from the Sargasso Sea
MLKDPSLLRQQCYINGQWCDAQSKETVAIANPATGAVIGSVPVMGQAETQAAIAAAEAALPAWRALTAKERGAKLRRWFELLNENSDDLALMMTTEQGKPLAEAKGEVTYAASFIEWFAEEAKRVYGDTIPGHQGDKRIMVIKQPVGVTAAITPWNFPAAMITRKAAPALAAGCTMVVKPAPQTPFTALALAVLAERAGIPAGVFSVITGDAIGIGNEMCSNPIVRKLSFTGSTQVGIKLMEQCAPTLKKLSLELGGNAPFIVFDDANIDAAVEGAMIAKYRNAGQTCVCANRIYVQEGVYDEFARKLSIAVGKLKVGEGITEGVTTGPLINRAAVEKVQSHLEDALSKGATVVAGGKPHSLGGNFFEPTVLTHVDSSMRVAREETFGPLAPLFKFTDVDDVIKQANDTEFGLAAYFYGRDISLVWKVAEALEYGMVGVNTGLISTEVAPFGGMKSSGLGREGSKFGIEEYLEIKYICMSV

SEQ ID NO: 92904 - protein, 440 aa, Unknown
  Bacterial polypetide isolated from the Sargasso Sea
MNLIQHFVNGKIIPGKSERRGKVFNPAIGEQESEVILGLKSDLDETVEIAKKAFDTWSLKPPIQRARIMFKFKELIEKNSDELTKMIVSEHGKVYEDAKGSLIRGLEVVEFTCGIPQVLKGEFTENVGTDIDSWSIRQPLGVCAGITPFNFPAMVPMWMFPMAIACGNTFVLKPSEKDPSISIKLAELFQEAGLPDGVFNVINGDKEVVDAILTNKDIKAVSFVGSTPIAKYIYENAAKNEKRVQALGGAKNHCVVMPDCDLDQAVNGLMGAAYGSAGERCMAQSVAVAVGNIGDNLVNELSKKVEALKVGPGMDKKSEMGPLVTKEHLEKVKGYVDLGVKEGAKLVVDGRNLKLQGYENGYYIGGCLFDHVKENMRIYKEEIFGPVLSVVRAKDFDEATKLINNHEFGNGTSIYTRDGDVGRTFASNIKIGMVGINIPI

SEQ ID NO: 92905 - protein, 266 aa, Unknown
  Bacterial polypetide isolated from the Sargasso Sea
YWFLANATQPKSPGRQREVDIVIEATGFFTERDKAAVHIHSGGAKRVIISAPGKNDDLTIVMGVNDHLYSADKHFVVSNGSCTTNGLAPAAQVLHQHFGIKHGLMNTTHAYTNSQALHDQPEKDLRGARAAALSIVPYSSGAAKALGKVIPELDGRLTGYSLRVPVPVVSIVDLTVTLERDVTEEEVNNAFRNAAATGPLKGILGYSDEPLVSSDYQGDPRSSIIDGLSTLVIGGNMVKILAWYDNEWGFSNRLVDLALLMAKNER

SEQ ID NO: 92906 - protein, 437 aa, Unknown
  Bacterial polypetide isolated from the Sargasso Sea
MTELKKYKMFIGGEWVESDTKKTFETLNPENNKPWAVVPEASANDVDKAVKAAQKAFEGEWSKLLPRDRGNYLRAIANKLRENAELLGKIETIDTGKLFRETNKQANYIAEYYDYYAGLADKVEGTVLPIDKPNIQAITTRIPIGVIAAIIPWNSQMLLTVTKLAPALAMGNTVVIKSSELAPAVMFEFAKLVEETGIPKGVVNVITGFGDPCGKALTTHNLVEKIAFTGGPETARHIIRNSAENLSEVSLELGGKSPVAVFDDAHQENAINGITAGIFGASGQSCIAGSRLYLQDGIYNEFLDKLTARAEKIKIGAPMDPESEMGPLSNFKQLEIIEKNIKLTVDQGGKIKCGGKRDTLSNEGYYFSPTIIECDNHNLPVAENELFGPVLSVMKFKTEDEVIEKMNDNQYGLSSGVYTSDFSRGLRVSKAIRAGIT

SEQ ID NO: 92907 - protein, 193 aa, Unknown
  Bacterial polypetide isolated from the Sargasso Sea
PTRMLVEKSIYDDAVNRLKKFANEYKVDVPQKEGDHIGPVISETQYNKIQGLIKKGIDEGANLIAGGPGKPDGLEDGYYVKPTVFADVNNNMEIARTEIFGPVLSVIPFETEEEAIAIANDTPYGLTNYIQTEDQEKVKRVARKLRSGMIVANTASLAVDAPFGGFKHSGIGREGGKEGLLEFLEVKSIGGWN

SEQ ID NO: 92908 - protein, 497 aa, Unknown
  Bacterial polypetide isolated from the Sargasso Sea
MKLIEHFVGGKLFSGSSDRKGKVFNPATGEQESEVNLASKSDLNQAVEIAKKAFETWSLKPPLQRARVMFKFKELIEKNSDELTKLIVSEHGKVFEDARGSLTRGLEVVEFACGIPHLLKGEFSENVGTNVDSWSMRQPLGVVAGITPFNFPAMVPMWMFPIAIACGNTFILKPSEKDPSCSIMLAQLLSEAGLPEGVFNVVNGDKESVDAILENSDIKAVSFVGSTPIAKYIYENSAKNEKRVQALGGAKNHLVVMPDCDLDGAVNGLMGAAYGSAGERCMAQSVAVAVGDIGDELVSRLSKKAEALKVGPGMDKTSEMGPLVTKEHLERVRGYVDLGVEEGAKLVVDGRDLKLQGYENGFYIGGCLFDHVNKDMRIYKEEIFGPVLSVVRVKTFEEAAKLINDHEYGNGVSIYTRDGDAGRTFASKIQVGMVGINVPIPVPMAFHSFGGWKRSLFGDSAMHGMEGIKFYTKLKTITSRWPSGIRSNAEFVMPTMK

SEQ ID NO: 92909 - protein, 175 aa, Unknown
  Bacterial polypetide isolated from the Sargasso Sea
VDEANKIKVDLASKKGDHIGPLVSKVQYDKVVNLINEGIKEGATLAAGGPDLPNGLNKGYFVKPTIFSDVNNDMKIARTEIFGPVLSIIPFETEEEAIAITNDTSYGLGNYLQTEDKEKAKRVARKVRAGTVYINGQATDTGMPFGGYKQSGNGREGGVWGFTEFLEVKAITGWN

SEQ ID NO: 92910 - protein, 145 aa, Unknown
  Bacterial polypetide isolated from the Sargasso Sea
ISYIEKGKQNADLIIGGERIHLDGKGCYVQPTIFNNVKANDVIAKEEIFGPVLSVISFDTEEEALSIANDSEYGLAASVWTDDLSRALRVSDHLHAGTVSVNTVDALNTVTPFGGVKQSGYGKDLSLHSFNKYTSLKTRWIKYKA

SEQ ID NO: 92911 - protein, 279 aa, Unknown
  Bacterial polypetide isolated from the Sargasso Sea
MDKLLRFRKDFKEIYVGGRWWPIEASFEDTNPSDNSLWATVPDVEVKDVQNAITSADHAFENWSNLKFNERSHYMIKIAEVLEENKMDIVKALRAEAGGWFGKAMFEAGYLPELFHAAAAANYQAIGEVIPSDSGKFSMAVRRPIGVISVISPWNFPCILTARGMAFALAAGNTVVLKPSEETPYTGGLLWAEIFEEAGVPGGVLNVVTCSRENVAEVGTELVENPLVKGVSFTGSTPVGREIAARAGAHLKKCCVELGGKDALIVCEDAEMDRATGAA

SEQ ID NO: 92912 - protein, 506 aa, Unknown
  Bacterial polypetide isolated from the Sargasso Sea
MTTVPAYTSDADVGHYIDGAPVAGRSGRFQDVLNPSLGRAVRRVALAGNDEVEQAVASAHAAFPDWAATPPIRRARVLHRFLQLMNEHRDTLAAIITAEHGKVFSDAQGEVARGIDIVEFACGVPQLLKGDFTDQVSTGIDNWTMRQPLGVVAGITPFNFPCMVPCWMFPVAIATGNTFVLKPSERDPSAALFIADLLTQAGLPAGVFNVVQGDKGAVDALLDHPDVQAVSFVGSTPIAAYVQQRAVQSGKRVQALGGAKNHLVVMPDANLEQAVDALIGAAYGSAGERCMAISVAVLVGDIADQIVPLVAERARKLVIGDGMSPEVEMGPIVTGDALKRIEGYIEQGVNEGAQLVVDGRGLRVPGREAGFFTGGTLFDHVTPDMRIYKEEIFGPVLGCVRVKDFGEAVDLINAHEFGNGVSCFTSDGGIAREFARRIQVGMVGINVPIPVPMAWHGFGGWKKSLFGDMHAYGEEGVRFYTRQKSVMQRWSSSIGKGAEFAMPTAK

SEQ ID NO: 92913 - protein, 199 aa, Unknown
  Bacterial polypetide isolated from the Sargasso Sea
WSSCDAPTRMLVEKSIYEKAVEEAADEAKKIGVDLPSKSGDHIGPVINKSQFEKIQSLIQSGIDEGATLVAGGAGRPSNLEKGYYVKPTVFTNVSNDMRIAKEEIFGPVLSIIPFESEEEAISITNDTPYGLGNFLQTENKERARRVAKQLRAGVVQINGNAPDAGTPFGGYNQSGNGREGGTWGLHEYLEVKAISGWK

SEQ ID NO: 92914 - protein, 477 aa, Unknown
  Bacterial polypetide isolated from the Sargasso Sea
MSADKHLQSWQERFEMAEAMQPLLGKLYRNQGVEVVVYGKPLLNASTIEIIKAHRLVRRHVGEKLRLRESFPFVQALSRLAVKQCKVDIGKLAVKYWAEHTDTNEIESYMARELAAAIDHADDIAPRDVVLYGFGRIGRLLARLLIERTGRSNKLRLRAIVLRGGKKGDLEKRASLLRRDSVHGPFNGSVEVDEENNAIIANGTYIQVIYANSPDEVDYTKYGITDALVVDNTGIWKDEAGLGLHLKSPGASKVLLTAPAKGAIKNIVYGVNEGDITPEDIIVSAASCTTNAITPVLKAVNDKYGIENGHVETIHSYTNDQNLIDNYHSADRRGRSAPLNMVITETGAAKAVAKALPVLAGKLTGNAIRVPTPNVSMAIISMNLNAETNKDELNEYLKDTALQSPLQNQIDYTDSTEIVSSDLVGSRYAGVVDSQATIAEGKRAILYVWYDNEFGYSCQVVGVMQTMLGLTTLSLPA

SEQ ID NO: 92915 - protein, 481 aa, Unknown
  Bacterial polypetide isolated from the Sargasso Sea
MLKDPSLLRQQCYINGQWCDAQSKETVSIANPATGAVIASVPVMGQAETQAAIAAAEAALPAWRALTAKERGAKLRRWFELLNENSDDLALMMTTEQGKPLAEAKGEVTYAASFIEWFAEEAKRVYGDTIPGHQGDKRIMVIKQPVGVTAAITPWNFPAAMITRKAAPALAAGCTMVVKPAPQTPFTALALAVLAERAGIPAGVFSVITGDAIGIGNEMCSNPVVRKLSFTGSTQVGIKLMEQCAPTLKKLSLELGGNAPFIVFDDANIDAAVEGAMIAKYRNAGQTCVCANRIYVQAGVYDEFAHKLSIAVGKLKVGEGIGEGVTTGPLINRAAVEKVQSHLEDALSKGATVVAGGKPHSLGGNFFEPTVLTHVDSSMRVAREETFGPLAPLFKFTDVDDVIKQANDTEFGLAAYFYGRDISLVWKVAEALEYGMVGVNTGLISTEVAPFGGMKSSGLGREGSKYGIEEYLEIKYICMSV

SEQ ID NO: 92916 - protein, 415 aa, Unknown
  Bacterial polypetide isolated from the Sargasso Sea
MQDKKKFYINGKWVDPKKKNDFNVINPSTEESCAVISLGSVEDINTAVSTAKKAFESWAFTTKEERIKLLESLYSLYKKRWAEMAEAISLEMGAPIDFSTQLQAGTGASHIKSYIKVLKDYKFEKILGDHAPNNKILYEPKGVCALITPWNWPMNQVCLKVIPALATGCTMVLKPSEIAPLSSMLLAEMIDEVKFPAGVFNLVNGDGAVAGNALTSHPDVNMISFTGSTRAGALISKNAANDFKRVSLELGGKGANIIFKDADAEAVERGAMRCFRNTGQSCNAPTRMLVEKSIYNKTIDKVKEVAAKVKIDLASKKGEHIGPVVSKTQFDKIQTLIQKGIDEGAKLVAGGTGKPKGLDKGYFVKPTAFADVNNNMQIARTEIFGPVLSIIPFETEDEAISIANDTPYGLLNFIK

SEQ ID NO: 92917 - protein, 153 aa, Unknown
  Bacterial polypetide isolated from the Sargasso Sea
ISQKQYDKIIELIKSGIEEGATLVAGGPEKPTGLEKGFFIKPTIFTDVSNDMRIAKEEIFGPVLSIIPFEDEDEAVSIVNDTCYGLGNYVQTQDIEKAKRVARKFRSGGVYINGNSADPGTPFGGYRQSGNGREGGDWGLEEYLEIKTICGWE

SEQ ID NO: 92918 - protein, 201 aa, Unknown
  Bacterial polypetide isolated from the Sargasso Sea
GEVCSAGSRLIIQKDIEKDFINKVVQLSKKMQPSDPLNPDSFAGAIVNTEQLEKINKYVNIGKKEGADIEVGGNITMKETGGCYFEPTIFKNVKNNMKIAQEEIFGPVLTTLAFSNFDEAVSIANDSEYGLAAGVWTNDINKAIRASREIRAGTVYINNYEEGVDSTIPLGGYKQSGIGRDNGAQALENYLQVKSTWVKIT

SEQ ID NO: 92919 - protein, 241 aa, Unknown
  Bacterial polypetide isolated from the Sargasso Sea
EISNIFFEDVMEKDDDFFDKCIEGFVMFNLNQGEVCTCPSRALIQESIYDKFMERAIARTKAVKQDNPLKMETMIGAQASVEQMEKIKSYLELGKKEGAKVLTGGSVAKLNSGLEKGNYIQPTIFEAKNNMRISQEEIFGPVVSVIKFKDEAEALKIANDTLYGLGAAVWTRDGNTAHRMGRAIQAGIVWTNCYHAYPAHSPFGGYKQSGVGRETHKMMLNHYRQNKNLHVSYAEKKLGFF

SEQ ID NO: 92920 - protein, 97 aa, Unknown
  Bacterial polypetide isolated from the Sargasso Sea
NVSLVDLSFIASRETSVDEINEVVKAASEGALKGVLDYNDGPLVSIDFNHNPASSTYDATMTKVQEGTLVKVCSWYDNEWGFSNRMLDTTLALVNAD

SEQ ID NO: 92921 - protein, 317 aa, Unknown
  Bacterial polypetide isolated from the Sargasso Sea
YENYKKRWPDIAEAITLEMGAPKDFASKLQTGTGASHIKSFIRYLKNFEFEKPLGEHAPNQRLIYEPKGVCALITPWNWPMNQVCLKVMPAIASGCTMVLKPSELAPLSSMILAEIIHEVKFPKGVFNLINGDGDTTGDALTSHPDINMISFTGSTRAGALISQNAAKDFKRVSLELGGKGANIIFKDADPEAIERGALRCFRNSGQSCNAPTRMLVEKSMYDDAIERLKKYTENFEVADPKKEGEHIGPVISETQYNKIQTLIQKGIDEGAQLIAGGTGKPEGLNKGYFVKPTVFADVNNDMEVARTEIFGPVLSV

SEQ ID NO: 92922 - protein, 335 aa, Unknown
  Bacterial polypetide isolated from the Sargasso Sea
MKIKIGINGMGRIGRLVLRSIIEKNNKNFEIKHINNRTRIEVVSSLIKYDSIHGPLNVKINNSKNRLTINKKKISYSQETNIENIKWNKYGVDIVFECTGKFNSKDKVLSHIKNGAKKVIVSAPCKNADKTIVFGVNEKKISKNDKVISAASCTTNCLAPVADVLNKNFGIKNGFMTTIHAFTSDQRILDNSHKDPRRARSASQSIIPTTTGASKALAEIIPSLKGKIGGIAMRVPTPNVSLIELVFNTNKKLSEKLINNAFKKASKKQLKGILDITDEKLVSVDFNHNSSSAIVDSSLTSVVGDKMGKISAWYDNEWGFSNRMCDLAKYLQKIS

SEQ ID NO: 92923 - protein, 135 aa, Unknown
  Bacterial polypetide isolated from the Sargasso Sea
GAKLVAGGTGKPDGLDKGYFVKPTVFADVNNNMEVARTEIFGPVLSVIPFETEEEAIKIANDTAYGLTNYIQTQDSEKVQRVARKLRSGMVDVNGAGIAVDAPFGGFKHSGIGREAGEHGLEEFLEVKAVGGWSN

SEQ ID NO: 92924 - protein, 102 aa, Unknown
  Bacterial polypetide isolated from the Sargasso Sea
MEIARTEIFGPVLSIIPFENEDEAISIANDTPYGLTNYIQTQDKEKVKRVARKLRSGMVDVNGVGIAVASPFGGYKHSGIGREAGTEGLIEFLEVKTVGGWN

SEQ ID NO: 92925 - protein, 483 aa, Unknown
  Bacterial polypetide isolated from the Sargasso Sea
MNQVSMLINGERTMARDGATFERRNPLDDTVASTAPAATVADAQAAVHAAAAAFPAWSAMGPGERRALLNRAADALEEKDDAFALAMAAETGASRLWADFNVKLAADGLREAAAMITQISGEVIPSDVPGSLALGVRQAAGVVLGIAPWNAPVILGVRAIALPLACGNTVVLKGSEICPATHGLIIEALQDAGLPRGVVNFVTNAPANAGDIVEAIIAESAVRRVNFTGSTRVGRIVATQCAKYLKPSVLELGGKAPFLVLHDADIDAAVQGAAFGAFANSGQICMSTERIVVDAAIADEFVARLAEKAKSLPLGDPRKGPAVLGSVVDMATVRRCNDLIDDALAKGATLVCGGKSETTLMPATLLDHVTADMHIYREESFGPVKAIVRVDGDEEAIACANDNEYGLSAAVFSRDVARALTVAKRIESGLCHVNGPTVHDEAQMPFGGMKSSGFGHFGGKAGIAEFTDLRWITVQTTPRHYPF

SEQ ID NO: 92926 - protein, 519 aa, Unknown
  Bacterial polypetide isolated from the Sargasso Sea
MGYNIINGELRPASDGETFESRNPAWSDDCLGVFPLSTKDDVHDALISAREAFSQWSQTPAPTRGQIIGNMGRLLMEHKDDIVRVESREIGKTLKESAGEVQEAIDTCLFFQSEGRRLYGQTVNSELPDKELFTYRRPLGVCGIINASNFPSAVPFWKMIPAIMCGNTCVWKSPQDSPLLSFMLTRIMHEAGLPNGVVNLIHGKGSGAGQFLVDSVDEGLVNKISFTGSTPVGKMIGEVCGRNLVSCSLELGGKNPLVVMPSANIENAVEGAYWAAFGTAGQRCTSLGNLILHKDIYEEFMDKFMAKVKETKIGDSLRNDDVLYGSMLSEKYASDFLRDLGMCETDGATKLWGEGKITNENKPENFQGDASEGAYMWPHVYADVTEEMQCFQQEIFGPVVTVVRAEDFENALHLANASPFGLSSACYTNDRLEAYRFKTGIKAGMTGINNSTTGAEAHLPFGGVKDSGNGTRESGIWVIEAYSYWHAVNDELSGKLQLAQMDVDEIHVKEAEADYASLA

SEQ ID NO: 92927 - protein, 187 aa, Unknown
  Bacterial polypetide isolated from the Sargasso Sea
MLISSKNYDKAVEIAVATANSTTVGDPNGEFRLGPIANKVQYEKILKLIEIGIEEGATLVAGGVEKPDGCDKGYYVRPTVFANVTNDMTIAKEEIFGPVLVMIKYNNEEEAIKIANDTEYGLAGYVQGDPNHARDVARKIRAGQVIINGGARGTGAPFGGYKASGNGREHGLHGIEECLETKAIIAP

SEQ ID NO: 92928 - protein, 480 aa, Unknown
  Bacterial polypetide isolated from the Sargasso Sea
MYEKFGQFIDGKWQKSSDGGTYEVINPANEEVLGKASKATPEDVDRALKSAAKGLEVWKKTAPWQRSYIIRRIADKMREKQDVLAKWMTLEVGKPFAEAKGEVGGAADIFEWNAEETKRIYGQTVESRFEDTRVHVYYQPVGVVAALTPWNFPAVLSARKISTALAAGCSVIVKPDVITPGIVMEMVDICRECGVPPGVVNLLSGDPPSIAQQLIASDIVKKISITGSSRVGKLILKQAADKVQRVTMELSGHSPFIVFDDADIKKAADMAIAAKFRNNGQVCISPNRFYIHERKKDEFVNLFIEKTKKLKIGDGMDPSTQLGPLTTKKRLNEIEELVEKTKEEGAKVLLGGKRPSGFNKGFYYEPTIFDDVKDDFTIMKQEPFGPLVPMLSFKSFDDVIKRANNHELGLCSYVCTNSMETAHLASEQLETGSVAVNTPMVAIAEAPFGGIKQSGYGREGGSMAIKDYLNIKYTHLGIKG

SEQ ID NO: 92929 - protein, 205 aa, Unknown
  Bacterial polypetide isolated from the Sargasso Sea
MYSKFGQFIDGKWQQSKNKETYEVINPATEEILGNASKASREDVDNALKSAEKGLEIWKNTSPWERSSIIRKIADKMREKRDTLAKWMTLEVGKPFKEAQGEVNGSADIFEWNAEETKRIFGQTVESRFADTRVHVYYQPVGVVAALTPWNFPLVLSSRKISTALAAGCSVIVKPDVITPGTVMELVDICRECGVPPGVVNLLSG

SEQ ID NO: 92930 - protein, 393 aa, Unknown
  Bacterial polypetide isolated from the Sargasso Sea
IDGQKMPTHYPATGEVFHELPKGNANDIGSAIRAAEAAWSDGAWANMPASARGDLVARMAQGIEENIEVLAAIEAADVGKPFRQAAMVLGGAASEGKYWASLGAVLDAEQDKPVNSGGGMGGLPPAEWDVVYRRDPIGIVGLISAWNYPLNVAFRKVAPALVAGNCAILKPSEIAGLSCMFLGKLAQDVGIPKGVFSVVTGDRETGAALVASPSVSMVSFTGSSLTGSKIMEASAPKLSQVALELGGKSAMVIFEDTDIERAVEATIKGCLTNGGQICTAHSRLIVQEGIKDELLTKLKNVLEKIPYCRDPITERERGDRAWETGVTDVIQPVVSASQHEKILGFLNEVEAAGIEIYTGGGVPNLVEVKKSGGYFIQPTILTNVPRNSDAGKR

SEQ ID NO: 92931 - protein, 46 aa, Unknown
  Bacterial polypetide isolated from the Sargasso Sea
MIKVAINGFGRIGKLVFRAIIEQNLKNVQIVAINELGSLESSLHLV

SEQ ID NO: 92932 - protein, 324 aa, Unknown
  Bacterial polypetide isolated from the Sargasso Sea
MGLGGINTDSIFDDISYDDLSVKLNKLKTRYIEGNIPKLTERKERLKKLIDIVENNADALGDAIQSDFGTRHKQLSLMADVRSTLSFANHSYKNLSSWIGPEKRSANFPLNLLGAKAKVHYQPYGVVGIISPWNFPVNLSIGPLVDAFSAGNAGMIKLSEFVPSTSRLLEQLICEKFDESEVVVINGGMQTSIDFTKLPFDHLIYTGSTDIARKVSSEAAKNLVPLTLELGGKSPTILSNGASIDKSVNKILFGKLLNGGQICVSPDYSFIPEQKVEQFIETSRNFISEKFPTIKNNPDYTSLVHQSHYERVKSYIEDARSKGA

SEQ ID NO: 92933 - protein, 490 aa, Unknown
  Bacterial polypetide isolated from the Sargasso Sea
MATNNIQNYQMFIDGQWTEAGNNQRFESTNPENNKPWSSFPDATVNDVNNAVAAAKNAFKSWSASDVKIRAQYLRAIGDQLKNNAEHIGKIETIDSGKLLKETKFQAEYMKDYFYYYAELAEKMENTKIISDIDKPDMEVIEVSEPIGVIACIIPWNSQMFLTATKVAPALAAGNTVVIKSSELAPAPLAEFVKLTEQVELPKGVINLVSGGAEVGKNLTSHKDIGKVLFTGGTETGSHVIRNTAENFAQLTLELGGKSPVIVFEDADIENALNNITTAIFSGNGCSCIAGSVLILHDKIYDEFLHQLKNRAESIKLGSPLEAETQMGPLNNLKQVKFIEKNIELSIKQGAKILCGGKRQNSCYFPPTIIECPDKSINTANTELFGPVLSVIRFSSEEEAINIANDNRYGLSSGVFSENKEICERVSKKIEAGICFTNCYRFISYAASFGGRKNSGYGRESGAEAISDMQLRKTIWTSTARVTEDPFKIR

SEQ ID NO: 92934 - protein, 429 aa, Unknown
  Bacterial polypetide isolated from the Sargasso Sea
MFKFKELVEKNSEEITELIVSEHGKVYEDAKGSLTRGLEVVEFACGIPQVLKGEFSENVGTNVDSWSMRQPLGVVAGITPFNFPAMVPMWMFPIAIACGNTFILKPSEKDPSCSIKLAQLLKEAGLPDGVFNVINGDKESVDAILEHKDVKAVSFVGSTPIAKYIYENAAKNEKRVQALGGAKNHLVVMPDCDIDGAVNGLMGAAYGSAGERCMAQSVAVAVGNIGDELVSRLSKKVEALKVGPGMDKSSEMGPLVTKEHLKKVSGYVDLGVKEGANLVVDGRNLKLQGYENGFFIGGCLFDNVKKDMRIYKEEIFGPVLSVVRVKSFEDATKLINEHEYGNGVSIYTRDGDAGRTFASKIQVGMVGINVPIPVPMAFHSFGGWKRSLFGDSAMHGIEGVRFYTKLKTITSRWPSGVRSNPEFVMPTMK

SEQ ID NO: 92935 - protein, 144 aa, Unknown
  Bacterial polypetide isolated from the Sargasso Sea
INLINEGIKEGATLAAGGPDLPNGLNKGYFVKPTIFSDVNNNMKIARQEIFGPVLSIIPFETEEEAIAITNDTSYGLGNYLQTEDKEKAQRVARKVRAGTVYINGQSTDTGMPFGGYKQSGNGREGGVWGFNEFLEVKAITGWK

SEQ ID NO: 92936 - protein, 105 aa, Unknown
  Bacterial polypetide isolated from the Sargasso Sea
MTIAQEEIFGPVLGVLTVKNDKDALKVASNSKYGLHASVFTQDIDRAFHLAKSLPCGTVSVNTFSEGDIKTPFGGYKQSGSLSRDQGTEALNSFLQTKTIWISHS

SEQ ID NO: 92937 - protein, 471 aa, Unknown
  Bacterial polypetide isolated from the Sargasso Sea
ATGEQKSEVILANKSDLNKAVSIAKEAFKSWSVKPALQRARVMFKFKELIEKNSEELTELIVSEHGKVYEDAKGSLTRGLEVVEFACGIPQVLKGEFSENVGTNVDSWSMRQPLGVVAGITPFNFPAMVPMWMFPIAIACGNTFILKPSEKDPSCSVKLAQLLKEAGLPDGVFNVINGNKESVDAILENKDIKAVSFVGSTPIAKYIYENAAKNEKRVQALGGAKNHLVVMPDCDIDGAVNGLMGAAYGSAGERCMAQSVAVAVGNIGDELVSRLSKKAEALKVGPGMDKNSEMGPLVTKEHLEKVKGYVDLGVKEGANLVVDGRNLKLQGYENGFFIGGCLFDNVKKDMRIYKEEIFGPVLSVVRVKTFEEATKLINEHEYGNGVSIYTRDGDAGRTFASKIQVGMVGINVPIPVPMAFHSFGGWKRSLFGDSAMHGVEGVRFYTKLKTITSRWPSGIRSDAEFVMPTMK

SEQ ID NO: 92938 - protein, 508 aa, Unknown
  Bacterial polypetide isolated from the Sargasso Sea
MNAAVPQTTLALPTAKLLIDGAFVESQSAEWGDIVNPATQEVIGRVPFATLDEVDAAIASAQRAFQTWKTTPIGARLRIMLKFQDLVRRNLERIAHTLTAEQGKTLPDAQGDIFRGLEVVEHACSIGTLQQGEFAENVAGGVDTYTLRQPIGVCAGITPFNFPGMIPLWMFPMAIVCGNTFVLKPSEQDPLSTMQLVELAIEAGVPQGVLNVVHGGKTVVDRLCTHPDIKAISFVGSTRVGTHVYNLGSQHGKRVQSMMGAKNHAVVLPDAHREQSINALVGAGFGAAGQRCMATSVVVLVGKARDWLPELVEKAKALKINAGHEPGTDVGPVVSKAAHARITALIDEGVKAGAKLELDGRNVKVPGYEQGNFVGPTIFSGVTTDMSIYTEEIFGPVVVVLEADTLDEAIALVNRNPMGNGVGLFTQSGAAARKFQSEIDIGQVGINIPIPVPVPYFSFTGSRGSKLGDLGPYGKQVVQFYTQTKTVTARWFDDDATAGGVNTTIALR

SEQ ID NO: 92939 - protein, 497 aa, Unknown
  Bacterial polypetide isolated from the Sargasso Sea
MNSIEHFIDGKTVKGTSKRTAKVFNPATGEVSSNVNLASTSDLNKAVDAAKKAFPSWSEKTPLFRARVLFKFKELIEKNYDELTKIIVSEHGKVYEDAKGSLTRGLEVVEFACGIPQLLKGEFTENVGTNVDSWSMRQPLGVCAGITPFNFPAMVPMWMFPIAIACGNTFILKPSEKDPSCSMKLAELFLEAGLPPGVFNVVNGDKEAVDAIINNKDIAAVSFVGSTPIAKYIYENCAKNEKRVQALGGAKNHCVVMPDCDLDQAVNGLMGAAYGSAGERCMAQSVAVAVGKIADPLVESLSKKVESLKIGPGLDKKSQMGPLVTKEHLEKVKGYVDIGVKEGAKLVVDGRNLKLQGYENGFYMGGCLFDNVKKDMRIYKEEIFGPVLSVVRAKDYGEALSLVNDHEFGNGTSIFTRDGDTGRSFASNVKIGMVGINIPIPVPMAFHSFGGWKRSLFGDQSIHGPEGVRFYTKLKTITSRWPSGIKSDPEFVMPTMK

SEQ ID NO: 92940 - protein, 117 aa, Unknown
  Bacterial polypetide isolated from the Sargasso Sea
YIEPTVFTQVTDEMAIARDEIFGPVLSVLKFSELEELVRRSNATNFGLAAAVWTRDVSRAHDVARRLRAGTVWINCYDVFDAAAPFGGFKQSGFGRELGERGLDPYLETKTVTVNLE

SEQ ID NO: 92941 - protein, 375 aa, Unknown
  Bacterial polypetide isolated from the Sargasso Sea
YYAELAEKMENTKTISDIDKPDMEVTEVTEPIGVIACIIPWNSQMFLTATKVAPALAAGNTVVIKSSELAPAPLAEFAKLTEQVELPKGVINLVSGGAEVGKNLTSHKDIGKVLFTGGTETGSHVIRNTAENFAQLTLELGGKSPVIVFADADIENALNNITTAIFSGNGCSCIAGSVLILHDKIYDEFLYQLKNRAESIILGSPLEAETQMGPLNNLKQVEFIEKNIELSIKQGAKILCGGKRQNNCYFPPTIIECPDKSINTANTELFGPVLSVIRFSSEEEAVNIANDNRYGLSSGVFSENKETCERVSKKIEAGICFTNCYRFISYAASFGGRKNSGYGRESGAEAIRDMQLRKTIWTSTARVTEDPFKIR

SEQ ID NO: 92942 - protein, 480 aa, Unknown
  Bacterial polypetide isolated from the Sargasso Sea
SRKGKVFNPATGEQIADVELASKDIVKMAVENSLQAFDKWSKTTPITRARIFSKYKDLLVQNMNELAELVSKQHGKTIPDAKGSIQRGIEVVEYVTGITSSLKGEHSSNVGTNVDSHTLRQPLGVCAGITPFNFPAMVPMWMFPVAIACGNTFVLKPSEKDPSCPLKLAELAIEAGFPPGVLNCVNGDKESVDALLEDKDVQAISFVGSTPIAEYVYHTGTKNNKRIQALGGAKNHMVIMPDADVEKTTDAIIGSAFGSAGERCMAISVAVCVGKETNNKIKKSLLEKTSKLNVGPYTDEKTDFGPLSSEAHYKKVLGYIDSGEKEGAKLLTDGRNFKKQGYENGYFVGPTIFDEVKPEMKIYKEEIFGPVLSMMTTKKYEDALKLVNDHELGNGAAVFTKSGNIAKHFTENAKIGMIGVNVPIPVPVAYHSFGGWKRSLFGDHSIHGPDGVRFYTKLKTATITWNEDNAGPEFTIPVLS

SEQ ID NO: 92943 - protein, 320 aa, Unknown
  Bacterial polypetide isolated from the Sargasso Sea
MTKLKQYKMFINGEWVDSDTKKTFETLNPENNKPWAVVPEASTNDVDKAVKAAQKAFEGEWPKLLPRERGKYLRAIADKLRENAELLGEIETIDTGKLFRETKKQANYIAEYYDYYAGMADKVEGTVLPIDKPNIQAITTRVPIGVIAAIIPWNSQMLLTVTKLAPALAMGNTVVIKSSELAPAVLFEFAKLVEETGIPKGVINVITGYGDPCGKALTTHNLVEKIAFTGGPETARHIIRNSAENLSEVSLELGGKSPVAVFEDAHQENAINGITAGIFGASGQSCIAGSRLYLQKGIYNEFLDKLTEKANKIKIGAPMD

SEQ ID NO: 92944 - protein, 480 aa, Unknown
  Bacterial polypetide isolated from the Sargasso Sea
MYEKFGQFIDGKWQQSSDKSTYEVINPANEEVIGHASKATPADVDKALKSAAKGLEVWKQTPPWQRSYIIRKIADKMRAKQDVLAKWMTLEVGKPFAEAKGEVGGAADIFEWNAEETKRIYGQTVESRFADTRVHVYYQPIGVVAALTPWNFPLVLSSRKISTALAAGCSVIVKPDVITPGTVMELIDICRECGVPPGVVNLLSGDPPSIAQQLISSDIIKKISVTGSTRVGKLILKQAADKVQRVTMELSGHSPFIVFDDANIEKATDMAISAKYRNNGQVCISPNRFYIQEKKKDEFVNLFIEKTKKLKIGDGMDPSVQLGPLTTKKRLNEVEELVETTKKEGAKVLLGGKRPAGFNKGFYYEPTIFDNVKDDFTIMKVEPFGPLVPMLSFKSFDEVIERANNNDLGLSSYICTNSMEQAHRASELMETGTVAVNTPLVAIAEAPFGGIKQTGYGREGGSMAIKDYLNVKYTHLGIKG

SEQ ID NO: 92945 - protein, 480 aa, Unknown
  Bacterial polypetide isolated from the Sargasso Sea
MYSKFGQFIDGKWQASQNNESYDVLNPATEEVLGKASKAGEEDVNKALKSAEKGLEVWRNTPPWQRSKIIRKIADLMRERTDVLAKWLTLEVGKPLSEAKGEVGGAADIFEWNSEETKRIYGQIIESRFEHTRMYVKYEPVGVVAGLIPWNFPIVLSSRKISTALAAGCSVICKPDVITPGSVMELMNIINDAGVPPGVVNLLSGDPAKISSQLISSDIVKKVSITGSTRVGKLILKQAAEKVQRVTMELSGHSPFIVFDDVDINKVTDMAITAKFRNNGQVCISPARFYIHESKKDEFAKTLVEKVTKLKVGNGMDEDTILGPLTTEKRLNEIEALVEKTKNEGATVLCGGKRPAGFNKGYFYEPTVFDNVKDNFTIAKEEPFGPLVPLLTFKDTDEVVKRANDNDLGLASYIYTNSLEKAHKVSEKMETGTCAVNHPTIAFAEVPFGGIKQTGYGREGGSMAIKDYLNVKYTHFGLNY

SEQ ID NO: 92946 - protein, 426 aa, Unknown
  Bacterial polypetide isolated from the Sargasso Sea
MKTNILINNELIQGDSTPEKIINPVNSELIVEVPQSSEEQVNKAVSAAKKAFATWSKTTPADRSGMLLKLADLIDSKAEEIAKLESLNTGKPFHLALNDELPAISDVFRFYAGACRNMPGAAAGEYMAGFTSMIRRDPVGVIASIAPWNYPLMMAAWKLGPALAAGNTVVLKPSEQTPLTTFFISELLAEVFPEGVVNIVYGIGETVGSSLINHQDVNMISLTGDIATGSKVLEAASNSIKKTHLELGGKAPVIVYDDADIDQLIEGIRAFGYYNAGQDCTAACRIFADKKVYDNVVADLSSAVSSIGLANDEDEKNEIPPLITQEHLSRVSNFVEKAKSLKHIEITTGGSQLGEKGNFYKPTVIAGAKYDDDIAKNEVFGPVVSVTPFRNVDDAVNWANDTKYGLASSVWTKDIKKGMKTAAQLQ

SEQ ID NO: 92947 - protein, 346 aa, Unknown
  Bacterial polypetide isolated from the Sargasso Sea
PAMVPMWMFPIAISCGNTFVLKPSEKDPSCSIKLAKLFKEAGLPDGVFNVVNGDKEAVDALLTNKDVLAISFVGSTPIAKYIYENAAKNEKRVQALGGAKNHCVVMPDCDLDQAVNGLMGAAYGSAGERCMAQSVAVAVGNIGDQLVAKLSKKVESLKVGPGLDKNSEMGPLVTKEHLERVKGYVDLGVKEGAKLVVDGRNIKLQGYEKGFYIGGCLFDNVQKKMRIYKEEIFGPVLSVIRVKDFDSALNLINEHEFGNGTSIYTRDGDVGRTFASKIKIGMVGINIPIPVPVAYHSFGGWKRSLFGDSAMHGTEGIKFYTKLKTITSKWPSGLRSDPDFVMPTMK

SEQ ID NO: 92948 - protein, 388 aa, Unknown
  Bacterial polypetide isolated from the Sargasso Sea
MKDKKNFYINGQWVSPIEPRSFEVINPATEEPCAEISLGGKKDVDAAVTSAKKAFETWGFTTKEERLNLFEKLYDIYKKNWDQMAKTISLEMGAPIDFSTELQTKTGASHIKSFKNILKNFKFEKTLDEEKNQTILYEPKGVCALITPWNWPINQVNLKVIPALAAGCTVVLKPSEIAPLSSMLLAEMMHDAGFPKGVFNLVNGDGAVTGDALTSHPDIDMISFTGSTRAGALISQNAAKDFKRISLELGGKGANIVFKDAGPDAISWSVQRCFRNSGQSCNAPTRMLVEKSIYNETIEKVREFANKTKVDSPNKNGNHIGPVISETQFNKIQTLIQKGIDEGAKLVAGGVGKPEGLEKGYYVKPTVFTDVNNQMEIARTEIFGPVLS

SEQ ID NO: 92949 - protein, 369 aa, Unknown
  Bacterial polypetide isolated from the Sargasso Sea
MYEKFGQFIDGKWQKSQNNETYEVINPATEEILGHASKACREDVEKALLSSESGFKKWKNTTPWERSKVLRRIADKIRKKKDILAKWMTLEVGKPLAEGVGEAGGAADIFEWNSEETKRIYGQTVESRFSDTRVHVYYQPVGVVAALVPWNFPLILASRKISTALAAGCSVICKPDVITPGTVMELVDICKECGVPDGVVNLLSGDPPSISEQLLESDIVKKVSITGSTRVGKLILKKAADKVQRVTMELSGHSPFIVFEDCNIEKVADMAIAAKFRNNGQVCISPNRFYIQESKKDEFVNKFIEKTKKLKIGNGMEQDVQLGPITTLKRLGEIEELVETTKKEGAKVLIGGKRPSGFNKGYFYEPTVF

SEQ ID NO: 92950 - protein, 215 aa, Unknown
  Bacterial polypetide isolated from the Sargasso Sea
MNNVLNKQKEYFIKNGPPPIELRIDRLERLKTLIMDNRYDFVEALNSDFGNRSKNASMLSDVYGIMPAINLAIKNVKKWNKVEKKSSNFPFGLLGAKSYVKYEPLGTVGMISPWNFPVNLAFVPLVSIFAAGNQVMHKPSEHTPITSSLLKDLCDAAYDENEFATFLGGPDVGESFTKLNFDHLLYTGGGSVAKHVMNAASKNLVPCTLELGGKS

SEQ ID NO: 92951 - protein, 430 aa, Unknown
  Bacterial polypetide isolated from the Sargasso Sea
MKKISHFIDGKIYSDSKSRIGPIFNPAIGEQIAEVELASKSTVEMAIKSSSKAFQKWSKTTPINRARILAKFKDLLIKNMNDLAVMVSEQHGKTIADAKGSIQRGIEVVEYATGITDSLKGDHSSNVGTNVDSHTLRQPLGVCAGITPFNFPAMVPMWMFPVAIACGNSFVLKPSEKDPSCPMKLAELAIEAGLPPGVLNCVNGDKEAVDTLLENKTVQAISFVGSTPIAEYVYHTGTKNNKRVQALGGAKNHMVIMPDADVDKTTDALIGSAFGSAGERCMAISVAVCVGKQTNEKIKAKLLKEASKLNVGPYTDEKSDFGPLNNKAHFEKVLGYIDTGEKEGAKLLADGRSFKKQGYENGYFVGPTIFDDVKPDMKIYKEEIFGPVLSMMTTETYEDALKLVNDHELGNGAAVFTKSGNIAKHFTENA

SEQ ID NO: 92952 - protein, 307 aa, Unknown
  Bacterial polypetide isolated from the Sargasso Sea
MNLIEHFINGKITKGSSKKTSKVFNPATGEQTAEVSLASKNDVDLAVQKAKLAFTDWSRKPPAQRARIIFKFKELIEKNSDEIIKLIVSEHGKVYEDAKGSLTRGLEVVEFACGIPHLLKGEFTENVGTDVDSWSIRQPLGVCAGITPFNFPAMVPMWMFPIAIACGNTFVLKPSEKDPSCSIKLAKLFKEAGLPDGVFNVVNGNKEAVDALLTNKDVEAISFVGSTPIAKYIYENAAKNEKRVQALGGAKNHCVIMPDCDLDQAVNGMMGAAYGSAGERCMAQSVAVAVGKIGNQLVNKLAKKVES

SEQ ID NO: 92953 - protein, 300 aa, Unknown
  Bacterial polypetide isolated from the Sargasso Sea
LAPLSSMILAEIVDEVKFPKGVFNLVNGDGATTGDALTSHPDIDMISFTGSTRAGALISQNAAKDFKRVSLELGGKGANIIFKDADNEAIERGAFRCFRNSGQSCNAPTRMLVEKSMYNEAIERLKKYTENFEVGDPKKEGEHIGPVISENQFKKIQALIQKGIDEGAKLVAGGTGKPDGLDKGFFVKPTVFADVNNNMEVARTEIFGPVLSVIPFESEEEAIKIANDTTYGLTNYIQSKDHDKVKRVARKLRSGMVDVNGAGIAVDAPFGGFKHSGIGREAGEFGLEEFLEVKAVGGWS

SEQ ID NO: 92954 - protein, 362 aa, Unknown
  Bacterial polypetide isolated from the Sargasso Sea
MRQPLGVVAGITPFNFPAMVPMWMFPIAIACGNTFILKPSEKDPSCSIKLAQLLKQAGLPDGVFNVVNGDKESVDAILENKDIKAVSFVGSTKIAKYIYENAAKNEKRVQALGGAKNHLVVMPDCDIDGAVNGLMGAAYGSAGERCMAQSVAVAVGDIGDELVSRISKKVDSLKVGPGMDKNSEMGPLVTKEHLEKVKGYVDLGVKEGAKLVVDGRNLKLQGYENGFFIGGCLFDNVQKDMRIYKEEIFGPVLSVVRVKTFEEATKLINEHEYGNGVSIYTRDGDAGRTFASKIQVGMVGINVPIPVPMAFHSFGGWKRSLFGDSAMHGVEGVRFYTKLKTITSRWPSGIRSNPEFVMPTMK

SEQ ID NO: 92955 - protein, 482 aa, Unknown
  Bacterial polypetide isolated from the Sargasso Sea
MTDRRMLIAGEWCTARDGRTFDRFNPATGALASRAPAAGAADADAAIDAAHRAFPAWSALAPTERRRLLLKAADLMDARIDAFIATGVAETGATPGWIGFNVTLAANMLREAASMTTQIAGDVIPSDVPGNLALAMRVPCGVVLGIAPWNAPVILGTRALAMPLACGNTVVLKASEACPGVHALIGAVLDEAGLGAGVVNVVTHAAADAPELVERLIAHPHVKRINFTGSTHVGRIIARHAAAHLKPVLLELGGKAPVLVLDDADLDAAVDAIAFGAFFNQGQICMSTERVIAARPIADALVERLAAKARTLVAGDPLAGHPLGTMVDASAAVRAASLVEDARALGAQLPLGCRVEGATMQPAIVDGVTRDMRLYREESFAPVVAILRADSDDEAVALANDSEFGLSASVFSRDVARAMAVARRIESGICHINGPTVHDEAQMPFGGTKASGYGRFGSRASIAEFTELRWITVQTTPRHYPI

SEQ ID NO: 92956 - protein, 201 aa, Unknown
  Bacterial polypetide isolated from the Sargasso Sea
MNLIEHFVNGKIIPGSSDKKGKVFNPATGEQESEVRLASRSDLDSAVEVAKKAFETWSLKPALQRARIIFKFKELIEKNSDELTKLIVSEHGKVYEDARGSLTRGLEVVEFACGIPHLLKGEFSENVGTNVDSWSMRQPLGVVAGITPFNFPAMVPMWMFPIAIACGNTFILKPSEKDPSCGLRLAELLSEAGLPDGVFNV

SEQ ID NO: 92957 - protein, 305 aa, Unknown
  Bacterial polypetide isolated from the Sargasso Sea
MILLKKAGLPDGVINMVNGRGSVTGAAITQNENIDVIAFTGGTETGRVIGAESGKTLKKIVTELGGKSANIIFSDADFERALDAAMVAIFSNNGQQCLAGSRILVEKPIAKEFKKRMVERARNLIIGDPFDSKTEIGPLISKEQIEKVMSFAQTAEESDDTNILCGGKRCESFQKGYYFEPTIVETKSNRNTVCQEEIFGPFATILEFDGIDEAMELANDSEFGLVSYIWSTDIRKIMRAQAEIRAGVVWVNTPLMRELRAPFGGYKNSGIGRDGGEWSRNLFTEEKTVSIPLKDFPITKLGEND

SEQ ID NO: 92958 - protein, 378 aa, Unknown
  Bacterial polypetide isolated from the Sargasso Sea
MDTYQLYIGGKFVDAEGGASKPTFNPWNGEAIANIPVASIADAEAAIAAARDAFDNGPWPKMTGAERGEIICALSSKMKERMKDLARLESLDSGGTITKTGADAFLAQRQMNYFGTMAEKFNSEPKEIEGMSRPGRSYNYTIREPMGVCASIIPWNFPLMMAVWKLGPALGTGNTIILKPASDTPLSAMELARIVDECGFPPGVVNIISGPGGKIGELLTTHPDVDKIAFTGSTEVGKDIMAKASGTLKKVTLECGGKSPNIVLHDANWEIAIDGSIFASFYHQGQVCESGTRLLLPADQHDDFVGQMVAKLNSLPMGDPLDPATKVGPVVSESHMNTVLDYIEKGKTEGATLACGGERATDGDLANGYFIKPTVFTD

SEQ ID NO: 92959 - protein, 297 aa, Unknown
  Bacterial polypetide isolated from the Sargasso Sea
MELVDICRECGVPAGVVNLLSGDPPSIAQQLISSDIVKKISITGSTRVGKLILKQAADKVQRVTMELSGHSPFIVFDDADIQKATDMAISAKFRNNGQVCISPNRFYIQENKKDEFVSLFVEKTKKLKIGDGMDPNVQLGPLTTKKRLNEVEELVETTKKEGAKILLGGKRPAGFNKGFYYEPTIFDNVKDDFTIMKVEPFGPLVPMLSFKSFDEVIERANNNDLGLCSYICTNSMEKAHRASELMETGTVAVNTPLVAIAEAPFGGIKQTGYGREGGSMAIKDYLNIKYTHLGIKG

SEQ ID NO: 92960 - protein, 200 aa, Unknown
  Bacterial polypetide isolated from the Sargasso Sea
MIERKNFYINGKWVSPSKPNDFEVIDPSTEEPFAIISLGSTKDADDAINAAKVAFETWRETSKEERLELLIKFDEIYNRRWDEMVKAQSTEMGAPLDFASETHTKMGADISKNTLKILKDFNFEHEFDAKSNNHIRYEPIGVCGLITPWNFPMNQIVLKVIPALAAGCTMILKPSEIAPVSGVLFAEMIHEAGFPPGVFN

SEQ ID NO: 92961 - protein, 310 aa, Unknown
  Bacterial polypetide isolated from the Sargasso Sea
MEKYKNFINNKWIESESKETIKVDDPSNGKIIGEISCAKKNEVDLAVEAAKNSYNSRVLVDMPLLSRAKLMRKIAEETRKVSKEGGELLCYENGKNIASAIKEFNDVADMFDYYAGLTDKLEGKTIPVAKNVFDYTVLEPFGVSAHVVPWNFPLSMIGRSLSCSFATGNSTIIKTAELTPLSATVFAKAIQNAGVPEGLINIICGYGNEAGSYLVSHEDVNHVVFTGSVATGKKILHACADKAIPAVVELGGKSAGIVYPDADLNEVLESARSGIFSVAGQICTAMSRLVVHKSIKDELVDKLCDMSKSL

SEQ ID NO: 92962 - protein, 238 aa, Unknown
  Bacterial polypetide isolated from the Sargasso Sea
MQSIDTTFKSQQEKSIALRSSSFKERRSKLKLLLKNFLEMEEEVLAALSKDLGKSKTEALLAEIYGVKAEANFAIKNIKSWMKTKRVASPLAISFTKSWVKPEPKGNILIISPWNYPVMLCLNPLIAAIASGNTAIIKPSELTPASGELVKALIEKTFSSDEVAVFLGEKDVAQKLLNLPFNHIMFTGSPKVGKVVMEAASRHLAGVTLELGGKSPVIVDKHANIKDAAWKISFYKFA

SEQ ID NO: 92963 - protein, 368 aa, Unknown
  Bacterial polypetide isolated from the Sargasso Sea
MTDLTKNPDLRLRDKPDDFFGDWKWREGLAELMVPIIGKLYRNGVHVLMYGHSLVNQSPIEIMKSHRFIRRIEDTEISELETYPFLQRIELQDIKDCEIDLGEIVVDFMKENKNLDDPQIDTHIKSFILDPLDQVDQKRPSKPQDIVLYGFGRIGRLVSRIMAQTTGPGNYYRLRAIVVRKGSNTNDLLKRASLLRRDSVHGSFHGTIRVDNESETLIINGNPVKIIYANGPKDFKYSNYGIDNPIVIDNTGVWREEKDLSLHLESGACKVILTAPAKGKIKNIVNGINNDILNESDNIISAASCTTNAIVPVLDILNKEYSITSGHIETVHAYTNDQNLIDNYHNKDRRGRSAALNMVITSTGAVKA

SEQ ID NO: 92964 - protein, 466 aa, Unknown
  Bacterial polypetide isolated from the Sargasso Sea
MTIDGGETSAASWFDVVNPATGEIFAQAPQCTQDQLDDAMASAARAFVSWGVSDDSVRRAALQGIANALIAAQLELAELVTKEQGKPLMAAAFEVTETARWFSYFAELPLRPEALQDDARGQAVLVRRPLGVVAAITPWNFPLLLLGMKLAPALLAGNTIVLKPSPFTPLSTLAAGRIIAGHLPPGVLNVVSGGDALGAWMTGHPAVRKISFTGSVATGKAVAAAASPDLKRITLELGGNDAAIVLDDADPSRVAAGIFWGAFTNNGQICAGIKRVYVPDRLHDAVVEALAERARRARVGNGMDDGVQLGPINNKPQFERVSSLVADALADGALAAAGGHAMDRPGYFFEPTILHDAREGMRIVDEEQFGPALPVLRYSDLDEAIARANATPYGLSGSVWSSNEERAARVAARLDCGSAYVNTHLVVQPHLPFGGWKWSGIGIENGSWGLDAFCSLQVRYCPRGRS

SEQ ID NO: 92965 - protein, 165 aa, Unknown
  Bacterial polypetide isolated from the Sargasso Sea
MQTLNVGNPLDKNTDVGAINSKDQLDKIEKLVNEGVADGGDLFQIECELPKNGFWFKPSLFTSVQANYKIATEEIFGPVLTTLTFRTPEEAVEIANNTEYGLSAGIWTEKGSKILWTADRLEAGVIWANTFNKFDPASPFGGYKESGFGREGGRHGLLSYLKVSS

SEQ ID NO: 92966 - protein, 508 aa, Unknown
  Bacterial polypetide isolated from the Sargasso Sea
MAIFSISKSETGQKLLTLQSPVDLSHIDTYECTSSEDISKIMTHAKIAQSEWKKTSLKERVELMHKVADIVIQQQDRIMEVVMRETGKPQQEAMAMEVFSAVDSLVFYAKRAKKWLSDKKIKMHGPMQFLKKTIVTYKPRGVVAVITPWNGPFILSINPVIQAVLCGNSVVVKPSEVTPMSGALVEEIFALAEAPVHLVQTVIGDGETGAELIDHGPDKVSFTGSVATGKKIATKCGEMLIPYSLELGGKDAMIVCSDADVKDAASGAVVGSCMNAGQYCCGTERIYVMDDIYDEFVGEVVSITKTLIQSNDCKGDVGPTFWDKQIEIIEDHVKDAIDKGAKVLVGGKRNPNFEGLYFEPTVLTEVTHEMKIMKDETFGPIISIMKVSSEEEALMLANQSHYGLNGNVWTKDLIKGKKLAQSIETGACSVNDMAMSYGVNEVPFGGVKESGLGVVNGEEGLLAYAHAMPIIIGKKSASAYPYTDKSFEQLKGALKIFWGNRLVRKLFG

SEQ ID NO: 92967 - protein, 438 aa, Unknown
  Bacterial polypetide isolated from the Sargasso Sea
MNSIEHFIDGKVIKGSSKRTGKVFNPATGEVSSNVNLASSADLDKAVNAAKKAFKSWSEKTPLFRARVLFKFKELIEKNYDELTKIIVSEHGKVYDDAKGSLTRGLEVVEFACGIPQLLKGEFTENVGTNVDSWSTRQPLGICAGITPFNFPAMVPMWMFPIAIACGNTFVLKPSEKDPSCSMKLAELFLEAGLPPGVFNVVNGDKEAVDAIINNKDISAVSFVGSTPIAKYIYENCAKNEKRVQALGGAKNHCVVMPDCDLEQAVNGLMGAAYGSAGERCMAQSVAVAVGGIGDKLVDSLAKKVEALKVGPGMDKQSEMGPLVTKEHLEKVKGYVDIGEKEGAKLIVDGRNFKIQGYEKGFFIGGCLFDYVKKDMRIYKEEIFGPVLSVVRVKDFDEALKLVNDHEFGNGVSIFTRDGDSGRTFSSKAQIGMVGINI

SEQ ID NO: 92968 - protein, 158 aa, Unknown
  Bacterial polypetide isolated from the Sargasso Sea
MGSMISKGHLQTVDGYIQKGIDEGAKLLSGGVSNNKQKGFYAKPTLFDGLKENMTIAQEEIFGPVLGVLTVKNDEEALKVASNSKYGLHASVFTQDINRAFHLAKSLPCGTVSVNTFSEGDIKTPFGGYKQSGSLSRDQGTEALNSFLQTKTIWISHN

SEQ ID NO: 92969 - protein, 112 aa, Unknown
  Bacterial polypetide isolated from the Sargasso Sea
AFADVNNNMEIARTEIFGPVLSIIPFETEEEAISIANDTPYGLLNFIQTQDQKKANRVARKLRSGMVDINGAGLAPDAPFGGYKHSGIGREAGVLGLEEYLEVKAVSGWNDN

SEQ ID NO: 92970 - protein, 475 aa, Unknown
  Bacterial polypetide isolated from the Sargasso Sea
MKTSYIGGQWRPGSDGYRNINPSDTSDVVDEFSQADESLALEAIDAAYQAFTTGQVLGVQARADALDRVGTELLARKEELGELLSREEGKTRAEGIGEVARAGQIFKFFAGEVLRVRGEHLESVRPGLSVDITREPVGVVGIIAPWNFPIAIPAWKIAPALAYGNCVVFKPAELVPSSAWALSEIISRAGFPAGVFNLVIGRGSVVGKALLESPKVHAISFTGSTGTGARVMATAGARFAKLQLEMGGKNPLLVTDDADMETALTCAIQGSFYSTGQRCTASSRIIVTHGIYSRFRDALVERLSHLRVGHALSADTHIGPVVDSEQLQTDLEYIRIGREEGATLAFGGERIKRDTDGFFLSPALFADVTSGMRIAREEIFGPVACLIPARDFDDALQIANDTEFGLSAGICTTSLQYATRFKREAQAGMVMVNVPTAGVDYHVPFGGRKGSSYGSREQGSYAAEFFTTVKTAYNG

SEQ ID NO: 92971 - protein, 399 aa, Unknown
  Bacterial polypetide isolated from the Sargasso Sea
MMRETLELQKKAFIKDGPPTYNQRVDSLKRCIALIETHDDQIIEALNQDYKNRSHHEIRTSEIDQSIRNFAFTLKNLKKWMKPSKRSSSFGTDLMGAKTIMKPMPLGSVGVIAPWNFPVGMVFYPAASILAAGNKIMAKPSEFTPHTSQVMKDAVEKYFDKSEFAVFLGGPEVGAEFTSMPFDHLLYTGSNRIAKKVLANTADNLVPTTLELGGKSPTIISEDADLSLVAKRIMFVKTLNAGQICLSPDYVFLKRGLEDKFINELKNVFADFYPDGNEDDYTSMVNDHHFNRMKSYIEDAKSKGAEVISLGDFDSEPKDTMTTKVLMNVDDSMQVMQDEIFGPLLPIMLYDELSEVVDYINAHDHPLGLYFFGNKKSEQDFVINNTRSGGVTINDTMFH

SEQ ID NO: 92972 - protein, 233 aa, Unknown
  Bacterial polypetide isolated from the Sargasso Sea
MIEKKNFYINGKWVSPTKPNDFEVINPSTEEAFAIISLGSAEDADKAINAAKIAFETWRETTKEERLALLEKFDEIYNRRWDEMVEAQSKEMGAPLDFASETHTKMGADICRNNIEILKNFNFEHKFDPKSNNHIRYEPIGVCGLITPWNFPMNQIVLKVIPALAAGCTMILKPSEIAPVSAVLFAEMIDEAGFPAGVFNLVNGNGEVVGNHISGHADIDMISFTGINRAGKL

SEQ ID NO: 92973 - protein, 477 aa, Unknown
  Bacterial polypetide isolated from the Sargasso Sea
MSADKHLQSWQERFEMAEAMQPLLGKLYRNQGVEVVVYGKPLLNASTIEIIKAHRLVRRHVGEKLRLRESFPFVQALSRLAVKQCKVDIGKLAVKYWAEHTDTNEIESYMARELAAAIDHADDIAPRDVVLYGFGRIGRLLARLLIERTGRSNKLRLRAIVLRGGKKGDLEKRASLLRRDSVHGPFNGSVEVDEENNAIIANGTYIQVIYANSPDEVDYTKYGITDALVVDNTGIWKDEAGLGLHLKSPGASKVLLTAPAKGAIKNIVYGVNEGDITAEDIIVSAASCTTNAITPVLKAVNDKYGIENGHVETIHSYTNDQNLIDNYHSADRRGRSAPLNMVITETGAAKAVAKALPVLAGKLTGNAIRVPTPNVSMAIISMNLNAETNKDELNEYLKDTALQSPLQNQIDYTDSTEIVSSDLVGSRYAGVVDSQATIAEGKRAILYVWYDNEFGYSCQVVGVMQTMLGLTTLSLPA

SEQ ID NO: 92974 - protein, 447 aa, Unknown
  Bacterial polypetide isolated from the Sargasso Sea
KKAFLSWSQKTPLFRARILFKFKELIEKNYDELTKIIVSEHGKVYEDAKGSLTRGLEVVEFACGIPQLLKGEFTENVGTNVDSWSMRQPLGVCAGITPFNFPAMVPMWMFPIAIACGNTFVLKPSEKDPSCSMKLAELFLEAGLPPGVFNVVNGDKEAVDAIINNKDIAAVSFVGSTPIAKYIYENCAKNEKRVQALGGAKNHCVVMPDCDLDQAVNGLMGAAYGSAGERCMAQSVAVAVGKIGDPLVKSLSKKVESLKVGPGLDKKSQMGPLVTKEHLEKVTGYVDIGLKEGAKLVVDGRNLKLQGYENGFYMGGCLFDHVTKDMRIYKEEIFGPVLSVVRAKDYNEALSLVNDHEFGNGTSIFTRDGDTGRSFASNVQIGMVGINIPIPVPMAFHSFGGWKRSLFGDQSIHGPEGVRFYTKLKTITSRWPSGIKSDPEFVMPTMK

SEQ ID NO: 92975 - protein, 406 aa, Unknown
  Bacterial polypetide isolated from the Sargasso Sea
GKVYEDAKGSLQRGLEVVEYACGIPQMLKGEFTENVGSSVDSWSIRQPLGVCAGITPFNFPAMVPMWMFPMAIACGNTFVLKPSEKDPSCSMRLAELLKDAGLPDGVFNVVNGDKEAVDALISNKDVVAMSFVGSTPIAKYIYENCAKNEKRVQALGGAKNHCVVMPDCDLDQAVNGLMGAAYGSAGERCMAQSVAVAVGGIGDKLVESLAKKVEALKVGPGMDKLSEMGPLVTKEHLAKVKGYVDIGEKEGAKLIVDGRNFKLQGYENGYYIGGCLFDHVKKDMRIYKEEIFGPVLSVVRAKDFDEALQLVNDHEFGNGVSIFTRDGDTGRTFSNKAKIGMVGINIPIPVPMAFHSFGGWKRSLFGDQHMHGPEGVRFYTKLKTITSRWPTGLRTDPEFVMPTMK

SEQ ID NO: 92976 - protein, 307 aa, Unknown
  Bacterial polypetide isolated from the Sargasso Sea
LKINHINNRSNSETTSKLIKYDSIHGKLNAELDFDLNHIIINKNKITFSQETKIEDINWKKHDVDYVFECTGKFNSKEKLLTHIVKGAKKVIVSAPCKNADKTIVFGVNENIITKEDEIISAASCTTNCLAPVTSVLDENFEIEKGFMTTIHAFTSDQRILDNSHKDLRRARSANLSIVPTSTGASKAIGEIIPNLKGKLEGVAMRVPTPNVSLVELVFCTNKDISIKKINDAFEQASKNKLKNILEVTHEKLVSIDFNHHPASAIVDASLTNVVGSNMGKISAWYDNEWGFSNRMCDIAETLHKIS

SEQ ID NO: 92977 - protein, 255 aa, Unknown
  Bacterial polypetide isolated from the Sargasso Sea
AIADTDWSGCDLVLEASGKMKTVAVLQGYLDQGVKRVVVCAPVKEQGALNVVMGVNQHLFDPAQHRIVTAASCTTNCLAPVVKVIHEALGIRHGSITTIHDLTNTQSILDQPHKDLRRARASGMSLIPTTTGSATAIAEIFPELRGKLNGHAVRVPLANASLTDCVFEVERATTAEEVNALLKAAADGPLKNILGYEERPLVSIDYRTDPRSSIIDALSTMVVAGTQVKIYAWYDNEWGYANRAVELARLVGQAG

SEQ ID NO: 92978 - protein, 358 aa, Unknown
  Bacterial polypetide isolated from the Sargasso Sea
SAKKAFETWGFTTKEERLNLFEKLYEIYKKNWDQMAKTISLEMGAPIDFSTELQTKTGASHIKSFKNILKNFKFEKTLDEEKNQTILYEPKGVCALITPWNWPINQVNLKVIPALAAGCTVVLKPSEIAPLSSMLLAEMMHDSGFPKGVFNLVNGDGAVTGDALTSHPDIDMISFTGSTRAGALISQNAAKDFKRISLELGGKGANIVFKDAGPDAISWSVQRCFRNSGQSCNAPTRMLVEKSIYNETIEKVKEFANKTKVDNPNKNGNHIGPVISETQFNKIQTLIQKGIDEGAKLVAGGVGKPEGLEKGYYVKPTVFTDVNNQMEIARTEIFGPVLSIIPFENEDEAIKIANDTPY

SEQ ID NO: 92979 - protein, 145 aa, Unknown
  Bacterial polypetide isolated from the Sargasso Sea
QSLIKSGIEEGATLVAGGPDKPEDFKKGYFIKPTVFTDVNNDMRIAKEEIFGPVLSIIPFENEEEAIKITNDTEYGLGNYLQTEDKEKAKRVSKRLRAGIIYVNNKPADSGTPFGGYRQSGNGREGGTWGLHEYLEVKTITEWNK

SEQ ID NO: 92980 - protein, 457 aa, Unknown
  Bacterial polypetide isolated from the Sargasso Sea
VINPATEEVIGKASKAGEEDVNKALKSAEKGLEVWKKTPPWQRAKIIRKIADLMREKTDVLAKWLTLEVGKPLSEAAGEVGGGADIFEWNSEETKRIYGQIVESRFENTRMYVKYEPVGVVAGLIPWNFPIVLASRKISTALAAGCSVICKPDVITPGSVMELMNIINEAGVPPGVVNLLSGDPAKISSQLISSDIIKKVSITGSTRVGKLILKQAAEKVQRVTMELSGHSPFIVFDDVDINQVTDMAITAKFRNNGQVCISPARFYIHETKKDEFAKTLVDKVTKLKIGNGMDKDTILGPLTTEKRLLEVEALAEKTKQEGAKVLCGGKRPAGFNKGYFYEPTIFDDVKDNFTIIKEEPFGPLVPILTFKDRDEVVKRANDNDLGLASYIYTNSLENAHKVSEKMETGTCAVNTPAVAFAEVPFGGIKQTGYGREGGSMAIKDYLNIKYTHFGINY

SEQ ID NO: 92981 - protein, 388 aa, Unknown
  Bacterial polypetide isolated from the Sargasso Sea
EFACGIPNLLKTDFTDQIGGGIDNWNLRQPLGVVAGITPFNFPMMVPCWMFPVAIACGNTFVLKPSERDPSASNRLAELLKEAGLPDGVFNVVHGDKVAVDALLVHPEVSALSFVGSTPIAEYIYTEGTKHGKRVQALGGAKNHLVVMPDADLDQAVDALIGAAYGSAGERCMAISVAVAVGHIADELIERLTPRVKSLKILNGMEKEAEMGPLVTAAHREKVVGYIDAGVAAGAKLVVDGRSHQVAGHEKGFFLGGTLFDDVSTDMKIYREEIFGPVLCVVRVPDFASAVELINANEFANGVALFTSDGGVARAFSRQIQIGMVGINVPIPVPMAWHSFGGWKRSLFGDHHAYGEEGVRFYTRYKSIMQRWPDSIGKGAEFTMPVAK

SEQ ID NO: 92982 - protein, 265 aa, Unknown
  Bacterial polypetide isolated from the Sargasso Sea
VGTNVDSWSMRQPLGVVAGITPFNFPAMVPMWMFPIAIACGNTFILKPSEKDPSCSIRLAELLKEAGLPDGVFNVVNGDKEVVDAILTNKDIKAVSFVGSTPIAKYIYENSAKNEKRVQALGGAKNHLVVMPDCDLDGAVNGLMGAAYGSAGERCMAQSVAVAVGDIGDDLVSRLSKKAEALKVGPGMDKNSEMGPLVTKEHLEKVKGYVDLGVKEGAKLIVDGRNLKLQGYENGFYIGGCLFDHVKKEMKIYKEEIFGPVLICC

SEQ ID NO: 92983 - protein, 437 aa, Unknown
  Bacterial polypetide isolated from the Sargasso Sea
CHLAISSARNAFKLWSQSQLEERKKILDQIGDALINNSQEIGKLIAREEGKTVAEGAGEVYRSGQFFQYFGAEVLRQMGEVTTSVRPNIDIEVTREPLGVIGVITPWNFPVAVAAWKIAPAIAFGNSVVLKPSEIVPASASAFAEIIHQSELPDGVFNCVQGSGDVGQIITNSKNIDGISFTGSVRTGKQIAQNAMKNMVRIQMEMGSKNALVILNDANIETAVQCAINGAFFGTGQKCTASSRLIVEEKIHDEFVAALTEATKALVVGHALDEKTQIGPAVDDRQFKQNKKYLDEALKKGAKMVAGDEKIDVSSNGFFMRPTLLIDTDNNMKINREEVFGPIACVIKANDYDHALAISNDSDFGLTSGIVTDSLKHANHFKRNSQSGCVMVNLPTAGTDYHVPFGGRKASSYGPREQGQYAKEFFTIVKTSYISSA

SEQ ID NO: 92984 - protein, 354 aa, Unknown
  Bacterial polypetide isolated from the Sargasso Sea
DFEYEKDGYLVRKEPVGVVGMITPWNWPMNQMCTKVASGIAAGCTMVLKPSEITPFCGIILAEIIHDAGVPAGIFNLVNGMGPVVGASMSEHKDIDMMHFTGSTRAGVAVAQASAPTVKRVAQELGGKSANIVLDDADIEKAVSAGVSSCFLNTGQSCNAPTRMLVSSKNYDKAVEVAANTANAMKVGDPFDADTKMGPISNKTQYEKVQRMIQIGIDEGATLSAGGVGLPEGCESGYYVKPTIFSDVTNDMTIAREEIFGPVLCLIKYETEEEAIEIANDTPYGLAGYIQGEHTHAVEVASKIRAGQITINKGARVRSAPFGGYGSSGNGREHGTHGLEECLETKAVIGALVE

SEQ ID NO: 92985 - protein, 120 aa, Unknown
  Bacterial polypetide isolated from the Sargasso Sea
ECELPGNGFWFKPTLFTDVQPSYSIAREEIFGPVLTTLTFRTPQEAVEIANNTEYGLSAGVWTEKGSKILWTADRLQAGVVWANTFNKFDPSSPFGGYKESGFGREGGRQGLLSYLKAES

SEQ ID NO: 92986 - protein, 187 aa, Unknown
  Bacterial polypetide isolated from the Sargasso Sea
EKSIYERAVKEAVDEANKIKIDQATKKGDHIGPVISKVQYDKIINLIESGISEGATLAAGGPELPNGLNKGYFIKPTIFTDVTNEMRIAKEEIFGPVLSIIPFDTEDEAVKIVNDTSYGLGNYLQTEDREKAHRVAKKLRSGCVYINGNAADVGTPFGGYRQSGNGREGGVWGLEEFLEVKNVTGWN

SEQ ID NO: 92987 - protein, 216 aa, Unknown
  Bacterial polypetide isolated from the Sargasso Sea
YPNAVRDGIRNVMSNSGQSCDAPTRMLVERSIYDRAVKEAVDEANLIKVDHASKKGDHIGPVVSKVQYDKIINLIQSGIDEGATLAAGGPELPGGLNKGYFIKPTIFTDVTNDMRIAKEEIFGPVLSIIPFETEDEAVNIVNETEYGLGNYLQTEDKEKAKRVARRLNAGTIYINGNGADSGTPFGGFKQSGNGREGGVWGLEEYLEVKTVTGWPS

SEQ ID NO: 92988 - protein, 399 aa, Unknown
  Bacterial polypetide isolated from the Sargasso Sea
HREQNVRILLYGNPLITLSVSQIMQEHRLVRETEKNELSEFETFEVINILKDLDLGPCEIDVGIIAAGHMFDSKSLSLKEFVKEQVADAIGNKNPVLQKPQDLVLFGFGRIGRLITRLLLEDTGSGETLSLKAVVVRKKSDDDLFKRAELMRRDSVHGNFKGTIRVDLDEYGLVINGNLIRFIDGDPSSIDYKKYGIDNAVIIDNSGVWRDEKGLSAHLKSKGAKKVLLTAPTKSPLKNIVYGVNENDLDDKDKIVGAASCTTNAIVPLLKALDDDYGIINGHVETIHSYTNDQNLIDNYHSKSRRGRSAALNMVITETGAASAVSQILPNLKGKLTANAIRVPTPNVSLAILKLSLNKSLNDKEAANEYFRQLAFHSIYKDQIDFTNSSEIVSSDLVG

SEQ ID NO: 92989 - protein, 370 aa, Unknown
  Bacterial polypetide isolated from the Sargasso Sea
MGDKRDINFQSTERQKRILPEDSFGDWKWREALAELMVPLIGSLYRKGINIMIYGKSLVNESPVAIMKAHRFARQTDNNELSELETYPILQHISTLELQDCEIDIGEIAVRCPFFDDIKDDSSKIPNYINSELKSVINVDSKRPKVPANIVLYGFGRIGRLVTRMMTQTTGPGNYFRLKAIVIRKAADDDIFKRASLLTRDSVHGPFDGTVRVDEENSTLVINGNPVKVIYATNPDEVNYADYEIHNPIVIDNTGVWRDEKGLSKHIKSGASKVILTAPAKGDLKNIVYGINDDILADNDSIISAASCTTNAIVPILKAVNDEYKIRGGHIETVHAYTNDQNLIDNFHKGDRRGRGAPLNMVITTTGAVK

SEQ ID NO: 92990 - protein, 243 aa, Unknown
  Bacterial polypetide isolated from the Sargasso Sea
MQSIDTTFKSQQEKSIALRNSSFKERRSKLKLLLKNFLEMEEEVLAALSKDLGKSKTEALLAEIYGVKAEASFAIKNIKSWVKTKRVASPLAISFTKSWVKPEPKGNILIISPWNYPVMLCLNPLIAAIASGNTAIIKPSELTPASGELVKTLIEKTFSSDEVAVFLGEKDVAQKLLNLPFNHIMFTGSPKVGKIVMEAASRHLAGVTLELGGKSPVIVDKHANIKDAAWKISFYKFANAGQT

SEQ ID NO: 92991 - protein, 293 aa, Unknown
  Bacterial polypetide isolated from the Sargasso Sea
MHFQWYGELIDKVFGKVGPTEPSITSLIVKEPIGVVAGIVPWNFPLMMAVWKMAPALAAGCSVIIKPAEDTPLTAIRVAQIGKEAGIPDGVLNVLPGYGDVGEALGRHKDVDAVSFTGSTEVGGYFLKYASESNLKPVALEMGGKSPFIVLEDAKITDDLIDNAMNSAFWNGGQNCSANMRQIVHKKVKDEFLDKIFKKVKKLKVGDPLDLKSNMGSMISKGHLQTVDGYIQKGIDEGAKLLSGGVSDNKQKGFYAKPTLFDGLKENMTIAQEEIFGPVLGVLTVKNDEEALK

SEQ ID NO: 92992 - protein, 245 aa, Unknown
  Bacterial polypetide isolated from the Sargasso Sea
KNFQNISYGPAPEDSNEVNSWIKNLKDPNNLFINGKFVKSSSSKKINIINPSTNKKIASLCIASKKDVNAAVSAAKNAHVKWAKLSSFKRSKYLYALARLIQKNSRFISVLETIDNGKPIRETRDIDIPLVSRHFYYHAGWAARNINNFDNSIGVVGQIIPWNFPLLMLAWKIAPAIALGNTVVLKPAEYTSLTALYFAELCQKAKIPSGVINIITGDGSTGELITSHKDIKKIAFTGSTEVEKK

SEQ ID NO: 92993 - protein, 314 aa, Unknown
  Bacterial polypetide isolated from the Sargasso Sea
MHFQWYGELIDKVFGKVGPTEPSITSLIVKEPIGVVAGIVPWNFPLMMAVWKMAPALAAGCSVIIKPAEDTPLTAIRVAQIGKEAGIPDGVLNVLPGYGDVGEALGRHKDVDAVSFTGSTEVGGYFLKYSSESNLKPVALEMGGKSPFIVLEDAKITDDLIDNAMNSAFWNGGQNCSANMRQIVHKKVKDEFLDKIIKKVKKLKVGDPLDLKSNMGSMISKGHLQTVDGYIQTGIDEGAKLLSGGVSDNKQKGFYAKPTLFDGLKENMTIAQEEIFGPVLGVLTVKNDEEALKIASNSKYGLHASVFTQDINRA

SEQ ID NO: 92994 - protein, 306 aa, Unknown
  Bacterial polypetide isolated from the Sargasso Sea
MGAPIDMSLSDQAQSGRGHLKAFIRALGSIEFQRPLRPGVEGQDIVFEAAGVAALITPWNWPMNQVVLKVGAALAAGCTMVLKPSEIAPMSSMLFAECVDAADFPAGVFNMVNGDGAGVGSLLSAHPNIDVVSFTGSTRAGVLISKAAADTVKKVSLELGGKSPNLVFDDCDISAAVARGASFCFNNTGQSCNAASRMLVERNAYEQAIEVAAATAGATTVDLPSKPGNHIGPLVSEAQFNKVQALIQSGIDEGARLVAGGVGRPEGINRGWFVRPTVFADTTRDMTIIREEIFGPVLAIMPFDTE

SEQ ID NO: 92995 - protein, 299 aa, Unknown
  Bacterial polypetide isolated from the Sargasso Sea
MAPALAAGCSVIIKPAEDTPLTAIRVAQIGKEAGIPDGVLNVLPGYGDVGEALGRHKDVDAVSFTGSTEVGGYFLKYASESNLKPVALEMGGKSPFIVLEDAKITDDLIDNAMNSAFWNGGQNCSANMRQIVHKKVKDEFLDKIFKKVKKLKVGDPLDLKSNMGSMISKGHLQTVDGYIQKGIDEGAKLLSGGVSDNKQKGFYAKPTLFDGLKENMTIAQEEIFGPVLGVLTVKNDEEALKIASNSKYGLHASVFTQDINRAFHLAKSLPCGTVSVNTFSEGDIKTPFGGYKQSGSLSR

SEQ ID NO: 92996 - protein, 257 aa, Unknown
  Bacterial polypetide isolated from the Sargasso Sea
MLDNSTLFVYPGDDGAKLMPKSRYENYIGGEWCAPKDGKYFENTSPTTGKVICEIPRSNSKDIELALDAAHKAAPDWGKTGPAIRANILLKIADRIEQNTEMLALAETLDNGKPIREGHAADIPLTVDHFRYFAGAIRSQEGTIGNIDGMQSGGGNSALGMMAYHYPEPLGVVGQIIPWNFPILMAAWKLAPALAAGNAVVLKPAEQTPFSICVLMELIEDLLPPGVVNIVQGFGVEAGKPLASSNRIAKVGFTGET

SEQ ID NO: 92997 - protein, 301 aa, Unknown
  Bacterial polypetide isolated from the Sargasso Sea
AGLSGELKGENYPTNIPNSIHYTTRDPIGVVCAIVPWNAPLFLTVAKIAPAIVAGNSVVLKTAEQAPFCALLLSEIFQQELPPGVLNVISGYGEECGEPLVTHEKVRKVTFTGSFTVGKIIAQKAAPKLCPVTLELGGKNPNIIMSDADLDIAIQGVIDGMRYTRQGQACTAGSRVYIQEKIYDQVLGGAAEKLSKLKMGNALDESSDIGAIISEEQLKRTLHYMDIAKKNSTTNVVHGGNQITGGDYKNGFFYEPTLMSGVPVSSPVCQEEIFGPVACAIPFKTFDEVMNSANDTPLDIS

SEQ ID NO: 92998 - protein, 343 aa, Unknown
  Bacterial polypetide isolated from the Sargasso Sea
GQAGALVSFKSRYDNFIGGEWVAPRAGRYFENISPVDGKVFCEVARSDAADIELALDAAHKAFASWSKTSVTERSNLLLRIADRIEQNIEVLAIAETWENGKAVRETLAADLPLVVDHFRYFAGCIRAQEGSAAELDQNTVSYHFKEPIGVVGQIIPWNFPLLMAAWKLAPVLAAGCCSVLKPAEQTPVTIMLMMDLIKDILPAGVVNVVNGFGAEAGQALATSDRIQKLAFTGSTEVGAHILRCAADKLIPSTVELGGKSPNIYFADVMQHESSYIDKAVEGMLMTFFNQGEVCTCPSRALVQASIYDDFMDKVLARARTIVQGNPLDTATQVGAQARASSR

SEQ ID NO: 92999 - protein, 279 aa, Unknown
  Bacterial polypetide isolated from the Sargasso Sea
WNWPMNQITTKVSAALAAGCTMVLKPSEISPYCAMLLAEVFDKAGVPDGVFNVVNGYGPTVGAALSEHPDVAMMSFTGSTRAGIAVAQASANSVKRVHQELGGKSSNIILDDVVDLEKSVKGGAGHCFLNSGQSCNAPTKMLISSKNYDKAVEIAVATANNTTVGDPNGEFRLGPIANKVQYEKILKLIEIGIEEGATLVAGGVEKPDGCDKGYYVRPTVFADVTNDMTIAKEEIFGPVLVMIKYDNEEEAINIANDTEYGLAGYVQGDPDHAREVARK

SEQ ID NO: 93000 - protein, 304 aa, Unknown
  Bacterial polypetide isolated from the Sargasso Sea
YFDNTTPITNEVICKVPRSNDKDVDFALDAAHAAFPAWGKTSITERSNILLKIADVIEKNLNVLATAECLDNGKPIRECMAADLPLVIDHWRYFAGVIRAEEGSVAEISNSEYSYHIPEPLGVVGQIIPWNFPLLMATWKLAPALAAGNCVVLKPAEQTPASIMLLMELIGDLLPAGVVNVVSGYGLEAGKPLASSKRIKKIAFTGETTTGRLIMQYASQNLIPITLELGGKSPNIFFEDVMAKDDDFFDKCLEGFAMFTLNQGEVCTCPSRALIQKSIYDKFMEKAIARTKAVKQDNPLKMET

SEQ ID NO: 93001 - protein, 307 aa, Unknown
  Bacterial polypetide isolated from the Sargasso Sea
MQHFRWSRYWRGVSNLKFDHLLYTGSSNVGRHVMKAASNNLVPVTLELGGKSPVIISNTADIKTSAKRIMFGKTLNAGQICLAPDYVIVQKQVKDDFIAEAKNAVTEFFPDIKNNNDYTSIINQKHYDRINELVTDAKEKGAKVIEINPADEDFTQQEFYKIPPTLIVNANDSMNIMHEEIFGPVLPVVSYDELDEAVELINSKDKPLGLYYFGKDNKEQANVLSKTSSGGVTINNVVGHIQQMDLPFGGVGNSGTGRYQSHDGFKNFSNTRAIYKDVDSRWDKLLLGAIRPPYKQSIEKILKVLMK

SEQ ID NO: 93002 - protein, 328 aa, Unknown
  Bacterial polypetide isolated from the Sargasso Sea
LSTLEALDVGKPFTQAQADVRALARYMEFYGGAADKVHGETIPYLEGYTVYTLREPHGVTGHIVPWNYPMQIIGRSVGAALAMGNTCVLKPAEEACLTALTFANLAIEAGLPKGVLNVVPGLGAKAGAALCAHKGINHISFTGSVATGRLVQASAANNIVPVTLELGGKSPQLFFEDANLESALPFLVNSGIQNGGQTCSASSRILVHRSRYNEVVDHMSQKYKGLIVRPAINDGALGPLISERQKSIVEDFISKGQKLNLVANGEIDSSAPTKGHYVAPHLFADVPEDHILAKDEIFGPVQVIMPFDTEEKAISIANGTDYGLVASI

SEQ ID NO: 93003 - protein, 265 aa, Unknown
  Bacterial polypetide isolated from the Sargasso Sea
ADVPLAADHFRYFAGCIRAQEGSTAEINDGTVAYHFHEPLGVVGQIIPWNFPLLMAAWKLAPALAAGNAIVLKPAEQTPLSITLLAELVGDLLPPGVLNIVQGFGREAGEALATSKRIAKIAFTGSTPVGSHILKCAAENIIPSTVELGGKSPNIFFADIMNAEPAFIEKAAEGLVLGFFNQGEVCTCPSRALVQESIYEPFMAEVMKKVKQIKRGNPLDTDTMVGAQASQQQFDKILSYLEIAQQEGAQVLTGGAAERLEGDLA

SEQ ID NO: 93004 - protein, 280 aa, Unknown
  Bacterial polypetide isolated from the Sargasso Sea
MGLGNVSIGSTYPEVSRDKMLSKLNKLKQPFLKNFNPDLKVRIDRIKRIQTLVEENIDAFHDALRSDFGTRHEQLSLMADTMPVINNAKDALKNIKRWVKPDKRKPNFPLGMLGAKAYVQFQPYGVVGVISPWNFPLTLSIAPLIEIFAAGNNAMMKLSEFVPATSELTEELINKFFSDEEVVIVNGGPQTSQDFAGLPFDHLLFTGSTNVAKKVASEAASNLVPLTLELGGKSPVIVGPNAKMKKSVDKIMMGKLLNGGQICISPDYVMVPEGQTDEFV

SEQ ID NO: 93005 - protein, 231 aa, Unknown
  Bacterial polypetide isolated from the Sargasso Sea
MKVKFPFKAKYGNYINGKFVEPKSGKYFDNTTPITNEVICKVPRSNEKDVDLALDAAHAAFPAWGKTSITERSNILLKIADVIEKNLNVLATAECLDNGKPIRECMAADLPLVIDHWRYFAGVIRAEEGSVAEISNSEYSYHIPEPLGVVGQIIPWNFPLLMATWKLAPALAAGNCVVLKPAEQTPASIMLLMELIGDLLPAGVVNVVSGYGLEAGKPLASSKRIKKIAFT

SEQ ID NO: 93006 - protein, 309 aa, Unknown
  Bacterial polypetide isolated from the Sargasso Sea
CSAVQTASGASHIEDFIKRLKEFNFEPGFDKGSQNHIVYEPIGVCGLITPWNWPINQIALKVIPAFATGCTMVLKPSEIAPLSGMLFAEMINEAGFPQGVFNLVNGDGAGVGTDLSGHPDIDMVSFTGSTRAGKLITKNAADTIKRVCLELGGKGGNIVFADSYPDAVRDGIRNVMSNSGQSCDAPTRMLVEKSIYERAVKEAADEANKIKVDLASKSGEHIGPVISKIQYDKIQSLIKSGIEEGATLVAGGPDKPENFKKGYFIKPTVFTDVKNNMRIAKEEIFGPVLSIIPFENEDEAIKITNDTEY

SEQ ID NO: 93007 - protein, 240 aa, Unknown
  Bacterial polypetide isolated from the Sargasso Sea
MQQLVRAGSTRQLAWRQEQLNNLEALLQELEAPLQAALAADLGKPAVEAFFEIVGVQGELKLAKKQLKRWMAPRRVALPAVQQPGRTWVQDEPLGTVLILGPWNYPLMLVLRPLVSALAAGNTAVLKPSEQAPAVAKLLAEMVPRHFEADEVRVELGGAETAQALLKQPFDHVVFTGGTTIGREVMKAAAEQLIPVTLELGGKSPCIVLDDADLQVSARRIAWGRFLNAGQSCGPRTTCW

SEQ ID NO: 93008 - protein, 274 aa, Unknown
  Bacterial polypetide isolated from the Sargasso Sea
VAKVAFTGGSATGAQVYAKAAKTLKRCTLELGGKSPNIIFDDADLDDAVKGAVSGIFAATGQTCMAGSRLLVQDGIYEEFVESLIDFAGQAKMGDPMDKSTQVGPVTTPPQYKKVLDYIAIAKREGAEVLLGGAPASGRPECGESKYFIEPTILGKVENSMRIAQEEVFGPVLVIIRFTSDQEAIDIANDISFGLAAGIWTRSIKRAMRVSKAIRAGTIWVNTYRAISYMSPFGGYKMSGLGRENGMEAIREYLQTKSVWISTADETPNPFVMR

SEQ ID NO: 93009 - protein, 269 aa, Unknown
  Bacterial polypetide isolated from the Sargasso Sea
QKPGRAWVQCDSLGTVLILGPWNYPFMLLLRPLVTALAAGNTAMLKPSEHAPAVADLIAEALPRHFAPDVVQLQQGGPETAQALLRQPFDHVFFTGGTAIGRKVMKAAAEQLMPVTLELGGKSPCIVLDDADLHVSARRIAWGRFLNSGQSCVAPDYVLVTPAMRQPLETALAEAIDQFYGTDPRESVDFGRVVNTVQFDRLDGLLQNATVLKGGEREREQLFIAPTLVEGDPEGGLMQEEIFGPVLPLITVDDLEQALEFIRGRAKPL

SEQ ID NO: 93010 - protein, 316 aa, Unknown
  Bacterial polypetide isolated from the Sargasso Sea
FRYFAACLETLDEEVTPSRGDYLTMSIYEPIGVIAAITPWNSPIASDAQKLAPALAGGNAVVLKPAEVTPLVSLALARICEEAGVPKGVLSVVPGKGSVIGDVLVRHPLVKKVSFTGGTEVGRGIARIAADKLMPVSLELGGKSPTIVFDDADLDHAVNGVLYGIFSSSGEACIAGSRLFVQRSIYDAFMKRLAEGARKLRVGDPSRAETQMGPLITAAHRETVERYVALGLEEGGRLLCGGERPVGDGREQGTYFQPTILEGLTNDARICQEEIFGPVLVAMPFDDEASLLKEANNSVFGLAAGIWTRDYKRAYR

SEQ ID NO: 93011 - protein, 239 aa, Unknown
  Bacterial polypetide isolated from the Sargasso Sea
MKVSSVLDTSHLKVKFPFKSKYGNYINGKFVEPLSGKYFDNPSPISNETICSVARSNEKDVEAALDAAHAAFTTWGKTDITTRSNIMMKIADVLEKNLNLLATAECLDNGKPIRECMAADLPLVIDHWRYFAGVIRAEEGSVAEISNSQYSYNIPEPLGVVGQIVPWNFPLLMATWKLAPALAAGNCSVLKPAEQTPASIMVMMELIGDLLPPGVVNIVSGFGLEAGKPLASSKRVAKV

SEQ ID NO: 93012 - protein, 293 aa, Unknown
  Bacterial polypetide isolated from the Sargasso Sea
MLHIDKIYINGEFVTPHGSETFALFNPATEEMIGQARLADEEDARRAIAAAKAAFPCWSRTTKQQRLDVLERMYQAVRAREADLLEAIVTEYGAPASRSQWMATWPAQTIKQAMETLASFEFVEPAGRAQVVMTPVGVAGLITPWNSDAGFICSKLATAMAAGCTAVIKPSEMSAWQTQIVTEALHAAQIPAGVVNIVTGRGEVVGDIINHHPDIAKISFTGSTAVGKHIIESGAQTLKRVTLELGGKSPTLILDDADVQQAVPLALAAGFMNSGQACIAGTRILVPAGRLAE

SEQ ID NO: 93013 - protein, 283 aa, Unknown
  Bacterial polypetide isolated from the Sargasso Sea
MISPWNFPVNLTFVPLVSIFAAGNQVMHKPSEHTPVTSVLLKDLCDKTYDQNEFATFLGGPDVGEAFTKLNFNHLLYTGGGEVAKHVMNAASQNLVPCTLELGGKSPVVIGKSADLKTSAKRIMFGKTMNAGQICLAPDYVIVHKDKKDDFIRETKDAVTEYFPDIKNNEDYTSIINQKHYDRLKDLLDDAVAKGANVNEINPANEDFSQQEFYKIPPTIVTNTTDDMKIMQEEIFGPILPVVEYEEIDEATRLINSKDRPLGLYYFGTDKKEEDNILNNTSS

SEQ ID NO: 93014 - protein, 235 aa, Unknown
  Bacterial polypetide isolated from the Sargasso Sea
IKKVTLELGGKGGNIVFADSYPNAVRDGVRNIMSNSGQSCDAPTRMLVEKPIYERAVKEAVDEANKIKVDLASKKGDHIGPLVSKVQYDKVVNLINEGIKEGATLAAGGPDLPNGLNKGYFVKPTIFSDVNNDMKIARTEIFGPVLSIIPFETEEEAIAITNDTSYGLGNYLQTEDKEKAKRVARKVRAGTVYINGQATDTGMPFGGYKQSGNGREGGVWGFTEFLEVKAITGWN

SEQ ID NO: 93015 - protein, 307 aa, Unknown
  Bacterial polypetide isolated from the Sargasso Sea
NYSLRQPIGPVGIITPWNTPFMLSTWKIAPALAAGCTIVHKPAEWSPCTAAMLVKIMHEAGLPAGVVNTVQGAGETAGKALTEHKAIKAIAFVGESRTGSEIMKQGADSLKRVHFELGGKNPVIVFDDADLDRALDAVVFMIYSLNGERCTSSSRLLIQKSISAEFVEKVKARVAILNVGHPLNPATEVGPLIHEQHREKVASYFDIAKEDGATIAIGGNKSDLDGKGCYVEPTLFTNASNSMRIAQEEIFGPVLTVIEFEDEAEAVEIANGVRYGLAAYIWTGDSGRSIRLGRDLDVGMIWVTPKT

SEQ ID NO: 93016 - protein, 257 aa, Unknown
  Bacterial polypetide isolated from the Sargasso Sea
MNIDLLINGNFEKGNSTEEKVINPKNRDLIVAIPQASDDQINKAVDSSVKAFKKWSRTTPSERSSLLLKLANKIDENAEEIAKLESLNCGKPYHLALEEELPATADVFRFFAGACRCMSASAAGEYMEGFTSMIRREPIGVIASIAPWNYPIMMAAWKLAPALAAGNTVVLKPSEQTPLTTFKLAELINEIFPEGVVNVVYGIGETVGSSLVNNPNISMISLTGDVATGSQILKSASNGVKRTHLELGGKAPVIVFD

SEQ ID NO: 93017 - protein, 255 aa, Unknown
  Bacterial polypetide isolated from the Sargasso Sea
HLKVKFPFKAKYGNYINGKFVEPKSGKYFDNTSPISNEVICSVARSNEKDVDAALDAAHAAFPTWGKTSITERSNILLKIADVIEKNLNVLATAECLDNGKPIRECMAADLPLVIDHWRYFAGVIRAEEGSVAEISNSEYSYHIPEPLGVVGQIIPWNFPLLMATWKLAPALAAGNCVVLKPAEQTPASIMLLMELIGDLLPPGVVNVVSGFGLEAGKPLASSKRIKKIAFTGETTTGRLIMQYASQNLIPITLE

SEQ ID NO: 93018 - protein, 240 aa, Unknown
  Bacterial polypetide isolated from the Sargasso Sea
VDHFRYFAGAIRAQEGTIGNIDGMQSGGGNSALGMMAYHYPEPLGVVGQIIPWNFPILMAAWKLAPALAAGNAVVLKPAEQTPFSINVLMEVIGDLLPAGVANIVHGYGVEAGKPLASSKRVKKVGFTGETTTGRLILQYASENLIPVTLELGGKSPNIFFKDIMGGSDDYISRCVEGFLHAYFNQGEVCTCPSRAIIHEDIYEPFMEIVKERVKAINCGSPFDLNTQVGAQASNEQLKK

SEQ ID NO: 93019 - protein, 135 aa, Unknown
  Bacterial polypetide isolated from the Sargasso Sea
FSTPNCKKYLKTVSPSTEEVLASLSIGNKNDVDSAVNSAKEGLKIWSKTAPSERAKYLYKLARLIQERSREFAVLESMDGGKPIKESRDFDLPQVAANFFYFAGWADKLDISWGTKEMKPYGVVGQIIPWNFPLL

SEQ ID NO: 93020 - protein, 266 aa, Unknown
  Bacterial polypetide isolated from the Sargasso Sea
MYEKLGQFIDGKWCQSSDKNTYDVINPATEEVIGQASKATPEDVDRALKSAEKGLSIWKKTPPWQRSNILRKIADTIRLKKDILAKWMTLENGKPLAEGSAEANGTADIFEWNAEETKRIYGQTIESRFDDTRVHVYYQPVGVVAALSPWNFPLILAARKISTALGAGCSVIIKPDTITPGVVMQLVDICRECGVPRGVINLLSGDPPSIASQLIQSDIIKKISITGSVRVGKLILKQAAEKVQRVTMELSGHSPFIVFDDADIKK

SEQ ID NO: 93021 - protein, 236 aa, Unknown
  Bacterial polypetide isolated from the Sargasso Sea
TIKKVTLELGGKGGNIVFADSYQNAVRDGVRHVMSNSGQSCDAPTRMLVQKPIYERAVKEAVDEANKIKVDVASKKGDHIGPLVSKVQYDKVINLINVGIKEGATLATGGPDLPNGLNKGYFVKPTIFTDVNNDMRIAREEIFGPVLSIIPFETEEEAIAIVNDTSYGLGNYLQTEDKEKAKRVARKLRAGTIFINGQGADVGAPFGGYKQSGNGREGGIWGLNEFLEVKTITGWK

SEQ ID NO: 93022 - protein, 294 aa, Unknown
  Bacterial polypetide isolated from the Sargasso Sea
SHAKKHLKSWMKDEKRKSNFPFGLMGAKSYIHREPLGVVGMISPWNFPMYLSLAPLAGIFSAGNQVMHKPSEFTPITSELLKEICDSAFDETEFATFLGGPDVGAAFTQLKFDHLLFTGSGNIGKHVMRAASENLVPLTLELGGKSPVIVSDSSNIDITARRVMFNKTLNAGQICLAPDYVYVHETEKDNFVEACKDQVNEFYSDLKYNPDYTSVINQKHYDRLNGLLSDAKDHGAELVEINPANEDFSQQESHKIPPTLVLNPTDEMQIMKEEIFGPILPIKTYKDINEPINY

SEQ ID NO: 93023 - protein, 301 aa, Unknown
  Bacterial polypetide isolated from the Sargasso Sea
PLWMAIWKIAPALITGNSVILKPAEQSPMSAIKIGALLSEAGVPDGVFSVLPGDGPITGKSLCLHNDIDCVAFTGSGEVGKLVLEYSGQSNMKRVQLECGGKSPNIIFADCADLDRAAEASAYAIFGNQGEVCSAGSRLIIQKDIEKDFINKVVQLSKKMQPSDPLNPDSFAGAIVNAEQLEKINKYVNIGKKEGADIEVGGNITMKETGGCYFEPTIFKNVKNNMKIAQEEIFGPVLTTLAFSNFDEAISIANDSEYGLAAGVWTNDINKAIKASREIRAGTVYINNYEEGVDSTIPLGG

SEQ ID NO: 93024 - protein, 289 aa, Unknown
  Bacterial polypetide isolated from the Sargasso Sea
MRQTAYLNGVWCEADSGARTEIFNPATGELIGAVPNMGRGETRRAIEAAQAAQQAWRALTAKERAARLRRWYEVMLENQEDLARIMTAEQGKPLAEARGEVAYAASFLEWFAEEGKRLYGDVIPAHAGDKRILVQKEPVGVTAAITPWNFPSAMITRKAGPALAAGCAMVLKPAPQTPFSALALAALAERAGIPAGLFSVITADAATSREVGAELCENPIVRKLSFTGSTAVGIKLMQQCAPTLKKLSLELGGNAPFIVFDDADLDAAVEGAMISKYRHAGQTCVCANR

SEQ ID NO: 93025 - protein, 231 aa, Unknown
  Bacterial polypetide isolated from the Sargasso Sea
SGKYFDNTSPISNEVICSVARSNEKDVDAALDAAHAAFPTWGKTSITERSNILLKIADVIEKNLNLLATAECLDNGKPIRECMAADLPLVIDHWRYFAGVIRAEEGSVAEISNSEYSYHIPEPLGVVGQIIPWNFPLLMATWKLAPALAAGNCVVLKPAEQTPASIMLLMELIGDLLPPGVVNVVSGFGLEAGKPLASSKRIKKIAFTGETTTGRLIMQYASQNLIPITWN

SEQ ID NO: 93026 - protein, 300 aa, Unknown
  Bacterial polypetide isolated from the Sargasso Sea
ILPSGDILVREPIGVCGLITPWNWPVNQVVLKVLPALATGCCCILKPSEHTPLSAMIYAEILHGAGYPAGVFNLVNGKGPVVGSAMSQHPDIQMMSFTGSTRAGTTVVRESAETVKRVTLELGGKSPNIVFADCELEDRVTYSVKECMSNTGQSCDAPTRLLVEQSCYDSALEIAKSVAESLIVGDPNDESTEIGPLFDKIQFDRVQTMIKLGITEGCRLLTGGLGKPNGLDVGWFVKPTIFCDANNNMRVAREEIFGPVLVVIPFKSESEAIEIANDTEYGLASFIQTGDSQRAKRVAK

SEQ ID NO: 93027 - protein, 299 aa, Unknown
  Bacterial polypetide isolated from the Sargasso Sea
MNKVLNDQKEYFIKNGSPSIELRIDRLERLRTLIMDNRNDFVEALNTDFGVRSKNASMLSDVYGILPAITHAVKNVKKWNKIEKKSSNFPFGLIGAKSYIKYEPLGTVGMISPWNFPVNLAFMPLVCIFAAGNQVMHKPSEHTPLTASLLKDLCDKAYDQNEFATFLGGPEVGAAFTQLQFDHLIYTGGNAVAKHVYNSASKNLVPCTLELGGKSPVIVSKTADMKTTAKRIMFGKTLNAGQICLAPDYVVVHKDKKDEFIKETKEAVSKYYPDIKNNDDYTSIINQAHYERLNDLLDD

SEQ ID NO: 93028 - protein, 161 aa, Unknown
  Bacterial polypetide isolated from the Sargasso Sea
MTTIHSFTGDQRTVDQAHNDLRRARTASSSMIPASTGAAKAIGLVLPKLKGRLDGTAIRVPTPNVSLIDFTFISKKKTTSEKINSTMIKASKKSNLKNILTINDLPLVSVDFNHNPSSSIFDTTQTQVIDQNFCRVLSWYDNEWGFSNRMIDTLLDLKRLI

SEQ ID NO: 93029 - protein, 284 aa, Unknown
  Bacterial polypetide isolated from the Sargasso Sea
MEKVLEIQKKAFLKEGPPSLEMRKDLLRRCATLIETYEEKIIKALNHDFQNRSIEEIKISEIDQTIRNILFTIRKLNKWMKPQRRLSSLGTDLLGAKSFLKPTPLGTVGLITPWNFPVGLVFYPLASIFAAGNRAMVKPSEITSATSSVIKEGVEKYFDVSELAVITGGPSVGERFSSLKLDHLLFIGSNNVAKKVASQTAKNLVPTTLELGGKSPTIIGQSANMKLAAKRILFSKTLNAGQICLSPDYVFVRKDDEVKFISELQDTYSKFFSKPNSMDQTAMV

SEQ ID NO: 93030 - protein, 246 aa, Unknown
  Bacterial polypetide isolated from the Sargasso Sea
MNLETLYEKMEYGPAPESPNNAEQWLKDHQHKFSLFINGKWTESSKKNSFESINPATGKSLASISEASEKEVDQAVKAAKKAFESWSGLDPHQRSRFLYAMARHMQKHARLLAVLETLDNGKTIRETRDIDVPLAVRHFYHHTGWAQLLDQEFKNHQPLGVVGQIIPWNFPLLMLAWKVAPALAAGNTVILKPAEFTPLTALWFAEMCQRIGLPPGVFNLLTGSGTTGAMLAAHPGISKIAFTGST

SEQ ID NO: 93031 - protein, 273 aa, Unknown
  Bacterial polypetide isolated from the Sargasso Sea
IVAGNSVVLKTAEQAPFCALLLSEIFQQELPPGVLNVISGYGEECGEPLVTHEKVRKVTFTGSFTVGKIIAQKAAPKLCPVTLELGGKNPNIIMSDADLDIAIQGVIDGMRYTRQGQACTAGSRVYIQEKIYDKVLGGAVEKLSKLKMGNALDESSDIGAIISEEQLKRTLHYMDIAKKNSTTNVVHGGNQITGGDYKNGFFYEPTLMSGVPVSSPVCQEEIFGPVACAIPFKTFDEVMHSANDTPFGLSAVLWTQNLSRALQFVEEIEAGFV

SEQ ID NO: 93032 - protein, 305 aa, Unknown
  Bacterial polypetide isolated from the Sargasso Sea
KDDVNLAVSAAKEAFKSFSLTSKKDRLVLLQELLEITKRRFEDLAWAMTKEMGAPITMSRDAQADSGIGHLEGFISCLKDSKERETLPNGDVLIREPIGVCGLITPWNWPINQIVLKVVPVLATGCTCVLKPSEHTPLSAKIYAEIIDEAGYPPGVFNLVQGDGLTVGVALSEHPNIEMVSFTGSTRAGTDVSKRASDTVKRVTLELGGKSPNIIFGDCDLPGRVVESVKECFYNSGQSCDAPTRLLVERSCYDQVLKISKQTALSQEVGDPNNEGEHIGPLFDQIQFERVQNMIDVGINEGAEL

SEQ ID NO: 93033 - protein, 285 aa, Unknown
  Bacterial polypetide isolated from the Sargasso Sea
PANEEVIGNASKATPQDVDRALKSAEKGLEVWKKTPPWQRSYIIRKIADKMREKQDVLAKWMTLEVGKPFSEAKAEVGGSADIFEWNAEETKRIYGQTVESRFADTRVHVYYQPVGVVAALSPWNFPLVLSSRKISTALAAGCSVIIKPDVITPGTVMELVDICRECGVPPGVVNLLSGDPPSIASQLIQSDIVKKISITGSSRVGKLILKQAADKVQRVTMELSGHSPFIVFDDADIKKATDMAIAAKFRNTGQVCISPNRFYIQENKKEEFINLFIEKTKKLK

SEQ ID NO: 93034 - protein, 268 aa, Unknown
  Bacterial polypetide isolated from the Sargasso Sea
GSALSRHPDIQMMSFTGSTRAGTAVTHDAADSVKRVTLELGGKSPNLVFADCDLEERVTQSVAECMFNTGQSCDAPTRLLVERSCYDEVVEIARRAAGATAVGNPEEEGGHIGPLFDQIQFDRVQNMIQVGIDEGATLLVGGLGRPEGFDAGWYVRPTVFSDVNNTMRIAREEIFGPVLAIIPFDDEEAAVEIANDTPYGLAAYVQTGSPERAARLSRSLRAGAVHINGGAYEYGSPFGGYKASGNGREGGDMGLEDFLETKMVHGLA

SEQ ID NO: 93035 - protein, 250 aa, Unknown
  Bacterial polypetide isolated from the Sargasso Sea
STRAGALISQNAAKDFKRVSLELGGKGANIIFKDADPEAIERGALRCFRNSGQSCNAPTRMLVEKSMYDEAVQRLKKYADDFKVDDPNKEGEHIGPVISETQFNKIQGLIQKGIEEGAKLVSGGPGKPDGLKDGYYVKPTVFADVNNSMNIARTEIFGPVLSVIPFDTEEEAIEIANDTDYGLTNYIQTQDGEKVQRVARKLRSGMVDVNGAGIAVDAPFGGYKHSGIGREAGKEGLVEFLEVKSVGGWS

SEQ ID NO: 93036 - protein, 271 aa, Unknown
  Bacterial polypetide isolated from the Sargasso Sea
PWNWPMNQVVLKVLPVIATGCTCVLKPSEHTPVSAMIYAEILDEAGVPAGVFNLVNGVGPVVGGALSRHPGVQMMSFTGSTRAGTAVTRDAADSVKRVTLELGGKSPNLVFADCDLEERVTQSVAECMFNTGQSCDAPTRLLVERSCYDEVVEIARRAAEATAVGNPKEEGDHIGPLFDQIQFDRVQNMIQVGIDEGANLIAGGMGRPEGFEAGWFVRPTIFADVNNTMRVAREEIFGPVLAIIPFDTEEEAVEIANDTPYGLAAYVQTVA

SEQ ID NO: 93037 - protein, 327 aa, Unknown
  Bacterial polypetide isolated from the Sargasso Sea
LIFIRKIADKMREKQDVLAKWMTLEMGKPLVEAKGEVNGSADIFEWNAEETKRIYGQTVESRSKGTRVHVYYQPVGVVAALSPWNFPLVLSSRKISTALAAGCSVIIKPDVITPGTVMELINICKEAGVPAGVVNLLSGDPPSIASQLISSDIIKKISITGSSRVGKLILKQAADKVQRVTMELSGHSPFIVFDDADIKKAADMAIAAKFRNNGQVCISPSRFYIQENKKDEFINLFVEKTKKLKIGDGMDPSVNLGPLTTKKRLNEVEELVETTKKEGAKVLLGGKRPKGFNKGFYYEPTIFDNIKDDYTIMKVEPFAPISSYGYH

SEQ ID NO: 93038 - protein, 289 aa, Unknown
  Bacterial polypetide isolated from the Sargasso Sea
ADRIEQNIEVLAIAETWENGKAVRETLAADLPLVVDHFRYFAGCIRAQEGSAAELDQNTVSYHFKEPIGVVGQIIPWNFPLLMAAWKLAPVLAAGCCSVLKPAEQTPVTIMLMMDLIKDILPAGVVNVVNGFGAEAGQALATSDRIQKLAFTGSTEVGAHILRCAADKLIPSTVELGGKSPNIYFADVMQHESSYIDKAVEGMLMTFFNQGEVCTCPSRALVQASIYDDFMDKVLARARTIVQGNPLDTATQVGAQASREQFDKILSYMEIGRGEGAKMLIGGGPARVR

SEQ ID NO: 93039 - protein, 273 aa, Unknown
  Bacterial polypetide isolated from the Sargasso Sea
EKVRKVTFTGSFTVGKIIAQKAAPKLCPVTLELGGKNPNIIMSDADLDIAIQGVIDGMRYTRQGQACTAGSRVYIQEKIYDKVLNGAVEKLSKLKMGNALDENSDIGAIISEEQLKRTLHYMNIAKKNSTTKVLHGGNQSTGGDYKNGFFYEPTLMSGVPVSSPVCQEEIFGPVACAIPFKTFDEVMNSANDTPFGLSAVLWTQNLSRALQFVEEIEAGFVQVNQCVAPRANVSYGGLKMSGLGKEYAFDSMINHFTQSKTVLINRGKSNIDI

SEQ ID NO: 93040 - protein, 311 aa, Unknown
  Bacterial polypetide isolated from the Sargasso Sea
LGVVGQIIPWNFPLLMATWKLAPALAAGNCVVLKPAEQTPASIMLLMELIGDLLPAGVVNVVSGFGLEAGKPLASSKRIKKIAFTGETTTGRLIMQYASQNLIPITLELGGKSPNIFFEDVMDKDDDFFDKCMEGFAMFTLNQGEVCTCPSRVLVQESIYDKFMEKAIARTKAVKQGNPLKMETMIGAQASVEQMEKIKSYLDLGKKEGAKVLCGGNVAKVNSGLEKGNFIEPTIFEGNNSMRIFQEEIFGPVVSVTKFKDEADAVKIANDTLYGLGAGVWTRNGNIAYRMGRANEAGRVWTNCYHAYPAH

SEQ ID NO: 93041 - protein, 198 aa, Unknown
  Bacterial polypetide isolated from the Sargasso Sea
MSTQQATSSKVSSSLDTSHLKVKFPFKAKYGNYINGKFVEPKSGKYFDNTSPITNEVICKVPRSNDKDIDFALDAAHAAFPTWGKTSIGERSNILNKIADKIEQNLNLLAVAECLDNGKPIRECMAADLPLVVDHWRYFAGVIRAEEGSVAEISNSEYSYHIPEPLGVVGQIIPWNFPLLMATWKLAPALAAGNCVVL

SEQ ID NO: 93042 - protein, 229 aa, Unknown
  Bacterial polypetide isolated from the Sargasso Sea
SKHLEAGAEKVIITAPAKGDDIPTYVMGVNADDYKHTDKIISNASCTTNGLAPFAKVLDDSFGIVKGLMTTTHSYTGDQRILDASHRDLRRARAAALNIVPTGTGAAKAVALVLPQLKGKLNGIALRVPTPNVSVVDMCIQVEKKCTAEEINAAFREAAEGPMKGILAVCDEPLVSIDFRCSDVSTSIDSALTMVMGDDLVKVVAWYDNEWGYSQRVVDLAELTASKWD

SEQ ID NO: 93043 - protein, 311 aa, Unknown
  Bacterial polypetide isolated from the Sargasso Sea
VYEAAGVAGLITPWNWPMNQVVLKVGAALAAGCTMVLKPSEIAPLSSVVFAEMVHEAGFPPGVFNMVNGDGVGVGSILSSHPGIDVVSFTGSTRAGILISKAAADTVKTVSLELGGKSPNLVFDDCDLEKAVRSGAAFCFNNTGQSCNAATRMLVQRSIYDEAVEIAAAKAASTKVDLPSNEGKHIGPLVSEAQFEKVQRLIQTGIDEGARLVAGGVGRPEGLNRGWFVRPTVFADAKPDMTIMREEIFGPVLAMMPFDSEDEAISIANDTQYGLAAYIQTRDMERARRVAGQLRSGMVQVNGAPRASGSP

SEQ ID NO: 93044 - protein, 132 aa, Unknown
  Bacterial polypetide isolated from the Sargasso Sea
GAEAVAGGKKIEGKGYFFESTVLDGVKQDMTVAREEIFGPVLSIIEYEDSDEAIQIANDTDYGLAAGVFTKNIDQATEASNKLEAGQIYVNSWFTGSIATPFGGYKQSGYSREKGQQALKSYLQVKNVGIQL

SEQ ID NO: 93045 - protein, 219 aa, Unknown
  Bacterial polypetide isolated from the Sargasso Sea
MDKWEYSESIESDSIVSIQSKYGHFIDGKFSTPNSKKYLKTVSPSTEEVLASISIGNKNDVDSAVNSAKEGLKIWSKTAPSERAKYLYKLARLIQERSREFAVLESMDGGKPIKESRDFDLPQVAANFFYFAGWADKLDISWGTKEMKPYGVVGQIIPWNFPLLMLAWKVAPALATGNTVVLKPAETTPLTALLFAELCEEVGLPKGVFNLVTGDGTTG

SEQ ID NO: 93046 - protein, 291 aa, Unknown
  Bacterial polypetide isolated from the Sargasso Sea
EEFFDESEIAVFTGDPEVGAAFSGLAFDHLIFTGGTAIAKHVMKAASENLVPLTLELGGKSPVVVGKSSKIKETATRVMQGKTMNAGQICLAPDYALVPEDSVDEFVQASVDVTSEMYPDMKDNEDFTSIINQKHYDRIQGYISDAKEKGADIVEINPSNEDFSQQPHHKIPPTIILNPTEDMQVMQEEIFGPVLPVKTYKDVSETVDYINGKDRPLGLYYFGEDSKEKDYVLDNTTSGGVTVNDVISHITMEDLPFGGVGPSGMGSYHGHDGFKEFSHAKSVYKQSWLNL

SEQ ID NO: 93047 - protein, 218 aa, Unknown
  Bacterial polypetide isolated from the Sargasso Sea
LILLNGVGDVVGTALSKHKDIQMMSFTGSTRAGILVTKDSADTIKRVTLELGGKSPNLIFADCDLEKDVKASVEECMFNSGQSCDAPTRLLVERSCYDEVLKIAKESAEAISVDDPKKEGDHLGPLFDKIQFDRVQNMIDVGINEGAPLLTGGLGKPEGFEQGWYVKPTIFHDVKNNMRIAQEEIFGPVLVIIPFENEAEAITIANDTPYGLAAYLQT

SEQ ID NO: 93048 - protein, 217 aa, Unknown
  Bacterial polypetide isolated from the Sargasso Sea
MEKLKPGFDQLREAQLADPMPGLETRRDRLQRLLKGLEEREEAFTQAISKDFGQRSAFETANYDITVTLADIKYQNRNLARWMRIRKRSVPLHLMPGRARIVPQPLGVVGVISPWNFPVFLSLSPVAGAIAAGNRVMLKPSEWTPKTSTLLAELASEAFEPDEFAVFEGGIETGRAFSELPFDHLLFTGSTRVAKEVSNSAAKNLTPLTLELGGKSP

SEQ ID NO: 93049 - protein, 299 aa, Unknown
  Bacterial polypetide isolated from the Sargasso Sea
VESAKRASEQHDWRYNSANRSKILHDIADRLDSEHQKLIEIEINDNGKRIREVKAQMSGLGDWYRHFAVALVHMEVEKLNLNLDGVSAYLDLIPYGVVGAITAWNSPLMIAAWKVAPALAGGNAVVIKPSEFASASTVVFAELLSDIVPDGLINVVTGYGDEVGTAIVESDEVKKVSFTGSEIGGSKVAVTAAKHVKPVTLELGGKSPQIVFRDADLENAINGIMSGIFLSNGQSCVAGSRLIIHDKIKQSFVGRLQEELGRLQFGDPLSEDTDIGPIANKAQFDKVLSMIGRAKKEGV

SEQ ID NO: 93050 - protein, 266 aa, Unknown
  Bacterial polypetide isolated from the Sargasso Sea
KYEPLGTVGMISPWNFPVNLTFVPLVSIFAAGNQVMHKPSEHTPTTSLLLKELCDKSFDQNEFATFLGGPEVGESFTNLSFDHLLYTGGGAVAKHVMASASKNLVPCTLELGGKSPVVIGKSADLKTSAKRIMFGKTMNAGQICLAPDYVVVHKDQKDDFIKETKDAVSEYFPDIKDNDDYTSIINEKHYDRLKALLDDAVEKGANIDEINPSNEDFSQQEFFKIPPTIVTNTTDDMKIMQEEIFGPLLPIIEYNQIEDATKLINS

SEQ ID NO: 93051 - protein, 345 aa, Unknown
  Bacterial polypetide isolated from the Sargasso Sea
KLENPISDCMEIDLPETIGTFRWHAEAADKIYDPLSPSGPGVVSMIVREPIGVVAAILPWNFPLMMAAWKLGPILAEGNTTILKPAEQTSMSTIRLAQLGTEAGIPDGVINVVPGFGEEVGKALGEHMGIDCVGFTGSTEIGRMFLRYSADSNLKRVLLECGGKNPLVVMPDATDLDVVADHAANSIFWNMGENCSSNSRVLIHNSLKDEFIELLIERARDWVIADPLDSACRLGPLIEEEHMKKVLSHIEKAKKEGAKLVYGGNRVMTDSGGYFIEPTIFDEVNPKMSIAKEEIFGPVLAILTFETPEEGIAMANDTDYGLTASVFSASNKTAHNAARQIRQEP

SEQ ID NO: 93052 - protein, 207 aa, Unknown
  Bacterial polypetide isolated from the Sargasso Sea
MDISFPFKSRYNNFINGKFVEPKTGQYFENPTPITGEVLCEMARSGADDVEAALDAAHAAKTAWGQTSLTERSMILNRIADRMEANLNLLGAAESLDNGKPIREAIAADITLSIDHFRYFAGVIRAEEGTISEINANTYSYHYKEPIGVVGQIIPWNFPITMAAWKLAPALAAGNCVVMKPAEQTPASIMVLMELIADLLPEGVVNI

SEQ ID NO: 93053 - protein, 274 aa, Unknown
  Bacterial polypetide isolated from the Sargasso Sea
MQNLQKFYIDGQWVVPQSSKKMPVVNPATEEIISEVILGNEEDVNIAVKAAKNAFISFSKTSKEERMNILKNIRKISEERFDDLADAMTIEMGAPRKMSREAQADAAIGHLDGFISALEKHEEKIELSNTDILLKEPIGVCGLITPWNWPINQITLKVLPVIATGCTCILKPSEHTPLSAMVYAEILDKAGVPAGVFNLVHGDGEGVGIAMSRHPDIEMMSFTGSKRGGKSVTIESAETVKKVTLELGGKSPNLVFADCDLQEKVTASVNECMF

SEQ ID NO: 93054 - protein, 50 aa, Unknown
  Bacterial polypetide isolated from the Sargasso Sea
NNEYSYHIPEPLGVVGQIIPWNFPLLMATWKLAPALTAGNCVVLKPAERT

SEQ ID NO: 93055 - protein, 310 aa, Unknown
  Bacterial polypetide isolated from the Sargasso Sea
ELSPVTAKILNEIALEAGLPPGVWNLVNGFGEEAGVALTKNKDIKAVAFVGESKTGSAIMRQGSETLKRVHFELGGKNPVIVFDDADLDRALDAVIFMIYSLNGERCTSSSRLLIQKNIAEEFISKLVDRVNKIKVGNPLDPDTEVGPLISENHLEKVISYFDIAKREGAEIAVGGNAHKKPGWFVSPTLFKNAKPGMRISQEEIFGPVLTAITFEDEEEALKISNDVEYGLTGYIWTNNVTRALRFSDELEAGMIWVNSENVRHLPTPFGGIKSSGIGRDGGDWSFEFYMEQKHIGFATVNHQIPKLGK

SEQ ID NO: 93056 - protein, 273 aa, Unknown
  Bacterial polypetide isolated from the Sargasso Sea
FVNGKWVDSENGSTFESINPSIGKSWALIPEATANDVNNAVEAAYKAFNEGEWSKITPTQRGKYLRKLGDLLAEKSEELGKIESIDTGKLLKETRWQAKYIAEYFHYYAGLADKIEGSTLPIDKPDMYAFNVREPLGVVAAIVPWNSQLFLVAVKIGPALAAGNTVVLKASEHASAAMLEFGKVIEETGFPPGVVNIISGHGDPCGKTLTTHPLVHRISFTGGPATARHVIRNSAENFAEVSLELGGKSPFIVFEDADIESAVNGSIAGIFGA

SEQ ID NO: 93057 - protein, 288 aa, Unknown
  Bacterial polypetide isolated from the Sargasso Sea
MTKVKNAFKKMDYEEALESNIQSSEWIAEHNGQFGHFIGGRFTKPKNLFKTINPYNKKEIAKISQGTVDDIKKAVRAASSGLEKWQSLSPFQRSRYLYAIARYLQKESRTISVLESMENGKSIRESRDIDIPLAARHFYYHAGWAQLLDEEFQDYSAIGVCGQIIPWNFPILMLAWKVAPAIAAGNSVILKPAEQTSLTALYFAEICKRIKLPEGVVNVVTGDGTTGSHLIAQKDISKVAFTGSTEVGKEIKKNMAGTGKALTLELGGKSPFIIFEDADLDSAVEGLV

SEQ ID NO: 93058 - protein, 303 aa, Unknown
  Bacterial polypetide isolated from the Sargasso Sea
MVGLGHLKAAIRSLSNHEFEYTHGKFLIRHEPIGVCGLITPWNWPVNQVVSKIAPCIAAGCTAILKPSEIAPLSSMVIAEIIHEANVPSGVFNLVNGLGPEVGEAMSSHPDIDMMSFTGSTRGGVAVAKASADSVKRVSQELGGKSPNIILDDDHFEKSVMDGVELCMDNTGQSCNAPTRMLVPESRKEEAFALAVKEAENTTVGDPKANDTTIGPLVSDVQFNKVQTLIDAGISEGATLLVGGTGKPDGLNKGYYVKPTVFGDVTNDMTIAREEIFGPVLSIITYSDIDEAVSIANDSEYGL

SEQ ID NO: 93059 - protein, 251 aa, Unknown
  Bacterial polypetide isolated from the Sargasso Sea
MPHSVPSPNIRQTQLFINGQWIPSQSGKTFDTINPANEEVIAEVAEGDAVDVECAVEAARRAFDEGPWPRLNARERGKIMHRFCDLIDEEIDELAAIESLDNGKPLKDARHVDIPLAVECIRYYAGWADKIQGTTIPVNGDFLCYTRREPVGVAGQIIPWNFPILMVAWKWGPALAAGCTLVMKPAEQTPLTCLRLARLAQKAGVPDGVINVVPGFGPTAGAAIVKHPGVDKIAFTGSGETAKAIMRQSAD

SEQ ID NO: 93060 - protein, 188 aa, Unknown
  Bacterial polypetide isolated from the Sargasso Sea
MKVKFPFKAKYGNYINGKFVEPKSGKYFDNTTPITNEVICKVPRSNEKDVDFALDAAHAAFPAWGKTSITERSNILLKIADVIEKNLNVLATAECLDNGKPIRECMAADLPLVIDHWRYFAGVIRAEEGSVAEISNSEYSYHIPEPLGVVGQIIPWNFPLLMATWKLAPALAAGNCVVLKPAEQTPAS

SEQ ID NO: 93061 - protein, 287 aa, Unknown
  Bacterial polypetide isolated from the Sargasso Sea
MSKIIKNFKNISYGPAPEDNKDVMSWINSLNNPNYLFINGAWVKSRSSKKLQVINPATNKKLTSISISNKADVNAAVGAAKKAFNSWSKTSADKRAKYLYALARLIQKHSRFLSVLETIDNGKPIRETRDIDIPLVARHFYYHAGWAKKIDTKKNKPIGVIGQIIPWNFPLLMMAWKIAPAIAAGNTVVLKPAEFTSLTALYFAELCQKARIPKGVVNIITGDGSTGEIITSHLDTKKIAFTGSTEVGKKIIQSTSKQEKKLTMELGGKSPFIVFEDRSILIVQLKV

SEQ ID NO: 93062 - protein, 303 aa, Unknown
  Bacterial polypetide isolated from the Sargasso Sea
AAGAKRLEERKSEIETLLSLDTGNALRTQAIPETGASIELTNMFAGLSGELKGENYPTNIPNTIHYTTRDPIGVVCAIVPWNAPLFLTVAKIAPAIVAGNSVVLKTAEQAPFCALLLSEIFQQELPPGVLNVISGYGEECGEPLVTHEKVRKVTFTGSFTVGKIIAQKAAPKLCPVTLELGGKNPNIIMSDADLDIAIQGVIDGMRYTRQGQACTAGSRVYIQEKIYDKVLNGAVEKLSKLKMGNALDESSDIGAIISEEQLKRTLHYMNIAKKNSTTKVLHGGNQSTGGDYKNGFFYEPTLM

SEQ ID NO: 93063 - protein, 198 aa, Unknown
  Bacterial polypetide isolated from the Sargasso Sea
MKVKFPFKAKYGNYINGKFVEPKSGKYFDNTTPITNEVICKVPRSNEKDVDFALDAAHAAFPAWGKTSITERSNILLKIADVIEKNLNVLATAECLDNGKPIRECMAADLPLVIDHWRYFAGVIRAEEGSVAEISNSEYSYHIPEPLGVVGQIIPWNFPLLMATWKLAPALAAGNCVVLKPAGTNTSINYAFNGTYRG

SEQ ID NO: 93064 - protein, 268 aa, Unknown
  Bacterial polypetide isolated from the Sargasso Sea
KLQREHFLNEGPPSYELRIDRLDRVQDMVIQNKERITEALNADFGSRSPNQSLISDVYAVLPAFSHAKKHLKSWMKDEKRKSNFPFGFLGAKSYIHREPLGVVGMISPWNFPMYLSLAPLAGIFSAGNNVMHKPSEFTPITSELLKEICDSAFDETEFATFLGGPDIGAAFTQLKFDHLLFTGSGNIGKHVMRAASENLVPLTLELGGKSPVIVSDTSNIDITARRVMFNKTLNAGQICLAPDYVYVHETEKNNFVEACKNQVNEFYN

SEQ ID NO: 93065 - protein, 303 aa, Unknown
  Bacterial polypetide isolated from the Sargasso Sea
RIADKMREKQDILAKWMTLEVGKPFAEAKGEVNGAADIYEWNAEETKRIYGQTVESRFEDTRVHVYYQPVGVVAALVPWNFPLVLSARKISTALAAGCSVIVKPDVITPGVVMEQVEICRECGVPPGVVNLLSGDPPSIAQQLIASDIVKKISITGSSRVGKLILKQAADKVQRVTMELSGHSPFIVFDDADIKKAAEMAIAAKFRNNGQVCISPNRFYIQEKKKEEFVNLFVEKTKKLKIGDGMDPSVQLGPLTTKKRLNEIEDLVETTKKEGAKVLLGGKRPKGFNKGFYYEPTIFDDVKD

SEQ ID NO: 93066 - protein, 290 aa, Unknown
  Bacterial polypetide isolated from the Sargasso Sea
IGPMEHAKKNLKKWMKTEKRKAAIAPLGSALSLLGAKAEVRYQPKGVVGAISPWNFPMNLALAPLAGIISAGNRVMHKPSELTPATSDLLKQMIEEYFDEGEMAVFVGDAEVGAAFSGLAFDHLIFTGGTSIAKHVMKAASENLVPLTLELGGKSPVVVGKNAKIKETAQRVMQGKTMNAGQICLAPDYALVPEEKVEEFVQASVEATSEMYPEMKDNDDFTSIINQRHYDRIQSYLEDAKEKGADVVEINPSNEDFSQQPHHKIPPTIVLNPSEDMKIMQEEIFGPVFQ

SEQ ID NO: 93067 - protein, 292 aa, Unknown
  Bacterial polypetide isolated from the Sargasso Sea
MNYVIRKPIGVVGLISPWNLPLYLLTWKIAPALLMGNSIIAKPSEITPLTAHHFSKLLGEIDFPKGVVNIVHGYGPEVGQAIVEHPDIKAISFTGGTMTGRIVASTAAPMFKKLSLELGGKNSTIVLDDADFESAVPGVARSGFLNSGQICLCGSRILIHESIYDKFVPLLLEEVSNMDIGPVISEEHRTKVLSYIELAKQEGGQILLGGKIIDKPGAWIEPTVIAGLPTNSRTSTEEIFGPVVTLHSFSSDDEAIEIANSTEYGLAGSVWSKERGRQIAERIESGMVWVNT

SEQ ID NO: 93068 - protein, 242 aa, Unknown
  Bacterial polypetide isolated from the Sargasso Sea
MDKWEYSESIESDSIVSIQSKYGHFIDGKFSTPNSKKYLKTVSPSTEEVLASISIGNKNDVDSAVNSAKEGLKTWSKTAPSERAKYLYKLARLIQERSREFAVLESMDGGKPIKESRDFDLPQVAANFFYFAGWADKLDISWGTKEMKPYGVVGQIIPWNFPLLMLAWKVAPALATGNTVVLKPAETTPLTALLFAELCEEIGLPKGVFNLVTGDGTTGSELVNHEGISKIAFTGSTSVENI

SEQ ID NO: 93069 - protein, 244 aa, Unknown
  Bacterial polypetide isolated from the Sargasso Sea
KILHACADKAIPAVVELGGKSAGIVYPDADLNEVLESARSGIFSVAGQICTAMSRLVVHKSIKDELVDKLVDMSKSLKIGPGIEKDTDLTPVISENQLQKVEGYARSGIQEGAEAAYGGKRLERDGYFMEPTVLNNVKQSMTVAREEIFGPVLSVLEYEDQEEAIDIANDTEYGLGAGVFTKDLRKASWTASKLEAGQVYVNKWFTGNHATPFGGYKQSGYSREKGVDGLKSYLQVKNVGISLG

SEQ ID NO: 93070 - protein, 237 aa, Unknown
  Bacterial polypetide isolated from the Sargasso Sea
MNVRAKIPKRGKYGTSQNKGILAKQKAFFIKNGPPSYEMRIDRLDRMKSLIMENRYKIVDALNEDFGVRSKNQSMATDVYTIVPSIEYAKKNLKKWMAGSKRKANFPLGFLGAKASVDYEPLGTVGMISPWNFPVFLTFSPAASIFAAGNQIMHKPSEYTEQTSALLKELCDTAFDEEEFATILGGPDVGASFTQQKFDHLLYTGSGAVAKHIMKAASENLVPVTLELGGKSPVIVS

SEQ ID NO: 93071 - protein, 210 aa, Unknown
  Bacterial polypetide isolated from the Sargasso Sea
LDSARSGIFGVAGQICTAMSRLVVHKSIKDELVDKLVDLSKSLKIGPGIDKDTDLTPVISENQLQKVEGYARSGIQEGAEAAHGGKRVNREGYFMEPTVLNNVKQDMTVAREEIFGPVLSVLEYNDEEEAIKIANDTDYGLGSGVFTKDLKKASWTASKLEAGQVYVNKWFTGNHATPFGGYKQSGYSREKGVDGLKSYLQVKNVGISLS

SEQ ID NO: 93072 - protein, 259 aa, Unknown
  Bacterial polypetide isolated from the Sargasso Sea
NGKSIRETTAADIPLGIDHFRYFASVIRAQEGTTAEINNDTMSYLIPEPLGVVGQIIPWNFPLLMAIWKLAPALATGNCVVLKPAEQTPASIMVLMELIGHLIPAGVVNVVNGYGLEAGKPLASSTRIAKIAFTGETTTGRMILQYASQNLIPSTLELGGKSPNIFFKDIADADDDFFDKCIEGFVMFALNQGEVCTCPSRALIHEDIYDKFIARCIERTKAIVQGDPLDSNTMIGAMASAEQYEKVKSYLDLGKKEGA

SEQ ID NO: 93073 - protein, 304 aa, Unknown
  Bacterial polypetide isolated from the Sargasso Sea
MRNRVNQGANHIKNFIKTLKKFEFESTFDEESDNHIVYEPIGVCALITPWNWPINQITLKVIPALAAGCTMVLKPSEIAPLSGMVFAEMVHEAGFPSGVFNLVNGNGEGVGTQLSGHPKIDMVSFTGSTRAGKLITKNSADTIKRVTLELGGKGGNIVFADSDPDAVKRGVKHVMGNSGQSCNHPTRMLVEKSIYERAVKEAIEQAQNTKVNVASKKGDHIGPVVSKVQYDKIQNLIHTGIKEGANLVAGGPDRPDDLEKGYFVKPTIFSDVNNDMTIAREEIFGPVLSIIPFETEEEAIAITN

SEQ ID NO: 93074 - protein, 288 aa, Unknown
  Bacterial polypetide isolated from the Sargasso Sea
DVDKALKSAAKGLEVWKQTPPWQRSYIIRKIADKMREKQDVLAKWMTLEVGKPFAEAKGEVGGAADIFEWNAEETKRIYGQTVESRFADTRVHVYYQPIGVVAALTPWNFPLVLSSRKISTALAAGCSVIVKPDVITPGTVMELIDICRECGVPPGVVNLLSGDPPSIAQQLISSDIIKKISVTGSTRVGKLILKQAADKVQRVTMELSGHSPFIVFDDADIQKATDMAISAKYRNNGQVCISPNRFYIQESKKDEFVNMFVEKTKKLKIGDGMDPSVQLGPLTTKKK

SEQ ID NO: 93075 - protein, 267 aa, Unknown
  Bacterial polypetide isolated from the Sargasso Sea
NEALPHYINGSKLLSKSNEFFENISPINNEIIGSVASGGSEDINDACNAASAAFDEWKNISGKERKKLLHKIADGIEDRAREIALIESYDSGQAIRFMSKAAIRSATNFRFFADMAPNARDGKSLPADEHLNYSIRQPIGPVGVITPWNTPFMLTTWKIAPALASGCTVVHKPAEWSPLSSMILADITKEAGVPDGVLNVVHGFGETAGKSLTENEKIKAIAFVGESSTGSKIMKQGADSLKRVHFELGGKNPVIVFDDADLDKALD

SEQ ID NO: 93076 - protein, 204 aa, Unknown
  Bacterial polypetide isolated from the Sargasso Sea
MDKVIKNFKNISYGPAPEDSSEVYSWINNLSSPNKIFINNKFIKSSGNKKLNIINPSNKKNIGRLSVSSKKDVDLAVKAAKNAFPKWSKLSPFERSKYLYALARMIQKNSRFLSVLETIDNGKPIRETRDIDIPLVARHFYYHAGWSAKDTGSKNKPIGVVGQIIPWNFPLLMLAWKVAPALATGNTVVLKPAEYTSLTALFFA

SEQ ID NO: 93077 - protein, 299 aa, Unknown
  Bacterial polypetide isolated from the Sargasso Sea
LAISFTKSWVKPEPKGNILIISPWNYPVMLCLNPLIAAIASGNTAIIKPSELTPASGELVKALIEKTFSSDEVAVFLGEKDVAQKLLNLPFNHIMFTGSPKVGKVVMEAASRHLAGVTLELGGKSPVIVDKHANIKDAAWKISFFKFANAGQTCTAPDYILCDEAVHEELVAALQKNMSEFFPGGIDEAAKDYCSIANEHHFNRLKNALAEAVSGGARVACGGETSQGGLYFSPAVLTNVGYDNPIMEEEIFGPILPVVKVKSLGESINYVNSNEKPLALYLFSSKRSSHNRVLKNTSS

SEQ ID NO: 93078 - protein, 172 aa, Unknown
  Bacterial polypetide isolated from the Sargasso Sea
KLAASIKVGPGDEEGVDLTPVISEEQLQKVENYARSGLQAGAKAVSGGNRVDRKGFFFEPTIYSDVKPNMTIAQEEIFGPFLSVLDYEDHEEAIHIANDTDYGLAAGVFTKDVDMATKTASRLNGGQVYVNSWFTGSIATPFGGYKQSGYSREKGQQAIKSYLQLKNVGIQL

SEQ ID NO: 93079 - protein, 314 aa, Unknown
  Bacterial polypetide isolated from the Sargasso Sea
FRFFADMAPNACDGKSLPADEHLNYSIRQPIGPVGVITPWNTPFMLTTWKIAPALASGCTVVHKPAEWSPLSSMILADITKEVGLPDGVLNVVHGFGETAGKSLTENEKIKAIAFVGESSTGSKIMKQGADSLKRVHFELGGKNPVIVFDDADLDKALDATVFMIFSLNGERCTSSSRLLIQESIKDDFINKLCDRIAKLKVGHPLDPDTEIGPLIHEKHKQKVLNYFALAKKEGATIKAGGNEMASNSNGNYVEPTLFTDVSNDMRVAQEEIFGPVLSAITFKNEAEALEIANDIDFGLAAYLWTNDVGRSLR

SEQ ID NO: 93080 - protein, 277 aa, Unknown
  Bacterial polypetide isolated from the Sargasso Sea
FLSKDKKLYINGKWVDPNSNKSFDVEDPATGKKIATCAAGNSKDVDAAVKAARKAFDSGVWTTMSNSEKGKIIWKIGELIDKHNEELAQLESLDNGKPVAVAGAADVPLSSDIFRYMAGWATKIEGNTIPYSCLYTPGAQYHSYTLREPVGVCGQIIPWNFPLLMAAWKIAPALTAGCTIILKPAEQTPLSALRLTEIIHDAGILPEGVLNVVTGFGEEAGAPLAEHPLVDKVAFTGSTEVGKIITKAASGNLKKVSLELGGKSPTIIFPDADIEAA

SEQ ID NO: 93081 - protein, 263 aa, Unknown
  Bacterial polypetide isolated from the Sargasso Sea
KTAEQAPFCALLLSEIFQQELPPGVLNVISGYGEECGEPLVTHEKVRKVTFTGSFTVGKIIAQKAAPKLCPVTLELGGKNPNIIMSDADLDIAIQGVIDGMRYTRQGQACTAGSRVYIQEKIYDQVLGGAAEKLSKLKMGNALDESSDIGAIISEEQLKRTLHYMDIAKKNSTTNVVYGGNQITGGDYKNGFFYEPTLMSGVPVSSPVCQEEIFGPVACAIPFKTFDEVMNSANDTPFGLSAVLWTQNLSRALQFVEEIEAGF

SEQ ID NO: 93082 - protein, 261 aa, Unknown
  Bacterial polypetide isolated from the Sargasso Sea
MKVKFPFKAKYGNYINGKFVEPKSGKYFDNTTPITNEVICKVPRSNEKDVDFALDAAHAAFPAWGKTSITERSNILLKIADVIEKNLNVLATAECLDNGKPIRECMAADLPLVIDHWRYFAGVIRAEEGSVAEISNSEYSYHIPEPLGVVGQIIPWNFPLLMATWKLAPALAAGNCVVLKPAEQTPASIMLLMELIGDLLPAGVVNVVSGYGLEAGKPLASSKRIKKIAFTGETTTGRLIMQYASQNLIPITLELGGKSPN

SEQ ID NO: 93083 - protein, 300 aa, Unknown
  Bacterial polypetide isolated from the Sargasso Sea
EAGFPSGVINCVTGFGLEVGQPLVDHKDVSKVAFTGSDISGQKIYESAAKKIMPVTLELGGKSPNIVFDDADMDAAVMGVISGIFAATGQTCIAGSRLLLHEDIHDEFVSKLVSVAKEASIGDPMMESTNVGPVTTEPQFKKIIDYIDIAKSEGATCVLGGNKYNGPGSKGQRFVEPTIFTDVKNNMRIAQEEVFGPVLSIIRFKDEKEAIQIGNDILFGLAAGVWTSNIGRALRMADKLKAGTIWVNTYRAVSYMSPFGGYKRSGQGRESGQECIKEFLETKSVWISHETSSANPFVIK

SEQ ID NO: 93084 - protein, 265 aa, Unknown
  Bacterial polypetide isolated from the Sargasso Sea
VGFPPGVINVVTGFGADVGAPLVEHPKVAKVAFTGSDTTGTQIYQAAAKHMKHVTMELGGKSPNIVFDDAEVDNAVKGAISGIFAATGQTCIAGSRLLVQESIHDEFVDRLVALAETAKMGDPMNMDTQVGPVTNIPQFEKILDYIKIAKGEGAEAVLGGAKANALECGDGWFVEPTIFTGVKNSMRIAQEEVFGPVLSVIPFKDEEEAIEIGNDVVYGLAAGVWTQNIRRAMIMADRLEAGTVWVNTYRAVSYMSPFGGYKQSG

SEQ ID NO: 93085 - protein, 299 aa, Unknown
  Bacterial polypetide isolated from the Sargasso Sea
LNNAKRLTDKILIDGKLISAQTNNKIPVLNPSTGDNIGSAPQCDKNDVNIAVESAYKAFQKWKKIPARERGKMVAAGAKRLEERKSEIETLLSLDTGNALRTQAIPETAASIELTNMFAGLSGELKGENYPTNIPNSIHYTTRDPIGVVCAIVPWNAPLFLTVAKIAPAIVAGNSVVLKTAEQAPFCALLLSEIFQQELPPGVLNVISGYGEECGEPLVTHEKVRKVTFTGSFAVGKIIAQKAAPKLCPVTLELGGKNPNIIMSDADLDIAIQGGIDGMRYTRQGQACTAGSRVYIQEK

SEQ ID NO: 93086 - protein, 192 aa, Unknown
  Bacterial polypetide isolated from the Sargasso Sea
MKVKFPFKAKYGNYINGKFVEPKSGKYFDNTTPITNEVICKVPRSNDKDVDFALDAAHAAFPAWGKTSITERSNILLKIADVIEKNLNVLATAECLDNGKPIRECMAADLPLVIDHWRYFAGVIRAEEGSVAEISNSEYSYHIPEPLGVVGQIIPWNFPLLMATWKLAPALAAGNCVVLKPAEQTPASIMLL

SEQ ID NO: 93087 - protein, 304 aa, Unknown
  Bacterial polypetide isolated from the Sargasso Sea
MGAKSYIKYEPLGTVGMISPWNFPVNLAFVPLVSIFAAGNQVMHKPSEHTPLTSALLKDLCDKAYDEVEFATFLGGPEVGAAFTKLNFDHLLYTGGGSVAKHVMNAASENLVPLTLELGGKSPVVLGKSADLKTSAKRIMFGKTLNAGQICLAPDYVVVHKDQKNDFIKETKDAVSEYYPKIKDNDDYTSIINESHYNRLKDMIDDAIEKGATVEEINPANEDFSQQEFYKIPPTIVSNTTDDMKIMQEEIFGPLLPVVEYDEIDEATQLINSKDRPLGLYYFGNDKTEENNLLNKTSSGGVTV

SEQ ID NO: 93088 - protein, 238 aa, Unknown
  Bacterial polypetide isolated from the Sargasso Sea
MAVNYKSIAKKLKFEGRAFINGKYVNAIDGKKFETINPATGEKLCSVAKCNHKDVNLAVKVSRKAFNSGVWSKSSPEHRKEVLLKFAELLRKHGDENSVLECVDTGKLVTDCINEVANDAPMHFQWYGELIDKVFGKVGPTEPSITSLIVKEPIGVVAGIVPWNFPLMMAVWKMAPALAAGCSVIIKPAEDTPLTAIRVAKIAQEAGIPDGVLNVLPGYGDVGEALGRHKDVDAVSFT

SEQ ID NO: 93089 - protein, 149 aa, Unknown
  Bacterial polypetide isolated from the Sargasso Sea
TVDQSHSDLRRARGAAISMIPTSTGAAKALSLVLPKMKGKLDGTAIRVPTPNVSLIDFTFTSKKKTTVEKINKLAINASKTKELKNILTTNELPLVSIDFNHNPSSSVFDLTQTQVLNGRFCRVLSWYDNEWGFSNRMIETMLDLKKLL

SEQ ID NO: 93090 - protein, 300 aa, Unknown
  Bacterial polypetide isolated from the Sargasso Sea
QIFLNGMAEETKRIYGQTVESRFKDTRVHVYYQPVGVVAALSPWNFPLVLSSRKISTALAAGCSVIIKPDVITPGTVMELVDICNECGVPPGVVNLLSGDPPSIASQLIKSDIVKKISITGSSRVGKLILKQAADKVQRVTMELSGHSPFIVFDDADIKKATDMAVAAKFRNTGQVCISPNRFYIQESKKEEFVNLFVEKTKKLKMGNGMEPDVQLGPITTKKRLNEIEELVETTKKEGAKVLLGGKRPSGFNKGYFYEPTIFDNVKDDFTIMKVEPFGPLVPMLSFKTFDEVIERANNH

SEQ ID NO: 93091 - protein, 252 aa, Unknown
  Bacterial polypetide isolated from the Sargasso Sea
STRAGTLVAQNAAPTVKRISQELGGKSPNIILEDADLEKAVKGGVMHMYNNSGQSCNAPSRMLVPSAKLAEAEEIAAEVSKKVVVGDPKAEGTTMGPVVSEVQFEKIQGLIEKGISEGAKLVTGGPGRPDGLNQGFYVRPTVFSEANNDMTISREEIFGPVLTMIPYDSEEEAIQIANDTEYGLAAYVQSSDLDKARKIASKLRAGNINLNGAGQTPNLPFGGYKKSGNGREWGAHGFADYLEIKAVAGFEE

SEQ ID NO: 93092 - protein, 266 aa, Unknown
  Bacterial polypetide isolated from the Sargasso Sea
ITNEVICKVPRSNDKDVDFALDAAHAAFPAWGKTSITERSNILLKIADVIEKNLNLLATAECLDNGKPIRECMAADLPLVVDHWRYFAGVIRAEEGSVAEISNSEYSYHIPEPLGVVGQIIPWNFPLLMATWKLAPALAAGNCVVLKPAEQTPASIMLLMELIGDLLPAGVVNVVSGYGLEAGKPLASSKRIKKIAFTGETTTGRLIMQYASQNLIPITLELGGKSPNIFFEDVMSKDDDFFDKCLEGFAMFTLNQGEVCTCPSRA

SEQ ID NO: 93093 - protein, 259 aa, Unknown
  Bacterial polypetide isolated from the Sargasso Sea
MLDKRQFYINGKWVDPTTPNDLEVINPSNEEVCAIISLGSSSDTDLAIESANQALPSWSKTSKEERLKLIEKLYEIYKARWNDMTESISLEMGAPYDWANNEQSKSGANHIKNFIKTLKKFEFESSFDEESDNHIVYEPIGVCALITPWNWPINQITLKVIPALAAGCTMVLKPSEIAPLSGMVFAEMVHEAGFPAGVFNLVNGNGEGVGTHLSGHPKIDMVSFTGSTRAGKLITKNSADTIKRVTLELGGKGGNIVFA

SEQ ID NO: 93094 - protein, 250 aa, Unknown
  Bacterial polypetide isolated from the Sargasso Sea
MFTGSTNTGKLVMKSAAENLVPVTLELGGKSPVIVDDDADMKSATTRIMRGKTMNAGQICLAPDYVMVPKGKSEEFYEKSKEAIEKSFDTLKYNPDYTSVINEKHYERLNDLIEDAKAKGADVKVINPADEDFSQQEVHKIPPTLIMNPTDDMQIMKEEIFGPVLPVKEYENFQETINYVNSKDRPLGLYYFGKNKEREEKVLNNTISGGVTINDVIWHIGQEDLPFGGVGPSGIGNYHGFDGFKTFSHA

SEQ ID NO: 93095 - protein, 318 aa, Unknown
  Bacterial polypetide isolated from the Sargasso Sea
SLSCSFATGNSQIIKSAELTPLSAAIFAKAIEKAGVPKGLINIIAGYGEEAGSYLVSHPDVNHVVFTGSVNTGKKILHACADKAIPAIVELGGKSAGIVYPDADLDSVIESARHGIFGVAGQICTAMSRLVVHKSIKDELIEKLVTLSKSLKIGAGYEEGTELTPVISENQLEKIEGYARSGIQQGAEAVYGGKRVDREGYFMEPTVLNNVKKDMTVAREEIFGPVLSVLEYNEQEEAIEIANDTDYGLGAGVFTKDLKKASWTASKLEAGQVYVNKWFTGSHATPFGGYKKSGYSREKGVDALKSYLQVKNVGISLN

SEQ ID NO: 93096 - protein, 300 aa, Unknown
  Bacterial polypetide isolated from the Sargasso Sea
ETIPYLKDYTVYTLREPHGVTGHIIPWNYPMQIIGRTLGASLAMGNACVLKPSEEACLTALAIGELATEVGFPEGSINIVPGLGTKAGTSLISHPDIDHISFTGSVKIGKTIQSEAAKNLVPVTLELGGKSPQIVFEDANVDKALPFLINAGIQNAGQTCSASSRILVSKKIYSEVVEKMSSSYSKLKVDQAIEDQDLGPVISNRQKKVIQNYLYFSKDLECIAEGRFNSDLPKKGHYVLPKLFGDVKYSHKLAQEEIFGPIQVIIPFEDEEDAIKIANSTKYGLVASIWTLDGARQMRV

SEQ ID NO: 93097 - protein, 258 aa, Unknown
  Bacterial polypetide isolated from the Sargasso Sea
SGCFKCISGYGEECGEPLVTHEKVRKVTFTGSFTVGKIIAQKAAPKLCPVTLELGGKNPNIIMSDADLDIAIQGVIDGMRYTRQGQACTAGSRVYIQEKIYDKVLGGAVEKLSKLKMGNALNESSDIGAIISEEQLKRTLHYMDIAKKNSTTNVVHGGNQITGGDYKNGFFYEPTLMSGVPVSSPVCQEEIFGPVACAIPFKTFDEVMNSANDTPFGLSAVLWTQNLSRALQFVEEIEAGFVQVNQCVAPRANVSYGG

SEQ ID NO: 93098 - protein, 252 aa, Unknown
  Bacterial polypetide isolated from the Sargasso Sea
MGKTIAKIAAPMFKKLSLELGGKNPNIIFADCNLDKAVSVSILSSFSNQGQICLCGSRIFIERKIYDNFKKKFLKKVKELSIGDPLDKKTKIGALVSKAHMNKVLQHIKIAKDEGGVLLAGGNRHFNKGRCEKGYFLEPTVFEGLAYDCNTNQEEIFGPVVTLTPFDNEKELIRYANSTKYGLSASVWTSNISKANRLSNSLMAGIVWVNCWLVRDLRTPFGGVKESGIGREGGTYAINFFTETTNVCISYD

SEQ ID NO: 93099 - protein, 294 aa, Unknown
  Bacterial polypetide isolated from the Sargasso Sea
VPWNFPLMMAVWKMAPALAAGCSVIIKPAEDTPLTAIRVAQIGKEAGIPDGVLNVLPGYGDVGEALGRHKDVDAVSFTGSTEVGGYFLKYSSESNLKPVALEMGGKSPFIVLEDAKINDDLIDNAINSAFWNGGQNCSANMRQIVHKKVKDEFLDKVIKKVKKLKVGDPLDLKSNMGSMISKGHLQTVDGYIQKGIDEGAKLLTGGVSNNKQKGFYAKPTLFDGLKENMTIAQEEIFGPVLGVLTVKNDEDALKVASNSKYGLHASVFTQDINRAFHLAKSLPCGTVSVNTFSE

SEQ ID NO: 93100 - protein, 175 aa, Unknown
  Bacterial polypetide isolated from the Sargasso Sea
PKEAKRVYGDVIPGHQPDKRLIVIKQPIGVTAAITPWNFPAAMITRKAGPALAAGCTMVIKPASQTPFSALALVELAHRAGIPKGVLSVVTGSAGEVGGELTSNPIVRKLSFTGSTEIGRQLMAECAKDIKKVSLELGGNAPFIVFDDADLDKAVEGALISKYRNNGQTCVCANR

SEQ ID NO: 93101 - protein, 281 aa, Unknown
  Bacterial polypetide isolated from the Sargasso Sea
MKTYNHYINDEWVEPSSGDYLDSENPFTGEIWARVARGNAEDADMAVKAAKEAFENSDWADMRPTQRGKLLVGLAEIIEREAVRLGEIEVRDNGKLIAEMGAQTKYLAEWYRYYGGLADKIEGVVIPSDKPGIFNFTRYEPLGVVGMITAWNSPLLLLAWKLAPALAAGNTAVVKPSEFTSASSLEFMELIREVGFPKGVVNCITGLGLEVGQPMVDHPDLDKVAFTGSDVAGQKIYESAAKKIIPVTLELGGKSPNIVFEDADFESAVMGAISGNFCCHR

SEQ ID NO: 93102 - protein, 302 aa, Unknown
  Bacterial polypetide isolated from the Sargasso Sea
RVVVKHQPIGPCLLITPWNFPLLMIVRKAGAALAAGCTTITKTAQETPLTGALFVEVLHDAGFPAGVVNLLHTTKSSGVSEPLLKDKRLRKVSFTGSTGVGGLLMEQGARNILNCSMELGGDGPFIVLDDADIDLAAEQAIICKFRNAGQACVAANRIIVDARVETEFTEKFVAKVKALKVGDGMGAVDVGPMISAKQRDRLGETLNQLTDAGGRLLAGGRPVAGEGYFFEPTVVRFEGRNEVMCSNELFAPIAAIFSVDGPEAALAFANESDFGLASYVFTRDLSRALTFGERLEFGMVGI

SEQ ID NO: 93103 - protein, 323 aa, Unknown
  Bacterial polypetide isolated from the Sargasso Sea
GQTIAVNNPATGEIIGHVPKMGRAETRRAIEAAEQALPAWRALTAKERANKLRRWFELLMENQDDLGRLMTLEQGKPLAEAKGEIAYAASFIEWFAEEAKRVYGDVIPGHQPDKRLIVIKQPIGVTAAITPWNFPAAMITRKAGPALAAGCTMVIKPASQTPFSALALVELAERAGIPKGVLSVVTGSAGEVGGELTSNPIVRKLSFTGSTEIGRQLMAECAQDIKKVSLELGGNAPFIVFDDADLDAAVEGALISKYRNNGQTCVCANRIYVQGRRLRRLRRETDRCRGQAEDWHGLEDGTTTGPLIDEKAVAKVQEHIARR

SEQ ID NO: 93104 - protein, 299 aa, Unknown
  Bacterial polypetide isolated from the Sargasso Sea
SKALQSAENGLNIWKNTPAWERSYIIRRIADRIREKKDVLAKWMALEVGKPLTEGLAEVNGSADIFEWNAEETKRIYGQTVESRFKDTRVHVYYQPIGVVAALSPWNFPLVLSSRKISTALAAGCSVIIKPDVITPGVIMELVDICRECGVPPGVVNLLSGDPPTIAQQLISSDIIKKISITGSSRVGKLILKQAADKVQRVTMELSGHSPFIVFDDADIQKATDIAISAKFRNNGQVCISPNRFYIQDTKKDEFINLFIEKTKKLKIGNGLDPETQLGPLTTKKRLNEVEELVETTKK

SEQ ID NO: 93105 - protein, 288 aa, Unknown
  Bacterial polypetide isolated from the Sargasso Sea
MGLITKEPIGVVAAIVPWNYPLWMAIWKIAPALITGNSVILKPAEQSPMSAIKIGALLSEAGVPDGVFSVLPGDGPITGKSLCLHNDVDCVAFTGSGEVGKLVLQYSGQSNMKRVQLECGGKSPNIIFADCPDLDSAAEASAYAIFGNQGEVCSAGSRLIVQKEIEKDFLDKVAKISETMQPADPLDPSSFAGAIVNTEQLEKINKYVNIGKEEGAEIKVGGNITMKETGGCYFEPTIFKNVKNSMKIAQEEIFGPVLTALTFKDYNEAISIANDTEYGLAAGVWTRD

SEQ ID NO: 93106 - protein, 278 aa, Unknown
  Bacterial polypetide isolated from the Sargasso Sea
GGRSHIQYQPKGVVGIVAPWNFPVAMVFQPLAGILAAGNRAMIKPSEFTPETSKVIDEIVAEAFDPTEVTTFSGGPEVGQAFSALPFDHMIFTGATNIARHILTAAARNLVPVTLELGGKSPVVISRSADLDQAMQRVMLGKTLNAGQICLAPDYLLVPEEQLEEVISLATRAVNEMYSSLRDNDQYTSVINDRHHKRLGGYLEDAEQRGCRIISLNPANEDFSNGTGKIPPTLIVSPENDALCMEEEIFGPLLPIRTYKNFDETIDYINANPRPLAA

SEQ ID NO: 93107 - protein, 265 aa, Unknown
  Bacterial polypetide isolated from the Sargasso Sea
MGADICRNNIEILKDFNFEHQFDPKSNNHIRYEPIGVCGLITPWNFPMNQIVLKVIPALAAGCTMILKPSEIAPVSAVLFAEMIDEAGFPAGVFNLVNGNGEVVGNHISGHPDIDMVSFTGSTRAGKLIQKNAADTIKKVTLELGGKGGNIVFADSYPNAVRDGVRNIMSNSGQSCDAPTRMLVEKPIYERAVKEAVDEANKIKVDLASKKGDHIGPLVSKVQYDKVVNLINEGIKEGATLAAGGPDLPNGLNKGYFVNQQFFQM

SEQ ID NO: 93108 - protein, 161 aa, Unknown
  Bacterial polypetide isolated from the Sargasso Sea
MKRFTWGPISNKTQYAKVQDLIQKGIDEGATLACGGTGRPNGLEKGFFVKPTVFTNVKNNMTIAREEIFGPVICLIPYSDVEQAIEIANDSEYGLSSMISCSDEVKGQEIAKKIRTGQVILNRISRGDYPAPFGGFKMSGNGREHGLFGIDEYLEVQAVIT

SEQ ID NO: 93109 - protein, 277 aa, Unknown
  Bacterial polypetide isolated from the Sargasso Sea
MKLIREAGFPKGVVNCITGLGLEVGQPMVDHPELDKVAFTGSDLAGKKIYESAAKKIIPVTLELGGKSPNIVFEDADFELAMMGAISGIFAATGQTCIAGSRLLVQRSIHDSFVERLIEVAKEAKIGDPISTETHVDPVTTPPQYRKILDYIEVARKEGAKCVLGGKPYAGDGVRSDRFVEPTIFTGVSNQMQVAQEEIFGPVLSVIPFEDEDEAIAIGNDIVFGLAAGVWTSDIGRALRISEKLKAGTIWVNTYRAVSFMSPFGGYKRSGKGRESG

SEQ ID NO: 93110 - protein, 299 aa, Unknown
  Bacterial polypetide isolated from the Sargasso Sea
AGNWSDADSGEKDEVLNPATGGILGTVPQCGQQETRKAIEAANQAMPAWKATPAKERGKILRRWYELMIENKEDLAILMTAEQGKPLAESHGEILYASSFFEWFSEEAKRMYGETIPTHMPDRRLLVVKEGVGVTAAITPWNFPAAMITRKAGPALAAGCPMIIKPAPDTPFSALALCELGERAGVPKGILSVVPGDAIAVGGELTSNAIVRKLSFTGSTGVGKLLMKQCSETMKKLSLELGGNAPFIVFDDADLDAAVQGALDCKFRNAGQTCVCANRIMAQDGIYDEFTRKLAEGAA

SEQ ID NO: 93111 - protein, 285 aa, Unknown
  Bacterial polypetide isolated from the Sargasso Sea
KFNSCHKSSFRREHRKCKYCSKEDVDKAVQAARNAFKSFSKTLVSERVELLTEIRNIYKKRFDDIATAIQTEMGAPNSLARGSQATVGLSHLKTAIRVLENHKFEFKHGSYIVRHEPIGVCGLITPWNWPINQVVSKLAPCLASGCTAVLKPSEIAPLSSMVIAEIFHEAGVPKGVFNLVNGLGPVVGEAMSNHVGIDMMSFTGSTRGGIAVARASANSVKRVCQELGGKSPNIILDDENFKISVSDGVKSCMSNTGQSCNAPTRMLVPKKRYDEALEIAIEANN

SEQ ID NO: 93112 - protein, 315 aa, Unknown
  Bacterial polypetide isolated from the Sargasso Sea
ASIELTNMFAGLSGELKGENYPTNIPNSIHYTTRDPIGVVCAIVPWNAPLFLTVAKIAPAIVAGNSVVLKTAEQAPFCALLLSEIFQQELPPGVLNVISGYGEECGEPLVTHEKVRKVTFTGSFTVGKIIAQKAAPKLCPVTLELGGKNPNIIMSDADLDIAIQGVIDGMRYTRQGQACTAGSRVYIQEKIYDQVLGGAVEKLSKLKMGNALDESSDIGAIISEEQLKRTLYYMDIAKKNSTTNVVHGGNQLTGGDYKNGFFYEPTLMSGVPVSSPVCQEEIFGPVACAIPFKTFDEVMNSANDTPFGLSAVLWT

SEQ ID NO: 93113 - protein, 283 aa, Unknown
  Bacterial polypetide isolated from the Sargasso Sea
IGVVCAIVPWNAPLFLTVAKIAPAIVAGNTVVLKTAEQAPFCALLLAEIFQKELPPGVLNVISGYGEECGEPLLSHPDVRKITFTGSFSVGKIIAQKAAPKLCPVTLELGGKNPNIIMSDADLDIAIPGVIDGMRYTRQGQACTAGSRVYIQEKIYEKVLEGVVNKLKNLKMGNALDENSDIGAIISKEQLNRTLHYMNIAKENSSTKVLHGGNQKKEGDYKNGFFYEPTLLSGVPVESPVCQEEIFGPVACAIPFKSFDEVLKSANNTPFGLSAVLWTQKFI

SEQ ID NO: 93114 - protein, 207 aa, Unknown
  Bacterial polypetide isolated from the Sargasso Sea
MSTEKYKSIAANLKLEGRAYINGKYVDAVDGAKFETINPATGETLCSVAKCNNKDVELAVKVSRKVFENGIWSRSTPEHRKEVLLNFAKLLSDQGKENSVLESIDTGKLIVDCINEVANDAPMHFQWYGELIDKVFGKVGPTDPSITSLIVKEPIGVIAGIVPWNFPLMMAVWKMAPALAAGCSVIIKPAEDTPLTAIKVAEMHSKA

SEQ ID NO: 93115 - protein, 278 aa, Unknown
  Bacterial polypetide isolated from the Sargasso Sea
MDKVIKNFQNISYGPAPEDSKEVNSWIKNLKNPNNLFINGKFVKSSSSKKLNIINPSTNKKIATLSVASKKDVNAAVSAAKKAHIKWSKLSSFDRSKYLYALARLIQKNSRFISVLETIDNGKPIRETRDIDIPLVARHFYYHAGWAARNTNNSDNSIGVVGQIIPWNFPLLMLAWKIAPAIALGNTVVLKPAEYTSLSALYFAELCQKAKIPQGVINIITGDGSTGEHITSHKDIKKIAFTGSTEVGKKIIQTNTNPDKKMTMELGGKSPFIVLKML

SEQ ID NO: 93116 - protein, 306 aa, Unknown
  Bacterial polypetide isolated from the Sargasso Sea
QEGTIGNIDGMQSGGGNSALGMMAYHYPEPLGVVGQIIPWNFPILMAAWKLAPALAAGNAVVLKPAEQTPFSINVLMEVIGDLLPAGVANIVHGYGVEAGKPLASSKRVKKVGFTGETTTGRLILQYASENLIPVTLELGGKSPNIFFKDIMGGSDDYISRCVEGFLHAYFNQGEVCTCPSRAIIHEDIYEPFMEMVKERVKALNCGSPFDLNTQVGAQASNEQFEKIMSYLDIGKQEGAEVIYGGEKREMNGNFSGGYYVEPTAFKGNNSMRIFQEEIFGPVISVATFKDEAEAVSIANDTLYGL

SEQ ID NO: 93117 - protein, 279 aa, Unknown
  Bacterial polypetide isolated from the Sargasso Sea
RVLEAQKKFFIEEGSPSIELRIDRLNRLKCLIMNNRYDFVDALNEDYGNRSNNISLLSDAYGIIPDINNAIKNIRKWTKIDKRSSNFPFGLFGAKSYVKYEPIGTVGMISPWNFPVNLSFKPLAAIFAAGNQVMHKPSELTPITASLIKDLCDKEYDENEFATFLGGPETGEAFTKLHFDHLLYTGSGSIGKKVMKSASQNLVPVTLELGGKSPVIIGNSADIKVSAKRIMFGKTLNAGQICLAPDYVIVHKEKKDEFITEVENVINEYYPTIKDNDDY

SEQ ID NO: 93118 - protein, 276 aa, Unknown
  Bacterial polypetide isolated from the Sargasso Sea
DVDKALKSAEKGLEVWKQTPPWQRSYIIRRIADKMREKQDVLAKWMTLEVGKPFAEAKGEVGGSADIFEWNAEETKRIYGQTVESRFVDTRVHVYYQPVGVVAALTPWNFPLVLSSRKISTALAAGCSVIVKPDVITPGTVMELVDICRECGVPPGVVNLLSGDPPSIAQQLISSDIIKKVSITGSTRVGKLILKQAADKVQRVTMELSGHSPFIVFDDADIQKATDMAISAKFRNNGQVCISPNRFYIHEEKKEEFISSFIDKTKKLKIGNGMDP

SEQ ID NO: 93119 - protein, 287 aa, Unknown
  Bacterial polypetide isolated from the Sargasso Sea
GVAASITPWNFPNAMITRKAGPALAAGCAFVARPASETPFSALALGVLAERAGLPKGILSILPSTDASGTGKEFCENKKVRKLTFTGSTEVGRVLLGQAAKNVLKCSMELGGNAPFIVFDDADLDDAVQGAIMCKFRNNGQTCVCANRIYVQTGVYKEFAAKLQKAVSKLKVGDGFDPETTLGPLISLNAVKKVNSHIDDAISKGAEPIYSNTYSQEDGNFINPTILTGVTKNMKVATEETFGPLAPLFEFSTVEEVIELANDTIFGLASYFYAKDLSRVYEVAEAL

SEQ ID NO: 93120 - protein, 196 aa, Unknown
  Bacterial polypetide isolated from the Sargasso Sea
MNLETLYEKMEYGPAPESPNNAVQWLKDHQHKFILFINGKWTESSTKSRFESINPATGKSLASISEASEEEVDQAVKAANKAFESWSGLDPHQRSRFLYAMARQMQKHSRLLAVLETLDNGKTIRETRDIDVPLAVRHFYHHAGWAQLLDQEFKNHQPLGVVGQIIPWNFPLLMLAWKVAPALASGNTVVLKPARV

SEQ ID NO: 93121 - protein, 266 aa, Unknown
  Bacterial polypetide isolated from the Sargasso Sea
PSGVVGQIIPWNFPTVMAIWKLAPALATGNCVVLKPAEQTPASIMVLMELIGHLIPPGVVNVVNGYGLEAGKPLASSTRIAKIAFTGETTTGRMILQYASQNLIPSTLELGGKSPNIFFKDIAEADDDFFDKCIEGFVMFALNQGEVCTCPSRALIHEDIYDKFIARCIERTKAIIQGDPLDSNTMIGAMASSEQYEKVKSYLDLGKKEGAEVLVGGDVAQMSGEMANGYYIQPTIFKGHNKMRIFQEEIFGPVVSVCTFKTDEEA

SEQ ID NO: 93122 - protein, 310 aa, Unknown
  Bacterial polypetide isolated from the Sargasso Sea
DREFNAMVHGSSKAKVIRQPKGVMGNMAPWNFPIECALVMVNDMLAAGNRVIIKGAELTPATSAVLEEAIKSEFDEDTVAVVNGDISFAEYFCTLPWDHLTYTGGERVAKLVMNAASKNLTPVTLELGGKNPTVFTNEGVCDLLVERFLYNRIFKAGQVCSSPDYALVPEEHLSTWINLAKSKWSEMYPSYIGHADATGTINDHHYDRIMNYIDEAREAGCKVISLNGEEPNKTLRQIPMMLVIDPDESLSIMQEEVFGPVTAVKTYSNIDSVIDYINSKPRPLAAYLVGREIESIQKFEENIISGGMEL

SEQ ID NO: 93123 - protein, 292 aa, Unknown
  Bacterial polypetide isolated from the Sargasso Sea
APIKLASTAQAYAGLGHITEAAKILKDYSFTEDLGPHRVVKEPIGVCGLITPWNWPLNQVSCKVAPALAVGCTMVLKPSEIAPLSAYLYAEIMDEAGIPVGVFNLVNGDGPTVGEALSRHPDVDMMSFTGSTRAGSLVAQNAAPTVKRVTQELGGKSPNIILADADLEAAVTRGVMHMYNNTGQSCNAPSRMLVPRDLLPKAEAIAAKVTESVVIGPTAEDSTTMGPVVSKVQWDKIQALIEGGIAEGAKVVCGGPGLPDGIDRGYYVRPTVFSDVTNDKSIAEQEIFGPVL

SEQ ID NO: 93124 - protein, 178 aa, Unknown
  Bacterial polypetide isolated from the Sargasso Sea
TKYAIAAANNMSTGDPLDEDIYLGPISNKTQYEKVQDLIQKGIDEGATLACGGTGRPNGLEKGFFVKPTVFTNVNNNMTIAREEIFGPVICLIPYSDIEQAIEIANDSEYGLSSMISCSDEVKGQEIAKKIRTGQVILNRISRGDYPAPFGGFKMSGNGREHGLFGIDEYLEVQAVIT

SEQ ID NO: 93125 - protein, 143 aa, Unknown
  Bacterial polypetide isolated from the Sargasso Sea
SDFRRARGAAISMIPTSTGAAKALSLVLPNMKGKLDGTAIRVPTPNVSLIDFTFTSKKKTSIEKINSLIIKASKTKSLKNILTTNKLPLVSIDFNHNSSSSIFDLTQTQVIKGKFCRILSWYDNEWGFSNRMIDTLLDLKKYL

SEQ ID NO: 93126 - protein, 259 aa, Unknown
  Bacterial polypetide isolated from the Sargasso Sea
MLGARAEVRYQPKGVVGAISPWNFPMNLALAPLAGIIAAGNRVMHKPSELTPATSDLLKLMVEEYFDEAEMAVFVGDAEVGAAFSGLAFDHLIFTGGTSIAKHVMKAASENLVPLTLELGGKSPVVVGKDAKIKDTAQRVMQGKTMNAGQICLAPDYALVPEGKVDEFVKASVEVTSEMFPEMKDNDDFTSIINQRHYDRIQGYLDDAKEKGADIVEINPSNEDFSQQPHHKIPPTLVLNPSEDMKIMQEEIFGPVLPI

SEQ ID NO: 93127 - protein, 269 aa, Unknown
  Bacterial polypetide isolated from the Sargasso Sea
IVLKVIPALAAGCSMILKPSEIAPISGVLFAEMIDEAGFPSGVFNLVNGNGEVVGNHISGHPDIDMVSFTGSTRAGKLIQKNAADTIKKVTLELGGKGGNIIFADSYPNAVRDGVRNIMSNSGQSCDAPTRMLVQKPIYERAVKEAVDEANKIKVDLASKKGDHIGPLVSKVQYDKVINLINTGIKEGAKLAAGGPDLPDGLNKGYFVKPTIFTDVNNDMRIAREEIFGPVLSIIPFETEEEAIAIVNDTSYGLGNYLQTEDKEKAQRV

SEQ ID NO: 93128 - protein, 224 aa, Unknown
  Bacterial polypetide isolated from the Sargasso Sea
MVAAGAKRLEERKSEIETLLSLDTGNALRTQAIPETAASIELTNMFAGLSGELKGENYPTNIPNSIHYTTRDPIGVVCAIVPWNAPLFLTVAKIAPAIVAGNSVVLKTAEQAPFCALLLSEIFQQELPPGVLNVISGYGEECGEPLVTHEKVRKVTFTGSFTVGKIIAQKAAPKLCPVTLELGGKNPNIIMSDADLDIAIQGVIDGMRYTRQGQACTAGSRVYI

SEQ ID NO: 93129 - protein, 242 aa, Unknown
  Bacterial polypetide isolated from the Sargasso Sea
MNLETLYEKMEYGPAPESPNNAEQWLKDHQHKFSLFINGKWTESSKKNNFESINPATGKSLASISEASEKEVDQAVKAAKKAFESWSGLDSHQRSRFLYAMARQMQKHARLLAVLETLDNGKTIRETRDIDVPLAVRHFYHHAGWAQLLDQEFKNHQPLGVVGQIIPWNFPLLMLAWKVAPALAAGNTVVLKPAEFTPLTALWFAEMCQRIGLPPGVFNLLTGSGTTGAMLAAPFRVFRKSH

SEQ ID NO: 93130 - protein, 259 aa, Unknown
  Bacterial polypetide isolated from the Sargasso Sea
SVLGNLPNDISAIEGGISIDGQLLKVLSERNPSDLPWADLEVDVVIESTGIFTDRDKAAQHLDAGAPLVIVSAPASGADATIVVGVNHDEFEKGVHQVISNASCTTNCFVPMVQVLDDAFGVEKGLMTTVHAYTGDQSLVDGPHSDLRRARASAVNIIPTSTGAARATGLVLQAMNGKLDGTSLRVPIPDGSITDFTAVLASSPTVEEINAAFAEAAAKAPLAGILAYSEDPLVSSDIVGDPSSCVFDAGLTMTMDNLV

SEQ ID NO: 93131 - protein, 289 aa, Unknown
  Bacterial polypetide isolated from the Sargasso Sea
ILMAAWKLAPALAAGNAVVLKPAEQTPFSICALLELIGDLIPAGVVNVVQGYGVEAGKPLASSNRIKKIGFTGETTTGKLIMQYASENLIPVTLELGGKSPNIYFKDIMNGSDDYVSRCVEGFLHAYFNQGEVCTCPSRAIIHKDIYEPFMEMVKDRVKALNCGNPFDLSTQLGAQASNEQYEKIMSYLDIGRQEGAKVLFGGEKREMQSPYSGGYYVEPTAFEGNNSMRIFQEEIFGPVVSVTTFEDEAEAVSIANDTLYGLGAGVWSRDANTCYRMGRNIEAGRVWV

SEQ ID NO: 93132 - protein, 189 aa, Unknown
  Bacterial polypetide isolated from the Sargasso Sea
MKVKFPFKAKYGNYINGKFVEPKSGKYFDNTTPITNEVICKVPRSNEKDVDFALDAAHAAFPAWGKTSITERSNILLKIADVIEKNLNVLATAECLDNGKPIRECMAADLPLVIDHWRYFAGVIRAEEGSVAEISNSEYSYHIPEPLGVVGQIIPWNFPLLMATWKLAPALAAENCVVLKPAGTNTSIN

SEQ ID NO: 93133 - protein, 234 aa, Unknown
  Bacterial polypetide isolated from the Sargasso Sea
RVHVYYQPVGVVAALVPWNFPLVLSARKISTALAAGCSVIVKPDVITPGVVMEQVEICRECGVPPGVVNLLSGDPPSIAQQLIASDIVKKISITGSSRVGKLILKQAADKVQRVTMELSGHSPFIVFDDADIKKATDMAIAAKFRNNGQVCISPNRFYIQENKKDEFVNLFVEKTKKLKIGDGMDPSVQLGPLTTKKRLNEIEELVETTKKEGAKVLLGGKRPSGFNKGYFYEP

SEQ ID NO: 93134 - protein, 253 aa, Unknown
  Bacterial polypetide isolated from the Sargasso Sea
EQALGKFSGESLIRETFDNFIGGKWVAPVRGQYFDNVSPVTGQVVCRVARGTAEDIELALDAAHAAKDAWGKASPIERSNTLLKIADRLEANLDRLALVETIDNGKPIRETTAADIPLAIDHFRYFAGVLRAQEGSIAEIDHDTVAYHFHEPLGVVGQIIPWNFPILMAAWKLAPALAAGNCVVLKPAEQTPMSILVLAETIADLLPPGVLNIVNGFGIEAGKPLATNKRIAKIAFTGETPPAASSCSTPRKT

SEQ ID NO: 93135 - protein, 298 aa, Unknown
  Bacterial polypetide isolated from the Sargasso Sea
LVVDHWRYFAGVIRAEEGSVAEISNSEYSYHIPEPLGVVGQIIPWNFPLLMATWKLAPALAAGNCVVLKPAEQTPASIMLLMEMIGDLLPPGVVNVVSGFGLEAGKPLASSKRIKKIAFTGETTTGRLIMQYASQNLIPITLELGGKSPNIFFEDVMAQDDDFFDKCLEGFAMFTLNQGEVCTCPSRVLVQESIYDKFMERAIARTKAVKQDNPLKMETMIGAQASVEQMEKIKSYLDLGKKEGAKVLCGGNVAKVNSGLEKGNYIEPTIFEGNNSMRIFQEEIFGPVVSVTKFKEKQ

SEQ ID NO: 93136 - protein, 292 aa, Unknown
  Bacterial polypetide isolated from the Sargasso Sea
QAIFMLTAKPDIDNGFKLQKESFLNEDASSLKDRINDLNIIKKALLKYQHELSSAMNEDFGNRNQMESLFGDILPLINTINYQIKKLPFWMRPSRRKPGLLLSPAKVEIHYQPLGVIGIIVPWNFPVQLSIHPLITALSSGNRAMIKLSEFTPKTNTILQKLIDECFDKEKVMLVHGDSETAEYFTTLPFDHILFTGSTSIGKKVMKAAAENLTPVTLELGGKSPVIICDDIKIETAVERLILGKCLNAGQMCVSPDYIFCPNDQVDDFITTYKNKFKKMLERSITIMTTQA

SEQ ID NO: 93137 - protein, 197 aa, Unknown
  Bacterial polypetide isolated from the Sargasso Sea
MAKKTNKNTWELAPAPESSGHIDLKKQYELFIDGRWVAPKKKKYFATTNPANEKKIANIAYADESDVDLAVAAARKAFDGVWSKIAPSERAKYIYRIARIMQERSRELAVIETMDGGKPIRESRDVDVPLASNHFFYNAGWADKLEYAFPTKRAEPLGVAGQIIPWNFPLLMAAWKIAPALAAGNTVVLKPAETTSL

SEQ ID NO: 93138 - protein, 252 aa, Unknown
  Bacterial polypetide isolated from the Sargasso Sea
MKVSSVLDTSHLNVKFPFKSKYGNYINGKFVEPLSGKYFDNPSPISNEIICSVARSNEKDVEAALDAAHAAFKEWGKTDITTRSNILNKIADKIEENKDMLAVAECLDNGKPIRECMAADLALVIDHWRYFAGVIRAEEGSVAEISNSQYSYNIPEPLGVVGQIVPWNFPLLMATWKLAPALAAGNCSVLKPAEQTPASIMVMMELIGDLLPPGVVNIVSGFGLEAGKPLASSKRVAKVAFTGETTTGRLIM

SEQ ID NO: 93139 - protein, 245 aa, Unknown
  Bacterial polypetide isolated from the Sargasso Sea
DTGNALRTQAKPETSASIELTRMFAGLSGEIKGENYPPNIANTLHYTTRDPIGVVCAIVPWNAPLFLTVAKIAPAIVAGNTVVLKTAEQAPFCALLLAEIFQKELPPGVLNVISGYGEECGEPLLSHPDVRKITFTGSFSVGKIIAQKAAPKLCPVTLELGGKNPNIIMSDADLDIAIPGVIDGMRYTRQGQACTAGSRVYIQEKIYEKVLEGVVNKLKNLKMGNALDENSDIGAIISKEQLNRT

SEQ ID NO: 93140 - protein, 303 aa, Unknown
  Bacterial polypetide isolated from the Sargasso Sea
IKPSELTPASGEFMKKLIEKTFSSDEVAVFLGEKEVAQKLLDLPFNHIMFTGSPRVGKLVMKAASKHLAGVTLELGGKSPVIIDKDANINDAAWKISFYKFANAGQTCTAPDYILCHGSVYEDLVSALQKNMAQFFSGGIDVATKDYCSIANQHHFNRLQDALRGAVSDGAEIACGGETSQRGLYFSPAVLTGVNYDNSIMQEEIFGPILPVVKVKNLEESINYINSNEKPLALYLFSNSSSVHNRVLENTSSGGMVINDCVLHHMNPNLPFGGINNSGVGSYHGKFGFDAFSHQKAVLKSSA

SEQ ID NO: 93141 - protein, 195 aa, Unknown
  Bacterial polypetide isolated from the Sargasso Sea
ICSAMSRMIVHKSIKDEVLEKLSKLAASIKVGPGDEEGVDLTPVISEEQLQKVENYARSGLQAGAKAVSGGNRVDRKGFFFEPTIYSDVKPDMTIAQEEIFGPFLSVLDYEDHEEAIHIANDTDYGLAAGVFTKDVDMATKTASRLNGGQVYVNSWFTGSIATPFGGYKQSGYSREKGQQAIKSYLQLKNVGIQL

SEQ ID NO: 93142 - protein, 292 aa, Unknown
  Bacterial polypetide isolated from the Sargasso Sea
LRITLETSELTKKMFQEYFDSAEAAVFTGGPDVGAAFSALPFDHLLFTGSTNTGKLVMKSAAENLVPVTLELGGKSPVIVDDDADMKSATTRIMRGKTMNAGQICLAPDYVMVPKGKSEEFYEKSKEAIEKSYESLKYNPDYTSVINEKHYDRLNDLIEDAKEKGAEVKVINPANEDFSQQEVHKIPPTLIMNPTDDMQIMKEEIFGPVLPVKEYENFQETIDYVNSKDRPLGLYYFGKNKEREDKVLNNTISGGVTINDVIWHIGQEDLPFGGVGPSGIGNYHGFDGFKAF

SEQ ID NO: 93143 - protein, 295 aa, Unknown
  Bacterial polypetide isolated from the Sargasso Sea
MEINKFYIDGNFVEPDGSEKIDIVNPATEEVISHVISGSPKDVDIAVAAANKAFPSAMALTLEQKKKILEEIIAGMEERREDFAQIISEEMGSPIKMARKAQYGAGVIHFKNTLSVIDKFDFNEVHGNITINKLPIGPVGMITPWNWPLNQMCTKIASAIAAGTSFVLKPSEITPGAAHIFAEVIDKTSMPKGMFNLIHGLGVTVGKAMSSHSDLEMISFTGSTRAGIDIQKSAADNIKRVSLELGGKSPNIILEDVDLENAVTMGMKQCFLNTGQSCSSPTRMLLPEHMLDEAT

SEQ ID NO: 93144 - protein, 245 aa, Unknown
  Bacterial polypetide isolated from the Sargasso Sea
KSATYFNTVNPASGKRLARITEAGKVEVNSAVSAAKLAFPKWNALTGHERARFLYAIARQVQKHSRLFAVLESMDNGKTIRETRDIDIPLVIRHFYHHAGWAQTLESEFPKHEAIGPVGQIIPWNFPLMLLSWKIAPALAAGNTVVLKPAEFTPLTALLFAEICNQSGLPPGVLNVLTGSGKTGSMLVKHPDLKKIAFTGSTEVGRIIREETADSDKKLTLELGGKSPFIIFENADLDSAIEGLV

SEQ ID NO: 93145 - protein, 335 aa, Unknown
  Bacterial polypetide isolated from the Sargasso Sea
ERKSEIETLLSLDTGNALKTQAIPETGASIELTNMFAGLSGELKGENYPTNIPNSIHYTTRDPIGVVCAIVPWNAPLFLTVAKIAPAIVAGNSVVLKTAEQAPFCALLLSEIFQQELPPGVLNVISGYGEECGEPLVTHEKVRKVTFTGSFTVGKIIAQKAAPKLCPVTLELGGKNPNIIMSDADLDIAIQGVIDGMRYTRQGQACTAGSRVYIQEKIYDKVLGGAVEKLSKLKMGNALDESSDIGAIISEEQLKRTLHYMDIAKKNSTTNVVHGGNQLTGGDYKNGFFYEPTLMSSVPVSSPVCQEEIFGPVACAIPFKTFDEVMNSANDTPFG

SEQ ID NO: 93146 - protein, 264 aa, Unknown
  Bacterial polypetide isolated from the Sargasso Sea
LSRHQNIQMISFTGSTRAGKEVTRDAADTIKRVTLELGGKSANIIFEDCDLEASIKQSVSECMFNTGQSCDAPTRMLVQRSIYGESIGLLKKYGSEIEVGDPSNEGEHIGPLFDKIQFDRVQNMIKTGIEEGAEILIGGLGKPNGFSKGWYVKPTIFKNVSNQMRVAREEIFGPVLVVIPFDTEEDAVEIANDTPYGLAAYLSSGDTERATRVAAKLKAGAVHINGGGFNYGSPFGGYKQSGNGREGGILGLEDYLETKTLHWG

SEQ ID NO: 93147 - protein, 320 aa, Unknown
  Bacterial polypetide isolated from the Sargasso Sea
GETVAIHNPANQELIGHVPVMGAAETQAAITAANQALPAWRALTAKERSQKLRRWFELMHQHADDLALMMTTEQGKPLAEAKGEVTYAASFVEWFAEEAKRIYGDTIPGHQADKRLTVIKQPVGVTAAITPWNFPAAMITRKAAPALAAGCTMIVKPAPQTPFTALALAELAHRAGIPAGVFSVVTGDAIAIGNTLCKSPVVRKLSFTGSTAVGITLMEQCAPTLKKLSLELGGNAPFIVFDDADIDAAVEGAMIAKYRNAGQTCVCANRIYVQAGVYEQFTQKFAAAVAKLNVGIGTDDGVNIGPLINQAAVQKYKAIN

SEQ ID NO: 93148 - protein, 240 aa, Unknown
  Bacterial polypetide isolated from the Sargasso Sea
KIQQIRLKRVTLELGGKSPNLVFSDCNLEERVNASVNECMFNTGQSCDAPTRLLVEESCYEEVLKIAKEACDKVLVDSPKKEGDHIGPLFDKIQFERVQTLINSGIDEGATLLCGGPGKPEGFENGWFVKPTIFMDVTNDMKIAKEEIFGPVLVIIPFKDEDEAIEIANDTPYGLAAYLQTGSDERAKRVAAKLRAGAVHINGGEFNYGSPFGGYKQSGNGREGGVMGLEDYLETKTLHY

SEQ ID NO: 93149 - protein, 297 aa, Unknown
  Bacterial polypetide isolated from the Sargasso Sea
RFHEVHGNITINKLPIGPVGMITPWNWPLNQMCTKVASAIAAGTSCVLKPSEITPGAAHIFAEVVNKTSMPKGMFNLIHGLGVTVGKAMSSHSDLEMISFTGSTRAGIDIQKSAADNIKRVSLELGGKSPNIILEDVDLENAVTMGMKQCFLNTGQSCSSPTRMLLPEHMLDEATKYAVAAANDMSTGDPLDEEIYLGPISNKTQYEKVQDLIQKGIDEGATLACGGTGRPDGLEKGFFVKPTVFTNVNNNMTIAREEIFGPVICLIPYSDVEQAIEIANDSEYGLSSMISCSDEVK

SEQ ID NO: 93150 - protein, 192 aa, Unknown
  Bacterial polypetide isolated from the Sargasso Sea
MAPAPENKDHISLKDKYGLFINGKFVAPKSGKYFPSINPANEQKLAMIAEAGAKDVDAAIKAARNAYNNIWSKISGKERGKYIYRIARIIQEKSRELAVIESLDGGKAIRESRDVDVPISAAHFFYYAGWADKLNYAFPNQNPSPIGVAGQIIPWNFPLMMAAWKIAPALATGNTVVLKPAETTSLTALKLA

SEQ ID NO: 93151 - protein, 242 aa, Unknown
  Bacterial polypetide isolated from the Sargasso Sea
IVPWNFPLVMACWKLGPALATGNSVILKPSEKSPLTALRIAGLAKEAGIPDGVFNVLPGFGHTVGEALAMHMDVDCITFTGSTKIGKHLVQCSGKSNLKRAFMECGGKSPNIVLADAPDLDAAARSAVGAIFYNQGEVCTAASRLLVQNSIKPQFMERLLAHAREWISANPLDPTTRIGAMVDHIQMEQVLNYIAIGQQEGAKLLLGGKRTQPEEGGYYIEPTIFDDVTPTMRIFREEIFGP

SEQ ID NO: 93152 - protein, 223 aa, Unknown
  Bacterial polypetide isolated from the Sargasso Sea
MDTSHLKVPFPYKAKYGNYINGKFVEPKSGKYFDNTTPINNEVICSVARSDAKDVDAALDAAHAAFPTWGKTSITERSNILIKIADVIEKNLEKLATAECLDNGKPIRECMAADLPLVVDHWRYFAGVIRAEEGSVAEISNNEYSYHIPEPLGVVGQIIPWNFPLLMATWKLAPALAAGNCVVLKPAEQTPASIMLLMELIGDLLPPGVVNVVSGFGLEAGKP

SEQ ID NO: 93153 - protein, 281 aa, Unknown
  Bacterial polypetide isolated from the Sargasso Sea
DKVSGDTLPIDKPDLFVFTNREPLGVVAAVVPWNSQLFLVAVKIGPALAAGNTVVLKASEHASAAMLEFGKCIEEAGIPPGVVNIITGHGDPCGKVLTSHPKVSRISFTGGPNSARHVVKNSAENFAEVSLELGGKSPFIVFDDANIENAVNCSIAGIFGATGQSCVAGSRVYLQENIADEFLDKIVAQAKEIVIGDPLLDETQMGPLCTEGQLSNIKTELNFALSEGGEILCGGKSPEGLGELFFEPTIVACPNQKMRIVDTELFGPVLTVIKFKDEEEV

SEQ ID NO: 93154 - protein, 281 aa, Unknown
  Bacterial polypetide isolated from the Sargasso Sea
MKFNYVLKKIKKWSKKRKVSSSLFNFLSTDYILPCPYGITLNISPWNYPFQLSISPIIGAISAGNTVVLKPSEHSPNTTNILKLVIEKSFERGHVDIVTGGPDTGQKLLELNWDYIFFTGSTEIGKIVAKEAAKTLTPVTLELGGNNPCVIDKNISLKTTSKRVIWGKFLNCGQTCIAPNFLAVDVKIKDSLLNQLIFDIKDTFGDDVYNSPYYSRIINKKHVERLSKLIKGYKLLHGGNYNMEKNFFEPTILEVKSIKDKILKDEIFGPILPVLTYQSVD

SEQ ID NO: 93155 - protein, 255 aa, Unknown
  Bacterial polypetide isolated from the Sargasso Sea
CCAEHNSITLELGGKSPNIFFEDIMEKDDDFLDKCVEGFVMFNLNQGEVCTCPSRALVQESIYDKFMERCIKRTKAVVQDNPLKMETMIGAQASVEQVEKIKSYLDLGKKEGAKVLTGGSQAKLNSGLEKGNYIQPTIFEAKNNMRISQEEIFGPVVSVIKFKDEADALRIANDTLYGLGAGVWTRNGNIAYRMGRAIQAGIVWTNCYHAYPAHSPFGGYKQSGVGRETHKMMLNHYRQNKNLHVSYAEKKLGFF

SEQ ID NO: 93156 - protein, 276 aa, Unknown
  Bacterial polypetide isolated from the Sargasso Sea
GEIILGNSEDVDMAVSAAKNAFNSFSKTSKNDRLELLNKIRQISEKRFEDLANAMTSEMGAPHRMAREAQADAAIGHLDGFIDALKKHEEKIVLSNTDVLLKEPIGVCGLITPWNWPINQITLKVLPVIATGCTCILKPSEHTPLSAMVYAEILDEAGVPDGVFNLVHGDGEGVGVSMSRHPDIEMMSFTGSKRGGKSVTIESAETVKKVTLELGGKSPNIVFADCDLDEKVKDSVNECMFNTGQSCDAPTRLLVEKKCYDEVIDIAKKTAEEIKV

SEQ ID NO: 93157 - protein, 309 aa, Unknown
  Bacterial polypetide isolated from the Sargasso Sea
AAPGAAGAKITYKPRYDNFIGGKFVPPVKGQYFDVITPVSGKVYTQAARSTAEDIELALDAAHAAADSWGKTDAATRANILLKIANRIEENLERLAYAETVDNGKAIRETLNADIPLTVDHFRYFAGCVRAQEGALSNIDENTVAYHIQEPLGVVGQIIPWNFPILMAAWKLAPALGAGNCVVLKPAESTPISILILVELIADLLPPGVLNIVNGYGREAGMPLAQSKRIAKIAFTGSTSTGRVIAQAAANNLIPATLELGGKSPNIFFADVMDKDDAFLDKAIEGLVLFAFNQGEVCTCPSRALIQES

SEQ ID NO: 93158 - protein, 290 aa, Unknown
  Bacterial polypetide isolated from the Sargasso Sea
TKYEPYGVIGMITAWNSPLLLLSWKLAPALAAGNTAVIKPSEFTSASTLEFMKLISEAGFPDGVVNCVTGMGIDVGQPLVEHKHISKIAFTGSDVSGQKIYETAAKKIMPVSLELGGKSPNIVFEDADFEAAIMGVISGIFAATGQTCIAGSRLLVQDSIYEKFVKRLVEVASEAKIGDPMSLDTHVGPVTTQPQFDKIMSYIEIAKSEGAKCVLGGKAYSGENVRGNRFVEPTIFTDVNNEMRIAQEEVFGPVLSIIRFKDEEEAIKVGNDVVFGLAAGVWTNNIGKSA

SEQ ID NO: 93159 - protein, 252 aa, Unknown
  Bacterial polypetide isolated from the Sargasso Sea
ATLRYYGEAIDKVYGEIAPTAEGILGLIKKEPIGVVGAIVPWNFPLMIGAWKIGPALAAGNSVILKPAESASLSLLRLAELGLEAGLPPGVLQVVTGYGSEAGQAIALSKDVDVLTFTGAGLTGRKLMEFSAQSNLKRVYLELGGKSPNIVFSDAPDLELAAKSAVNAIFRNSGQVCVAGSRLLVEHSIYQNFLDKVCNYTAQLKVGDPLDLSNDIGAVHSEAQLLKNLRFLDSLKNREKNIVLGGDRLIEE

SEQ ID NO: 93160 - protein, 279 aa, Unknown
  Bacterial polypetide isolated from the Sargasso Sea
TSITERSNILLKIADVIEKNLNVLATAECLDNGKPIRECMAADLPLVIDHWRYFAGVIRAEEGSVAEISNSEYSYHIPEPLGVVGQIIPWNFPLLMATWKLAPALAAGNCVVLKPAEQTPASIMLLMELIGDLLPAGVVNVVSGYGLEAGKPLASSKRIKKIAFTGETTTGRLIMQYASQNLIPITLELGGKSPNIFFEDVMAKDDDFFDKCLEGFAMFTLNQGEVCTCPSRALIQKSIYDKFMEKAIARTKAVKQDNPLKMETMIGAQASLEQMEKIK

SEQ ID NO: 93161 - protein, 283 aa, Unknown
  Bacterial polypetide isolated from the Sargasso Sea
MADLVAQRSHAKAEGIESYQQRREHLLALKAMITENQARIIKAINQDYGNRSRHETLLAEIINACADINSTLKHLKKWMKVQKRHVDHRMYLGAKNRVIPQPLGVVGLIVPWNFPINLAFSQLAAAFAAGNKAMVKMSENSRHLSALLGELVGNYFKPEKLQFYCETGEVGIAFSKLPFDHLMFTGSGETGKKVMAAAAQTLTPVTLELGGKSPAVIATDYPMQKAVERIMYVKQMNAGQICTNVDYVFVHQSQLALFIDTATRWAKSMCQISIAKITQPLLM

SEQ ID NO: 93162 - protein, 283 aa, Unknown
  Bacterial polypetide isolated from the Sargasso Sea
NADAFDVINPFNSEIIASIAQSSTDQVNEAVSSAKHAFPKWSRTSPGERSGLLLKLADEIEKNAEEIAKLESLNTGKPYHLALNDEIPGTADTFRYYGGICRNLPGYAAGEYMTGFTSMIRRDPIGVVASIAPWNYPLMMAAWKIAPAVAAGNTMVLKPSEQTPLSTLYVAELIAGIFPEGVINIVHGVGETVGSSLINHPDVNMISLTGDIATGTKVLDAASKSIKKTHLELGGKAPVIVFDDADINDVVEGVRAFGYYNAGQDCTAACRIFADKKVYEKIV

SEQ ID NO: 93163 - protein, 262 aa, Unknown
  Bacterial polypetide isolated from the Sargasso Sea
MGEKYVAQKLLNLPFNHIMFTGSPKVGKVVMEAASRNLAGVTLELGGKSPVIVDKHANIKDAAWKISFYKFANAGQTCTAPDYILCDEAVHEDLITALQKNMSEFFPGGIDEATKDYCSIANEHHFNRLKSALTEAVDGGARVAWGGETSQEGLYFSPAVLTSVGYDNPIMEEEIFGPILPVVKVKSLDESINYVNSNEKPLALYLFSSKSSSHSRVLKNTSSGGMVINDCVLHHMNPNLPFGGINNSGIGSYHGKFGFDAF

SEQ ID NO: 93164 - protein, 294 aa, Unknown
  Bacterial polypetide isolated from the Sargasso Sea
DFILRLKDFEFDEHFDQKSNNHIYYEPIGVCGLITPWNWPINQIALKVVPAFATGCTMILKPSEIAPLSGMLFAEMIDEVGLPNGVFNLVNGDGAGVGTQISGHPDIDMVSFTGSTRAGRLISKNAAETIKRVCLELGGKGGNIVFADSYENAVRDGIRNVMSNSGQSCDAPTRMLVEKSIYERAVNEAVDEANKIKVDQASKKGDHIGPVISKTQYEKIINLIESGISEGATLAAGGPELPNGLNKGYFIKPTIFTNVTNDMRIAKEEIFGPVLSIIPFETEDEAVNIVNDTS

SEQ ID NO: 93165 - protein, 124 aa, Unknown
  Bacterial polypetide isolated from the Sargasso Sea
KHLDKGYTIEPTVFMDVTNEMVIAQEEIFGPVLVVIDYETEDEAINIANNSPYGLSAGVWSGSEEKALAVARRLRTGTVTVNGGNYYGADAPFGGYKQSGIGREMGREGFEEYLETKTIAIGVS

SEQ ID NO: 93166 - protein, 318 aa, Unknown
  Bacterial polypetide isolated from the Sargasso Sea
SMARSAQADAAIGHLDSFIDALNELEERTTLKNGDILLKEPIGVCGLITPWNWPINQIALKVIPALATGCTCILKPSEHTPVSAMIYAEVIEEAGYPAGVFNLVNGVGDVVGTAMSKHKDIDMMSFTGSTRAGILVTKDSAETIKRVTLELGGKSPNIVFSDANLERDIEYSVKECMLNTGQSCDAPTRLLVESSCYEEVLKIAKKVAEEITINDPEKEGDHIGPLFDKIQFDRVQNMIDVGIKEGASVLTGGLGKPQGLEDGWFVKPTIFYNVTNNMRVAQEEIFGPVLVIIPFENESDAVSMANDTPYGLAAYLQT

SEQ ID NO: 93167 - protein, 318 aa, Unknown
  Bacterial polypetide isolated from the Sargasso Sea
KILQTMSEEMGAPLDWCSSAQTSSGADHINDFILRLKNFQFETNFNKDSNNYIVYEPIGVCGLITPWNWPINQITLKVIPALATGCTMILKPSEIAPLSGMLFAEIIHEAGFPAGVFNLINGDGAGVGTDLSTHSDVDMISFTGSTRAGKLISKNAADTIKRVCLELGGKGGNIVFSDSHPGAVREGVRNIMSNSGQSCDAPTRMLVEKSIYKRAIEEAADEANKIKVDIALKNGNHIGPVISQTQYDKIIDLIRSGINDGATLVAGGPEKPNGLEKGYFVKPTIFTDVTNKMRIAKEEIFGPVLSIIPFENEDEAIS

SEQ ID NO: 93168 - protein, 183 aa, Unknown
  Bacterial polypetide isolated from the Sargasso Sea
MLDEATKYAVAAANDMTTGDPLDEEIYLGPISNKTQYEKVQDLIQKGIDEGATLACGGTGRPDGLEKGFFVKPTVFTNVNNNMTIAREEIFGPVICLIPYSDVEQAIEIANDSEYGLSSMISCSDEVKGQEIAKKIRTGQVILNRISRGDYPAPFGGFKMSGNGREHGLFGIDEYLEVQAVIT

SEQ ID NO: 93169 - protein, 298 aa, Unknown
  Bacterial polypetide isolated from the Sargasso Sea
PSTEEAFAIISLGSAEDADKAINAAKIAFETWRETTKEERLALLEKFDEIYNRRWDEMVDAQSKEMGAPLDFASETHTKMGADICRNNIEILKDFNFEHQFDPKSNNHIRYEPIGVCGLITPWNFPMNQIVLKVIPALAAGCTMILKPSEIAPVSAVLFAEMIDEAGFPAGVFNLVNGNGEVVGNHISGHPDIDMVSFTGSTRAGKLIQKNAADTIKKVTLELGGKGGNIVFADSYPNAVRDGVRNIMSNSGQSCDAPTRMLVEKPIYERAVKEAVDEANKIKVDLASKKGDHIGPLV

SEQ ID NO: 93170 - protein, 281 aa, Unknown
  Bacterial polypetide isolated from the Sargasso Sea
PQTSQSFAGLPFDHLLFTGSTNVAKKVASEAATNLVPMTLELGGKSPVIVGPNAKMKKSVDKIMMGKLLNSGQICISPDYVFVPEGKTEEFVQHAQEHVAENYPTIKNNPDYTSIIHLNHFERLRDLISDAKSKGATIVELNPAQEDFSQQEHHKIVPTLILNPTDDMKVMKEEIFGPLMPIKTYKNFEDTVSFINQNPKALALYYFGDDKEEMNNVLDNTSSGQAVMNDVLFQFSMHDLPFGGVGPSGMGAYHGHDGFKNFSHKRSVLKGQNILDAGKMI

SEQ ID NO: 93171 - protein, 250 aa, Unknown
  Bacterial polypetide isolated from the Sargasso Sea
INQIACKVAPALAAGCTMVLKPSEVSPLNAVIFAEVLHEAGVPAGVFNLVNGDGLSVGEAMSSHPDIDMMSFTGSTRAGVAVAKASADTVKRVSQELGGKSANIILDDADFNQSVAGGVTGCFMNSGQSCNAPTRMLVPADRQDEAVAIAKATAEATVVGDPKEVAAGGIGPVVSEVQFNKIQGLIEKGIEEGATLVAGGPGKPEGFNAGYYVKPTIFSDVSNDMTIAREEIFGPVLSVLPYKDEDDAIS

SEQ ID NO: 93172 - protein, 305 aa, Unknown
  Bacterial polypetide isolated from the Sargasso Sea
WNWPINQITLKVIPPLAVGCTCILKPSEHTPLSAKIFSEIIEEAGYPPGVFNLINGDGPTVGTLLSKHKDVDMVSFTGSTRAGVLVSKNAADSVKRVTLELGGKSPNLVFSDCNLEERVNESVLECFSNSGQSCDAPTRLIVERKCYNEVLKIAENAAKNQKVDDPHKDGDHIGPLFDQIQFDRVQNMIQLGINEGAKLLIGGLGKPDGFDKGWYVKPTIFYDVHNKMQIAREEIFGPVLVIIPFEDEKEAIEIANDTPYGLASYLQTGDTERAERVASKLRAGSVHINGGSLNYGSPFGGYKQS

SEQ ID NO: 93173 - protein, 315 aa, Unknown
  Bacterial polypetide isolated from the Sargasso Sea
AEISNSEYSYHIPEPLGVVGQIIPWNFPLLMATWKLAPALAAGNCVVLKPAEQTPASIMLLMELIGDLLPAGVVNVVSGYGLEAGKPLASSKRIKKIAFTGETTTGRLIMQYASQNLIPITLELGGKSPNIFFEDVMAKDDDFFDKCLEGFAMFTLNQGEVCTCPSRALIQKSIYDKFMEKAIARTKAVKQDNPLKMETMIGAQASLEQMEKIKSYLDLGKKEGAKVLCGGSEAKINSGLEKGNYIQPTIFEGKNNMRIFQEEIFGPVVSVTTFKDEKEALEIANDTLYGLGAGVWTRDGNIAYRMGRGIEAGRV

SEQ ID NO: 93174 - protein, 238 aa, Unknown
  Bacterial polypetide isolated from the Sargasso Sea
LIGDLLPPGVLNIVSGFGLEAGKPLASSKRVAKIAFTGETTTGRLIMQYASENLIPVTLELGGKSPNIFFEDVMDADDAFFDKCLEGFTMFALNQGEVCTCPSRALIQESIYDKFMARALDRVKKVTQDNPLKMETMLGAQASIEQMEKITSYLDLGKKEGAEVLAGGSKASLNTGLEKGNYIQATVFKGNNAMRVFQEEIFGPVVSVTTFKDKAEAIKIANDTLYGLGAGVWTRNGN

SEQ ID NO: 93175 - protein, 265 aa, Unknown
  Bacterial polypetide isolated from the Sargasso Sea
MVGLAEIIEREAVRLGEIEVRDNGKLIAEMGAQTKYLAEWYRYYGGLADKIEGAVIPSDKSGIFNFTRYEPLGVVGMITAWNSPLLLLAWKLAPALAAGNTAVVKPSEFTSASSLEFMELIREAGFPKGVVNCITGLGLEVGQPMVDHPELDKVAFTGSDVAGQKIYESAAKKIIPVTLELGGKSPNIVFEDADFESAVMGAISGIFAATGQTCIAGSRLLVQRSIHDSFVERLIEVAKEAKIGDPMSSETHVGPVTTPPQYRKI

SEQ ID NO: 93176 - protein, 335 aa, Unknown
  Bacterial polypetide isolated from the Sargasso Sea
INDRIDRIKRIQTLVEENIDDFHKALRLDFGTRHEQLSLMADTMPVINNAKHALKNIKKWIKPEKRKPNFPLGLLGSKAYVQFQPYGVVGIISPWNFPLTLSIAPLIEIFAAGNNAMMKLSEFVPATSDLTEKLINKYFNENEVVVINGGPQTSQSFAGLPFDHLLFTGSTNVAKKVASEAANNLVPMTLELGGKSPVIVGPNAKMKKSVDKIMMGKLLNSGQICISPDYVFVPEGKTDEFVQHAQEHVAENYPTIKNNPDYTSIIHLNHFERLRHLINDAKSKGATIVELNPAQEDFSQQEHHKIVPTLILNPTDDMKVMKEEIFGPLMPIKTY

SEQ ID NO: 93177 - protein, 324 aa, Unknown
  Bacterial polypetide isolated from the Sargasso Sea
PSTDLGKPAVEAFFEIVGVQGELKLAKKQLKRWIAPRRVALPAVQQPGRTWVQDEPLGTVLILGPWNYPLMLVLRPLVSALAAGNTAVLKPSEQAPAVAQLLAEMVPRHFEADVVRVELGGAETAQALLKQPFDHVVFTGGTTIGREVMKAAAEQLIPVTLELGGKSPCIVLDDADLQVSARRIAWGRFLNAGQSCVAPDYVLVTPAMRQPLEAALKQAITEFYGPDPKQSPDFGRLVSTRQFDRVDALLKDATVLHGGERVREERYIAPTLVEGDPNSSLMQEEIFAPVLPLIEVSDLEAALRFIAERPKPLAAYLFSRSNTA

SEQ ID NO: 93178 - protein, 244 aa, Unknown
  Bacterial polypetide isolated from the Sargasso Sea
MVSFTGSTRAGKLIQKNAADTIKKVTLELGGKGGNIVFADSYPNAVRDGVRNIMSNSGQSCDAPTRMLVEKSIYERAVKEAVDEANKIKVDVASKKGDHIGPLVSKVQYDKVINLINVGIKEGATLAAGGPDLPNGLNKGYFVKPTIFTDVNNDMRIAKEEIFGPVLSIIPFETEEEAIAITNDTSYGLGNYLQTEDKEKAQRVARKVRAGTVYINGQGTDTGAPFGGYKQSGNGREGGVWGFT

SEQ ID NO: 93179 - protein, 196 aa, Unknown
  Bacterial polypetide isolated from the Sargasso Sea
MNKVIKNFKKIKYGPAPEDSKEVLSWIKKISSPNKIFIGGNWIKSTSKKIIPAINPATNKKLFNLSVSSKVDVDKAVKAAKKAYPSWSKKTPYQRSKYLYALARLIQKHSRFLAVLESIDNGKPIRETRDIDIPLVARHFYYHAGWTEKASHNDVDSIGIIGQIIPWNFPLLMLSWKIAPAVACGNTVVLKPAEFT

SEQ ID NO: 93180 - protein, 285 aa, Unknown
  Bacterial polypetide isolated from the Sargasso Sea
LNLLGAAESLDNGKPIREAIAADITLSIDHFRYFAGVIRAEEGTISEINANTYSYHYKEPIGVVGQIIPWNFPITMAAWKLAPALAAGNCVVMKPAEQTPASIMVLMELIADLLPEGVVNIVSGFGLEAGKPLASSKKIGKVAFTGETTTGRLIMQYASQNLIPVTLELGGKSPNVFFEDVMSEDDAFFDKCLEGFTMFALNQGEVCTCPSRALIQESIYDRFMEKALKRVEAVKQGNPLEMETMIGAQASTEQMQKIESYLQLGKDKGAEVLAGGNVAKLNNGL

SEQ ID NO: 93181 - protein, 298 aa, Unknown
  Bacterial polypetide isolated from the Sargasso Sea
MNQITTKVSAAIASGCTMVLKPSEISPYCSMLLAEVMHDTGVPKGVFNLVNGYGPVVGAALSEHEKVDMMSFTGSTRAGIAVAQASATTVKRVQQELGGKSANIILDDVADLEKSVKGGAGHCFLNSGQSCNAPTRMLVSSKNYDKAVEVAVATANSTTVGDPNGEFRLGPISNKTQYEKIIKLIEIGIEEGAKLVAGGVEKPEGCEKGYYVKPTVFADVTNDMTIAKEEIFGPVLCMMKYETEEEAIQIANDTEYGLAGYVQGELSHAIEVGNQIRAGQITINGGARGNAAPFGGYK

SEQ ID NO: 93182 - protein, 296 aa, Unknown
  Bacterial polypetide isolated from the Sargasso Sea
MISPWNFPMYLSLAPLAGIFSAGNSVMHKPSEFTPITSELLKEICDSAFDETEFATFLGGPDVGAAFTQLKFDHLLFTGSGNIGKHVMRAASENLVPLTLELGGKSPVIVSESSNIDITARRVMFNKTLNAGQICLAPDYVYVHETEKDNFVEACKDQVNEFYSDLKYNPDYTSVINQKHYDRLNGLLSDAKDHGAELVEINPANEDFSQQESHKIPPTLVLNPTDEMQIMKEEIFGPLLPIKTYKDINEPINYINKNDKPLGLYYFGNNKNEEAKVVNSTTSGGVTVNDIMGHIQ

SEQ ID NO: 93183 - protein, 471 aa, Unknown
  Bacterial polypetide isolated from the Sargasso Sea
MKLSTQLLIDGQFVTGDGQAEPILNPATGELLASVPEASFEQVNRAVNGAQRAFAQWSRTTPASRSTLLLRLADAIERHAEEFAALESLNCGKPYLAVLNDELPAVVDCFRFFAGAARCLQGPLAGEYIEGHTSMIRRDPIGVVGSIAPWNYPLMMAAWKMAPVLAAGNTVVLKPSEQTPLTALRLAELASELFPRGVINIVCGRGESVGAPLVEHPLVRMVSLTGDIATGQKILQSAARTMKRTHLELGGKAPVIIFDDADLEAVVAGIRTFGFYNAGQDCTAACRIYAQGKIYDKFVAAMTDAVASIKVGGPREEGVEMGPLISDRQRNRVASFVERAQSSGHVEVTAGGKIRPGNGFFFEPTLIAHARQEDEIVRREVFGPVVSVTRFSDAEQVVQWANDSDYGLASSVWTRDLGLASKVASHLQYGCTWINTHFMLTSEMPHGGMKMSGYGKDLSLYALEDYTVPRH

SEQ ID NO: 93184 - protein, 450 aa, Unknown
  Bacterial polypetide isolated from the Sargasso Sea
MAPLSAMQQLVQQGQTRPLNWRLQQLGRLEAMVAELSEPLEAALSADLGKPALEAFFEVAGITGELKLAKRQLRHWMAPKPVPLPAAQRPGRTWVQCEPLGAVLILGPWNYPFMLLLRPLVTALAAGNTAMLKPSEHAPAVADLLAQAVPRHFEPEVVQLQQGGAETAQALLQQPFDHVFFTGGTAIGRKVMQAAAEQLMPVTLELGGKSPCIVLDDADLQVSARRIAWGRFLNSGQSCVAPDYVLVTPAMRQPLEAALAEAIDQFYGPDPRQSEDFGRLVNTTQFDRLDGLLQNASVLKGGERDREQRYIAPTLVDGDPEGGLMQEEIFGPVLPLLTVEGLEEALAFIRARAKPLALYLFSRDKQARQRVLQASQSGGVVFNDVIVHAGVPGLPFGGVGPSGIGRCHGETGFIGLSNQRAVMERPFALDLAWRYPPYGNRLSLLRRLLS

SEQ ID NO: 93185 - protein, 367 aa, Unknown
  Bacterial polypetide isolated from the Sargasso Sea
MEFYAGAADKLHGDTIPYLKDYTVYTLREPHGVCAHIIPWNYPMQIIGRSVGAALATGNTCILKPAEEACLTALAFGALTKKAGFPDGVLNIVTGSGKTGASLSQHSDIDHISFTGSVSTGIKIQQSAAQNVIPVTLELGGKSPQIVFDDADLDAALPFLVNAGVQNAGQTCSASSRILVQKEVYPKVVSMMAKQYEMLLVGSAMDDLDVGPLISKKQHEIVSNYIQQGKDLELVATGKYKEEINNGGFYCLPHLFVDVPADHSLAQNEIFGPVQIIMPFDDEDHAVEIANGTGFGLVASVWTQDGSKQMRMAKRLKSGQVFINNYGAGGGVELPFGGRGLSGHGREKGFEAMFGFTTIKTVAHYHG

SEQ ID NO: 93186 - protein, 279 aa, Unknown
  Bacterial polypetide isolated from the Sargasso Sea
MTIRVAINGFGRIGRNILRAKYESDNYNDIQIVAINDLGDSQINAHLLVHDTVHGKFQKPVDVASDKIIIDNSDEILVTSERNPEALPWSKLNIDVVFECTGIFVSKDQAGGHIAAGAKKVIISAPGKEVDNTVVYGVNHDTLTSDHTVISNASCTTNCLATVINNIHKNLQITNGLMTTVHAYTNDQVLTDVYHTDLRRARSATQSMIPTKTGAAAAVGLVMPELNGKLDGFAIRVPTTNVSIVDLVFNTTKSSSVDDLNNLVLESSENEMRGIVGYN

SEQ ID NO: 93187 - protein, 498 aa, Unknown
  Bacterial polypetide isolated from the Sargasso Sea
MSTPKTRSDWENLAASLAINGKAFINGEYRDATSGNTFDCISPIDGRLLAPVASCDLLDANIAVANAREVFESGVWSKATPVKRKQVMIRFAELLEENANELALLETLDMGKPIRFSKAVDIAGAARAIRWSGEAIDKLYDELAPTAHNEIGMITREPVGVVAAIVPWNFPLLMACWKLGPALVTGNSVILKPSEKSPLTAIRIAELAVQAGIPKGVLNVLPGYGHTVGKALALHMDVDTLVFTGSTKIAKQLMIYAGESNMKRVWLEAGGKSPNIVFNDAPDLKAAAVAAAEAIAFNQGEVCTAGSRLLVEAGVKDQLIALIAEELATWQPGHPLDPATVSGAVVDKQQLDTILSYIKAGQDEGASLVHGGQQVLAETGGVYVQPTVFSNVKNQMKIASEEIFGPVLSVIEFNGMEEAIAIANDTIYGLAAGVWTADISKAHKTAKALRSGMVWINHYDGGDMTAPFGGYKQSGNGRDKSLHSFDKYTEIKATWIVL

SEQ ID NO: 93188 - protein, 472 aa, Unknown
  Bacterial polypetide isolated from the Sargasso Sea
KFYINGAWVKPNSSEEIKVIDPATEENCAVITLGNKADVDIAVNAAKDAYESWAFSSKEDRIELLEKLYENYKKRWADIAEAITLEMGAPKDFATKLQAGTGASHIKSFIRYLKNFEFEKPLGDHAPNQRLIYEPKGVCALITPWNWPMNQVCLKVMPAIAAGCTMVLKPSELAPLSSMILAEIIDEVKFPKGVFNLVNGDGAITGDALTSHPDINMISFTGSTRAGALISQNAAKDFKRVSLELGGKGANIIFKDADPEAIERGALRCFRNSGQSCNAPTRMLVEKSMYDEAIKRLKKYTENFEVGDPKKEGEHIGPVISETQYKKIQTLIQKGIDEGAKLIAGGTGKPDGLDKGYFVKPTVFADVNNKMNVARTEIFGPVLSVIPFESEEEAIKIANDTSYGLTNYIQTQDSEKVQRVARKLRSGMVDVNGAGIAVDAPFGGFKHSGIGREAGEHGLEEFLEVKAVGGWS

SEQ ID NO: 93189 - protein, 335 aa, Unknown
  Bacterial polypetide isolated from the Sargasso Sea
ISANDPDQRIIILKQPVGVVAAITPWNFPVAMITRKVAPALAAGCTVVLKPSEDTPLSALSLAYLGKKAGFPKGIFNVITTNNPQNMGEILTKSPKIKKISFTGSSEVGKILIKQSSSTVKKLSMELGGNAPFIIFDDADIDLAIEGLMLSKFRNSGQTCICANRIYVQKRVYESFLKKFIIRVKNLKVGSGQDPSVEIGPLINKDATKKISKILDDAVSKGAKILLGGTKHNYGDNFVQPTIVTNISDDMLICSTEIFGPVAAIYSFDDEKQIIKIANNTRAGLAAYFYGKNNSKIWKTAEGLEYGMVWSQYWTYINYNCSIWGSKRSGFGREG

SEQ ID NO: 93190 - protein, 365 aa, Unknown
  Bacterial polypetide isolated from the Sargasso Sea
EDFIIRLKDFKFDEHFDEKSNNHIYYEPIGVCGLITPWNWPINQITLKVVPAIATGCTMILKPSEIAPISGMLFAEMIDEVGFPKGVFNLVNGDGAGVGTQISNHSDIDMVSFTGSTRAGRLISKNAAETIKRVCLELGGKGGNIVFADSYKNAVRDGIRNVMSNSGQSCDAPTRMLVEKSIYQRAIDEAIDEANKIGVDQASKKGDHIGPVISKTQYDKIINLIKSGISEGATLAAGGPELPDGFNKGYFIKPTIFTNVTNNMRIAKEEIFGPVLSIIPFETEDEAVNIVNDTSYGLGNYLQTENKEKAHRVAKKLRSGCVYINGNAADAGTPFGGYRHSGNGREGGIWGLEEYLEVKTVTGWK

SEQ ID NO: 93191 - protein, 499 aa, Unknown
  Bacterial polypetide isolated from the Sargasso Sea
TVANFIHGECVTGSGQRVQAIFNPATGEQIRQVVMSTIQETEQAIAAAHDAFPGWARHSPLKRARVMFRFKALLEENMERLARIISEEHGKVFSDAVGELTRGLEVVEFACGIPHLQKGEHSANVGTGVDSHSLMQPLGVCVGITPFNFPAMVPMWMFPIALATGNTFVLKPSEKDPSLALALAKLLQEAGLPDGVFNVVQGDKESVDVLLTDPRVQAVSFVGSTPIAEYIYQTASAHGKRCQALGGAKNHCILMPDADMDMATNAIMGAAYGAAGERCMALSVVLAVGDKTADELCSRLEKQIAALRVGPGLDQTPENEMGPLISSVHRNKVLGYIDSGESQGASLRVDGRHFSVKGHEQGYFVGPTLFDNVTPEMTIYKEEIFGPVLSVVRVADYSSAVELINRHEYGNGTAIFTRDGGCARRFCEEVQAGMVGVNVPIPVPMAFHSFGGWKRSIFGALNVHGNDGVRFYTRMKTVTARWPEMLQDTGAAFSMPTLG

SEQ ID NO: 93192 - protein, 477 aa, Unknown
  Bacterial polypetide isolated from the Sargasso Sea
MKLYKNYIDGKWIESESREIIQVDDPATGKIIGEISCAKKNEVDLAVSAAKAAFNSRVLVDMPLLERAKLMHRIADETRKIADEGGKMLCYENGKMLGAAIKEFNDVADMFDYYAGLTDKLEGKTIPVSPTIFDYTVLEPFGVSAHIVPWNFPISMVGRSLACSFATGNSTIVKTAELTPLSATFFAKAIENAGVPNGLVNIICGYGNEAGSYLVSHPDVNHVVFTGSVSTGKKILHSCADKTIPAVIELGGKSAGIVYEDADLDQVIDSARHGIFGVAGQICTAMSRLVVHKSVKNELIEKLVDLSKSLKVGPGYEKDTGLTPIISEKQLEKVEGYARSGVQQGAEAVHGGKRADREGYFMEATVLNNVKQDTSVAREEIFGPVLSVLEYEDQDEAIHIANDTDFGLGAGVFTKDLKKASWTASKLESGQVYVNKWFAGNHATPFGGYKQSGYSREKGVDALKSYLQVKNVGISLD

SEQ ID NO: 93193 - protein, 347 aa, Unknown
  Bacterial polypetide isolated from the Sargasso Sea
PEGDYTLIKEPIGVIGMITPWNWPMNQITTKVSAALAAGCTMVLKPSEISPYCAMLLAEVFDKAGVPDGVFNVVNGYGPIVGAALSEHPDIAMMSFTGSTKAGIAVAQASAVSVKRVHQELGGKSSNIILDDVADLEKSVKGGAGHCFLNSGQSCNAPTKMLVSAKNYDKAVEVAVQTANNTSVGDPLGEFRIGPIANKAQYEKILRMIEIGIEEGATLVAGGVEKPDGCEKGYFVKPTVFANVTNDMTIAKEEIFGPVLSIIKYENEDEAIELANDTEYGLAGYVQGEPDHAKEVARKIRAGQVIINGGARGTGAPFGGYKSSGNGREHGLHGLEECLETKAVIAP

SEQ ID NO: 93194 - protein, 477 aa, Unknown
  Bacterial polypetide isolated from the Sargasso Sea
MLNKKNFYINGTWVSPIEARSYKVIDPSSEEPCAEISLGGKKDIDKAVSAAKKAFETWAFSKKEERLELLEKLYVIYKKRWAEMAKLITLEMGAPMKFSTEMQAATGASHIKSFKNILKDFKFEKDLGEEKNNQKLLYEPKGVCALITPWNWPINQVNLKVIPALASGCTVVLKPSEIAPLSSMLLAEMIDEVKFPRGAFNLINGDGALTGDALTSHPDINMISFTGSTRAGALISQNAAKDFKRISLELGGKGANIIFKDADEEAVARGVQRCFRNSGQSCNAPTRMLVEKSIYNETVEKVKELAINTKVDSPEKDGDHIGPVVSEIQFNKIQTLIQKGIDEGAKLVAGGTGKPKGLEKGYYVKPTVFADVNNQMEIARTEIFGPVLSIIPFENEEEAISIANDTPYGLTNYIQTKDKEKVKRVARKLRSGMVDVNGVGIAVGSPFGGYKHSGIGREAGTEGLIEFLEVKTVGGWN

SEQ ID NO: 93195 - protein, 444 aa, Unknown
  Bacterial polypetide isolated from the Sargasso Sea
MQQLVRDGSTRSQAWRQQQLEALEALLQELETPLQAALAADLGKPTVEAFFELVGVQGELRLAQRQLKRWMAPRRVALPAVQQPGRTWVQDEPLGTVLILGPWNYPLMLVLRPLVSALAAGNTAVLKPSEQAPAVAQLLAEMVPRHFEAEVVRVDLGGPETAQALLQQPFDHVVFTGGTRIGREVMKAAAEQLIPVTLELGGKSPCIVLDDADLQVSARRIAWGRFLNAGQSCVAPDYVLVTPAMRQPLEAALKQAITEFYGPDPKQSPDFGRLVSTRQFDRVDALLEGATVLHGGERVREERYIAPTLVQGDPDSALMQEEIFAPVLPLIEVSDLEAALRFIAERPKPLASYLFSRDKAARRQLIERTQSGSVAFNDVIVQAGVPGLPFGGVGPSGIGRCHGETGFRSLSNQKSVYQRPFALDLAWRYPPYGNRLSLLKRLLG

SEQ ID NO: 93196 - protein, 461 aa, Unknown
  Bacterial polypetide isolated from the Sargasso Sea
KINKIFEVINPATEKACAVISLGGKEDIHDAVVAAKEAFNSWGFSTKEERIELLEKLYVLYKKRWNDISEAITLEMGAPKDFSTKLQTGTGASHIKSFIRYLKDFEFEKGLGDHAKNQRILYEPKGVCALITPWNWPINQVCLKVIPALAAGCTMVLKPSELAPLSAIIIAELIDEAGFPRGVFNLVNGDGAITGDALTSHADVNMISFTGSTRAGALISQNAAKDFKRVSLELGGKGANIIFKDADPEAIERGALRCFRNSGQSCNAPTRMLVEKSMYDEAVQRLKKYADDFKVDDPNKEGEHIGPVISETQFNKIQGLIQKGIDEGAKLVSGGPGKPNGLKDGYYVKPTVFADVNNSMNIARTEIFGPVLSVIPFETEEEAIEIANDTDYGLTNYIQTQDGKKVQRVARKLRSGMVDVNGAGIAVDAPFGGYKHSGIGREAGKEGLIEFLEVKSVGGWS

SEQ ID NO: 93197 - protein, 455 aa, Unknown
  Bacterial polypetide isolated from the Sargasso Sea
MNLIQHFVNGKIIPGKSDRKGKVFNPATGEQESEVKLGSKTDLDEAVNIAKKVFETWSLKPPIQRARIMFKFKELIEKNSDELTKMIVSEHGKVYEDAKGSLLRGLEVVEFACGIPQVLKGEFTENVGTDIDSWSLRQPLGVCAGITPFNFPAMVPMWMFPMAIACGNTFVLKPSEKDPSCSIKLAELLKEAGLPDGVFNVINGDKEVVDAILINKDIKAVSFVGSTPIAKYIYENAAKNEKRVQALGGAKNHCVVMPDCDLDQAVNGLMGAAYGSAGERCMAQSVAVAVGNVGDHLVSKLSKKVESLKIGPGMDKTSEMGPLVTKEHLEKVKGYVDLGVKEGAKLVVDGRNLKLQGYEKGFYIGGCLFDHVKKNMRIYKEEIFGPVLSVVRAKNFEEATQLVNEHEFGNGTSIYTRDGDVGRTFASKIKVGMVGINIPIPVPVAFHSFGGWKRS

SEQ ID NO: 93198 - protein, 397 aa, Unknown
  Bacterial polypetide isolated from the Sargasso Sea
MNLIQHFVGGELTSGSSKKKGKVFNPATGEQKSEVLLANKSDLNKAVDIARKAFETWSLKPALQRARVMFKFKELIEKNSVELTELIVSEHGKVYEDAKGSLTRGLEVVEFACGIPQVLKGEFSENVGTNVDSWSMRQPLGVVAGITPFNFPAMVPMWMFPIAIACGNTFILKPSEKDPSCSIKLAQLLKEAGLPDGVFNVVNGDKEAVDAILENKEIKAVSFVGSTPIAKYIYENSAKNEKRVQALGGAKNHLVVMPDCDIDGAVNGLMGAAYGSAGERCMAQSVAVAVGSIGDELVSRLSKKAEALKVGPGMDKNSEMGPLVTKEHLKKVKGYVDLGVKEGANLVVDGRNLKLQGYENGFFIGGCLFDNVKKEMRIYKEEIFGPVLSVVRVKTFE

SEQ ID NO: 93199 - protein, 397 aa, Unknown
  Bacterial polypetide isolated from the Sargasso Sea
MKLIEHFIEGKNYSGNSKRKSKVFNPATGEQSAEVKLATKEDVNKAVENAKNSFEKWSNTPPLQRARVMFKFKELIEKNSDELTKIIVSEHGKVYEDAKGSLVRGLEVVEYACGIPQMLKGEFTENVGTGVDSWSTRQPLGVCAGITPFNFPAMVPMWMFPMAIACGNTFVLKPSEKDPSCSMRLAELLKEAGLPDGVFNVVNGDKEAVDALINNKDVVAMSFVGSTPIAKYIYENCAKNEKRVQALGGAKNHCVVMPDCDLDQAVNGLMGAAYGSAGERCMAQSVAVAVGSIGDKLVSNLAKKVEALKVGPGMDKKSEMGPLVTKEHLEKVKGYVDIGEKEGAKLIVDGRNLKLQGYENGYYIGGCLFDHVTKDMRIYNEEIFGPVLSVVRAKDFD

SEQ ID NO: 93200 - protein, 480 aa, Unknown
  Bacterial polypetide isolated from the Sargasso Sea
MYEKFGQFIDGKWEASSDNQTYDVINPATEELIGKASKATPKDVDNALNSAKRGLEVWKNTAPWQRSYTLRKIADKMREKQDILAKWMTLEVGKPFAEAKGEVGASADIFEWNAEETKRIYGQTVESRFKDTRVHVYYQPVGVVAALSPWNFPLVLSSRKISTALAAGCSVIIKPDVITPGTVMELVEICRESGVPKGVVNLLSGDPPSIATQLIESDIIKKISITGSSRVGKLILKQAADKVQRVTMELSGHSPFIVFDDADIKKAADMAIASKFRNNGQVCISPNRFYIQENKKDEFINLFIERTKKLKIGNGMDTDVNLGPITTKKRLNEIEQLVETTKKEGAKVLLGGKRPSGFNKGFYYEPTIFDNVKDDFTIMKVEPFGPLVPMLSFKNFDEVIERANNNELGLASYVCTNSMEKAHRASELLETGTVAVNTPVVAIAEAPFGGIKQSGYGREGGSMAIKDYLNVKYTHLGLKG

SEQ ID NO: 93201 - protein, 477 aa, Unknown
  Bacterial polypetide isolated from the Sargasso Sea
MQDKKKFYIDGKWVSPIEPRNYKVIDPSNEEPCAEISLGGKKDVDKAVSAAKKAFETWAFSKKEERLDLLEKLYVVYKKRWAEMAKLISLEMGAPMKFSTEMQAATGASHIKSFKNILKDFQFEKDLGEEKNNQKLLYEPKGVCALITPWNWPINQVNLKVIPALASACTVVLKPSEIAPLSSMLLAEMIDEVKFPSGVFNLVNGDGEITGNALTSHPDINMISFTGSTRAGALISQNAAKDFKRISLELGGKGANIIFKDADSEAVSRGVLRCFRNSGQSCNAPTRMLVEKSIYNETVEKVKELANNTKVDSPDKDGDHIGPVVSEVQFNKIQTLIQKGIDEGAKLVAGGTGKPKGFEKGYYVKPTVFADVNNQMEIARTEIFGPVLSIIPFENEDEAISIANDTPYGLTNYIQTQDKDKVKRVARKLRSGMVDVNGVGIAASSPFGGYKHSGIGREAGTEGLIEFLEVKTVGGWN

SEQ ID NO: 93202 - protein, 337 aa, Unknown
  Bacterial polypetide isolated from the Sargasso Sea
KGVCALITPWNWPINQVCLKVIPALAAGCTMILKPSELAPLSAIIIAELIHETGFPKGVFNLVNGDGAITGDALTSHPDVNMISFTGSTRAGALISQNAAKDFKRVSLELGGKGANIIFKDADPDAVERGALRCFRNSGQSCNAPTRMLVEKSMYKEAVDKLKKYADDFKVDDPNKEGGHIGPVISETQFNKIQTLIQNGIDEGAKLVSGGPGKPDGLKAGYYVKPTVFADVNNQMNIARTEIFGPVLSVIPFETEDEAIEIANDTDYGLTNYIQTQDSEKVQRVARKLRSGMVDVNGAGIAVDAPFGGYKHSGIGREAGKEGLIEFLEVKSVGGWS

SEQ ID NO: 93203 - protein, 477 aa, Unknown
  Bacterial polypetide isolated from the Sargasso Sea
MTQYKNFIDGKWIESESKETIKVDDPANGKIIGEISCANKNEVDLAVDAARRSFESRVLVDMPLLARAKLMRRIADETRKIAKEGGELLCYENGKTLGAAVKEFNDVADMFDYYAGLTDKLEGKTIPVSTNVFDYTVLEPFGVSAHIVPWNYPLSMIGRSLSCSFATGNSTIIKTAELTPLSATVFAQALINAEVPNGLINIICGYGNEAGSYLVSHEDVNHVVFTGSVATGKKILHGCADKAIPAVVELGGKSAGIVYPDANIDDILYSARHGIFGVAGQICTAMSRLVVHKSIKDEVVDKLVDLSKSLKIGPGIEKDTDLTPVISENQLQKVEGYARSGIQEGAEAAHGGKRIQRDGYFMEPTILNNVKQDMTVAREEIFGPVLSILEYEDQEEAIKIANDTDYGLGAGVFTKDLKKASWTASKLEAGQVYVNKWFTGNHATPFGGYKQSGYSREKGIDGLKSYLQVKNVGISLS

SEQ ID NO: 93204 - protein, 313 aa, Unknown
  Bacterial polypetide isolated from the Sargasso Sea
QLVVQLVLKPSEIAPLSAMLFAEMIHEAKFPAGVFNLVNGDGPGVGTDLSGHPDVDMVSFTGSTRAGKLITKNAADTIKRVCLELGGKGGNIVFADAYPDAVRDGIRNVMSNSGQSCDAPTRMLVEKSIYKRAVEEAADEANKIKVDLASKAGEHIGPVISKTQYDKIQSLIKSGIEEGATLVAGGPEKPEDFKKGYFIKPTVFTDVNNDMRIAKEEIFGPVLSIIPFENEEEAIKITNDTEYGLGNYLQTEDKEKAKRVSKKLRSGIVYVNHKPADSGTPFGGYRQSGNGREGGTWGLHEYLEVKTITEWKN

SEQ ID NO: 93205 - protein, 472 aa, Unknown
  Bacterial polypetide isolated from the Sargasso Sea
MKDKLNFYIDGSWIKSESKEKIAVINPANEELIGHISSGTKDDINKAVLAASNAFKTYQLTSKEDRIELLNNIISEYENRYDDLVQTITEEMGAPVWLSQKAQASTGIKNLHETLDALKDYEFEKKEGDYTLVREPIGVVGMITPWNWPMNQITTKASAALAAGCSMVLKPSEISPYCALLLAEIFHKAGVPAGVFNVVNGYGPIVGAALSDHPDVAMMSFTGSTEAGIAVAQASAVSVKRVHQELGGKSSNIILDDVADLEKSVKGGAGHCFLNSGQSCNAPTKMLVSKKNYDKAVEVAIQTANSTSVGDPQGEFRIGPIANKPQYEKILKMIEIGINEGATLVAGGLEKPEGYDKGYYVKPTVFANVTNDMTIAREEIFGPVLSIIKYDSEEEAIEIANDTEYGLAGYVQGEPEHANKVARKIRAGQVIINGGARGTGAPFGGYKSSGNGREHGIHGLEECLETKAVIMP

SEQ ID NO: 93206 - protein, 473 aa, Unknown
  Bacterial polypetide isolated from the Sargasso Sea
MKEMHKFYINGEWVNSLGSETIEVINPSDESIIGSIAAGTKEDIDVAVAAAKDAFKSFGFSSKEERIALLENIIIEYEKRSEELAQTISSEMGAPLWLSNVAQVTSGLSHFKDTLSVLKSFEFETTENEYIVRKEPIGVIGMITPWNWPMNQMCTKVASAIASGCTMVLKPSEITPFCGIIFAEILDAAKVPAGVFNLVNGMGPIAGAALSEHQDIDMMHFTGSTRAGVAVAIASAPTVKRVAQELGGKSANIILDDADIEKAAAAGANHCFMNTGQSCNAPTRMLVSSKNYDKAVEAAAQVANSTIVGAPEDEGVKIGPISNKVQYEKVQRLIQIGIDEGARLVAGGLGRPDGISEGYFVKPTVFAEVTNDMTIAREEIFGPVLSILKYETEDEAIDIANDTEYGLAGYVQSGDENHAKDVARKIRAGQISINRGNTGPAAPFGGFKTSGNGREHGLSGLNECLETKAILGS

SEQ ID NO: 93207 - protein, 354 aa, Unknown
  Bacterial polypetide isolated from the Sargasso Sea
MKKEFDNESDNYIAYEPIGVCGLITPWNWPINQIALKVVPALAAGCTMILKPSEIAPLSGMLFAEMIDEAGFPPGVFNLVNGDGPGVGTHLSGHPDIDMISFTGSTRAGRLITKNAAETVKRVCLELGGKGGNIVFADSYSEAVRDGVRNVMSNSGQSCDAPTRMLVEKSIYERAVKEAADEANKIKVDIAEKKGDHIGPVVSKTQYDKILNLIKSGIDEGATLVAGGPDRPEGLDKGYFIKPTIFTNVSNNMRIAKEEIFGPVLSIIPFENEEEAISIVNDTSYGLGNYVQTNDKEKARRVARQFRSGGVYINGKVADPGTPFGGYRQSGNGREGGTWGLEEYLEVKTICGWK

SEQ ID NO: 93208 - protein, 483 aa, Unknown
  Bacterial polypetide isolated from the Sargasso Sea
MELNNKSLFKQKCFINGEWVDSSSGETLEVNNPASLEIIGNVPKCSVSETKKAIDDANTAFQTWKETTAKERSVILKKWGELITENADDLAKIMTIEQGKPLAEAKGEILMGASYIEFYAEEAKRVYGDIVPDPRPGKRIVIIKQPVGVVGAITPWNFPNSMITRKCAAALAVGCTTVVKPASQTPYSALAVAVLAKEAGFPDGVFNVITGSASEIGKELTSNPIVRKISFTGSTEVGKILLEQSASTVKKVSMELGGHAPFIVFDDADMDEAVAGALQSKFRNSGQTCICSNRIFVHENIYDEFLEKFTNEVSKITVGNGLEDGIISGPLIDQSSLEKVIDHVQDAVNTGAKIAIGGDVHSLGGNFYQPTVLSNVSTKAKITFEETFGPVAPLYKFSSDDEVIKMANDTPYGLASYFYSRDIGRIWRVAEALEYGIVSINNGLPTIAEVPFGGVKESGMGREGSRYGLDDYLTIKYISMGGI

SEQ ID NO: 93209 - protein, 225 aa, Unknown
  Bacterial polypetide isolated from the Sargasso Sea
AISNIILEDVDLENAVTMGMKQCFLNTGQSCSSPTRMLLPEHMLDEATKYAVAAANDMSTGDPLDEEIYLGPISNKTQYEKVQDLIQKGIDEGATLACGGTGRPDGLEKGFFVKPTVFTNVNNNMTIAREEIFGPVICLIPYSDVEQAIEIANDSEYGLSSMISCSDEVKGQEIAKRIRTGQVILNRISRGDYPAPFGGFKMSGNGREHGLFGIDEYLEVQAVIT

SEQ ID NO: 93210 - protein, 469 aa, Unknown
  Bacterial polypetide isolated from the Sargasso Sea
MEDVLKLQREHFLNEGPPSYELRIDRLDRVQDMVIQNKERITEALNTDFGSRSPNQSLITDVYAVLPAFSHAKKHLKSWMKDEKRKSNFPFGFLGAKSYIHREPLGVVGMISPWNFPMYLSLAPLAGIFSAGNQVMHKPSEFTPITSELLKEICDSAFDETEFATFLGGPDIGAAFTQLKFDHLLFTGSGNIGKHVMRAASENLVPLTLELGGKSPVIVSDSSNIDITARRVMFNKTLNAGQICLAPDYVYVHETEKDNFVEACKNQVNEFYSDLKYNPDYTSVINQKHYDRLNGLLADAKDHGAELVEINPANEDFSQQESHKIPPTLVLNPTDEMQIMKEEIFGPLLPIKTYKDINEPINYINKNDKPLGLYYFGNNKNEEAKVVNSTTSGGVTVNDIMWHIQQNELGFGGVGPSGMGKYDGFDGFMNFSNNKPIYKQIGFGLDKFLDAIRPPYKGSIEDVLEKLLK

SEQ ID NO: 93211 - protein, 475 aa, Unknown
  Bacterial polypetide isolated from the Sargasso Sea
MFKQHAYINGEWLSALGGDTQSIFNPATGQLIGTVPMMGRQEARRAIAAANQALPAWRSLPAKERSARLRAWFELMLEHREELACLMTIEQGKPVAEARNEILYAASFVEWFAEEGKRVYGDVIPSPQADKRLLVIKQPIGVTAAITPWNFPSAMITRKAAPALAAGCTMVLKPAPQTPFSALALAALAQQADIPAGVFNVVTGSAEEIGGEFTSNPTVRKLTFTGSTQIGRLLMAQCANDVKKMSLELGGNAPFIVFEDADLDKAAEGALIAKYRNNGQTCVCTNRIYVHDSVYDDFVLRLKSAVDGLKVGNGLESGITIGPLINDAAVEKVKSHISDALSKGAKILTGGKPHSLGGYFFEPTILTDVTQDALVAKEETFGPLAPIFRFHDESEAVGFANDTEYGLAAYFYTKNLSRAFRVAEALEYGMVGINSGAISNEVAPFGGIKSSGLGREGSKYGIEEYLEIKYINIEL

SEQ ID NO: 93212 - protein, 497 aa, Unknown
  Bacterial polypetide isolated from the Sargasso Sea
MNLIEHFVGGKIIAGSSEKKGKVFNPATGEQEKEVRLASHNDLDQAVVIAKKAFETWSIKPSLQRARIMFKFKELIEKNYDELTKLIVSEHGKVYEDAKGSLTRGLEVVEFACGIPHLLKGEFSENVGTDVDSWSMRQPLGVVAGITPFNFPAMVPMWMFPIAIACGNTFILKPSEKDPSCAIRLAELLKEAGLPDGVFNVVNGDKEAVDAILNNIDIKAVSFVGSTPIAKYIYENSAKNEKRVQALGGAKNHLVVMPDCDLDGAVNGLMGAAYGSAGERCMAQSVAVAVGDIGDELVSRLSKKAEALKVGPGMDKNSEMGPLVTKEHLEKVKSYVDLGVKEGAKLVVDGRSLKLQGYENGFYIGGCLFDNVTKDMRIYKEEIFGPVLSVVRVKTFEEASKLINEHEYGNGVSIYTRDGDAGRTFASKIQVGMVGINVPIPVPMAFHSFGGWKRSLFGDSAMHGMEGIKFYTKLKTITSRWPSGIRSNAEFVMPTMK

SEQ ID NO: 93213 - protein, 324 aa, Unknown
  Bacterial polypetide isolated from the Sargasso Sea
MNQVCLKVMPAIASGCTMVLKPSELAPLSSMILAEMIDDTKFPAGVFNLVNGDGATTGDTLTSHPDINMISFTGSTRAGALISQNAAKDFKRVSLELGGKGANIIFKDADPEAIERGALRCFRNSGQSCNAPTRMLVEKSMYNDAIERLKKYTENFEVGDPKKEGEHIGPVISETQYNKIQTLIKKGIDEGAKLVAGGPGKPAGLEKGYFVKPTVFADVNNNMEVARTEIFGPVLSVIPFETEEEAIEIANDTPYGLTNYIQTKDSEKVKRVARKLRSGMVDVNGAGIAVDAPFGGFKHSGIGREAGKHGLEEFLEVKSVGGWS

SEQ ID NO: 93214 - protein, 377 aa, Unknown
  Bacterial polypetide isolated from the Sargasso Sea
LQYYSELARDQVGRIVSPVEKKSMSLIRYEPYGVVGCIIPWNYPLSLMGWKLAPALAAGNTIIMKPSEITSLSLLHWAEIISDIMPPGVLNIVTGYGAEAGEEIVKHPSIPIITFTGSVKTGKRIARLAADNLKKVSLELGGKDPVIICDDADISVAAKGTSWGGFVNSGQVCTSIERVYVYNSVADKFTEALVEEAKKVKLGDPMDENTDVGPMASKAQLKNTIDKVALAKKEGARLLTGGERPLEPARGYFFTPTIFDRVKPDMEIVTEESFSPVIPIQKIDSLDEAVRMANSTKYGLGCTIFTKDIERALTAADKIKSGTVCINNPLMENIAAPFGGMKQSGIGREHGVEALEEFREAKHIYIDYDHSKKSWWF

SEQ ID NO: 93215 - protein, 469 aa, Unknown
  Bacterial polypetide isolated from the Sargasso Sea
MNNVLKDQKEYFIKNGSPSVDLRIDRLQRLKSLIMDNRYDFVDALNADFGNRSKNASMLSDVYGIMPAINLAIKNVKKWNKIEKKSSNFPFGLLGAKSYIKYEPLGTVGMISPWNFPVNLAFVPLVSIFAAGNQVMHKPSEHTPITSSLLKDLCDKAYDQNEFATFLGGPDVGEAFTKLNFDHLLYTGGGSVAKHVMSAASENLVPCTLELGGKSPVVVGKSADLKTTAKRIMFGKTLNAGQICLAPDYVVVHKDQKDDFINETKNAVSDYFPDLKDNDDYTSIINQNHYDRLQDLLNDAIEKGATIDEINPANEDFSQQEHFKIPPTIVSNTTDDMKIMQEEIFGPLLPVVEYDEIDEATKLINSKDRPLGLYYFGNDQSEQDNILNKTSSGGVTVNNVISHLQQNDLSFGGVGPSGMGRYKSFEGFKNFSNPRAYYKDVSFKLDKVFDAVRPPYKENIEKVLKQLMK

SEQ ID NO: 93216 - protein, 359 aa, Unknown
  Bacterial polypetide isolated from the Sargasso Sea
MYSKFGQFIDGKWQQAEKKETYDVINPATEEVIGKASKASSVDVEKALKSAEKGLKVWRNTPPWQRSYIIRKIADLMREKKDILAKWLTLEVGKPLAEGVGEVGGSADIFEWNAEETKRIYGQTVESRFPDSRVHVYYQPVGVVAALVPWNFPIVLASRKISTALAAGCSVICKPDVITPGAVMELVDICREAGVPPGVVNLLSGDPAGISEQLIKSDIVKKISVTGSTRVGKLILKQAADKVQRVTMELSGHSPFIVFDDADINKATDIAVTAKFRNNGQVCISPNRFYIQEKKKDEFINSFINKAKKLKIGNGMDENVQLGPLSTEKRLNEVEQLVETTKKEGAKVLMGGKRPAGFN

SEQ ID NO: 93217 - protein, 335 aa, Unknown
  Bacterial polypetide isolated from the Sargasso Sea
MTIRVAINGFGRIGRNILRAKYESDNYNDMQIVAINDLGDSQINAHLLIHDTVHGKFQKPVDVASDKIIIDNSDEILVTSERNPEALPWKKLKIDVVFECTGIFVSKDQAGGHINAGAKKVIISAPGKEVDNTVVFGVNHETLTDDHTVISNASCTTNCLATVINNIHKNLQITNGLMTTVHAYTNDQVLTDVYHTDLRRARSATQSMIPTKTGAAAAVGLVMPELNGKLDGFAIRVPTTNVSIVDLVFNTDKSSSVDELNNLVLESSENEMKGIVGYNNLPLVSVDFNHSSFSSVYDESLTRASKDKLYKICAWYDNEWGFSNRMLDVTKNWIK

SEQ ID NO: 93218 - protein, 476 aa, Unknown
  Bacterial polypetide isolated from the Sargasso Sea
MKTYEQFYINGEWVDPAEGVNSFDVLNPANEEVIGKISMGSSADVDKAVEAASKAFNSFSQTSVEERLAILGKIVEVYQSRYDEIAETISMEMGAPLSLSKAAQAATGLGHFAQAIEILQGFEWEETKGKTLLRKEPIGVVGMITPWNWPINQISCKVAPAIAAGCTMVLKPTEIAPLNAMLFAEVIHEAGVPAGVFNLVNGDGPTVGEAMSAHPKIDMMSFTGSTRAGIAVAKGSADTVKRVAQELGGKSANIILDDADFESAITGGAKHCFNNSGQSCNAPTRMLVPESRHEEAKEIAKQAAESTKVGDPFAEDTGIGPVVSEVQFNKIQGLIEKGIEEGAELVSGGPGKPEGLNAGYYVRPTVFANVNNDMTIAREEIFGPVLSILPYKDEEEAVEIANDTEYGLYGYVSSGDVEHAKKVANQIRAGSIAINGAQADFTAPFGGYKQSGNGKEWGPFGFEEFLETKAVVGYSS

SEQ ID NO: 93219 - protein, 490 aa, Unknown
  Bacterial polypetide isolated from the Sargasso Sea
MSLSLTRPDLIHPHNLIDGKWVDAADRARFPVTNPATGELVVEVANSSATDARAATDAAAHAFPAWRDKLPRERAEILRRWHALIVANTEDLAKLMSTEQGKPLAESRGEVAYGASYVAWFADEATRIYGDLIPQQQRGKRMSAVKEPVGVVAAITPWNFPLAMIARKIAPALAAGCTVVAKPAEDTPLTALALAALAQEAGLPDGVLNMLSASREQGIAAVADWLADARVRKITFTGSTPVGKHLARESAGTLKKLSLELGGNAPFIVFDDADLDAAVTGLMAAKFRNGGQTCVCPNRVYVQSGVYARFADLLAQRVGALKVAPATDPDAQIGPMINERAIDKIARHVEDAVKHGAKVLTGGKRLAELGPNYYAPTVLTDAKDGMLVCCEETFGPVAPLFRFDDEAEAIRLANDTPFGLAAYFYTQDVRRINRVASRLEAGVIGINEGAVSSEAAPFGGVKESGYGREGSKYGLDDYMSIKYMCQGGLD

SEQ ID NO: 93220 - protein, 486 aa, Unknown
  Bacterial polypetide isolated from the Sargasso Sea
MTKRTIDLKHPREFYIGGQWVAPSTAETFDVLDCATEEVVATVAKAASADMQRAITAARDAFDNGPWPRMTPQERAVYLEKFAERLEALNDDFARIWSIETGIVYKIAQPRIGLFISGAFRQYAAMASTFPFVEEHRSVTGNLGYRVYEPVGVVGEIIPWNGPAGLMAYKTAPALLAGCTLVIKSSPEAPCSAYLFAEICEEIGLPPGVINVVTADRDVSEELVRHPGVDKITFTGSTGAGRRIASIAGDRVARVTLELGGKSPAVILDDFDVEAAANILGPSYFGYNTGQICHSLTRVIVPRAKHDAMVEALSNIAKQIVVGDPFAPETTSGPLASARQRETVERFVAKGIAEGATLAAGGKRPAGLQRGFFFEPTVFGNVDNRSTIAQDEIFGPVLSVIPADDEASAIRMANDTPFGLNAAVFTNDSARALHVARQIRSGTVGHNGPRTDFSIGFGGFKQSGIGREGGVEGLTAFMESKTIVMA

SEQ ID NO: 93221 - protein, 477 aa, Unknown
  Bacterial polypetide isolated from the Sargasso Sea
MLDKKNFYINGAWVKPNSSEEIKVIDPATEENCAVITLGNKADVDIAVNAAKDAYESWAFSSKEERIALLEKLYENYKKRWADIAEAITLEMGAPKDFATKLQAGTGASHIKSFIRYLKNFAFEKPLGEHAPNQRLIYEPKGVCALITPWNWPMNQVCLKVMPAIAAGCTMVLKPSELAPLSSMILAEIIDDVKFPKGVFNLVNGDGATTGDALTSHPDINMISFTGSTRAGALISQNAAKDFKRVSLELGGKGANIIFKDADPEAIERGALRCFRNSGQSCNAPTRMLVEKSMYEEAIERLKKYTESFEVGDPKKEGEHIGPVISETQYNKIQTLIQKGIDEGAKLVAGGTGKPDGLDKGYFVKPTVFADVNNNMDVARTEIFGPVLSVIPFETEEEAIKIANDTAYGLTNYIQTQDSEKVQRVARKLRSGMVDVNGAGIAVDAPFGGFKHSGIGREAGEHGLEEFLEVKAVGGWS

SEQ ID NO: 93222 - protein, 476 aa, Unknown
  Bacterial polypetide isolated from the Sargasso Sea
MLDKRQFYINGQWVDPIAPNDLEVINPSNEEVCAIISLGSSADTDLAIESANKALPSWSKTSKEERLKLIEKLYEIYKARWNDMTESISLEMGAPYDWANEEQSKSGANHIKNFIKTLKKFEFESTFDEESDNHIVYEPIGVCALITPWNWPINQITLKVIPALAAGCTMVLKPSEIAPLSGMVFAEMVHEAGFPAGVFNLVNGNGEGVGTQLSGHPKIDMVSFTGSTRAGKLITKNSADTIKRVTLELGGKGGNIVFADSDPDAIKRGVKHVMGNSGQSCNHPTRMLVEKSIYERAVKEAIEQAQNTKVDVASKKGDHIGPVVSKVQYDKIQNLIHTGIKEGANLVAGGPDRPDDLEKGYFVKPTIFSDVNNDMTIAREEIFGPVLSIIPFETEEEAIAITNDTDYGLTNYVQTQDKEKAKRVARQLKSGGVEVNGKGVSGGTPFGGFRQSGNGREGGKWGLEEYLEVKAITDWK

SEQ ID NO: 93223 - protein, 480 aa, Unknown
  Bacterial polypetide isolated from the Sargasso Sea
MYEKFGQFIDGKWQQSSDKSTYEVINPANEEVIGHASKATPADVDKALKSAAKGLEVWKKTPPWQRSYIIRKIADKMREKQDVLAKWMTLEVGKPFAEAKGEVGGAADIFEWNAEETKRIYGQTVESRFADTRVHVYYQPIGVVAALTPWNFPLVLSSRKISTALAAGCSVIVKPDVITPGTVMELIDICRECGVPPGVVNLLSGDPPSIAQQLISSDIIKKISVTGSTRVGKLILKQAADKVQRVTMELSGHSPFIVFDDADIQKATDMAISAKYRNNGQVCISPNRFYIQEKKKDEFVNLFIEKTKKLKIGDGMDPSVQLGPLTTKKRLNEVEELVETTKKEGAKVLLGGKRPAGFNKGFYYEPTIFDNVKDDFTIMKVEPFGPLVPMLSFKSFDEVIERANNNDLGLSSYICTNSMEQAHRASELMETGTVAVNTPLVAIAEAPFGGIKQTGYGREGGSMAIKDYLNVKYTHLGIKG

SEQ ID NO: 93224 - protein, 323 aa, Unknown
  Bacterial polypetide isolated from the Sargasso Sea
MQNLQKFYIDGQWVAPQSSKKMPVVNPATEEVIGEVILGNEEDVNIAVKAAKNAFMSFSKTSKEERMNILKNIRKISEERFDDLADAMTMEMGAPRKMSREAQADAAIGHLDGFISALEKHEEKIELSNTDILLKEPIGVCGLITPWNWPINQITLKVLPVIATGCTCILKPSEHTPLSAMVYAEILDKAGVPAGVFNLVHGDGEGVGIAMSRHPDIEMMSFTGSKRGGKSVTIESAETVKKVTLELGGKSPNLVFADCDLEEKVTASVNECMFNTGQSCDAPTRLLVEKKCYDEVVTIAKKAAEEIKVGDPQEDGDHLGPLF

SEQ ID NO: 93225 - protein, 472 aa, Unknown
  Bacterial polypetide isolated from the Sargasso Sea
MHERRHLYINGNWIEPSGEGSIEVINPTNEEVIGSVPVSSDSDANAAVEAARSAFTDWSTTEVSERVEFLNRISGLIKDRSEDLAEIITAEVGTPIEYSRMAMVGTPRVVSRSYAKILDGYVWEEEVRNSLVIKEPIGVVAMITPWNFPLHQIIGKVAPAIAAGCTMVLKPSKEAPLNAFLLADILDDVGLPNGVFNLISGHGRDIGETLCSHPMVDMVSFTGSTSAGIRVSELAAPSVKRVTLELGGKSANIILDDADIQRAATSAIYSCFGNSGQECSALTRLLVPEDSRDEVVEVISSKIGRYTVGDPMDESSRCGPLVSKRQQESVSSYISSGIEQGATLVAGGEGMPDGLGSGFFVKPTVFADVTPDMTIFREEIFGPVLCITSYSSEEEAVELANDSEYGLSGGVWSGDEERAMRVAKMLRTGQVSINGGAFNVTAPFGGYKQSGLGRELGVHGMEEFLEIKSIQR

SEQ ID NO: 93226 - protein, 477 aa, Unknown
  Bacterial polypetide isolated from the Sargasso Sea
MLDKKKFYINGKWVDPIKSNNFEVINPSTEEVCAIINLGSSEDTNLAVESAKKAFDSWKETSKENRLKLLEKLLEIYKSKWDEMTNAISTELGCPKDWCSANQTSSGAGHIEDFIKRLKEFNFEPGFDKGSVNHIVYEPIGVCGLITPWNWPINQIALKVIPAFATGCTMVLKPSEIAPLSGMLFAEMIHEAGFPAGVFNLVNGDGPGVGTDLSGHPDVDMISFTGSTRAGKLITKNAADTIKRVCLELGGKGGNIVFADSYPEAVRDGIRNVMSNSGQSCDAPTRMLVEKSIYKRAVEEAADEANKIKVDLASKSGDHIGPVISKVQFDKIQSLIKSGIEEGATLVAGGPDKPEDLKKGYFIKPTVFTNVNNNMRIAKEEIFGPVLSIIPFDSEEEAINITNDTEYGLGNYLQTEDKEKAKRVSKKLRSGIVYVNFKGADSGTPFGGYRQSGNGREGGTWGLHEYLEVKTITEWKN

SEQ ID NO: 93227 - protein, 326 aa, Unknown
  Bacterial polypetide isolated from the Sargasso Sea
MYSKFGQFIDGKWQQAEKKETYEVINPATEEVIGKASKASSVDVDKALKSAEKGLKVWRNTAPWQRSYIIRKIADLMREKKDVLAKWLTLEVGKPLAEGVGEVGGAADIFEWNAEETKRIYGQTVESRFPDSRVHVYYQPVGVVAALVPWNFPIVLASRKISTALAAGCSVICKPDVITPGAVMELVDICREAGVPPGVVNLLSGDPAGISEQLIKSDIVKKISVTGSTRVGKLILKQAADKVQRVTMELSGHSPFIVFDDADINKATDIAVTAKFRNNGQVCISPNRFYIQEKKKDDFINSFISKAKKLKIGNGMDENVQLGPLT

SEQ ID NO: 93228 - protein, 478 aa, Unknown
  Bacterial polypetide isolated from the Sargasso Sea
METRNFINGKFVDSISKEKISIINPANQKVVGKIDQALDDEINLAFESAKKAFDKRILLDMDPKEKSNMMRAIATKLREYKNEGGKLLSQENGKTVTQCIDEFKGAADTFDFYAGMTDKIQNKLIPSGKDTFNYVVLEPFGVSLQIVPWNYPVAIFSGMVAQNLIVGNTIVIKPPELCPLSSNFYGKIFEEVGVPNGIINIVHGFGDVTGRKLVKNKGSDYIVFTGSPEVASEILKETADRIVPCHFELGGKSAAIIFPDADIDKAVESTVKGIFKPNAGQICVAMSRVIVHPKIKDEYMTKLISKSKKLKIGPGIDSETEVTPLISKDHMQRVSNYVNSGIQSGATLELGGKEDQNKDGNFYQPTIFDNVSTKATIAQEEIFGPVASVFDFETENEAIEIANSTSYGLASGVFTSDDQKAKWTAERIKAGIIWHNDWFVDGINLPGGGYKKSGYGRDGGMDGIYSHGQTKRVSKRLY

SEQ ID NO: 93229 - protein, 477 aa, Unknown
  Bacterial polypetide isolated from the Sargasso Sea
MIEKRNFYINGSWVPPKNPKDIEVINPATEKNCAVISLGSKEDINDAVLAAKEAFKTWGFTSKEERLSLLEVFYSLYKKRWNDITDAIIQEMGAPKDFASKLQTGTGASHTKSFIRYLKEFEFEKPLGDHAKNQRIIYEPKGVCALITPWNWPINQVTLKVIPALASGCTMILKPSELAPLSAMIIAELIDEAKFPKGVFNLVNGDGEITGDALTSHPDVNMISFTGSTRAGALISQNAAKDFKRVSLELGGKGANIIFEDADAEAIERGAFRCFRNSGQSCNAPTRMLVEKSIYNEAIERLRKYANEFKVDDPNKNGEHIGPVISETQFNKIQGLIQKGIDEGAKLVAGGVGKPNGLNDGYYVKPTVFADVKNEMEIARTEIFGPVLSVIPFETEEEAIKIANDTDYGLTNYIQTQDKEKVQRVARKLRSGMVDVNGAGIAVDAPFGGFKHSGIGREAGKEGLLEFLEVKSVGGWN

SEQ ID NO: 93230 - protein, 488 aa, Unknown
  Bacterial polypetide isolated from the Sargasso Sea
MEKKSSLDFKNQAFINGNYTNSVTGKTFESISPVDGSVITSVAECDIEDINKAVKAARDVFEKGSWSRMAPSKRKKILFNFADLMKKNILELGLLETLNMGKPITRATGDIAACINCTKWYAEAIDKLYDDVAPTSDNLIATITKEPLGVVGAVTPWNFPLLMACWKFAPALATGNSFILKPAEQSPLSALRVAELAMEAGIPEGVFNVVPGYGPTAGKALGTHMDVDKLGFTGSTEVGRYFLSYAGESNMKRVSLECGGKSPNIIFADAPDLDHAAKMAADGMFGNSGQVCDAPSRLLLQKSIKDEFLEKVVSYSQPWMPGNPFDPNTLMGSIVDKTQTERIMNYIDTGKSEGANVITGGDQVLQDSGGYYVSPTVFKDVQNSMTVAKEEIFGPVLCAIDFENEDEALQIANDTHYGLNAMIWSNDLNKVHKLAKRIKSGKVLINSLSDGDMSLPHGGYKQSGSGRDKSLEALGQYTQTKLTLIEVK

SEQ ID NO: 93231 - protein, 496 aa, Unknown
  Bacterial polypetide isolated from the Sargasso Sea
MNKLTLADWQDKAASLEIEGRAFIDGALRDAHGGKTFDCVSPIDGRVLVKVADCGEADVNAAVAAARRAFDAGVWAGLNPRARKAVLLRWAALMREHLDELSLLETLDAGKPIGDTTTVDVPGAAYCVEWFAEAIDKVGGEVAPADHHLVGLVTREPVGVVAAVVPWNFPILMAAWKFGPALAAGNSVVLKPSEKSPLTAIRVAQLAVEAGMPAGVFNVVPGAGEPGKLLALHRDVDCIAFTGSTAVGKLIMQYAAQSNLKRAWLELGGKSPNIVLPDCPDLDRAAQAAAGAIFYNMGEMCTAGSRLLVHRDIKDAFIEKLVAAARAYVPGNPLDPSVSMGAIVDGIQLERVLGYIEAGRSEGRLVTGGARVKAETGGFYVEPTVFEVKPDAKIAREEIFGPVLSVIVFDDVDEAVRIANDTEYGLAAAVWTSNLTTAHDVSRRLRAGTVWVNCYDEGGDMNFPFGGYKQSGNGRDKSLHALEKYTELKSTLIRLR

SEQ ID NO: 93232 - protein, 476 aa, Unknown
  Bacterial polypetide isolated from the Sargasso Sea
MLDKRKFYINGEWVSPSKNSDFNVINPATEEPYVTISLGNEDDTNKAVVAAKNAFTSWKNTSVEERITLLEKLLKIYKRRFNEMTQAISTELGAPLDWASSAQTASGESHIEDFILRLKKFEFEKKFDESSDNYIVYEPIGVCGLITPWNWPINQIALKVIPAFATGCTMILKPSEMAPLSGLLFAEMIHEAGFPAGVFNLVNGDGAGVGSQISSHPDIDMVSFTGSTRAGKLISKSAADTIKRVCLELGGKGGNIIFADAYPNAVRDGVRNIMSNSGQSCDAPTRMLVEKSIYEKAVEEAADEAKKIGVDLPSKSGDHIGPVINKSQFEKIQSLIQSGIDEGATLVAGGAGRPSNLEKGYYVKPTVFTNVSNDMRIAKEEIFGPVLSIIPFESEEEAISITNDTPYGLGNFLQTENKERARRVSKQLRAGVVQINGIAPDAGTPFGGYNQSGNGREGGTWGLHEYLEVKAISGWK

SEQ ID NO: 93233 - protein, 472 aa, Unknown
  Bacterial polypetide isolated from the Sargasso Sea
MEINKFYIDGNFIEPDGSEKIDIVNPATEEVVGHVISGSPKDVDIAVAAANKAFPSAMALTLEQKKKILEEIIAGMEERREDFAQIISEEMGSPIKMARKAQYGAGVIHFKNTLSVIDKFDFNEVHGNITINKLPIGPVGMITPWNWPLNQMCTKIASAIAAGTSCVLKPSEITPGAAHIFAEVIHKTSIPKGMFNLIHGLGVTVGKAMSSHSDLEMISFTGSTRAGIDIQKSAADNIKRVSLELGGKSPNIILEDVDLENAVTMGIKQCFLNTGQSCSSPTRMLLPEHMLDEATKYAVAAANDMSTGDPLDEEIYLGPISNKTQYEKVQDLIQKGIDEGAILACGGTGRPDGLEKGFFVKPTVFTNVNNNMTIAREEIFGPVICLIPYSDVEKAIEIANDSEYGLSSMISCSDEVKGQEIAKRIRTGQVILNRISRGDYPAPFGGFKMSGNGREHGLFGIDEYLEVQAVIT

SEQ ID NO: 93234 - protein, 277 aa, Unknown
  Bacterial polypetide isolated from the Sargasso Sea
MVTHEKVRKVTFTGSFTVGKIIAQKAAPKLCPVTLELGGKNPNIIMSDADLDIAIQGVIDGMRYTRQGQACTAGSRVYIQEKIYDQVLGGAVEKLSKLKMGNALDESSDIGAIISEEQLKRTLYYMDIAKKNSTTNVVHGGNQLTGGDYKNGFFYEPTLMSGVPVSSPVCQEEIFGPVACAIPFKTFDEVMNSANDTPFGLSAVLWTQNLSRALQFVEEIEAGFVQVNQCVAPRANVSYGGLKMSGLGKEYAFDSMVNHFTQSKTVLINRGKSNIDN

SEQ ID NO: 93235 - protein, 247 aa, Unknown
  Bacterial polypetide isolated from the Sargasso Sea
MVGWQYSESTESPDIVSIKKKYTNYIGGKFLEPKSKKYINTISPSTEELLSKVPLSNEQDINSAVKSAKEGLEIWSKLTPNQRSRYLFKIARLIQERSREFAVLESLDGGKPIKESRDFDLPQVAANFFYFAGWADKLDLSWATKTLKPYGVVGQIIPWNFPLLMLSWKIAPALATGNTVVLKPAETTPLTALLFAEICEQAGLPPGVVNIVTGDGSTGSLIVNHKDINKIAFTGSTQVGKLIQKSL

SEQ ID NO: 93236 - protein, 256 aa, Unknown
  Bacterial polypetide isolated from the Sargasso Sea
MMSFTGSKRGGKSVTIESAETVKKVTLELGGKSPNIVFADCDLNEKVKDSVNECMFNTGQSCDAPTRLLVEKKCYDEVIDIAKKTAEEIKVGDPTLDGDHLGPLFDKIQFDRVQNMIQVGIDEGAKLLVGGLGKPNGHEKGWFVKPTIFSDVNNNMRVAQEEIFGPVLVIIPFDDEDEAIRIANDTPYGLAAYLQTGDKERAERVSRQLRAGGVHVNGGGYNYGSPFGGYKESGNGREGGDMGLEDYLETKVLHIA

SEQ ID NO: 93237 - protein, 491 aa, Unknown
  Bacterial polypetide isolated from the Sargasso Sea
MSAETLKALGMKDLSLFREQAYIAGNWSDADSGEKDDVLNPATGEVLGTVPRCGQQETRKAVEAANQAMPAWKATPAKERGKILRRWYELMIENKEDLAILMTAEQGKPLAESHGEILYASSFFEWFSEEAKRMYGETIPTHMPDRRLLVVKEGVGVTAAITPWNFPAAMITRKAGPALAAGCPMIIKPAPDTPFSALALCELGERAGVPKGILSVVSGDAIAVGGELTSNAIVRKLSFTGSTGVGKLLMKQCSETMKKLSLELGGNAPFIVFDDADLDAAVQGALDCKFRNAGQTCVCANRIIVQDRIYDEFTRKLAEGASKLTVGDGFSDGCQQGPLINPAALTKVESHIQDAVEKGASVLSGGGRHDLGGNFFQPTVLSNMKEDMLVAHDETFGPLAPVFRFSTEEEAIRMANDTEFGLASYFFSRDIGRIWRVSEALEYGMVGINTGIMSTEVAPFGGMKESGIGREGSKYGLDEYLEVKYLCMAGI

SEQ ID NO: 93238 - protein, 477 aa, Unknown
  Bacterial polypetide isolated from the Sargasso Sea
MIEKKNFYINGSWVAPKNPKDIQVINPATEKSCAVISLGGKEDVNDAVLAAKEAFKTWGFSSKEERLSLLENFYALYKKRWNDITDAIIQEMGAPKDFALKLQTGTGASHTKSFIRYLKEFEFEKPLGEHAKNQRLIYEPKGVCALITPWNWPINQVTLKVIPALASGCTMVLKPSELAPLSAMIIAELIDEAKFPKGVFNLVNGDGATTGDALTSHPDVNMISFTGSTRAGALISQNAAKDFKRVSLELGGKGANIIFKDADAEAIERGALRCFRNSGQSCNAPTRMLVEKSIYDEAVERLRKYASEFKVDDPNKEGEHIGPVISETQFNKIQGLIQKGIDEGAKLVAGGPGKPDGLNDGYYVKPTVFADVNNDMEIARTEIFGPVLSVIPFETEEEAIQIANDTDYGLTNYIQTQDNDKVQRVARKLRSGMVDVNGAGIAVDAPFGGFKHSGIGREAGKEGLLEFLEVKSVGGWN

SEQ ID NO: 93239 - protein, 497 aa, Unknown
  Bacterial polypetide isolated from the Sargasso Sea
MNLIQHFVNGKITPGKSERRGKVFNPAIGEQESEVILGLKSDLDEAVEIAKIAFETWSLKPPIQRARIMFKFKELIEKNSDELTKMIVSEHGKVYEDAKGSLIRGLEVVEFTCGIPQVLKGEFTENVGTDIDSWSIRQPLGVCAGITPFNFPAMVPMWMFPMAIACGNTFILKPSEKDPSISIKLAELFKEAGLPDGVFNVINGDKEVVDAILVNKDIKAVSFVGSTPIAKYIYENAAKNEKRVQALGGAKNHCVVMPDCDLDQAVNGLMGAAYGSAGERCMAQSVAVAVGNIGDNLVNELSKKVEALKVGPGMDKKSEMGPLVTKEHLEKVKGYVDLGVKEGAKLIVDGRNLKLQGYEKGYYIGGCLFDHVKKDMRIYKEEIFGPVLSVVRAKNFEEATQLINDHEFGNGTSIYTRDGDVGRTFASKIKIGMVGINIPIPVPVAFHSFGGWKRSLFGDQHMHGIEGVRFYTKLKTITSRWPSGIRSDPEFIMPTMK

SEQ ID NO: 93240 - protein, 476 aa, Unknown
  Bacterial polypetide isolated from the Sargasso Sea
MKECLKFYINGEWVDPVNPQHFDVINPATEESIGRIALGNEEDLNNAVAAAKNAFDSFSQTTKEERIELIGKIIEVYQSRYDEIAETISSEMGAPLWLSKAAQAATGAGHLGTFLEILKNYEFEEDRGNTRIRKEAVGVCGFITPWNWPINQITCKVAPALAAGCTMVLKPSEIAPLNAILFAEILDEAGVPAGVFNLVNGDGPTVGEAMSSHKDIDMMSFTGSTRAGIAVAKASADTVKRVAQELGGKSANIILDDADFGSAIAGGVTSCFMNSGQSCNAPTRMLVPADRQDEAIAIAKETAENTIVGDPAEVAAGGIGPVVSELQYDKIQALIEKGIEEGATLVAGGPGKPEGLNAGYFVKPTVFADVKNDMTIAQEEIFGPVLSILPYKDDEEAIAIANDTVYGLSGYVSGSQERAQGVAKRIRSGNVHVNGSGPDFSAPFGGFKQSGNGREWGDFGFEEFLEIKAILGYTAA

SEQ ID NO: 93241 - protein, 483 aa, Unknown
  Bacterial polypetide isolated from the Sargasso Sea
METETDLRRHDLLIDGKRLPPGTGEYSIDINPATEEPIALVAQGSAADVDTAVHAARAALKVWNAIRAAERGRILMRLAGLMRANQEELAALESLDAGKPISAVMRQDIPAAIDTLEYYAGWCDKINGQVVPVRPDALTYTLREPVGVVAAIVPWNFPLMIGMWKIAPALACGCTLIVKPAEMTPLSALRIGELALEAGVPPGVLNIVTGKGRVVGDALVAHPGVDKVTFTGSPSVGRGILQGAAGNFKRVTLELGGKSANLIFPDANLDNAVRAAASGIFFNTGQVCSAGSRILAHRDVYDEVVERLAARAKAIKVGDPAARETSMGPLISAAQMKTVLGYVEAGRAEGASLVTGGARVGERGFFVEPTVFANVEHEMRISQEEIFGPVASVIRFNDEADALRIANGTLYSLAAGVWSADIGRVHRVARELKAGTVWINTYGYTDVRLPWGGSGDSGFGREHGDVAIENFTEPKAVWLAIDQ

SEQ ID NO: 93242 - protein, 325 aa, Unknown
  Bacterial polypetide isolated from the Sargasso Sea
MNQIVLKVIPALAAGCTMILKPSEIAPISGVLFAEMIDEAGFPPGVFNLVNGNGEVVGNHISGHPDIDMVSFTGSTRAGKLIQKNAAETIKKVTLELGGKGGNIVFADSYPNAVRDGVRHIMSNSGQSCDAPTRMLVERPIYERAVKEAVDEANKIKVDVASKKGDHIGPLVSKIQYDKVINLIKAGIKEGATLAAGGPELPDELNKGYFVKPTIFTDVNNDMKIAREEIFGPVLSIIPFETEDEAIAIVNDTSYGLGNYLQTEDKEKAKRVARKLRAGTIFINGQGADVGAPFGGYKQSGNGREGGIWGFNEFLEVKAITGWKN

SEQ ID NO: 93243 - protein, 475 aa, Unknown
  Bacterial polypetide isolated from the Sargasso Sea
MENQRTMEEVLKLQREHYLNEGPPSYELRIDRLDRVQDMVIQNKERITEALNADFGARSPNQSLISDVYGVLPAFSHAKKHLKSWMKDEKRKSNFPFGLMGAKSYIHREPLGVVGMISPWNFPMYLSLAPLAGIFSAGNQVMHKPSEFTPITSELLKEICDGAFDETEFATFLGGPDVGAAFTQLKFDHLLFTGSGNIGKHVMRAASENLVPLTLELGGKSPVIVSDSSNIDITARRVMFNKTLNAGQICLAPDYVYVHETEKDNFVEACKDQVNEFYSDLKYNPDYTSVINQKHYDRLNGLLSDAKDHGAELVEINPANEDFSQQESHKIPPTLVLNPTDEMQIMKEEIFGPLLPIKTYKDINEPINYINKNDKPLGLYYFGNNKNEERKVVNSTTSGGVTVNDIMGHIQQNELGFGGVGPSGMGKYDGFDGFMNFSNNKPIYKQIGFGLDKLLDAIRPPYKGSIEDVLKKLLK

SEQ ID NO: 93244 - protein, 478 aa, Unknown
  Bacterial polypetide isolated from the Sargasso Sea
MKIYDQFYIDGAWRKPAGTGTIDVIDSGTEAVIGRIPEGVASDAQDAIRAARAAFDAWAATPPATRAGYLRRIVEHLQARSEELAQSITGEVGMPIKLSRAIQVGGPIYNWKAYAKLAESFEFEAQVGNSLVVREPVGVVAAITPWNYPLNQVTLKVAPALAAGCTVVLKPSEVAPLNAFMLAEAIHEAGLPPGVFNLVCGYGPVVGEVLATDPDVDMVSFTGSTRAGKRVAELAAASVKRVALELGGKSASVILDDADFATAVKGTVNACYLNAGQTCSAHTRMLVPEARYDEARAIAKAAAETYVAGDPRQDATRLGALASAAQQQRVQDYIQRGIDEGAELVTGGTGLPEGLTKGFFVKPTVFGRVDPKSTIAQEEIFGPVLSIITYRDEDEAVRIANDSPYGLGGAVWAGSDERAMGIARRIRTGQVDINGGAWNMAAPFGGYKQSGHGRENGVYGLEEYLEYKSMQLKPAKPA

SEQ ID NO: 93245 - protein, 334 aa, Unknown
  Bacterial polypetide isolated from the Sargasso Sea
MGVIGMITPWNWPMNQITTKVSAAIATGCTMVLKPSEISPYCSMLLAEVMHDAGVPKGVFNLVNGYGPIVGAALSEHEKVDMMSFTGSTRAGIAVAQASATTVKRVQQELGGKSANIILDDVADLEKSVKGGAGHCFLNSGQSCNAPTRMLVSAKNYDKAVEVAVATANGTTVGDPNGEFRLGPIANKAQYEKIIKMIEIGIEEGARLVAGGIEKPEGYEKGYYVKPTVFADVTNDMTIAKEEIFGPVLCIMKYETEEEAIEIANDTEYGLAGYVQGELSHAIEVGNQIRAGQITINGGARGNAAPFGGYKASGNGREHGLHGIEECLETKAIM

SEQ ID NO: 93246 - protein, 312 aa, Unknown
  Bacterial polypetide isolated from the Sargasso Sea
MHWYSTIIKTAELTPLSATIFAKALINAEVPNGLINIICGYGNETGSYLVSHEDVNHVVFTGSVATGKKILHACADKAIPAVVELGGKSAGIVYPDADLNDVLDSARSGIFGVAGQICTAMSRLVVHKSIKDELVDKLVDLSKSLKIGPGIDKDSDLTPVISENQLQKVEGYARSGIQEGAEAAHGGKRVDREGYFMEPTVLNNVKQDMTVAREEIFGPVLSVLEYNDEEEAIKIANDTDYGLGSGVFTKDLKKASWTASKLEAGQVYVNKWFTGNHATPFGGYKQSGYSREKGVDGLKSYLQVKNVGISLS

SEQ ID NO: 93247 - protein, 353 aa, Unknown
  Bacterial polypetide isolated from the Sargasso Sea
MNTFDNKSNNHIYYEPIGVCGLITPWNWPINQIALKVVPAFATGCTMILKPSEIAPISGMLFAEMIDEAGFPKGVFNLVNGDGAGVGTHISSHPDIDMVSFTGSTRAGRLISKNAAETIKRVCLELGGKGGNIVFADSYKDAVRDGIRNVMSNSGQSCDAPTRMLVEKSIYERAVKEAVDEANKIKVDQASKKGDHIGPVISKIQYDKIINLIESGISEGATLAAGGPELPNGLNKGYFIKPTIFTDVTNEMRIAKEEIFGPVLSIIPFETEDEAVNIVNDTSYGLGNYLQTEDREKAHRVAKKLRSGCVYINGNGADAGTPFGGYRQSGNGREGGVWGLEEYLEVKNVTGWS

SEQ ID NO: 93248 - protein, 409 aa, Unknown
  Bacterial polypetide isolated from the Sargasso Sea
MRDIKNYQMLINGDWVDASDGGVFESINPSTQAVWSRVPEATEEDVTRAVSAAHYAFSKGPWSKLTPTERGKCLRKLGDLLVDHSENLGRIETIDTGKMLKETRWQAKYIAEFFHFFAGCADKVSGETLPIDKPDMFVFTKREPLGVVAAVVPWNSQLFLVAVKIGPALAAGNTVVLKASEHASAAMLEFGKLIEQAGIPPGVVNIVTGHGEPCGRALTSHPDVARVSFTGGPNAARHVLENVKRNFAEVSLELGGKSPFIVFDDANIESAVNASIAGIFGATGQSCVAGSRLYLHEDIADEFLEKMIALARQIIIGDPLEEDTQMGPLCTLGQLKNIQAEVEYAEQKGAKILTGGKQPEGKEGLFYEPTIIECPKQDLRIVDTELFGPVLCVQRFKTEEEVLSLANDT

SEQ ID NO: 93249 - protein, 380 aa, Unknown
  Bacterial polypetide isolated from the Sargasso Sea
PFGLMGAKSYFHREPLGVVGMISPWNFPMYLSLAPLAGIFSAGNQVMHKPSEFTPITSELLKEICDSAFDETEFATFLGGPDVGAAFTQLKFDHLLFTGSGNIGKHVMRAASENLVPLTLELGGKSPVIVSDSSNIDITARRVMFNKTLNAGQICLAPDYVYVHETEKDNFVEACKDQVNEFYSDLKYNPDYTSVINQKHYDRLNGLLTDAKDHGAELVEINPANEDFSQQESHKIPPTLVLNPTDEMQIMKEEIFGPLLPIKTYKDINEPINYINKNDKPLGLYYFGNNKNEEAKVVNSTTSGGVTVNDIMGHIQQNELGFGGVGPSGMGKYDGFDGFMNFSNNKPIYKQIGFGLDKLLDAIRPPYKGSIEDVLKKLLK

SEQ ID NO: 93250 - protein, 432 aa, Unknown
  Bacterial polypetide isolated from the Sargasso Sea
MNLIQHFVNGKIVPGKSDRKGKVFNPATGDQESEVILGSKLDLDQAVEISKKAFETWSLKPPIQRARIMFKFKELIEKNSDLLTKMIVSEHGKVYEDAKGSLIRGLEVVEFACGIPQVLKGEFTENVGTDIDSWSIRQPLGVCAGITPFNFPAMVPMWMFPMAIACGNTFVLKPSEKDPSISIKLAELFKEAGLPDGVFNVINGDKEVVDAILINKDIKAVSFVGSTPIAKYIYENAAKNEKRVQALGGAKNHCVVMPDCDLDQAVNGLMGAAYGSAGERCMAQSVAVAVGNIADELVGKLTKKVEALKIGPGMDKSSEMGPLVTKEHLEKVKGYVDLGVKEGAKLLVDGRNLKLQGYENGYYIGGCLFDHVKKDMRIYKEEIFGPVLSVVRAKDFEEATQLINEHEFGNGTSIYTRDGDVGRTFASKIKIG

SEQ ID NO: 93251 - protein, 465 aa, Unknown
  Bacterial polypetide isolated from the Sargasso Sea
MMRETLELQKKAFIKDGPPTYNQRVDSLKRCMALIETHDDQIIEALNQDYKNRSHHEIRTSEIDQSIRNFAFTLKNLKKWMKPSKRTPSFGTGLMGAKTIMKPMPLGSVGVIAPWNFPIGMVFYPAASILAAGNKIMAKPSEFTPHTSQVMKEAVEKYFDKSEFAVFLGGPEVGAEFTSMPFDHLLYTGSNRVAKKVLANTANNLVPTTLELGGKSPTIISEDADLSLVAKRIMFVKTLNAGQICLSPDYVFLKRGFEDKFINELKNVFADFYPDGNEDDYTSMVNDHHFNRMRSYLEDAKLKGAEVISLGDFDSEPKDTMTTKVIMNVNDSMQVMQEEIFGPLLPIMLYDELSEVVEYINAHDHPLGLYFFGNKKSEQDFVINNTRSGGVTINDTMFHLMQSHLPFGGVGPSGYGYYFGHEGFLNFSNLRGIYYQTKSDAVLSVMRPPRGKAFGYFSKIMKKLS

SEQ ID NO: 93252 - protein, 469 aa, Unknown
  Bacterial polypetide isolated from the Sargasso Sea
MNKVLSEQKDFFIKNGSPSVELRIDRLQRLKSLIMDNRYDFVDALNTDFGNRSNNASMLSDVYGIMPAINLAIKNVKKWSKPEKKSSNFPFGLLGAKSYVKYEPLGTVGMISPWNFPVNLTFVPLVSIFAAGNQVMHKPSEHTPVTSALLKDLCDKTYDQNEFATFLGGPDVGEAFTKLNFNHLLYTGGGEVAKHVMNAASQNLVPCTLELGGKSPVVIGKSADLKTSAKRIMFGKTMNAGQICLAPDYVIVHKDKKDDFIKETKDAVTEYFPDIKNNEDYTSIINQKHYDRLKNLLDDAVAKGANVDEINPANEDFSQQEFYKIPPTIVTNTTDDMKIMQEEIFGPILPVVEYEEIDEATKLINSKDRPLGLYYFGTDKKEEDNILNNTSSGGVTVNNVISHLQQNDLSFGGVGPSGMGRYKSFDGFKNFSNPRAYFKDVSFKLDKFFDAVRPPYKGNIEKVLQQLMK

SEQ ID NO: 93253 - protein, 313 aa, Unknown
  Bacterial polypetide isolated from the Sargasso Sea
RAAKAAFDSGAWADMRPTQRGKLLVRLAEIIEREAERLANLEVRDNGKLITEMSAQTKYLAEWYRYFGGLADKIEGAVLPADRPGIFNFTRYEPLGVIGMITAWNSPLLLLAWKLAPALAAGNTAIIKPSEFTSASSLEFMELVNEAGFPKGVVNCITGFGIEIGAPMVEHPDVAKIAFTGSDFAGQKIYETAAKKIMPVTLELGGKSPNIVFEDADFEAAVMGAISGIFAATGQTCIAGSRLLVQRTIHDKFVKRLVEVASEAKIGDPMSVETHVGPVTTEPQYEKILQYIEVAKEDGATCVLGGKPYTGDN

SEQ ID NO: 93254 - protein, 358 aa, Unknown
  Bacterial polypetide isolated from the Sargasso Sea
MIKPWNFPINLIISPIAQAFAAGNRVMIKPSEITPKTSDLTKKMFNEFYDKAEVEVFLGGPDVAEAFGNLDFDHLLFTGSTNNGRKVMQSAAGNLVPVTLELGGKSPVIMDETADVSLSATRLMRGKTMNAGQICIAPDYMMMPKGKVDEFIDESTKAVSEMYPDMKYNEHYTSIVNERHYERINSLIEDAKEKGAEIKTINPANEDFEQQEGHKIPPTFVLNPTDDMKIMQEEIFGPVMPIKEYEDIDETISYVNSKPRPLALYYFGKNKDTQDKILNRTTSGGATINDVVWHYGQEDMPFGGVGDSGIGSYHGHEGFKRFSHQKSVLTQFSSDLLKNMMPPYKGKMFESAKKNALK

SEQ ID NO: 93255 - protein, 380 aa, Unknown
  Bacterial polypetide isolated from the Sargasso Sea
LRSSSFKERRSKLKLLLKNFLEMEEEVLAALSKDLGKSKTEALLAEIYGVKAEATFAIKNIKSWMKTKRVASPLAISFTKSWVKPEPKGNVLIISPWNYPVMLCLNPLIAAIASGNTAIIKPSELTPASGELVKALIEKTFSSDEVAVFLGEKDVAQKLLNLPFNHIMFTGSPKVGKVVMEAASRHLAGVTLELGGKSPVIVDKHANIKDAAWKISFFKFANAGQTCTAPDYILCDEAVHEDLVAALQKNMSEFFPSGIDEAAKDYCSIANEHHFNRLKGALTEAVNGGARVACGGETSQGGLYFSPAVLTDVGYDNPIMEEEIFGPILPIVKVKSLDESISYVNSNEKPLALYLFSSKSSSHNRVLKNTSSGGMVINDC

SEQ ID NO: 93256 - protein, 477 aa, Unknown
  Bacterial polypetide isolated from the Sargasso Sea
MKDKKKFYINGQWVNPIKAKDFNVINPSTEEVCAIISLGSSEDTDLAVKSAKSSFETWKETSKQERIKLLEKLLEIYKSRWDEMTDAISTELGCPKDWCSANQTASGAGHIEDFIKRLKEFNFEPGFDKGSVNHIVYEPIGVCGLITPWNWPINQIALKVVPALATGCTMVLKPSEIAPLSAMLFAEMIHDAKFPAGVFNLVNGDGPGVGTDLSGHPDVDMVSFTGSTRAGKLITKNAADTIKRVCLELGGKGGNIVFADAYPDAVRDGIRNVMSNSGQSCDAPTRMLVEKSIYKRAVEEAADEANKIKVDLASKAGEHIGPVISKTQYDKIQSLIKSGIEEGATLVAGGPEKPEDFKKGYFIKPTVFTDVNNDMRIAKEEIFGPVLSIIPFENEEEAIKITNDTEYGLGNYLQTEDKEKAKRVSKKLRSGIVYVNHKPADSGTPFGGYRQSGNGREGGTWGLHEYLEVKTITEWKN

SEQ ID NO: 93257 - protein, 267 aa, Unknown
  Bacterial polypetide isolated from the Sargasso Sea
MDKVIKNFQNISYGPAPEDSKVVNSWIKNLKNPNNHFINGKFVKSSSSKKLNVINPSTNKKIATLSVASKKDVNAAVSAAKKAHIKWSKLSSFDRSKYLYALARLIQKNSRFISVLETIDNGKPIRETRDIDIPLVARHFYYHAGWAARNTNNSDNSIGVVGQIIPWNFPLLMLAWKIAPAIAIGNTVVLKPAEYTSLSALYFAELCQKAKIPQGVINIITGDGSTGEHITSNKDINKIAFTGSTEVGKKIIQTNTNPDKKMTMELE

SEQ ID NO: 93258 - protein, 458 aa, Unknown
  Bacterial polypetide isolated from the Sargasso Sea
MREAQLANPMPELETRRDRLQRLMKGLEEREEAFTQAISTDFGQRSAFETANYDITVTLADIKYQIRNLARWMRIRKRSVPLHLMPGRARILPQPLGVVGVISPWNFPVFLSLSPVAGAIAAGNRVMLKPSEWTPKTSALLAELASEAFKPDEFAVFEGGIETGRAFSGLPFDHLLFTGSTSVAKEVSNSAAKNLTPLTLELGGKSPALVCPDANLKRAAERIVFGKLANAGQICIAPDYVFVERAKFHDFIEMLQTYIKKAYPRLNNNPDYTSIISADHFSRLNRMIEEAREDGAEIISINPDGETLEPSARMIPPTLILRPNPTLGVMQEEIFGPILPVLSYEKIEEAIEFIQNRARPLALYLFTEKARERERILRETVSGGVAVNEVLFHCVCETLPFGGVGASGMGSYHGQAGFDTFSHLKPVFIQPRFNFNFFLVPPITPMKRLFAKIFRKLV

SEQ ID NO: 93259 - protein, 464 aa, Unknown
  Bacterial polypetide isolated from the Sargasso Sea
MSSKKYSLVFESQKKFFESKATLDISYRINSLKKLKKQIQLHENEIIKALNKDLGKSLAESYMSEIGIIYNEINYVLKKIKKWSKKRKVSSSLFNFLSTDYILPCPYGVTLNISPWNYPFQLSISPIIGAISAGNTVVLKPSEHSPNTTNILKLVIEKSFERGHVDIVTGGPDIGQKLLELNWDYIFFTGSTEIGKIVAKEAAKTLTPVTLELGGNNPCVIDKNISLKTTSKRVIWGKFLNCGQTCIAPNFLAVDVKIKDSLLNQLISDIKDTFGDDVYNSPYYSRIINKKHVERLSKLIKGYKLLHGGNYSMEKNFFEPTILEVKSIKDKILKDEIFGPILPVLTYQSVNDLKNILNEYNNPLAFYVFSNNISFAEDLISTNSFGGGAINDTIGQIVNKKLPFGGVGNSGIGKYHGHESFKTFSHFKPFIIKSNYFDLSFKYKLSENSLLFRLTRRFLKYFSV

SEQ ID NO: 93260 - protein, 428 aa, Unknown
  Bacterial polypetide isolated from the Sargasso Sea
EGLEVWKKTSPWQRSYIIRKIADKMREKQDVLAKWMTLEVGKPFSEAKAEVGGSADIFEWNAEETKRIYGQTVESRFADTRVHVYYQPVGVVAALSPWNFPLVLSSRKISTALAAGCSVIIKPDVITPGTVMELVDLCRECGVPPGVVNLLSGDPPSIASQLIQSDIIKKISITGSSRVGKLILKQAADKVQRVTMELSGHSPFIVFDDADIKKATDMAIAAKFRNTGQVCISPNRFYIQENKKEEFVNLFVEKTKKLKIGNGMDPDVQLGPITTKKRLNEIEQLVETTKKEGAKVLLGGKRPSGFNKGYFYEPTIFDNVKDDFTIMKIEPFGPLVPMLSFKTFDEVVERANNHELGLASYICTNSMEKAHRASEMMETGTVAVNTPVVAIAEAPFGGIKQAGYGREGGSMSIKDYLNVKYTHLGIKG

SEQ ID NO: 93261 - protein, 476 aa, Unknown
  Bacterial polypetide isolated from the Sargasso Sea
MLDKRKFYINGKWIEPAKKNDFEVINPSNEETFAVISLGSKADVDLAVKISKDAFESWKETTKEERIKLLENLLSVYKKRFSEMTEAISKEMGAPMDWSSNVQNASGQAHLEDFIIRLKNFKFDEQFDSKSNNQIFYEPIGVCGLITPWNWPINQIALKVIPALATGCTMILKPSEIAPVSAMLFAEMIHEAGFPPGVFNLVNGDGAGVGTYISGHPDIDMVSFTGSTRAGKLITKNAAETIKRVCLELGGKGGNIVFADSYPNAVRDGIKNVMSNSGQSCDAPTRMLVEKSIYERAVSEAVDEANKIKVDIASKKGDHIGPVVSKVQYDKIINLIKDGINEGATLAAGGPEMPNGLNKGYFIKPTIFTDVTNDMQIAKKEIFGPVLSIIPFETEEEAISVTNDTEYGLGNYLQTEDKEKAKRVSKKLRSGIVYINGNSPDSGTPFGGYKQSGNGREGGSWGLEEYLEVKTITGWK

SEQ ID NO: 93262 - protein, 477 aa, Unknown
  Bacterial polypetide isolated from the Sargasso Sea
MLDKKKFYIDGKWISPSEPKTYKVIDPSNEEPCAEISLGNKKDVDKAVSAAKKAFETWAFTKKEERLELLEKLYVIYKKRWAEMAKLISVEMGAPMKFSTEMQAATGASHIKSFKNILKDFNFEKDLGDEKNNQKLLYEPKGVCALITPWNWPINQVNLKVIPALASACTVVLKPSEIAPLSSMLLAEMIDEAKFPSGVFNLVNGDGAVTGDALTSHPDIDMISFTGSTRAGALISQNAAKDFKRISLELGGKGANIIFKDADSEAVSRGVLRCFRNSGQSCNAPTRMLVEKSIYNETVEKVKELANNTKVDSPDKDGDHIGPVVSETQFNKIQTLIQKGIDEGAKLVAGGTGKPKGLEKGYYVKPTVFADVNNQMEIARTEIFGPVLSIIPFENEDEAISIANDTPYGLTNYIQTQDKEKVKRVARKLRSGMVDVNGVGIAVASPFGGYKHSGIGREAGTEGLIEFLELKTVGGWN

SEQ ID NO: 93263 - protein, 475 aa, Unknown
  Bacterial polypetide isolated from the Sargasso Sea
MSDKKELERILEVQKKAHLRDGPLSLEQRKEWIDRLINSIIEYQDKIPVAISKDFSHRSETSSLLTDVASSITSLKIAKNNIKQWMRPSKRRVSPSILGLLGAKLRVEYQPLGTIGLISPWNFPVVLTFGPLGSIFAAGNRVMIKPSEFTPRTSELMKNMFEDNFSEEEVAVITGGPEVGADFSSLPFDHLLFTGATSIGKHVMRAASENLVPVTLELGGKSPVIISDTSNVEQSSKRIIAGKTMNAGQICLAPDYVLLPENKLDKFIMHAKETVSTMFPSIKDNDDYTSVINERHYSRLKSYIDEAKDNGCEVIEINPAEEDFEQQEHYKIPPTLLINPDDNLKVMQEEIFGPILPIKTYKEFGETIDYVNKKDRPLGLYYFGSNNNELSTVLNKTTSGGVTVNDVIFHVAQDNAPFGGVGPSGMGSYHGEEGFKNFSHAKTIFTQTKLDNVISVFRPPYGSKARKALKSQIKA

SEQ ID NO: 93264 - protein, 252 aa, Unknown
  Bacterial polypetide isolated from the Sargasso Sea
MKVKFPFKAKYGNYINGKFVEPKSGKYFDNTTPITNEVICKVPRSNEKDVDFALDAAHAAFPAWGKTSITERSNILLKIADVIEKNLNVLATAECLDNGKPIRECMAADLPLVIDHWRYFAGVIRAEEGSVAEISNSEYSYHIPEPLGVVGQIIPWNFPLLMATWKLAPALAAGNCVVLKPAEQTPASIMLLMELIGDLLPAGVVNVVSGYGLEAGKPLASSKRIKKIAFTGETTTGRLIMQYASQNLIPIT

SEQ ID NO: 93265 - protein, 486 aa, Unknown
  Bacterial polypetide isolated from the Sargasso Sea
PDDVAVRSGHFIGGEYVEGGEPRIEVLRPSDGVAYASLPFADAEMVDRAVQNAWQAFRTSAWARMAPRERAKILRRFADLVEADASYLGRLEALGSTRPIAQAIGWDVPFTAEGIRFYAEFADKLGGDVAATDHDHLGMTIAEPYGVIGAIAPWNFPLVMASWKIAPALAAGNAVVLKPSEMTPFSVLRLAELAVQAGVPAGIFNVVQGDGRVTGDELVRHPKISKVTFTGSTRTGAAIMAACAQSGTKPVTLELGGKSPQIVFADAPRLDDVARRIAGSITGNAGQVCVAGSRLLVERSLAEPLAERIGKVFAELRPGATWAAGTTLSPIISAPQAARIEGIVGRTLEAGATLRYGGVRSDAGAGAFYAPTLLADVTAHSEAVREEVFGPVLTLQTFDTEEEALALAQHPDYGLAAGVHTADLGRALRFVRGLEAGTVWVNRYGRTSDFMIPTGGYKRSGIGKDLGRQAYEANLRFKSVLIDLRP

SEQ ID NO: 93266 - protein, 276 aa, Unknown
  Bacterial polypetide isolated from the Sargasso Sea
MSNFEKNYELALNNAKRLSDKILIDGKLISAQTNKKIPVLNPSTGENIGSVPQCDKNEVNIAVGSAFKAFQKWKKIPARERGKMVAAGAKRLEERKSEIETLLSLDTGNALRTQAVPETAASIELTNMFAGLSGELKGENYPPNIPNTIHYTTRDPIGVVCAIVPWNAPLFLTVAKIAPAIVAGNSVVLKTAEQAPFCALLLSEIFQQELPPGVLNVISGYGEECGEPLVTHEKVRKVTFTGSFSVGKIIAKKTAPKLCPVTLELGGKNPNIIMSD

SEQ ID NO: 93267 - protein, 465 aa, Unknown
  Bacterial polypetide isolated from the Sargasso Sea
MQTIDTTFKAQQAKSISLRNSTARERRDKLKLLLKNFLEMENDILAALSSDLGKSKTEALLAEIYGVKAEADFAIKNLGMWMKTKRVASPLAISFTKSWVKPEPKGNILIISPWNYPIMLCLNPLIAAIASGNTAVIKPSELTPASGELVKKLVENTFSSDEVAVFLGEKDLAQKLLELPFNHIMFTGSPRVGKLVMEAASKHLAGLTLELGGKSPVIVDKHANVKDAAWKISFYKFANAGQTCTAPDYILCDASVHDDLVLALRKNISQFFAEGVDAAKKDYCSIANEHHFNKLKCSLADALSDGAELACGGETSKEGLHFTPAVLTGVNYDNSIMKEEIFGPILPIIKVQSLDESINYVNENEKPLALYLFSNKPAVHNEVLKGTSSGGMVINDCVLHHMNPNLPFGGINNSGVGSYHGKFGFDAFSHHKAVLKSSSISPFKVMLPPYTKTKETLANLIKKYF

SEQ ID NO: 93268 - protein, 496 aa, Unknown
  Bacterial polypetide isolated from the Sargasso Sea
MTPFDTSLVPDGNILIGGEWRRGRGAPYASIYPADQSLNMEVSTANAEDAAEAVVAADAAWRRADWAGLKPHLRAQVLYRIADLIMQRHEALANLQRRDNGKPIGETRVLVASAANTFRYFAACLETLDEELTPSRGDYLTMSVYEPIGVIAAITPWNSPIASDAQKLAPALAGGNAVVLKPAEVTPLVSLALARICEEAGVPKGVLSVLPGKGSVIGDVLVRHPLVKKVSFTGGTEVGRGIARIAAEKLMPVSLELGGKSPTIVCDDADLDHAVNGVLYGIFSSSGEACIAGSRLFVQRAVYDEFMKRLVAGARKLRVGDPTRADTQMGPLITAKHRESVERYVALGLEEGGRLLCGGERPSGDGRENGFFYQPTILEGLPNSARICQEEIFGPVLVAMPFDDEASLIAQANDSVFGLAAGIWTRDYKRAWRIARALETGTVWINTYKLFSISTPFSGWKESGMGREKGRLGIREYMQQKSLYWGLNDAPLPWAN

SEQ ID NO: 93269 - protein, 497 aa, Unknown
  Bacterial polypetide isolated from the Sargasso Sea
MNIIKHFVGGKVIDGTSQRKGQVFNPATGEQESEVILATKSDLDKTVEIAKKAFETWSLKPALQRARIMFKFKELIEKNFDELTKLIVSEHGKVYEDAKGSLIRGLEVVEFACGIPHVLKGEFSENVGTNVDSYSMRQPLGVAAGITPFNFPAMVPMWMFPLAIACGNTFILKPSEKDPSCPMRLAELLHEAGLPDGVFNVVNGDKEVVDAILTNNDIKAVSFVGSTPIAKYIYENAAKNEKRVQALGGAKNHLVVMPDCDLDGAVNGLMGAAYGSAGERCMAQSVAVVVGDIGDELVSRLVKKAEALKIGPGMDKSSEMGPLVTKQHLEKVKGYVDLGVKEGAKLALDGRDLKLQGYENGFYIGGCLFDHVTTDMRIYKEEIFGPVLSVVRVKTFEEATKMINEHEYGNGVSIYTRDGDAGRTFASKIQVGMVGINVPIPVPMAFHSFGGWKRSLFGDSGMHGMEGIKFYTKLKTITSRWPSGIRSNPEFIMPTME

SEQ ID NO: 93270 - protein, 477 aa, Unknown
  Bacterial polypetide isolated from the Sargasso Sea
MIEKKKFYINGSWVASKNKKDIQVINPATEKSCAVISLGGKEDINDAVLAAKEAFKTWGFSSKQERVELLEDFYVLYKKRWSDITDAIIQEMGAPKDFASKLQTGTGASHTKSFIRYLKEFEFEKPLGEHAKNQRLIYEPKGVCALITPWNWPINQVTLKVIPALASGCTMILKPSELAPLSAMIIAELIDEAKFPKGVFNLVNGDGATTGDALTSHPDVNMISFTGSTRAGALISQNAAKDFKRVSLELGGKGANIIFKDADAEAIERGALRCFRNSGQSCNAPTRMLVEKPIYDDAIERLKKYASEFKVDDPNKEGEHIGPVISDVQFNKIQGLIQKGIDEGAKLVAGGPGKPEGLKDGYYVKPTVFADVNNDMEIARTEIFGPVLSVIPFETEEEAIQIANDTDYGLTNYIQTQDNDKVQRVARKLRSGMVDVNGAGIAVDAPFGGFKHSGIGREAGREGLLEFLEVKSVGGWN

SEQ ID NO: 93271 - protein, 480 aa, Unknown
  Bacterial polypetide isolated from the Sargasso Sea
MYSKFGQFINGKWQEAEKKETYEVINPATEEVIGRASKASSVDVDRALKSAEKGLNVWRNTAPWQRSYIIRKIADLMREKKDLLAKWLTLEVGKPLAEGLGEVGGAADIFEWNAEETKRIYGQTVESRFPDSRVHVYYQPVGVVAALVPWNFPIVLASRKISTALAAGCSVICKPDVITPGAVMELVDICREAGVPPGVVNLLSGDPAGISEQLIKSDIVKKISVTGSTRVGKLILKQAADKVQRVTMELSGHSPFIVFDDADINKATDIAVTAKFRNNGQVCISPNRFYIQEKKKDDFINSFISKAKKLKIGNGMDENVQLGPLTTEKRLNEIEQLVETTKKEGAKVLMGGRRPAGFNKGYFYEPTIFDDVKDDFTIMKEEPFGPLVPMLSFKNFDEVIERANKNDLGLCSYICTNSMDQAHRASELMETGTVAVNTGVVALAEAPFGGIKQTGYGREGGSTAIKDYLNIKYTHLGLKG

SEQ ID NO: 93272 - protein, 476 aa, Unknown
  Bacterial polypetide isolated from the Sargasso Sea
MIEKKNFYINGKWVAPVKPNDFNVIDPSTEEAFAVISLGSIEDTDKAISAAKVAFETWRETTKEERVKLLEKFDKIYNRRWNQMVEAQSMEMGAPLDFASDIHTKMGADISRNTIDILKNFNFEHQFDPKSNNQIRYEPIGVCGLITPWNFPMNQIVLKVIPALAAGCTMILKPSEIAPVSGVLFAEMIDEAGFPPGVFNLVNGNGEVVGNHISGHPDIDMVSFTGSTRAGKLIQKNAADTIKKVTLELGGKGGNIVFEDSYPDAVRDGVRSIMSNTGQSCDAPTRMLVQRSIYDRAVKEAVDEANKIKVDVASKKGDHIGPLVSKVQYDKVVNLINEGIKEGATLAAGGPDLPNGLNKGYFVKPTIFVDVNNDMKIAREEIFGPVLSIIPFDTEEEAIKITNDTSYGLGNYLQTEDKEKAKRVARKVRAGTVYINGQGAETGAPFGGFKQSGNGREGGLWGFTEYLEVKAITGWN

SEQ ID NO: 93273 - protein, 258 aa, Unknown
  Bacterial polypetide isolated from the Sargasso Sea
MKNVDKFYIDGEWITPKSSNQMPVINPANEEEIATVYLGNEDDVNIAVEAAKNAFDSFSQSSKSDRLDLLKKIRSVTKDRYEELAVAMSNEMGAPMTFSRDTQADSGIGHLDGFIESLEKLEEQITLSNGDILLKEPIGVCGLITPWNWPINQITLKVLPAIATGCTSVLKPSEFTPLSATVYAEILHEAGVPKGVFNLIHGKGEEVGVALSRHPDIQMVSFTGSTRGGISVTKESAPTVKKVTLELGGKSPNLVFAD

SEQ ID NO: 93274 - protein, 486 aa, Unknown
  Bacterial polypetide isolated from the Sargasso Sea
MLRKADMQLKDTQLFRQQAFIDGAWVDADNGQTIKVNNPATGEILGTVPKMGAAETRRAIEAADKALPAWRALTAKERANKLRRWFELLIENQDDLGRLMTLEQGKPLAEAKGEIVYAASFIEWFAEEAKRIYGDVIPGHQPDKRLIVIKQPIGVTAAITPWNFPAAMITRKAGPALAAGCTMVIKPASQTPFSALALVELAHRAGIPKGVLSVVTGSAGDIGGELTSNPIVRKLSFTGSTEIGRQLMAECAKDIKKVSLELGGNAPFIVFDDADLDKAVEGAIISKYRNNGQTCVCANRLYIQDSVYDAFAEKLKVAVTKLKIGNGLEDGTTTGPLIDEKAVAKVQEHIADALSKGAKLLAGGKVMEGNFFEPTILVDVPKNAAVAKEETFGPLAPLFRFKDEAEVIAMSNDTEFGLASYFYARDLGRVFRVAEALEYGMVGVNTGLISNEVAPFGGIKASGLGREGSKYGIEDYLEIKYLCLGI

SEQ ID NO: 93275 - protein, 476 aa, Unknown
  Bacterial polypetide isolated from the Sargasso Sea
MKECLKFYINGEWVDPVNPQHFDVINPATEESIGKIALGNEEDLNNAVSAAKNAFDSFSQTSKEERIELIGKILEVYQSRYDEIAETISSEMGAPLWLSKAAQAATGAGHLGTFLEILKNYEFEEDRGNTRIRKEAVGVCGFITPWNWPINQITCKVAPALAAGCTMVLKPSEIAPLNAILFAEILDEAGVPAGVFNLVNGDGPTVGEAMSSHKDIDMMSFTGSTRAGIAVAKASADTVKRVAQELGGKSANIILDDADFGSAIAGGVTSCFMNSGQSCNAPTRMLVPADRQDEAIAIAKETAENTIVGNPAEVAAGGIGPVVSELQYDKIQALIEKGIEEGATLVAGGPGKPEGLNAGYFVKPTVFADVKNDMTIAQEEIFGPVLSILPYKDDEEAIAIANDTVYGLSGYVSGSQERAQGVAKRIRSGNVHVNGSGPDFSAPFGGFKQSGNGREWGDFGFEEFLEIKAILGFTAA

SEQ ID NO: 93276 - protein, 305 aa, Unknown
  Bacterial polypetide isolated from the Sargasso Sea
MDKVIKNFQNISYGPAPEDCKEVNSWIKNLKNPNNHFINGKFVKSSSSKKLNIINPSTNKKIATLSVGSKKDVNAAVSAAKKAHVKWSKLSSFDRSKYLYALARFIQKNSRFISVLETIDNGKPIRETRDIDIPLVARHFYYHAGWAARNTNNSDNSIGVVGQIIPWNFPLLMLAWKIAPAIALGNTVVLKPAEYTSLTALYFAELCEKAKIPQGVINIITGDGSTGEYITLHKDIKKIAFTGSTEVGKKIIQTNTNPDKKMTMELGGKSPFIVFEDADLDSAVEGVVDAIWLIKGQYVVQDHRL

SEQ ID NO: 93277 - protein, 278 aa, Unknown
  Bacterial polypetide isolated from the Sargasso Sea
MEEVLRLQREHFMNEGPPSYELRIDRLDRVQDMVIQNKDRITEALDADFGARSPNQSLISDVYGVLPAFSHAKKHLKSWMKDEKRKSNFPFGLMGAKSYIHREPLGVVGMISPWNFPMYLSLAPLAGIFSAGNQVMHKPSEFTPITSELLKEICDSAFDETEFATFLGGPDVGAAFTQLKFDHLLFTGSGNIGKHVMRAASENLVPLTLELGGKSPVIVSDSSNIDITARRVMFNKTVNAGQICLAPDYVYVHETEKDNFVEACKDQVNEFYSDLKYN

SEQ ID NO: 93278 - protein, 195 aa, Unknown
  Bacterial polypetide isolated from the Sargasso Sea
CSSPTRMLIPENLIKEATEYACNATQKMKTGDPNNEETFLGPISNKTQFEKVQALIQKGIDEGAELALGGVDRPDGLDKGFYVKPTIFTNVKNEMQIAQEEIFGPVICLIPYKDIDEAVEIANDTPYGLSSMVSCSDIDKGHEIAKRIRAGQVIVNRISRGDYPAPFGGFKMSGNGREHGTFGLEEYLEVQAVIT

SEQ ID NO: 93279 - protein, 187 aa, Unknown
  Bacterial polypetide isolated from the Sargasso Sea
EDSKDVMSWINSLNNPNHLFINGSWIKSKSSKKIHVINPATNKKLTSLSMANKADVNAAVGAGKKAYTSWSKTSSDTRAKYLYALARLIQKHSRFLSVLETIDNGKPIRETRDIDIPLVARHFYYHAGWAKKIDTKNHKPIGVIGQIIPWNFPLLMMAWKIAPAIAAGNTVVLKPAEFTSLTALIFC

SEQ ID NO: 93280 - protein, 334 aa, Unknown
  Bacterial polypetide isolated from the Sargasso Sea
FTVAKIAPAIVAGNSVVLKTAEQAPFCALLLSEIFQQELPPGVLNVISGYGEECGEPLVTHEKVRKVTFTGSFTVGKIIAQKAAPKLCPVTLELGGKNPNIIMSDADLDIAIQGVIDGMRYTRQGQACTAGSRVYIQEKIYDQVLGGAAEKLSKLKMGNALDESSDIGAIISEEQLKRTLHYMDIAKKNSTTNVVHGGNQITGGDYKNGFFYEPTLMSGVPVSSPVCQEEIFGPVACAIPFKTFDEVMNSANDTPFGLSAVLWTQNLSRALQFVEEIEAGFVQVNQCVAPRANVSYGGLKMSGLGKEYAFDSMINHFTQSKTVLINRGKSNIDI

SEQ ID NO: 93281 - protein, 479 aa, Unknown
  Bacterial polypetide isolated from the Sargasso Sea
MPAAHIAGQPVRTHADAPGAPIFDASTGAAIGWQEFATAAHVDAAVRAARDAFAGWRDTPPAERGRILATIAARVEASRDRLAALQMQVSGKPPFEADADVGDVAATFAYYAKLCEDPALFAAEPVALPSDAVTAERFYDSVGVAALVMPWNFPMVTTAWKLAPALAAGCAVVLKPSELTSPTEHALLDIVAEAGVPAGIVNVVNGGAEVGAALTAHPLIDKISFTGSTAAGRKVMQAAAVDMKRVTLELGGKSSLIVRDDADLDVAVSLAVAGAFTNAGQMCSATARILVHDSVYRSFMAAFETAVRALVVAPPAAEQVAMGPLISAAQRTRVEAMLQQGIEAGARVAFSGRVADAGGDGFFMAPVVIAEPAADNPLWTDEVFGPVACVKSFRTDDEAIALANDTRYGLVATVVTRDAVIAKQFQQRVRAGLVWINAPQLIYPHVCWGGFGLSGIGRELGVAGLRSYQELRHAMRAID

SEQ ID NO: 93282 - protein, 479 aa, Unknown
  Bacterial polypetide isolated from the Sargasso Sea
MRTGHFIGGEWHESHGASDATYPVLNPATGETIAKVAKGGADDTQRAIDAAAHAFPAWRALTAKERGARVKRWGELMLENRDALAELLTREQGKPLAEARGEVAYAASFLEWFAEEAKRMYGDVIPSPKPNSQIVVTREPVGVVAAITPWNFPLAMITRKAGPALAAGCTMVLKPSEETPLSAFALAVLAERAGVPAGVFNVVSGDAVAIGETLTSSSVVRKLSFTGSTRVGKLLAKQSADTLKKLSLELGGNAPFIVFDDADLDAAVEGAIASKFRNTGQTCVCVNRFLVQDGVYDAFTRKLADAVRKLRVGNALAGEVDQGPLINEAALGKVERHVADATAKGAHALTGGKRHALGGTFYEPTVLTGMTADMLIAEEETFGPVAGCFRFATEEEAVAAANDTPFGLSAYFYTRDLGRAWRVSGALESGMVGVNDGIISTEVAPFGGVKQSGLGREGSKYGLDEYVELKYTLMAGLGR

SEQ ID NO: 93283 - protein, 476 aa, Unknown
  Bacterial polypetide isolated from the Sargasso Sea
MIDKRKFYINGTWINPIIKNDFEVINPSNEQPYAFISLGSKKDVDLAVNASKKAFITWSQVDKKHKISLLENLLKIYKSRWDEITQTMSEEMGAPLDWSSSAQTSSGADHINDFILRLKNFEFERRFNKNSNNYIVYEPIGVCGLITPWNWPINQITLKVIPALATGCTMILKPSEIAPMSGIIFTEIIHEAGFPPGVFNLVNGDGDGVGTDLSSHKDIDMISFTGSTRAGKLIYKNAADTIKRVCLELGGKGGNIVFSDSHPEAVREGVRNIMSNSGQSCDAPTRMLVEKSIYKRAVEEAADEANKIKVDIASKNGNHIGPVISKTQYDKIIDLINSGINEGATLVAGGPEKPNGLEKGYFVKPTIFTDVTNNMRIAKEEIFGPVLSIIPFEDEDEAISVVNDTSYGLGNYVQTQDKEKAKRVARKFRSGGVYINGNIADPGTPFGGYRQSGNGREGGDWGLEEYLEIKTICGWE

SEQ ID NO: 93284 - protein, 466 aa, Unknown
  Bacterial polypetide isolated from the Sargasso Sea
GQEWYHITDCTPAEVDKAVAAAQSALKAPGWGDITQTQRSGLIFNLAALIKEHASELGLLECRDNGKILRETTAQISYLHDYYRYFAGMADKIEGSTIPVNKPQVLNFTRHEPLGVVAIITPFNSPLNILSVSLAPCLAVGNTVVVKPSEHTSASTVAFAELIKEAGFPNGVFNVVTGGGAGAGQSLVSHKGVAKVAFTGGSDTGRRIAASVGDNLTQANLELGGKSPHIIFADADLDRAVNGAVAGIFASGGQTCVAGSRIFVEESIYEETLAQLTASALDVVVGHPEEPATQMGPLANLEQLEKVEELVRSAQEEGARLVCGGERLQDSPYDGGFYFAPTLFANARNDMRFCQEEIFGPVAGVIPFSSEADVIAQANDTRFGLSAGLWTRDLDRAMRCVDAIDSGTVWVNTFRTAAMMSPMGGFKDSGYGKHNGFATIREFSRLKNVVVDYSGQKQDAFVIRLR

SEQ ID NO: 93285 - protein, 477 aa, Unknown
  Bacterial polypetide isolated from the Sargasso Sea
MLEKRNFYINGSWVAPKKSSDIEVINPATEKACAVISLGSKDDVNDAVLSAKEAFKTWGYSTREDRIALLETFYTLYKKRWNDITDAIIQEMGAPRDFASKLQTGTGASHTKSFIRYLKEFEFEKPLGEHAKNQRLIYEPKGVCALITPWNWPMNQVTLKVIPALASGCTMILKPSELAPLSAMILAELIDEAKFPKGVFNLVNGDGATTGDALTSHPDVNMISFTGSTRAGALISQNAAKDFKRVSLELGGKGANIIFKDADPEAIERGALRCFRNSGQSCNAPTRMLVEKSMYGEAIERLKKYTNEFKVDDPKKEGEHIGPVISETQYNKIQTLIQKGIDEGAKLVAGGPGKPEGMNDGYYVKPTVFADVNNQMEIARTEIFGPVLSVIPFETEEEAIEIANDTDYGLTNYIQSQDSEKIRRLARKLRSGMVDVNGAGIAVDAPFGGFKHSGIGREAGKEGLLEFLEVKSVGGWS

SEQ ID NO: 93286 - protein, 495 aa, Unknown
  Bacterial polypetide isolated from the Sargasso Sea
MSSGNKYKSIANKLKFEGRAFINGKYVNAIDGKKFETINPATGKKLCAVAKCNHKDVDLAVKVSRKAFNSGVWSKSSPEHRKEVLLKFAELLRKHGDENSVLECIDTGKLIADCINEVANDAPMHFQWYGELIDKVFGKVGPTEPSITSLIVKEPIGVVAGIVPWNFPLMMAVWKMAPALAAGCSVIIKPAEDTPLTAIRVAQIGKEAGIPDGVLNVLPGYGDVGEALGRHKDVDAVSFTGSTEVGGYFLKYSSESNLKPVALEMGGKSPFIVLEDAKINDDLIDNAINSAFWNGGQNCSANMRQIVHKKVKDEFLDKVIKKVKKLKVGDPLDLKSNMGSMISKGHLQTVDGYIQKGIDEGAKLLTGGVSSKKQKGFYAKPTLFDGLKEDMTIAQEEIFGPVLGVLTVKNDEEALKIASNSKYGLHASVFTQDINRAFHLAKSLPCGTVSVNTFSEGDIKTPFGGYKQSGSLSRDQGTEALNSFLQTKTIWISHS

SEQ ID NO: 93287 - protein, 478 aa, Unknown
  Bacterial polypetide isolated from the Sargasso Sea
MKQYKHYINGEWVDSCKKNKKISVLNPANEEVIGEITAGIDEDINRAVEAAKKAYLSRVLVDMNPMERAKLMRRIADEIRKISKEGGALLCAENGKLLSASENEFHEAANYFDYYSGLTDKIEGQTIPVNSQVMDYTVYEPYGVSGHIVPWNFPISMIARSLACSFAAGNSTVIKPAELTPLATSSFFAQAVHNAGVPKGLINIVTGYGNEAGEALINHQDVAQITFTGSVKTGKVILHAAAERAVPAVVELGGKSAAVVLPDADINKVVNATKIGIFSQAGQICSAMSRMIVHKSIKDEVLDQLYKLAGSLKIGAGNEEGVDLTPIISEDQLQKVENYARSGLQSGANAVFGGKRVDRKGYFFEPTIYSDVKSDMTIAQEEIFGPFLSVLEYDDYDEAVEIANDTKYGLAAGVFTNDIDMATKTASDLNGGQVYVNSWFTGSIATPFGGYKQSGYSREKGQQAIKSYLQLKNVGIQL

SEQ ID NO: 93288 - protein, 427 aa, Unknown
  Bacterial polypetide isolated from the Sargasso Sea
AAKNSFLAWWGTSKEKKLELLNNLLNIYQKRSADMAQAISLEMGAPKDWSINEQSQSGEDHIKTFINQYQNFEFENYLDQEKGNYISYEPIGICALITPWNWPINQIALKVLPALAAGCTMILKPSEIAPLSAMLFAEMIHEAGFPKGVFNLVNGDGPGVGTQLSSHPDIDMVSFTGSTRAGKLITKNAADTIKRVSLELGGKGANIVFADADEKAVRRGVRRVFNNSGQSCNAPTRLLVEKSIYERAIKEAIEVAEKTDVDIANKEGRHIGPVVSKVQYDKIQNLINEGIKEGAKLVAGGPDRPSHLKKGYFVKPTVFADVNNEMTIAKEEIFGPVVSIIPFSTEEEAIKISNDTAYGLTNYIQTNDTNKAHRVARQLRSGMVEINGAGFADGSPFGGYKQSGNGREGGKWGIEEFLEVKSISGWK

SEQ ID NO: 93289 - protein, 469 aa, Unknown
  Bacterial polypetide isolated from the Sargasso Sea
MNKVLNEQKDFFIKNGSPSVELRIDRLQRLKTLIMDNRYDFVDALNTDFGNRSNNASMLSDVYGIMPAINLAIKNVKKWSKPEKKSSNFPFGLLGAKSYVKYEPLGTVGMISPWNFPVNLTFVPLVSIFAAGNQVMHKPSEHTPVTSALLKDLCDKTYDQNEFATFLGGPDVGEAFTKLNFNHLLYTGGGEVAKHVMNAASQNLVPCTLELGGKSPVVIGKSADLKTSAKRIMFGKTMNAGQICLAPDYVIVHKDKKDDFIKETKDAVTEYFPDIKNNEDYTSIINQKHYDRLKDLLDDAIAKGANVDEINPANEDFSQQEFYKIPPTIVTNTTDDMKIMQEEIFGPILPVVEYEEIDEATRLINSKDRPLGLYYFGTDKKEEDNILNNTSSGGVTVNNVISHLQQNDLSFGGVGPSGMGRYKSFDGFKNFSNPRAYFKDVSFKLDKFFDAVRPPYKGNIEKVLQQLMK

SEQ ID NO: 93290 - protein, 480 aa, Unknown
  Bacterial polypetide isolated from the Sargasso Sea
MYSKFGQFIDGKWQQAEKKETYDVINPATEEIIGKASKASPADVDKSLKSAEKGLKVWRNTPPWQRAYIIRKIADLMREKKDVLAKWLTLEVGKPLAEGIGEVGGSADIFEWNAEETKRIYGQTVESRFPDTRVHVYYQPVGVVAALVPWNFPLVLASRKISTALAAGCSVICKPDVITPGTVMELVDICREAGVPPGVVNLLSGDPPAIAEQLIKSNIVKKISVTGSTRVGKLILKQAADKVQRVTMELSGHSPFIVFDDADINKATDIAITSKFRNNGQVCISPNRFYIQEKKKDDFINSFINKAKKLKIGNGMDKDVQLGPLTTQKRLNEVEQLVETTKKEGAKVLMGGKRPAGFNKGYFYEPTVFDNVKDNFTIMKEEPFGPLVPILSFKNFDEVIERSNNNDLGLCSYICTNSMEQAHRASELMETGVVAVNTPVVAIAEAPFGGIKQTGYGREGGSNAIKDYLNVKYTHLGIKG

SEQ ID NO: 93291 - protein, 374 aa, Unknown
  Bacterial polypetide isolated from the Sargasso Sea
MYSKFGQFIDGKWQQAEKKETYDVINPATEELIGKASKASSIDVEKALKSAEKGLKVWRNTAPWQRAYIIRKIADLMREKKEVLAKWLTLEVGKPIAEGIGEVGGAADIFEWNAEETKRIYGQTVESRFPDTRVHVYYQPVGVVAALVPWNFPLVLASRKISTALAAGCSVICKPDVITPGCVMELVDICKQAGVPAGVVNLLSGDPPAIAEQLIKSDIIKKISVTGSTRVGKLILKQAADKVQRVTMELSGHSPFIVFDDADINKATDMAITSKFRNNGQVCISPNRFYIQEKKKDEFINAFISKAKKLKIGNGMDKDIQLGPLTTKKRLEEVEKLVEVTKKEGAKVLMGGKRPAGFNKGFFYEPTVFDGIED

SEQ ID NO: 93292 - protein, 488 aa, Unknown
  Bacterial polypetide isolated from the Sargasso Sea
MDNLDNLKKLIWFDPQKCFIDGVWQDPNSNNYLPLLNPSSGKEICRIARCSVQDVNLAVSAARHSLDGEWGQFTALERGRILQKIGFLVRDKIDLLSRIESIDVGKPLSQSKADAIALARYLEFYSGAADKIHGDTIPYQNGYTVYTLKEPHGVTAHIIPWNYPMQIIGRSVIGALTMGNAVVLKPSEDACLTALAFADICREANLPKGALNVVTGYGSETGEILSKHSGINHISFTGSVPVGTQIQKNAAENIVPVTLELGGKSPQIVFSDANISQAIPFLMKAGLQNAGQTCSASSRILIQKSIYNKVEKALADEYKNLTIGPAIQDFDLGPLISKKQVNMVQKYLNLGLDLKKIAELKINDKLENGSFISPTLFGMVDPSHALAQEEIFGPVQVLIPFDDEEEAIKIANGTKFGLVAGIWTNDGSRQLRMAKKIKAGQVFINNYGAGGGVELPFGGTGHSGYGREKGFEALNSFSTIKTIAINHG

SEQ ID NO: 93293 - protein, 480 aa, Unknown
  Bacterial polypetide isolated from the Sargasso Sea
MYEKYGQFTDGKWHKSSNGETYEVINPATEEVLGQVSKASPEDVNKALLSAQKGLEVWRKTPPWQRAYILRRIADKMREKQDILAKWMTLEVGKPFAEAKGEVNGAADIYEWNAEETKRIYGQTVESRFEDTRVHVYYQPVGVVAALVPWNFPLVLSARKISTALAAGCSVIVKPDVITPGVVMEQVEICRECGVPPGVVNLLSGDPPSIAQQLIASDIVKKISITGSSRVGKLILKQAADKVQRVTMELSGHSPFIVFDDADIKKAADMAIAAKFRNNGQVCISPNRFYIQEKKKEEFVNLFVEKTKKLKIGDGMDPSVQLGPLTTKKRLNEIEDLVETTKKEGAKVLLGGKRPKGFNKGFYYEPTIFDDVKDDFTIMKVEPFGPLVPMLSFKEFDEVIERANNHELGLSSYICTNSMERAHRASELMETGTVAVNTPLVAIAEAPFGGIKQAGYGREGGSMAIKDYLNVKYTHLGIKG

SEQ ID NO: 93294 - protein, 464 aa, Unknown
  Bacterial polypetide isolated from the Sargasso Sea
SDNSTYEVINPANEEVIGHASKATSVDVDKALKSAAKGLEVWKQTPPWQRSYIIRKIADKMREKQDVLAKWMTLEVGKPFAEAKGEVGGAADIFEWNAEETKRIYGQTVESRFADTRVHVYYQPIGVVAALTPWNFPLVLSARKISTALAAGCSVIVKPDVITPGTVMELVDICKECGVPAGVVNLLSGDPPSIAQQLISSDIIKKISVTGSTRVGKLILKQAAEKVQRVTMELSGHSPFIVFDDADIKKATDMAITAKFRNNGQVCISPNRFYIQESKKDEFVKLFVEKTKKLKIGDGMDPNVQLGPLTTKKRLNEVEELVETTKKEGAKVLLGGKRPAGFNKGYYYEPTVFDNVKDDFTIMRVEPFGPLVPMLSFKSFDEVVERANNNDLGLSSYICTNSMEKAHRASELMETGTVAVNTPLVAIAEAPFGGIKQTGYGREGGSMAIKDYLNIKYTHLGIKG

SEQ ID NO: 93295 - protein, 470 aa, Unknown
  Bacterial polypetide isolated from the Sargasso Sea
MHRVLELQKSLNIKEGAPSLELRADRLDRVVSMVMKYEKEIISALQEDFGNRDPVMSAATEVGSVVGPMIHAKKNLKKWMKTEKRKAAIAPLGSALSLLGAKAEIRYQPKGVVGAISPWNFPLNLALAPLAGILSSGNRVMLKPSELTPASSELTKSMIEESFDESEIAVFTGDPEVGAAFSGLAFDHLIFTGGTAIAKHVMKAASENLVPLTLELGGKSPVVVGKSSKIKETATRVMQGKTMNAGQICLAPDYALVPEDSVEEFVQASVDVTSEMYPDMKDNEDFTSIINQKHYDRIQGYISDAKDKGADVVEINPANEDFSQQPHHKIPPTLILNPTEDMQVMQEEIFGPVLPVKTYKDVSETVDYINSKDRPLGLYYFGEDTKEKDFVLDNTTSGGVTVNDVISHITMEDLPFGGVGPSGMGSYHGYDGFKEFSHAKSVYKQSWLNLNKLAGLVPPYKKKEDKIKSA

SEQ ID NO: 93296 - protein, 424 aa, Unknown
  Bacterial polypetide isolated from the Sargasso Sea
MLDKRKFYINGQWVDPIKKNDFEVINPCNEDPFAIISLGSTEDTDLAVKSAKNAFESWKETSKEERLSLLEKLLSVYKKRFNEMAEAISLEMGAPMDWATGVQTASGRDHLDDFILRLKNFKFDEHFNNKSNNHIYYEPIGVCGLITPWNWPINQIALKVVPAFATGCTMILKPSEIAPISGMLFAEMIDEVGFPKGVFNLVNGDGAGVGTDISGHPDIDMVSFTGSTRAGKLISKNAAETIKRVCLELGGKGGNIVFADSYKDAVRDGIRNVMSNSGQSCDAPTRMLVEKSIYERAVKEAVDEANNIKVDQASKKGNHIGPVISKIQYDKIINLIESGISEGATLAAGGPELPNGLNKGYFIKPTIFTDVTNEMRIAKEEIFGPVLSIIPFETEDEAVKIVNDTSYGLGNYLQLRIEKKHIVL

SEQ ID NO: 93297 - protein, 325 aa, Unknown
  Bacterial polypetide isolated from the Sargasso Sea
LGFTPATNSVIKQLLAEVFEESHVAVVEGEADVAAQFSALPFDHLLFTGSTTVGRHVMRAAANNLTPVTLELGGKSPVIIAPDMPLEIAVERMIYGKCLNAGQICVAPDYVLCPKAKVAEFIQAYQTKFQAMYGAITHNKDYGSIINTRQFERLLTVLEDAKAKGAKVIPASNDTIDSQHRKLATQLITDTTEDMLLMQEEIFGPLLPVIGYDSLDEAISYVNHRARPLALYVMSFDEASQQKILKQTHSGGVCINETVFHVAADDAPFGGIGPSGMGHYHGKEGFLTFSHAKTVLSRGRFNTGKFVHPPYGTFIQRMLMKLFLR

SEQ ID NO: 93298 - protein, 489 aa, Unknown
  Bacterial polypetide isolated from the Sargasso Sea
YKVIASKLKFEGRAFINGKYVNAIDGKKFETINPATGKNLCTVAKCNHKDVDLAVKVSRKAFNSGVWSKSSPEHRKEILLKFAELLRKHGDENSVLECIDTGKLIADCINEVANDAPMHFQWYGELIDKVFGKVGPTEPSITSLIVKEPIGVVAGIVPWNFPLMMAVWKMAPALAAGCSVIIKPAEDTPLTAIRVAQIGKEAGIPDGVLNVLPGYGDVGEALGRHKDVDAVSFTGSTEVGGYFLKYSSESNLKPVALEMGGKSPFIVLEDAKITDDLIDNAMNSAFWNGGQNCSANMRQIVHKKVKDEFLDKVIKKVKKLKVGDPLDLKSNMGSMISKVHLQTVDGYIQKGIDEGARLLSGGVSSKKQKGFYAKPTLFDGLKENMTIAREEIFGPVLGVLTVKNDEEALKIASNSKYGLHASVFTQDINRAFHLAKSLPCGTVSVNTFSEGDIKTPFGGYKQSGSLSRDQGTEALNSFLQTKTIWISHN

SEQ ID NO: 93299 - protein, 330 aa, Unknown
  Bacterial polypetide isolated from the Sargasso Sea
MLKPSELTPSSSDLTKYMIEEFFEESEIAVFTGDPEVGAAFSGLAFDHLIFTGGTAIAKHVMKAASENLVPLTLELGGKSPVVVGKSSKIKETATRVMQGKTMNAGQICLAPDYALVPEDSVDEFVQATVDVTSEMYPDMKDNEDFTSIINQKHYDRIQGYISDAKEKGADVVEINPSNEDFSQQPHHKIPPTIILNPTEDMQVMQEEIFGPVLPVKTYKDVSETVDYINSKDRPLGLYYFGEDSKEKDFVLDNTTSGGVTVNDVISHITMEDLPFGGVGPSGMGSYHGHDGFKEFSHAKSVYKQSWLNLNKLAGLVPPYKKKEDNAKSA

SEQ ID NO: 93300 - protein, 405 aa, Unknown
  Bacterial polypetide isolated from the Sargasso Sea
IGKIETNDSGKLLAETATQTQYVAEYYRYFAGLADKIQGSTLPIDKPDMHVFTSCEPIGVVAAVVPWNAQMFLTATKLAPALAAGCTIILKASEIAPCSLLYFARLIKEAGIPDGVVSIITGDEKNCAIPLTTHPDIDRIAFTGGPKVAKQIVINSSENFAVTTLELGGKSPIVVFEDADIEGAVNGIIAGNYGASGQSCVAGTRVIVHDSIKKVLVEMLSKRAESIVTGDPKNNETHVGPLCTNKQINLIEKTLKKAQSQGAKIVFGGSRLNQKGYYFEPTLIDCPNESIVSLETEMFGPVASLLTFKDEKQAIKMANNTKYGLGSGLFTNNLARAHRVSKKIKAGICWINSYRAISPIAPFGGYNQSGYAREAGMDSINDYIRTKTTWINISNEPMKNPFVMR

SEQ ID NO: 93301 - protein, 485 aa, Unknown
  Bacterial polypetide isolated from the Sargasso Sea
MNSPVVHLMQAGRLDRFFIDGDWVLPDGSDRFAVVSPSTEDTLGEIPLGSARDADRAVQAARRAFERWSATSPQERAALLDRVHALMLERAELFATALAMEMGAPIGYARGAHVPLAAEHIRVARDNLANYAFVRQRGTTAVVREPIGVCALITPWNWPIYQITAKVGPALAAGCTVVLKPSELSPLSALLFAEVIADAGVPAGVFNLVSGSGDTVGAALSSHPEVDMVSITGSTRAGVLVAQAAAPTVKRVAQELGGKSPNIVLPDADLSRAIPPGVAAAFRNMGQSCSAPTRMIVPRNVLGAVEELAAAAARTLVVGDPFAEATTHGPLANRAQFGRVAQMIDAGIDERAKLIAGGPGRPAELARGFYAQPTIFSDVRTDMTIAQQEIFGPVLAILPYDTVDEAVAIANDTVYGLGAHVQGTDKAQARAVAARIRAGQVHLNYPAWDPQAPFGGYKQSGNGREYGIEGMEEYMEIKSIVGFYD

SEQ ID NO: 93302 - protein, 477 aa, Unknown
  Bacterial polypetide isolated from the Sargasso Sea
MIEKKNFYINGSWVAPKNPIDIKVINPATEKDCAVISLGGKEDINDAVLAAKEAFKTWGFSSKEERLSLLENFYALYKKRWNDITDAIVQEMGAPKDFASKLQTGTGASHTKSFIRYLKEFEFEKPLGEHAKNQRLIYEPKGVCALITPWNWPINQVTLKVIPALASGCTMILKPSELAPLSAIIIAELIDEAKFPKGVFNLVNGDGATTGDALTSHPDVNMISFTGSTRAGALISQNAAKDFKRVSLELGGKGANIIFKDADAEAIERGAFRCFRNSGQSCNAPTRMLVERPIYDEAIERLKKYASEFKVDDPSKEGEHIGPVISDVQFNKIQGLIQKGIDEGAKLVAGGPGKPEGLKDGYYVKPTVFADVNNNMEIARTEIFGPVLSVIPFETEEEAIQIANDTDYGLTNYIQTQDTEKVQRVARKLRSGMVDVNGAGIAVDAPFGGFKHSGIGREAGKEGLLEFLEVKSVGGWN

SEQ ID NO: 93303 - protein, 495 aa, Unknown
  Bacterial polypetide isolated from the Sargasso Sea
MSSGNKYKVIASKIKFEGRAFINGKYVNAIDGKKFETINPATGKKLCTVAKCNHKDVDLAVKVSRKAFNSGVWSKSSPEHRKEVLLKFAELLRKHGDENSVLECIDTGKLITDCINEVANDAPMHFQWYGELIDKVFGKVGPTEPSITSLIVKEPIGVVAGIVPWNFPLMMAVWKMAPALAAGCSVIIKPAEDTPLTAIRVAQIGKEAGIPDGVLNVLPGYGDVGEALGRHKDVDAVSFTGSTEVGGYFLKYSSESNLKPVALEMGGKSPFIVLEDAKITDDLIDNAMNSAFWNGGQNCSANMRQIVHKKVKDEFLDKVIKKVKKLKVGDPLDLKSNMGSMISKGHLQTVDGYIQKGIDEGAKLLSGGVSSKSQKGFYAKPTLFDGLKENMTIAQEEIFGPVLGVLTVKNDEEALKIASNSKYGLHASVFTQDINRAFHLAKSLPCGTVSVNTFSEGDIKTPFGGYKQSGSLSRDQGTEALNSFLQTKTIWISHN

SEQ ID NO: 93304 - protein, 477 aa, Unknown
  Bacterial polypetide isolated from the Sargasso Sea
MENKKNFYIDGKWVAPKSKQEIKVINPATEENCAVISLGNKEDIDYAVSSAKKAYSTWAFSPKEERIRLLEKLYENYKKRWADIAAAITTEMGAPKDFATKLQAGTGAAHLKSFIRYLKNFEFEKPLGEHAPNQRLIYEPKGVCALITPWNWPMNQVCLKVAPALASGCTMILKPSELAPLSSIILAELIDETKFPAGVFNLVNGDGETTGNALTSHPDVNMISFTGSTRAGALISQNAAKDFKRVSLELGGKGANIIFKDSDPDAIERGALRCFRNSGQSCNAPTRMLVEKSMYNEAVERLKKYTENFEVGDPKKEGEHIGPVISETQYNKIQTLIKKGIDEGAKLVAGGAGKPEGFEKGYFVKPTVFVDVKNDMEVARTEIFGPVLSVMPFENEEEAIKIANDTPYGLTNYIQTQDKEKVKRVARKLRSGMVDVNGAGIAVDAPFGGFKHSGIGREAGEHGLEEFLEVKAVGGWN

SEQ ID NO: 93305 - protein, 396 aa, Unknown
  Bacterial polypetide isolated from the Sargasso Sea
MEKLDFYIDGSWVTPSGVKTLDVINPASEEKVTKISMGDASHVNEAVQAARKAFETYSQTPVEQRIDLLTTIREIYKRRLDDVADAIQTEMGAPTYLAKGAQAMVGLGHLKAAIRSLTNHNFEYEHGNFIIRHEPIGVCGLITPWNWPVNQVVSKLAPCLAAGCTAILKPSEIAPLSSMVIAEILDEAKVPAGVFNLINGMGPVVGEAMSAHPDIDMMSFTGSTRGGVAVAKASADSVKRVSQELGGKSANIILDDANFEKSIRAGVDSCMSNTGQSCNAPTRMLVPAVRKDDAYSIAKDAAEKVIAGDPTKDSTTIGPLVSNVQYEKVQNLIQKGIDEGAELLIGGTGKPDGLEKGYYAKPTVFGDVQNDMAISKEEIFGPVLSMLTYENIDDAV

SEQ ID NO: 93306 - protein, 448 aa, Unknown
  Bacterial polypetide isolated from the Sargasso Sea
MGLGGVSVASDYPEVSRDELERILNSLKKRFQNGDYPNYKERIDRINRLKLLVEENSEDFHKALQNDFGTRHEQLSLLSDTLPIIASAKHISKNLSKWMKPEKRKPNFPLGLLGAKAFIHNQPYGVVGIISPWNFPLNLSLGPLVEVFAAGNNAMMKLSEFVPETSDLTEKLVKQYFNDDEVVVINGGPQTSQSFAGLAFDHLLFTGSTHIAKKIAYEASENLVPLTLELGGKSPVIVGPKAKMKKSVDKIMMGKLLNAGQICISPDYVFLPEGKENEFVEHAKSYVQESYETLKNNPDYTSIIHLNHYERLRSYISDAKSKGAEIVEINPANEDLTQQEHHKIPPTLILNPTDDMEVMKNEIFGPILPVMSYKNFDETIKYVNHNPKALALYYFGDDANEVDDLLNKTTSGQLVTNDVLFQFSMHDLPFGGVGPSGSGSYHGHDGYR

SEQ ID NO: 93307 - protein, 287 aa, Unknown
  Bacterial polypetide isolated from the Sargasso Sea
MDFKNQAFINGNYINSVTGKTFESISPVDGSIITSVSECDVEDINIAVKAARDVFEKGSWSRMAPSKRKKILFNFADLMKKNILELGLLETLNMGKPITRATGDIAACINCTKWYAEAIDKLYDDVAPTSDNLIATITKEPLGVVGAVTPWNFPLLMACWKFAPALATGNSFILKPAEQSPLSALRVAELAMEAGIPEGVFNVVPGYGPTAGKALGTHMDVDKLGFTGSTEVGRYFLSYAGESNMKRVSLECGGKSPNIIFADAPDLDHAAKMAADGMFGNSGQVCD

SEQ ID NO: 93308 - protein, 495 aa, Unknown
  Bacterial polypetide isolated from the Sargasso Sea
MSSGNKYKAISNKLKFEGRAFINGKYVNAIDGKKFETINPATGQKLCAVAKCNHKDVDLAVKVSRKAFNSGVWSKSSPEHRKEVLLKFAELLRKQGDENSVLECIDTGKLIADCINEVANDAPMHFQWYGELIDKVFGKVGPTEPSITSLIVKEPIGVVAGIVPWNFPLMMAVWKMAPALAAGCSVIIKPAEDTPLTAIRVAQIGKEAGIPDGVLNVLPGYGDVGEALGRHKDVDAVSFTGSTEVGGYFLKYSSESNLKPVALEMGGKSPFIVLEDAKITDDLIDNAMNSAFWNGGQNCSANMRQIVHKKVKDEFLDKVIKKVKKLKVGDPLDLKSNMGSMISKGHLQTVDGYIQKGIDEGAKLLSGGVSSKKQKGFYAKPTLFDGLKENMTIAQEEIFGPVLGVLTVKNDEEALKIASNSKYGLHASVFTQDINRAFHLAKSLPCGTVSVNTFSEGDIKTPFGGYKQSGSLSRDQGTEALNSFLQTKTIWISHN

SEQ ID NO: 93309 - protein, 323 aa, Unknown
  Bacterial polypetide isolated from the Sargasso Sea
NQVCLKVIPALAAGCTMVLKPSELAPLSAIIIAELIDEAGFPKGVFNLVNGDGAITGDALTSHPDVNMISFTGSTRAGALISQNAAKDFKRVSLELGGKGANIIFKDADPEAIERGALRCFRNSGQSCNAPTRMLVEKSMYDEAVQRLKKYADDFKVDDPNKEGEHIGPVISETQFNKIQGLIQKGIDEGAKLVSGGPGKPDGLKDGYYVKPTVFADVNNSMNIARTEIFGPVLSVIPFDTEEQAIEIANDTDYGLTNYIQTQDGEKVQRVARKLRSGMVDVNGAGIAVDAPFGGYKHSGIGREAGKEGLIEFLEVKSVGGWS

SEQ ID NO: 93310 - protein, 196 aa, Unknown
  Bacterial polypetide isolated from the Sargasso Sea
ILSNDDKIISAASCTTNCLAPVVNVLNNNFEIEKGFMTTIHAFTSDQRILDNSHKDPRRARAASQSIVPTSTGASKSIGEIIPSLKGKLEGVAMRVPTPNVSLVDLIFCSKKEIDIKKINDAFETAAKYELNKILEVTHEKLVSIDFNHHSASAIVDASLTNVVGTNMGKISAWYDNEWGFSNRMCDIAENLNKIS

SEQ ID NO: 93311 - protein, 477 aa, Unknown
  Bacterial polypetide isolated from the Sargasso Sea
MEKYNNFINGKWIDSEAKEIIKVEDPATAKVIGEISCAKQSEVDLAVSAAKESFNKRILVDMPLLQRAKLMHRIADETRKVAEEGGKLLCYENGKTLAAAIKEFNDVADMFDYYAGLTDKLEGKTIPVSHNVFDYTVLEPFGVSAHIVPWNYPLSMIGRSLACSFATGNSTVIKTAELTPLSATVFAKALQNAEVPPGLINIICGYGNEAGSYLVSHPDVNHVVFTGSVATGKKILHSCADKAIPAIVELGGKSAGIVYPDADLNDVIDSAKNAIFGVAGQICTAMSRLVVHKSVKDELIEKLVDLSKSLKVGPGYEEGSELTPVISSNQLDKVEGYARSGIQQGAEAVHGGKRADREGYFMEATVLNNVTQDMSVAREEIFGPVLSVLEYQDTEEAIAIANDTEYGLGGGVFTKDLNKASWTASKLQAGQVYVNKWFTGSHATPFGGYKQSGYSREKGVDGLKSYLQVKNVGISLS

SEQ ID NO: 93312 - protein, 228 aa, Unknown
  Bacterial polypetide isolated from the Sargasso Sea
GGKSPVIVFDDADLEKTIPGVARACFFLQGQNCMAGTRVFVHEDIHDELVNGVKAMAESFQIGHGLIQTNDFGPLISEEQRKRVMKYIKQGISEGATLICGGNEVNDEGFFIQPTIFTDVTGEMTIAREEIFGPVLCIEKFGNESLQEIANRANETTYGLSGSVWTKDISTGHKMAALIDSGQVSINCHAAVDSAIPFGGNKQSGWGREFGEEGLDSYLKTKATTVMY

SEQ ID NO: 93313 - protein, 497 aa, Unknown
  Bacterial polypetide isolated from the Sargasso Sea
MNLIQHFVNGKIISGKSERRGKVFNPAIGEQESEVILGLKSDLDEAVEIAKKAFETWSLKPPIQRARIMFKFKELIEKNSDELTKMIVSEHGKVYEDAKGSLIRGLEVVEFTCGIPQVLKGEFTENVGTDIDSWSIRQPLGVCAGITPFNFPAMVPMWMFPMAIACGNTFVLKPSEKDPSISIKLAQLFKEAGLPDGVFNVINGDKEVVDAILTNKDIKAVSFVGSTPIAKYIYENAAKNEKRVQALGGAKNHCVVMPDCDLDQAVNGLMGAAYGSAGERCMAQSVAVAVGNIGDNLVNELSKKVEALKVGPGMDKKSEMGPLVTKEHLEKVKGYVDLGVKEGAKLVVDGRNLKLQGYENGYYIGGCLFDHVKKDMRIYKEEIFGPVLSVVRVKDFDEATQLINDHEFGNGTSIYTRDGDVGRTFASNIKIGMVGINIPIPVPVAFHSFGGWKRSLFGDQHMHGVEGVRFYTKLKTINFRWPSGLRSDPEFVMPTMK

SEQ ID NO: 93314 - protein, 335 aa, Unknown
  Bacterial polypetide isolated from the Sargasso Sea
MKIKVGINGMGRIGRMIVRSIIENKITNIEIKHINNRTNSESCSSLLKHDSIHGKFKAEISFDEKHLIINKNKITFSQETDLNNIKWKKYDVDYVFECTGKFNSKDKLLPHLQNGVKKVIVSAPCKNADKTIVYGVNESELKKEDNIISAASCTTNCLAPVAHVLNENFEIEKGFMTTIHAFTSDQRILDNSHKDPRRARSASQSIVPTSTGASKAIGEIIPSLKGKLEGVAMRVPTPNVSLVELVFCTKKDLSIEKINSAFQNFSKKSNNKILEVTYEKLVSIDFNHHPASSIVDASLTNVVGKNMGKISAWYDNEWGFSNRMCDIAEYLQKIS

SEQ ID NO: 93315 - protein, 478 aa, Unknown
  Bacterial polypetide isolated from the Sargasso Sea
MSDETIQEMHRVLEMQKALNISEGAPDIKLRKDRLDRVIAMVNKYQDQIVQSVNDDFGNRDPVMSAVTEVASVIGPMEHAKKNLKNWMKTEKRKAAIAPLGSALSLLGAKAEVKYQPKGVVGAISPWNFPVNLALAPLAGIIAAGNRVMHKPSELTPATSDALKTMIEEYFDEGEMAVFVGGPEVGAAFSGLPFDHLMYTGSTAVAKHVMKAASENLVPLTLELGGKSPVVVGKSAKMQDVAQRVMQGKTMNAGQICLAPDYALVPEEKVDDFVKASVEVTSEMYPEMKDNDDFTSIVNQKHYDRIQGLLEDAKEKGADVVEINPSNEDFSQQPHHKIPPTILLNPSEDMKIMQEEIFGPVLPVKTYKDVSEPVEYINSKDRPLGLYYFGEDNTEKDYVLDNTTSGGVTVNDVISHIQMEDLPFGGVGPSGMGSYHGYDGFKEFSHAKAVYKQTKFNLMKLAGLVPPYKKKEEKTNTA

SEQ ID NO: 93316 - protein, 501 aa, Unknown
  Bacterial polypetide isolated from the Sargasso Sea
MSNKDKLKISEEAKNFLESEHLLFIDGEWKQSSSGEKIPVFDPATEEKIAEVQSGTTKDIDLAVNAAREALSGEWAKIPSHDRAQILHRLSDEIEANFSVLSELEVLDNGMPLELAQYSIASHGVTLLRYYASWAPKIHGKTIPVSPGGAMNGESLTYTKREPIGVVGAIIPWNSPLIFAILKLAPALAAGCTVVLKPAELTPLTALYFGHLIEKSGIPKGVVNIVTGLGETAGDALAKHNDVDKITFTGSTEVGKKIVSSSISNLKKVTLELGGKSPVIVFDDADLEKTIPGVARACFFLQGQNCMAGTRVFVHEDIHDELVAGVKSMAESFQIGHGLIQTNDFGPLISGDQRKRVMKYIKQGLSEGATLVCGGNEVNDRGYFIEPTIFTDVTGEMSIAKEEIFGPVLCIEKFSNESLEEIAKRANKTTYGLSGSVWTNDISTGHKMAALIDSGQVSINCHAAVDSAIPFGGNKQSGWGREFGEEGLDSYLKTKATTVMY

SEQ ID NO: 93317 - protein, 472 aa, Unknown
  Bacterial polypetide isolated from the Sargasso Sea
MATDPATISPLTELLQRQRASYLAAPNPDYAIRKERLMRLKAALLSYQQPLVEALSQDYGHRSVDDSLISDIMPVVNNINYSLKNLKKWLKPSRRHAGILLAPAQVKVHYQPLGVIGIIVPWNFPVMLSIGPLVTAIAAGNHAMLKLSEFTPATNSVIKQLLAEVFDESHVAVVEGEADVAAQFSALPFDHLLFTGSTTVGRHVMRAAANNLTPVTLELGGKSPVIIAPDIPLEIAVERMIYGKCLNAGQICVAPDYVLCPNAKVSDFIQAYQAKFQAMYGAIAQNKDYGSIINARQFDRLLAVLEDAKTKGAKIISASNEAIDSQNRKLATQLITNTTEDMLLMQEEIFGPLLPVIGYDSLDEAISYVNRRARPLALYVMSFDEASQQKILKQTHSGGVCINETVFHVAADDAPFGGIGPSGMGHYHGKEGFLTFSHAKTVLSRGSFNTGKFVHPPYGTFIQRMLMKLFLR

SEQ ID NO: 93318 - protein, 425 aa, Unknown
  Bacterial polypetide isolated from the Sargasso Sea
KVWRNTTPWQRANIIRKIADLMREKSDVLAKWLTLEVGKPLAEGVGEVGGSADIFEWNAEETKRIYGQTVESRFPDTRVHVYYQPVGVVAALVPWNFPLVLASRKISTALAAGCSVICKPDVITPGCVMELVDICREAGVPPGVVNLLSGDPPAIAEQLIKSDIVKKISVTGSTRVGKLILKQAAEKVQRVTMELSGHSPFIVFDDADINKATDMAIISKFRNNGQVCISPNRFYIQEKKKEEFINTFISKAKKLKIGNGMDKDVQLGPLTTKKRLEEVEKLVETTKKEGAKVLMGGKRPPEFNKGFYYEPTVFDGVEDNFTIMKEEPFGPLVPMLSFKSFDEIIERSNNNDLGLCSYICTNSMEQAHRASELMETGVVAVNTPVVAIAEAPFGGIKQTGYGREGGSNAIKDYLNVKYTHLGIKG

SEQ ID NO: 93319 - protein, 404 aa, Unknown
  Bacterial polypetide isolated from the Sargasso Sea
MQTIDTTFKAQQAKSISLRNSTAKERRGKLKLLLKNFLEMESDVLAALSSDLGKSKTEALLAEIYGVKAEADFAIKNLGKWMKTKRVASPLAISFTKSWVKPEPKGSILIISPWNYPIMLCLNPLIAAIASGNTAVIKPSELTPASGELVKKLVEKTFSSDEVAVFLGEKDLAQKLLELPFNHIMFTGSPMVGKLVMEAASKHLAGLTLELGGKSPVIIDKHANVKDAAWKISFYKFANAGQTCTAPDYILCDELVHDDLVLALQKNISQFFAGGLDAAKKDYCSIANEHHFNRLEGALADALSDGAELACGGEVSQEELHFTPAVLTDVNYDNSIMKEEIFGPILPIIKVQSLDESINYVNENEKPLALYLFSNKSAVHNEVLKSTSSGGMVINDCVLHHMNP

SEQ ID NO: 93320 - protein, 335 aa, Unknown
  Bacterial polypetide isolated from the Sargasso Sea
MTIKVGINGMGRIGRMIVRSIYENYKGKIIIKHINNRSSSEICTNLLKYDSIHGNFSSQVKSGGNYIKINKEKISYTQHSMINDIKWKQYGVDYVFECTGKFNSKDQLLPHIKNGVKKVIVSAPCKMADKTIVFGVNHKKINKNDRIISAASCTTNCLAPVADVINKNFIILNGFMTTIHAFTSDQRILDNSHKDPRRARSASQSIVPTSTGASKAIGEIIPSLKGKLEGIAMRVPTPNVSLIEFIFNVKKNITSKKLNNSLFSASKTKLKNILNVTDEKLVSVDFNHNSASAIIDSSLTNVVGNKMGKISAWYDNEWGFSNRMCDIAEYVSKIK

SEQ ID NO: 93321 - protein, 497 aa, Unknown
  Bacterial polypetide isolated from the Sargasso Sea
MHSRTNQAIDPSALRAQLRDGSLLETRAWLASGWEEGADGRSFPVTNPATGDILARVASLGAADVEQAIASSALAQQGWQKRTSHERAKLLRAWYDLIVANTDDLALIMTSEQGKPLAEARGEIMYAASFVEWFAEEAKRVYGDVIPHPQGDKRILVIRQPIGVCAAITPWNFPAAMITRKVAPALAAGCSIIVRPADLTPLTALALAVLAERAGIPAGVLQVVCGPSREIGAVLTASPVVRKLSFTGSTEVGRVLMSQSSGTIKRLSLELGGNAPFIVFDDADLDAAIEGAMASKYRNSGQTCVCANRFLVQAGIHDRFVDTLARRVQALKVGNGIEAGVQQGPLIQKSACDHLNQLIDDAVSKGARIVTGGKGHPLGGTFFEPTVIADATPAMRLAREELFGPVGPVFRFEDEAEAIAMANDTEYGLAAYLYTRDHGRIWRVGEALEYGMVGLNTGVISNEVAPFGGVKQSGLGREGSRYGIEEYLEIKYMCSQV

SEQ ID NO: 93322 - protein, 468 aa, Unknown
  Bacterial polypetide isolated from the Sargasso Sea
MQAILEKQKAFFIKNGPPSYDLRIDRLNRMKTLIMDNRYKIVDALNEDFGVRSKNQSMATDVYTIIPSIEYAKKNLKKWMAGSKRKANFPLGLLGAKASVDYEPLGTVGMISPWNFPMFLTFSPAASIFAAGNQIMHKPSEYTEQSASLMKELCDSAFDEEEFATILGGPDVGATFTQQKFDHLLYTGSGAVAKHIMKAASENLVPVTLELGGKSPVIVSNSADSAIAAKRIMLGKTMNAGQICLAPDYVMVHSDKKDELVSGMKEAVADFYPDLKHNDDYTSIVNQKHFDRLQGLLSDAKEKGAEIDEINPANEDFSQQEAFKIPPTLVMNPTDDMEIMKEEIFGPLLPIKEFTEIDETISYVNNNDKPLGLYYFGANKGEEDQVLTRTSSGGVTVNDVLGHIQQEDLPFGGVGPSGIGSYHGEEGFKTFSNAKAVYKQIGSRFDKLLSAIRPPYKGDIEKVLKQIT

SEQ ID NO: 93323 - protein, 498 aa, Unknown
  Bacterial polypetide isolated from the Sargasso Sea
MTNYSFEEWKKIASKISFRNKAFINGKFVDAKSGKTFDSINPATDEVLTSVAECGQEDVDFAVKIARKSFQKGSWSKMPPAERKAVLLKLADLIRENLEEFALLDSLDMGKLITDAVTIDAPGSAAFFQWHAEAIDKMYDEIAPTGPGDLAMVTREPLGVVGAVVPWNFPLDMATWKASAALAAGNSLVLKPAEQSPLSALRLAELAIEAGVPEGVFNVVPGFGETAGKALGLHQDVDCIAFTGSTAVGKLFQQYAGQSNMKQVWLETGGKSPNLIFADCNDLESAINMAAFGIFFNQGEVCSANSRLLVERSVQNEFVERLSTIAKDTQPGHPLNPDSKMGAIVNEEQTKRIVSYIEKGKQKADLLIGGEQIKVDGKGCYVQPTIFNNVNANDVIAKEEIFGPVLSVIPFDTEEEALSIANDSEYGLAASVWTDDLSRALRVSDHLHAGTVSVNTVDALNTVTPFGGVKQSGYGKDLSLHSFNKYTSLKTRWIKYKA

SEQ ID NO: 93324 - protein, 308 aa, Unknown
  Bacterial polypetide isolated from the Sargasso Sea
VCKPANATPLSALAICELAARAGIPDGVINIVAGRTSEIGEALTTSPLVRKLTFTGSTPIGKKLMADCSKTMKRTSMELGGNAPFIVFDDADLDAAVTGAMICKFRNAGQTCVCANRFLVQEKIYDEFLEKLRKATESLVIGNGMNEEVGLGPLINQKAANDVIGFIDDAVDKGANVLTGGQRNTIGDCFINPTILTNVDKSMRVYKEEIFGPVAPILKFKTEEDAINLANDTEFGLACYFYSRDVGRIWRVGEALEYGIVGINEGIISNEMAPFGGVKESGQGREGSKYGLDDYLEIKYMCVGGIDK

SEQ ID NO: 93325 - protein, 497 aa, Unknown
  Bacterial polypetide isolated from the Sargasso Sea
MKLIEHFVDGKIISGSSDRKGKVTNPATGEQESEVRLASKSDLDQAVEVAKKAFETWSQKPALQRARIIFKFKELIEKNSDELTKLIVSEHGKVYEDARGSLIRGLEVVEFACGIPQMLKGEFSENVGTSVDSWSMRQPLGVVAGITPFNFPAMVPMWMFPIAIACGNTFILKPSEKDPSCPLRLAELLKDAGLPDGVFNVINGDKEVVDAILTNQNIKAVSFVGSTPIAKYIYENAAKNEKRVQALGGAKNHLVVMPDCDLDGAVNGLMGAAYGSAGERCMAQSVAVAVGDIGDELVARLSKKAEALKVGPGMDKNSEMGPLVTKEHLEKVKGYVDLGVKEGAKLVVDGRVLKLQGYENGFYIGGCLFDHVNKDMRIYKEEIFGPVLSVVRVKTFEEAVELINEHEYGNGVSIYTRDGDAGRTFANKIQVGMVGINVPIPVPMAFHSFGGWKRSLFGDSGMHGTEGIKFYTKLKTVTSRWPSGIRSNVEFVMPTMK

SEQ ID NO: 93326 - protein, 501 aa, Unknown
  Bacterial polypetide isolated from the Sargasso Sea
MSNKQEFTISEETRSFLGSEHLLFINGDWVKSSSGDLIPVIDPATEKKIADVQSGGSDDIDSAVKAARDALSGEWSKIPSHDRAQILHRLSDEIEANFSVLSELEVLDNGMPMELAQYSIASHGVTLLRYYASWAPKIHGKTIPVSPGGAMNGDSLTYTKREPIGVVGAIVPWNSPLIFAILKLAPALAAGCTLVLKPAELTPLTTLYLGHLIEKSGIPKGVVNIVTGFGETAGDALSKHKDVDKITFTGSTEVGKKIVASSVGNLKKVTLELGGKSPVIVFDDADLEKTIPGVARACFFLQGQNCMAGTRVFVHEDIHDELVNGVKAMAESFQIGHGLIQTNDFGPLISEEQRKRVMKYIKQGISEGATLICGGNEVNDEGFFIQPTIFTDVTGEMTIAREEIFGPVLCIEKFGNESLEEIANRANETTYGLSGSVWTKDISTGHKMAALIDSGQVSINCHAAVDSAIPFGGNKQSGWGREFGEEGLDSYLKTKATTVMY

SEQ ID NO: 93327 - protein, 466 aa, Unknown
  Bacterial polypetide isolated from the Sargasso Sea
MLSKLNKLKQPFLKNFNPDLNVRIDRIKRIQTLVEENIDAFHDALRSDFGTRHEQLSLMADTMPVINNAKDALKNIKRWVKPDKRKPNFPLGLLGAKAYVQFQPYGVVGVISPWNFPLTLSIAPLIEIFAAGNNAMMKLSEFVPATSELTEELINKFFSDEEVVIVNGGPQTSQDFAGLPFDHLLFTGSTNVAKKVASEAASNLVPLTLELGGKSPVIVGPNAKMKKSVDKIMMGKLLNGGQICISPDYVMVPEGQTDEFVDHAKSHVSENYPTIKNNPDYTSIIHLNHYERLRELVKDAESKGATIVEINPANEDLSQQEHHKILPTLVLNPTDDMKIMQEEIFGPLLPVKTYKSFNETIEFINKNPKALAIYYFGDDKKEIDTVLNNTSSGQAVINDVLFQFSMHDLPFGGVGPSGMGSYHGYDGFKNFSHKRSVLKGQNILDAGKMITAPFTESTEKNIKRLS

SEQ ID NO: 93328 - protein, 484 aa, Unknown
  Bacterial polypetide isolated from the Sargasso Sea
MLKDSALVHHSSYIAGQFQSGRSGHFAVHNPADGSLLALVAEAGSTEAEQAITAAATAFPGWSGLTAAERAAKLMRWSQLMLEHQQDLARILTLEQGKPLDEAAGEIAYGASYVSWFAEEAKRMNGDIIPAAKANQQILVLKQAIGVVAAITPWNFPNAMILRKAAAALAAGCTFVVKPSELTPLSALALAELATRSGIPAGVFNVVTGTDAKAIGQVLTKDSRVAKFSFTGSTPVGKTLLAQCASTVKKVSMELGGNAPFIVFDDADLPAAVQGLLAAKFRNAGQTCVCVNRVFVQRPVYDAFLAQLIKATAPLKLASGLEAGCQIGPLINQAAVDKITRLLDQALDQGAELLLGGAIDADLGPLFFQPTIVTDVTADMQISQTEIFGPVLCISLFDTEQEAIELSNNTPTGLASYFYSRDIGRIFRVAKALDYGMVGINEGLISNAAAPFGGVKESGLGREGSSYGLDDFTELKYLCLGGLG

SEQ ID NO: 93329 - protein, 465 aa, Unknown
  Bacterial polypetide isolated from the Sargasso Sea
MQPIEAIFKTQQAKSLDLRNSSAKDRKLKLQLLLKNFLEMEEEVLSALSSDLGKSKTEALLAEIYGVKSEAKFAIKNIHRWMKTKRVASPLTISFSKSWVKPEPKGNILIISPWNYPIMLCLNPLIAAISSGNTAIIKPSELTPASGEFMKKLIEKTFSSDEVAVFLGEKDVAEKLLDLPFNHIMFTGSPRVGKLVMKAASKHLAGVTLELGGKSPVIVDKSTNINDAAWKISFFKFANAGQTCTAPDYILCDEAVHNDLVAALQKNMSQFFPEGVDAATKDYCSIANEHHFNRLKDALEGAVSGGAEIVCGGETSKSGLYFSPAILTGVGYNNPIMEEEIFGPILPIVKVKNLDESIRYVNSNEKPLALYLFSNKSSVHKKVLKNTSSGGMVINDCVLHHMNPNLPFGGINNSGVGSYHGKFGFDAFSHQKAVLKSSSLSPFKIMLPPYNNTKEALANLIKKYF

SEQ ID NO: 93330 - protein, 491 aa, Unknown
  Bacterial polypetide isolated from the Sargasso Sea
MADLLIRQRNAFLHDGPPDLALRKARLARLRAAVLAHREAIKDAVSADFGNRSRHETDIMELSCVIQAIDYLSSHLRRFMKRERRHEHFFYRAARAYVEYQPLGIVGVMAPWNYPVSLTLVPLATALAAGNRAMLKPSELTPRTSEALRHMLAGAFAEDEVAVVLGGPEVGATFSALPFDHLLFTGSTQVGRKVMRAASDNLVPVTLELGGKSPAIVARGHVNDRTVQSLVYGKLSNAGQTCVAPDFAFVHKEDLEAFIAQYTATVHRFYPDGPASRDYTTIVSDRHYDRLRGLVDDARRNGARVVEVGERPAHMPGRERTLVPTLVVNAGDETPLMQEEIFGPILPVRTYGTIDEAITYVNARPRPLALYYFGAEDRDCARLLAHTTSGNVGINNTLIHVAQDDLPFGGVGPSGMGAYHGIEGFRAMSHAKGVFVQGRWNFPGLLHAPFGRLADMAISLTLGKAAGQPRSKPPRPRAGHDGSPVSPRSHF

SEQ ID NO: 93331 - protein, 454 aa, Unknown
  Bacterial polypetide isolated from the Sargasso Sea
FDVLNPANEEVIGSIAMGSAADVDKAVEAASNAFDSFSQTSVEERLAILGKIVEVYQSRYDEIAETISMEMGAPLSLSKAAQAATGLGHFAQAIEILQGFEWEETKGKTLLRKEPIGVVGMITPWNWPINQISCKVAPAIAAGCTMVLKPTEIAPLNAMLFTEVIHEAGVPAGVFNLVNGDGPTVGEAMSCHPGIDMMSFTGSTRAGIAVAKGSADTVKRVAQELGGKSANIILDDADFESAITGGARHCFNNSGQSCNAPTRMLVPESRHDEAKEIAKQAAETTKVGDPFAEDTGIGPVVSEVQFNKIQGLIEKGIEEGAELVSGGPGKPEGLNAGYYVRPTVFANVNNDMTIAREEIFGPVLSILPYKDEEEAVNIANDTEYGLYGYVSSGDVEHAKKVANRIRAGSIAINGAQADFTAPFGGYKQSGNGKEWGPFGFEEFLETKAVVGYSD

SEQ ID NO: 93332 - protein, 350 aa, Unknown
  Bacterial polypetide isolated from the Sargasso Sea
GEHAKNQRIIYEPKGVCALITPWNWPMNQTCLKVMPAIASGCTMVLKPSEVAPLSAMILAELIHEAKFPKGVFNLVNGDGAHTGDALTSHPDINMISFTGSTRAGALISQNAAKDFKRVSLELGGKGANIIFEDADPKAIERGALRCFRNSGQSCNAPTRMLVEKSMYSQAVERVKQFANEMKVGDPNKEGEHIGPVVSEVQYKKIQSLIQKGIDEGATLVAGGTGKPDGIEKGYFVKPTAFADVNNNMEIARTEIFGPVLSIIPFENEEEAIEIANDTDYGLTNYIQTQDKEKANRVARKLRSGMVDVNGAGIAVDAPFGGFKHSGIGREAGKEGLLEFLEVKSVGGWN

SEQ ID NO: 93333 - protein, 361 aa, Unknown
  Bacterial polypetide isolated from the Sargasso Sea
RECMAADLPLVIDHWRYFAGVIRAEEGSVAEISNSEYSYHIPEPLGVVGQIIPWNFPLLMATWKLAPALAAGNCVVLKPAEQTPASIMLLMELIGDLLPAGVVNVVSGYGLEAGKPLASSKRIKKIAFTGETTTGRLIMQYASQNLIPITLELGGKSPNIFFEDVMAKDDDFFDKCLEGFAMFTLNQGEVCTCPSRALIQKSIYDKFMEKAIARTKAVKQDNPLKMETMIGAQASLEQMEKIKSYLDLGKKEGAKVLCGGSEAKINSGLEKGNYIQPTIFEGKNNMRIFQEEIFGPVVSVTTFKDEKEALEIANDTLYGLGAGVWTRDGNIAYRMGRGIQAGRVWTNCYHAYPAHAAFGGY

SEQ ID NO: 93334 - protein, 488 aa, Unknown
  Bacterial polypetide isolated from the Sargasso Sea
MQTQLFIDGRFVDAVDGGTIDVLNPHDGSLITKIAAANAADVDLAVEAATRAFPKWSAMAAAERGRLLLRLADAIESNAEELAQLESLDTGHPIRDSRGLDVPRTAACFRYFGGMADKLQGSVIPVETGFLNYVQRAPIGVVGQIVPWNFPLMFTSWKMGPALAAGNTVVLKPSEITPLSTLRIVELMAEVGFPAGVVNIVPGYGHTAGQRLAEHPGVGKIAFTGSTATGRRIVEASQRNLKRIQLELGGKGANIVFDDADLDAAINGAAWAIFHNQGQACIAGSRLILHERIADAFLERFVALAASIRIGNPLDPDTEMGPLTSLQHLERVLAFADIAREQGGRVLTGASAPQDAALANGYYVRPTVIEAKTANDRIAQEEVFGPFVTVLRFSSDEEALSIANGTEYGLGSGLWTRDLSRAHKTASQIRAGMCWINCYKRVNPGSPFGGVGQSGYGREMGFEAMHDYTEARSVWVNVDGNVPPHFRR

SEQ ID NO: 93335 - protein, 506 aa, Unknown
  Bacterial polypetide isolated from the Sargasso Sea
MDARSAKALSKDDWAKMAGDADSIFEGRCFINGEYVDAADGGKIEVINPATNEACGTCAAGNEKDIDKAVAAAKESFKAKTWRKMAPRKRMGIMMKFADLLQANTAELALMDSMNMGKPISDCLNVDVPASAVNIRFMAECIDKMYGKVANTHEKALNLSVREPYGVVGLISPWNYPLLMGVWKIAPALAAGNSIVLKPDEHSPHSCIKMAELFVEAGGPPGVFNVVTGHGEEAGQSLALHQDVSKIGFTGSTEVGKLLLQYAGQSNMKKVSLETGGKSPMIYFADLPDMELAVSTAYDSIYANMGEVCNAGSRIYVERAIYADFVDQFIAEGQGAYTPGDPLDPETNMGPLMSAQAQKRVLGFIESGKNEGAKLKFGGNIPTGLESGCFVEPTMFADVNNDMTIGREEIFGPVASIIPFDSEEEAIEMANDTIYGLCASVWTSNVSRAHNMAKAIESGMVYVNCYDVGDMTFEFGGYKQSGNTKDSCFESVLGYTQSKSIWYNLG

SEQ ID NO: 93336 - protein, 238 aa, Unknown
  Bacterial polypetide isolated from the Sargasso Sea
AKDFKRVSLELGGKGANIIFEDADAEAIERGAFRCFRNSGQSCNAPTRMLVEKSIYNEAIERLRKYANEFKVDDPNKNGEHIGPVISETQFNKIQGLIQKGIDEGAKLVAGGVGKPNGLNDGYYVKPTVFADVKNEMEIARTEIFGPVLSVIPFETEEEAIKIANDTDYGLTNYIQTQDKEKVQRVARKLRSGMVDVNGAGIAVDAPFGGFKHSGIGREAGKEGLLEFLEVKSVGGWN

SEQ ID NO: 93337 - protein, 569 aa, Unknown
  Bacterial polypetide isolated from the Sargasso Sea
MPERCRAAPSSRCSLPAHFPLPTRRAMRRAGTGIPYPDRAATIADSGQGARFHRHTVNATSKPDGGRGSCHRPHPFGPTIRPWETRNTMMKIQNLIDGRHCDAAAGRTFEKLAPATGDYVAAVPASTAEDVDRAVRAAHAALHGDAWARAGGPARARWLLRLADLVERDRDALAECLAVEQGRPLAEMRMMDLPMCIDTLRYFAGWADKLEGRTIPTDGFMGRPTLSYTRRAPVGVAGQIIPWNAPLMIAVWKLAPALAAGCPVVIKPSEDAPLAVARLGELVCEAGLPAGVVNIVHGVGAEVGAALVAHPLVNKISFTGSTEVGRAIAGVAAKTFKRVTLELGGKAAQIVFADTDLDRAIPSLMAGMFANQGQTCAAGSRVLAHRSIAHALEERLADAARAMRVGPPSEPGVQMGALINPRHLARVRALVDGALAEGAVMLAGDEQVPPRGCFMRPTILGGVHPGMRIARDEVFGPVGMVMPFETEDDAVRVANDTPFGLSASVWTQDVGTAHRVAERLDIGAVAINAWSPIDARLPWGGTKQSGIGRDLSKAALDSYLEEKIITAAL

SEQ ID NO: 93338 - protein, 479 aa, Unknown
  Bacterial polypetide isolated from the Sargasso Sea
MENKKNFYIDGKWVTAISKEEIKVINPATEEECAVISLGNKEDVDLAVNAAKKAYSSWAFSPKEERIRLLEKLYENYKKRWADIANAITVEMGAPKDFATKLQAGTGAAHLKSFIRYLKNFQFEKPLGEHAPNQRLIYEPKGVCALITPWNWPMNQVCLKVMPAIASGCTMVLKPSELAPLSSMILAELIDDTKFPAGVFNLVNGDGATTGDALTSHPDINMISFTGSTRAGALISQNAAKDFKRVSLELGGKGANIIFKDADPEAIERGALRCFRNSGQSCNAPTRMLVEKSMYSDAIERLKKYTENFEVGDPKKEGEHIGPVISETQYNKIQTLIKKGIDEGAKLVAGGPGKPPGLDKGYFVKPTVFADVNNNMEVARTEIFGPVLSVIPFETEEEAIEIANDTPYGLTNYIQTKDSEKVKRVARKLRSGMVDVNGAGIAVDAPFGGFKHSGIGREAGEHGLEEFFGGKICGWLELI

SEQ ID NO: 93339 - protein, 450 aa, Unknown
  Bacterial polypetide isolated from the Sargasso Sea
MSLRNSTAKERKDKLKLLLKNFLEMEDDVLAALSSDLGKSKTEALLAEIYGVKAEADFAIKNLGRWMKTKRVASPLAISFTKSWVKPEPKGSVLIISPWNYPIMLCLNPLIAAIASGNTAVIKPSELTPASGELVKKLVERTFSSDEVAVFLGEKDLAQKLLELPFNHIMFTGSPRVGKLVMEAASKHLAGLTLELGGKSPVIIDKHANVKDAAWKISFYKFANAGQTCTAPDYILCDESVHDDLVLALQKNISQFFVDGVDAAKKDYCSIANEHHFNRLKDALANALSDGAALACGGETSQEGLHLTPAVLTDVNYNNSIMKEEIFGPILPIIKVQSLDESINYVNENEKPLALYLFSNKPAVHREVLKSTSSGGMVINDCVLHHMNPNLPFGGINNSGVGSYHGKFGFDAFSHQKAVLKSSSVSPFKIMLPPYTKTKETLANLIKKYF

SEQ ID NO: 93340 - protein, 455 aa, Unknown
  Bacterial polypetide isolated from the Sargasso Sea
KFMSSGNKYKLIASKLKFEGRAFINGKYVNAIDGKKFETINPATGKKLCVVAKCNHKDVDLAVKVSRKAFNSGIWSRSSPEHRKEVLLKFAELLRKHGDENSVLECIDTGKLITDCINEVANDAPMHFQWYGELIDKVFGKIGPTEPSITSLIVKEPIGVVAGIVPWNFPLMMAVWKMAPALAAGCSVIIKPAEDTPLTAIRVAQIGKEAGIPDGVLNVLPGYGDVGEALGRHKDVDAVSFTGSTEVGGYFLKYSSESNLKPVALEMGGKSPFIVLEDAKINDDLIDNAINSAFWNGGQNCSANMRQIVHKKVKDEFLDKVIKKVKKLKVGDPLDLKSNMGSMISKGHLQTVDGYIQKGIDEGAKLLSGGVSNNKQKGFYAKPTLFDGLKENMTIAQEEIFGPVLGVLTVKNDEEALKVASNSKYGLHASIFTQDINRAFHLAKSLPCGTVSVNT

SEQ ID NO: 93341 - protein, 477 aa, Unknown
  Bacterial polypetide isolated from the Sargasso Sea
MLDRKNFYIDGKWVSPAEPKNFKVIDPSNEEICAEISIGGKKDVDKAVSAAKKAFETWAFSKKEERLDLLEKLYVVYKKRWAEMAKLISLEMGAPMKFSTEMQAATGASHIKSFKNILKDFKFEKDLGEEKNNQKLLYEPKGVCALITPWNWPINQVNLKVIPALASACTVVLKPSEIAPLSSMLLAEMIDEVKFPSGVFNLVNGDGATTGDALTSHPDVNMISFTGSTRAGALISQNAAKDFKRISLELGGKGANIIFKDADSEAVSRGVLRCFRNSGQSCNAPTRMLVEKSIYDETVKKVKELANNTKVDAPQKEGDHIGPVVSEVQYNKIQDLIQKGIDEGAKLIAGGTGKPKGFEKGYYVKPTVFADVNNQMEIARTEIFGPVLSIIPFENEEEAISIANDTPYGLTNYIQTQDKEKVKRVARKLRSGMVDVNGVGIAVASPFGGYKHSGIGREAGTEGLIEFLEVKTVGGWN

SEQ ID NO: 93342 - protein, 270 aa, Unknown
  Bacterial polypetide isolated from the Sargasso Sea
MIEKKDFYINGKWVSPAKPNDFEVINPSTEEPFAIISLGSTEDADKAINAAKIAFETWRETTKEERLALLEKFDEIYNRRWDEMVEAQSKEMGAPLDFASETHTKMGADICRNNIEILKDFNFEHQFDPKSNNHIRYEPIGVCGLITPWNFPMNQIVLKVIPALAAGCTMILKPSEIAPVSAVLFAEMIDEAGFPAGVFNLVNGNGEVVGNHISGHPDIDMVSFTGSTRAGKLIQKNAADTIKKVTLELGGKGGNIVFADSYPNAVRDGV

SEQ ID NO: 93343 - protein, 487 aa, Unknown
  Bacterial polypetide isolated from the Sargasso Sea
MSASQPALSLIKSLAYIDGRWCEAGGGRRFEVHNPATGQVITQVPDMDEGDTRRAIAAAHAAQPGWAALTAKERSNRLYAWFELIMANQEELARIMTCEQGKPLAEAKGEVAYGASFIQWFAEEGKRAYGRTIPGFSSDRRLATIKQPVGVVAAITPWNFPIAMITRKAGPALAAGCTIVIKPAAETPLCALALAALAEQAGIPAGVINIVTSHQAAAVGNELCNNKTVRKLSFTGSTRIGKLLMRQCADTMKKLSLELGGNAPFIVFDDADLDAAIAGALASKYRNAGQTCVCANRILVQAGIYDAFAEKLTAAVKAFKVGDGMSEGTQIGPLINPAAASKVAELVKQATTAGAELLLGGEAHPAGQLFYQPTILGKVDKTNPILQEEIFGPVAPLVRFETEDEAIALANDTPYGLAAYFYGRDIARVWRVAEQLEYGMVGINEGIISTELAPFGGIKESGLGREGAAEGLEEYLETKYLCFGGIR

SEQ ID NO: 93344 - protein, 338 aa, Unknown
  Bacterial polypetide isolated from the Sargasso Sea
QLGVVTSITPWNFPNAIITRKLGPALAAGCSFVAKPAEDTPLSALAIAVIAERAGIPKGVLSIITSNKSQIIGEEFCSNSKVRKLTFTGSTEVGKILLKQGSSQVLKMSMELGGNAPFIVFDDADLDAAVEGAILSKYRNNGQTCVCANRLYVQEKVYDEFAQKLSNAVSKFEVGDGFNENVTLGPLITEDAVLKVENHINDALSKGAKLITGGSRHKLGGNFFEPTLLTEVTKNMVVSSNETFGPVAPLFRFKDEDDVINQANDTIFGLAAYFYSKDLSRVWKVSEALEYGMVGVNAGVISTELAPFGGVKQSGLGREGSKHGIEEFLEMKYICMSV

SEQ ID NO: 93345 - protein, 336 aa, Unknown
  Bacterial polypetide isolated from the Sargasso Sea
AGIVPWNFPLMMAVWKMAPALAAGCSVIIKPAEDTPLTAIRVAQIGKEAGIPDGVLNVLPGYGDVGEALGRHKDVDAVSFTGSTEVGGYFLKYSSESNLKPVALEMGGKSPFIVLEDAKITDDLIDNAMNSAFWNGGQNCSANMRQIVHKKVKDEFLDKIIKKVKKLKVGDPLDTKSNMGSMISKGHLQTVDGYIQTGINEGAKLLSGGVSSKNQKGFYAKPTLFDGLKENMTIAQEEIFGPVLGVLTVKNDEEALKVASNSKYGLHASVFTQDINRAFHLAKSLPCGTVSVNTFSEGDIKTPFGGYKQSGSLSRDQGTEALNSFLQTKTIWISHN

SEQ ID NO: 93346 - protein, 476 aa, Unknown
  Bacterial polypetide isolated from the Sargasso Sea
MKTYEQFYINGEWVDPAEGKNSFDVLNPANEEVIGTIAMGSAADVDKAVEAASNAFDSFSQTSVEERLAILGKIVEVYQSRYDEIAETISMEMGAPLSLSKAAQAATGLGHFAQAIEILQGFEWEETKGKTVLRKEPIGVVGMITPWNWPINQISCKVAPALAAGCTMVLKPTEIAPLNAMLFAEVIHEAGVPAGVFNLVNGDGPTVGEAMSAHPRIDMMSFTGSTRAGIAVAKGSADTVKRVAQELGGKSANIILDDADFESAITGGARHCFNNSGQSCNAPTRMLVPESRHDEAKEIAKQAAESTKVGDPFAEDTGIGPVVSEVQFNKIQGLIEKGIEEGAELVSGGPGKPEGLNAGYYVRPTVFANVNNDMTIAREEIFGPVLSILPYKDEEEAVNIANDTEYGLYGYVSSGDVEHAKKVANRIRAGSIAINGAQADFTAPFGGYKQSGNGKEWGPFGFEEFLETKAVVGYAD

SEQ ID NO: 93347 - protein, 480 aa, Unknown
  Bacterial polypetide isolated from the Sargasso Sea
MYEKFGQFIDGKWQQSSDKSTYEVINPANEEVIGHASKATPGDVDKALKSAAKGLEVWKQTPPWQRSYIIRKIADRMREKQDVLAKWMTLEVGKPFAEAKGEVGGAADIFEWNAEETKRIYGQTVESRFTDTRVHVYYQPIGVVAALTPWNFPLVLSSRKISTALAAGCSVIVKPDIITPGTVMELIDICRECGVPPGVVNLLSGDPPSIAQQLISSDIIKKISVTGSTRVGKLILKQAADKVQRVTMELSGHSPFIVFDDADIQKATDMAISAKYRNNGQVCISPNRFYIQEKKKDEFVNLFIEKTKKLKIGDGMDPSVQLGPLTTKKRLNEVEELVETTKKEGAKVLLGGKRPAGFNKGFYYEPTIFDNVKDDYTIMKVEPFGPLVPMLSFKSFDEVIERANNNDLGLSSYICTNSMEQAHRASELMETGTVAVNTPLVAIAEAPFGGIKQTGYGREGGSMAIKDYLNVKYTHLGIKG

SEQ ID NO: 93348 - protein, 477 aa, Unknown
  Bacterial polypetide isolated from the Sargasso Sea
MLDRKNFYIDGKWVSPIEPRNHKVIDPSNEEICAEISLGGKKDVDKAVSAAKKAFETWAFSKKEERLDLLEKLYVVYKKRWAEMAKLISLEMGAPMKFSTEMQAATGASHIKSFKNILKDFKFEKDLGEEKNNQKLLYEPKGVCALITPWNWPINQVNLKVIPALASACTVVLKPSEIAPLSSMLLAEMIDEVKFPPGVFNLVNGDGETTGDALTSHPDVNMISFTGSTRAGALISQNAAKDFKRISLELGGKGANIIFKDADSEAVARGVLRCFRNSGQSCNAPTRMLVEKSIYNETVEKVKELANNTKVDLPEKEGDHIGPVVSEVQYNKIQNLIQKGIDEGAKLIAGGTGKPKGFEKGYYVKPTVFADVNNQMEIARTEIFGPVLSIIPFENEEEAISIANDTPYGLTNYIQTQDKEKVKRVARKLRSGMVDVNGVGIAVASPFGGYKHSGIGREAGTEGLIEFLEVKTVGGWN

SEQ ID NO: 93349 - protein, 469 aa, Unknown
  Bacterial polypetide isolated from the Sargasso Sea
MNSVLKKQKEYFVKNGAPSIELRIDRLERLKSLIMDNRYDFVETLNSDFGNRSKNASMLSDVYGIMPAINLAIKNVKKWSKDEKKSSNFPFGLLGAKSYIRYEPLGTVGMISPWNFPVNLAFVPLVSIFAAGNQVMHKPSEHTPLTSALLKDLCDKAYDEVEFATFLGGPEVGAAFTKLNFDHLLYTGGGSVAKHVMNAASENLVPLTLELGGKSPVVLGKSADLKTSAKRIMFGKTLNAGQICLAPDYVVVHKDQKNDFIKETKDAVSEYFPKIKDNDDYTSIINESHYNRLKDMIDDAIEKGATVEEINPANEDFSQQEFYKIPPTIVSNTTDDMKIMQEEIFGPLLPVVEYDEIDEATQLINSKDRPLGLYYFGNDKTEEDNLLNKTSSGGVTVNNVISHLQQNDLSFGGVGPSGMGRYKSFEGFKNFSNPRAYYKDVSFKLDKFFDAVRPPYKGDIEKVLKQLMK

SEQ ID NO: 93350 - protein, 497 aa, Unknown
  Bacterial polypetide isolated from the Sargasso Sea
MKLIEHFVNGKIIPGSSDKKGKVFNPATGEQESEVRLASKSDLDSAVEVAKKAFETWSLKPALQRARIIFKFKELIEKNSDELTKLIVSEHGKVYEDARGSLTRGLEVVEFACGIPHLLKGEFSENVGTNVDSWSIRQPLGVVAGITPFNFPAMVPMWMFPIAIACGNTFILKPSEKDPSCAIRLAELLSEAGLPDGVFNVINGDKEAVDAILENKDIKAVSFVGSTPIAKYIYENSAKNEKRVQALGGAKNHLVVMPDCDLDGAVNGLMGAAYGSAGERCMAQSVAVAVGDIGDELVSRLSKKAEALKVGPGMDKTSEMGPLVTKEHLEKVTSYVDLGVEEGAKLVVDGRGLKLQGYENGFYIGGCLFDHVNKDMRIYKEEIFGPVLSVVRVKTFEEAAKLINDHEYGNGVSIYTRDGDAGRTFASKIQVGMVGINVPIPVPMAFHSFGGWKRSLFGDSGMHGMEGIKFYTKLKTVTSRWPSGVRSNAEFVMPTMK

SEQ ID NO: 93351 - protein, 491 aa, Unknown
  Bacterial polypetide isolated from the Sargasso Sea
METFNHYINGTWEKPSSGRYFKTENPYTCEVWANVAQGNEKDVDKAVTAAKIAFENDWSELTATDRGKKLVSLASLIEKESKRLAEIEVKDNGKLIAEMEAQTKYLAEWYRYYGGLADKIEGSVLPSDKPGIFNYTKYEPLGVVGMITAWNSPLLLLAWKLAPALAAGNTAVIKPSEFTSASTLEFMKLIEEVGFPKGVVNCVTGFGVEVGQPLVEHKDVAKIAFTGSDVSGQKIYENAAKKIIPVSLELGGKSPNIVFEDADFDAAVMGVISGIFAATGQTCIAGSRLLVQKNIHDKFVEKLIKVAGDAKIGDPMSFNTHVGPVTTKPQFDKIMNYIEIAKTEGAECVLGGKPYTGSGSKGSRFIEPTIFKNVSNEMRIAQEEVFGPVLSIIAFEDEKEAIDIGNDIIFGLAAGVWTNNIGRALRVSDKLKAGTVWVNTYRAVSFMSPFGGYKRSGRGRESGQESIKEFLQVKSVWISQNTSVANPFIIR

SEQ ID NO: 93352 - protein, 353 aa, Unknown
  Bacterial polypetide isolated from the Sargasso Sea
MNIDKFYINGKFITPHGEEKIDIVNPATEEIIGSVISGSEDDVNNAVDSSNAAFTLASNLTIQQRKKILEEIIEGMQERRSDFGQVISDEMGAPMSLALKAQFGSGTIHFKNTLSVIEQFSFNEVHDNITINKLPIGPVGMITPWNWPLNQMCTKVASAIAAGTSFVLKPSEITPGAAQILAEIIDTTSLPKGIFNLIHGYGHTVGKLMSSHSGLEMISFTGSTKAGIDIQKNAADNVKRVSLELGGKSPNIILDDVDLEQAVNMGMKQCFFNTGQSCSAPTRMLVPQNLMEQATEIAVAATSEMITGDPKEEDTFLGPISNEKQFKKVQELIQIGIDEGAELSCGGVGRPDG

SEQ ID NO: 93353 - protein, 313 aa, Unknown
  Bacterial polypetide isolated from the Sargasso Sea
AMGNTCVLKPAEEACLTALTFANLALEAGLPAGVLNVVPGLGASAGAALCANKGINHVSFTGSVATGRLVQAAAAYNIVPVTLELGGKSPQLFFEDANLENALPFLVNAGIQNGGQTCSASSRILVHRSRYDEVVDRMSKKYKELIVRPAIEDGSLGPLISERQKSIVEDFISKGQNLNLVAQGEIDGKAPKKGHYVAPHLFADVSDDHILAKDEIFGPVQVIIPFDTEEEAINIANGTDYGLVASIWTNDGARQMRLAKKLKSGQVFINNYGAGGGVELPFGGRGFSGHGREKGFEALFGFSTLKTVASYHQ

SEQ ID NO: 93354 - protein, 111 aa, Unknown
  Bacterial polypetide isolated from the Sargasso Sea
PTVFTNVNNNMTIAREEIFGPVICLIPYPDIEQAIEIANDSEYGLSSMISCSDEVKGQEIAKKIRTGQVILNRISRGDYPAPFGGFKMSGNGREHGLFGIDEYLEVQAVIT

SEQ ID NO: 93355 - protein, 472 aa, Unknown
  Bacterial polypetide isolated from the Sargasso Sea
MSNDLKFYINGEWVKSESNETIDVINPANEEIIGQVTAGTKEDIDKAVSAALDAFSSYQKTTKTHRIELLKNVITEYEARYDDFVQTISKEMGSPIWLSEAAQAKTGIKNIQETLDALESYEFERPEGDYTLIKEPIGVIGMITPWNWPMNQITTKVSAALAAGCTMVLKPSEISPYCAMLLAEVFDKAGVPNGVFNVVNGYGPTVGAALSEHPDVAMMSFTGSTRAGIAVAQASASSVKRVHQELGGKSSNIILDDVVDLEKSVKGGAGHCFLNSGQSCNAPTKMLISSKNYDKAVEIAVATANSTTVGDPNGEFRLGPIANKVQYEKILKLIEIGIEEGATLVAGGVEKPDGCDKGYYVRPTVFADVTNDMTIAKEEIFGPVLVMIKYNNEEEAINIANDTEYGLAGYVQGDPDHAKDVARKIRAGQVIINGGARGTGAPFGGYKASGNGREHGLHGLEECLETKAIIAS

SEQ ID NO: 93356 - protein, 477 aa, Unknown
  Bacterial polypetide isolated from the Sargasso Sea
MENKKNFYINGKWVTPKSKEEIKVIDPATEENCAVITLGNKDDVNDAVNAAKKAYSSWAFSSKEERIKLLEKLYENYKKRWADIANAITIEMGAPKDFATKLQAGTGAAHLKSFIRYLKNFEFEKPLGEHAPNQRLIYEPKGVCALITPWNWPMNQVCLKVMPAIASGCTMVLKPSELAPLSSMILAELIDETKIPAGVFNLVNGDGATTGDALTSHPDVNMISFTGSTRAGALISQNAAKDFKRVSLELGGKGANIIFKDADPDAIERGALRCFRNSGQSCNAPTRMLVEKSMYNDAVERLKKYTENFEVGDPKKEGEHIGPVISETQYNKIQTLIKKGIDEGAKLVAGGPGKPDGLEKGYFVKPTVFADVNNKMEIARTEIFGPVLSVMPFETEEEAIEIANDTPYGLTNYIQTKDKEKVKRVARKLRSGMVDVNGAGIAVDAPFGGFKHSGIGREAGEHGLEEFLEVKSVGGWS

SEQ ID NO: 93357 - protein, 273 aa, Unknown
  Bacterial polypetide isolated from the Sargasso Sea
MSNFKKNYELALNNAKRLSDKILIDGKLISAQTDKKIPVLNPSTGENIGSAPQCDKNDVNIAVESAFKAFEKWKKIPARERGKMVAAGAKRLEERKSEIETLLSLDTGNALRTQAVPETAASIELTNMFAGLSGELKGENYPPNIPNTIHYTTRDPIGVVCAIVPWNAPLFLTVAKIAPAIVAGNSVVLKTAEQAPLCALLLSEIFQQELPPGVLNVISGYGEECGEPLVTHEKVRKVTFTGSFSVGKIIAEKAAPKLCPVTLELGGKNPNII

SEQ ID NO: 93358 - protein, 497 aa, Unknown
  Bacterial polypetide isolated from the Sargasso Sea
MKLIEHFVGGKIIPGSSDKKGKVFNPATGEQEKEVRLASSSDLDQAVVIAKKAFETWSLKPSLQRARIMFKFKELIEKNSDELTQLIVSEHGKVYEDAKGSLTRGLEVVEFACGIPHLLKGEFSENVGTDVDSWSMRQPLGVVAGITPFNFPAMVPMWMFPIAIACGNTFILKPSEKDPSCAVRLAELLKEAGLPDGVFNVINGDKEAVDAILNNKDIKAVSFVGSTPIAKYIYENSAKNEKRVQALGGAKNHLVVMPDCDLDGAVNGLMGAAYGSAGERCMAQSVAVAVGDIGDELVSRLSKKAEALKVGPGMDKNSEMGPLVTKEHLEKVKSYVDLGVKEGAKLVVDGRNLKLQGYENGFYIGGCLFDNVKKDMRIYKEEIFGPVLSVVRVKTFEEASKLINDHEYGNGVSIYTRDGDAGRTFASKIQVGMVGINVPIPVPMAFHSFGGWKRSLFGDSAMHGMEGIKFYTKLKTITSRWPSGIRSNAEFVMPTMK

SEQ ID NO: 93359 - protein, 445 aa, Unknown
  Bacterial polypetide isolated from the Sargasso Sea
EEVIGQVTAGTKEDIDAAVNAASNAFVSFSKSSQEERIDLLKKIIQEYENRYKDFVEVITKEMGAPNWLSERAQANTGLINFKETLEALEEYEFEKEEGGYTLRREPIGVIGMITPWNWPMNQITTKVSAAIATGCTMVLKPSEISPYCSMLLAEVMHKAGVPNGVFNLVNGYGPIVGAALSEHEKVDMMSFTGSTRAGIAVAQASATTVKRVQQELGGKSANIILDDVADLEKSVKGGAGHCFLNSGQSCNAPTRMLVSSKNYDKAVEVAVATANSTTVGDPNGEFRLGPISNKTQYEKIIKMIEIGIEEGARLVAGGIERPEGYDKGYYIKPTVFADVTNDMTIAKEEIFGPVLCIMKYETEEEAIEIANDTEYGLAGYVQGELSHAIEVGNQIRAGQITINGGARGNAAPFGGYKASGNGREHGKHGLEECLETKAIIAPAS

SEQ ID NO: 93360 - protein, 490 aa, Unknown
  Bacterial polypetide isolated from the Sargasso Sea
MPLSLTRTELLRSANLIDGTWRDAHDGSRFAVTDPARLDTVAHAPDSGAADARAATDAAVRALPAWRATPARDRAAILRAWHAAIVANTDDLAKLMSREQGKPLAEARGEVAYGASYVLWFAEEATRTYGDIIPQQQRGKRLSAVKEPIGVVAAITPWNFPLAMIARKIAPALAAGCTVVAKPAEDTPLTALALAFLAQEAGVPAGVLNLITASRERGIDAAADWLADSRVRKITFTGSTAVGKLLARDSAATLKKLSLELGGNAPFIVFDDAELDAAVDGLMAAKFRNGGQTCVSPNRIYVQAGVYDAFAAKLAARVAALKVAPATDPAAQIGPMINARAVDKIARHVGDAVERGARVLTGGKRLTELGPNFYAPTVLADASADMQLTCEETFGPVAPLFRFDTEDDAVDAANDTPFGLAAYFYTQDVRRIARVSARLETGIVGINEGALASEAAPFGGVKESGYGREGSRYGLDDYLSIKYLCQGGLD

SEQ ID NO: 93361 - protein, 497 aa, Unknown
  Bacterial polypetide isolated from the Sargasso Sea
MKIIEHFVDGKIIPGSSKKKGKVFNPATGEQQAEVMLASSSDLNNAVEIAKKAFNDWSIRPPLQRARVMFKFKELIEKNSDELTKMIVAEHGKVYEDAKGSLTRGLEVVEFACGIPHLLKGEFSENVGTNVDSWSMRQPLGVVAGITPFNFPAMVPMWMFPIAIACGNTFVLKPSEKDPSCSIKLAELLKEAGLPDGVFNVINGDKEAVDAILNNKDIKAVSFVGSTPIAKYIYENSAKNEKRVQALGGAKNHLVVMPDCDLDGAVNGLMGAAYGSAGERCMAQSVAVAVGDIGDELVSRLSKKVENLKVGPGMDKASQMGPLVTKEHLNKVKGYVDLGVKEGAKLVVDGRDLKLQGYENGFYIGGCLFDHVKRDMRVYKEEIFGPVLSVVRVKSFEEATKLINDHEYGNGVSIYTRDGDAGRTFASKIQVGMVGINVPIPVPMAFHSFGGWKRSLFGDSAMHGMEGIKFYTKLKTITSRWPSGIRSNPEFVMPTMK

SEQ ID NO: 93362 - protein, 342 aa, Unknown
  Bacterial polypetide isolated from the Sargasso Sea
VIKQPIGVVTSITPWNFPNAMITRKLGPALAAGCSFVAKPAEDTPLSALAIAVIAERAGIPKGVLSIVTSNKSQVIGEEFCSNSKVRKLTFTGSTEVGKILLKQGSSQVLKMSMELGGNAPFIVFDDADLDAAVEGAILSKYRNNGQTCVCANRLYVQEKVYDKFAQKLSNAVSKFEVGDGFNKSVTLGPLITEDAVLKVESHINDAVSKGAKLICGGKRHELGGNFFEPTLLTEVKKNMIVSTNETFGPVAPLYRFKDEDDVIKQANDTIFGLAAYFYAKDLSRVWRVSEALEYGMVGVNAGVISTELAPFGGVKQSGLGREGSKHGIEEFLEMKYICMSV

SEQ ID NO: 93363 - protein, 193 aa, Unknown
  Bacterial polypetide isolated from the Sargasso Sea
MKVSSVLDTSHLKVKFPFKAKYGNYINGKFVEPKSGKYFDNLSPISNEKICSVARSNEKDVEAALDAAHAAFPEWGKTDITTRSNILYKIADVLEKNLNLLAVAECLDNGKPIRECMAADLPLVIDHWRYFAGVIRAEEGSIAEIANNQYSYNFHEPLGVVGQIVPWNFPLLMATWKLAPALAAGNCSVLKTS

SEQ ID NO: 93364 - protein, 266 aa, Unknown
  Bacterial polypetide isolated from the Sargasso Sea
MHQDVDCLAFTGSTNVGKLIMQYAGQSNLKRVWLELGGKSPNIVMPDCPDLDRAANAAAGAIFYNMGEMCTAGSRLLVHRDIKEVFLDKLIAAARSYTPGNPLDPQTSMGAIVDNVQLERVLGYIEVGRAEAKLLLGGSRVRQETGGFYIEPTIFEIPAAGAKVAREEIFGPVLSVITFDTVEEAIRIANDSEYGLAAALWTSNLTTAHEVSRKLRAGTVWVNCYDEGGDMNFPFGGYKQSGNGRDKSLHALEKYTELKSTLVRLR

SEQ ID NO: 93365 - protein, 472 aa, Unknown
  Bacterial polypetide isolated from the Sargasso Sea
MATDPAKISPLTELLQRQRASYLAAPNPDYAIRKERLTRLKAALLKFQQPLVEALSQDYGHRSVDDSLISDIMPVVNNLNYSLKNLKKWLKPSRRHAGILLAPAQVKVHYQPLGVIGIIVPWNFPVMLSIGPLVTAIAAGNHAMLKLSEFTPATNSVIKQLLAEVFEESHVAVVEGEADVAAQFSALPFDHLLFTGSTTVGRHVMRAAANNLTPVTLELGGKSPVIIAPDMPLEIAVERMIYGKCLNAGQICVAPDYVLCPKAKVAEFIQAYQAKFQAMYGAITHNKDYGSIINARQFERLLTVLEDAKAKGAKVIPASNDVIDSQHRKLATQLITDTTEDMLLMQEEIFGPLLPVIGYDSLDEAISYVNHRARPLALYVMSFDEASQQKILKQTHSGGVCINETVFHVAADDAPFGGIGPSGMGHYHGKEGFLTFSHAKTVLSRGRFNTGKFVHPPYGTFIQRMLMKLFLR

SEQ ID NO: 93366 - protein, 470 aa, Unknown
  Bacterial polypetide isolated from the Sargasso Sea
MHRVLELQKSLNIKEGAPEIDLRKDRLDRVIAMVNKYDKKIIETVNQDFGNRDSMMSAVTEVASVVGPMEHAKKNLKKWMRTEKRKAAIAPLGSALSLLGAKAEVRYQPKGVVGAISPWNFPMNLALAPLAGIIAAGNRVMHKPSELTPATSDLLKLMVEEYFDEAEMAVFVGDAEVGAAFSGLAFDHLIFTGGTSIAKHVMKAASENLVPLTLELGGKSPVVVGKDAKIKDTAQRVMQGKTMNAGQICLAPDYALVPEGKVDEFVKASVEVTSEMFPEMKDNDDFTSIINQRHYDRIQGYLDDAKEKGADIVEINPSNEDFSQQPHHKIPPTLVLNPSEDMKIMQEEIFGPVLPIKTYSDVSEPVEYINSKDRPLGLYYFGNDNTEKDYVLDNTTSGGVTVNDVISHIQMEDLPFGGVGPSGMGSYHGYDGFKEFSHAKAVYKQTKFNLMKLAGLVPPYKKKEEKAKTA

SEQ ID NO: 93367 - protein, 238 aa, Unknown
  Bacterial polypetide isolated from the Sargasso Sea
MSKIIQNFKNISYGPAPEDSKDVMLWINSLNDPNLLFINGKWVKSKSSRKIQVINPATNKKLTTLSISNKNDVNAAVGAAKKAYSSWSKTSSDTRAKYLYALARLIQKHSRFLSVLETIDNGKPIRETRDIDIPLVARHFYYHAGWAKKINTDTHKSIGVIGQIIPWNFPLLMMAWKIAPAIAAGNTVVLKPAEFTSLTALYFAELCQKAKIPKGVINIITGDRSTGELITSHVDTKK

SEQ ID NO: 93368 - protein, 335 aa, Unknown
  Bacterial polypetide isolated from the Sargasso Sea
CALITPWNWPMNQTCLKVMPALASGCTMILKPSEVAPLSAMILTELIDEAGFPSGVFNLVNGDGATTGDALTSHQDINMISFTGSTRAGALISQNAAKDFKRVSLELGGKGANIIFKDADPEAIERGALRCFRNSGQSCNAPTRMLVEKSMYDEAVERVKKFANSMKVGDPKKEGEHIGPVVSEVQYEKIQSLIQKGIDEGAKLVAGGVGKPDGIDKGYFVKPTAFADVNNQMEIARTEIFGPVLSIIPFENEEEAISIANDTDYGLTNYIQTKDKEKANRVARRLRSGMVDVNGAGIAVDAPFGGFKHSGIGREAGKEGLLEFLEVKSVGGWAN

SEQ ID NO: 93369 - protein, 441 aa, Unknown
  Bacterial polypetide isolated from the Sargasso Sea
MKKYQHYINGEWIDSKGNEVIAVVNPATEEVIGEISAANKDDIDLAVAAAKAAYDSRVLVDMNPMERAKLMRGIADELRKISKDGGALLCAENGKLLGASEYEFLDAANYFDYYSGLTDKIEGQTIPVNNQVMDYTLYEPYGVSGHIVPWNFPISMLARSLACSFAAGNSTVIKPAELTPLATTSFFAQAIHNAGVPKGLVNIVTGYGVEAGAALTSHDDVAQITFTGSVKTGKTILHAAAERAVPAVVELGGKSAAVVLPDADIDKVVNATKVGIFSQAGQICSAMSRMIVHKSIKDEVLDKLSELAKSIKVGPGNEEGVDLTPVISEEQLQKVENYARSGLQAGATAISGGHRVDRKGYFFEPTIYADVKPDMTIAQEEIFGPFLSVLEYEDHEEAVHIANDTDYGLAAGVFTKDVDMATKTAAKLNGGQVYVNSWFTG

SEQ ID NO: 93370 - protein, 477 aa, Unknown
  Bacterial polypetide isolated from the Sargasso Sea
MKEYHQFYINGSWVDPINGLNKLDVLNPATEEPIGSIALGSSEDVNAAVDAAKNAFASFSSSEKEERVGYLEKIIEIYMKRSSEMAEAISSEMGAPMSLASKAHSPSGLGHFMTALETLKNYDFEQQKDGLFIRKEAIGVVGMITPWNWPINQIACKVAPALAAGCTMILKPSEIAPFNAMLMAEIIHEAGIPDGVFNLVNGDGPTVGEAMSSHPDIDMMSFTGSTRAGIQVAKGSADSVKRVHQELGGKSPNIILDDADFENAVIRGTRHMFNNSGQSCNAPSRMLVPESRQDEAKAAAKKAADETKVGDPNAEDTVIGPVVSEVQFNKIQGLIEKGIEEGAELVCGGPGKPDGLNQGFYVKPTVFANVNNDMTIAKEEIFGPVLCIIPYKDEDEAIEIANDTPYGLAGYVSSENIDHAVEVARKIRSGNVHINNAPSGLTSPFGGFKQSGNGREWGEFGFEEFLEIKSVLGAGAA

SEQ ID NO: 93371 - protein, 441 aa, Unknown
  Bacterial polypetide isolated from the Sargasso Sea
MQTIDTIFRAQQAKSISLRNGTAKERRDKLKLLLKNFLEMENDVLAALSSDLGKSKTEALLAEIYGVKAEADFAIKNLGRWMKTKRVASPLAISFTKSWVKPEPKGSILIISPWNYPIMLCLNPLIAAIASGNTAVVKPSELTPASGKLVKKLVEKTFSSDEVAVFLGEKDLAQKLLELPFNHIMFTGSPRVGKLVMEAASKHLAGLTLELGGKSPVIVDKHANIKDAAWKISFYKFANAGQTCTAPDYILCDESIHDDLVVALQENISRFFAEGVDAAKKDYCSIANEHHFNRLKGALADALSDGAELACGGEVSQEGLYFTPAILMGVNYDNSIMKEEIFGPILPIIKVQSLDESINYVNENEKPLALYLFSNKSVVHSKVLKSTSSGGMVINDCVLHHMNPNLPFGGINNSGVGSYHGKFGFDAFSHYKAVLKVVLFL

SEQ ID NO: 93372 - protein, 462 aa, Unknown
  Bacterial polypetide isolated from the Sargasso Sea
MLNDNLWYPTDKIFINGQWKDCNSKKRLPIENPSNGEVIAEISDSCEVDIDEAVNSASKALDNSWGDLTASERGRLLLKLSELVRNRIDNLAIIESFDVGKPLKQAKSDALALARYFEFYGGASDKIMGETIPYLKDYTVYTLREPHGVTGHIIPWNYPMQIIGRTLGASLAMGNACVLKPSEEACLTALAIGQLANEAGFPKGSINIVTGLGEKAGSSLIKHPDINHISFTGSVEVGKKVQTEAAKNLIPVTLELGGKSPQIVFEDANLEKALPFLINAGIQNAGQTCSASSRILVSKKIYAELIDKMSKLYCNLKVAQAIDDKDLGPVISSRQREIITNYLKLSKDLECISEGKFETNLPKKGYYVLPKLYGDVKYSHRLAQEEIFGPVQVVIPFEDEEDAVKIANSTKYGLVASIWTLDGARQMRVAKAIKSGQVFINNYGAGGGVELPFGGKGYSGHG

SEQ ID NO: 93373 - protein, 257 aa, Unknown
  Bacterial polypetide isolated from the Sargasso Sea
MENLRKFYIDGQWVDPISTQTMPVVNPATEEKIGDVALGNAEDVDRAVAAASSAFGKFSQFSKKDRLNLLKTVLMITDRRLEDLAQAMSMEMGAPITMARSAQADAAIGHLKGFIDALEDYDERSKLKNGDIIVREPIGVCGLITPWNWPINQITLKVLPALATGCTCILKPSEYTPISAMIYAEILNEAGYPKGVFNLVHGEGPVVGTAMSQHPDIQMMSFTGSTRAGTAVTCDAAETVKRVTLELGGKSPNLVFA

SEQ ID NO: 93374 - protein, 229 aa, Unknown
  Bacterial polypetide isolated from the Sargasso Sea
MGGKSANIILDDVPDFARAVSGGVAGCFGNSGQSCNAPTRMLVPQSRMEEAINAAKAAAAKSVVGDPSAESTRMGPVVSEIQFNKIQTLIQKGIDEGADLIAGGPTRPEGIEEGYFVRPTIFANVSNDMTIAREEIFGPVLSIIGYQDDDDAVSIANDTDYGLSGYVSGEPEHAQAIARKLRTGNVHINGAGPDFSAPFGGYKQSGNGREWGIEGFEEFLETKAMMGAA

SEQ ID NO: 93375 - protein, 240 aa, Unknown
  Bacterial polypetide isolated from the Sargasso Sea
NAAKDFKRVSLELGGKGANIVFKDADPEAIERGALRCFRNSGQSCNAPTRMLVEKSLYSEAIERLKKFANEFKVDDPNKEGDHIGPVISENQFNKIQSLIKKGIDEGANLVAGGPGKPEGLKDGYYVKPTVFADVNNSMEIARTEIFGPVLSVIPFETEEEAIKIANDTDYGLTNYIQTQDNKKVQRVARKLRSGMVDVNGAGIAVDAPFGGYKHSGIGREAGKEGLTEFLEVKSVGGWN

SEQ ID NO: 93376 - protein, 272 aa, Unknown
  Bacterial polypetide isolated from the Sargasso Sea
MGPVVGEAMSAHPDIDMMSFTGSTRGGVAVAKASADSVKRVSQELGGKSANIILDDADFEKSIRAGVDSCMSNTGQSCNAPTRMLVPAARKDDAYSIAKDAAAKVIAGDPKKDDTTIGPLVSDVQYEKVQTLIQKGIDEGAELLIGGTGKPNGLEKGYYAKPTVFGDVQNDMAISKEEIFGPVLSMLTYENIDHAVAIANDTEYGLAAYVSGEDKETLTSIARRLRAGQIHVNYGSGGADAPFGGYKQSGNGREKAEWGLEEFLEVKAIMGA

SEQ ID NO: 93377 - protein, 169 aa, Unknown
  Bacterial polypetide isolated from the Sargasso Sea
MTIKVGINGYGRIGRNILRALYESKRTNEIEIIAINDLGDTNTNAHLTQYDTAHGIFPGTVTVENDNMIINGDKVHVLSERDPSKLPWGKLGVDVVIESTGFFTSKAKAQAHINGGAKKVIISAPGGSDVDATVVYGVNDDVLRSTHTVISNASCTTNCLAPVVKVLHE

SEQ ID NO: 93378 - protein, 281 aa, Unknown
  Bacterial polypetide isolated from the Sargasso Sea
MRELAHYKMFINGQWLDSENNKRFESTNPSTGEPWASIPEASANDVDKTVKCAYEAFSSGEWSKITPTQRGKYLRKLGELLSEKSEELGKIESIDTGKLLKETRWQAKYIAEYFHYYAGLADKIEGSTLPIDKPDMYAFNVREPLGVVAAIVPWNSQLFLVAVKIGPALAAGNTVVLKASEHASAAMLEFGKVVQEAGFPPGVVNIISGHGEPCGKTLTTHPLVHRISFTGGPSTARHVIRNSAENFAEVSLELGGKSPFIVFDDANIESAVNGSIAGIFG

SEQ ID NO: 93379 - protein, 400 aa, Unknown
  Bacterial polypetide isolated from the Sargasso Sea
MDNRDVLGMMDCVDSGNALSGMKGDVNCSSDSLKFFANLITEIKGQTHSEKSGHLNFTRRHPYGVVAKINPFNHPLRFCAEKSAAALAAGNTVVVKASEQAPLSSLRFAEICEEVLPPGVVNVLTGDKICGDAMVRHPDVRRVGVVGSVATGKIIAKAAAEDLTHVTLELGGKNPIIIFPDANPKQAASYAVKGMNMNRQGQSCSSTSRVLVHQDLHDAVLEEMVKLVEKLPVGLPWIEENELGPVVSKIQYKKILEFISSAQKEGAQLITGGSSPKDEELKNGFFIQPTIFDQVTPEMRIGSEEIFGPVMSVFKWDDYENMLSIANGIEYGLTAMIVTDNLKQAMETAERIEAGYVWINSTGRYLGAPYGGWKASGIGQEECFEELMSYTQIKNVNMRW

SEQ ID NO: 93380 - protein, 496 aa, Unknown
  Bacterial polypetide isolated from the Sargasso Sea
MALALNDVIEKKSSIDFKTQAFINGNYTNSVTGKTFESISPVDGSLIANVSECDVEDINNAVKAARAVFEKGSWSRMAPSKRKKILFNFADLMKKNILELGLLETLNMGKPITRATGDIAACINCTKWYAEAIDKLYDDVAPTSDNIIATITKEPLGVVGAVTPWNFPLLMACWKFAPALATGNSFILKPAEQSPLSALRVAELAMEAGIPEGVFNVIPGFGPTAGKALGTHMDVDKLGFTGSTEVGRYFLSYAGESNMKRVSLECGGKSPNIIFADAPDLDHAAKMAADGMFGNSGQVCDAPSRLLVENSIKDEFLEKVVKYSEPWTPGDPFDPSTLMGSIVDHTQTKRIMDYIDTGKNEGANVITGGEQVLQETGGCYVNPTVFKDVKNSMKVAKEEIFGPVLCTIDFENEDEALEIANDTNYGLNAMIWSNDLNKVHKLAKRIKSGKVLINSVSDGDMSLPHGGYKQSGFGRDKSLEALGQYTQTKLTLIEIK

SEQ ID NO: 93381 - protein, 469 aa, Unknown
  Bacterial polypetide isolated from the Sargasso Sea
MNKVLNDQKEYFIKNGSPSIELRIDRLERLRTLIMDNRNDFVEALNTDFGVRSKNASMLSDVYGIFPAITHAVKNVKKWNKIEKKSSNFPFGLIGAKSYIKYEPLGTVGMISPWNFPVNLAFMPLVCIFAAGNQVMHKPSEHTPLTASLLKDLCDKAYDQNEFATFLGGPEVGAAFTQLQFDHLIYTGGNAVAKHVYNSASKNLVPCTLELGGKSPVIISKTADMKTTAKRIMFGKTLNAGQICLAPDYVVVHKDKKDEFIKETKEAVSEYYPDIKNNDDYTSIINQAHYDRLNDLLDDAIQKGANVEPINPSGEDFSQQEFYKIPPTIVTNTTDDMKIMQEEIFGPLLPVLEYEEIDEATDLINSKDKPLGLYYFGQNKSEEDNLLNKTSSGGVTVNNVISHLQQSELSFGGVGASGIGRYKSFEGFKNFSNPRAYYKEVSSRFDKLFDGVRPPYKGNIEKILKQLMK

SEQ ID NO: 93382 - protein, 244 aa, Unknown
  Bacterial polypetide isolated from the Sargasso Sea
MSVNYKSIAQKLKFEGRAFINGKYVNAIDGKKFETINPATGEKLCTVAKCNKKDVDLAVKVSRKAFNSGVWSRSSPEHRKEILLKFAELLRKHGNENSVLECVDTGKLILDCINEVANDAPMHFQWYGELIDKVFGKVGPTEPSITSLIVKEPIGVVAGIVPWNFPLMMAVWKMAPALAAGCSVIIKPAEDTPLTAIRVAKIAQEAGIPDGVLNVLPGYGDVGEALGRHKDVDAVSFTGSTEVG

SEQ ID NO: 93383 - protein, 480 aa, Unknown
  Bacterial polypetide isolated from the Sargasso Sea
MYEKFGQFIDGKWLESSDKGTYEVINPATEEVIGNASKATPKDVERALKSAEKGLLVWKKTAPWQRSYILRKIADKMREKQDVLAKWMTLEVGKPLAEAKGEVGGAADIFEWNAEETKRIYGQTVESRFEDTRVHVYYQPVGVVAALTPWNFPAVLSARKISTALAAGCSVIIKPDVITPGIVMQMVDICRECGVPPGVVNLLSGDPPSIAQQLIASDIIKKISITGSSRVGKLILKQAADKVQRVTMELSGHSPFIVFDDADIKKAADMAIASKFRNNGQVCISPNRFYIHESKKDEFVNLFVDKTKKLKIGDGMDPSTQLGPLTTKKRLNEIEELVEKTKQEGAKVLLGGKRPAGFNKGFFYEPTVFDNVKDDFTIMKQEPFGPLVPMLSFKSFDEVIERANNHELGLASYICTNSMEKAHKASELMETGTVAVNTPVVAIAEAPFGGIKQAGYGREGGSMAIKDYLNVKYTHLGIKG

SEQ ID NO: 93384 - protein, 288 aa, Unknown
  Bacterial polypetide isolated from the Sargasso Sea
ITGFAENCSKILTSHPKVDRIAFTGGVQTAKHIVKNSAENLSQVTLELGGKSPVVIFKDARKNNAINGVLASIFGASGQSCIAGSRLYLQEEIYDDYLNEIKNRALKISIGDPMEQHTQIGPLATLQQLRNIENKITETIKQGGKLIVGGNKPKDIKTGYFFEPTIIECDNHNLPVAENELFGPVLSIMKFTDEDHAIKLMNDNKFGLAAGIFTENNGVAMRVSKAVRAGIVFVNTYRLISPIAPFGGFKNSGFGRESGMEVIKDYSNIKTTWINTSTKEIDDPFIIR

SEQ ID NO: 93385 - protein, 474 aa, Unknown
  Bacterial polypetide isolated from the Sargasso Sea
MEKLKKFFINGTWVNPRSDETMAVISPSDLRKIGTVSLGNEQDVNDAVQSAKKAFTSFSKTKKKERIDLLKGLKRITERRFEDLAQAMREEMGAPISMARSAQADAALGHLESFIGALAELKERTVLDSGDILLKEPVGICGLITPWNWPVNQIALKVIPALATGCTCILKPSEYTPLSAMVYTEIIEEAGYPAGVFNLVNGVGDTVGRVMSKHPEIDMMSFTGSTRAGIMVTKDSSETIKRVTLELGGKSPNIVFSDANLERDIKYSINECMFNTGQSCDAPTRLLVEHSCYEEVLKIAKKSAEEILIGDPTKEGDHIGPLFDKIQFDRVQNMIDLGIKEGASVLTGGLGKPHGLEKGWFVKPTIFYNVRNTMRIAREEIFGPVLVIMPFKNEQEAISIANDSPYGLAAYVQTSDIKKAERVSSQLRVGAVHINGGGYNYGTPFGGYKQSGNGREGGLMGLEDYLEIKSLHGL

SEQ ID NO: 93386 - protein, 236 aa, Unknown
  Bacterial polypetide isolated from the Sargasso Sea
VTQELGGKSANIILEDADFNKAVSRGAMSCFSNSGQSCNAPTRMLVPQEKLDEAAEIASKVAESTIADNPEKESTKIGPVVSQAQWDKIQKLIQAGIDEGAVLAAGGTGKPNPESKGYYVKPTVFTNVKNDMTIAREEIFGPVLSIIPYKDEDDAIAIANDTLYGLAGYVSSENIEHARSVASKMRTGMVHINGAPLDAMAPFGGYKQSGNGREWGEYGMEEFLEIKSVYGYNSNK

SEQ ID NO: 93387 - protein, 354 aa, Unknown
  Bacterial polypetide isolated from the Sargasso Sea
HEKALNLSVREPYGVVGLISPWNYPLLMGVWKIAPALAAGNSIVLKPDEHSPHSCIKMAELFVEAGGPPGVFNVVTGHGEEAGQSLALHQDVSKIGFTGSTEVGKLLLQYAGQSNMKKVSLETGGKSPMIYFADLPDMELAVSTAYDSIYANMGEVCNAGSRIYVERAIYADFVDQFIAEGQGAYTPGDPLDPETNMGPLMSAQAQKRVLGFIESGKNEGAKLKFGGNIPTGLESGCFVEPTMFADVNNDMTIGREEIFGPVASIIPFDSEEEAIEMANDTIYGLCASVWTSNVSRAHNMAKAIESGMVYVNCYDVGDMTFEFGGYKQSGNTKDSCFESVLGYTQSKSIWYNLG

SEQ ID NO: 93388 - protein, 476 aa, Unknown
  Bacterial polypetide isolated from the Sargasso Sea
MIEKKNFYINGKWVSPTTPNDFEVINPSTEEAFAIISLGSAEDTDKAIKAANIAFETWRETTKEERLALLEKFEEIYKRRWDEMVGAQSKEMGAPLDFASETHTKMGADICRNNIEILKDFNFEHQFDPKSNNHIRYEPIGVCGLITPWNYPMNQIILKVIPALAAGCTMILKPSEIAPVSAVLFAEMIDEAGFPAGVFNLVNGNGEVVGNHMSGHPDIDMISFTGSTRAGKLIQKNAADTIKKVTLELGGKGGNIVFADSYPNAVRDGVRNIMSNSGQSCDAPTRMLVEKPIYERAVKEAVDEANKIKVDLASKKGDHIGPVVSKVQYDKVVNLINEGIKEGATLAAGGPDLPNGLNKGYFVKPTIFSDVNNDMKIARTEIFGPVLSIIPFETEEEAIAITNDTSYGLGNYLQTEDKEKAKRVARKVRAGTVYINGQATDTGMPFGGYKQSGNGREGGVWGFTEFLEVKAITGWN

SEQ ID NO: 93389 - protein, 476 aa, Unknown
  Bacterial polypetide isolated from the Sargasso Sea
MIDKRKFYINGDWVDPVNKNDCNVIDPSTEEPYVTISLGSADDTNKAVEAAKKSFFTWKNTSKEERIELLEKLLKIYRNRSEEMTNAISKELGAPLDWASSAQMGSGESHIEDFIKRLKEFEFESNFDENSDNYIVYEPIGVCGLITPWNWPINQIALKVIPAFATGCTMILKPSEMAPLSGLLFAEMIHEAGFPAGVFNLVNGDGAGVGSQISGHPDIDMVSFTGSTRAGKLISKNAADTIKRVCLELGGKGGNIIFADAYPNAVRDGVRNIMSNAGQSCDAPTRMLVEKSIYEKAVQEAADEANKIGVDLPSKPGDHIGPVINKSQFDKIQSLIQSGIDEGATLVAGGAGRPSNFEKGYYVKPTVFTNVKNEMRIAKEEIFGPVLSIIPFDSEEEAISITNDTSYGLGNFLQTEDKERARRVSKQLRAGVVQINGNAPDSGTPFGGYNQSGNGREGGTWGLHEYLEVKAISGWK

SEQ ID NO: 93390 - protein, 472 aa, Unknown
  Bacterial polypetide isolated from the Sargasso Sea
MEINKFYIDGKFVDPDGSEKIDIVNPATEEVVGYVISGSNKDVDFAVEAANKAFPEVMALTLDQRKKILEEVLEGMEERREDFAQIISEEMGSPITMARRAQYGSGTIHFKNTLSIIDRFDFQEVHGNITINKLPIGPVGMITPWNWPLNQMCTKVASAIAAGTTFVIKPSEITPGAAHILAEVIDKTSMPKGMFNLIHGHGITVGKAMSSHPDLEMISFTGSTRAGIDIQKNAADNIKRVSLELGGKSPNIILEDVDLENAVTMGMKQCFLNTGQSCSSPTRMLLPEHMLDEATKYAIAAANDMSTGDPLDEEIYLGPISNKTQYEKVQDLIQRGIDEGATLACGGTGRPDGLEKGFFVKPTVFTNVDNKMTIAQEEIFGPVICLIPYSDVEQAIEIANDSAYGLSSMISCSDEVKGQEIAKKIRAGQVILNRISRGDYPAPFGGFKMSGNGREHGLFGIDEYLEVQAVIT

SEQ ID NO: 93391 - protein, 469 aa, Unknown
  Bacterial polypetide isolated from the Sargasso Sea
MNQILKQQKEFFIKNGAPSVDLRIDRLQRLKTLIMDNRYDFIDALNSDFGNRSKNASMLSDIYGIMPAINLAIKNVKKWSKPEKKSSNFPFGLLGAKSYIKYEPLGTVGMISPWNFPVNLAFVPLVSIFAAGNQVMHKPSEHTPITSQLLKDLCDKAYDENEFATFLGGPEVGESFTKLTFDHLLYTGGGSVAKHVMNAASQNLVPCTLELGGKSPVVIGKSADLKTSAKRIMFGKTLNAGQICLAPDYVVIHKDQKEDFVNESKIAVSEYFPSLKDNDDYTSIINEKHYDRLKDLLDDAIEKGAHVDEINPSNEDFSQQEFYKIPPTIVTNTTDDMKIMQEEIFGPLLPVVEYDDIDEATALINSKDRPLGLYYFGDNKSEEDELLNKTSSGGVTVNNVISHLQQNDLSFGGVGPSGMGRYKSFDGFKNFSNPRAYYKDIGPKLDKVFDAVRPPYKGDIEKVLKKLMK

SEQ ID NO: 93392 - protein, 495 aa, Unknown
  Bacterial polypetide isolated from the Sargasso Sea
MTAISILPEVTAFLARRHGHYIHGRAVEGRGDRIAVVNPSDEQEIADIADATRDDVDAAVASSRAAFEGAWGRTTPAERANVLLRLADLFEKHREELAQIETLQSGKIIQISRAFEVDQAIGFLKHYAGAATRIHGETITPSLPSFNGERYSAFTRREPVGVVVGIVPWNFSILIAVWKFASALATGCTVIIKPSQFTPLTLLRIAELATEAGAPAGALNVVSGGGNPGRWLIEHEGTAKVSFTGSVPTGIAVGRNAMDAKLTRATLELGGKNAVGFLKDVDADKAVAGILESGFVHQGQVCAAGERFFLHRSRLDEVLEKLKHALAGLQIGDPMDERTQFGPLSNRAHFDKIVDFFDLARSEGSTIAFGGQPLDRTGYFVTPTAILVDDRRAKMLSEETFGPIATFLAYDDEAELVDLFNDTPYGLAASLWTNDLGKAMNLIPRIEAGTVWVNMHTFLDPALPFGGVKASGIGREFGSAFIDDYTELKSVMIRH

SEQ ID NO: 93393 - protein, 327 aa, Unknown
  Bacterial polypetide isolated from the Sargasso Sea
MNNLQKFYINGKWVIPNSTKKMAVLNPATEDLIGEIILGNSKDVDMAVSAAKNAFNSFSKTSKNDRLELLNKIRQISEKRFEDLADAMTSEMGAPHRMARDAQADAAIGHLDGFIDALKKHEEKIVLSNTDVLLKEPIGVCGLITPWNWPINQITLKVLPVIATGCTCILKPSEHTPLSAMIYAEILDEAGVPDGVFNLVHGDGEGVGVSMSRHPDIEMMSFTGSKRGGKSVTIESAETVKKVTLELGGKSPNIVFADCDLEEKVKASVNECMFNTGQSCDAPTRLLVEKKCYNEVIDIAKKTAEEIKVGDPTLDGDHLGPLLIKYN

SEQ ID NO: 93394 - protein, 477 aa, Unknown
  Bacterial polypetide isolated from the Sargasso Sea
MLDKKKFYINGKWVEPVNKNECEVINPSTEEVCAIISLGSSDDTNAAVKAAKSAFETWKETSKEERLNLLEKLLKIYNSRWDDMTDAITTELGCPKDWCSANQTSSGAGHIEDFIKRLKEFEFEPGFDKGSTNHIVYEPIGVCGLITPWNWPINQIALKVIPAFATGCTMVLKPSEIAPLSGMLFAEMIDEAGFPAGVFNLVNGDGPGVGTDLSGHPDVDMVSFTGSTRAGKLITKNAAETIKRVCLELGGKGGNIVFADAYPDAVRDGIRNVMSNSGQSCDAPTRMLVEKSIYKRAVEEAADEANKIKVDLASKAGDHIGPVISKTQFDKIQSLINSGIEEGATLVAGGPDKPEDLKKGYFIKPTVFTDVNNNMRIAKEEIFGPVLSIIPFENEEEAIQITNDTEYGLGNYLQTEDNEKAKRVSKKLRSGIVYVNHKAADSGTPFGGYRQSGNGREGGTWGLHEYLEVKTITEWKN

SEQ ID NO: 93395 - protein, 379 aa, Unknown
  Bacterial polypetide isolated from the Sargasso Sea
APLDFASETHTKMGADICRNNIEILKDFNFEHQFDPKSNNHIRYEPIGVCGLITPWNFPMNQIVLKVIPALAAGCTMILKPSEIAPVSAVLFAEMIDEAGFPAGVFNLVNGNGEVVGNHISGHPDIDMVSFTGSTRAGKLIQKNAADTIKKVTLELGGKGGNIVFADSYPNAVRDGVRNIMSNSGQSCDAPTRMLVEKPIYERAVKEAVDEANKIKVDLASKKGDHIGPLVSKVQYDKVVNLINEGIKEGATLAAGGPDLPNGLNKGYFVKPTIFSDVNNNMKIARTEIFGPVLSIIPFETEEEAIAITNDTSYGLGNYLQTEDKEKAKRVARKVRAGTVYINGQATDTGMPFGGYKQSGNGREGGVWGFTEFLEVKAI

SEQ ID NO: 93396 - protein, 500 aa, Unknown
  Bacterial polypetide isolated from the Sargasso Sea
MSEEVKVVDWHAKAKSLDVQTKLFIDGQFVDAVDGGRFTTVNPATGLDQHTMVRGNEKDIDLAVAAARRTFKEGVWSRMAPRDRMDVLFRLAQLINEHTEEFALLDCLDMGKPISDLLNGDVPFSAHTFQYFAEAIDKIEGVVTNTASSAFHFISREPIGVVGAVTPWNYPLMMAAWKVAPALAAGNSVVLKPAEQSPTSALLLARLFVEAGGPAGVFNVVNGFGEDAGKALALHKDVDKISFTGSTEVGKLMMIYAGQSNMKRVTTECGGKSPQIVFDDVADIDTAVRYAASGIYGNQGEVCSAGSRILVQRGIYEQFVKKFVELAPTMFKPGDPLDPGTTMGPLVTKEQHKRVSSYIDIGQSEGGVLALAGQIPAELRAGNFVAPTLFTDVNRNMRIANEEIFGPVAAIMPFDSEEEAVDIANSSIYGLAAGIWTSNVTRAHRVARNVESGIVWVNCYDHGDMTQPWGGFKQSGQGRDKCFETILAHTQSKSVWLNLE

SEQ ID NO: 93397 - protein, 488 aa, Unknown
  Bacterial polypetide isolated from the Sargasso Sea
MQTQLFIDGRFVDAVDRGTIDVLNPHDGSVITKIAAATAADVDLAVEAATRAFPKWSALPAAERGRLLLRLADAIEANAEELAQLESLDTGHPIRDSRALDVPRTAACFRYFGGMADKLQGSVIPVETGFLNYVQRAPIGVVGQIVPWNFPLMFTSWKMGPALAAGNTVVLKPSEITPLSTLRIVELMAEVGFPAGVVNIVPGYGHTAGQRLAEHPGVGKIAFTGSTATGRRIVEASQGNLKRVQLELGGKGANIVFDDADLDAAINGAAWAIFHNQGQACIAGSRLVLHERIADAFLERFVALASSIRLGNPLDANTEMGPLTSKQHLERVLSFVDVAREQGGRVLTGGTAPQDPALADGYYVRPTVIEARSATDRVAQEEVFGPFVTVLRFGSDDEALAIANATEYGLGSGLWTKDLSRAHKMASQINAGMCWINCYKRVNPGSPFGGVGKSGYGREMGFEAMHDYTEARSVWVNVDGNVPPHFKR

SEQ ID NO: 93398 - protein, 489 aa, Unknown
  Bacterial polypetide isolated from the Sargasso Sea
MKHLLKDTSLWREGAYVGGEWLNETPHGRYPLRNPANGDVLVELPRCQQAEAVHAIEVAHRTHLDWRKTTAKHRSEVLRRWYELIVQNREDLATLITLEEGKPLSEARGEMDYAASFIQWFSEEAKRVRGDVIPAPKDTQRIVVLKQPIGVCAAITPWNFPAAMITRKAGPALAAGCSMVVKPASQTPLTALALAELALRAGVPAGLFSVLTGNDTRILGNELTTHPLVRKITFTGSTEVGRVLLQQAASTVKKCSMELGGNAPVLVFDDADLDTAVEGVIASKFRNTGQACISANRIYVQDGIYDAFAQRMAERVAQLKVGNGLADGVQQGPLIDDGAVTKVEEHIADAVAGGARVKLGGKRHALGGCFFEPTILVDVQPSMMVAREETFGPVAPLFRFHTEDEALRLANDTEFGLAAYLYSRDASRIWRVSAGIESGMVGINCGLISNEVAPFGGVKQSGLGREGSQYGIEEFLELKYLCWDGLDAV

SEQ ID NO: 93399 - protein, 498 aa, Unknown
  Bacterial polypetide isolated from the Sargasso Sea
MSTPKKRSDWESLAASLAINGKAYINGEYRDAAAGSTFDCVSPIDGRVLAKVASCDQMDANIAVANAREVFESGVWSKTAPVKRKQVMIRFAELLEENANELALLETLDMGKPIRFSKAVDIAGAARAIRWSGEAVDKLYDELAPTAHNEIGMITREPVGVVAAIVPWNFPLLMACWKLGPALATGNSVILKPSEKSPLTAIRIAELAVQAGIPKGVLNVLPGYGHTVGKALALHMDVDTLVFTGSTKIAKQLMIYAGESNMKRVWLEAGGKSPNIVFNDAPDLKAAAVAAAEAIAFNQGEVCTAGSRLLVESGVKDQLIELIAEELASWQPGHPLDPATVSGAVVDKQQLDIILSYIKAGQDEGANLVHGGQQVLAKTGGVYVQPTIFSQVHNKMKIASEEIFGPVLSVIEFNGMEEAIAIANDTIYGLAAGVWTADISKAHKTAKALRSGMVWINHYDGGDMTAPFGGYKQSGNGRDKSMHSFDKYTEIKATWIAL

SEQ ID NO: 93400 - protein, 490 aa, Unknown
  Bacterial polypetide isolated from the Sargasso Sea
MIFKNFIDNQWFDARSGKTFEVLNPFTEEVIANVPASDEQDINNAVKVAKNSFHEWSELTAGERRDHLRALANNSREHAESIAETISSEMGKPYKDALTELDDLAEYLEYYSELARDQVGRIVAPVDQRSMSLVRYEPYGVVGCIIPWNYPLSLMGWKLAPALAAGNTIIMKPSEVTSLSILHWAELAGGAMPSGVMNVVTGLGAEAGEALVKHPEVPIITFTGSVRTGKRIAKLAAQNLKKVSLELGGKDPVIICDDADIEVAAKGTSWGGFVNTGQVCTSVERVYVYDSVVKRFTEALVEEAKKVKLGDPMDEDTDIGPMASQDQFNNTISKVDLAKKQGGRVLTGGKRSDKFDKGYFYEPTVFDNITSDMDIVTEESFSPVIPIQKISSMDEAIEMANSTKYGLGCTIFTKDIERALTAADKIKSGTVCINNPLMENIAAPFGGMKQSGIGREHGVEALEEFREAKHIFIDYDHNNKDWWFGEKDDK

SEQ ID NO: 93401 - protein, 501 aa, Unknown
  Bacterial polypetide isolated from the Sargasso Sea
METNEHFPLLDATRAFLAKPKQMLIGAEWCDAASCRRLDVVNPADGSVLAHVPEADEHDVQQAIAAARRAFDAGPWRSAKTTDRERLLLALADLIDANARELAEIESLDNGKPVTVAQGLDVAMAAQCFRYMAGWATKIEGSVIDAGMPYMPDSEIFTYTRKEPVGVVGAIIPWNFPLLMAAWKLAPALATGCTVVLKPAEDTPLSALRLGELIQAAGFPDGVVNIVTGYGHTAGAALSRDPRIDKIAFTGSTQTGKTIGHAALDNMTRMSLELGGKSPVIVLPDVDPDKAALGVANAIFFNQGQVCTAGSRAYIHAKVFDDVIERVAKIAASLKIGPGMDPSTQIGPLVSAKQRQRVCGYIDSGFGEGARAAVGGRAIDGPGFFVEPTVLVDTTQAMRVVREEIFGPVLVAMPFDDVDTAVQLANDTPYGLGASIWSNDLSAIHKLIPRIAAGTVWVNCHSLLDNAMPFGGMKQSGFGRELGRAVIDQYTESKSVMMNYA

SEQ ID NO: 93402 - protein, 286 aa, Unknown
  Bacterial polypetide isolated from the Sargasso Sea
DGVFSVLPGDGPITGKSLCLHNDIDCVAFTGSGEVGKLVLQYSGQSNMKRVQLECGGKSPNIIFADCDDLDRAAEAAAYAIFGNQGEVCSAGSRLIIQKDIEKDFINKVVQLSKKMQPSDPLNPDSFAGAIVNTEQLEKINKYVNIGKKEGADIEVGGNITMKETGGCYFEPTIFKNVKNNMKIAQEEIFGPVLTTLAFSNFDEAVSIANDSEYGLAAGVWTNDINKAIRASREIRAGTVYINNYEEGVDSTIPLGGYKQSGIGRDNGVQALENYLQVKSTWVKIT

SEQ ID NO: 93403 - protein, 188 aa, Unknown
  Bacterial polypetide isolated from the Sargasso Sea
NASCTTNGLAPFVKVLDDKFGIVKGLMTTTHSYTGDQRILDASHRDLRRARAAALNIVPTSTGAAKAVALVLPQLKGKLNGIALRVPTPNVSVVDLVIQTSKKVTADEVNQTFREAADGKLKGILAVADEPLVSCDFRCSDVSTTVDAALTMVMGDDMLKVVAWYDNEWGYSQRVVDLAELCAANWGR

SEQ ID NO: 93404 - protein, 441 aa, Unknown
  Bacterial polypetide isolated from the Sargasso Sea
DVDKAVNAARKSFEKGDWSTMPPTERKGILLKLADLIRANLNEFALLDSLDMGKLVNDAVTIDAPGSAMFFQWHAEAIDKMYDEIAPTGPGDLAMVARKPLGVIGAVVPWNFPLDMATWKASAALAAGNSLVLKPAEQSPLSALRLAELAIEAGIPEGVFNVVPGYGEIAGKALGLHQDVDCIAFTGSTPVGKLFQQYAGQSNMKQVWLETGGKSPNLIFQDCKDLDAALNMAAFGIFFNQGEVCSANSRLLVERSIQEEFVKRLSSLAKDTQPGNPLNPDSKMGAIVNEEQTNKIMSYIEKGKHKAELVIGGEQIKIDGKGFYVQPTIFNNVDSNEEIAKEEIFGPVLSIIPFDTEEEAISMANESEYGLAASVWTDDLARALRVSDKLHAGTVSVNTVDALNTITPFGGVKQSGYGKDLSLHSFNKYTYLKTRWIKYKP

SEQ ID NO: 93405 - protein, 399 aa, Unknown
  Bacterial polypetide isolated from the Sargasso Sea
EYAKKNLKKWMAGSKRKANFPLGFLGAKASVDYEPLGTVGMISPWNFPVFLTFSPAASIFAAGNQIMHKPSEYTEQTSALLKELCDAAFDEEEFATILGGPDVGASFTQQKFDHLLYTGSGAVAKHIMKAASENLVPVTLELGGKSPVIVSNSADSAIAAKRIMLGKTMNAGQICLAPDYVMVHSDKKDELVSGMKEAVAEFYPDLKHNDDYTSIINQKHYDRLQGLLADAKDKGAEIDEINPANEDFSQQEAFKIPPTLVMNPTDDMEIMKEEIFGPLLPIKEFSEVDETISYVNSNDKPLGLYYFGSSKNEEEQVLSRTSSGGVTINDVLGHIQQEDLPFGGVGPSGIGSYHGEEGFKTFSNAKAVYKQIGSRFDKLLSAIRPPYKDDIEKVLKQIT

SEQ ID NO: 93406 - protein, 480 aa, Unknown
  Bacterial polypetide isolated from the Sargasso Sea
SKTRAFVHGEYRAAESGATFECISPVDGRLLGMVASCDQADADVAVKDARATFESGVWSRMAPAKRKKVMIRFAELIEEHGQELALLETLDMGKPISDSLSIDVGSAANAIRWSGEAIDKIYDEVAATAHDELGLVTREPVGVVAAIVPWNFPLLMTCWKLGPALSTGNSIILKPSEKSPLTGIRIAQLAIEAGIPAGVFNVLPGFGHTVGKALALHMDVDTLVFTGSTKIAKQLMIYAGESNMKRVWLEAGGKSPNIVFADAPDLQAAAEAAASAIAFNQGEVCTAGSRLLVENAIKDTFVPMVVEAIKAWKPGNPLDPATNVGALVDTTQMNNVLSYIQAGHDDGAKLVAGGKRVMEETGGTYVEPTIFDGVNNAMRIAKEEIFGPVLSVIGFDDQDEAIAIANDTVYGLAAAVWTSNLSRAHLVGKALRAGSVWINQYDGGDMTAPFGGFKQSGNGRDKSLHAFDKYTELKSTWIKL

SEQ ID NO: 93407 - protein, 328 aa, Unknown
  Bacterial polypetide isolated from the Sargasso Sea
WNFPLSMIGRSLSCSFATGNSTIIKTAELTPLSATVFAKAIQNAGVPEGLINIICGYGNEAGSYLVSHEDVNHVVFTGSVATGKKILHACADKAIPAVVELGGKSAGIVYPDADLNEVLESARSGIFSVAGQICTAMSRLVVHKSIKDELVDKLVDMSKSLKIGPGIEKDTDLTPVISENQLQKVEGYARSGIQEGAEAAYGGKRLDREGYFMEPTVLNNVKQSMTVAREEIFGPVLSVLEYEDQEEAIDIANDTEYGLGAGVFTKDLKKASWTASKLEAGQVYVNKWFTGNHATPFGGYKQSGYSREKGVDGLKSYLQVKNVGISLG

SEQ ID NO: 93408 - protein, 367 aa, Unknown
  Bacterial polypetide isolated from the Sargasso Sea
FDYYSGLTDKIEGRTIPVNSNVMDYTIYEPFGVSAHIVPWNYPISMLARSLSCSFAAGNSTVVKTAELTPLATASIFAKAIDNAGVPPGLINIICGYGNGAGNDLTSHKDVSQIAFTGSVKTGKVILHAAAERAIPAVVELGGKSAAVVMPDADLDKVVNSAKGAIFGQAGQICSAMSRVIAHKSVKNQLVDKLSNLANSLKVGHGSEDGTDLTPVISEEQLQKIENYSRSGQQAGANAVAGGKRVDRKGYFFEATVFDNVQPEMTIAQEEIFGPVLSVIEYSDEEEAVSIANNTEFGLAAGVFTNDVNKATSMASQLNGGQVYVNSWFTGSVATPFGGYKQSGYSREKGQEAIKSYLQLKNIGIQL

SEQ ID NO: 93409 - protein, 244 aa, Unknown
  Bacterial polypetide isolated from the Sargasso Sea
SVTIESAETVKKVTLELGGKSPNLVFADCDLEEKVIASVNECMFNTGQSCDAPTRLLVEKKCYDEVVTIAKKAAEEIKVGDPQEDGDHLGPLFDKIQFDRVQNMIQVGIDEGAELLVGGLGKPEGLEKGWFTKPTIFINVNNSMRVAQEEIFGPVLVIIPFEDEKEAIEIANDTPYGLAAYLQTGDTERAERVSRQLRAGGVHVNGGGYNYGSPFGGYKESGNGREGGDMGLEDYLETKALHIA

SEQ ID NO: 93410 - protein, 385 aa, Unknown
  Bacterial polypetide isolated from the Sargasso Sea
RKVSPPILGLLGAKLRVEYQPLGTIGLISPWNFPVVLTFGPLGSIFAAGNRVMIKPSEFTPRTSDLMKQMFEDNFTEEEVAVVTGGPEVGADFSSLPFDHLLFTGATSVGKHVMRAASENLVPVTLELGGKSPVIVSDTSDVRTSSKRIIAGKTMNAGQICLAPDYVLIPENKLDQFISHVKETVTDLFPTIKDNDDYTSVINERHYSRLTSYIDEAKEKGCEIIEINPANEDFEQQEHYKIPPTLLINPDDNLKVMQEEIFGPILPVKTYEKFEETIDYVNKKDRPLGLYYFGSNNDELNTVIEKTTSGGVTVNDVIFHVAQDNAPFGGVGPSGMGSYHGEEGFKNFSHAKTVFTQTKLDSVISVFRPPYGSKAKKALKAQIKP

SEQ ID NO: 93411 - protein, 392 aa, Unknown
  Bacterial polypetide isolated from the Sargasso Sea
DAITTELGCPKDWCSANQTSSGAGHIEDFIKRLKDFEFEPGFDKGSTNHIVYEPIGVCGLITPWNWPINQIALKVIPAFATGCTMVLKPSEIAPLSGMLFAEMIDEAGFPAGVFNLVNGDGPGVGTDLSGHPDVDMVSFTGSTRAGKLITKNAAETIKRVCLELGGKGGNIVFADAYPDAVRDGIRNVMSNSGQSCDAPTRMLVEKSIYKRAVEEAADEANKIKVDLASKAGDHIGPVISKTQFDKIQSLINSGIEEGATLVAGGPDKPEDLKKGYFIKPTVFTDVNNNMRIAKEEIFGPVLSIIPFENEEEAIQITNDTEYGLGNYLQTEDKEKAKRVSKKLRSGIVYVNHKAADSGTPFGGYRQSGNGREGGTWGLHEYLEVKTITEWKN

SEQ ID NO: 93412 - protein, 260 aa, Unknown
  Bacterial polypetide isolated from the Sargasso Sea
DKIAFTGSTHVGQKIIEASAGNIKRLSLELGGKSPHIIFADADLDAAVPAAAMAVFANSGQICSAGTRLFVQEAVYDEFVEKVAAFGNALRVGDPADPGTQLGPLVSEQQLARVAGYLRAGQDEGATLLGGGLPAGQSELSNGFFVRPTVFANVRDEMRIAKEEIFGPVISTLRFSDTADVIARANTSDFGLGGGVWTRSLATAQQVTRGLRTGSVWVNCYQAMDPAVPFGGYKMSGYGRESGREHVEEFLNTKAVWINA

SEQ ID NO: 93413 - protein, 416 aa, Unknown
  Bacterial polypetide isolated from the Sargasso Sea
TTKEERIKLLENLLSVYKKRFNEMTEAISKEMGAPMDWSSNVQNASGQSHLEDFIIRLKNFKFDKQFDSKSNNQIFYEPIGVCGLITPWNWPINQIALKVIPALATGCTMILKPSEIAPVSAMLFAEMIHEAGFPPGVFNLVNGDGEGAGTFISGHPDIDMVSFTGSTRAGKLITKNAADTIKRVCLELGGKGGNIVFADSYPNAVRDGIRNVMSNSGQSCDAPTRMLVEKSIYKRAVEEAVDEANKIKVDVASKKGDHIGPVVSKVQYDKIINLIKDGINEGATLAAGGPEMPNGLNKGYFIKPTIFTDVTNDMQIAKKEIFGPVLSIIPFETEEEAISVTNDTEYGLGNYLQTEDKEKAKRVSKKLRSGIVYINGNSPDSGTPFGGYKQSGNGREGGSWGLEEYLEVKTITGWK

SEQ ID NO: 93414 - protein, 308 aa, Unknown
  Bacterial polypetide isolated from the Sargasso Sea
MIHKPSEIAPLSAMLFAEMIDEAGFPPGVFNLVNGDGVGVGTDISSHPDINLVSFTGSTRAGKLILKNGAKTIKRVCLELGGKGGNIVFADSYPNAVRDGIRNVMSNSGQSCDAPTRMLVEKSIYDRAVKEAVDEANLIKVDHASKKGDHIGPVVSKVQYDKIINLIQSGIDEGATLAAGGPELPGGLNKGYFIKPTIFTDVTNDMRIAKEEIFGPVLSIIPFETEDEAVNIVNETEYGLGNYLQTEDKEKAKRVARRLNAGTIYINGNGADSGTPFGGFKQSGNGREGGVWGLEEYLEVKTVTGWPS

SEQ ID NO: 93415 - protein, 208 aa, Unknown
  Bacterial polypetide isolated from the Sargasso Sea
MSTQQATSSKVSSSLDTSHLKVKFPFKNKYGNYINGKFVEPKSGKYFDNTTPITNEVICKVPRSNEKDVDFALDAAHAAFPAWGKTSITERSNILLKIADVIEKNLNVLATAECLDNGKPIRECMAADLPLVIDHWRYFAGVIRAEEGSVAEISNSEYSYHIPEPLGVVGQIIPWNFPLLMATWKLAPALAAGNCVVLKPAEQTPASI

SEQ ID NO: 93416 - protein, 486 aa, Unknown
  Bacterial polypetide isolated from the Sargasso Sea
MAIKRKKIAKSKTNKKRIKLVKASRKKIRTKKKVVTKKSATKKRSKKSRKNNKLKKTNKRGKIRKMSTETMKSASSPLLDTSHLKVPFPYKAKYGNYINGKFVEPKSGKYFDNTTPINNEVICSVARSDAKDVEAALDAAHAAFPTWGKTSITERSNILIKIADVIEKNLEKLATAECLDNGKPIRECMAADLPLVVDHWRYFAGVIRAEEGSVAEISNNEYSYHIPEPLGVVGQIIPWNFPLLMATWKLAPALAAGNCVVLKPAEQTPASIMLLMELIGDLLPAGVVNVVSGFGLEAGKPLASSKRIKKIAFTGETTTGRLIMQYASQNLIPITLELGGKSPNIFFEDVMDKDDDFFDKCMEGFAMFTLNQGEVCTCPSRVLVQESIYDKFMEKAIARTKAVKQGNPLQMETMIGAQASVEQMEKIKSYLDLGKKEGAKVLCGGNVAKVNSGLEKGNFIEPTIFEGNNSMRIFQEEIFGPSSICY

SEQ ID NO: 93417 - protein, 369 aa, Unknown
  Bacterial polypetide isolated from the Sargasso Sea
MATKRKKRAKPKTNKKKTKLVKSSRKKIRTKKKVRTKKSATKKRSKKSRKNNKLKSIKKTGGVKKMSAEAMKVSSVLDTSHLKVKFPFKAKYGNYINGKFVEPKSGKYFDNTSPISNEVICSVARSNEKDVDAALDAAHAAFPTWGKTSITERSNILLKIADVIEKNLNVLATAECLDNGKPIRECMAADLPLVIDHWRYFAGVIRAEEGSVAEISNSEYSYHIPEPLGVVGQIIPWNFPLLMATWKLAPALAAGNCVVLKPAEQTPASIMLLMELIGDLLPPGVVNVVSGFGLEAGKPLASSKRIKKIAFTGETTTGRLIMQYASQNLIPITLELGGKSPNIFFEDVMAKDDDFFDKCLEGFAMFTLN

SEQ ID NO: 93418 - protein, 188 aa, Unknown
  Bacterial polypetide isolated from the Sargasso Sea
VASTYQSVSGAGKAGMDELISQTKEVLENKDVESKNFTKQIAFNAIPHIDSFLENGSTKEEQKNHDEVKKILDSKINITSTCVRIPVLVSHSISVNVEFNKKHDLEEIRNVLSSSPGCKVVDEHKDGGYITPVEAEDKFETFISRIREDSSQPNSINLWVVSDNLLKGAALNAVEIAEALVEKDFYGK

SEQ ID NO: 93419 - protein, 129 aa, Unknown
  Bacterial polypetide isolated from the Sargasso Sea
KEELKMRQETHKILSSEISFSATCVRVPVFIGHSEAVNIEFENKISVEEAREAIKNAPGCTLLDERADGGYVTPKECAGNDDTYVSRIREDTSTKNGLSIWVVSDNLRKGAALNTIQIAEMLIEEHLSK

SEQ ID NO: 93420 - protein, 129 aa, Unknown
  Bacterial polypetide isolated from the Sargasso Sea
YSLEEMKMVWETYKIFEDKSIEVNPTAVRVPVRFGHSEAIGVVTENHLSIGQIRGLLSESSGIQLMDDDESYPMPAREGEGTDAVYIGRIRADLNHSNGVNLWVVADNIRKGAALNSIQIAETIIESNY

SEQ ID NO: 93421 - protein, 167 aa, Unknown
  Bacterial polypetide isolated from the Sargasso Sea
SQTKDYLDNKNIKSKNFTKQMAFNLIPHIDAFVDDGYTKEEWKMENETKKILDNNIGLSATCVRVPVKTSHSEAVNIEFENEYDLETVKKLLISAPGCKVVDEPKDGGYITPLEAEGDYLTFISRIRKDHSNKKAINIWIVSDNLLKGAALNSIQIAECLIKNLKNS

SEQ ID NO: 93422 - protein, 203 aa, Unknown
  Bacterial polypetide isolated from the Sargasso Sea
VMVIDAINSISKVGKVIVSTYQAVSGTGKEAVNELINQQSGDQSTNVYDFPIANNIFPHVDDFMPDGFTKEEHKMINESKKILHDNEIEIIPTCVRVPVKIGHSESLTISLKNEISLEDIKKVVREYSGITLLDQSDEIPYPMPLFAEGKKDVFVGRIRKSLNNSKELNLWLSCDNLIKGAAYNALQILESMIKKDLIKLGKG

SEQ ID NO: 93423 - protein, 237 aa, Unknown
  Bacterial polypetide isolated from the Sargasso Sea
PDVPLIVPQVNANHLNNINKNIIANPNCSTAQLVIALKPLHDLFTIKRIVVSTYQSVSGGGKAPMDELIEQTKLVLEGKKVKSKNFTKQIAFNAIPHIDVFSEDGYTKEELKMNNETKKILDVKIDLTATCVRLPISISHSESVNVQFEKSFSLEEVKKALDNFEGCKVIDERTDGGYSTPLEAEGRDETFISRIREDKTIKNGLNLWIVSDNLLRGAALNAVEIAETLIKNDFYEK

SEQ ID NO: 93424 - protein, 272 aa, Unknown
  Bacterial polypetide isolated from the Sargasso Sea
MNIAIVGATGNVGRKTLEVFDKKNFKFNNLYLVASEKSAGKKISFRDKEYVIENLETYDFSKADITFFAAGGKIAEKFAEKAAKHTIVIDNSSFFRMDPDVPLIVPQVNAAEIKNMKKNIIANPNCSTAQLVIALKPLHNLFKIKRVVVSTYQSVSGGGKSPMDELIDQTKQYLDGKKIESKNFTKQIAFNVIPHIDVFADDGYTKEELKMTNETKKILDESIELTATCVRIPVLVSHSESVNIEFEKPYTLEKVRDVLSKADGCEVIDKRE

SEQ ID NO: 93425 - protein, 208 aa, Unknown
  Bacterial polypetide isolated from the Sargasso Sea
MKVAVVGVTGMVGSVMLNVLKEFNFPVSKLIPVASIKSAGSSISFNGKNYTVVTLEDAIDMDIDLALFSAGGSVSEEWAPKFAQKGIYVVDNSSFWRMDPNKKLIVPEINGSSLTKEDYIIANPNCSTIQLVLVLFALHKRFKVKRVIVSTYQSISGTGVKAVKQMNNERQGIKSEMAYAYPIDQNCIPQCDDFLENDYTKEEMKLTN

SEQ ID NO: 93426 - protein, 262 aa, Unknown
  Bacterial polypetide isolated from the Sargasso Sea
LTYMNIAIVGATGNVGRKLLEVIEKLNFDFSELHLIASDKSIGKKITFKNKTYSIVGLKDFDFSKVKIAFFSAGSVIAEKWAPIAAKKTIVIDNSKYFRMDKDIPLVVPEVNSATLKNYKNKNIIANANCSTIQLVLALKPLHDKFKIKRVIVSTYQSVSGAGNAQMNELEEQSKKVLDKQKVKSKNFTKQIAFNVIPHIDSFMEDRYTKEEWKMTVETKKILDPNISLSATCVRVPVFIGHAESLNVEFNSEVDAKKIRDC

SEQ ID NO: 93427 - protein, 301 aa, Unknown
  Bacterial polypetide isolated from the Sargasso Sea
MKKLKDLAIIGATGLVGHTFISLFEEGFFPNAKIHLVASERSKGKEIEIRGIKHEVKSLKEFDFSSVQLALFSAGASTAKEYAPKALKQNCIVIDNSSCFRYEDDVPLIVPEVNSYILDSSIFKGLVANPNCSTIQMLAAIKPIHDEFEIKKINVTTFQAVSGTGKEAQEELVSQSSSKLNNPELDLTTEVYEKPIAFNAIPHCDDFQENRYTKEEMKMVWETNKILDAAIEVNPTCVRVPVLNGHSESVHLTTKKKINLDKVINLLRATKGVKVFYGEGPEDYPTALIDADGNNDVMVGR

SEQ ID NO: 93428 - protein, 204 aa, Unknown
  Bacterial polypetide isolated from the Sargasso Sea
QLVMALSPLHREFNIKRVVVSTYQAVSGAGKEAMDELFNQTKKVYVNDPLEKNVFTKEISFNVIPHIDVFLEDGFTKEEVKMRDETKKILDESIDVVAHCVRVPVFVGHSEAVFIECENPMDEELARDVLSDTEGVIIIDHRVDEGYITPKEAAGEDGVYLSRIRVDNSVPSGLVFWCVSDNLRKGAALNAVQIAELAVSQGLK

SEQ ID NO: 93429 - protein, 240 aa, Unknown
  Bacterial polypetide isolated from the Sargasso Sea
EIIVEDLSEFDFSKAHISLFSPGGKISAEYAPKAAKAGSIVIDNTSHFRMQQNIPLIVPEVNADVLDEFFDNENRTNIISNPNCSTIQMVVALKPLHEKAIINRVVVSTYQAVSGAGKTGMDELFKQTQNVYANQELKKDKFTKQIAFNAIPHIGAFLENGNTEEEQKMIDETKKILDKGINVSATCVRTAVFIGHSEAINIEFDSPIDEKEAKEILSKSEGISVIDHRKDEGYITPVEI

SEQ ID NO: 93430 - protein, 230 aa, Unknown
  Bacterial polypetide isolated from the Sargasso Sea
TLDEFFQDEERTNIISNPNCSTIQMVVALKPLHEKSIINRVVVSTYQAVSGAGKTGMDELFNQTQSVYANQELKKEKFTKQIAFNAIPHIGAFLENGNTEEEQKMIDETKKILDEGIKVSATCVRTAVFIGHSEAINIEFDSPLDAKEAHDILSKSDGVSVIDHRKDEGYVTPVEIAGEDKVYISRIRNDDSIDNGLSLWVVSDNLRKGAALNAVQIAETIIKDYDQYIQ

SEQ ID NO: 93431 - protein, 216 aa, Unknown
  Bacterial polypetide isolated from the Sargasso Sea
IIANANCSVIPIVVALKPLHDLYNVKRIVASTYQSVSGAGKAGMDELISQTKEVLENKDVESKNFTKQIAFNAIPHIDSFLENGSTKEEQKNHDEVKKILDSKINITSTCVRIPVLVSHSISVNVEFNKKHDLEEIRNVLSSSPGCKVVDQQKDGGYITPVEAEDKFETFISRIREDSSQPNSINLWVVSDNLLKGAALNAVEIAEALVEKDFYGK

SEQ ID NO: 93432 - protein, 184 aa, Unknown
  Bacterial polypetide isolated from the Sargasso Sea
YQAVSGAGRPAMDELFNQTKSIYVNDAVQPEIFTKQIAFNAIPHIDVFCDDGFTKEEWKMTAETKKILDPTIELVAHCVRIPVFVGHSEAVFIETQHPMTEKAVRGLLGDAPGVIVIDHRANEGYVTPHEAAGEDAVYISRIRQDPTVRNGMVFWCVSDNLRKGAALNSVQIAELIAAQDIRGR

SEQ ID NO: 93433 - protein, 220 aa, Unknown
  Bacterial polypetide isolated from the Sargasso Sea
MSLNIAIVGATGNVGREMLNILSDRKYNSSKIFPVASSKSEGTKVEFGDKELTVEAIDKFDPAKVDLALFSAGASVSKEWAPKFTEKNCIVIDNSSQFRMDKDVPLIVPEVNPDAIKNYKIKNIIANPNCSTIQLVVALKPLHEISNIKKVIVSTYQSVSGAGKAGMDELFDQTKNMFSDEIKDNVKFTKPIAFNVIPHIDKFMDDGYTKEELKMNQETK

SEQ ID NO: 93434 - protein, 163 aa, Unknown
  Bacterial polypetide isolated from the Sargasso Sea
MKNVVIAGATGAVGNEFLKLLEAREFPVKNLRLLASARSIGKKLEFLGEKIPVEQLTSKSFSGVDLAFFSAGRESSKVYIPHAVESGTVVIDNSSAFRMDPDVPLVVPEINPESAFKHKGIIANPNCSTIQMVVALNPLHKAALVNRVVVSTYQSTAGAGAKG

SEQ ID NO: 93435 - protein, 133 aa, Unknown
  Bacterial polypetide isolated from the Sargasso Sea
CFDGYTKEEWKMENETKKILDKKINLTATCVRVPIKTSHSESINVEFKKKYNFKRLKEILKKTPGCKVVDERKNGGYITPLEAEGNYKTFISRIRKDSSKKNAINLWVVSDNLLKGAALNTVQIAEKLVNKDF

SEQ ID NO: 93436 - protein, 195 aa, Unknown
  Bacterial polypetide isolated from the Sargasso Sea
LYGIKRIVISTYQSVSGAGKAAMDELLSQTRDFLDKKKLAPKNFTKQIAFNAIPHIDSFLEDGSTKEEQKNHDEVKKILDKKIKITSTCVRIPVLVSHSISTNVEFHKKYDLNEIKKVLSSSPGCKVVDEHKDGGYITPVEAENKYETFISRIREDFSNENSINLWIVSDNLLKGAALNAVEIAESLIKNDFYGR

SEQ ID NO: 93437 - protein, 219 aa, Unknown
  Bacterial polypetide isolated from the Sargasso Sea
MGYRVAVVGATGAVGREMLQTLAERRFPANKIYALASAKSAGREVSYGEDQTLIVESLEKFDFGTADIALFSAGGDTAKAFAPKAGAAGCIVIDNSSAFRMDDDVPLIVPEVNADTVEKCLIKNKGRNIIANPNCSTAQLVVALKPLHDAFCVRRVVVSTYQAVSGAGKPAMDELFNQTRAIYVNDTVQPEIFTKQIAFNAIPHIDVFLDDGFTKEEWK

SEQ ID NO: 93438 - protein, 224 aa, Unknown
  Bacterial polypetide isolated from the Sargasso Sea
MAHVKNKNIIANANCSVIPLVVALKPLHDLYKVKRIVVSTYQSVSGAGKAPMDELLSQTQDYFNNKNLQSEHFTKQIAFNIIPHIDSFLENGYTKEEQKTSDEIKKILDKKIQITSTCVRIPVLVSHSISANVEFDKKCNLEEIKNVLSSSPGCKVVDEHKDGGYITPVEAENKYETFISRIRKDDSQSNTINLWIVSDNLLKGAALNAVEIAESLIKKNLHER

SEQ ID NO: 93439 - protein, 167 aa, Unknown
  Bacterial polypetide isolated from the Sargasso Sea
AQSRDFLNKKKILSKNFTKQIAFNLIPHIDKFMDQGYTKEELKMVNETKKILDSKIKITATCVRVPVMTSHSESINVEFEKSFDIEKIKDILNNSEGCKVLDERKDGGYITPIEAENNYLTFISRIRKDNSNDKALNMWVVSDNLLKGAALNTVQIAEKLIKDYYGK

SEQ ID NO: 93440 - protein, 210 aa, Unknown
  Bacterial polypetide isolated from the Sargasso Sea
CSVIPLVVVLKPLHDLYNVKRIVVSTYQSVSGAGKDPMDELLSQTQEFLQNKKIESKHFTKQIAFNAIPHIDSFLEDGYTKEEQKTNDEVKKILDNKIKITSTCVRIPVLVSHSLSVNVEFNKKYKLDEIKNVLSTSPGCQLVDEHKDGGYITPVEAENKFETFISRIREDKSQPNSINLWIVSDNLLKGAALNAVEIAESLVEKDFYGK

SEQ ID NO: 93441 - protein, 219 aa, Unknown
  Bacterial polypetide isolated from the Sargasso Sea
NKNIIANANCSVIPIVVALKPLHDLYSIKRIVISTYQSVSGAGKAAMDELLIQTKDFLDKKKLAPINFTKQIAFNAIPHIDSFLADGSTKEEQKNHDEVKKILDKRIKITSTCVRIPVLVSHSISTNVEFHKKYDLNEIKKVLSSSPGCKVVDEHKDGGYITPVEAENKYETFISRIREDFSNDNSINLWIVSDNLLKGAALNAVEIAESLIKNDFYGK

SEQ ID NO: 93442 - protein, 289 aa, Unknown
  Bacterial polypetide isolated from the Sargasso Sea
KISLNLIFKSSYRFFSPVYKISAEYAPKAANAGCIVMTNTSHFRMQKNIPLIVPEVNANTLEEFFQNEERTNIISNPNCSTIQMVVALKPLHEKSIINRVVVSTYQAVSGAGKTGMDELFNQTQNVYANQELKKEKFTKQIAFNAIPHIGAFLENGNTEEEQKMIDETKKILDEGIKVSATCVRTAVFIGHSEAINIEFDSPMDSKEAHDILSNSDGISVIDHRKDEGYITPVEIAGEDKVYISRIRNDDSIDNGLSLWVVSDNLRKGAALNAVQIAETIIKDYDQYIQ

SEQ ID NO: 93443 - protein, 192 aa, Unknown
  Bacterial polypetide isolated from the Sargasso Sea
VFKIKRIIVSTYQSVSGAGKDSMDELIDQTKLALDKKKIKSINFTKQIAFNAIPHIDVFLDNGYTNEEMKMINETKKILDKDINVTATCVRVPVLVSHAESVNIEFEKKFTLEKVIKLLNTAEGCKVINDPRDGGYITQLEAEGKDETFISRVRKDNTNEKAINLWIVSDNLLRGAALNAVEIAEAYIKTKK

SEQ ID NO: 93444 - protein, 98 aa, Unknown
  Bacterial polypetide isolated from the Sargasso Sea
HKKFNIKRVVVSTYQAVSGAGKAARDELMSQTKDFLEKKKIKSTNFTKQIAFNLIPHIDVFVEDGYTKEEWKMENETKKILSEKIKVSATCVRVPVIT

SEQ ID NO: 93445 - protein, 234 aa, Unknown
  Bacterial polypetide isolated from the Sargasso Sea
AVGTEIVQILEQRNFPIDNLYLLASSKSKGKKVEFKDKEIVVEDLSEFDFSKAHIGLFSPGGKISAEYAPKAAKSGCIVIDNTSHFRMQQNIPLIVPEVNANALDEFFDDENRTNIISNPNCSTIQMVVALKPLHEKAIINRVVVSTYQAVSGAGKTGMDELFNQTQNVYANQELKKEKFTKQIAFNAIPHIGAFLENGNTEEEQKMIDETKKILDEGINVSATCVRTAVFIGH

SEQ ID NO: 93446 - protein, 277 aa, Unknown
  Bacterial polypetide isolated from the Sargasso Sea
MGYNLAIVGATGAVGREMLQTLSERNFPVNNIYALASKSSVGKEVSYGETKVLKVLNLEEFDFSKVHIALFSAGSEIAKKFAPIAGNQGCISIDNSSCFRMAQDIPLIVPEVNPEHVFDFSKRNIIANPNCSTIQMVVALAPLHKKYKIKKVFVSTYQAVSGAGKLAMDELFNQTKGVYVNDTSTPEQFTKKIAFNVIPHIDSFLEDGFTKEEWKMNVETKKILDPNIEVTAHCVRVPVFIGHSESVFVECENNVDENEARNLLKQSKGITVIDHRA

SEQ ID NO: 93447 - protein, 245 aa, Unknown
  Bacterial polypetide isolated from the Sargasso Sea
MTKEYNVAVAGATGAVGSEIIQILEQRNFPIDNLYLLASSKSKGKKLEFKEKNIIVEDLAEFDFSKVHIGLFSPGGKISAEYAPKAAKAGCIVIDNTSHFRMQKNIPLIVPEVNSNTLEEFFQDEERTNIISNPNCSTIQMVVALKPLHEKSIINRVVVSTYQAVSGAGKTGMDELFNQTQNVYANHELKKEKFTKQIAFNAIPHIGAFLENGNTEEEQKMIDETKKILDEGIKVSATCVRTAVF

SEQ ID NO: 93448 - protein, 240 aa, Unknown
  Bacterial polypetide isolated from the Sargasso Sea
MQKNIPLIVPEVNANTLEEFFQDEERINIISNPNCSTIQMVVALKPLHEKSIINRVVVSTYQAVSGAGKTGMDELFNQTQNVYANQELKKEKFTKQIAFNAIPHIGAFLENGNTEEEQKMIDETKKILDEGIKVSATCVRTAVFIGHSEAINIEFDSPIDSKEAHDILSNSDGISVIDHRKDEGYVTPVEIAGEDKVYISRIRNDDSIDNGLSLWVVSDNLRKGAALNAVQIAETIIKDY

SEQ ID NO: 93449 - protein, 237 aa, Unknown
  Bacterial polypetide isolated from the Sargasso Sea
MSYNVAVVGATGAVGREMLQTLSERNFPINNIYALASKSSVGKEISYGESKVLKIINLEDFDFSKVSMALFSAGSDTAKKYAPIAAKKGCVSIDNSSCFRMEKDIPLVVPEVNPEHILDFSKRNIIANPNCSTIQMVVALAPLHKKYKIKKVFVSTYQAVSGAGKLAMDELFNQTKGIYVNDTAIPEQFTKKIAFNVIPHIDSFVEDGFTKEEWKMNVETKKILDASIEVTAPLCEG

SEQ ID NO: 93450 - protein, 238 aa, Unknown
  Bacterial polypetide isolated from the Sargasso Sea
IDNSKFFRKDPQIPLVVPEVNSKELAHVKHKNIIANANCSVIPIVVALKPLHDLYSVKRIVASTYQSVSGAGKEAMDELISQTKDYLKDKEINSKNFTKQIAFNAIPHIDAFLENGSTKEEQKNHDEIKKILDKKINVTSTCVRIPVLVSHSISINVEFNKKYNLDEIRNVLSSSPGCKVIDKKIDGGYITPVEAENKYETFISRIREDNSQPNTINMWIVSDNLLKGAAKNAVEIAE

SEQ ID NO: 93451 - protein, 170 aa, Unknown
  Bacterial polypetide isolated from the Sargasso Sea
ELITQSKDFLSGKKISSQNFTKQIAFNLIPHIDEFVEEGYTKEEWKMINETRKILDPTIKLTATCVRVPVMVSHSESINVEFEKAFDIESVKRILNKSTGCKVLDERKNGGYITPLEAEDSHMTFISRLRKDSSNEKALNMWVVSDNLLKGAALNTVQIAEKLIKDYYAK

SEQ ID NO: 93452 - protein, 313 aa, Unknown
  Bacterial polypetide isolated from the Sargasso Sea
LADTLSACGLEKNQYQIKLSNRKLIQGLIENLKISEDRQQLTVLRAIDKLDRVGTDGVKQLLTTGREDKSGDKTIGAKLSDNQAEEILSFINMKSLDKIKSTIPNKLVEDGVDELNEVLDGLNYSSNFNQIIFSPEVIRGLEYYDGPIFEANLTFKVKNQKNQEVEFGSVGGGGRYNSLVSRFKKVDLSATGVSIGLDRLLYALVQLNKIEVKNNSPIIICVLDKKYLSNYYKLLSQLRNQNIKSEVYLGDSGLKSQLKYADKRSSPAVILCGDNEFKDDKITIKKLNSNLDETSKNLSREEWKNLKILKLHS

SEQ ID NO: 93453 - protein, 289 aa, Unknown
  Bacterial polypetide isolated from the Sargasso Sea
LEVFDKKNFKFDNLYLVASEKSAGKKIPFRDKEYVIENLETYDFSKADITFFAAGGKIAEKFAEKAAKHTIVIDNSSFFRMDPDVPLIVPQVNAAEIKNMKKNIIANPNCSTVQLVIALKPLHNLFKIKRVVVSTYQSVSGGGKSPMDELIDQTKQYLDGKKIESRNFTKQIAFNVIPHIDVFADDGYTKEELKMTNETKKILDESIELTATCVRIPVLVSHSESVNIEFEKPYTLEKVRDLLSKADGCEVIDRRENGGYSTPFEAAGSDETFISRIREDKTKKNSLNL

SEQ ID NO: 93454 - protein, 224 aa, Unknown
  Bacterial polypetide isolated from the Sargasso Sea
MNLAIIGATGNVGRKTIEILEKSKIKISELFLVASEKSEGKKIKFKGKEIKIQNLKNFDFSSATITFFAAGGKIAEKWVPKASKKTIVIDNSSFFRMDKDVPLIVPEVNLEKLSTYKNKNIIANPNCSTIQMVVALKPLHDHFSIKRVIVSTYQSVSGAGKAPMDELVNQTKEFLDGKKINSKNFTKQIAFNLIPHIDEFVKEGYTKEEWKMVNETKKILDPKN

SEQ ID NO: 93455 - protein, 138 aa, Unknown
  Bacterial polypetide isolated from the Sargasso Sea
IDIFTDNKFTKEEMKMVNETNKILDKNINVNATCVRVPSYMGHAESIYIELEKDISIEDLERALKNAEGIKYSNSDYHTPIDSEGEDWVYVSRLRKDIYKNNIFNLWVVADNLLKGAALNSVQIGESLIKKKIMSNNE

SEQ ID NO: 93456 - protein, 155 aa, Unknown
  Bacterial polypetide isolated from the Sargasso Sea
KVKSKNFTKRIAFNIIPHIDQFVDDGYTKEELKMEMETKKILDNNIKVSATCVRVPVFNSHSESVNVEFKKKHNLDIVKKILRKTPGCKLIDNRKDGGYITPAEASGNYKTFISRVRKDRSRKNAINLWIVSDNLLKGAALNSVQIAEAITKIKK

SEQ ID NO: 93457 - protein, 212 aa, Unknown
  Bacterial polypetide isolated from the Sargasso Sea
ANCSVIPLVVALKPLHDLYIVKRIVASTYQSVSGAGKAPMDELLSQTKEHFDNKNLQSKYFTKQIAFNAIPHIDNFLESGYTKEEQKTTDEVKKILDKKIKITSTCVRIPVLVSHCISANVEFDKKYNLVEIKNVLSTSPGCKVVDEHRDGGYITPAEAENKFETFISRIRKDDSQPNTINLWIVSDNLLKGAALNAVEIAECLIQNNLYGK

SEQ ID NO: 93458 - protein, 166 aa, Unknown
  Bacterial polypetide isolated from the Sargasso Sea
LINQTRAWANGDTLEISSFPSQILFNLFPHVDIFMENGYTKEEMKMVNETKKIMNAPNMGISATCVRVPVLRSHSEAVWIETEKKITPEEARKILKKAPGLIVRDEPENGGYPMPWDVDKTVETFVGRIREDFSHPKGLTFWVVADNLNKGAALNSIQIAEVLEAG

SEQ ID NO: 93459 - protein, 215 aa, Unknown
  Bacterial polypetide isolated from the Sargasso Sea
HCLVIDNSSFYRMDPDVPLIVPQVNSSHLNQIKKNIIANPNCSTAQLVIALKPLHDLFVIKRIVVSTYQSVSGGGKAPMDELIEQTKLVLNGEEVKSKNFTKQIAFNAIPHIDVFSEDGYTKEELKMTNETKKILDNKIDLTATCVRLPISVSHSESVNLQFEKPFSLEKVREALNNFEGCKVLDKRVDGGYSTPLEAEGKDETFISRIREDKTI

SEQ ID NO: 93460 - protein, 248 aa, Unknown
  Bacterial polypetide isolated from the Sargasso Sea
ELLEKRSLSIDHLYLVASSKSSGKKISFKGKDHEVFDLETFDFSKVKISFFAAGGIISEKFAEKAAKHCLVIDNSSYYRMDPDVPLVVPQVNSNDLKNIKKNIIANPNCSTAQLVIALKPLHDLFVIKRVVVSTYQSVSGGGKAPMDELIEQTKLVLSKKKVKSKNFTKQIAFNAIPHIDVFSNDGYTKEELKMSNETKKILDDKINLTATCVRLPISVSHSESVNLQFEKPFSLEKVKEALNDFEGC

SEQ ID NO: 93461 - protein, 129 aa, Unknown
  Bacterial polypetide isolated from the Sargasso Sea
MTVETKKILDPKIKVTATCVRVPVFIGHAEAVNLQFSKEVSAKDAREVLGDAPGVVIVDHRANEGYVTPEEVAGEDAVYVSRIREDATIENGLNLWVVSDNLRKGAALNAIQIAELLDRDHLKKAIAAE

SEQ ID NO: 93462 - protein, 128 aa, Unknown
  Bacterial polypetide isolated from the Sargasso Sea
EELKMRQETHKILNNEISFSATCVRVPVFIGHSEAVNIEFENKISVEEAREAIKNAPGCTLLDERADGGYVTPKECAGNDDTYVSRIREDTSTKNGLSIWVVSDNLRKGAALNTIQIAEMLIEEHLSK

SEQ ID NO: 93463 - protein, 170 aa, Unknown
  Bacterial polypetide isolated from the Sargasso Sea
MNIAIVGATGNVGRKTLEVLEKKEISIDNLYLVASPKSAGKKIKFHGKEIEVNNLENFDFSKVKIAFFAAGGKISESFAEKAAKYCLVIDNSSFFRMDPDVPLVVPQVNSSDLNNIKKNIIANPNCSTAQLVIALKPLHDLFVIKRIVVSTYQSVSGAGKASMDELFEQT

SEQ ID NO: 93464 - protein, 198 aa, Unknown
  Bacterial polypetide isolated from the Sargasso Sea
SPIHKEFVIDFLNVATYQAVSGTGKQAVQELQNQIKDKTSRQEVYPKQIAFNVIPQCDIFLDNDFTKEEMKLVWETKKILDSSIEVQATCVRVPVLNGHSEAVFFRTKKESSRNQIIELLSNEPGIDVIDNPKSLEYPTPLENANDTEDVYVGRIRSQSINHENWISMWIVADNVYGKGAALNTVQILESLVEKNKLC

SEQ ID NO: 93465 - protein, 284 aa, Unknown
  Bacterial polypetide isolated from the Sargasso Sea
MICEKFDFSKVKIAFFAAGSAIAEKWANIVAEKTIVIDNSKFFRKDPDIPLVVPEVNSKELVQVKNKNIIANANCSVIPLVVALKPLHDLYNVKRVVVSTYQSVSGAGKAPMDELLSQTKEYFNNKNLESKFFTKQIAFNIIPHIDSFLENGYTKEEQKTTDEVKKILDKKIKISSTCVRIPVLVSHSISANVEFERQCNLEEIKSVLSSSPGCKVVDEQKDGGYITPVEAENKYETFISRIRKDDSLQNTINLWIVSDNLLKGAALNAVEIAESLVEKNLHER

SEQ ID NO: 93466 - protein, 204 aa, Unknown
  Bacterial polypetide isolated from the Sargasso Sea
STIQMLVALKPLLYEFVIERIDVTTFQAVSGTGKLATEELINQIDAYKGSMKPNSFIYAKPIANNVLPHCDEFEENRYTKEENKLVKETKKILDPDIKVAATCVRVPVLNGHSESVHIQTKKPIAEDLALKLLKEAPGLSIRYGESEDDYPTAFTDGAGNGLVHVGRIRKDLWEENRLNLWVVADNLLKGAALNSIQIATLLFD

SEQ ID NO: 93467 - protein, 168 aa, Unknown
  Bacterial polypetide isolated from the Sargasso Sea
MQTKGIYVPGQEVAPKNFTKQIAFNVIPHIDNFLPDGQTKEEWKMAAETKKILDSKIKVTATCVRVPVFVGHAESINIEFEKPMEESEAREILRHSEGILVVDKKEDGGYISPIECVGDYNTFVSRIRQDSTIENGLNIWCVSDNLRKGAALNAVQIAELYINKFKLN

SEQ ID NO: 93468 - protein, 89 aa, Unknown
  Bacterial polypetide isolated from the Sargasso Sea
PLIVPEVNPLDIDNYKNKNIIANPNCSTAQMVVALKPLHDRAIIKRVVVSTYQSVSGAGKGAMRRVMSCKQKEYMCQVKKLRQKILRNK

SEQ ID NO: 93469 - protein, 162 aa, Unknown
  Bacterial polypetide isolated from the Sargasso Sea
PNCSTIQMMVALKSIQEAVGISRINVCTYQSVSGAGKDAMEELAKQTAGLLNAREVKPDAFSRQIAFNAIPQIDAFQDNDYTKEEMKMVWETQKIMGDNSILVNATAVRVPVFYGHAEAIHLETHSPIDAEQVKQLLADAPGVTLYESAEQFPTQVSSASGN

SEQ ID NO: 93470 - protein, 277 aa, Unknown
  Bacterial polypetide isolated from the Sargasso Sea
FSKVKIAFFAAGSAVAEKWANKAAEKTIVIDNSKFFRKDPDIPLIVPEVNSKELVYVKNKNIIANANCSVIPLVVALKPLHDLYIVRRIVASTYQSVSGAGKASMDELLSQTQDYFNNKNLQSENFTKQIAFNVIPHIDSFLENGYTKEEQKTSDEVKKILDKKIKITSTCVRIPVLVSHSISANVEFEKKINLDEIRNVLSTSPGCKVVDEQRDGGYITPVEAENKYETFISRIRRDDSQSNTVNLWIVSDNLLKGAALNAVEIAESLVKKNLHDR

SEQ ID NO: 93471 - protein, 111 aa, Unknown
  Bacterial polypetide isolated from the Sargasso Sea
DPDIKVAATCVRVPVLNGHSESVHIQTKKPIAEDLALKLLKEAPGLSIRYGESEDDYPTAFTDGAGNGLVHVGRIRKDLWEENRLNLWVVADNLLKGAALNSIQIATLLFD

SEQ ID NO: 93472 - protein, 292 aa, Unknown
  Bacterial polypetide isolated from the Sargasso Sea
FSGKEHTIIDLEKFDFSKVKVAFFAAGSAIAEKWAHVAAEKTIVIDNSKFFRKDPDIPLIVPEVNSKELIHVKNKNIIANANCSVIPLVVALKPLHDLYNVKRIVVSTYQSVSGAGKDPMDELLSQTQEFFQNKKLESKYFTKQIAFNAIPHIDSFLEDGYTKEEQKTNDEVKKILDNKIKITSTCVRIPVLVSHSLSVNVEFNKKYNLDEIKNVLSTSPGCKLIDEHKDGGYITPVEAENKFETFISRIREDKSQPNSINLWIVSDNLLKGAALNAVEIAEALIEKDFYGK

SEQ ID NO: 93473 - protein, 219 aa, Unknown
  Bacterial polypetide isolated from the Sargasso Sea
MTQEYNVAVAGATGAVGSEIIQILEQRNFPIDNLYLLASSKSKGKKIEFKDKEIIVEDLAEFDFSKAHIGLFSPGGKISAEYAPKAANAGCIVIDNTSHFRMQKNIPLIVPEVNANTLEAFFQDEERTNIISNPNCSTIQMVVALKPLHEKSIINRVVVSTYQAVSGAGKTGMDELFNQTQNVYANQELKKEKFTKQIAFNAIPHIGAFLKTEIPKKNK

SEQ ID NO: 93474 - protein, 202 aa, Unknown
  Bacterial polypetide isolated from the Sargasso Sea
MVIALKPLHEVFKIKRIVVSTYQSVSGAGKGPMDELIDQTKLALDNKKINSKNFTKQIAFNAIPHIDVFSNDGYTKEEMKMINETKKILDNNINVTATCVRVPVLVSHAESVNIEFEKEFTLEKVINLLDNADGCKVVNDQRDGGYMTQLEAAGKDETFISRVRIDNTNEKAINLWIVSDNLLRGAALNAVEIAEAYIKTKQ

SEQ ID NO: 93475 - protein, 236 aa, Unknown
  Bacterial polypetide isolated from the Sargasso Sea
MNIAIVGATGNVGRKTLEVFDKKNFKFDNLYLVASEKSVGKKISFRDKEYVIENLETYDFSKADITFFAAGGKIAEKFAEKAAKHTIVIDNSSFFRMDPDVPLIVPQVNAAEIKNMKKNIIANPNCSTAQLVIALKPLHDLFKIKRVVVSTYQSVSGGGKIPMDELIDQTKQYLDGKKIESKNFTKQIAFNVIPHIDVFADDGYTKEELKMTNETKKILDDSIELTATCVRIPVLV

SEQ ID NO: 93476 - protein, 240 aa, Unknown
  Bacterial polypetide isolated from the Sargasso Sea
RMDPDVPLIVPQVNSNHLDQIKKNIIANPNCSTAQLVIALKPLHDLFVIKRIVVSTYQSVSGGGKAPMDELIEQTKLVLDGKDVKSKNFTKQIAFNAIPHIDVFSDDGYTKEELKMTNETKKILDSKIDLTATCVRLPISVSHSESVNLQFEKPFSLEKIKEALNNFEGCKVVDERADGGYSTPLEAEGKDETFISRIREDKTIENGLNLWIVSDNLLRGAALNAVEIAETLIKNDFYGK

SEQ ID NO: 93477 - protein, 173 aa, Unknown
  Bacterial polypetide isolated from the Sargasso Sea
MNIAIVGATGNVGRKMLEVLEQKKLPIDELYLVASSKSAGKKINFNGKNYEVYNLETFDFSKAQISFFAAGSAISEEYALKAAKDSTVIDNSSFFRMDPDVPLIVPQVNSGDAKNLKKNIIANPNCSTAQLVIALKPLHNLFNIERVVISTYQSVSGAGKASMDELIKQTKQF

SEQ ID NO: 93478 - protein, 167 aa, Unknown
  Bacterial polypetide isolated from the Sargasso Sea
ILNNENISKSVYPHQIAFSLIPQVDDFLEDGYTKEEHKMVNETRKIMHDNNLNISVTCVRVPIFYCHSESVSVDFEDDIDIQEIVNLFSNADGIKLINDGKNENYPTPSMVEGKDDIFIGRIRKDLSSSRGVNFWLVSDNLRKGAALNAVQIMESAIKLGKIPNFVG

SEQ ID NO: 93479 - protein, 178 aa, Unknown
  Bacterial polypetide isolated from the Sargasso Sea
MKNVVIAGATGAVGNEFLKLLEAREFPVKNLRLLASARSIGKKLEFLGEKIPVEQLTSKSFSGVDLAFFSAGRESSKVYIPHAVESGTVVIDNSSAFRMDPDVPLVVPEINPESAFKHKGIIANPNCSTIQMVVALNPLHKAAVVNRVVVSTYQSTAGAGAKGMNELINQTRAWANGD

SEQ ID NO: 93480 - protein, 192 aa, Unknown
  Bacterial polypetide isolated from the Sargasso Sea
RVIVSTYQSTSGAGREQMDELFEQTKDIFANNQIKKKFFTKQIAFNVIPHIDKFLDDGQTKEEWKMEVETQKILDKSIKVSATCVRVPVFIGHGESVNIEFEKEISEDKLRETLKKTPGVSVIDFRQDEGYVTPEECAGEDKVYVSRIRKDKTIKNGISLWIVADNLRKGAALNAIQIGEELLKMKVLKNEK

SEQ ID NO: 93481 - protein, 130 aa, Unknown
  Bacterial polypetide isolated from the Sargasso Sea
DGYTKEELKMTNETKKILDNEIDVSATCVRVPIRTGHSESINIEFDNLYDFENIIKILKNAPGCKVIDERSDGGYMTPLEAEGSYTTYISRIRKDNSNIKAINLWVVSDNLLKGAALNTVQIAECLMKKL

SEQ ID NO: 93482 - protein, 131 aa, Unknown
  Bacterial polypetide isolated from the Sargasso Sea
MDVGLIGWRGMVGTVLLQRMREEDDFKHLNAHFYSTSNPGGEAPKEDSDNGLLKDAFDIETLKKMDMILTCQGGDYTQKVYPELRKAGWKGYWIDAASTLRGEESSVLVLDPINSNQIEKGLSEGKKDLSE

SEQ ID NO: 93483 - protein, 256 aa, Unknown
  Bacterial polypetide isolated from the Sargasso Sea
EKAAKHCIVIDNSSFYRMDPDVPLIVPQVNSDDLKDTKKNIIANPNCSTAQLVIVLKPLHDLFTIKRVVVSTYQSVSGGGKAPMDELIEQTKLVLDGKKVKSKNFTKQIAFNAIPHIDVFSNDGYTKEELKMTNETKKILDDKIDLTATCVRLPISVSHSESVNLQFEKPFSLEKVREALNNFEGCKVIDERVDGGYSTPLEAEGKDDTFISRIREDKTIENGLNLWIVSDNLLRGAALNAVEIAETLIKNNFYGK

SEQ ID NO: 93484 - protein, 299 aa, Unknown
  Bacterial polypetide isolated from the Sargasso Sea
GATGAVGTEFLNILKDHYTGLPQLTLLASARSAGNTIEVNGEAVVIQEATPESFEGVDIAFISVSSEISLDLAPHAVKAGAIVIDDSSAFRMDDTVPLVVPEVNGDDCKWHEGIISIPNCSTTPLVMVLQALRELSEITRVTASTYQSVSGAGSAAMTALTSESTDLMNDKDVNPDKDQIGFNVIPRIDEFLENGYTKEEQKMIDESKKILHLPNLSVSATCARVPVYISHSEAVHIEFKNSVNLEDVRNQLNNFAGITVMDDPKKDIYPMPYDIEGKDDVYVGRIRKDTSVDNGIVLW

SEQ ID NO: 93485 - protein, 295 aa, Unknown
  Bacterial polypetide isolated from the Sargasso Sea
KKLALGIKSMRFLILENFDFSKVKIAFFAAGGKISEKFAEKAAKHCVVIDNSSFYRMDPDVPLIVPQVNSDDLKNNKKNIIANPNCSTAQLVIALKPLHDLFVIKRIVVSTYQSVSGGGKAPMDELIEQTKLVLDGKEIKSKNFTKQIAFNAIPHIDVFSDDGYTKEELKMTNETKKILNSQIDLTATCVRLPISVSHSEAVNLQFEKPFSLEKVREALNNFDGCKVIDERVDGGYITPLEAEGKDETFISRIREDKTIKNGLNLWIVSDNLLRGAALNAVEIAETLINNNFYGK

SEQ ID NO: 93486 - protein, 203 aa, Unknown
  Bacterial polypetide isolated from the Sargasso Sea
VALKPLHDLYNIKRIVASTYQSVSGAGKEAMDELLSQTKDYFDNKEMNSKNFTKQIAFNAIPHIDSFLDNGTTKEEQKNHDEVKKILDKKINITSTCVRIPVLVSHSISINVEFNKKHNLEEIRNVLSSSPGCKVVDEKKDGGYITPVEAENKYETFISRIREDNSQPNTINMWIVSDNLLKGAALNAVEIAESLIKENFYEK

SEQ ID NO: 93487 - protein, 185 aa, Unknown
  Bacterial polypetide isolated from the Sargasso Sea
MKIGIIGATGAVGKVFLGLLPDSNLEISDLKLTASNRSIGKKIKYENKEYTIQEHNDDFYNDLDYVFSSASSEVSKIAAQKSKEHNVIMIDDSSEFRLDEDVPLVVPEINSQELNNHNGIVAIPNCTTTPLAMILDAVRSDYKIKRVIVDTYQAVSGTGNLAIEELLNQTKHYLENGTNSNKKEV

SEQ ID NO: 93488 - protein, 212 aa, Unknown
  Bacterial polypetide isolated from the Sargasso Sea
MTQKYNIAVAGATGAVGSEIIQILEQRNFPIDNLYLLASSKSKGKKLEFKDKEIIVEDLSEFDFSKAHIGLFSPGGKISAEYAPKAANAGCIVIDNTSHFRMQKNIPLIVPEVNANTLEEFFQDEERINIISNPNCSTIQMVVALKPLHEKSIINRVVVSTYQAVSGAGKTGMDELFNQTQNVYANQELKKEKFTKQIAFNAIPHIGAFLEN

SEQ ID NO: 93489 - protein, 267 aa, Unknown
  Bacterial polypetide isolated from the Sargasso Sea
MSGRKTIEILEKSKIEITNLFLVASAKSAGKKIKFKGKEIEIQDLEKYDFSNAKITFFAAGSKIAEQWATKASKKTIVIDNSKFFRMDNDVPLIVPEVNLDQLQNYKKKNIIANANCSTIQMVVALKPLHDHFKIKRVIVSTYQSVSGAGKAPMDELITQSKDFLEGKKISSKNFTKQIAFNLIPHIDEFVDEGYTKEEWKMINETKKILDPNIKISATCVRVPVMVSHSESINVEFEKPFDIKSIKNILNKSSGCKVIDERKDGGY

SEQ ID NO: 93490 - protein, 164 aa, Unknown
  Bacterial polypetide isolated from the Sargasso Sea
NEYDRQVVDSNYPDKEENLFAHNVIPQIGSFENNGYSLEEMKMVWETHKIFEDKSIEVNPTAVRVPVRFGHSEAIGVVTENHLSIGQIRGLLSESSGIQLMDDDESYPMPLREGEGTDAVYIGRIRADLNHSNGVNLWVVADNIRKGAALNSIQIAETIIESNY

SEQ ID NO: 93491 - protein, 200 aa, Unknown
  Bacterial polypetide isolated from the Sargasso Sea
MTQEYNIAIAGATGAVGSEIIQILEQRDFPIDNLYLLASSKSKGKKLKFKDKEIIVEDLAEFDFSKAHIGLFSPGGKISAEYAPKAAKAGCIVIDNTSHFRMQNNIPLIVPEVNSNTLEEFFQDEERTNIISNPNCSTIQMVVALKPLHEKSIINRVVVSTYQAVSGAGKTGMDELFNQTQNVYANKELKKEKFTKQIAL

SEQ ID NO: 93492 - protein, 280 aa, Unknown
  Bacterial polypetide isolated from the Sargasso Sea
VGTEIVQILEQRDFPIDNLYLLASSKSKGKKVEFKDKEIIVEDLSEFDFSKAHIGLFSPGGKISAEYAPKAAKAGCIVIDNTSHFRMQQNIPLIVPEVNDNALDEFFDDENRTNIISNPNCSTIQMVVALKPLHEKAIINRVVVSTYQAVSGAGKTGMDELFNQTQNVYANQELKKEKFTKQIAFNAIPHIGAFLENGNTEEEQKMIDETKKILDEGINVSATCVRTAVFIGHSESINIEFDSPIDEKEANEILSNSEGVSVIDHRKDEGYVTPVEIAGE

SEQ ID NO: 93493 - protein, 279 aa, Unknown
  Bacterial polypetide isolated from the Sargasso Sea
ILEQRNFPIDNLYLLASSKSKGKKLEFKEKNIIVEDLAEFDFSKAHIGLFSPGGKISAEYAPKAAKAGCIVIDNTSHFRMQKNIPLIVPEVNSNTLEEFFQDEERTNIISNPNCSTIQMVVALKPLHEKSIINRVVVSTYQAVSGAGKTGMDELFNQTQNVYANKELKKEKFTKQIAFNAIPHIGAFLENGNTEEEQKMIDETKKILDEGIKVSATCVRTAVFIGHSEAINIEFDSPLNAKEAYDILSKSEGISVIDHRKDEGYVTPVEIAGEDKVYIS

SEQ ID NO: 93494 - protein, 276 aa, Unknown
  Bacterial polypetide isolated from the Sargasso Sea
GKKLEFKEKEIIVEDLAEFDFSKAHIGLFSPGGKISAEYAPKAANAGCIVIDNTSHFRMQKNIPLIVPEVNSNTLEDFFQNEKRTNIISNPNCSTIQMVVALKPLHEKSIINRVVVSTYQAVSGAGKTGMDELFNQTQSVYANQELKKEKFTKQIAFNAIPHIGAFLENGNTEEEQKMIDETKKILDEGIKVSATCVRTAVFIGHSEAINIEFDSPLDAKEAHDILSNSDGISVIDHRKDEGYVTPVEIAGEDKVYISRIRNDDSIDNGISLWVVS

SEQ ID NO: 93495 - protein, 200 aa, Unknown
  Bacterial polypetide isolated from the Sargasso Sea
KPIHELFKIKRVVVATYQSVSGGGKAPMDELVEQTKLALENKKIESKNFTKQISFNLIPHIDVFADDGYTKEELKMTNETKKILDQNIELSATCVRVPVLVSHSEAVNLELEKEFTIDQIKECLEKMEGCKVIDERKDGGYSTPLEATGKDETFISRIREDKTKKNCLNMWIVSDNLLRGAALNAVEIAETLIKNNFYGK

SEQ ID NO: 93496 - protein, 62 aa, Unknown
  Bacterial polypetide isolated from the Sargasso Sea
RDATMRELTPAKVTGTLSIPVGRIRKLNMGPEYISAFTVGDQLLWGAAEPLRRMLRIVLEQN

SEQ ID NO: 93497 - protein, 182 aa, Unknown
  Bacterial polypetide isolated from the Sargasso Sea
NFSELFLIASDKSAGKKITFKGKNYSVLGLSDFDFSKVKIAFFSAGSVIAEKWAPFAAKKTIVIDNSKHFRMDKDVPLVVPEVNADSLKNYKNKNFIANANCSTFQLVLALKPLHDQFKIKRVIVSTYQSVSGAGNIHIKELEEQSKKVLNKEKVISKNFTKQIAFNVIPHIDTFMEDRYTK

SEQ ID NO: 93498 - protein, 152 aa, Unknown
  Bacterial polypetide isolated from the Sargasso Sea
NFTKQIAFNLILHIDEFVDEGYTKEEQKMIKETQKILDNKIKITATCVRVPVLVSHSESINVEFEKSFDIKDVKDILIKSDGCKVLDERKDGGYITPLEAENSYLTFISRIRQDSSNDKALNMWVVSDNLLKGAALNTVQIAEELIKKYYGK

SEQ ID NO: 93499 - protein, 137 aa, Unknown
  Bacterial polypetide isolated from the Sargasso Sea
YFQENKYTKEEMKMVWETQKILEDSSIMVNPTAVRIPVFYGHSEAVHMETKSKISCNEVIDLMNQTDGVEVIDGVELGAYPTAVSDASGADPVYVGRIREDISHPNGINLWIVADNIRKGAALNTVQIAEILLRDYL

SEQ ID NO: 93500 - protein, 209 aa, Unknown
  Bacterial polypetide isolated from the Sargasso Sea
MGYRVAVVGATGNVGREILNVLSEREFPVDEVFAVASSSSVGKEVSFGDTEILKVQPLDSFDFSSSDIGLFSPGSAVSAEHAPRAAASGCIVVDNTSHFRMEPDIPLVVPEVNREALDGYRKHNIVANPNCSTIQMVVALKPLHDLAPIRRVVVSTYQSVSGAGRQAMDELFDQTRKVFFNERLSPSNFTREIAFNVIPHIDMFQADGS

SEQ ID NO: 93501 - protein, 205 aa, Unknown
  Bacterial polypetide isolated from the Sargasso Sea
MGYRVAVVGATGAVGREMLQTLAERRFPADKIYALASAKSAGREVSYGEDQTLIVESLEKFDFSTADIALFSAGADTAKAFAPKAGAAGCIGIDNSSAFRMDDDVPLIVPEVNADIVEKCLIKNKGRNIIANPNCSTAQLVVALKPLHDAFCVRRVVVSTYQAVSGAGKPAMDELFNQTRAIYVNDTVQPEIFTKQIAFNAIPQY

SEQ ID NO: 93502 - protein, 169 aa, Unknown
  Bacterial polypetide isolated from the Sargasso Sea
MDKAIDLALVGVSGVVGNKIISLLEKKNINIQNFYPLGSASVGQEVTLNNTNYQIEDLSSFDCSKVNLAIFSAGSKVAKEYAESFVNQGVYVIDLSSEFRYEENIPLIIPEINGSLLEDIKKPSLIANPNCSVSQLLMVLDPIHKEYSIDFLNIATYQAVSGTGKDAID

SEQ ID NO: 93503 - protein, 116 aa, Unknown
  Bacterial polypetide isolated from the Sargasso Sea
KKILDNKIEVTATCVRVPIKTGHSESINIEFDNPYDFENIIKILKTAPGCKVMDERKDGGYITPIEVEGDYTTYISRIRKDNSNTKAINLWVVSDNLLKGAALNTVQIAECLMKKI

SEQ ID NO: 93504 - protein, 239 aa, Unknown
  Bacterial polypetide isolated from the Sargasso Sea
IALFSAGGKISGEFAPKAAEKNCIVIDNSSRFRMDPDVPLIVPEVNKEDLDNYEKTKIIANPNCSTIQMVVALKPLHDLGKIKRVIVSSYQSTSGAGKAAMDELFEQTKGIYSNNSIEPEIFQTQISFNVIPQIGPFVSSGYTEEEEKMINETKKILSKDIEVSATCVRVPTFIGHAESVNIEFENYVSANEASNILSEAPGCLVDLDNPETFTTPIDCAGNDHTYISRIRNDNSIENG

SEQ ID NO: 93505 - protein, 275 aa, Unknown
  Bacterial polypetide isolated from the Sargasso Sea
SKVKIAFFAAGGKISEKFAEKAAKNCFVIDNSSYYRMDSDVPLIVPQVNSDDLKNIKKNIIANPNCSTSQLVIVLKPLHDLFTIKRIVVSTYQSVSGGGKAPMDELIEQTKLVLDNKKVKSKNFTKQIAFNIIPHIDVFSDDGYTKEEIKMTNETKKILDDKIDLTATCVRLPVLVSHSESVNIEFEKPFSLAQVTEALNNFEGCKVIDERVDGSYSTPLEAEGKYETFISRIREDKTIKNGLNLWIVSDNLLRGAALNAVEIAETLIKNNFYGK

SEQ ID NO: 93506 - protein, 189 aa, Unknown
  Bacterial polypetide isolated from the Sargasso Sea
IVASTYQSVSGAGKAAMDELLLQTKEYFDNKKLKSQNFTKQIAFNAIPHIDSFLENGSTKEEQKNHDEVKKILDKRIKITSTCVRIPVLVSHSISLNVEFEKKFNLEEIRKVLSTSPGCKVVDEQKDGGYITPVEAENKYETFISRIRKDESQANTINLWIVSDNLLKGAALNAVEIAESLIEKDLYGR

SEQ ID NO: 93507 - protein, 109 aa, Unknown
  Bacterial polypetide isolated from the Sargasso Sea
IAVTATCVRVPVKTGHSESINIEFNNLYDLNNIKRILRKAPGCKVIDDHKDGGYVTPLDVEGDHTTYISRVRKDNTNVKAINLWVVSDNLLKGAALNTVQIAECLMKKM

SEQ ID NO: 93508 - protein, 167 aa, Unknown
  Bacterial polypetide isolated from the Sargasso Sea
MTQKYNIAVAGATGAVGTEIIQILEQRNFPIDNLFLLASSKSKGKKLEFKDKEIVVEDLSEFDFSKAHIGLFSPGGKISAEYAPKAAKAGCIVIDNTSHFRMKKNIPLIVPEVNATVLDEFFDDENRTNIISNPNCSTIQMVVALKPLHEKAIINRVVVSTYQAVSG

SEQ ID NO: 93509 - protein, 123 aa, Unknown
  Bacterial polypetide isolated from the Sargasso Sea
RLETHKILGNEISFSATCVRVPVFIGHSEAVNIEFENKISVEEAREAIKNAPGCTLLDERADGGYVTPKECAGNDDTYVSRIREDTSTKNGLSIWVVSDNLRKGAALNTIQIAEMLIEEHLSK

SEQ ID NO: 93510 - protein, 270 aa, Unknown
  Bacterial polypetide isolated from the Sargasso Sea
TYMNIAIVGATGNVGRKLLEVIEKLNFKFSELYLIASDKSIGKKISFKGKTYSLVGLNDFDFSKVKIAFFSAGSSIAEKWAPVAAKKTIVIDNSKHFRMDKDIPLVVPEVNAYSLKNYKNKNIVANANCSTIQLVLALKPLHDKFKIKRVVVSTYQSVSGAGNAHINELEEQSKKVLNKQKVSSKNFTKQIAFNVIPHIDSFMEDRYTKEEWKMMVETKKILDPNITLSATCVRVPVFVGHSESVNVEFKSEVNAKKIRECKNRHPGVKL

SEQ ID NO: 93511 - protein, 191 aa, Unknown
  Bacterial polypetide isolated from the Sargasso Sea
MSQKYNIAVAGATGAVGTEIVQILEQRDFPIDNLFLLASSKSKGKKVEFRDKEIFVEDLSEFDFSKAHIGLFSPGGKISAKYAPKAAKAGCLVIDNTSHFRMQQNIPLIVPEVNANTLDEFFDDDNRANIISNPNCSTIQMVVALKPLHEKAIINRVVVSTYQAVSGAGKTGMDELFNQTQNVYANQELKK

SEQ ID NO: 93512 - protein, 249 aa, Unknown
  Bacterial polypetide isolated from the Sargasso Sea
MNIAIVGATGNVGRKTLEVLEKKDLSIDNLYLVASSKSVGKKIIFKKKEYEVLDLQNFDFSKVKIAFFAAGGKISEKFAEKVAKSCIVIDNSSYYRMDPDVPLVVPQVNPEALNNIKKNIIANPNCSTAQLVIALKPLHDLFIVKRIVVSTYQSVSGGGKAPMDELIEQTKMVLEGKKVKSKNFTKQIAFNAIPHIDIFSDSGYTKEEIKMANETKKILDNEIDLTATCVRLPITVSHSESVNIQFVKP

SEQ ID NO: 93513 - protein, 288 aa, Unknown
  Bacterial polypetide isolated from the Sargasso Sea
MNIAIVGATGNVGRKLLEVIEKLNFEFSELYLIASNKSIGKKITFKGKTYSIVGLSDFDFSKVKIAFFSAGSAIAEKWVPIAAKKTIVIDNSKHFRMDKEIPLVVPEVNADTLKNYKNKNIIANANCSTIQLVLALKPLHDQFKIKRVIVSTYQSVSGAGNAHMNELEEQSKKVLDKQKVSSKNFTKQIAFNVIPHIDTFMEDRYTKEEWKMTVETKKILDPKISLSATCVRVPVFVGHSESINIEFNSEANAEKIRKCLEKAPGCKVVDETKDGGYITPVESSGDFI

SEQ ID NO: 93514 - protein, 181 aa, Unknown
  Bacterial polypetide isolated from the Sargasso Sea
MNFAIIGATGNVGRKTIEVLEKSRLEIDNLFLVASEKSAGQKLIFKKKEIIVEQLEKYDFSKAEITIFAAGSEIAKNWAPKASKKTIVIDNSKYFRMDKDVPLVVAEVNPSALRSHKNIIANPNCSTIQLMLPLKPLHEKYKIKRVVVSTYQAVSGAGKASVDELFDQTKNYLEGKKIESK

SEQ ID NO: 93515 - protein, 221 aa, Unknown
  Bacterial polypetide isolated from the Sargasso Sea
MQKYDIAVIGATGLVGEAMLRVLESSQFPVANLYPLASDQSSGSSLMFNGNSHYIEKASDFDFNRVQLVFSAVSDRLAKYLIPMALDAGCLVIDNSGAYRMDPDVPLVIPEINGDCLQKFSDGGVIANPNCSVIQLLMSIQPFIRKCQIERVIASTYQSVSGIGRSGVNDLIEQSHSVLDDSALGGSSFARKMAFNVCPQIGSFHDNGYCQEEMKIYQEAQ

SEQ ID NO: 93516 - protein, 297 aa, Unknown
  Bacterial polypetide isolated from the Sargasso Sea
IMNIAIVGATGNVGRKTLEVLEKKELSIDNLYLVASSKSAGKKIIFKGKEHEVFDLENFNFSKVKIAFFAAGGKISEKFAEKAAKHCLVIDNSSFYRMDPDVPLIVPQVNSNHLDQIKKNIIANPNCSTAQLVIALKPLHDLFVIKRIVVSTYQSVSGGGKAPMDELIEQTKLVLDGKDIKSKNFTKQIAFNAIPHIDVFSDDGYTKEELKMTNETKKILDSKIDLTATCVRLPISVSHSESVNLQFEKSFSLEKVREALDNFDGCKVIDERVDGGYTTPLEAEGKDETFISRIRED

SEQ ID NO: 93517 - protein, 273 aa, Unknown
  Bacterial polypetide isolated from the Sargasso Sea
CIVGATGNVGRKTLEVLEKKELSIDNLYLVASSKSAGKKISFKAKEHEIFDLENFDFSKVKIAFFAAGGKISEKFAEKAAKHCLVIDNSSFYRMDPDVPLIVPQVNSNHLDGIKKNIIANPNCSTAQLVIALKPLHDLFVIKRIVVSTYQSVSGGGKAPMDELIEQTKLVLDGKVATSKNFTKQIAFNAIPHIDVFSDDGYTKEELKMTNETKKILDNKIDLTATCVRLPISVSHSESVNLQFEKSFSIKKVREALNNFDGCKVIDERVDGGY

SEQ ID NO: 93518 - protein, 165 aa, Unknown
  Bacterial polypetide isolated from the Sargasso Sea
MNLAIIGATGNVGRKTIEILEKSKIKIRKLFLVASERSKGKKIKFKGKEIQIQSLEKYDFSSAQITFFAAGSKIAQQWVPKACKKTTVIDNSKCFRMDKDVPLVVPEVNPSHLAMYKKRNLIANANCSTIQMVVALKPLHDNFKIKRVVVSTYQSVSGAGKASMD

SEQ ID NO: 93519 - protein, 160 aa, Unknown
  Bacterial polypetide isolated from the Sargasso Sea
FDQRSIDKKVYPKQIAFISIPFVDCFLENNYTREEMKMVWETHKILDENISVNPTAVRVPVLVGHAESIYIETEKEIDIELAKNCLNEFAGISVIDNVQEVDFPTSFEHGHGTDNVYVGRIRKGLSKNNSLNLWVVADNVRKGAALNSIQIAENLVGSKM

SEQ ID NO: 93520 - protein, 257 aa, Unknown
  Bacterial polypetide isolated from the Sargasso Sea
MNIAIVGATGNVGRKTLEVFDKKNFKFDNLYLVASEKSAGNKISFRDKEYVIENLETYDFSKADITFFAAGGKIAEKYAIKAAEHTIVIDNSSFFRMDPDVPLIVPQVNASEIKNMKKNIIANPNCSTAQLVIALKPLHDLFKIKRVVVSTYQSVSGAGKVAVDDCVSETLFTLGAKDNHSIGNTFPAPIAFNAIPQIDIFADDGYTKEELKMTNETKKILDESIELTATCVRIPVLVSHSESVNMEFEKPYTLEKV

SEQ ID NO: 93521 - protein, 269 aa, Unknown
  Bacterial polypetide isolated from the Sargasso Sea
TGSVGREIVQILEQREFPVQNIYLLASSKSQGLKINFNNKEIIVEDLSNFDFSKVHISLFSPGSSVSSEYAPKAANKGSIVIDNTSYFRMQKNIPLIIPEVNGSVLDDFFNQENRDNIISNPNCSTIQMLVALKPLHDAAIINRLVVSTYQSVSGAGKTGMDELFNQTQNIYSNKAIEKQKFTKQIAFNLIPHIDSFIDNGNTKEEEKMINETKKILDPQIEVSATCVRVPIFVGHSESINIEFDSPITDTEAKEILKKTNGISVVIIV

SEQ ID NO: 93522 - protein, 280 aa, Unknown
  Bacterial polypetide isolated from the Sargasso Sea
VGATGNVGRKTLEVLEKKELTIDNIYLVASSKSAGKKISFKGKDLEVFDLENFDFSRVKISFFAAGGKISEKFAEKAAKHCLVIDNSSFYRMDPNVPLIVPQVNSNHLNNIKKNIIANPNCSTAQLVIALKPLHDEFVIKRIVVSTYQSVSGGGKAPMDELIEQTKSVLDGKKVKSKNFTKQIAFNAIPHIDVFSDNGYTKEELKMTNETKKILDEKIDLTATCVRLPISVSHSESVNIQFEKSFTLEKVRDLLNSFNGCKVIDDRIDGGYSTPIDAEGK

SEQ ID NO: 93523 - protein, 185 aa, Unknown
  Bacterial polypetide isolated from the Sargasso Sea
YQSVSGSGKEAMDELWSQTKGMYVPGQEVEPKVYPKQIAFNVIPHIDVFMDDGQTKEEWKMVAETKKILDKKIKLTATCVRVPVFVGHSEAVNIEFEEFLDEEEARAILRESPGIMIVDKRENGGYMTPSECAGDYATFISRLRQDSTIENGLNLWCVSDNLRKGAALNAVQIAELLGTKILKKA

SEQ ID NO: 93524 - protein, 267 aa, Unknown
  Bacterial polypetide isolated from the Sargasso Sea
MIKKYNIAVAGATGAVGSEIIQILEERDFPIDNLYLLASSKSKGKKLEFNQKEIIVEELSEFDFSKAQIGLFSPGGKISAEYAPKAAKAGCVVIDNTSHFRMQKNIPLIVPEVNASVLEEFFLDEKRTNIISNPNCSTIQMLVALKPLHEKSIINRVIVSTYQAVSGAGKTAMDELFNQTQNVYANQELKKEKFTKQIAFNAIPHIGAFLKNGNTEEEQKMIDETKKILDEGIKISATCVRTAVFIGHSESINIEFDSPLDEKEARE

SEQ ID NO: 93525 - protein, 338 aa, Unknown
  Bacterial polypetide isolated from the Sargasso Sea
MNSLINLALIGASGVVGKKIISLLENKNIEINNLYPLGSTSVGDEIVFNNNEYKIDDLSNFDYSKVNLAIFSAGSKVAEEHAKDFVNAGVYVIDLSSKFRYEKDIPLIIPEINGNEINLLEAPSLISNPNCSTSQLLMAINPIHKKYEIDILNIATYQAVSGTGKQAVQELKNQIKDESANKEIYPKKIAYNVIPQCDIFLENDFTKEEMKLVWETKKILDKNIEVQATCVRVPVINGHSEAVFLRTKKETSREQIIDLLNNSSGIKVIDNPESQEYPTPLENANDTEEVFVGRIRSQTINNENWISMWIVADNVYGKGAALNTVQILETLLENNKLC

SEQ ID NO: 93526 - protein, 331 aa, Unknown
  Bacterial polypetide isolated from the Sargasso Sea
MKVAVIGATGVVGTVILNLLDKRKFPVTEIIPVASERSVGNKIKFQGKEYSIVSLTEAVAMKPDIALFSAGGSTSQEWAPKFAENGTRVVDNSSAWRMDSTKKLIVSEVNSATLTKDDYIIANPNCSTMQMLVVLAPIHKKFKIKRLVISTYQSVSGTGKNAIDQLYGERNGSNSEKVYPYSIDQNLLPHCDVFEEGGYTKEENKLINETRKILNDNSIQITSTAVRVPIELCHGESVNIEFVDEFNLEEVLSVLRSSPGLIVEDEPEKNIYPMPINASNKDEVFVGRIRRDFSIKSGLNLWIVSDNLRKGAATNTIQIAEKLIEMGIVKS

SEQ ID NO: 93527 - protein, 212 aa, Unknown
  Bacterial polypetide isolated from the Sargasso Sea
IANANCSTIQMVIALKPLHEIFKIKRIVVSTYQSVSGAGKDPMDELIDQTKFALENKKINSKNFTKQIAFNAIPHIDDFSNDGYTKEEMKMINETKKILDKSIDVTATCVRVPVLVSHAESLNIEFEKEFTLEKIINLLENADGCKVVNDQRDGGYMTQLEAAGKDETFISRIRKDNTNEKAINLWIVSDNLLRGAALNAVEIAEAYIKTKQ

SEQ ID NO: 93528 - protein, 246 aa, Unknown
  Bacterial polypetide isolated from the Sargasso Sea
MNIAIVGATGNVGRKTLEVLEKKELSIDNLYLVASSKSAGKKISFKYKEHEVFDLENFDFSKVKIAFFAAGGKISEKFAEKAAKHCLVIDNSSFYRMDPDVPLIVPQVNPNHLDQIKKNIIANPNCSTAQLVIALKPLHDLFVIKRIVVSTYQSVSGGGKAPMDELIEQTKLVLDGKDVKSKNFTKQIAFNAIPHIDVFSDDGYTKEELKMTNETKKILDSKIDLTATCVRLPISVSHSESVNLQF

SEQ ID NO: 93529 - protein, 227 aa, Unknown
  Bacterial polypetide isolated from the Sargasso Sea
MNIAIVGATGNVGRKTLEVLEKKGLKIDNLYLVASSKSAGIKIKFKGKEYEVCDLENFDFSKAKIIFFAAGGKISEKFAEKASKSSFVIDNSSFFRMNQDVPLIVPQVNPEDLKNIKKNIIANPNCSTAQLVIALKPLHDLFEIKRVVVSTYQSVSGGGKAPMDELIEQTKMALGGKNIESKNFTKQIAFNAIPHIDTFSDSGYTKEELKMTNETKKILGDKIDLTA

SEQ ID NO: 93530 - protein, 336 aa, Unknown
  Bacterial polypetide isolated from the Sargasso Sea
MNIAIVGATGNVGRKLIEVLEKKNFPITEAYLLASSNSAGKKINFLGKEHTVINLEEFDFSKVKIAFFAAGSAIAEKWAPIAAEKTIVIDNSKFFRKDSEIPLIVPEVNSKELPKFKNKNIIANANCSVIPIVVALKPLHDLYNVKRIVASTYQSVSGAGKAGMDELISQTKEVLENKNVQSKNFTKQIAFNAIPHIDSFLENGSTKEEQKNHDEVKKILDNKISITSTCVRIPVLVSHSISVNVEFNKKHNLEEVKTVLSSSPGCKVVDEHKDGGYITPVEAEDKFETFISRIRDDSSQANSINLWIVSDNLLKGAALNAVEIAEALVEKDFYGR

SEQ ID NO: 93531 - protein, 155 aa, Unknown
  Bacterial polypetide isolated from the Sargasso Sea
MASSKKPKIAVVGATGNVGREVLDIIDEKEIQYSDLIALASSRSKGSTIDYGENKSVVVADLAEYDFSDTDIAIFSPGAKVSSEFAPKAAKQGCIVIDNTSHFRTDPDVPLVVAEVNPEALKDFRKKNIIANPNCSTMGMLVAIKPLHDQFNVKR

SEQ ID NO: 93532 - protein, 336 aa, Unknown
  Bacterial polypetide isolated from the Sargasso Sea
MNIAIVGATGNVGRKIIEILEKKNFPVSELFLIASAKSAGKKINFKGEDHTVIDLEKFDFSKVKIAFFAAGSAIAEKWATEAAKKTIVIDNSKFFRKDPDIPLVVPEVNSKELAHVKNKNIIANANCSVIPLVVALKPLHDLYNIKRIIVSTYQSVSGAGKAPMDELLSQTQDFFNNKNLESKYFTKQIAFNAIPHIDSFLESGYTKEEQKTTDEVKKILDKKIKITSTCVRIPVLVSHSISANVEFSKKYNIKEIRNVLSTSPGCKVIDELKDGGYITPAEAENKFDTFISRIRQDESQANTVNMWIVSDNLLKGAALNAVEIAESLVEKDLYGK

SEQ ID NO: 93533 - protein, 336 aa, Unknown
  Bacterial polypetide isolated from the Sargasso Sea
MNIAIVGATGNVGRKLIEVLEKKNFPITEAYLVASSNSEGKKINFLGKEHTVSNLEQFDFSKVKIAFFAAGSSIAEKWAPIAAEKTIVIDNSKFFRKDPEIPLIVPEVNSKELPKFKNKNIIANANCSVIPIVVALKPLHDLYNVKRIVASTYQSVSGAGKAGMDELISQTKEVLENKDVESKNFTKQIAFNAIPHIDSFLENGSTKEEQKNHDEVKKILDSKINITSTCVRIPVLVSHSISVNVEFNKKHDLEEIRNVLSSSPGCKVVDEQKDGGYITPVEAEDKFETFISRIREDSSQPNSINLWVVSDNLLKGAALNAVEIAEALVEKDFYGK

SEQ ID NO: 93534 - protein, 336 aa, Unknown
  Bacterial polypetide isolated from the Sargasso Sea
MNIAIVGATGNVGRKLIEVLEKKNFPITEAYLVASSNSAGKKINFLGKEHSVIDLEQFDFSKVKIAFFAAGSAIAEKWTPIAAQKTIVIDNSKFFRKDPEIPLIVPEVNSKELSKFKNKNIIANANCSVIPIVVALKPLHDLYNVKRIVASTYQSVSGAGKAGMDELIFQTREVLENKNVESRHFTKQIAFNVIPHIDSFLENGSTKEEQKNHDEIKKILDNKINITSTCVRIPVLVSHSISTNVEFHKKYDLDEIRSVLSTSPGCKVVDEQKDGGYVTPVEAENRFETFISRIRSDASQPNTINLWIVSDNLLKGAALNAVEIAEALIEKDFYGK

SEQ ID NO: 93535 - protein, 331 aa, Unknown
  Bacterial polypetide isolated from the Sargasso Sea
MKVAVVGVTGVVGTVMLNLLDKRKFPITQIIPVASEKSVGKKIGFKGKDYNIVSLTDALTVKPDIALFSAGGTTSKEWAPKFADIGTRVVDNSSAWRMDSTKKLIVSEVNSDTLTKNDYIIANPNCSTMQMLVVLAPLHKKFKIKRLVISTYQSVSGTGKNAIDQLYSERNGSNSEKIYPYSIDQNLLPHCDVFEDGGYTKEENKLINETRKILNDYSIQITSTAVRVPIEVCHGETVNIEFKNKFQLKEVYSILRNTPGLIVEDEPQDNLYPMPLNAANKDEVFVGRVRRDFSIENGLNLWIVADNLRKGAATNTIQIAEKLIEMGLVRF

SEQ ID NO: 93536 - protein, 129 aa, Unknown
  Bacterial polypetide isolated from the Sargasso Sea
GYTKEELKMTNETKKILDNEIDVSATCVRVPVRTGHSESINIEFNNLYDFENIIKILKNAPGCKVIDERTDGGYMTPLEAEGSYTTYISRIRKDNSNIKAINLWVVSDNLLKGAALNTVQIAECLMKKL

SEQ ID NO: 93537 - protein, 331 aa, Unknown
  Bacterial polypetide isolated from the Sargasso Sea
MKIAIVGATGNVGRKIIEVLEQKKLLVEDLCLLASKKSAGTELLFNGKKIKVQSLEDFDFSKVDITFFSAGKKISEAYAVKAAKCSVVVDNSSYFRMDPDVPLIVPQVNKHHLSNLKKNIIANPNCSTAQMVIVLKPLHDLFDIKRVVVSTYQSVSGAGKASMDELIEQTRDILAEKKVSSKNFTKQIAFNAIPHIDDFLDDGYTKEEIKMINETKKILDHKIELTATCVRIPVMVSHSESLNIEFNKTASLSEVRKVLAKAPGCKIIDDPLNNMYATPIDSAGKNETFISRIRQDNSNKNSINLWIVSDNLLRGAALNAVEIAETYYNKL

SEQ ID NO: 93538 - protein, 329 aa, Unknown
  Bacterial polypetide isolated from the Sargasso Sea
MKIAVVGATGLVGRVMLKLLEDRKFPLDDLIPVASKSSIGQSISFKDKSYPVVSMEEAIKLKPAIALFSAGGSTSLEWAPKFAENGTKVIDNSSAWRMDSSKKLIVPEINADALEKDDMIIANPNCSTIQMVVALGPLHNKYNIKRLVISTYQSVSGTGKDALDQLNKETSGDFTEKVYPYQIYQNLLPHCDVFDEDGYTKEEIKLMKETRKILDDDSIKITSTAVRVPIEKCHGESINLEFYNEFDLEDIIETLGCSPGVKVMDDINNNLYPMPIEAANNDEVYVGRIRRDHSVENGLNLWIVSDNLRKGAATNTIQIAETLIEKGLL

SEQ ID NO: 93539 - protein, 336 aa, Unknown
  Bacterial polypetide isolated from the Sargasso Sea
MNIAIVGATGNVGRKLIEVLEKKNFPITEAYLVASSNSEGKKINFLGKEHTVSNLEQFDFSKVKIAFFAAGSSIAEKWAPIAAEKTIVIDNSKFFRKDPEIPLIVPEVNSKELPKFKNKNIIANANCSVIPIVVALKPLHDLYNVKRIVASTYQSVSGAGKAGMDELISQTKEVLENKDVESKNFTKQIAFNAIPHIDSFLENGSTKEEQKNHDEVKKILDSKINITSTCVRIPVLVSHSISVNVEFNKKHDLEEIRNVLSSSPGCKVVDEQKDGGYITPVEAEDKFETFISRIREDFSQPNSINLWVVSDNLLKGAALNAVEIAEALVEKDFYGK

SEQ ID NO: 93540 - protein, 300 aa, Unknown
  Bacterial polypetide isolated from the Sargasso Sea
MNICIVGATGNVGRKILDVLDKKNFSINQLYLVASEKSEGKKILFKKKEYIVHNLENFDFSKCDIAFFSAGGKIAEKFAEKAARHSIVIDNSSFFRMDPDVPLIVPQVNSEDLKNIKKNIIANANCSTIQMVIALKPLHKKFKIKRIVVSTYQSVSGAGKGPMDELIDQTKLALDNKKINSKNFTKQIAFNAIPHIDNFANDGYTKEEMKMINETKKILDKNINVTATCVRVPVLVSHAESVNIEFEKEFTLEKVINLLDNAEGCKVVNDQIDGGYMTQLEAAGKDETFYSRVGKDNTNQ

SEQ ID NO: 93541 - protein, 253 aa, Unknown
  Bacterial polypetide isolated from the Sargasso Sea
MNIAIVGATGNVGRKTLEVFDKKNFKFDNLYLVASEKSAGKKILFRDKEYEIENLENYDFSKADITFFAAGGKIAEKYAENAAKHTVVIDNSSFFRMDPDVPLIVPQVNSSEIKKMNKNIIANPNCSTAQLVIALKPLHDLYKIKRVVVSTYQSVSGGGKSPMDELIEQTKKYLDGKKIESKNFTKQIAFNVIPHIDVFSDDGYTKEELKMTNETKKILDETIELTATCVRIPVLVSHSESVNIEFEKPFNLD

SEQ ID NO: 93542 - protein, 347 aa, Unknown
  Bacterial polypetide isolated from the Sargasso Sea
MTQKYNIALAGATGAVGNEIIQILEQRDFPIDNLYLLASSKSKGKKIEFKEKEIIVEDLAEFDFSKAHLGLFSPGGKVSAEFAPKAAKTGCIVIDNTSYFRMQKKIPLIVPEVNASVLEEFFQDETRTNIISNPNCSTIQMVVALKPLHDKSIINRVVVSTYQAVSGAGKTGMDELFNQTQNVYANQELKKEKFTKQIAFNAIPHIGAFLENGNTEEEQKMIDETKKILDEGIKVSATCVRTAVFIGHSESINIEFDSPLGAKEAYEILSKSDGISVIDHRKDEGYITPVEIAGEDKVYISRIRDDESLDNGLSLWVVSDNLRKGAALNAVQIAEVIISQYSNYIKI

SEQ ID NO: 93543 - protein, 332 aa, Unknown
  Bacterial polypetide isolated from the Sargasso Sea
MSKLAIVGASGLVGRNLLEQLQKREFKIDEIFLLGKKSAGSSINFLDKDCIIEDIDKFDFNKPDYAILSAGSDVARDYANKFIEADCKVLDMSSFFRYEDDVPLIIPEINGNIISKKTNLIANPNCSTAQLLMVLDHIHKEFSIESVMITTFQAVSGAGEQGIKELENQSQSISTTSNIFSKTIAGNVIPQCDKFLENGFTKEEMKLDWETKKILDEKIHVTSTCVRVPVKNGHSESVFIKVRNEASRSSIIRLLEGKEGVKVIDDPSKEAFPTALENANKTSDVYVGRIRSSKINNEDWISCWIVADNVFGKGAALNAVQILELMKETDEN

SEQ ID NO: 93544 - protein, 336 aa, Unknown
  Bacterial polypetide isolated from the Sargasso Sea
MNIAIVGATGNVGRKLIEVLEKKNFEISELFLVASSKSEGKKINFNGKEHTVIDLEKFDFSKVKIAFFAAGSTIAEKWANIAAEKTIVIDNSKFFRKDPDIPLVVPEVNSKELVQVKNKNIIANANCSVIPVVVALKPLHDLYNVRRVVISTYQSVSGAGKEPMDELLSQTKEHFDNKKLESKYFTKQIAFNAIPHIDSFLENGYTKEEQKTTDEIKKILDKKINVTSTCVRIPVLVSHSISANVEFNKKCNLEEIRNVLSTSPGCKVVDEHKDGGYITPVEAENKFETFISRIRLDESQLNTVNLWIVSDNLLKGAALNAVEIAESLIDKDFYGQ

SEQ ID NO: 93545 - protein, 168 aa, Unknown
  Bacterial polypetide isolated from the Sargasso Sea
MKINDFPSISVVGATGAVGKICLDILNERNYPIEKINLFASSRSAGKKIIYDNNELIVKEATKNSFDESDVVFISADSNVSLELAPSAVNSGALVIDDGSAFRMKEDVPLVVPEVNENDINTHNGIISIPNCTTTPLVMAVHNLRKLSKINRIQAATYQAVSGSGSMA

SEQ ID NO: 93546 - protein, 322 aa, Unknown
  Bacterial polypetide isolated from the Sargasso Sea
KIIEVLENKNFPISELYLIASSKSSGQKINFKGKEHTVIDLEKFDFSKVKITFFAAGSAVAEKWAHKVAEKTIVIDNSKYFRKDSEIPLIVPEVNSKELVHVKNKNIIANANCSVIPLVVALKPLHDLFTVKRIVASTYQSVSGAGKAPMDELLSQTQDYFNNKNLQSKHFTKQIAFNAIPHIDSFLENGYTKEEQKTSDEVKKILDKKIKITSTCVRIPVLVSHSISANVEFEKKFNLDEIRNVLSTSPGCRVIDEQKDGGYITPVEAQNKYETFISRIRQDDSQSNTINLWIVSDNLLKGAALNAVEIAESLIKKNLHDR

SEQ ID NO: 93547 - protein, 294 aa, Unknown
  Bacterial polypetide isolated from the Sargasso Sea
MSKGINLALVGASGVVGSKIVSILEKKQVQVKNFYPLGSSSVGNAISFNNKEYVIEDLSKFNCDLADVVIFSAGSAVAKKYAESYVSKGAYVIDLSSEFRYEDHVPLVIPEVNGEILNALKEPTLIANPNCSVSQLLVALNPIHKIFEVDILNIATYQAVSGTGKEAIEELQNQIKDESYDANVYPKKIAFNVIPQCDVFLENDFTKEEMKVTWETKKILDPSIEVQATCARVPVINGHSEAVFFRTKQKASKKEILDILRATSGVKVMDNPAKLEYPTPLENANDTEDVFVGR

SEQ ID NO: 93548 - protein, 336 aa, Unknown
  Bacterial polypetide isolated from the Sargasso Sea
MNIAIVGATGNVGRKLIEVLEKKNFPINEAYLVASPNSAGKKINFLGKEHTVINLEEFDFSKVKIAFFAAGSAIAEKWAPIAAEKTIVIDNSKFFRKDPEIPLIVPEVNSKELPKFKNKNIIANANCSVIPIVVALKPLHDLYNVKRIVASTYQSVSGAGKAGMDELISQTKEVLENKNVQSKNFTKQIAFNAIPHIDSFLENGSTKEEQKNHDEVKKILDNKISITSTCVRIPVLVSHSISVNVEFNKKHNLEEVKTVLSSSPGCKVVDEQKDGGYITPVEAEDKFETFVSRIRDDSSQLNSINLWIVSDNLLKGAALNAVEIAEALVEKDFYGR

SEQ ID NO: 93549 - protein, 326 aa, Unknown
  Bacterial polypetide isolated from the Sargasso Sea
NVGRKLIEVLEKKNFSVTEAFLVASSKSSGKKINFLGKEHTVEDLEKFDFSKVKIAFFAAGSTVAEKWAPIAANKTIVIDNSKFFRKDSDIPLIVPEVNSKELSKFKNKNIIANANCSVIPIVVALKPLHDLYNVKRIVASTYQSVSGVGKAGMDELLSQTKEILENKNVQSKNFTKQIAFNAIPHIDSFLENGSTKEEQKNHDEIKKILDKKINVTSTCVRIPVLVSHSISINIEFHKKPKIEEIKKVLSSSPGCIVVDEHKDGGYITPVEAENKFETFISRIRQDFSQENSINMWIVSDNLLKGAALNAVEIAETLIENNFYGK

SEQ ID NO: 93550 - protein, 336 aa, Unknown
  Bacterial polypetide isolated from the Sargasso Sea
MNIAIVGATGNVGRKIIEVLENKNFPITELYLIASSKSSGQKINFKGKEHTIIDLEKFEFSKVKIAFFAAGSVVAEKWAHKAAEKTIVIDNSKFFRKDPDIPLIVPEVNSKELTHVKNKNIIANANCSVIPLVVALKPLHDLYTVKRIVVSTYQSVSGAGKAPMDELLSQTQDYFSNKNLQSKHFTKQIAFNIIPHIDSFLENGYTKEEQKTSDEVKKILDKKIKITSTCVRIPVLVSHSISVNVEFDKKCNLEEIKNVLSSSPGCKVVDEPKDGGYMTPVEAANKYETFISRIRKDDSQSNTINLWIVSDNLLKGAALNAVEIAESLIKKNLHER

SEQ ID NO: 93551 - protein, 336 aa, Unknown
  Bacterial polypetide isolated from the Sargasso Sea
MNIAIVGSTGNVGRKLIEVLEKKNFPVTKAFLVASSKSSGKKINFLGKEHTVENLEKFDFSKVKIAFFATGSSVAERWAPIAAKKTIVIDNSKFFRKDPDIPLIVPEVNSEKLSNFKNKNIIANANCSVIPIVVALKPLHDLYDIKRIVASTYQSVSGAGKAGMDELISQTKEILENKKVVSKNFTKQIAFNAIPHIDSFLENGSTKEEQKNHDEIKKIMDSKIKVTSTCVRIPVLVSHSISVNVEFNKQYNLDEIKKVLSSAPGCKVIDEQKDGGYITPVDAENKFETFISRIRQDTSQDNTINMWIVSDNLLKGAALNAVEIAETLIKNDFYGK

SEQ ID NO: 93552 - protein, 166 aa, Unknown
  Bacterial polypetide isolated from the Sargasso Sea
LLEQTHSYLNQREISKSVYPSQIAFNVIPFVDSFLDNGYTKEEMKMVWETQKILDKDIRVDATAVRVPVLIGHSESISIETERVIDIDMVVNDYKTSDKIELIDDSANFEFPTAVEHGNGTDKVFVGRIRKSQINDKILNIWVVADNVRKGAALNSVQIAEHLIKG

SEQ ID NO: 93553 - protein, 166 aa, Unknown
  Bacterial polypetide isolated from the Sargasso Sea
MSNIKLAIVGATGAVGREFLRILAEQQFPAENLFLVASSKSAGKAIKYFEKIIEIEDLQLFDFSKASVAFFSAGSSVAESHASQAIEKGCTVIDNSSFFRNRDDLELIVPEVNGSRLEDLNLPAIIANPNCSTAQMVVALKPFHDLFKIRRVDVATYQSVSGTGQS

SEQ ID NO: 93554 - protein, 338 aa, Unknown
  Bacterial polypetide isolated from the Sargasso Sea
MNSLINLALIGASGVVGKKIISLLENKNIEINNFYPLGSTSVGDEIVFNNNQYKIEDLTNFDYSKVNLAIFSAGSKVAEEHAKDFVNAGVYVIDLSSKFRYEKHIPLIIPEINGNEINLLDTPSLISNPNCSTSQLLMAIAPIHKEYEIDVLNIATYQAVSGTGKQAVQELKNQITDESINQEVYPKKIAFNVIPQCDIFLENDFTKEEMKLVWETKKILDNNIEVQATCVRVPVINGHSEAVFLRTKKETSREQIIELLNNSSGIKVIDNPKSQEYPTPLENANDTEEVFVGRIRSQTINNENWISMWIVADNVYGKGAALNTVQILESLVENKKLC

SEQ ID NO: 93555 - protein, 226 aa, Unknown
  Bacterial polypetide isolated from the Sargasso Sea
MFKTKNKYNIAIVGATGIVGESLLDILYSRKFPAEKIVPLASKKSAGTEIKFGDKLIEVIALDDYDFRDIDIAFFSAGSNISKIHAPIAAKSGAIVIDNTSEFRYVDNIPLVIPEVNSSEIENYKKCNIIANPNCSTIQMLVALKPVHDRYKILNINVSTYQAVSGSGKSGVDELLQQSHNYLNQQQIKPSVYPKQIGFNAIPFVDSFCENGIYKRGNEDGVGNSK

SEQ ID NO: 93556 - protein, 181 aa, Unknown
  Bacterial polypetide isolated from the Sargasso Sea
MSLNIAIVGATGNVGREMLNILSDKKYDSSNIFPIASSKSEGTKVEFGDKELTVEAIDKFDPAKVDLALFSAGASVSKEWAPMFAEKNCIVIDNSSQFRMDKDVPLIVPEVNPDAIKNYKIKNIIANPNCSTIQLVVALKPLHEISKIKKVIVSTYQSVSGAGKAGMDELFDQTKHMFSEK

SEQ ID NO: 93557 - protein, 309 aa, Unknown
  Bacterial polypetide isolated from the Sargasso Sea
MSQAFDVAVLGATGLVGQTMIELLEERDFPVNRLYPLASKRSAGSTVSFKGEDIEVLDADDFDWSLVQFGFFSAGGSISAKFAPIAAEEGCIVIDNTSEFRYEPDIPLVVPEVNAHALAEFRNRNIIANPNCSTIQMLVALKPIQDAVGIDRINVCTYQSVSGAGKEAMEELAKQTAGLLNAREVKPESFSRQIAFNVIPQIDVFQDNDYTKEEMKMLWETQKIMGDQSILVNATAVRVPVFYGHAEAIHLETRSPIDAQHVKELLADAPGVTVYDGNEQFPTQVSSASGNDIVHVGRIRNDITHPCGL

SEQ ID NO: 93558 - protein, 283 aa, Unknown
  Bacterial polypetide isolated from the Sargasso Sea
EHVIENLETYDFSKADITFFAAGGKIAEKYAEKAAKHTIVIDNSSFFRMDPDVPLIVPQVNATEIKNMKKNIIANPNCSTAQLVIALKPLHNLFKIKRVVVSTYQSVSGGGKSPMDELIDQTKQYLDGKKIESKNFTKQIAFNVIPHIDVFADDGYTKEELKMTNETKKILDDSIELTATCVRIPVLVSHSESVNIEFEKPYTLEKVRDVLSKADGCEVIDKRENGGYSTPFEAAGSDETYISRIREDKTKKNSLNLWIVSDNLLRGAALNSVEIAETIINSK

SEQ ID NO: 93559 - protein, 108 aa, Unknown
  Bacterial polypetide isolated from the Sargasso Sea
SATCVRVPVMVSHSESINVEFEKPFDIKNIKEILNKSNGCKVIDERKDGGYITPLEAENSYLTFISRIRKDSSNNKAINMWVVSDNLLKGAALNTVQIAEQLIKKYVK

SEQ ID NO: 93560 - protein, 221 aa, Unknown
  Bacterial polypetide isolated from the Sargasso Sea
MRYNVAIVGATGAVGREMLQTLSERNFPVENVYALASKSSVGKEVSFGENKVLKILNLEEFDFSKANIALFSAGSDTAKKYAPIASKKGCISIDNSSCYRMDEQVPLIVPEVNPEHIYNFKKKNIIANPNCSTIQMVVALAPLHKKYKIKKVYVSTYQAVSGAGKLAMDELFNQTKGVYVNDSALPEQFTKKIAFNVIPHIDNFLDDGFTKEEWKMNVETK

SEQ ID NO: 93561 - protein, 203 aa, Unknown
  Bacterial polypetide isolated from the Sargasso Sea
LLMALNPIHKELKVDILNVSTYQAVSGTGKQAVQELKNQIKDSSINQDVYPKKIAFNVIPQCDIFLENNFTKEEMKLVWETQKILDKNIEVQATCVRVPVINGHSEAVFLRTIKETTREKVIELLNNSSGIKVIDNPESLKYPTPLENANDTEDVFVGRIRSQIINSENWTSMWIVADNVYGKGAALNTVQILEGLVENNKLC

SEQ ID NO: 93562 - protein, 263 aa, Unknown
  Bacterial polypetide isolated from the Sargasso Sea
MGIKVAVVGATGAVGREMLQTLEERSFPSDEIIALASSKSIGKEVSYGEDRSLKVQGLNSYDFSGVDIALFSAGGAISGEFGPKVASKGAVVIDNSSKWRMEPDIPLIVPEVNGSDIAAYEKRNIIANPNCSTAQLVMALKPLHDLYKIKRVVVSTYQSVSGAGNSGMDELFNQTRAVYVNDPVENQEFSKQIAFNCIPHIDIFMDDGFTKEEWKMVAETKKILDPNIEVVAHCVRVPVFIGHAEAVFIETTRQIDEAEAREA

SEQ ID NO: 93563 - protein, 336 aa, Unknown
  Bacterial polypetide isolated from the Sargasso Sea
MNIAIVGATGNVGRKIIEVLEKKNFPISEIYLIASSKSSGKKISFRGKELIVIDLEKFDFSKVKIAFFAAGSSIAEKWAYKAAEKTIVIDNSKFFRKDPDIPLVVPEVNSKELVHVKNKNIIANANCSVIPLVVALKPLHDLYIVKRIVVSTYQSVSGAGKAPMDELLTQTKEYFDKKNLQSKHFTKQIAFNVIPHIDSFLENGNTKEEQKTIDEVKKILDKKIKITSTCVRIPVLVSHCISANVEFDKKYNLEEIKNVLSTSPGCKVVDEHKDGGYITPVEAENKYETFISRIRKDDSQSNSINLWVASDNLLKGAALNAVEIAESLIKKNLHER

SEQ ID NO: 93564 - protein, 257 aa, Unknown
  Bacterial polypetide isolated from the Sargasso Sea
AEKAAKHCLVIDNSSFFRMDPDVPLIVPQVNSDALNNIKKNIIANPNCSTAQLVIALKPLHDLFVIKRIVVSTYQSVSGAGKASMDELIKQTKLALGGKDIKSENFTKPIAFNAIPHIDVFSEDGYTKEELKMRNETKKILDDKIDLTATCVRLPISVSHSESVNIQFEKTFSLEQIKKALNSFDGCKVIDERIDGGYSTPLEAEGKDETFISRIREDKTIKNGLNLWIVSDNLLRGAALNAVEIAETLIKNNFYGK

SEQ ID NO: 93565 - protein, 250 aa, Unknown
  Bacterial polypetide isolated from the Sargasso Sea
CLVIDNSSFFRMDPDVPLIVPQVNSDALNNVKKNIIANPNCSTAQLVIALKPLHDLFVIKRIVVSTYQSVSGAGKASMDELIKQTKLALDGKDIKSENFTKPIAFNAIPHIDVFSEDGYTKEELKMRNETKKILDDKIDLTATCVRLPISVSHSESVNIQFEKSFSLEQIKKALNSFDGCKVIDERIDGGYSTPLEAEGKDETFISRIREDKTIKNGLNLWIVSDNLLRGAALNAVEIAETLIKNNFYGK

SEQ ID NO: 93566 - protein, 331 aa, Unknown
  Bacterial polypetide isolated from the Sargasso Sea
MNIAIVGATGNVGRKTLEVFDKKNFKFDNLYLVASEKSAGKKISFRDKEYVIENLETYDFSKADITFFAAGGKIAEKFAEKAAKHTIVIDNSSFFRMDPDVPLIVPQVNAAEIKNMKKNIIANPNCSTAQLVIALKPLHDLFKIKRVVVSTYQSVSGGGKDPMDELVEQTKKYLEGKKIESKNFTKQIAFNIIPHIDVFADDGYTKEELKMTNETKKILDEKIELTATCVRIPVLVSHSEAVNIEFEKPFNLEKVREALSNAEGCEVIDKRENGGYSTPLEATGKDETYISRIREDKTKENSINLWIVSDNLLRGAALNSVEIAETIINSK

SEQ ID NO: 93567 - protein, 336 aa, Unknown
  Bacterial polypetide isolated from the Sargasso Sea
MNIAIVGATGNVGRKLLEVLNKKKFPITEIFLVASPKSVGKKINFRDKELIVEDLNNFDFSKVKIAFFAAGSAIAEKWAPIAAEKTIVIDNSKFFRKDPEIPLIVPEVNSKELIHVKNKNIISNANCSVIPIVVALKPLHDLYNIKRIVASTYQSVSGAGKEAMDELLSQTKDYFDNKEMISKNFTKQIAFNAIPHIDSFLDNGTTKEEQKNHDEVKKILDKKINITSTCVRIPVLVSHSISINVEFNKKYNLDEIRNVLSSSPGCKVVDEKKDGGYITPVEAENKYETFISRIREDNSQSNTINMWIVSDNLLKGAALNAVEIAESLIKENLYEK

SEQ ID NO: 93568 - protein, 329 aa, Unknown
  Bacterial polypetide isolated from the Sargasso Sea
MKVAVIGSTGVVGNVMLSLLESRNFPLSDLIPVASEKSIGKKILFNNEHFDIVSIEDAVKMKPDIALFSAGGSTSLEWAPKFAEVGTRVIDNSSAWRMDSSKKLVVSEVNSEVLTKDDYIIANPNCSTMQLMVVLAPLHKVYKIKRLVISTYQSVSGTGKNAIDQLNGERRDSDPEMIYPYNIDQNLLPHCDVFEEGGYTKEENKLINETRKILNDDSIQITSTAVRVPIEICHGESVNIEFENQFELDQVFEILKKSPGLIVEDDPANNIYPMPINSANKDEVFVGRIRRDFSIESGLNIWVVADNLRKGAATNTIQIAEKLIEMKII

SEQ ID NO: 93569 - protein, 336 aa, Unknown
  Bacterial polypetide isolated from the Sargasso Sea
MNIAIVGATGNVGRKLIEVLEKKNFPISELFLVASSKSEGKKINYSGKEHTVIALEKFDFSKVKIAFFAAGSLIAEKWAHIAAEKTIVIDNSKFFRKDPEIPLIVPEVNSKELVHVKNKNIIANANCSVIPLVVVLKPLHDLYNVKRIVVSTYQSVSGAGKDAMDELASQTQEFFQNKELKSKYFTKQIAFNAIPHIDSFLEDGYTKEEQKTNDEVKKILDNKIKITSTCVRIPVMVSHSLSVNVEFNKKYNLNEIKNVLSTSPGCKLVDEHKDGGYITPVDAENKFETFISRIREDKSQPNTINLWVVSDNLLKGAALNAVEIAESLLKNDFYGK

SEQ ID NO: 93570 - protein, 202 aa, Unknown
  Bacterial polypetide isolated from the Sargasso Sea
MVMPLKPLHEIFKIKRIVVSTYQSVSGAGKGPMDELIDQTRLFLDNKKINSKNFTKQIAFNAIPHIDLFSNDGYTKEEMKMINETKKILDKNINVTATCVRVPVMVSHAESVNVEFEKEFTLEKVINLLINAEGCKVINEQVDGGYATQIEAEGKNETFISRIRQDNTNKKAVNLWIVSDNLLRGAALNAVEIAEAYIKTKQ

SEQ ID NO: 93571 - protein, 174 aa, Unknown
  Bacterial polypetide isolated from the Sargasso Sea
MNIAIVGATGNVGRKTLEILDRKEFSIDNLYLVASSKSVGKKISFRGKEIDVLDLENFDFSKVNIAFFAAGGKISEKFAERAAKNCLVIDNSSFFRMDPEVPLIVPQVNSDDLKKIKKNIIANPNCSTAQLVIALKPLHDLFIIKRIVVSTYQSVSGGGKAPMDELIEQTKLVL

SEQ ID NO: 93572 - protein, 269 aa, Unknown
  Bacterial polypetide isolated from the Sargasso Sea
MNIAIVGATGNVGRKILEVLEKKELSIDNLYLLASSRSAGSKINFLGDEHEVLNLETFDFSRAKITFFAAGGKISEKFAEKAAKHSLVIDNSSFYRMDPDVPLIVPQVNSDHLNNIKKNIIANPNCSTAQLVIALKPLHDLFTIKRIVVSTYQSVSGGGKAQMDELIDQTKLILEKKKVESKNFTKQIAFNAIPQIDVFADDGYTKEELKMTNEIKKILGSKIELTATCVRLPVLVSHSESVNIEFEKLFTLEKVREALDNFEGLQSSR

SEQ ID NO: 93573 - protein, 347 aa, Unknown
  Bacterial polypetide isolated from the Sargasso Sea
MNQKYNIAVAGATGAVGTEIIQILEQRDFPIDNLYLLASSKSKGKKIEFKEKEILVEDLADFDFTKAHIGLFSPGGKISAEYAPKAAKAGCIVIDNTSYFRMQKNVPLIVPEVNANALDEFFQDENRTNIISNPNCSTIQMVAALKPLHEKSIINRVVVSTYQAVSGAGKTGMDELFNQTQNVYANQELKKEKFTKQIAFNAIPHIGAFLENGNTEEEQKMIDETKKILDEGINVSATCVRTAVFIGHSESVNIEFDSPLDEKEAREILSNSDGISVIDHRKDEGYVTPVEIAGEDKVYVSRIRNDDSVDNGLNLWVVSDNLRKGAALNAVQIAELVISKHTEHISI

SEQ ID NO: 93574 - protein, 320 aa, Unknown
  Bacterial polypetide isolated from the Sargasso Sea
TLEVLEKKKISIENLYLVASPKSAGKKIKFQGKEIEVYNLENFDFSKVKIAFFAAGGKISEKFAEKAAKYCLVIDNSSFFRMDPDVPLVVPQVNSDDLNNIKKNIIANPNCSTAQLVIALKPLHDLFVIKRIVVSTYQSVSGAGKAPMDELFEQTQLVLDGKNIKSQNFTKQIAFNAIPHIDVFSEDGYTKEELKMRNETKKILSDGIDLTATCVRLPISVSHSEAVNLQFEKSFSLEKVREALNNFEGCKVIDERVDGGYITPLEAEGRNETFISRIRKDKTIENGLNLWVVSDNLLRGAALNAVEIAETLINNNFYGK

SEQ ID NO: 93575 - protein, 282 aa, Unknown
  Bacterial polypetide isolated from the Sargasso Sea
MNEKYDIAVVGATGSVGREIVQILEQREFPVNNIYFLASSKSEGSKIQFDSKEIVVEDLSKFDFSKVQLGLFSPGSIVSAEYAPKAAAKGCLVIDNTSYFRMQKNIPLIIPEVNPEVLEDFFINDNRINIISNPNCSTIQMLVALKPLYDKAIINRIVVSTYQSVSGAGKNGMDELFNQTQNIYANKSIEKKEFTKQIAFNAIPHIDSFVENGNTKEEEKMINETKKILDSGIEVSATCVRVPIFVGHAESINIEFDSPLSDKEATETLKNSNAIKVIDYRK

SEQ ID NO: 93576 - protein, 234 aa, Unknown
  Bacterial polypetide isolated from the Sargasso Sea
MTNNNKFPSIAIVGATGAVGKVCLNILAERNYPAEKIKLFASERSAGKRISYNKNDLIVNEADKNSFKGSNVVFISADSEVSLSLAPAAVNSGAMVIDDGSAFRMKKNVPLVVPEVNEDDINFHEGIISIPNCTTTPLVMALDKLRKLSKIKRVHASTYQAVSGSGSLAVSELRNQTENILNNEEISKSVYPHQIAFSLIPQVDDFLEDGYTKEEHKMIKETKKILHDYDLSIS

SEQ ID NO: 93577 - protein, 278 aa, Unknown
  Bacterial polypetide isolated from the Sargasso Sea
MNIAIVGATGNVGRKTLEVLEKKELSIDNMFLVASSRSTGKKINFNGKEHEVHDLENFDFSKVKIAFFAAGGEISKKFAEKAAKNCLVIDNSSHYRMDPDVPLIVPQVNSKDLKNIKKNIIANPNCSTAQLVIVLKPLHDLFNIKRIVVSTYQSVSGAGKAPMDELIEQTKLALDSKKIKSKNFTKQIAFNVIPHIDSFSDYGYTKEELKMTNETKKILDDKIDLTATCVRLPVLISHSESVNIEFEKSYSLEKVKEVLDNFEGCKVIDERADGGYVT

SEQ ID NO: 93578 - protein, 335 aa, Unknown
  Bacterial polypetide isolated from the Sargasso Sea
MNIAIVGATGNVGRKILEVLEKKGLSIDNLYLIASTKSSGKKISFKGKEYQVSDLESFDFSKVKIAFFSAGGKISEKFAEKAAKNCFVIDNSSHYRMDPEVPLIVPQVNSEDLNNIKKNIIANPNCSTAQLVIALKPLHDLFTIKRVVVSTYQSVSGGGKAPMDELIDQTKMVLNNQKVEPRNFTKQIAFNIIPHIDIFSENGYTKEELKMVNETKKILDDKINLTATCVRIPVLVSHAESVNIEFEKTFTLEEVRKALDKFEGCKVIDERADGGYSTPLEAEGKDETFISRIREDKTLKNGMNLWIVSDNLLRGAALNAVEIAETLIKNNFYGK

SEQ ID NO: 93579 - protein, 166 aa, Unknown
  Bacterial polypetide isolated from the Sargasso Sea
MSISVAVVGATGNVGREILNILSDRKFPISRIAALASRKSVGSEVSFGDQSLKVKDLESFDFKNWDLALFAIGSEPTKKYSAIATKSGCTVIDNSSLFRYDFKVPLIVPEVNPQDIYNYKNKNIIANPNCSTAQMVVALKPLHDVAKIKRVVVSTYQSVSGAGKAA

SEQ ID NO: 93580 - protein, 331 aa, Unknown
  Bacterial polypetide isolated from the Sargasso Sea
MKVAVVGVTGVVGTVMLSLLDKRKFPITQIIPVASEKSVGNQIRFQGKNYTIVSLNDAVAMKPDIALFSAGGSISMEWAPKFADIGTRVVEYSSAWRMDSTKKLIVSEVNSETLTDDDYIIANPNCSTMQMLVVLAPLHKRFNIKRLVISTYQSVSGTGKNAIDQLYSERNGSDSEKVYPYSIDQNLLPHCDVFEEGGYTKEENKLINETKKILNDNSIQITSTAVRVPIEICHGESVNIEFEDDFKLEEVFSVLKNSPGLIVQDEPEKNLYPMPINASNKDEVFVGRIRRDFSIKSGLNLWIIADNLRKGAATNTIQIAEKLIEMGIVKS

SEQ ID NO: 93581 - protein, 335 aa, Unknown
  Bacterial polypetide isolated from the Sargasso Sea
MNIAIVGATGNVGRKTLEVLEKKELPIDNLYLLASSKSVGTKISFKGEDHKVSDLKNFDFSKVKITFFAAGGKISEEFGGKAAKHSIVIDNSSYYRMDPDVPLIVPQVNADHLNNINKNIIANPNCSTAQLVIVLKPLHDLFSIKRIVVSTYQSVSGGGKAPMDELIEQTKSVLEGKKVKSKNFTKQIAFNAIPHIDVFSEDGYTKEEIKMNNETKKILDVKIDLTATCVRLPISISHSESVNVQFEKPFSLDKVKEALDNFEGCKVIDERIDGGYSTPLEAEGRDETFISRIREDKTIKNGLNLWIVSDNLLRGAALNAVEIAETLIKNDFYEK

SEQ ID NO: 93582 - protein, 338 aa, Unknown; identical to SEQ ID NO: 93554
  Bacterial polypetide isolated from the Sargasso Sea

SEQ ID NO: 93583 - protein, 261 aa, Unknown
  Bacterial polypetide isolated from the Sargasso Sea
EEKIAEKFAEKAAKHTIVIDNSSFFRMDPDVPLIVPQVNAAEIKNMKKNIIANPNCSTAQLVIALKPLHNLFKIKRVVVSTYQSVSGGGKSPMDELVDQTKQYLDGKKIESKNFTKQIAFNVIPHIDVFADDGYTKEELKMTNETKKILDESIELTATCVRIPVLVSHSESVNIEFEKPYTLEKVRDVLSKADGCEVIDKRENGGYSTPLEATGKDETYISRIREDKTKKNSLNLWIVSDNLLRGAALNSVEIAETVINSK

SEQ ID NO: 93584 - protein, 235 aa, Unknown
  Bacterial polypetide isolated from the Sargasso Sea
PDVPLIVPEVNREAITNYEKTKIIANPNCSTIQMVVALKPLHDLGTIKRVVVSSYQSTSGAGKAAMDELFEQTKGIYSNNSIEPEIFQTQISFNVIPQIGPFVSSGYTEEEEKMINETKKILDNDIKVSATCVRVPTFIGHAESVNIEFENYISSEEASKVLAEAPGCLVDLDDKESYTTPIDCAGNDHTYISRIRNDDSVENGLNLWVVSDNLRKGAALNTIQIAEILEKDYLN

SEQ ID NO: 93585 - protein, 214 aa, Unknown
  Bacterial polypetide isolated from the Sargasso Sea
KIIANPNCTTIISLMAIKPLHELSSIKRIVATSFQSVSGAGNVGIKELLSETKRFLNGKGKAKNSIFERRIAFNAIPKIGGITRNLYSEEEMKLHNESRKILSDNKILITATTVRVPIIRSHSISLNVEFNKDVPLAKARKALNRFPGIKNININDSMEYPTPLDSSNKDNCLVGRLRKDYSVKHGLSLWVVGDQIRKGAALNAVQIAECLQKK

SEQ ID NO: 93586 - protein, 232 aa, Unknown
  Bacterial polypetide isolated from the Sargasso Sea
DNNVPLIVPEVNPEALKSHENIISNPNCSTIQLVLVLKPLHELYKIKRVVVSTYQAVSGAGKDSMDELFNQTREYLDNKKIKSKNFTKQIAFNLIPHIDTFVEDGYTKEEWKMENETKKILDKGIDLTATCVRVPVKTSHSESVNIEFEKDYDLKKIKETLSKSPGCKVIDEHKDAGYITPFEAEGDNFTYISRIRKDNSNKKAINLWVVSDNLLKGAALNTVQILETLIKK

SEQ ID NO: 93587 - protein, 193 aa, Unknown
  Bacterial polypetide isolated from the Sargasso Sea
HDKYKIRRVVVSTYQAVSGAGKASVDELFSQTKDYLDNKKIKSENFTKQIAFNLIPHIDSFVEDGYTKEEWKMENETKKILDKKIGITATCVRVPIKTSHSESVNIEFENEYDLEAVRKILTNAPGCKVIDEHKDGGYVTPVEAEGDYMTFVSRIRKDHSNKKALNIWVVSDNLLKGAALNTVQIAECLMKKK

SEQ ID NO: 93588 - protein, 286 aa, Unknown
  Bacterial polypetide isolated from the Sargasso Sea
KSKIKINNLYLVASKKSAGQKLRFNKNEIIVEQLEKYDFSKADITIFAAGSEIAKNWVPIAAKNTIVIDNSKYFRMHDDVPLVVAEVNPDELKKHKNIIANPNCSTIQLMLPLKPLHDKYKIKRVIVSTYQAVSGAGKASVDELFSQTKDFLDEKKINSKNFTKQMAFNLIPHIDDFVEDGYTKEEWKMENETKKILDNKIGLNATCVRVPVKTSHSESVNIEFEHEYEFDTVRNILKNAPGCKVVDDHKDGGYITPLEAEGDYLTFISRNRKDHSNNKALNIWVV

SEQ ID NO: 93589 - protein, 213 aa, Unknown
  Bacterial polypetide isolated from the Sargasso Sea
MGYKIVVVGATGNVGREMLTILSERQFPVDEIAALASRRSLGTEVSFGDQTIIIKDLETFDFEGWDIALFAIGSDATKTFAPKAAAKGCIVIDNSSLYRYDPNVPLIVPEVNAEALNEYSKKNIIANPNCSTAQMVVALKPLHDRARIKRVVVSTYQSVSGAGKEGMDELWDQTKSIYNPVTDVPPTKFTKQIAFKIIPHIDKFLDDGSTKEE

SEQ ID NO: 93590 - protein, 269 aa, Unknown
  Bacterial polypetide isolated from the Sargasso Sea
IEILEKSKIKISKLFLIASPRSEGKKMKFKDSEITIQSIEKYDFSNAPITFFAAGSKIAEQWVPKASKKTVVIDNSKFFRMDNDVPLIVPEVNPDQLEMYKKKNIIANPNCSTIQMVVALKPLHDRFNIKRVVVSTYQSVSGAGKAPMDELLSQSKDYLEGKKINSKNFTKPIAFNLIPHIDEFVDEGYTKEEWKMINETQKILDPKIKITATCVRVPVLVSHSESINIEFEKPFDVKEVQNILEKANGCKVLDERKDGGYITPLEAEN

SEQ ID NO: 93591 - protein, 202 aa, Unknown
  Bacterial polypetide isolated from the Sargasso Sea
ANGSSFKPLHDEYKIKRVIVSTYQAVSGAGKDPMDELFDQSRDYLDGKKIKLINFTKQIAFNLIPHIDSFSQDGYTKEELKMTNETKKILDNEIDVSATCVRVPVRTGHSESINIEFDNLYDFENIIKILKNAPGCKVIDERSDGGYITPLEAEGSYTTYISRIRKDNSNIKAINLWVVSDNLLKGAALNTVQIAECLMKKL

SEQ ID NO: 93592 - protein, 269 aa, Unknown
  Bacterial polypetide isolated from the Sargasso Sea
MNFAIIGASGNVGRKTIEILEKSKITIDNLFLVASSKSAGKKINFKNKEIEIEDLGNYNFSKAQITFFAAGSKVAKEWVPKAAKDTIVIDNSSYFRMQKDVPLVVPEVNSEALNKHKNIIANPNCSTMQMVLPLKPLHDEYKIKRVIVSTYQAVSGAGKDPMDELFDQSRDYLDGKKINPINFTKQIAFNLIPHIDSFDQDGYTKEELKMTNETKKILDNEIDVSATCVRVPVRTGHSESINIEFDNLYDFENIIKILKNAPGCKVIDE

SEQ ID NO: 93593 - protein, 228 aa, Unknown
  Bacterial polypetide isolated from the Sargasso Sea
MGFNYAVVGATGNVGREILQILAERSVPSSEVIAIASSASKGIEVPYGDDAVLKVDSLENFDFSNVDIVLSSPGANISREFAPKAAAAGAIVIDNTSEFRMDPEVPLVVPEVNAEALANYKAKNIIANPNCSTIQMVVALKPLHDEVGINRVVVSTYQSVSGAGKSAMDELFNQTRGIYANEPEQKFMENFTKSIAFNVIPHIDVFMEDGSTKEEWKMSVETKKIIDP

SEQ ID NO: 93594 - protein, 107 aa, Unknown
  Bacterial polypetide isolated from the Sargasso Sea
ISATCVRVPVLRAHSESINMKFAGVVEPKDALEELKKSSGIEIIEDYKNNRFPMPNDVMGRDNVAVGRLRTDISQPNGLELWLCGDQIRKGAALNAVQIAELLIPKK

SEQ ID NO: 93595 - protein, 185 aa, Unknown
  Bacterial polypetide isolated from the Sargasso Sea
VSTYQSVSGAGNAHINELEEQSKKVLDKQKVRSKNFTKQIAFNVIPHIDTFMEDRYTKEEWKMTVETKKILDPNISLSATCVRVPVFVGHSESVNVEFNSEVDAEKIKKCLEKAPGCKVVDEVKDGGYITPVESSGDSTTYISRIRNDNTQKNSINMWVVSDNLLKGAALNAVQIANVLIKKYIN

SEQ ID NO: 93596 - protein, 222 aa, Unknown
  Bacterial polypetide isolated from the Sargasso Sea
SHILNDFNTPGIIANPNCSTIQMLVALKPLHDEFVIERIDVTTFQAVSGTGKLATEELINQIDAYKGSMKLNSFIYAKPIANNVLPHCDEFEENRYTKEENKLVKETKKILDPDIKVAATCVRVPVLNGHSESVHIQTKKPIAEDLALKLLKESPGLSIRYGESEDDYPTAFTDGAGNGLVHVGRIRKDLWEENRLNLWVVADNLLKGAALNSIQIATLLFD

SEQ ID NO: 93597 - protein, 308 aa, Unknown
  Bacterial polypetide isolated from the Sargasso Sea
MTNKYNIAVVGATGNVGREMLQILQERNFPLENLHCVASSRSKGKKINFGDKEIVVEDLSEFDFSKVHISLFSPGSSVSAKFAPIAAKNNCLVIDNTSYFRLKDDVPLVVPEVNIEVLQDFFNNESRSNIIANPNCSTIQMVAALKPIHDAAIINRIVVSTYQSVSGAGKEAMDELFEQTKNIYSNKNIERKKFTKQIAFNVIPHIDSFLDNGNTKEEQKMIDETKKILDSNIKVSATCARVPVFISHSESINLELDSPLSDLEARKILDNSHYISVVDYRKDEGYVTPVEAAGEDKVYVSRIREIIQ

SEQ ID NO: 93598 - protein, 149 aa, Unknown
  Bacterial polypetide isolated from the Sargasso Sea
LIPWIDKDLGNGMSKEEWKGGAETNKILGKPAMGEPGSIPVDGLCVRIGAMRCHSQALTIKLNKDVPLDEINGILASANDWVKVVPNEREASMRDLSPANVTGTLTVPVGRLRKLAMGGEYLSAFTVGDQLLWGAAEPLRRMLRILLDK

SEQ ID NO: 93599 - protein, 252 aa, Unknown
  Bacterial polypetide isolated from the Sargasso Sea
MQSNLEAIVIDDSSAFRMNDTVPLVVPEVNGDDCKWHEGIISIPNCSTTPLVMVLQALRELSEITRVTASTYQSVSGAGSAAMTALTSESTDLMNDKDVYPHKDQIGFNVIPRIDEFLDNGYTKEEQKMIDESKKILHLPNLSVSATCARVPVYISHSEAVHIEFKNSVHLEDVRNQLNDFPGITVMDDPKRDIYPMPYDIEGKDDVYVGRIRKDTSVDNGIVLWIVSDNLRKGAALNSLQIAETLVKLELV

SEQ ID NO: 93600 - protein, 240 aa, Unknown
  Bacterial polypetide isolated from the Sargasso Sea
MNFAIIGATGNVGRKTIEILEKSKIKITNLFLVASEKSEGKKIKFKGKEIQIQSLENYDFSSAQITFFAAGSKIAEHWVPKASKKTTIIDNSKCFRMDEDVPLVVPEVNPEKLAMYKKKNIIANANCSTIQMVVVLKPLHDNFGIKRVIVSTYQSVSGAGKAPMDELASQSKDFLAGKKINSQNFTKQIAFNLIPHIDEFVEEGYTKEEWKMVNETKKILDPKIKLTATCVRVPVMVSLC

SEQ ID NO: 93601 - protein, 308 aa, Unknown
  Bacterial polypetide isolated from the Sargasso Sea
YERKFPIEKIYPLASEKSAGKEVMFGDKKISVQKLEQFDFNLVDFVLLSAGSDVSKKIAPLASNKNCFVIDNSSAWRMNPEVPLVVPEVNASVLDSLNGKKIIANPNCSTSQLVVALSPLHEEAEIKRVVVSTYQSTSGAGQKAMDELFNQTKSIFVNDPIKIENFTKQIAFNVIPHIDIFLDDKSTKEEWKMVVETKKILDPKIKLTATCVRVPTFVGHAEAINIEFNKPISADRAKEILRESPGLMVVDKNEDGGYTTPIDCVGDYATFVSRIREDPTVENGLSIWVVSDNLRKGAALNAVQIAES

SEQ ID NO: 93602 - protein, 241 aa, Unknown
  Bacterial polypetide isolated from the Sargasso Sea
KLKFGSLFLVASSKSAGKTIKFRNKEIEIENLEDYDFSKAQITFFAAGSQIAKEWAPKAAKKTIVIDNSSYFRMQKDVPLVVSEVNPEALDKHNNIISNPNCSTMQMVLPLKPLHDEYKIKRVVVSTYQAVSGAGKAPMDELFNQTKKYLEGKKFTSQNFTKQIAFNLIPHIDAFEKDGYTKEELKMTNETKKILDNEIEVTATCVRVPVRTGHSESINIEFDNLYDFENINHILKNAPGC

SEQ ID NO: 93603 - protein, 261 aa, Unknown
  Bacterial polypetide isolated from the Sargasso Sea
SEAYASKAANHSIVIDNSSFYRMDPDVPLIVPQVNADDLKNIKKNIIANPNCSTAQLVLPLKPIHDLFKIKRVVVATYQSVSGGGKAPMDELVEQTKLALENKKIESKNFTKQITFNLIPHIDVFADDGYTKEELKMTNETKKILDQNIELSATCVRVPVLVSHSEAVNLELEKEFTIDQIKECLEKMEGCKVIDERKDGGYSTPLEATGKDETFISRIREDKTKKNCLNMWIVSDNLLRGAALNAVEIVETLIKNNFYGK

SEQ ID NO: 93604 - protein, 178 aa, Unknown
  Bacterial polypetide isolated from the Sargasso Sea
MKPVNVAVVGATGAVGEVMIEILESRGFPVDTLYPLASSRSAGKSVQFRGKHHTVQDLSTFDFSQTPIGLFSAGGDISAEYAPIAASAGCVVIDNTSHFRRDEDVPLVIPEVNPEAIADFGSRGIIANPNCSTIGMLVALKPLYDAVGIERINVATYQAVSGTGKAAIQELAGQTARL

SEQ ID NO: 93605 - protein, 256 aa, Unknown
  Bacterial polypetide isolated from the Sargasso Sea
MSIKYNIAIAGATGNVGREIIQILEDKDFPIDKLYFLASSRSKGQTIEFRGEEIIVEDLAEFDFSKVQIGLFSPGGKVSAEFAPKAAKAGCLVIDNSSHFRMKEDIPLIVPEVNESILEDFFNNENRRNIIANPNCSTIQMVVALKPLHDKAIINRVIVSTYQSVSGAGKEAMDELFNQTQNIYTNKNIEKNKFTKQMAFNVIPHIDIFLDNGSTKEEQKMVDETKKILDEGIKVSATCVRVPVFISHAESINIEF

SEQ ID NO: 93606 - protein, 287 aa, Unknown
  Bacterial polypetide isolated from the Sargasso Sea
MNFNIAIVGATGNVGREMLNILSEKKYGASKIFPVASSRSEGMEIEFGEDKLIVESIEKFDPSKVELALFSAGASTSKEWAPKFAEKNCIVIDNSSHFRMEEDIPLIVPEVNPSDLNNYKKRNIIANPNCSTIQLVVALKPLHEISKIKKVIVSTYQSVSGAGKAGMDELFEQTKNMFSDDIKDNVKFTKPIAFNVIPHIDKFMDDGYTKEELKMRQETHKILSNEISFSATCVRVPVFIGHSEAVNIEFENKVSVEEAREAIKNAPGCTLLDERADGGYVTPKECA

SEQ ID NO: 93607 - protein, 270 aa, Unknown
  Bacterial polypetide isolated from the Sargasso Sea
MKNVVIAGATGAVGNEFLKLLEAREFPVKNLRLLASARSIGKKLEFRGEKIPVEQLTSKSFSGVDLAFFSAGRESSKVYIPHAVESGTVVIDNSSAFRMDPDVPLVVPEINPESVFKHKGIIANPNCSTIQMVVALNPLHKAAKIKRVVVSTYQSTAGAGAKGMNELLNQARAWASGEELEISSFPSQILFNLFPHVDIFMENGYTKEEMKMVNETKKIMNTPDMGISATCVRVPVLRSHSEAVWIETEKKITPEEAKEILTKSPRVNCT

SEQ ID NO: 93608 - protein, 271 aa, Unknown
  Bacterial polypetide isolated from the Sargasso Sea
GREMLTILSERQFPVDEITALASRRSLGTEVSFGDQTIITKDLETFDFEGWDIALFAIGSDATKAFAPKAAAKGCIVIDNSSLYRYDPNVPLIVPEVNAEAITEYSKKNIIANPNCSTAQMVVALKPLHDRARIKRVVVSTYQSVSGAGKEGMDELWDQTKSIYNPVTDVPPTKFTKQIAFNVIPHIDKFLDDGSTKEEWKMVAETKKIIDTSIKVTATCVRVPVFVGHSEAINIEFEDFLDEDEARDILREAPGVMVIDKRDDGGYVTPI

SEQ ID NO: 93609 - protein, 291 aa, Unknown
  Bacterial polypetide isolated from the Sargasso Sea
EGKKIKFKGNEIQIQSLEKYDFSSAQITFFAAGSKLAEKWVPNASKKTIVIDNSKFFRMDKDVPLVVPEVNPEQLAMYKKKNIIANANCSTIQMVLVLKPLHDHFNIKRVVVSTYQSVSGGGKASMDELISQSKDYLSGKKIESKNFTKQIAFNLIPHIDEFVDEGYTKEEWKMENETKKILDPKIKMTATCVRVPVMVSHSESINVEFEKNFDIKKVKEILSSAAGCKVVDERKNGGYTTPVEAENSYLTFISRIRKDNSNDKALNMWVVSDNLLKGAALNTVQIAERLI

SEQ ID NO: 93610 - protein, 272 aa, Unknown
  Bacterial polypetide isolated from the Sargasso Sea
MSAKFNIAIAGATGNVGREIIQILEDKEFPVDQLYLLASSRSKGQAIEFRGEELIVEDLAEFDFSKVQIGLFSPGGKVSAEFAPKAAKAGCLVIDNTSYFRMHDNVPLIVPEVNASALEDFFNNDYRSNIIANPNCSTIQMVVALKPLHDKAIINRVVVSTYQSVSGAGKEAMDELFNQTQHIYTNKNIEKNKFTKQMAFNVIPHIDTFLENGSTKEEQKMVNETKKILDEGIKVSATCVRVPVFISHAESVNIEFDSPLSDVEATKLLKNL

SEQ ID NO: 93611 - protein, 220 aa, Unknown
  Bacterial polypetide isolated from the Sargasso Sea
MSQKYNVAVLGATGLVGRQIIETLADRKFPVDQLFLLASSRSAGEDIKFRGETIEVQDVEGFDFSQAHIGLFSAGGSVSEKYAPIAADAGCIVIDNTSHFRNDFEIPLVVPEVNASSLADFRNRNIIANPNCSTIQMMLALKPIYDAYGIDRINVSTYQAVSGAGKEAVDELAKQTANLMNARPMDNEIFPKQIAFNVIPQIDSFEENGYTREEMKMVNE

SEQ ID NO: 93612 - protein, 232 aa, Unknown
  Bacterial polypetide isolated from the Sargasso Sea
PDVPLVVPEINPESALKHKGIIANPNCSTIQMVVALNPLHKVAEVKRVVVSTYQSTAGAGAKGMNELLNQTRAWANGEALEVSSFPSQILFNLFPHVDIFLENGYTKEEMKMINETKKIMNAPNMGISATCVRVPVLRSHSEAVWIETEKKITPEEARQILKKSPGLIVRDEPANGGYPMPWDVDKTIETFVGRIREDFSHPKGLTFWVVADNLNKGAALNSIQIAEVLEAG

SEQ ID NO: 93613 - protein, 284 aa, Unknown
  Bacterial polypetide isolated from the Sargasso Sea
MKIAIIGATGLVGRKIINLSEEYFPKDTSYTFFASSKSKGTELVINKNKLIVQELIDENISKFDIALFSAGGDRSREFAKKFIEHGAYVIDNSSAFRHDDEVPLVVYGINEETININTKLIANPNCTTMGLVMALKPLHDKFNLKSITPVAYQAVSGSGTQAVDSLSREIEMGDDLKEDYADGFYSRPIAKNVIPVAGNLLENGYSDEEMKFVNESRKILSIDDLIVEPSNARVGVKTGHGTFCSAVFENEVSRESAIDEINNFDGIEYWDDPLPTPLDAEGRD

SEQ ID NO: 93614 - protein, 280 aa, Unknown
  Bacterial polypetide isolated from the Sargasso Sea
MIVEDLAEFDFSKAHLGLFSPGGKISAEYAPKAAKAGCLVIDNTSYFRMKNDVPLIVPEVNASDLEDFFNNEERSNIIANPNCSTIQMVVALKPLHDQAIINRVIVSTYQSVSGAGKDAMDELFNQTQNIYANKNIEKNKFTKQIAFNVIPHIDTFVDNGNTKEEEKMINETKKILDEGIKVSATCVRVPVFISHAESINVEFDSPLSDQEASKLLKEFDGVSVIDFRKDEGYVTPIEAAGEDKVYVSRIRNDTSVDNGLNIWVVADNLRKGAALNAVQI

SEQ ID NO: 93615 - protein, 216 aa, Unknown
  Bacterial polypetide isolated from the Sargasso Sea
PNCTTMAAMPVLAPLHAEAGLRTLTVSTYQAVSGAGLAGVDELASQVEAVADGAAGLAHDGRAVEFPQPSSFARTIAFNVLAHAGSFVDDGRGETDEEQKLRNESRKILGIPDLMVSGTCVRVPVFTGHSMSVHAEFDRPISPERATELLADAPGVVLADVPTPLDAAGVDPTIVGRIRIDETRSNGLALFLAGDNLRKGAALNTIQIAEELLKRG

SEQ ID NO: 93616 - protein, 288 aa, Unknown
  Bacterial polypetide isolated from the Sargasso Sea
MSISPSNPPHVGIVGATGLVGEMMRGLLAERNFPLASLRLFASARSAGKTIRFGQADIVVEDAASADYAGLDIVFFSAGGETSKALAPQVAAAGALVIDNSSAWRSDPQVPLVVAEVNPHALADLPKGIIANPNCTTMAAMPVLKPLHDAAGLKRLTVSTYQAVSGGGIEGIRVLEDQSRATVGQGAALARDGGAVDFGAPEKWVVPIAANVVALNYTLGEDGYTDEELKLRDESRKILEIPGLPVSGTCVRVPVFTGHSLSINVEFERPLSAAHALDLLAQAPGVGG

SEQ ID NO: 93617 - protein, 302 aa, Unknown
  Bacterial polypetide isolated from the Sargasso Sea
KKENFPIDEIRLCASERSVSKKLTLRGEQIEVELCTPELLKEVDFSFISASGDISREIAPLSAANGAIAIDDSSAFRMDPNVPLVVPEVNADDLNNHSGIVSIPNCSTTPLVMVMQALSKNAKIHRVVVDTFQAVSGTGAAAVREMTTQSGNLLNDKEIEIQEYPHQIAFNVLPHIEPFQENGYTREEMKMVNETRKILHDPNVMVSATCVRVPVTISHSEAMHIEFDRPISTDEARELINNSSGMKVMDDPSNDIYPMPINSTGIDDVLVGRIRQDVSNPNGIALWAVCDNLRKGAALNAI

SEQ ID NO: 93618 - protein, 286 aa, Unknown
  Bacterial polypetide isolated from the Sargasso Sea
NEFLKLLEAREFPVKNFRLLASARSIGKKLEFRGEKIPVEQLTSKSFSGVDLAFFSAGRESSKVYIPHAVESGTVVIDNSSAFRMDPDVPLVVPEINPKSAFKHKGIIANPNCSTIQMVVALNPLHKAAEVKRVVVSTYQSTAGAGAKGMNELLNQTRAWANGEALEVSSFPSQILFNLFPHVDIFMENGYTKEEMKMINETKKIMNAPNMGISATCVRVPVLRSHSEAVWIETEQKITPEEAREILKKSPGLIVRDEPANGGYPMPWDVDETVETFVGRIREDFS

SEQ ID NO: 93619 - protein, 190 aa, Unknown
  Bacterial polypetide isolated from the Sargasso Sea
MNIAIVGATGLVGRKIIKLCEEFFDNSVEFQLFASKTSEGKILSVNDIDVEIKELNNKNIKPCDIALFSAGGVRSKEYANEFVDRGAFVIDNSSTFRMNDEIPLVVYGINENTINEKTKIIANPNCTTMALVMALKPLHDIFKLVGIVPVSYQAVSGSGKDAVESLNNELLNLQNSGSAPDEKYYKTQIA

SEQ ID NO: 93620 - protein, 245 aa, Unknown
  Bacterial polypetide isolated from the Sargasso Sea
VIDNTSFYRMKKDVPLIVPEVNPKAIEKIKKGIIANPNCSTIQMVVALKPIHDLFKIKKIVVSTYQSTSGAGKSAMDELFHQTLDVYKNKPLIPKQFTKRIAFNLIPHIDDFLENGFTKEENKMIEETQKIMDSKIEIFSTCVRVPVFVGHGESVFVETEKEIDLKKLITKIKKFPGLSLVDKKIDGGYVTPDESAGEDDVFVSRMRLGLSKKTLGLWIVADNLRKGAALNSIQIAELILKKKIK

SEQ ID NO: 93621 - protein, 298 aa, Unknown
  Bacterial polypetide isolated from the Sargasso Sea
IEQLNLVASKNSSGKKIKFKGKDLTVVALDNYDFENADITFFAAGSSIAEKYAKNASKKTIVIDNSKYFRMDKNVPLIVPEVNPEDIKRHKNIIANPNCSTIQMVLALKPLHEKFNIKRVVVSTYQAVSGAGKAAMDELVSQTQDFLDKKKIKSKNFTKQIAFNLIPHIDVFVEDGYTKEEWKMENETKKILDDNIKVSATCVRVPVITSHSESVNIEFDKNYNINEVKKLLSKTPGCKLVDEHIDGGYITPLEAQDDSKTYISRVRKDRSSEKAINMWIVSDNLLKGAALNSVQMQK

SEQ ID NO: 93622 - protein, 271 aa, Unknown
  Bacterial polypetide isolated from the Sargasso Sea
IGATGAVGVELINVMFDRKFPVGELTLFASERSAGKTVETKFGTKTVALFSVEEAKQCDIVFLAVSGDFAKEYAPKIAEGALVIDNSSAFRLNDDVPLIVPEINGHLAKTAKLIANPNCTTAIAAVALWPLHQAFGLKKVIVSTYQAASGAGQPGMNELREGLAAGLAGKPVPAEVFSSPLAFNVIPHIDSFQDNGYTREEMKVTWETRKIFGAPDLPVSCTAVRIPTERTHSEAIVVETEKVVTPDAAREVLAKAKGVKLVDDPANNKYP

SEQ ID NO: 93623 - protein, 267 aa, Unknown
  Bacterial polypetide isolated from the Sargasso Sea
AAGSKIAEKWVPKASKKTIVIDNSKFFRMDRDVPLVVPEVNPEQLAMYKKKNIIANANCSTIQMVLVLKPLHDHFGIKRVVVSTYQSVSGAGKAPMDELVSQSKDFLAGKKINPQNFTKQIAFNLIPHIDEFVDEGYTKEEWKMINETKKILDPKIKLTATCVRVPVMVSHSESINVEFEKPFDIKKVKDILSKTEGCKVLDERKNGGYITPLEAENSYMTFVSRIRKDDSNNNALNIWVVSDNLLKGAALNTVQIAEKLIKNYYGK

SEQ ID NO: 93624 - protein, 243 aa, Unknown
  Bacterial polypetide isolated from the Sargasso Sea
MSKKYNVAVVGATGAVGKMMIQILLERNFPIKKLYLLASKKSEGKKLKINGEEYLITSLEDFDFKDTDIALFSAGGEISKKYASVATKNNTIVIDNTSFFRYEKNIPLIIPEVNGDEISKYNETGIIANPNCSTIQMLVAIKPIHDVCKIKRINVCTYQAVSGSGSLAIEELKDQVHAYTNNKDIKSNVYPKQIAFNVIPQIDKFMDNGYTKEEMKMVWETKKILDNSIEVNPTTVRVPVFYG

SEQ ID NO: 93625 - protein, 193 aa, Unknown
  Bacterial polypetide isolated from the Sargasso Sea
VQIKRIVVSTYQAVSGAGKAQTDELFSQTESFLKGETVKSKNFTKQIAFNLIPHIDTFVEDGYTKEEWKMENETKKILDKKIELTATCVRVPVKTSHSESVNIEFENEYDLEKVKKILTKAPGCKVVDEREDGGYITPAEAEGDNLTFISRVRKDNSNKKALNMWIVSDNLLKGAALNSVQIAEILVKKLNEK

SEQ ID NO: 93626 - protein, 217 aa, Unknown
  Bacterial polypetide isolated from the Sargasso Sea
STLSWGNQEIIVEDSAKADWSNVDIALLSAGKTASLEISPVIAASGATVVDNSSGWRMDPEVPLVVSEVNPEALDEITKGIVANPNCTTMVAMPVLSPLHKRAGLLSLRISTYQAVSGAGLAGVEELEGQINSATGKATQLAYDGKAHEFPEPSSFPQSIAFNVLPHAGSFVDDGRGETDEEQKLRNETRKILNIPNLLVSPVCVRVPVFTRSLLWL

SEQ ID NO: 93627 - protein, 313 aa, Unknown
  Bacterial polypetide isolated from the Sargasso Sea
MKKIFQFDNIVPLASHRSVGSNIKFGKELIAVKDLATYDFKDIDIAFFSAGAEVSQQYVPIATKAGAVVIDNTSEFRYQEDIPLVVPEVNKEAIDSHTKHSIIANPNCSTIQMLVALKPIHERFNIKNINVSTYQAVSGSGKKGIKELLEQTHSYLNQREISKSVYPSQIAFNVIPFVDSFLDNGYTKEEMKMVWETQKILDKNISVDATAVRVPVLIGHSESISIETEKVIDIDQVVNDYKTNDKIELIDDPANFEFPTAVEHGNGTDKVFVGRIRKSQINDKILNIWVVADNVRKGAALNSVQIAEHLIKG

SEQ ID NO: 93628 - protein, 268 aa, Unknown
  Bacterial polypetide isolated from the Sargasso Sea
WRIHISLFSAGGKRSKDYAHNFIDNGSFVVDNSSVFRMNDEVPLVVYGINENIITEESKLISNPNCTTMGLVMALKPLHDNYTLSSMTPVAYQAVSGSGSEAIKSLEKETLLGNKLDANYQQAYYSNPIAQNVIPLAGSLTDNGYSDEEMKFVHESRKILSIPDLVVEPSNARVGVRTGHGTFCSAVFENEVNLEECTDLLNNFEGVEVWNDSLPTPIDVEGKDEVLVSRLRQGLSSKNILNFWVVSDNLLKGAALNAVQIAKFVEKL

SEQ ID NO: 93629 - protein, 246 aa, Unknown
  Bacterial polypetide isolated from the Sargasso Sea
NVGREVLDIIDEKEIQYSDLVALASSRSKGSTIDFGENKSITVGDLAEYDFSDTDIAIFSPGAKISSEFAPKAAKKGCIVIDNTSHFRTDPDVPLVIAEVNPEALKNFRNKNIISNPNCSTMGMLVAVKPLHEQFKVKRIVVSTYQSVSGAGKEAADELFNQTKSIYANEAVVKEKFTKQIAFNVIPHIDVFLEDGQTKEEWKMYNETKKILDESIELTATCVRVPVFVAHSLAVNLEFEKPFEED

SEQ ID NO: 93630 - protein, 230 aa, Unknown
  Bacterial polypetide isolated from the Sargasso Sea
PQVNADNLKNIKKNIIANPNCSTAQLVLPLKPIHDLFKIKRVVVATYQSVSGGGKAPMDELIEQTKLALENKKIESKNFTKQISFNLIPHIDVFADDGYTKEELKMTNETKKILDQNIELSATCVRVPVLVSHSEAVNLELEKEFTIDQIKECLEKMKGCKVIDERKDGGYSTPLEATGKDETFISRIREDKTKKNCLNMWIVSDNLLRGAALNAVEIAETLIKNNFYGK

SEQ ID NO: 93631 - protein, 304 aa, Unknown
  Bacterial polypetide isolated from the Sargasso Sea
VGDLLGTEVSFEIKQIITKDLETLNFEGGDIALFAIGSDATKTFAPKAAAKGCIVIDNSSLYRYDPKVPLIVPEVNAEAITEYSKKNIIANPNCSTAQMVVALKPLHDRARIKRVVVSTYQSVSGAGKEGMDELWDQTKSIYNPVTDVPPTKFTKQIAFNVIPHIDKFLDDGSTKEEWKMVAETKKIIDTSIKVTATCVRVPVFVGHSEAINIEFEDFLDEDEARDILREAPGVMVIDKRDDGGYVTPIECAGDYATFISRLRQDSTIENGLNLWCVSDNLRKGAALNAVQIAETLGQRVLKKG

SEQ ID NO: 93632 - protein, 246 aa, Unknown
  Bacterial polypetide isolated from the Sargasso Sea
MSSNFRYEDDVPLIIPEINGEIVSRLSKPSLIANPNCSTAQLLLALKPIHDQVEIKFLNIATYQAVSGTGKAALEELHNQTYFTDSEIESPVYPKQIAFNVIPQCDIFLENNSTKEEMKLTWETHKILDPNILVQATCVRVPVFNGHSEAVFFKVSKAISREEIIETLESSPGIKVLDDPKDEVYPTPVECASDTEEVYVGRIRSQELDGDTWISMWIVADNVYGKGAALNAVQICERLLVVNSLQ

SEQ ID NO: 93633 - protein, 243 aa, Unknown
  Bacterial polypetide isolated from the Sargasso Sea
NSSFFRYKEDVPLIVPEVNASDLKKNSSGGLIANPNCSTIQMLTAIKPIHDEFIIERIDITTFQAVSGTGKEAEKELISQSSSKFTDVNLKLNVNVYKKPIAFNVIPECGEFQENRYTEEEMKLVWETKKIMDSSIQVNATCVRVPVINGHSESIHLKTKKDINLDKVLEILKNKEGLSVFYGKGPDDYPTPLTDSNGKNNVFVGRLRKDLWDENRLNLWVVADNLRKGAALNSFQIAKLLFH

SEQ ID NO: 93634 - protein, 263 aa, Unknown
  Bacterial polypetide isolated from the Sargasso Sea
FFSAGANVSRVFAPKAANAGTIVIDNTSEFRYDDHIPLIVPEVNAHALKDFRKSNIIANPNCSTIQMLVALNPIHQAARIKSINVSTYQSISGAGRSMLNEYDRQVLDSNYPQHEESLFAHNVIPQIGSFENNGYTLEEMKMVWETHKIFEDKSIEVNPTAVRVPVRYGHSESIGIITESYLSIGEVRELLSGSLGIQLMQDDESYPMPLKEGEGTDDVYIGRIRADLNHSNGINLWVVADNIRKGAALNSIQIAETIIESDY

SEQ ID NO: 93635 - protein, 264 aa, Unknown
  Bacterial polypetide isolated from the Sargasso Sea
SEGKKIKFKDNEIKIQSLEKYDFSNAQITFFAAGSKIAEKWVPKASKKTVVIDNSKFFRMDKDVPLVVPEVNPEQLSMYKKKNIIANANCSTIQMVLALKPLHDNFIIKRVIVSTYQSVSGAGKAPMDELISQSQDYLAGKKISSKNFTKQIAFNLIPHIDEFVDEGYTKEEWKMVNETKKILDPKIKLTATCVRVPVMVSHAESINVEFEKSFDIEKVKNILNKADGCRVLDERKNGGYVTPLEAENSYITFISRIRKDGSND

SEQ ID NO: 93636 - protein, 274 aa, Unknown
  Bacterial polypetide isolated from the Sargasso Sea
KKIKFKGNEIKIQSLEKYDFSSAQITFFAAGSKIAEKWVPKASKKTIIIDNSKFFRMDKDVPLVVPEVNPEQLAMYKKKNIIANANCSTIQMVLVLKPLHDHFNIKRVVVSTYQSVSGGGKAPMDELISQSKDYLSGKKIESKNFTKQIAFNLIPHIDEFVDEGYTKEEWKMENETKKILDPKIKMTATCVRVPVMVSHSESINVEFEKNFDIKKVKEILSSATGCKVIDERKNGGYITPVEAANSYLTFISRIRKDNSNDKALNMWVVSDNLL

SEQ ID NO: 93637 - protein, 268 aa, Unknown
  Bacterial polypetide isolated from the Sargasso Sea
FAAGSKIAEEWVPKASKKTIVIDNSKFFRMDKNVPLVVPEVNPEQLSMYKKKNIIANANCSTIQMVLVLKPLHDNFKIKRVVVSTYQSVSGGGKAPMDELISQSKEYLSGKKIESKNFTKQIAFNLIPHIDEFVDNGYTKEEWKMENETKKILDSKIRLTATCVRVPVMISHCESINVEFEKDFDIKKVREILASTAGCQVLDERKNGGYITPVEAENSPLTFISRIRKDSSNEKALNMWVVSDNLLKGAALNTVQIAEKLIEEHYGK

SEQ ID NO: 93638 - protein, 260 aa, Unknown
  Bacterial polypetide isolated from the Sargasso Sea
APKAAAKGCIVIDNSSLYRYDPKVPLIVPEVNAEAITGYSKKNIIANPNCSTAQMVVALKPLHDRARIKRVVVSTYQSVSGAGKEGMDELWDQTKSIYNPVTDVPPTKFTKQIAFNVIPHIDKFLDDGSTKEEWKMVAETKKIIDTSIKVTATCVRVPVFVGHSEAINIEFEDFLDEDEARDILREAPGVMVIDKRDDGGYVTPVECAGDYATFISRLRQDSTIENGLNLWCVSDNLRKGAALNAVQIAETLGQRVLKKG

SEQ ID NO: 93639 - protein, 258 aa, Unknown
  Bacterial polypetide isolated from the Sargasso Sea
GNVAAEKTIVIDNSKFFRKDPEVPLVVPEVNAKDLVNFKNKNIIANANCSVIPLVVALKPLHDLYSIKRIVVSTYQSVSGAGKEPMDELLSQTNEYFENKKLESKFFTKQIAFNAIPHIDSFLESGYTKEEQKTTDEVKKILDNKIKVTSTCVRIPVLVSHSLSTNVEFNKKYNLDEIRNVLSTSPGCKVIDELKDGGYITPVEAEDKFETFISRIRQDESQPNTINLWIVSDNLLKGAALNAVEIAETLIEKDFYGK

SEQ ID NO: 93640 - protein, 164 aa, Unknown
  Bacterial polypetide isolated from the Sargasso Sea
MSSTLPNRPLNVAVLGASGAVGQELLLLLEERRFPVGELKLLASARSAGQTQSWNGRTLTVEEVSAQSFEGVDLVLASAGGSVSKQWREAITAAGAVMVDNSSAFRMEEGVPLVVPEVNPDAAFAHKGVIANPNCTTILLTLALAPLAAKRAMRRVVVSTYQSA

SEQ ID NO: 93641 - protein, 300 aa, Unknown
  Bacterial polypetide isolated from the Sargasso Sea
AIIGASGNVGRKTIEILEKSNLPMDDLFLIASSKSAGKKIKFKNKEIKIENLEDYNFSKAQITFFAAGSQIAKDWVPKAAKKTIVIDNSSYFRMQKDVPLVVPEVNPDALNHHKNIISNPNCSTMQMVLPLKPLHDEYKIKRVIVSTYQAVSGAGKAPMDELFNQSKDYLNGKEIKSINFTKQIAFNLIPHIDSFEKDGYTKEELKMTNETKKILDKEIEVSATCVRVPVKTGHSESINIEFDNLYDFENIRKILKSAPGCKVIDEHKDGGYITPLEAEGEHTTYISRIRKDHSNIKAIN

SEQ ID NO: 93642 - protein, 204 aa, Unknown
  Bacterial polypetide isolated from the Sargasso Sea
MVVALKPIHDIAEISRVNVATYQAVSGSGKSGITELANQTSDLLNARAIQSNVYPAQIAFNCLPHIDEFQDNGYTKEEMKMVWETKKIMECPSIEVNPTAVRVPVFFGHSEAVHFETNRKVSREQVTLALQKAPGVTVIDDRNDGGYPTPIEHAVENDDVFVGRIREDISHPRGISMWVVSDNIRKGAALNSVQIAEILVQSHL

SEQ ID NO: 93643 - protein, 218 aa, Unknown
  Bacterial polypetide isolated from the Sargasso Sea
KKKNIIANANCSTIQLVLALKPLHDQFKIKRVVVSTYQSVSGAGNAHMNELEEQSKKVLDKQKVVSKNFTKQIAFNVIPHIDSFMEDGYTKEEWKMIVETKKILDSNVSLSATCVRVPVFVGHSESVNIEFNSAVNANKIRECLKKAPGCKVVDEIKDGGYITPVESSGDFTTYISRIRDDKTQKNSINMWVVSDNLLKGAALNAVQIANVLIKKYIN

SEQ ID NO: 93644 - protein, 245 aa, Unknown
  Bacterial polypetide isolated from the Sargasso Sea
CFRMDDKVPLIVPEVNPEAINGYKNKNIIANPNCSTIQLVVALKPIHKKYEISRVVVSTYQAVSGAGKPAMDELFSQTKGVFVHDQAKPEQFTKKIAFNVIPHIDIFMDDGFTKEEWKMRVETKKILDPNIDLVAHCVRVPVFIGHSEAVFIECKKDIDEKNVRSLLRDANGVTVVDHRADEGYVTPEEVAGEDDVYISRIRKDPSVKNGIVFWCVGDNLRKGAALNTVQIAELLASKKIKGVPL

SEQ ID NO: 93645 - protein, 219 aa, Unknown
  Bacterial polypetide isolated from the Sargasso Sea
LDDYTLPGIIANPNCSTIQMLVALKPLHDEFIIERIDVTTFQAVSGTGKKATEELMNQIDAYEGNTELKSSVYAKPIANNVLPHCDEFEENRYTKEENKLVRETHKILDPNIHVAATCVRVPVLNGHSESVHIKTKRPVSEELALKLLQEAPGLSVKYGKSEEDYPTAFTDGDGSYFVQVGRVRKDLWDENRLNLWVVADNLLKGAALNSIQIASLLFD

SEQ ID NO: 93646 - protein, 293 aa, Unknown
  Bacterial polypetide isolated from the Sargasso Sea
VRSLSDFDFEGTDIALFSPGAKVSAIHATRAASKGCVVIDNTSQFRMESDVPLVVPEVNPEAISGYSNRNIISNPNCSTIQMVVALKPLHDAFDIKRVVVSTYQSTSGAGKEAMDELFNQTRAIFVNDRLDKKEFTKQIAFNVIPQIDIFMEDGSTKEEWKMVVETKKILDAKIDITATCVRVPVFIGHAESINIECKKEITTDSARKLLRESEGVSLIDHRADEGYVTPVEAAGDDLVFVSRVRDDSTIANGLNLWVVSDNLRKGAALTQCKLLSCWIVNTLIICVLISNFD

SEQ ID NO: 93647 - protein, 171 aa, Unknown
  Bacterial polypetide isolated from the Sargasso Sea
MAQQYDVAVLGATGLVGQHLIEILEQRDFPVNKLYPLASSRSAGGFITFKGKQIEVLDAETFDWTKVQIGLFSAGGSVSATYAPRAADAGCVVIDNTSHFRYEADIPLVVPEVNAHAIAEFRNRNIIANPNCSTIQMLVALKPIHDAVGISRINVATYQSVAGAGQQGVEA

SEQ ID NO: 93648 - protein, 309 aa, Unknown
  Bacterial polypetide isolated from the Sargasso Sea
FAIIGATGNVGRKTIEVLEKSKIGVDNLFLIASKKSAGQKLFFKKKEIIVEQLENYDFSKAEITIFAAGSEIAKKWAPKASKKTIVIDNSKHFRMDKDVPLVVAEVNPKDLNTHNNIIANPNCSTIQLMLPLKPLHVKYKIKRVIVSTYQAVSGAGKASVDELFSQTKEYLNKREIKSKNFTKQIAFNLIPHIDSFVKDGYTKEEWKMENETKKILDQSIGLTATCVRVPVKTSHSESVNVEFENEFDLETVRKILKSAPGCKVVDEQVDGGYITPLEAEDDHLTFISRIRKDNSNNKALNMWVVSDNL

SEQ ID NO: 93649 - protein, 189 aa, Unknown
  Bacterial polypetide isolated from the Sargasso Sea
MKKYRIGIVGATGAVGQEIIRLLEKREFPVAEARLLASARSAGREIQACGNLETVRETSAEAFNGLDMAIFSSGSQSSQEFAEIARRQGCVVIDNSSAFRMDADVPLVVPEINGDALETHRGLIANPNCSTAVALMGLYPLHKRFGLKRFIASTYQAVSGAGAAGVAELNDQTKKVLAEEPHEPNPDSI

SEQ ID NO: 93650 - protein, 224 aa, Unknown
  Bacterial polypetide isolated from the Sargasso Sea
MGFNYAVVGATGNVGREILQILAERSVPSSEVIAIASAASKGIEVPYGDDAVLQVDSLETFDFGNVDIVLSSPGANVSREFAPKAAAAGAIVIDNTSEFRMDPEVPLVVPEVNAEALVNYKAKNIIANPNCSTIQMVVALKPLHDEVGINRVVVSTYQSVSGAGKSAMDELFNQTRGIYANEPEQKFMENFTKSIAFNVIPHIDVFMEDGSTKEEWKMSVETKK

SEQ ID NO: 93651 - protein, 199 aa, Unknown
  Bacterial polypetide isolated from the Sargasso Sea
PLKPLHDRYKIKRVIVSTYQAVSGAGKASVDELFSQTKEYLSGKKIKSKNFTKQIAFNLIPHIDVFVDDGYTKEEWKMENETKKILDNKIGLTATCVRVPIKTSHSESVNIEFENDYELDAVKKLLRNAPGCKVIDEHKDGGYITPVEAEGDYLTFISRIRKDHSNSKALNIWVVSDNLLKGAALNTVQIVEHLIKNNS

SEQ ID NO: 93652 - protein, 183 aa, Unknown
  Bacterial polypetide isolated from the Sargasso Sea
MSQHVAIAGATGAVGTEFLKLLEARDFPMKSLRLLASSRSAGSKLKFRGENLEVEELTPKSFAGIDIAFFSAGGSRSKEFAPHAVDSGAVVIDNSSAFRMDEKVPLVVPEINPKQAFEHQGLIANPNCSTIQMVVALNPIHRAANIQRVVVSTYQAVSGAGASAMEELKQQLRAWANENREAG

SEQ ID NO: 93653 - protein, 218 aa, Unknown
  Bacterial polypetide isolated from the Sargasso Sea
MKVGLVGWRGMVGSVLMQRMQEEKDFDLIDTVFFSTSNAGGKAPAFAKTDAPLADANDIEALKACDTIITCQGGDYTTEVFPKLRAAGWNGYWIDAASTLRMEDDAVIVLDPVNLSLIKNAVAAGTKNFIGGNCTNSILLMGVGGLFREGLVEWVSSMTYQAASGGGANHMRELLKGMGVIHGAVADELANPASAILDIDRKVAKTIREDVPTEFFPA

SEQ ID NO: 93654 - protein, 138 aa, Unknown
  Bacterial polypetide isolated from the Sargasso Sea
MPSGQSKEEWKAQVEANKILGSTQQPVPIDGLCVRIGAMRCHSQAMTIKLREDISVEKIEEILASHNEWVKVIPNERDITSTDLTPVKVTGTLSIPVGRIRKLAMGPKYISAFTVGDQLLWGAAEPLRRMLRIIVDAE

SEQ ID NO: 93655 - protein, 338 aa, Unknown
  Bacterial polypetide isolated from the Sargasso Sea
MSNRINIALIGASGVVGRKIISLLEKKNIDVNNFYPLGSSSVGEEISFNQKIFKIDKLSNFNCSKIDLAIFSAGSSVARDYAQDFVKQGVYVIDLSSEFRYEENIPLIIPEINPSALIEATNPILIANPNCSVSQLLMAIEPIHKKYKIDILNIATYQAVSGTGRKAVEELENQIKDASIKPSVYPKKIAFNVIPQCDVFLENDFTKEEMKVAWETKKILDPNIEVQATCVRVPVVNGHSEAVFFRTAQEVSKDEIIELLSSSRGITVIDNPQNHDYPTPLEHADDTEEVYVGRIRSESIKNENWVSMWIVADNVYGKGAALNAVQIIETLIENNKLC

SEQ ID NO: 93656 - protein, 334 aa, Unknown
  Bacterial polypetide isolated from the Sargasso Sea
MNIAIVGATGNVGRKILEVIEKLNLKFSELYLIASDKSIGKKINFKGKNYSIVGLNDFDFSKVKIAFFSAGSAIAEKWAPVAAKKTIVIDNSKHFRMEKDIPLIVPEVNADALKSYKNKNIIANANCSTIQLVLALKPLHDQFKIKRVIVSTYQSVSGAGNVHMNELEEQSKKVLNKQKVNSKNFTKQIAFNVIPHIDTFMEDRYTKEEWKMTVETKKILDSNISLSATCVRVPVFVGHSESVNIEFNSEVNAEKIRQCLQKAPGCKVVDETKDGGYITPVESSGDFMTYISRIRDDQTQKNSINMWVVSDNLLKGAALNAVQIANILIKKYIK

SEQ ID NO: 93657 - protein, 334 aa, Unknown
  Bacterial polypetide isolated from the Sargasso Sea
MNIAIVGATGNVGRKLLEVIDKLDFKFSELYLIASDKSIGKKITFKNKTYSIIGLSDFDFSKVKIAFFSAGSVIAEKWAPIAAKKTIVIDNSKYFRMDKDIPLVVPEVNADTLKNYKNKNIIANANCSTIQLVLALKPLHDKFKIKRVIVSTYQSVSGAGNAHIKELEEQSKQVLNKQKVSSKNFTKQIAFNVIPHIDAFMEDRYTKEEWKMTVETKKILDQDLSVSATCVRVPVFVGHSESVNIEFNKEVNSKKVRECLEKASGCKVVDETKDGGYITPVESSGDFITYISRIRDDQTQKNSVNMWVVSDNLLKGAALNAVQIANVLIKKYIK

SEQ ID NO: 93658 - protein, 333 aa, Unknown
  Bacterial polypetide isolated from the Sargasso Sea
MKISIVGATGLVGRNIIELCEEYFDNSVEYHLYASKESEGKTLQVNGKEVPIRELSSKNIESCDIALFSAGGERSREFANQFVDKGAFVIDNSSSFRMEKTVPLVVYGINEDIIKNDSKIIANPNCTTMALVMALKPLHDIFNLLSIVPVSYQAVSGSGKSAIESLENELANLSTPGSAPDEKYYQSQIAKNVIPIAGNITENGYSDEEMKFSNESKKILDIPDLNVEPSNARVGVETGHGIFCTATFEKDVDVESAIESLEAFEGVEYWKETYPTPLDAQGNKNILVSRMRSGLTSNKILNFWAVGDNLLKGAALNAVQIANHLYKNDFYTK

SEQ ID NO: 93659 - protein, 335 aa, Unknown
  Bacterial polypetide isolated from the Sargasso Sea
MNIVIVGATGNVGRKTLEVLEKKELPIDELYLVASSKSTGKKINFKGKELEVSDLENFDFSKVKIAFFAAGGKISKKFAVKAAEDCIVIDNSSYFRMDPEVPLIVPQVNSNHLNNIKKNIIANPNCSTAQLVMALKPLHDLFIIKRVVVSTYQSVSGAGKASMDELIEQTKLALEGKKIESKNFTKTIAFNAIPHIDVFSDNGYTKEELKMSNETKKILDEKIDLTATCVRLPISVSHSESVNLQFEKNYSLERVREALDNFKGCKVIDERVDGGYTTPLDAEGKDDTFISRIREDRTVKNGLNLWIVSDNLLKGAALNAVEIAETLIKNNFYGK

SEQ ID NO: 93660 - protein, 330 aa, Unknown
  Bacterial polypetide isolated from the Sargasso Sea
MNFAIIGASGNVGRKTIEILEKSKIKFDNLFLVASSKSAGKKIKFRNKEIEIEVLENYDFSKAQITFFAAGSEIAKEWAPKASKKTIIIDNSSYFRMQKDVPLVVSEVNPEALDKHNNIISNPNCSTMQMVLALKPLHDEYKIKRVVVSTYQAVSGAGKASMDELFDQSKKYLEGKKVNSQNFTKQIAFNLIPHIDVFEKDGYTKEELKMTHETKKILDNAIEVTATCVRVPVRTGHSESINIEFENLYDFENIIKILQTAPGCKVVDERKDGGYITPLEAEGDYTTFISRIRKDNSNIKAINLWVVSDNLLKGAALNTVQIAESLMKKI

SEQ ID NO: 93661 - protein, 339 aa, Unknown
  Bacterial polypetide isolated from the Sargasso Sea
MKNYSVAIVGATGAVGRMMLKVLEEQNFPISELYLLASKRSKNKTIQYNDHDLVVQDINDFDFSNADISLFSAGSEVSKKFAPTAAEKGSIVIDNTSYFRYEDEIPLIVPEVNPEEIENFKNKNIIANPNCSTIQMVVALKPIHDLYSIQKINVSTYQAVSGTGVNAINELISQIKEFSENKKLTAEVYPKRILFNALPHIDSFMENRYTKEEMKMVWETQKILDKNILVNATAVRIPVITGHSESIHVECEKEIVLKKVFDELNKYKDIIKVIDDIEDPSYPTTVESEDSNHVFVGRLRNDINHKNSLNLWVVSNNLRKGAAYNSVQIAELLVKKKLI

SEQ ID NO: 93662 - protein, 347 aa, Unknown
  Bacterial polypetide isolated from the Sargasso Sea
MTQKYNIAVAGATGAVGTEIVQILEQRDFPIDNLYLLASSKSKGKKVEFKDKEIVVEDLSEFDFSKAHIGLFSPGGKISAEYAPKAAKKGCIVIDNTSHFRMQQNIPLIVPEVNANALDEFFDDENRTNIISNPNCSTIQMVVALKPLHEKAIINRVVVSTYQAVSGAGKTGMDELFNQTQNVYANQELKKEKFTKQIAFNAIPHIGAFLENGNTEEEQKMIDETKKILDEGINVSATCVRTAVFIGHSEAVNIEFDSPLDEKEANEILSNSEGISVIDYRKDEGYVTPVEIAGEDKVYISRIRNDQSIDNGLNLWVVSDNLRKGAALNAVQIAELIISKYSEKINI

SEQ ID NO: 93663 - protein, 321 aa, Unknown
  Bacterial polypetide isolated from the Sargasso Sea
MLNILSDKNYDAKNIFAVASERSAGSTVEYGNTELTVEAIDNFDISKVQIALFSAGSDVSKEWAPKFGEKNCVVIDNSSQFRMDDDIPLIVPEVNPEAIQNFKNKNIIANPNCSTIQLVVALKPLHEISKIKKVIVSTYQSVSGAGKAAMDELFDQTKNMFSDEIKENINFTKPIAFNVIPHIGDFVDDGYTKEEIKMREETNKILDKDIQFSATCVRVPVFIGHAEAVNVEFENKVSVDEARNAIKNASGCSLLDERKDGGYVTPKECAGNDDTYVSRIREDSAISNALSLWVVSDNLRKGAALNTIQIAEILMEKHLNQ

SEQ ID NO: 93664 - protein, 342 aa, Unknown
  Bacterial polypetide isolated from the Sargasso Sea
MAYNVAVVGATGAVGREMLQTLFERKFPVKNIYALASKSSIGKEVSYGDDKVLKVKSVDDFNFENVDIALFSAGSKIAKKFGPVAGNKGCIVIDNSSCFRMDDEVPLIVPEVNPEAINNYNKKNIIANPNCSTIQLVVALKPIHKKFEISRVVVSTYQAVSGAGKPAMDELFNQTKGVFVHDQATPEQFTKKIAFNVIPHIDIFMDNGFTKEEWKINVETKKILDPSINLVAHCVRVPVFIGHSEAVFVECKKDIDERQVRNLLRDANGITVVDHRADEGYVTPVEVAGEDDVYISRIRKDPSVKNGIAFWCVGDNLRKGAALNTVQIAELLVSKNLKGISL

SEQ ID NO: 93665 - protein, 321 aa, Unknown
  Bacterial polypetide isolated from the Sargasso Sea
MLNILSEKKYDASKIFPVASSRSEGMEIEFGEDKLIVESIEKFDPSKVELALFSAGASTSKEWAPKFAEKNCIVIDNSSHFRMEEDIPLVVPEVNPSDLNNYKKRNIIANPNCSTIQLVVALKPLHEISKIKKVIVSTYQSVSGAGKAGMDELFEQTKNMFSDDIKDNVKFTKPIAFNVIPHIDKFMDDGYTKEELKMRQETHKILSSEISFSATCVRVPVFIGHSEAVNIEFENKISVEEAREAIKNAPGCTLLDERADGGYVTPKECAGNDDTYVSRIREDTSTKNGLSIWVVSDNLRKGAALNTIQIAEMLIEEHLSK

SEQ ID NO: 93666 - protein, 332 aa, Unknown
  Bacterial polypetide isolated from the Sargasso Sea
MKFAIIGATGNVGRKTIDILEKSKLDIEQLHLVASKNSLGKKIKFKGDNLTVVALENFDFEKADITFFAAGSSIAEKYAKKASKKTVVIDNSKFFRMDKDVPLIVPEVNSEDIKKHKNIIANPNCSTIQMVLALKPLHKKFNIKRVVVSTYQAVSGAGKAAMDELISQTKDFLENKKIKSKNFTKQIAFNLIPHIDVFVDDGYTKEEWKMENETKKILSGSIKVSATCVRVPVITSHSESVNVEFKKNYNIDEVKKLLSETPGCKLIDEHSDGGYMTPLEAQDDFKTYISRVRKDRSNEKAINMWIVSDNLLKGAALNSVQIAETLVKYGLK

SEQ ID NO: 93667 - protein, 337 aa, Unknown
  Bacterial polypetide isolated from the Sargasso Sea
MSLNIAIVGATGNVGREMLNILSDRKYDSSSIFPVASSKSEGAKVEFGDKELTVEAIDKFDPAKVDLALFSAGASVSKEWAHKFAEKNCIVIDNSSQFRMDKDIPLIVPEVNPEAIRDYKIKNIIANPNCSTIQLVVALKPLHEISKIKKVIVSTYQSVSGAGKAGMDELFDQTKNMFSDEIKDNIKFTKPIAFNVIPHIDKFMDDGYTKEELKMDQETKKILSNEISFSATCVRVPVFIGHSEAVNIEFHEKVSVEQARDAIKNAPGCKLLDEREDGGYVTPKECAGNDDTYVSRIREDTSTKNGLSIWVVSDNLRKGAALNTIQIAEMLIEDHLK

SEQ ID NO: 93668 - protein, 332 aa, Unknown
  Bacterial polypetide isolated from the Sargasso Sea
MKIAIVGATGLVGTNIINLCEQYFDVDVEYSLFASKSSEGKKIKVNDKDITVKELNKENIGEYNISLFSAGGERSKDYAPNFIDNGSFVIDNSSVFRMNDEIPLVVYGINENIITKKSKLISNPNCTTMGLVMALKPLHDKYTLSSMTPVAYQAVSGSGSEAIKSLEKETLLGDKLDANYQQAYYSNPIARNVIPLAGSLTDNGYSDEEMKFVHESRKILSIPDLVVEPSNARVGVRTGHGTFCSAVFENEVDLEECTDLLNNFEGVEVWNDSLPTPIDVEGKDEVLVSRLRQGLSSKNILNFWVVSDNLLKGAALNAVQIAKFVENYDFYE

SEQ ID NO: 93669 - protein, 345 aa, Unknown
  Bacterial polypetide isolated from the Sargasso Sea
ENYYDYNIALVGSTGAVGREMLQTLYERDFPVDNVYALASSKSPGRQVSFGDERTIDVQPIEDFDFSKVDFAFFSAGGDVSEKYAPLAGKNGALVIDNSSAFRMTQNVPLIVPEVNHYDLKGCLSENGGMNIIANPNCSTAQLVMALCPLHREFIIKRVVVATYQAVSGAGKEAMDELFNQTKKIYVNDPLEKNVFTKEISFNLIPHIDVFLDDGFTKEEVKMRDETKKILDENIDVVAHCVRVPVFVGHSEAVFIECENPMDEEVAREVLTEMEGVIVIDHRADEGYITPKEAAGEDGVYISRIRRDESVPSGLVFWCVSDNLRKGAALNAVQIAELAISQGIK

SEQ ID NO: 93670 - protein, 292 aa, Unknown
  Bacterial polypetide isolated from the Sargasso Sea
MTEKKYNIAIAGATGLVGETMLSILEQINFPFKKVYVLASSRSSGKTISFKGDDLIVQELETFNFDKVDIGLFSPGASVSAVHAPRAVDAGCIVIDNTSQFRYDDDVPLVVTEVNPHVISGYKKKGIIANPNCSTIQMLVALKPIYDAVGIERINVCTYQAVSGTGKEAIDELANQSINIMNAKDIESSVYSKQIAFNVIPHIDEFQSNKYTKEEMKMVWETKKIFEDDSILVNPTAVRVPVFYGHSEAIHIETKEKIGAESAKELLKKMPGVTVIDEQKDGGYPTAVTEAA

SEQ ID NO: 93671 - protein, 333 aa, Unknown
  Bacterial polypetide isolated from the Sargasso Sea
MNIAIVGATGLVGRKIIKLCEEFFDTSVEFQLFASKTSEGKILSVNDKDLPIKELNIRNIEPCDIALFSAGGVRSKEYANEFVDRGAFVIDNSSTFRMNDDIPLVVYGINENTINEKTKIIANPNCTTMALVMALKPLHDIFKLVGIVPVSYQAVSGSGKDAVESLNNELLNLQNSGSAPDEKYYKTQIAKNVIPVAGNMTENGYTDEEMKFSNESKKILNIPNLIVEPSNARVGVETGHGIFCSATFEEDVDVDKAIESINLFEGVEYWANDFPTPVDAEGNRNIFVSRMRSGLSSNKILNFWAVGDNLLKGAALNAVQIASYIQKNDIYSR

SEQ ID NO: 93672 - protein, 285 aa, Unknown
  Bacterial polypetide isolated from the Sargasso Sea
MGYKVAVVGATGAVGREILQTLAERNFAADKIYALASSKSIGQEVSYGDDEIVTVEALDKFDFAAAEIALFSAGGDTAKTYAPIAGQAGCLVIDNSSAFRMDDDVPLVVPEVNPLTLASCLIENGGRNIIANPNCSTAQLVVALKPLHDAFVVRRVVVSTYQAVSGAGRPAMDELFNQTKGIYVNDAVQPEIFTKQIAFNAIPHIDVFLDDGFTKEEWKMTAETKKILDPTIELVAHCVRIPVFVGHSEAVFIETEQPMTEKAVRGLLGDAPGVWWWITEQMKVM

SEQ ID NO: 93673 - protein, 322 aa, Unknown
  Bacterial polypetide isolated from the Sargasso Sea
MLQTLEERDFPSDEVVALASSKSIGKEVSYGDDRSLKVQGLDAYDFSGIDIALFSAGGSISSEFGPKVASQGAVVIDNSSKWRMEPDIPLIVPEVNSSDIASFKKRNIIANPNCSTAQLVMALKPLHDLYKIKRVVVSTYQSVSGAGNSGMDELFNQTRAVYVNDPVENKEFSKQIAFNCIPHIDIFMDDGFTKEEWKMVAETKKILDPNIEVVAHCVRVPVFIGHAEAVFIETTKQIDEGEARESLNNFPGVVVVDHRESGGYVTQQECAGEDAVYVSRLRKDPTVKNGLVFWCVSDNLRKGAALNAVQIAETVVKRHLLN

SEQ ID NO: 93674 - protein, 269 aa, Unknown
  Bacterial polypetide isolated from the Sargasso Sea
AFFSAGSSIAEKWAPIAAKKTIVIDNSKHFRMQKDIPLVVPEVNPESLKLYKNANIISNANCSTIQLVLALKPLHDQFKIKRIIVSTYQSVSGAGNAHMNELEEQSKKVLNKQKVDSKNFTKQMAFNVIPHIDSFMEDRYTKEEWKMTVETKKILDPNISLSATCVRVPVFIGHAESVNVEFNSKVNATQIRECLKKAAGCKVVDETKDGGYITPVESSGDFVTYISRIRDDQTQKNSINMWIVSDNLLKGAALNAVQIANVLIKKYIN

SEQ ID NO: 93675 - protein, 336 aa, Unknown
  Bacterial polypetide isolated from the Sargasso Sea
MKKAKRIAVAGATGMVGQAFQNLLENNFFPEAEIDLLASQKSKGRSVTFRGKEHIIKDLAEYDFSYTDLALFSAGASVSAEYAPKAVSQGCVVVDNSSCFRYDDEIALIVPEVNGDELSNYDLPSIIANPNCSTIQMLVALKPIHEEFKIKRIDITTLQAVSGTGKEATEELLDQLSAYQGDNELENNIYPKQIANNALPHCDVMEENRYTKEENKLLKETHKILDSNIHVAATCVRVPVLNGHSESIHILTEKPLTEDVVVKLLSNSPGLKLHYDLGANDYPTAATDADGDYLVHVGRLRKDLWDDCRMNMWVVADNLLKGAALNSIQIANLIFD

SEQ ID NO: 93676 - protein, 329 aa, Unknown
  Bacterial polypetide isolated from the Sargasso Sea
MNIAIVGATGLVGREIINLCEEFLPKDTIYTLFASSKSAGKKLKVNGKDYEVKELAEDNIESYHISLFSAGGERSKNFAEIFTSKGSYVIDNSSAFRMEKEVPLVVFGINENTISQETKLISNPNCTTMGLVMALKPLHDKYNLLNIVPVAYQAVSGSGSEAVSSLIEEESLGEKLDSDYEKGFYDRPIARNVIPLAGNLTENGYSDEEMKFVNESRKILNIPQLIVEPSNARVGVKTGHGIFCSATFEEEADVQEAIGLIDSFDGVEYWKDKLPTPLDAEGNKKVLVGRMRNGLSDNRILNFWAVSDNLLKGAALNAVQIARYIVDND

SEQ ID NO: 93677 - protein, 261 aa, Unknown
  Bacterial polypetide isolated from the Sargasso Sea
ISGEFAPKAAKKNCIVIDNSSRFRMDPDVPLIVPEVNKEDLDNYEKTKIIANPNCSTIQMVVALKPLHDLGKIKRVIVSSYQSTSGAGKAAMDELFEQTKGIYSNNSIEPEIFQTQISFNVIPQIGPFVSSGYTEEEEKMINETKKILSKDIEVSATCVRVPTFIGHAESVNIEFENYVSANEASNILSEAPGCLVDLDNPETFTTPIDCAGNDHTYISRIRNDNSIENGLNLWVVSDNLRKGAALNTIQIAEILEKDYLS

SEQ ID NO: 93678 - protein, 291 aa, Unknown
  Bacterial polypetide isolated from the Sargasso Sea
IKFKGKKIEIQDLVKYDFSSAKITFFAAGSKIAEQWVPKASKKTIVIDNSKFFRMDNNIPLIVPEVNLDQLENYKKKNIIANANCSTIQMVVALKPLHDHFNIKRVIVSTYQSVSGAGKAPMDELVSQSKDFLAGKKISSKNFTKQIAFNLIPHIDEFVEGGHTKEEWKMINETKKILDPKIEISATCVRVPVMVSHSESINIEFEKSFDINKIKEILSKSNGCKVIDERKDGGYITPLEAENSYLTFISRIRKDSSNNKAINMWVVSDNLLKGAALNTVQIAEQLIKKYV

SEQ ID NO: 93679 - protein, 347 aa, Unknown
  Bacterial polypetide isolated from the Sargasso Sea
MTQKYNIAVAGATGAVGTEIVQILEQRDFPIDNLYLLASSKSKGKKVEFKDKEIVVEDLSEFDFSKAHIGLFSPGGKISAEYAPKAAKTGCIVIDNTSHFRMQQNIPLIVPEVNANALDEFFDDENRTNIISNPNCSTIQMVVALKPLHEKAIINRVVVSTYQAVSGAGKTGMDELFNQTQNVYANQELKKEKFTKQIAFNAIPHIGAFLENGNTEEEQKMIDETKKILDEGINISATCVRTAVFIGHSEAVNIEFDSPLDEKEANKILSNSEGISVIDHRKDEGYVTPVEIAGEDKVYISRIRNDQSIDNGLNLWVVSDNLRKGAALNAVQIAELIISKYSEKITI

SEQ ID NO: 93680 - protein, 342 aa, Unknown
  Bacterial polypetide isolated from the Sargasso Sea
MSYNVAVVGATGAVGREMLQTLFERNFPVKNIYALASKSSIGKEVSFGDDKILKVSSVDDFHFEKADIALFSAGSEIAKKFGPKAGVKGCIVIDNSSCFRMDDKVPLIVPEVNPEAINGYKNKNIIANPNCSTIQLVVALKPIHKKYEISRVVVSTYQAVSGAGKPAMDELFNQTKGIFVNDHAKPEQFTKKIAFNVIPHIDVFMDDGFTKEEWKMRVETKKILDPNINLVAHCVRVPVFIGHSEAVFIECKKNIDEKNVRSLLRDANGVTVVDHRVDEGYVTPEEVAGEDDVYISRIRKDPSVKNGIAFWCVGDNLRKGAALNTVQIAELLASKKIKGVAL

SEQ ID NO: 93681 - protein, 333 aa, Unknown
  Bacterial polypetide isolated from the Sargasso Sea
MNLAIIGATGNVGRKTIEILEKSKIEISNLFLVASAKSAGKKIKFKGKEIEIQDLEKYDFSNAKITFFAAGSKIAEQWATKASKKTIVIDNSKFFRMDNDVPLIVPEVNLDQLQNYKKKNIIANANCSTIQMVVALKPLHDHFNIKRVIVSTYQSVSGAGKAPMDELITQSKDFLDGKKISSKNFTKQIAFNLIPHIDEFVDEGYTKEEWKMINETKKILDPKIKISATCVRVPVMVSHSESINVEFEKTFDIKSIKNILSQSNGCKVIDERKDGGYITPLEAENSYLTFISRIRKDSSNDKAINMWVVSDNLLKGAALNTVQIAEQLIKKYV

SEQ ID NO: 93682 - protein, 338 aa, Unknown
  Bacterial polypetide isolated from the Sargasso Sea
MDKAIDLALVGASGVVGNKIISLLEKKNINIENFYPLGSASVGQEVTLNNTNYQIEDLSSFDCSKVNLAIFSAGSKVAKEYAKSFVNQGVYVIDLSSEFRYEENIPLIIPEINGRILEDIKKPSLIANPNCSVSQLLMVLDPIHKEYSVDFINIATYQAVSGTGKDAIDELYNQTKDQSMEPNIYPKNIAFNVIPQCDIFLDNDFTKEEMKVAWETKKILDQNIEVQATCVRVPVVNGHSEAVFLRTKNKTAKDNIIQLLATSEGLTVIDNPKKLEYPTPLENANDTEEVYVGRIRSQIINNENWISLWIVADNVYGKGAALNAVQILEKLIKNNKLC

SEQ ID NO: 93683 - protein, 245 aa, Unknown
  Bacterial polypetide isolated from the Sargasso Sea
MNFNIAIVGATGNVGREMLNILSEKKYDASKIFPVASSRSEGMEIEFGEDKLIVESIEKFDPSKVELALFSAGASTSKEWAPKFAEKNCIVIDNSSHFRMEEDIPLIVPEVNPSDLNNYKKRNIIANPNCSTIQLVVALKPLHEISKIKKVIVSTYQSVSGAGKAGMDELFEQTKNMFSDDIKDNVKFTKPIAFNVIPHIDKFMDDGYTKEELKMRQETHKILSNEISFSATCVRVPVFIGHSEA

SEQ ID NO: 93684 - protein, 312 aa, Unknown
  Bacterial polypetide isolated from the Sargasso Sea
MTKLSDINIGIIGATGAVGVEALKLLEKINHPKNKISLFASERSTGKLVEYNKDKIQILEVNEDNLKKIDVGLISVSSEVSENLAPIIVNNGGIVIDDGSAFRMKEEVPLVVPEINEKDLDFHKGIISIPNCTTTPMVMAIDALNKICKVNKVIVSTYQAVSGTGKEAVNELKNQLSGDSKINVYDYKIANNVFPHVDDFLEDGFTKEEHKMINESKKILHDPSLEIIPTCVRVPVKIGHSESLCISTDRDLSIEDINSSLSNYSGIKILDNSTDLPYPMPLYSEGKDEVFVGRIRKSPNNDREINLWLSCD

SEQ ID NO: 93685 - protein, 292 aa, Unknown
  Bacterial polypetide isolated from the Sargasso Sea
KKIKFKGNELNVVALENFDFEKADITFFAAGSSIAEKYAKKASQKTIVIDNSKFFRMDKDVPLIVPEVNSEDIKKHKNIIANPNCSTIQMVLALHPLHQKFNIKRVVVSTYQAVSGAGKAAMDELMSQTKDFLEKKKIKSTNFTKQIAFNLIPHIDVFVEDGYTKEEWKMENETKKILSEKIKVSATCVRVPVITSHSESVNVEFEKNYNIGEVKKLLSETSGCKLVDEHVDGGYITPLEAQDDFKTYISRVRKDRSNEKAINMWIVSDNLLKGAALNSVQIAETLVKYGIK

SEQ ID NO: 93686 - protein, 335 aa, Unknown
  Bacterial polypetide isolated from the Sargasso Sea
MNFAIIGATGNVGRKTIEILEKSNIQISNLFLVASEKSEGKKIKFKGKEIQIESLKTYDFSKAQITFFAAGGKIAEEWVPKASKKTVVIDNSKVFRMDKDVPLIVPEVNPDKLSMFKNKNIIANPNCSTIQMVVALKPLHENFNIKRVIVSTYQSVSGAGKAPMDELISQTKEYLEEKKINSKNFTKQIAFNLIPHIDEFKEEGYTREEWKMISETKKILDPKINLTATCVRVPVMVSHAESLNVEFEKSFDIKKVRDILDKADGCKVVDERKNGGYTTPVEAENKNFTFISRIRKDNSKDNALNMWVVSDNLLKGAALNTVQIAQRLIKDFYGK

SEQ ID NO: 93687 - protein, 336 aa, Unknown
  Bacterial polypetide isolated from the Sargasso Sea
MGLRVAIVGATGNVGREMLGILDERKFPVDEVFALASSRSRGNAVQFGNKELTVEDLSEFDFSKADIALFSAGGKISGEFAPKAAEKNCIVIDNSSKFRMDPDVPLIVPEVNKEDLDNYEKTKIIANPNCSTIQMVVALKPLHDLGKIKRVIVSSYQSTSGAGKAAMDELFEQTKGIYSNNSIEPEIFQTQISFNVIPQIGPFVSSGYTEEEEKMINETKKILSKDIEVSATCVRVPTFIGHAESVNIEFENYVSANDASNILSEAPGCLVDLDNPESFTTPIDCAGNDHTYISRIRNDNSIENGLNLWVVSDNLRKGAALNTIQIAEILEKDYLS

SEQ ID NO: 93688 - protein, 236 aa, Unknown
  Bacterial polypetide isolated from the Sargasso Sea
DQVPLIIPEINGGLIRDIEKPSLIANPNCSVSQMLMAIEPIHKKFQVDLLNVATYQAVSGTGKDAVKELNSQIEDFNVEPIVYPKKIAFNVIPQCDIFLDNDFTKEEMKVTWETKKILDPNIEVTATCVRVPVINGHSEAVFFRTKELVSKNDIVDLLSDSPGIKVIDNPADQKYPTPLENANDTEDVYVGRIRTQTINGESWVSMWIVADNVYGKGAALNAVQIIEMLIKENKLC

SEQ ID NO: 93689 - protein, 338 aa, Unknown
  Bacterial polypetide isolated from the Sargasso Sea
MNSQINLALIGASGVVGEKIMTLLENRATKINNFYPLGDSSVGKELVFNDSAYVIQDLKDFDHSKINIAIFSAGSKVAKEHARNFVDNGIYVIDLSSEFRYEDDVPLIIPEINGEEINKLRGPSLIANPNCSTSQLLMALNPIHKELKVDILNVSTYQAVSGTGKQAVQELKNQIKDSSINQDVYPKKIAFNVIPQCDIFLENNFTKEEMKLVWETQKILDKNIEVQATCVRVPVINGHSEAVFLRTIKETTREEVIDLLNNSSGIKVIDNPESLKYPTPLENANDTEDVFVGRIRSQTINSENWTSMWIVADNVYGKGAALNTVQILEGLVENNKLC

SEQ ID NO: 93690 - protein, 177 aa, Unknown
  Bacterial polypetide isolated from the Sargasso Sea
MNLAIIGASGNVGRKTIEILEKSKLAIDNLFLVASSKSVGKKIKFKNKEILIENLENYNFSKAQITFFAAGSEVAKEWVPIASKETIVIDNSSYFRMQKDVPLVVPEVNSEELNKHKNIIANPNCSTMQMVLPLKPLHDEYKIKRVIVSTYQAVSGAGKASMDELFEQSKNYIAGKK

SEQ ID NO: 93691 - protein, 322 aa, Unknown
  Bacterial polypetide isolated from the Sargasso Sea
STGLVGREIINLCEEFLPKDTNYTLFASSKSAGKKLKVNGKDYEVKELSENNIESYDISLFSAGGERSKNFAEIFTSKGSYVIDNSSAFRMEKEVPLVVFGINENTISQETKLISNPNCTTMGLVMALKPLHDKYNLLNIVPVAYQAVSGSGSEAVNSLIQEESLGEKLDSDYEKGFYDRPIARNVIPLAGNLTENGYSDEEMKFVNESRKILNIPQLIVEPSNARVGVKTGHGIFCSATFEKETDVKEAIGLIDSFDGVEYWKDKLPTPLDAEGSKQVLVGRMRKGLSDNRILNFWAVSDNLLKGAALNAVQIARYIVDND

SEQ ID NO: 93692 - protein, 336 aa, Unknown
  Bacterial polypetide isolated from the Sargasso Sea
MNKARKIAIVGATGMVGQSFLKLLENDYFLGSEVSLLASSNSAGKDINFRGVDHKVQDLSQYDFFDTDFALFSAGSTVASTYAPIAVNQGCLVIDNSSCFRYEEDIPLVVPEVNSHILNDFNTPGIIANPNCSTIQMLVALKPLHDEFVIERIDVTTFQAVSGTGKLATEELINQIDAYKGSMKLNSFIYAKPIANNVLPHCDEFEENRYTKEENKLVKETKKILDPDIKVAATCVRVPVLNGHSESVHIQTKKPIAEDLALKLLKESPGLSIRYGESEDDYPTAFTDGAGNGLVHVGRIRKDLWEENRLNLWVVADNLLKGAALNSIQIATLLFD

SEQ ID NO: 93693 - protein, 220 aa, Unknown
  Bacterial polypetide isolated from the Sargasso Sea
NAHALKDFRKSNIIANPNCSTIQMLLALNPIHQAARIKSINVSTYQSISGAGRSMLNEYDRQVLDSSYPQHEGSLFAHNVIPQIGSFENNGYTLEEMKMVWETHKIFEDKSIEVNPTAVRVPVRYGHSESIGIITESYLSIGEVRELLSGSLGIQLMQDDESYPMPLKEGEGTDDVYIGRIRADLNHSNGINLWVVADNIRKGAALNSIQIAETIIESDY

SEQ ID NO: 93694 - protein, 336 aa, Unknown
  Bacterial polypetide isolated from the Sargasso Sea
MNKARKIAIAGATGMVGQSFLKLLEQDFFQDSEIFLLASINSAGKEINFRGKNHKVEDLSKFNFSDIELALFSAGSSVASTYAPIAVSQGCVVVDNSSCFRYEDDIPLIVPEVNSKVLDDYELPGIIANPNCSTIQMLVALKPLHDEFVIERIDVTTFQAVSGTGKKAAEELIDQIDVYEGKAKIKSSIYPKPIANNVLPHCDDFEENRYTKEENKLVRETHKILDPNIQVAATCVRVPVLNGHSESVHIKTKRPVSEDLALKLLQEAPGLSVKYGKSEEDYPTAFTDGDGSYLVQVGRVRKDLWDENRLNLWVVADNLLKGAALNSIQIASLLFD

SEQ ID NO: 93695 - protein, 336 aa, Unknown
  Bacterial polypetide isolated from the Sargasso Sea
MALKVAIVGATGNVGREMLDILVERDFPIDEVFALASSRSKGDAVQFGNKELIVEDLSEFDFSNADIALFSAGGKISGEFAPLAAEKNCVVIDNSSRFRMDPDVPLIVPEVNREAIANYEKTKIIANPNCSTIQMVVALKPLHDLGTIKRVVVSSYQSTSGAGKAAMDELFEQTKGIYSNNSVEPEIFQTQISFNVIPQIGPFVSSGYTEEEEKMINETKKILDNDIKVSATCVRVPTFIGHAESVNIEFENYISSEEASKVLAEAPGCLVDLDDKESYATPIDCAGNDHTYISRIRNDDSVENGLNLWVVSDNLRKGAALNTIQIAEILEKDYLN

SEQ ID NO: 93696 - protein, 338 aa, Unknown
  Bacterial polypetide isolated from the Sargasso Sea
MDKAIDLALVGASGVVGNKIISLLEKKNINIENFYPLGSASVGQELTLNNTNYQIEDLSSFDCSKVNLAIFSAGSKVAKEYAKSFVNQGVYVIDLSSEFRYEENIPLIIPEINGSLLEDIKKPSLIANPNCSVSQLLMVLDPIHKEYSIDFLNIATYQAVSGTGKDAIDELYNQTKDQSMEPNIYPKNIAFNVIPQCDIFLDNDFTKEEMKVAWETKKILDQNIEVQATCVRVPVVNGHSEAVFLRTKNKATKDDILQLFATSEGLTVIDNPKKLEYPTPFENANDTEEVYVGRIRSQIINNENWISLWIVADNVYGKGAALNAVQILEKLIKNNKLC

SEQ ID NO: 93697 - protein, 340 aa, Unknown
  Bacterial polypetide isolated from the Sargasso Sea
MGYKVVVVGATGNVGREMLTILSERQFPVDEIAALASRRSLGTEVSFGDQTIITRDLETFDFEGWDIALFAIGSDATKTFAPKAAAKGCIVIDNSSLYRYDPKVPLIVPEVNAKAITGYSEKNIIANPNCSTAQMVVALKPLHDRARIKRVVVSTYQSVSGAGKEGMDELWDQTKSIYNPVTDVPPTKFTKQIAFNVIPHIDKFLDDGSTKEEWKMVAETKKIIDTSIKVTATCVRVPVFVGHSEAINIEFEDFLDEDEARDILREAPGVMVIDKRDDGGYVTPVECAGDYATFISRLRQDSTIENGLNLWCVSDNLRKGAALNAVQIAETLGQRVLKKG

SEQ ID NO: 93698 - protein, 240 aa, Unknown
  Bacterial polypetide isolated from the Sargasso Sea
RTDPDVPLVVAEVNPEALKDFRKKNIISNPNCSTMGMLVAVKPLHDHFKVKRIVVSTYQSVSGAGKEAADELFNQTKSIYANEAVVKEKFTKQIAFNVIPHIDVFLEDGQTKEEWKMYNETKKILDQNIELTATCVRVPVFISHSLAVNIEFEKPYDEDQIREIFKKSPGLKMIDYRADEGYVTPIESAGLDPVYVSRIRRDPTIPNGLNFWCVSDNLRKGAALNTVQIAEILIKDYLSS

SEQ ID NO: 93699 - protein, 269 aa, Unknown
  Bacterial polypetide isolated from the Sargasso Sea
FFSAGGSVSATYAPRAADAGCVVIDNTSHFRYEADIPLVVPEVNAHAIAEFRNRNIIANPNCSTIQMLVALKPIHDAVGISRINVATYQSVAGAGQQGVEALATETAQLLNGRPLEEGGKFARQIAFNCIPQIDVFLDNGYTKEEMKMHWETQKIMGDASISVNATAVRVPVFYGHAEAVHLETRMPISVEQVKALLANAPGVTLMEENADYPTQVGNAAGQDDVFVGRIRQDFTHENGINLWVVADNIRKGAATNSIQIAEHLIRDYL

SEQ ID NO: 93700 - protein, 271 aa, Unknown
  Bacterial polypetide isolated from the Sargasso Sea
AEITFFAAGSAIAEKWAPVAAKNSIVIDNSKNFRMDPDVPLVVPEVNSQHLKLYRNKNIIANANCSVIPLVVALKPLHDLYDIKRIVASTYQSVSGAGKSAMDELLSQTKEFYENKELKSKYFTKQIAFNAIPHIDKFLDNGYTKEEQKMHDEVKKILDTKIKVTSTSVRIPVLVSHAVSVNVEFNRNYKLDEIRNVLGSSPGCKLVDKMEDGGYVTPVEAENEYETFISRIRKDDSQENTINLWIVSDNLLKGAALNAVEIAETLIKNFR

SEQ ID NO: 93701 - protein, 240 aa, Unknown
  Bacterial polypetide isolated from the Sargasso Sea
FRYEDDVPLIVPEVNSHILDSSMFKGLVANPNCSTIQMLAAIKPIHDEFEIRKINVTTFQAVSGTGKEAQEELVSQSSSKLNNPEIDLSTEVYEKPIAFNAIPHCDDFQENRYTKEEMKMVWETNKILDPAIEVNPTCVRVPVLNGHSESVHLTTKKKIDLDKVINLLRATKGVKVFYGEGPEDYPTALIDADGNNDVMVGRIRKDLSKDNGMNLWIVADNLRKGAALNSIQIAEKIFEN

SEQ ID NO: 93702 - protein, 326 aa, Unknown
  Bacterial polypetide isolated from the Sargasso Sea
GREILQILAERSVPSSEVIAIASAASKGLEVPYGDDAVLKVDSLETFDFSNVDIVLSSPGANVSREFAPKAAAAGAIVIDNTSEFRMDPEVPLVVPEVNAEALANYKAKNIIANPNCSTIQMVVALKPLHDEVGINRVVVSTYQSVSGAGKSAMDELFNQTRGIYANEPEQKFMENFTKSIAFNVIPHIDVFMEDGSTKEEWKMSVETKKIIDPSIEVHANCVRVPVFIGHAEWVNVELNSPLSYENARELLGAAPGLVVVDHRQDEGYVTPVECAGEDAVYVSRIREDLTIENGLSFWGVSDNIRKGAALNTVQISEVLINDYLS

SEQ ID NO: 93703 - protein, 331 aa, Unknown
  Bacterial polypetide isolated from the Sargasso Sea
MSRQSAVPFTPRLSSSFPARPLNVAVLGASGAVGQELLLLIKERNFPVAELKLLASARSAGSTQQWNGRTITLEEVSAEAFEGVDLVLASAGGSVSRQWRDAITAAGAVMVDNSSAFRMEEGVPLVVPEVNPDAALAHNGVIANPNCTTILLTLALAPLAAKRPMRRVVVSTYQSASGAGARAMEELKILSQTVLDGGTPQGEVLPYSLAFNLFLHNSPLQANSYCEEEMKMVNETRKIMDLPDLRFTATCVRVPVLRAHSEAVNIEFEQPFPVEEARALLSAAPGVELIEDPATNRFPMPTDVTGRDPVAVGRIRQDISDPNALELWLCG

SEQ ID NO: 93704 - protein, 303 aa, Unknown
  Bacterial polypetide isolated from the Sargasso Sea
GAVGSELLKILEQRHFPISELVLLSSERSEGKKIIWKGEELVTKKTTKEEFLNLDLVLASAGGSISKKWLSTIMEQNALLIDNSSAFRLDNNVPLIVPEVNGSDVINHDGVIANPNCTTILLTLVLAPLNKLSTIQRVVVSTYQSVSGAGQLAMEELKLLTEKYLRGNPQKSEVLPYSLAFNLFLHNSPMLANNYCEEEMKMVNETRKILNIADLRLSATCVRVPVLRAHSESINIEFASVVEPKDALEELKKSPGLEIIEDFKNNRFPMPNDVMGRDNVAVGRLRTDISQPNGLELWLWEIK

SEQ ID NO: 93705 - protein, 190 aa, Unknown
  Bacterial polypetide isolated from the Sargasso Sea
DDAIIILDPVNQAVITDGLNKGIKTFVGGNCTVSLMLMSLGGLFANDLVEWVSVATYQAASGGGARHMRELLAQMGQLHGHVAAELADPASAILDIERKVTQLSRSGELPVDNFGVPLAGSLIPWIDKQLDNGQSREEWKGQAETNKILATTTTIPVDGLCVRVGALRCHSQAFTIKLKKNVSIPTIEEL

SEQ ID NO: 93706 - protein, 230 aa, Unknown
  Bacterial polypetide isolated from the Sargasso Sea
MVVSEVNPDDARKHNGLIANPNCTTILLALVLSPLTRHIPIKRVVVSTYQSASGAGALAMEELQKLSQEVLDGVTPKSKVLPYSLAFNLFLHNSPLQPNNYCEEEMKMVNETRKILGDPQLSLTATCVRVPVLRAHSESVNIEFTKPFPVKEAYEILESAQGVEILEDLGSNRFPMPQDVNGRDPISVGRIRQDISNPNALELWLCGDQIRKGAALNAVQIAELLLAKKS

SEQ ID NO: 93707 - protein, 268 aa, Unknown
  Bacterial polypetide isolated from the Sargasso Sea
MRKIGFVGWRGMVGSVLRKRMLEEKDFELIEPFFFTSSQAGQTSPEVAGEVYTLLDAYDLKALTAMDVIITCQGSEYTNDIHSKLRNFGWKGYWIDAASALRMNDHSAIVLDPVNLSLIKERLATGIRDFIGGNCTVSLMLMGLGGLFKANLVEWATAMTYQAASGAGAKNMLELIHQMGAITSSVGTQLDSPEFGILDIDETVTQCLRSAEFPVDSWGFPLAGSILPWIGDAKENGQSGEEWKNEAETNKILGNTDSAVSLDGLCVR

SEQ ID NO: 93708 - protein, 274 aa, Unknown
  Bacterial polypetide isolated from the Sargasso Sea
AASSLRMDDSAVIVLDPVNRKVIDQALDAGSKNYIGGNCTVSLMLMALGGLYEAGLVEWMSAMTYQAASGAGAQNMRELIKQMGAINGAVADDLADPASAILDIDRKVAEAMRGEDFPVDNFGMPLAGSLIPYIDKELPNGQSREEWKAQAETNKILGRFKSPIPVDGICVRIGAMRCHSQALTIKLNKDVPMADIEGLISQHNPWVKLVPNHREDSIRDLGPTAVTGTLSVPVGRLRKLNMGSQYLGAFTVGDQLLWGAAEPLRRMLRILLER

SEQ ID NO: 93709 - protein, 294 aa, Unknown
  Bacterial polypetide isolated from the Sargasso Sea
GIVGATGQVGGVMRSVLIERLFPLDEIRFFASARSAGTTIDWDGADIVVEDASTADYSDIDIALFSAGGATSLEIAEKVASQGALVIDNSSAWRMDPDVPLVVPEVNANAVTKTPKGIIANPNCTTMAAMPVLAPLHEEAQLQGMIASTYQAVSGAGLAGVAELGEQLRATISDAEGLTYDGEAVNHTEPHSFPQPIAHNVLAHAGNFVSDGSGETDEEQKLRNESRKILDIPDLEVSGTCVRVPVFTGHSLALNLRFGSEISPERATEILSTAAGVVVADVPTPLTAAGQDPS

SEQ ID NO: 93710 - protein, 193 aa, Unknown
  Bacterial polypetide isolated from the Sargasso Sea
MGAIHSSVAQQLDNPSSAILEIDKIVSEKMASSDLPQDQFGVPLAGSLIPWIDVPMPSGQSKEEWKAQVEANKILGSTHQPVPIDGLCVRIGAMRCHSQAMTIKLREDISVEKIEEILASHNEWVKVIPNERDITSTDLTPVKVTGTLSIPVGRIRKLAMGPKYISAFTVGDQLLWGAAEPLRRMLRIIVDAE

SEQ ID NO: 93711 - protein, 174 aa, Unknown
  Bacterial polypetide isolated from the Sargasso Sea
SSAILDIERKVTTLSRSGELPVDNFGVPLAGSLIPWIDKQLDNGQSREEWKGQAETNKILNTSSVIPVDGLCVRVGALRCHSQAFTIKLKKDVSIPTVEELLAAHNPWAKVVPNDREITMRELTPAAVTGTLTTPVGRLRKLNMGPEFLSAFTVGDQLLWGAAEPLRRMLRQLA

SEQ ID NO: 93712 - protein, 257 aa, Unknown
  Bacterial polypetide isolated from the Sargasso Sea
AGATGAVGTEFLKLLEARDFPMKSLRLLASSRSAGSKLKFRGENLEVEELTPKSFKGIDIAFFSAGGSRSKEFAPHAVDSGAVVIDNSSAFRMDEKVPLVVPEINPKQAFEHQGLIANPNCSTIQMVVALNPIHRAANIQRVVVSTYQAVSGAGASAMEELKQQLRAWANDEPMKQEVFPTQIAFNLFPHIDVFQDNGYTKEEMKMVHETRKIMNAPNMQISATCVRVPVLRAHSEAVWVETEKPLSESEARELSKR

SEQ ID NO: 93713 - protein, 288 aa, Unknown
  Bacterial polypetide isolated from the Sargasso Sea
CAQDISSFDFSTVQIGFFSAGADVSAEYAPKAAAAGCIVIDNTSQFRFEDEVPLVVPEVNGNKIADYRAKGIIANPNCSTIQMVVALKPIHDAVGITRINVATYQAVSGAGKNAMQELARHSAAMLSGKSTGIRGDEGYKKIAFNAVPHIDEFQDNRYTKEEMKMVWETQKIMDDESINVNPTAVRIPAFFGHSEAIHIETRDKISAAQVCKLMREAPGVVLIDGTEAGQYPTARTDASGTDPVYVGRVREDISHPKGINLWVVSDNIRKGAALNSIQIAEILVKNYL

SEQ ID NO: 93714 - protein, 285 aa, Unknown
  Bacterial polypetide isolated from the Sargasso Sea
KVMLGSKAITVTDLANFDFKLADIALFSAGGAISAEFAPKAGDSGCVVIDNTSHFRYDDDIPLIVPEVNSCKIGEYKNRNIIANPNCSTIQMLVALKPIYDSVGIERITVSTYQAVSGSGTNAVNELAKQTAELLNGRDAECDVYPKQIAFNVLPHIDIFMDNGYTKEEMKMCWETQKIFGDENINVSATCVRVPVFFGHSEAIQIETSDYIDEKQARSLLEKAEGVTVIDERRDGGYPTAVHESAGSDSVFVGRIRKDISLKNGLNLWVVSDNVRKGAALNSIQ

SEQ ID NO: 93715 - protein, 258 aa, Unknown
  Bacterial polypetide isolated from the Sargasso Sea
SKKWLSTVKDQNAILIDNSSAFRLEKDIPLVVPEVNACDALKHNGVIANPNCTTILLTLVLAPLNNISPIKRVIVSTYQSVSGAGQLAMEELKFLTEKYLQGDAKESEVLPYSLAFNLFLHNSPMLANNYCEEEMKMTNETRKILNISDLKLSSTCVRVPVLRAHSESVNIEFENIIKPSYAIDQLKNADGIEIIEDYEKNRFPMPNDVMGRDNIAVGRVRTDISNPNGLELWLCGDQIRKGAALNAVQIAELLIEKK

SEQ ID NO: 93716 - protein, 271 aa, Unknown
  Bacterial polypetide isolated from the Sargasso Sea
MRSILHERSFPVDEMRLFASARSAGTSIQWNGEEIVVEDASTADFNGVDIALFSAGKTTSLELAEKVASQGALVIDNSSAWRMDPEVPLVVPEVNADQVLNTPKGIIANPNCTTMAAMPVLAPLHNEAQLVGIVASTYQAVSGAGLAGVAELGEQIRATVDNAEGLTYSGSAVEHTAPSSFAQPIAHNVLAHAGAFVSDGSGETDEEQKLRNESRKILDIPDLDVSGTCVRVPVFTGHSLALNLRFRSEITPERATELLDKAEGVVLSDVP

SEQ ID NO: 93717 - protein, 290 aa, Unknown
  Bacterial polypetide isolated from the Sargasso Sea
IIWKGEELVTKKTTKEEFLNLDLVLASAGGSISKKWLSTIMEQNALLIDNSSAFRLDNNVPLIVPEVNGSDAINHDGVIANPNCTTILLTLVLAPLNKLSTIQRVVVSTYQSVSGAGQLAMEELKLLTEKYLRGNPQKSEVLPYSLAFNLFLHNSPMLANNYCEEEMKMVNETRKILNIADLKLSATCVRVPVLRAHSESINIEFASVVEPKDALEELKKSPGIEIIEDYKNNRFPMPNDVMGRDNVAVGRIRTDISQPNGLELWLCGDQIRKGAALNAVQIAELLIPKK

SEQ ID NO: 93718 - protein, 292 aa, Unknown
  Bacterial polypetide isolated from the Sargasso Sea
KKIIWKGEELVTKKTTKEEFLNLDLVLASAGGSISKKWLSTIMEQNALLIDNSSAFRLDNNVPLIVPEVNGSDVINHDGVIANPNCTTILLTLVLAPLNKLAPIKRVVVSTYQSVSGAGQLAMEELKLLTEKYLGGNPQKSEVLPYSLAFNLFLHNSPMLSNNYCEEEMKMVYETRKILNIADLKLSATCVRVPVLRAHSESINIEFAGVVEPKFAFEELKKSPGIEIIEDYKNNRFPMPNDVMGRDNVAVGRIRTDISQPNGLELWLCGDQIRKGAALNAVQIAELLIPKK

SEQ ID NO: 93719 - protein, 234 aa, Unknown
  Bacterial polypetide isolated from the Sargasso Sea
EKNVPLVVPEVNSGDALNHDGVIANPNCTTILLTLVLAPLNKLSSIQRVIVSTYQSVSGAGQLAMEELKLLTEQFLQGNPQKSEVLPYSLAFNLFLHNSPMLANNYCEEEMKMVNETRKILNITDLKLSATCVRVPVLRAHSESINIEFAGVVDPKDALKELKKSPGIEIIEDYQNNRFPMPNDVMGRDNVAVGRLRTDISQPNGLELWLCGDQIRKGAALNAVQIAELLIPKK

SEQ ID NO: 93720 - protein, 333 aa, Unknown
  Bacterial polypetide isolated from the Sargasso Sea
MSQHVAIAGATGAVGTEFLKLLEARDFQMKSLRLLASSRSAGSKLKFRGENLEVEELTPKSFEGIDIAFFSAGGSRSREFAPHAVDSGAVVIDNSSAFRMDEKVPLVVPEINPKQAFEHQGLIANPNCSTIQMVVALNPIHRAANIQRVVVSTYQAVSGAGASAMEELKQQLRAWANDEPMKQEVFPTQIAFNLFPHIDVFQDNGYTKEEMKMVHETRKIMNAPNMQISATCVRVPVLRAHSEAVWVETEKPLSESEARELFEKEPGIVLQDERESGGYPTPWHITETQETYVGRIRKDISHPNGLTFWVVADQLYKGAALNAIQIAEVLQQG

SEQ ID NO: 93721 - protein, 343 aa, Unknown
  Bacterial polypetide isolated from the Sargasso Sea
MASSKKPKIAVVGATGNVGREVLDIIDEKEIQYSDLIALASSRSKGSTIDYGENKSVVVADLAEYDFSDTDIAIFSPGAKVSSEFAPKAAKQGCIVIDNTSHFRTDPDVPLVVAEVNPEVLKDFRKKNIIANPNCSTMGMLVAIKPLHDQFNVKRIVVSTYQSVSGAGKEAADELFNQTKSIYANEAIVKEKFTKQIAFNVIPHIDVFLEDGQTKEEWKMFNETKKILDQNIELTATCVRVPVFVSHSLAVNVEFNNPYDEDQVREIFKKSPGLKMIDYRADEGYVTPIESAGLDPVYISRIRRDPTIPNGLNFWCVSDNLRKGAALNTVQIAEILIKDYLSS

SEQ ID NO: 93722 - protein, 374 aa, Unknown
  Bacterial polypetide isolated from the Sargasso Sea
MSQQKVGLVGWRGMVGSVLMQRMQEEQDFAHIEPTFFTTSQKGSAAPDFAGKDAGVLEDAHDIEALSKQDIIITCQGGDYTKAVYNDLRATGWNGYWIDAASALRMKDDAVIILDPVNRKEIDSGIEKGIRTYVGGNCTVSLMLLALGGLFEKDLVEWASPMTYQAASGSGAQHMRELINQMGAIHSNVKAKVEDPATAILEIDQQVSEFIRSADYPSEQFGVPLAGSLIPYIDSQLPSGQSREEWKAQAEANKILGIKGGEVPIDGICVRVGAMRCHSQAITLKLKKDLPLAEIETILANHNDWVKVIPNDRDATMQELTPAKVTGTLSIPVGRIRKLNMGPEYISAFTVGDQLLWGAAEPLRRMLRIVLEQK

SEQ ID NO: 93723 - protein, 334 aa, Unknown
  Bacterial polypetide isolated from the Sargasso Sea
MLTKKESYNVAVVGATGIVGESLLEILYSRRFPISSIHAVASKKSKGSKAKFGDQLLTVESLDEFNFTDIDIAFFSAGSSVSKEYATKATTQGCIVIDNTSEFRYEQDVPLVVPEVNPQDIDLYKHKNIIANPNCSTIQMLVALKPLHDTFCVKHINVCTYQAVSGSGKDGVEELLQQSSAYIDQRSIDKKVYPKQIAFNSIPFVDCFLDNNYTREEMKMVWETHKILDENISVNPTAVRVPVLVGHAESIYIETEKEIDIESAKNCLNEFAGISVIDNVQEVDFPTSFEHGHGTDDVYVGRIRKGLSKNNSLNLWVVADNVRKGAALNSIQIA

SEQ ID NO: 93724 - protein, 338 aa, Unknown
  Bacterial polypetide isolated from the Sargasso Sea
MSQEFNVVVLGASGAVGQTMIEILEERNFPVANLYPLASSRSAGETVSFHGKQVTILDVETFDWSQAQLGFFSAGGDVSAKWAPIAAEAGCVVIDNTSHFRYDIDIPLVVPEVNPHAIADFRNRNIIANPNCSTIQMLVALKPIYDTYGISRINVATYQSVSGTGKKAIEELAKQCTKLLQGLPADAEVYPKQIAFNVLPQIDKFMDNGYTKEEMKMVWETQKIFGDDDILVNATAVRVPVFYGHSEAVHIETRQVADAEDIKALLRNAEGVVLFESDDEYPTAVTHAAGTDPVYVGRVRKDISHSHGINLWVVSDNIRKGAALNSVQIAEILVRDYY

SEQ ID NO: 93725 - protein, 352 aa, Unknown
  Bacterial polypetide isolated from the Sargasso Sea
MSRQSAVPFTPRLSSSFPARPLNVAVLGASGAVGQELLLLLEERNFPVAELKLLASARSAGSTQQWNGRTITLEEVNDAAFEGVDLVLASAGGSVSRQWRDAITAAGAVMVDNSSAFRMEEGVPLVVPEVNPDAALAHNGVIANPNCTTILLTLALAPLAAKRPMRRVVVSTYQSASGAGARAMEELKTLSQTVLDGGTPQGEVLPYSLAFNLFLHNSPLQANRYCEEEMKMVNETRKIMDLPDLRFTATCVRVPVLRAHSEAVNIEFEQPFPVEEARALLSAAPGVELIEDPATNRFPMPTDVTGRDPVAVGRIRQDISDPNALELWLCGDQIRKGAALNAVQIAELLLPS

SEQ ID NO: 93726 - protein, 342 aa, Unknown
  Bacterial polypetide isolated from the Sargasso Sea
MSFASAATPPTVAILGATGAVGQELLTLLEERSFPLKQLRLLASPRSAGQTVPFQDQTLTVEPVSAEALAGVDLVLASAGGSVSREWAPVAVQQGAVVIDNSSAFRMDPTVPLVVPEVNPQAALTHQGIIANPNCTTILLTLALAPLAAMRPLRRVVVSTYQSASGAGARAMEELRQLSRTVLDGGEARSEVLPHSLAFNLFLHNSPLKANGYCEEELKMLNETRKIMQLPELSFSATCVRVPVLRAHSEAVNIEFEAPLSVAEARAALAQAPGVELIEDFETNRFPMPTDVTGRDPVAVGRIRQDLSHPQALELWLCGDQIRKGAALNAVQIAELLLEAAQ

SEQ ID NO: 93727 - protein, 319 aa, Unknown
  Bacterial polypetide isolated from the Sargasso Sea
GTEFLKLLEARDFPMKSIRLLASSRSAGSKLKFRGENLEVEELTPKSFKGIDIAFFSAGGSRSKEFAPHAVDSGAVVIDNSSAFRMDEKVPLVVPEINPKQAFEHQGLIANPNCSTIQMVVALNPIHRAANIQRVVVSTYQAVSGAGASAMEELKQQLRAWANDEPMKQEVFPTQIAFNLFPHIDVFQDNGYTKEEMKMVHETRKIMNAPNMQISATCVRVPVLRAHSEAVWVETEKPLSESEARELFEKEPGIDVQDERESGGYPTPWHITETQETYVGRIRKDISHPNGLTFWVVADQLYKGAALNAIQIAEVLQQG

SEQ ID NO: 93728 - protein, 338 aa, Unknown
  Bacterial polypetide isolated from the Sargasso Sea
MSQEFNVVVLGASGAVGQTMIEILEERNFPVANLYPLASSRSAGETVSFHGKQVTILDVETFDWSQAQIGFFSAGGDVSAKWAPIAAEAGCVVIDNTSHFRYDIDIPLVVPEVNPHAIADFRNRNIIANPNCSTIQMLVALKPIYDTYGISRINVATYQSVSGTGKKAIEELAKQCTKLLQGLPSDAEVYPKQIAFNVLPQIDKFMDNGYTKEEMKMVWETQKIFGDDEILVNATAVRVPVFYGHSEAVHIETRQVADAEDIKALLRDAEGVVLFESDDEYPTAVTHAAGTDPVYVGRVRKDISHSHGINLWVVSDNIRKGAALNSVQIAEILVRDYY

SEQ ID NO: 93729 - protein, 373 aa, Unknown
  Bacterial polypetide isolated from the Sargasso Sea
MNVGLVGWRGMVGSVLMQRMQEEGDFDLIEPVFFSTSNTGGKAPSFAKNETTLKDATNVDELKKCDVIITCQGGDYTNDVFPKLRAAGWNGYWIDAASSLRMKDDAVIILDPVNLDVIKDALVKGTKNFIGGNCTVSLMLMALGGLFRENLVDWMTAMTYQAASGAGAQNMRELLSQMGTLNGAVKEQLADPASAILDIDRRVLAAMNSDAMPTSNFGVPLAGSLIPWIDKDLGNGMSKEEWKGGAETNKILGKPAMGEPGSIPVDGLCVRIGAMRCHSQALTIKLNKDVPLDEINGILASANDWVKVVPNEREASMRDLSPANVTGTLTVPVGRLRKLAMGGEYLSAFTVGDQLLWGAAEPLRRMLRILLDK

SEQ ID NO: 93730 - protein, 286 aa, Unknown
  Bacterial polypetide isolated from the Sargasso Sea
MSQHVAIAGATGAVGTEFLKLLEARDFPMKSLRLLASSRSAGSKLKFRGENLEVEELTPKSFKGIDIAFFSAGGSRSKEFAPHAVDSGAVVIDNSSAFRMDEKVPLVVPEINPKQAFEHQGLIANPNCSTIQMVVALNPIHRAANIQRVVVSTYQAVSGAGASAMEELKQQLRAWANDEPMKQEVFPTQIAFNLFPHIDVFQDNGYTKEEMKMVHETRKIMNAPNMQISATCVRVPVLRAHSEAVWVETEKPLSESEAHELFEKEPGIVVQDERESGGYPTPWHIT

SEQ ID NO: 93731 - protein, 330 aa, Unknown
  Bacterial polypetide isolated from the Sargasso Sea
MNFAIIGASGNVGRKTIEILEKSKLAIDNLFLVASSKSAGKKIKFKNKEIEIEDLENYNFSRAQITFFAAGSKVAKEWVPKAAKETIVIDNSSYFRMQKDVPLVVPEVNSDALNKHKNIIANPNCSTMQMVLPLKPLHDEYKIKRVIVSTYQAVSGAGKESMDELFDQSRDYLDGKKIKPINFTKQIAFNLIPHIDSFDQDGYTKEELKMTNETKKILDNEIDVSATCVRVPVRTGHSESINIEFDNLYDFENIIKILKNAPGCKVIDERNDGGYMTPLEAEGSYTTYISRIRKDNSNIKAINLWVVSDNLLKGAALNTVQIAECLMKKL

SEQ ID NO: 93732 - protein, 222 aa, Unknown
  Bacterial polypetide isolated from the Sargasso Sea
LLTAPGKGIPNIVHGVNHLENNPDSIDIFSAASCTTNAITPVLKVLEDNFGIKKGHLETIHAYTNDQNLVDNMHKKYRRGRAAALNMVITETGAGKAVSKALPALEGKLTSNAIRVPVPNGSLAVLNLQLNSETTVEAVNAIMKQYALEGDLVEQIKYSLSNELVSSDIVGTTAPSIFDSKATIVDGDTIVIYVWYDNEYGYSHQVMRLAKHIAKVRRYTYY

SEQ ID NO: 93733 - protein, 271 aa, Unknown
  Bacterial polypetide isolated from the Sargasso Sea
EIDYSKLNYLKKKNVLVTGAGGSIGSELSRQISKLKPTKLIMLDHSESSLQKLKSSEKIKLSNKNRLILGNILDEGFIANIINKYKIDLIFHTAAYKHVEILEDNIFNATKNNIFGTLSLIEAANSANKKIQFVYVSTDKAVKPIGILGYTKGIGEVLTENLYDNSKNLKTSIVRFGNVFASDGSVFNKFVDQIKRKNRIELTDKKMERYFMSIEEACHLLLKCPIISLRKNIFILNMGKPIKILNLIKKMKKFLNKDIKIKIIGKRKGEK

SEQ ID NO: 93734 - protein, 228 aa, Unknown
  Bacterial polypetide isolated from the Sargasso Sea
MEPCGALRNRCGTLRNCRGTLRNPAELPRNPAEPPRNPAEPCGTAAEPWGTAAEPCGTAEPLRNPAEPPRNPSELCGTAAEPCETAAEPCGTLRNRRGTLRNRRGTPRNPAEPPRNHAEPLRNPAELCGTAAELCGTAAELRGTLRNRRGTLRNRRGTAAEPCGTAAEPCGTLRNCRGTLRNPAEPLRNPAELPRNPAEPCGTAAEPCVTAAEPCGTLRNCRGTLRNR

SEQ ID NO: 93735 - protein, 79 aa, Unknown
  Bacterial polypetide isolated from the Sargasso Sea
MTVKIGINGMGRIGRMVVRSIVESKNKNLKINHINNRSNSETTSKLIKYDSTHGKLNANLDYDPNHLIINKNKITFSQE

SEQ ID NO: 93736 - protein, 65 aa, Unknown
  Bacterial polypetide isolated from the Sargasso Sea
MSNRPYRVALNGYGRIGRCVLRALHERGNSASLEIVALNDLADQASIEYLTRFDSTHGRFPGEVK

SEQ ID NO: 93737 - protein, 54 aa, Unknown
  Bacterial polypetide isolated from the Sargasso Sea
MTIKVGINGMGRIGRMVVRSIIESENNNIKIKHINNRSNSEATCSLIKYDSVHG

SEQ ID NO: 93738 - protein, 201 aa, Unknown
  Bacterial polypetide isolated from the Sargasso Sea
MAIKIGINGLGRIGRMIIRSLIEANNKKIEIKHINSRSSAEVVASLLKYDSIHGKFNCKIKHGNNYLNINNKKITFSQHSNLNEIKWKKFNVDYVLECTGKFNSKDKLIPHLKNGAKKVIVSAPCKNADKTIVYGVNHKSINKNDFIISAASCTTNCLAPVAYILNKEFKIEKGFMTTIHSYTSDQRLLDNSHKDLRRARS

SEQ ID NO: 93739 - protein, 187 aa, Unknown
  Bacterial polypetide isolated from the Sargasso Sea
AIVPALKVVDDNFKILSGHIETVHAYTNDQNLIDNYHSADRRGRSAALNLVITDTGAAKAISGVLPELKGKITANAIRVPTPNVSLAIMHLNIKKGVSVEDLNQCFRNAAFHSNLRTTIDYSNSLDAVSSDFYSNEFACVFDSQATISNFNNITIYCWYDNEYGYSRQVARLLNKALGINLVRYPKQ

SEQ ID NO: 93740 - protein, 165 aa, Unknown
  Bacterial polypetide isolated from the Sargasso Sea
MTIKIGINGMGRIGRMVVRSIIESKNKKFKINHINNRSSSETTCKLIKYDSVHGKFNADLKFDENHLLINKDKITFSQESKIEDIKWKKFDVDYVFECTGKFNSKEKLNAHIKNGAKKVIVSAPCKSADKTIVFGVNENIISKNDKIISAASCTTNCLAPNRECA

SEQ ID NO: 93741 - protein, 197 aa, Unknown
  Bacterial polypetide isolated from the Sargasso Sea
AADASEGDRSIITFSKPRDVRGTALLTHSKIEPNDDSQWIFLPAVKRVKRISSSNRTGKFVSSEFSYEDLGSEEVADNDHIWLQDAACEHDGALTCAAVESRPKNKRSGYSRRVSFVDLEEYRVHRIDFYNRRGDLEKSLRFEDYRQYEGQFWRAHVMIMDNNQTGKSTRLAWGDYSFRQGLTERDFTPQGLPKASR

SEQ ID NO: 93742 - protein, 165 aa, Unknown
  Bacterial polypetide isolated from the Sargasso Sea
MTIKVGISGFGRIGKLVYRIIEDLRLNKNEDIQVVALNCPSISSENLKYLINYDSTHHLLKYKILTFENYLVVNDNKVTLFRERDPQKINWKSANVDYVIDSTGVFKTIDKASVHLKNGAKKVIITAPSEDAPMYVVGVNSDKYDKSQKIVSNSSCTTNCLAPCC

SEQ ID NO: 93743 - protein, 252 aa, Unknown
  Bacterial polypetide isolated from the Sargasso Sea
MNIFINGLGRIGKLVFRRLCDEGLYKKIHSVNEKEGIPSDQEYFLKYDSVHGSWGEKLNFKNNNLFYKEHPIRVSNFNHIEDLSFPEATPNIAIDCTGKFKDEKSLQAYFDKGIDYVLVSAPIDSKNVFNIVYGINHNDVNLEKYKILTAASCTTNCLAPIVKVLETNIGISHGSITTIHNITNTQTIADSPNSNLRRSRSGINSLIPTTTGSAKAISLIYPELKGRLNGHAVRVPLLNSSLTDCVFEMKKK

SEQ ID NO: 93744 - protein, 35 aa, Unknown
  Bacterial polypetide isolated from the Sargasso Sea
IPELKGKLEGIAIRVPTPNVSLIELVFCTKKNLTD

SEQ ID NO: 93745 - protein, 103 aa, Unknown
  Bacterial polypetide isolated from the Sargasso Sea
MPELKGKITANAIRVPTPNVSLAIMHLNIKKGVSVEDLNQCFRNAAFHSNLRTTIDYSNSLDAVSSDFYSNEFACVFDSQATISNFNNITIYCWYDNEYGYSR

SEQ ID NO: 93746 - protein, 78 aa, Unknown
  Bacterial polypetide isolated from the Sargasso Sea
EIKKVMLEASKNDLSGILGYCDEPVVSQDFIGDKRTSIFDANAGMELNSNFFKIISWYDNEYGYSNKLLDLSKHIYSI

SEQ ID NO: 93747 - protein, 186 aa, Unknown
  Bacterial polypetide isolated from the Sargasso Sea
AIVPVLKAVNDQYGIVNGHVETVHSYTNDQNLIDNFHKGSRRGRSAALNMVITETGAATAAAKALPVLKGKLTGNAIRVPTPNVSMAILNLNLEKATTREEINEYLRQMAMHSDLQKQIDFVSSQEVVSTDFVGSRHAGVVDAEATIANDNRVVLYVWYDNEFGYSCQVVRVMEDMAGVNPPAFPR

SEQ ID NO: 93748 - protein, 305 aa, Unknown
  Bacterial polypetide isolated from the Sargasso Sea
MTDLTKNPDLRSREKIDDYFGDWKWREGLAELMVPIVGRLYRHGVHIMIYGQSLVNKSPIDIMHAHRFVRQIEENELSELETYPLLERLSKMDLPDCEVDIGELAMRCSFFEDLPNNPDSIEDFLHEHINVDGITTKRPEQPQDIVLYGFGRIGRLMARMLAQTTGPGNYFRLKGVVVRKTGENDLIKRASLLRRDSVHGRFDGTIRVDLENELLVINGNPVKFIYANSPSDVNYSDLNINSPIVIDNTGIWRDEQSLSQHLNCGASKVILTAPAKGDIRNIVFGVNDSALQASDQIFRLHRVQP

SEQ ID NO: 93749 - protein, 131 aa, Unknown
  Bacterial polypetide isolated from the Sargasso Sea
NAVAKAIPELEGKLTGNAIRVPTPNVSLALLVLELNEEVTKESLNNYLKDSAFRSKYRQILGFVNSSEIVSTDFYSSQFASVIDAQATIVNGKHVTLYCWYDNEYGYSQQVLNLTKKIASIDLPLLPLSIQ

SEQ ID NO: 93750 - protein, 131 aa, Unknown
  Bacterial polypetide isolated from the Sargasso Sea
MKIKVGINGMGRIGRMVLRSIFENNSKNIEIKHINNKSSSEIFTNLIKYDSVHGKFNADVSFDEKHLFINKNKISYSRYSNLEDIQWGKLDVDYVFECTGKFNSKEKLQTHLKNGAKKVIVSAPCKNADKS

SEQ ID NO: 93751 - protein, 225 aa, Unknown
  Bacterial polypetide isolated from the Sargasso Sea
MTVKIGINGLGRIGRMIIRSLIENNNKKIEVKHINSRSNSKVVSSLLKYDSIHGKFKCEIKYGDNYLSFNGKKVTYSQYSNLNEINWKKLGVDYVLECTGKFNSKEKLIPHIKNGAKKVIVSAPCKNADKTIVYGVNHKSISKNDLVISAASCTTNCLAPIVYVLNKEFKIEKGFMTTIHSYTTDQRLLDNSHKDPRRARSATQSMVPTSTGASKAIGEIIPELK

SEQ ID NO: 93752 - protein, 297 aa, Unknown
  Bacterial polypetide isolated from the Sargasso Sea
GFGRIGRNIFRQAYKNPLFNIVAISEYSHIETLHYLLARDSVHGVLEDEIGIEEDSFVINGKKVKILPGEKPGGLNWDKFDIDFVIDATGKYHRRSDLEKHISSGAKRVIVSSMPEDHIDRVVINGINDDEIQTSDKIISATSSTTQVLALMVKILDEKYSLNRAMMTTVHAFTADQPLSDAVRLDLRRSRSAVENIIPNTTHAPAAVERLMPKFSGKLDGMAFNVPVPNGSCVDLTTDLKTLPNIDQVNELMLEKSKNGLHGIVGYTEDPIVSSDVRGRQETLVFDAKATMITAGS

SEQ ID NO: 93753 - protein, 313 aa, Unknown
  Bacterial polypetide isolated from the Sargasso Sea
MKNKNKKIRIGLFGFGRIGRNIFRIGYNDPRFNFVAISDLGDVEAMHYLLMRDSIHGSMDDEILLNGNDLTYVGNSTRLLPGSAPGSIPWDAFDVDIVIDSTGVYRKKEQLQLHLDSGARRVLVTKPPADEIDRIVIQGINHDKINSKDQIISTTSSTTQVLALMLKVLDQNFGIKNAMMTNVHAYTSDQPLADSVRSDLRRSRSAVENIIPNETWAPDYVSQLLPKFKNKILGMAMNVPVANGSCVDLTTEMSSMPSIEEVNNAFKDASENELIDLIRYTEDPIVSSDAIGGGETMVFDSKATMMHQINFKN

SEQ ID NO: 93754 - protein, 129 aa, Unknown
  Bacterial polypetide isolated from the Sargasso Sea
VSKALPELDGKLTGNAIRVPTPNVSLAVMSLTVDKNDLYKEEVNEFLRKTAFNSKYREIVGFVNSTEIVSSDFYSSPFASVIDSQATIVSDNKITLYCWYDNEYGYSVQVVNLVKNIAGINLIRLPVKV

SEQ ID NO: 93755 - protein, 101 aa, Unknown
  Bacterial polypetide isolated from the Sargasso Sea
KNADKTIVYGINHKTINKKDLIISAASCTTNCLAPIAQVLNDEFKIEKGFMTTIHSYTTDQRLLDNSHKDLRRARSAAQSIVPTSTGASKALSEIIPELKG

SEQ ID NO: 93756 - protein, 131 aa, Unknown
  Bacterial polypetide isolated from the Sargasso Sea
MSIIVGISGFGRIGRAICRLIFETPPDTNNPITIGAINSSKSPEYLAYLLKYDTVHGCFAGQVDYTEDKLIVNNVSIPIVSHRNPSEIPWKKYNIKYVCECTGVFNTKETAKQHIDHDNGAEYVILSCPPK

SEQ ID NO: 93757 - protein, 306 aa, Unknown
  Bacterial polypetide isolated from the Sargasso Sea
MYHFDAPGDISQQVYPSKFRWEDTTKLIFDRLGLKCHLAKPLNTSYRSVRSIVDLANWYLEQMDERNRITGHVIKEALTSEAGIRPSILFNDDEGHFIENLLKFKLPMPHCPLIVRDEVEKERVIKIINKKEDVKKEDFNPSVFIFTIAEVKGLEFNYIITWDFTSGSKHLLKRAFHIKKGDYIEKEDWNLQMELKHAFVGVTRTRLLLLHLSPNHKEYGIDPLMQKQIKNNLAIKEESDDLSRFSEVILSDEEYEKLAESYKDAEMFAAAAAVYRKIEMIPESIHCEYLSKDDDNLELAVLEELF

SEQ ID NO: 93758 - protein, 218 aa, Unknown
  Bacterial polypetide isolated from the Sargasso Sea
MKIKIGINGLGRIGRMVVRAIVENNNKNIEIKHINNRTDLKNISQLLKYDSIHGKFNADIKFNEKNLFINGKEIFYSRETALEKINWKKNSVDIVLECTGKYNSREKSFQHIKNGAKKVIVSAPCKNSDKTIVYGVNQNSINKNDLVISAASCTTNCLAPVAYILNKDFGIEKGFMTTIHSYTTDQRLLDNSHKDLRRARSAAQSIVPTSTGASKALG

SEQ ID NO: 93759 - protein, 295 aa, Unknown
  Bacterial polypetide isolated from the Sargasso Sea
GVADNLSDGDQDYAIVLTGDSSSTDLRFRNVDPPDVSVRNLDYTTKGGFYVSQISGDTDENLNTAFFTVSLSSAPSKDNVTITMATSDAEEGDISTISSASPDNTSQLVFTASNWNSVRTVTVKGVADNLSDGDQDYAIVLTGDSSSTDLRFRNVDPPDVSVRNLDYTTKGGFYVSQISGDTDENLNTAFFTVSLSSAPSKDNVTITMATSDAEEGDISTISSASPDNTSQLVFTASNWNSVRTVTVKGVADNLSDGDQDYAIVLTGDSSSTDLRFRNVDPPDVSVRNLDYTTKG

SEQ ID NO: 93760 - protein, 152 aa, Unknown
  Bacterial polypetide isolated from the Sargasso Sea
MTIKVGISGFGRIGKLVYRIIEDLRLNENEDIQVVALNCPSISSENLKYLINYDSTHHLQKYNILTFENYLVVNDNKVTLFRERDPQKINWKSANVDYVIDSTGVFKTIDKASVHLKNGAKKVIITAPSEDAPMYVVGVNTNKYDKSQKIVS

SEQ ID NO: 93761 - protein, 113 aa, Unknown
  Bacterial polypetide isolated from the Sargasso Sea
NAIRVPTPNVSLAIMNLNLKKSVGVEELNDLFKQAAFHSNFRTIVDYSNSIDGVSSDFYSNEFACVYDAQATISNFNCVTIYVWYDNEYGYSRQVVRLLKKVLGVNLIRYPKQ

SEQ ID NO: 93762 - protein, 341 aa, Unknown
  Bacterial polypetide isolated from the Sargasso Sea
MSDSSKKINIAIFGFGRIGRNIFRLAYKDPRFNIVAISEFGHAEALHYLLVRDSVHGKLKDPIKLEGNNLVFGDQVVRILPGEKPGEIPWSTMNVDFVIDATGAFLDRNELEKHINSGAKRVIVSRTPTDRIDRMVIHGINEDSIEQSDQIISATSSTTQVLGLMLKILDNHFGLKRAMMTTVHAYTADQPLTDAIGLDLRRSRAAVENIIPNTTSAPNIIEKLMPEFKGKLDGIAFNVPVPNGSCVDLTTELQKIPNVEELNDVFREESENKFKNLIGYTEDPIVSSDVIGREETMVFDAKATMLTADKLLKTLCWYDNGWGFSKRILDTIALYETGEDN

SEQ ID NO: 93763 - protein, 737 aa, Unknown
  Bacterial polypetide isolated from the Sargasso Sea
MGYQPKSRISKAIMGCLGLSVLPALPLNAKEVLGAPKVEPIEILQVHGQQYRRATTMTKPGEAIISMEQIEEMQATTFAEVIDDMAGAHVDGGTRSGGERINLWGFGETEDFNIYVDNAPVGFEQYRYGSFFLDPDLIKRVEVIKGAHDVRSGNGGFGGSMYVVTKSADDFLTYNQNVGARVKASYASNNDAQSYTGTVYGRANKQLSGLLHVTRRDAGDVTLANGDEFEYSGYEQNNYLGKLDYEQGDHQLMLSLTHYLDEGRKPWANRRGPMPAISDYNIRKYGSYEQALYATTAYNTYEDNTWSANYRYSPSNPLIDTQIVVSHSANARHWIRPPIAWEKMTVSVGNFGHESWLDYKRDYIDINNLSIVGDHEITTGLQFRSLDRDSMVFNKSYEKNPEKNYGWYTPYYQPEGRQDTYAVYLRDAISVTDELTITPSLRYDYIYSIGRPNIAPDYNDIEAGHDYSSTHHSGFSPRLGIDYQLTANTRVNFDYAYSLQAPVVDEIYAVQYAKASITGTSRDIDVERLHAFKLGLMTQQISLFAAQDTLSTQVTLFANLGRDDIAQRRGAKSDPNQVIQSGYTNLDGYEIYGADLESQYRYQDFFSDLAVSWLQGEHRGSLRDSQGEDEYLANIAPLDIRLRVGMYITDDISVAWQGTWYDAQDNVPQGDIFNAESPSENYFLQNIYLAYEPQEILKGLSVRLMAKNLTNQQVTPFLSDGIPAPGRDIRLSLAYEF

SEQ ID NO: 93764 - protein, 208 aa, Unknown
  Bacterial polypetide isolated from the Sargasso Sea
MAIKIGINGLGRIGRMIIRSLVENNNKKIVIKHINSRSSAEIVSSLLKYDSIHGKFNCKIKYGNNYLSLNGKKITFSQCSDLNQIKWNKLNVDYVLECTGKFNSKEKLLTHLKNGAKKVIVSAPCKNADKTIVYGVNHKSIKQNDNIISAASCTTNCLAPVAYVLNEEFKIEKGFMTTIHSYTTDQRLLDNSHKDSRRGRSAAQSIVP

SEQ ID NO: 93765 - protein, 370 aa, Unknown
  Bacterial polypetide isolated from the Sargasso Sea
MAEVCGYKLNQTNAKDGVNPNDTNAEFQLEEKKVEKIKIGLFGFGRIGRNIFRIGYEDPRFEFVAISDLGDVEAMHYLLMRDSIHGAMKSDIKLEGKDLLYNGSSSRLLPGAAPGSIPWDAFGVDMVIDSTGAYRKREELQMHIDSGAKRVLVSKPPINEIDRIVIQGINEDQIDRNDKIISTTSSTTQVLALMMKVLDDSFGINRAMMTTVHAYTSDQPLADAVRSDLRRSRSAVENIIPNETWAPDYVSQLMPKFKDKISGIAMNVPVANGSCIDLTTEMKKMPSVEEANKSFEDASLNELKGLIRFTEDPIVSSDAIGGGETMLFDSKATMIASEKLLKTVAWFDNGWGFANRILELAEAYSKKERI

SEQ ID NO: 93766 - protein, 111 aa, Unknown
  Bacterial polypetide isolated from the Sargasso Sea
MRIAINGFGRVGRHITRALIGQTVQAHNDLKLIAVNDLAPIEHSAHLLKYDSIYGQFHEPISVRGDEIMVGDKSIRYFCDPDPRKASWGELDIDLVLECTGRFASGEKSSS

SEQ ID NO: 93767 - protein, 185 aa, Unknown
  Bacterial polypetide isolated from the Sargasso Sea
MHHVQLICIAPVLKVLNESIGIDCGFLTTVHSFTNDQRLTDSNHKDPRRARSATESMIPTKTGAAIAVGDVIPDLKGKLDGYAIRIPIINVSVADLVLNVKKDTSVEEVNNIIKTACTNEMKNIIDYNELPLVSKDFNHRAASGVFDSTLTKVIDKRLVKIFTWYDNEWGFSNRMLDTTLVFMKK

SEQ ID NO: 93768 - protein, 332 aa, Unknown
  Bacterial polypetide isolated from the Sargasso Sea
MVTYGINGIGRIGKFALKALIEREAKVSWINDSSGTIDLHRHLLEYDSVHGKWDADFSNDEKSITINDKKIIFQTSSTIENIELEDVDIIIDCTGYYKSRSKLLNYFNMGVKKVVVSAPIEDENIANIVYGVNQDIYDSKKYDIVTAASCTTNCLAPIVKVIHENIGIKHGSITTIHNPTNTQTIVDKANKEFRRARSALNSLIPTTTGSAKAITLIYPELLGKLNGQAVRVPLLNSSLTDCVFEVSRKTNKKEINNLLKKASEQELRGILGYEEKPLVSTDYLSDKRSAIIDADCTMVINETQVKIYAWYDNEIGYAERLIDVSQMVGSLL

SEQ ID NO: 93769 - protein, 361 aa, Unknown
  Bacterial polypetide isolated from the Sargasso Sea
MHSNAKDGIGPNDSEAQFQLDENQIEKIRIGLFGFGRIGRNIFRIGYNDPRFEFVAISDLGNVEAMHYLLMRDSIHGAMQDDIILEGKDLIYKDSKTRLLPGAAPGSIPWDAFDVDLVIDSTGAYRKKDELQLHIDSGAKRVLVSKPPINEIDRVVIQGVNHNDIQYSDKIISTTSSTTQVLALMMKILDGSFGVDRAMMTTVHAYTSDQPLADAVRSDLRRSRSAVENIIPNETWAPEYVSQLMPKFKDKISGIAMNVPVANGSCIDLTTEMKKMPTVDEVNKCFEDASLNNFKGLVRYTEDPIVSSDAIGGGETMLFDSQATMIASNKLLKTIAWFDNGWGFASRILELAESYSQLERS

SEQ ID NO: 93770 - protein, 208 aa, Unknown
  Bacterial polypetide isolated from the Sargasso Sea
MKIKIGINGLGRIGRMVIRSIFENNKKNIEIKHINNRTDLKNCSQLLKYDSIHGKFNADIKFNEKNLFINNKKISYSRETELNNINWKKNGVDIVLECTGKNNSKEKSFQHIKNGAKKVIVSAPCKNADKTIVYGVNHKLINKNDLVISAASCTTNCLAPVAYILNKEFKIEKGFMTTIHSYTTDQRLLDNSHKDPRRARSAGQSMSN

SEQ ID NO: 93771 - protein, 99 aa, Unknown
  Bacterial polypetide isolated from the Sargasso Sea
MLDNVIGFSSIEVEEAMVPRADIVAIPEKSSLNECIDQFRKAAHSRLPVYRGTLDEVIGMVHVKDILTFWNNDKDFILENIIRKVIISAPSSLISDLFQ

SEQ ID NO: 93772 - protein, 121 aa, Unknown
  Bacterial polypetide isolated from the Sargasso Sea
KAIGEIIPELKGKLEGIAMRVPTPNVSLVELVFCTKKNLSVEKINSAFQKFISQQKSKILEISNERLVSIDFNHNSASSIIDASLTNVVGKNMGKISAWYDNEWGFSNRMCDIAEFIHKNS

SEQ ID NO: 93773 - protein, 265 aa, Unknown
  Bacterial polypetide isolated from the Sargasso Sea
FKNYLDVPWEKSSVDIILECTGKNKKPDKLNPYFDSLGMKRVIVACPVKGIVAEAESLNIVYGINQSLYDPSKHKLVTAASCTTNCLAPIVKVINENFSIKHGAITTIHDVTNTQVPVDFYKSDLRRARGCMQSLIPTTTGSAKAIAEIFPELKGKLNGHAVRVPLLNGSLTDAVFELNNEVTVEQVNLALKEASETYLKGILGYEERPLVSADYVNDPRSSIVDSLSTMVVNSNLLKIYAWYDNEWGYSCRLADLTEYVIKNEI

SEQ ID NO: 93774 - protein, 222 aa, Unknown
  Bacterial polypetide isolated from the Sargasso Sea
MTIKIGINGLGRIGRMVIRSIIEKNNKKIEIKHINNRTDLKNCSQLLKYDSVHGKFNAEIKCNEKYLFINKKKISYSRETELSKINWKKNNVDIVLECTGKYNSKEKSFQHIKNGAKKVIVSAPCKNADKTIVYGVNHKSIKKYDSVISAASCTTNCLAPVAYVLNQKFKIEKGFMTTIHSYTTDQRLLDNSHKDQRRARSAGHSIVPTSTGASKALAEIIP

SEQ ID NO: 93775 - protein, 114 aa, Unknown
  Bacterial polypetide isolated from the Sargasso Sea
ELNGKLDGIAMIVPVPDGSVVDFNVRIKVDVTVDQINDAVRSASESGSLKNILEYSTLPVVSSDIIGNSHSSIFDAPFTRVIEGNYIKTLNWYDNEWGYSNRVVDLVSLLGQVG

SEQ ID NO: 93776 - protein, 164 aa, Unknown
  Bacterial polypetide isolated from the Sargasso Sea
MTIKVGINGFGRMGRLSFRAAFDWADVEFVRINDPAGDAASLAHLITFDSVHGRWHHEASSDGDEMVIGNHRILCTRNKEIGQTDWSDCDVVIEASGKMKTKALLNAYLAQGVKRVVVTAPVKEEGVLNVVMGVNHHLYDKAQHPIVTAASCTTNCLAPSGEGD

SEQ ID NO: 93777 - protein, 181 aa, Unknown
  Bacterial polypetide isolated from the Sargasso Sea
NCLAPIVKVINENFSIKHGAITTIHDVTNTQVPVDFYKSDLRRARGCMQSLIPTTTGSAKAIAEIFPELKGKLNGHAVRVPLLNGSLTDAVFELNNEVTVEQVNLALKEASETYLKGILGYEERPLVSADYVNDSRSSIVDSLSTMVVNSNLLKIYAWYDNEWGYSCRLADLTEYVIKKEI

SEQ ID NO: 93778 - protein, 267 aa, Unknown
  Bacterial polypetide isolated from the Sargasso Sea
IKNLLRYDSIHGKFNANIEFNEKNIFINNKKISYTRETDLEKINWNKSGVDIVLECTGKNNSKEKSTIHIKNGAKKVIVSAPCNNADKTIVYGVNHKSINKKDLVISAASCTTNCLAPVAYILNKEFVIEKGFMTTIHSYTTDQRLLDNSHKDPRRARSAGQSIVPTSTGASKAIGEIIPELKGKIEGLAMRVPTPNVSLIDLVFNSKKKLSINKINNSFKKASKKNLKNILEATEEKLVSIDFNHNSNSAIVDLSLTNIVGDRMGK

SEQ ID NO: 93779 - protein, 250 aa, Unknown
  Bacterial polypetide isolated from the Sargasso Sea
MVIKIGINGLGRIGRMALRSIIESKRKDLEVVAINNRANSKISSFLLKHDTIHGELKAQITHSENEIKINGKKIVLSHETEISKINWKKNKVDVVLECTGKFNSKEKSSQHIKAGAKKVLVSAPCKGAANIVFGVNQKTLKNNDQVISAASCTTNCLAPVAKVINDNFGIERGFMTTIHSYTPDQRLLDNSHKDLRRARSAPNSMIPTTTGATKSLGDVIPNLKNKVEGISIRVPTPNVSLVEFVFSSKK

SEQ ID NO: 93780 - protein, 186 aa, Unknown
  Bacterial polypetide isolated from the Sargasso Sea
MTVKVGINGLGRIGRMIIRSIVENNKNIEIKHINNKTDVKNSSQLLKYDSVHGKFDANIKFNEKNLFINNKKINYSRETEINKINWKKYGVDIVLECTGKNNSKEKSSKHIKNGAKKVIVSAPCKNADKTIVYGVNHKKINKKDLIISAASCTTNCLGPIVYVLNKEFKIENGFMTTIHSYTSDQR

SEQ ID NO: 93781 - protein, 119 aa, Unknown
  Bacterial polypetide isolated from the Sargasso Sea
MSLVLPSLKGKLDGTAIRVPTPNVSLIDLTLVTDKEVTPESINEAMTNAAKGELKGILDVNQKPLVSKDFNHNSHSSIFDVTQTQVIKGKFSRVLSWYDNEWGFSNRMCDTAIQISGLI

SEQ ID NO: 93782 - protein, 211 aa, Unknown
  Bacterial polypetide isolated from the Sargasso Sea
MTIKIGINGMGRIGRMVIRSIIETQNKNLKIVHINNRSNLESTSKLIKYDSVHGKFNADIKFDKNYLTINKNKIKFSQEPKIENINWKNQDVDYVFECTGKFNSKEKLMSHIRNGAKKVIVSAPCKNADKTIVFGVNDNILSKNDLIISAASCTTNCLAPIVDVINNEFGIERGFMTTIHAFTSDQRILDNSHKDPRRARAASQSIVPTST

SEQ ID NO: 93783 - protein, 199 aa, Unknown
  Bacterial polypetide isolated from the Sargasso Sea
NLYDPSKHKLVTAASCTTNCLAPIVKVINENFSIKHGAITTIHDVTNTQVPVDFYKSDLRRARGCMQSLIPTTTGSAKAIAEIFPELKGKLNGHAVRVPLLNGSLTDAVFELNNAVTEEQVNNEFKKASETYLEGILGYEERPLVSADYVNDSRSSIVDSLSTMVVNSNLLKIYAWYDNEWGYSCRLADLTEYVIKKEI

SEQ ID NO: 93784 - protein, 172 aa, Unknown
  Bacterial polypetide isolated from the Sargasso Sea
MRVAINGFGRIGKLVFRAFLEKKIKNVEVVAINELGSLESSIHLLKYDSVHGEMPLKINKTKNGIKIANNNINFYSERDPSNLPWKSLKVDIVLECSGVFTSKEKAASHLNAGAKKVIISAPASNVDKTVVQGVNNQELSSKHNIISNGSCTTNCLAPVAMVLDSSLGIESG

SEQ ID NO: 93785 - protein, 201 aa, Unknown
  Bacterial polypetide isolated from the Sargasso Sea
GVNHRSLTSDDKIVSNGSCTTNCLAPLAKVLNDNIGIERGIMTTIHSYTGDQPTLDRRHHDLYRARSAATSMIPTSTGAAKALGEVLPELHGKLDGTALRVPTPNVSAVDLTFEASTPVTEKDVNSVVAHAAKNEMVQVLAYDSEPKVSIDFNHTTQSCIFAPDQTKVVGKRMVRVLAWYDNEWAFSCRMADVASTMGRLL

SEQ ID NO: 93786 - protein, 264 aa, Unknown
  Bacterial polypetide isolated from the Sargasso Sea
INNRSDSQVCANLLKYDSVHGKFNAEIKSNSSYLKINKDKISFSQLSNIQDINWKKYNVDYVFECTGKFNSKVKLIPHLKNGAKKVVVSAPCKNADKTIVFGVNHKKIGKNDNIISAASCTTNCLATVADVINANFTIQNGFMTTIHAFTTDQRILDNSHKDPRRARSASQSIVPSSTGASNAIGEIIPSLKGKLEGIAMRVPIPNVSLVEFVFNVKKNISKEKLNNSFTKASNSYLKNILNITKEKLVSIDINHNSASAILDS

SEQ ID NO: 93787 - protein, 129 aa, Unknown
  Bacterial polypetide isolated from the Sargasso Sea
LYQLQPGASKSIGEIIPELKGKLEGVALRVPTPNVSIIELVFCTNKEVTINKINNVLISSSKKELNGILEVTNEKLVSIDFNHNSNSAIIDASLTNVVGKNMGKISAWYDNEWGFSCRMIDLVKYISKI

SEQ ID NO: 93788 - protein, 115 aa, Unknown
  Bacterial polypetide isolated from the Sargasso Sea
SNLKGKLDGTAIRVPTPNVSLIDFTFISKKKTNAKEINNIVLKASKTKELKNILGINDLPLVSIDFNHNASSSIFDMTQTQVVKNRFCRILSWYDNEWGFSNRMIDTMIDLRKFV

SEQ ID NO: 93789 - protein, 200 aa, Unknown
  Bacterial polypetide isolated from the Sargasso Sea
LGAASCTTNAIVPTLKVLNDEFDIQSGHIESVHSYTNDQNLIDNFHKKVRRGRSAALNMVITETGAGKAVGQVLPELQGKLTANAVRVPTPNVSLAIINLRFAKDITLEELNDFLRQKAFHSDLKEQIGFTNSAEVVSTDFVGDRHAGIIDSAATIVNGNKCVLYVWYDNEFGYTAQLLGLAKEMVGLTYQRYPNFSEST

SEQ ID NO: 93790 - protein, 252 aa, Unknown
  Bacterial polypetide isolated from the Sargasso Sea
SLLERLSKMDLPDCEIDLGELAMRCSFFKDLPSNPDSIDDFLNEQISVNDLIINRPDNPQDIVLYGFGRIGRLMARMLAQTTGPGNYFRLKGVVVRKTGDNDLIKRASLLRRDSVHGRFEGTIRVDLENELLVINGNPVKFIYSNSPNEINYSDLGINAPIVIDNTGIWRNEEDLSQHLGSGASKVILTAPAKGDIRNIVFGVNDSALKDSDKIISAASCTTNAIVPVLKIISDNYGIKSGHIETVHSYTND

SEQ ID NO: 93791 - protein, 165 aa, Unknown
  Bacterial polypetide isolated from the Sargasso Sea
IIETGFMTTIHSYTSDQRLLDNSHKDPRRARSAGQSIVPTSTGASKALSEIIPELKDKIEGLAIRVPTPNVSLIELVFNSKKKLSINKINDLFNKASKNNLKNILETTEEKLVSIDFNHNSNSAIIDLSLTNVAGDKMGKVSAWYDNEWGFASRMCDLAEYIHKI

SEQ ID NO: 93792 - protein, 266 aa, Unknown
  Bacterial polypetide isolated from the Sargasso Sea
EENVGIKANGTFIKVIYADSPELVDYTQYGIHDALVVDNTGIWKDDKELSIHFKSKGAAKVLLTAPAKGEVHNVVYGVNHGMIQPEDRIVSAASCTTNAITPVLKALNDEYGIKNGHVETVHSYTNDQNLIDNYHKAERRGRAAPLNMVITSTGAASAVAKALPELKGKLTGNAIRVPTPNVSMAILSLNLNKETNREELNSYLQKVALFSELQDQIDFTSSTEIVSSDLVGSRYAGVVDSQATIVQDDRCVLYVWYDNEFGYSTQ

SEQ ID NO: 93793 - protein, 291 aa, Unknown
  Bacterial polypetide isolated from the Sargasso Sea
KHINNRSNTLISSNLLKYDSVHGKFNEKIQFDDKFIKIGKHKISFSQETNIEDINWSKYGVDYVLECTGKFNSKDQLYTHLKNGAKKVIVSAPCKNADRTIVFGVNEKSITKKDEIISAASCTTNCLAPVLDILNKNFLIEKGFMTTIHAFTTDQRILDNSHKDPRRARSASQSIVPTSTGASKAIGEIIPSLKGKLEGVAMRVPTPNVSLVELVFCTKKNLTTNIINSSFEKASKNYLKGVLCITKEKLVSVDFNHNSHSAIVDASLTNTIGKNMGKISAWYDNEMGIFK

SEQ ID NO: 93794 - protein, 283 aa, Unknown
  Bacterial polypetide isolated from the Sargasso Sea
MAIKIGINGLGRIGRMIIRSLIEKNYKDIEIKHINNRSNSETASQLLKYDSVHGKFNCEIRNDKNHLILKNKKITYTQYTKLEDINWKKYNVDYVLECTGKFNSKEKILPHIKNGAKKIIVSAPCKQADKTIVYGVNEKIIHKEDKIISAASCTTNCLAPVADVLNKNFIIEKGFMTTIHSFTTDQRLLDNSHKDPRRARSAVQSIVPTSTGASKSIAEIIPDLKGKLEGIAMRVPTPNVSLIELVFCTKKDLTIEKINNVFAKSSKGKLKGILDITNEKLVQ

SEQ ID NO: 93795 - protein, 252 aa, Unknown
  Bacterial polypetide isolated from the Sargasso Sea
LIIDNTGIWRDKDELSAHINSGGSKVILTAPAKGDIKNIVYGINDSIIEDNDNIISAASCTTNAIVPVLKVINDEYKIKDGHIETVHAYTNDQNLIDNFHKKDRRGRGAPLNMVITSTGAVKAVAKALPELDGKLTGNAIRVPTPNVSLAILSLTLDKKVTNDVVNDYLRSIAFHSKYREIIGFVNSTEIVSTDFYSSPFATIVDSQATISSGNKLTLYCWYDNEYGYSKQVISLAKKVANINLPRLPKPVN

SEQ ID NO: 93796 - protein, 115 aa, Unknown
  Bacterial polypetide isolated from the Sargasso Sea
LPSLKGKLDGTAIRVPTPNVSLIDLTFVPKKEVTSESINDAMIKAAKGSLKGILATNSAPLVSKDFNHNPHSSIFDITQTQVIKGKFSRVLSWYDNEWGFSNRMCDTAIQIAGLI

SEQ ID NO: 93797 - protein, 292 aa, Unknown
  Bacterial polypetide isolated from the Sargasso Sea
MVVRSIYENYKGIIQIKHINNRSGSEICANLLKYDSVHGKFNAEINSKPNYLKINKDKISFSQIPNIQNINWKKYNVDYVFECTGKFNSKEQLISHLKNGAKKVIVSAPCKNADKTVVFGVNHKKIGKKDTIISAASCTTNCLAPIVDVINKNFIIQNGFMTTIHAFTTDQRILDNSHKDPRRARSASQSIVPTSTGASKTIGEIIPSLKGKLEGIAMRVPTPNVSLVEFVFNVKKNISKEQLNNSFSKASNTYLKNILNVTKEKLVSVDFNHNSASAVLDSSLTNVVGLKM

SEQ ID NO: 93798 - protein, 123 aa, Unknown
  Bacterial polypetide isolated from the Sargasso Sea
MSAKIKVAINGYGRIGRNILRALYEGHRKDAIEIVAINDLGDAAVNAHLTQYDTTHGKFNGEVSVEGDNLVVNGDKIKVLSERDPSKLPWGDLGVDVVYECTGFFASKEKASAHLQGGAKKVI

SEQ ID NO: 93799 - protein, 249 aa, Unknown
  Bacterial polypetide isolated from the Sargasso Sea
FRALWGRPGLELVHVNDPAGDAATAAHLLEFDSVHGRWDRGISSDAYGFSVEGSPLTWSSEKDPTAVPWRERGVEMVLEASGKIKTPETLSPYFEQVGLKRVLVACPVKGEVAGEEALNIVYGINHDLYEPDRHKLVTAASCTTNCLAPVVKVVHESFGIEHGMITTIHDITNTQVPIDAFKSDLRRARSGLTSLIPTTTGSAKAIAMIFPELKGKLNGHAVRVPLLNGSLTDAVFELKQSVTVEQVNA

SEQ ID NO: 93800 - protein, 256 aa, Unknown
  Bacterial polypetide isolated from the Sargasso Sea
GKFNCKIKHGDNYLNINGKKITFSQYPNLSEIKWKNFGVDYVLECTGKFNSKEKLIPHLKNGAKKVIVSAPCKNADKTIVYGVNHKTLNKNDLVISAASCTTNCLAPVAYILNKEFKIETGFMTTIHSYTSDQRLLDNSHKDLRRARSAAQSMVPTSTGASKSIGEIIPELKGKLQGLAIRVPTPNVSLIDFVFNSKNNLSIKKINDSFIKASKKELHNILEATEEKLVSTDFNHNPNSAIVDLSLTNVASEKMGK

SEQ ID NO: 93801 - protein, 160 aa, Unknown
  Bacterial polypetide isolated from the Sargasso Sea
MTTIHAYTGDQPTLDSSHKDLRRARAAAMSMIPTSTGATSTVGEVLPTLVGKMNGSAIRVPTANVSVVDLVVTTSRDTSLDEINQAFRDAANGPMRGVLGINERPLVSIDFNHDPHSSVADLTQTNVANKRFVRVLAWYDNEWGFSCRMLDTAAAMAKYL

SEQ ID NO: 93802 - protein, 276 aa, Unknown
  Bacterial polypetide isolated from the Sargasso Sea
MKDVSGKIGFITGGASGLGFAMAKTFLASGMRVALTDIEDAAIEKTKAFFSDRVEDVLVMKTDVTDRDSMAAAREQTLEKFGKVHVVCNNAGIALNKNVADMTYKDWDWVLGVNLDGVVNGVTTFVGDIKSQGEGGHFVNTASIAGHHGMLGLSGYCASKFGVVGMSEAMRIDLAEDDIGISVLCPGPVATGIFNSERVRPEKFGGTEQAAYPIKEGARQSLEMETLEPDLVGQMVLNAVLENRFYIMTHSEFQEWFKTRTDEIQDEYDYWKNFRE

SEQ ID NO: 93803 - protein, 280 aa, Unknown
  Bacterial polypetide isolated from the Sargasso Sea
RVVEEEDLLIINGNEVKVIYSNDPTTIDYTDYGIENALLIDNTGVWRTKEGLGQHLNCTGISKVLLTAPAKDGIKNIVHGINNDIMKNDDILGAASCTTNAIVPTLKVLNDEFDIKSGHIESVHSYTNDQNLIDNFHKKERRGRSAALNIVITETGAGNAVGQVLPELQGKLTANAVRVPTPNVSLAIMNLELGKEVSVETLNDFLRQKAFHSDLKEQIGFTNSPEVVSTDFVSDSHAGIVDSAATIVNNNKCTLYVWYDNEYGYTAQLLGLAKEMVGLT

SEQ ID NO: 93804 - protein, 162 aa, Unknown
  Bacterial polypetide isolated from the Sargasso Sea
GSITTIHDVTNTQTIVDRPSKDKRRARSALNNLIPTTTGSATAITMIYPELKGKLNGHAVRVPLLNASLTDCVFEVERATSAKEVNALFEEASNKSLKGILGFEKRPLVSSDYTNDPRSSIVDGLSTMVVNKTQVKVYAWYDNEWGYACRLGDITRMVAGSL

SEQ ID NO: 93805 - protein, 77 aa, Unknown
  Bacterial polypetide isolated from the Sargasso Sea
MTLRVAINGFGRIGRNFMRCWLSRGAYTNIEVVGINVTSDPKTNAHLLKYDSVLGQLDGVDIQYTDDTFVINNKTIK

SEQ ID NO: 93806 - protein, 122 aa, Unknown
  Bacterial polypetide isolated from the Sargasso Sea
MTLRVAINGFGRIGRNFMRCWLSRGAYTNIEVVGINVTSDPKTNAHLLKYDSVLGQLDGVDIQYTDDTFVINNKTIKCFSDRNPMNLPWKDWGVDLVIESTGVFNTDVGASKHLEVGAKKVF

SEQ ID NO: 93807 - protein, 159 aa, Unknown
  Bacterial polypetide isolated from the Sargasso Sea
DQNLIDNYHVSDRRGRSAALNLVITDTGAAKAISGVLPELKGKLTANAIRVPTPNVSLAIMHLNVKKGVSVEELNQCFRNAAFHSGLRTTIDYSNSLDAVSSDFYSNEFACVFDSQATISNFNNITIYCWYDNEYGYSRQVARLLNKALGINLVRYPKQ

SEQ ID NO: 93808 - protein, 262 aa, Unknown
  Bacterial polypetide isolated from the Sargasso Sea
TTGPGNYFKLRAIVIRKATNDDIFKRASLLTKDSVHGPFDGTVRVDEENSSLVINGNPVKVIYATSPDKVKYSDYDINDPLVIDNTGIWRDEEELSVHIKSGASKVILTAPAKGNIKNIVYGINDSILKENDQLISAASCTTNAIVPVLKTINDEFKINGGHIETVHAYTNDQNLIDNFHKKDRRGRGAPLNMVITSTGAVNAVAKALPELKGKLTGNAIRVPTPNVSLAILSLELDKKVSVEIINDYLRSMAFHSEYREIM

SEQ ID NO: 93809 - protein, 134 aa, Unknown
  Bacterial polypetide isolated from the Sargasso Sea
MTIKVGINGFGRMGRLSFRAAFDWADVEFVRINDPAGDAASLAHLITFDSVHGRWHHEASSEGDEMVIGNHRILCTRNKEIGQTDWSDCDVVIEASGKMKTKALLSAYLAQGVKRVVVTAPVKEEGVLNVVDGG

SEQ ID NO: 93810 - protein, 92 aa, Unknown
  Bacterial polypetide isolated from the Sargasso Sea
CVFEVERATTVDEVNALFKAAAAGPLAGILGYEERPLVSIDYRTDPRSSIIDALSTMVVNGTQVKIYSWYDNEWGYSNRLVELARKVGQAGN

SEQ ID NO: 93811 - protein, 221 aa, Unknown
  Bacterial polypetide isolated from the Sargasso Sea
APGKGKIKNIVYGVNDHKVSNEDKFLAAASCTTNAIVPALKVVDDNFKILSGHIETVHAYTNDQNLIDNYHSADRRGRSAALNLVITDTGAAKAISGVLPELKGKLTANAIRVPTPNVSLAIMHLNVKKGVSVEDLNQCFRNAAFHSGLRTTIDYSNSLDAVSSDFYSNEFACVFDSQATISNFNNITIYCWYDNEYGYSRQVARLLNKALGIDLVRYPKQ

SEQ ID NO: 93812 - protein, 155 aa, Unknown
  Bacterial polypetide isolated from the Sargasso Sea
MTLRVAINGFGRIGRNFMRCWLSRGAYTNIEVVGINVTSDPKTNAHLLKYDSVLGQLDGVDIQYTDDTFVINNKTIKCFSDRNPLNLPWKDWGVDLVIESTGVFNTDVGASKHLEVGAKKVILTAPGKGDGVGTYVVGVNADTYSHKDYDILSNA

SEQ ID NO: 93813 - protein, 146 aa, Unknown
  Bacterial polypetide isolated from the Sargasso Sea
MKVGVNGFGRIGRLVFRALWGRPGIELVHVNDNAGDAATAAHLLTFDSVHGRWSQEARATGSGFQIDGHPITYSQHSDPTAVPWDQAGVELVLECTGKIKTPDTLQPYFDQTKVRRVIVACPVKGQVAGAEALNIVYGINHQLYEP

SEQ ID NO: 93814 - protein, 67 aa, Unknown
  Bacterial polypetide isolated from the Sargasso Sea
MIKVGINGFGRIGRAIFRINNYNQIFEVTAINDIDPLIENHVYLVNYDSIYGSLKNHLSVSNDKKYI

SEQ ID NO: 93815 - protein, 116 aa, Unknown
  Bacterial polypetide isolated from the Sargasso Sea
MSKKKIAINGFGRIGRLVFRAYIERVKEFNDTFEIAYINDLADIDSNIHLLKYDSVHGALNQEINKTAEDKFSIGDNEFIVTSERNPVDLKWGDKGVDIILECTGVFASKEKAMSH

SEQ ID NO: 93816 - protein, 250 aa, Unknown
  Bacterial polypetide isolated from the Sargasso Sea
AYDVDVVIDATGRFLKRGELSAHLESGAKRVFLSRNAKDTIDRYVIPGINESSIEASDRIISTTSSTTQVLALMVKMLDETFGLKRAMMTTIHAYTADQPLADAAGVDLRRSRSAVENIIPNTTLAPSIVEDLMPQFSGKLDGIAFNVPVPNGSCVDLTTELNDTPSVDKANDAIKKFSEDSLKGIVGYTEDPIVSSDVIGREETMVFDQKATMITKDELLKTLCWYDNGWGFASRILDVVDAYATLEDK

SEQ ID NO: 93817 - protein, 104 aa, Unknown
  Bacterial polypetide isolated from the Sargasso Sea
MGKIKIGINGFGRIGRMVLRLSLNRSDVEVIAINDLLDINHLVYLLKYDSVHGKINSNVSVEGNNLNIDGQKIKITSEKDPKQIGWDNIGVDVVLECTGIFTTL

SEQ ID NO: 93818 - protein, 271 aa, Unknown
  Bacterial polypetide isolated from the Sargasso Sea
NGNFIKVIYSDGPDKVDYTEYGINNAIVVDNTGKWRDEAGLGLHLKSKGVSRVILTAPGKGDIKNIVYGINNDWITDEDKILSAASCTTNAITPVLKAINDEYGIEDGHVETVHSYTNDQNLIDNYHKGSRRGRSAPLNMVITETGAAKAVAKALPELKGKLSGNAIRVPTPNVSMAILNLNLKSDVDGEQVNEYLRDMALHSELQKQIDFVNSPEVVSTDFVGSRHAGIVDAQATIANGKRLILYVWYDNEFGYSAQVVRCVNQMAGVTY

SEQ ID NO: 93819 - protein, 268 aa, Unknown
  Bacterial polypetide isolated from the Sargasso Sea
INGLGRIGRMVIRSLEENRNKDIKIVHVNNRTNSENSSLLLKYDSVHGKFNANIDFDKKNLIINSKKIHFSQETELDKINWKKNNVDIVLECTGKYNSKKQSMTHVKNGAKKVIVSAPCKNADRTVVYGINHKSIKKNDLIISAASCTTNCLAPVAFVVNENFNIEKGFMTTIHSYTTDQRLLDNSHKDPRRARSAAQSIVPTSTGASKAIGDIIPELKGKLEGLALRVPTANVSLVEFVFNSKKKLSVKKINDSFIKASNNKLKNVL

SEQ ID NO: 93820 - protein, 247 aa, Unknown
  Bacterial polypetide isolated from the Sargasso Sea
HVNNRTNSENSSLLLKYDSVHGKFNANVDFDKKNLIINNKKIHFSQETELNKINWKKNNVDIVLECTGKYNSKQQSITHIKNGAKKVIVSAPCKNADKTVVYGINHNSIKKKDLIISAASCTTNCLAPVTFVINENFKIEKGFMTTIHSYTTDQRLLDNSHKDPRRARSAAQSIVPTSTGASKAIGEIIPELKGKLEGLAMRVPTANVSLVEFVFNSKKKLSVKKINDSFKKASNNRLKNILSVTNE

SEQ ID NO: 93821 - protein, 89 aa, Unknown
  Bacterial polypetide isolated from the Sargasso Sea
MGKIKIGINGFGRIGRMVLRLSLKRSDVEVIAINDLLDIKHLAYLLKYDSVHGKINSNISIDGNSLNIDGQKIKITSEKDPKQIGWDNI

SEQ ID NO: 93822 - protein, 318 aa, Unknown
  Bacterial polypetide isolated from the Sargasso Sea
MIIRSLIENNNKKVEIKHINSRSNSEIVSSLLKYDSIHGKFNCEIKYGDNYLKLNGKKITFSQHSNLNEINWKKFGVDYVLECTGKFNSKEKLYTHIKNGAKKVIVSAPCKNADKTIVYGVNHKSISKKDLVISAASCTTNCLAPIAYVLNKEFKIEKGFMTTIHSYTTDQRLLDNSHKDPRRARSATQSIVPTSTGASKAIGEIIPELKGKLEGLAIRVPTPNVSLVDFVFNSKNKLTVKKINDSFKKASERELKNVLFATDEKLVSIDFNHNPNSSIVDLSLTNVVGDTWVKFRHGMIMNGDLLPGCAIYQNIFIK

SEQ ID NO: 93823 - protein, 81 aa, Unknown
  Bacterial polypetide isolated from the Sargasso Sea
AEEINSAIKEASDGRLKNVLAFNEAPLVSIDFNHNPASSTFDATQTQVIGGNFVRVLSWYDNEWGFSNRMSDTAVALANAS

SEQ ID NO: 93824 - protein, 154 aa, Unknown
  Bacterial polypetide isolated from the Sargasso Sea
MVLDKVLGIEAGFMTTVHSFTGDQRTLDQTHSDLRRARTATSSMIPTSTGAAKALSLVLPKLKGKLDGTAIRVPTPNVSLIDFTFSSKKKASVDLINHSMIKAAKSKNLKGILTVNNLPLVSIDFNHNPSSSIFDLTQTQVVRDKFCRVLSWYD

SEQ ID NO: 93825 - protein, 314 aa, Unknown
  Bacterial polypetide isolated from the Sargasso Sea
RKGDLEKRASLLRRDSIHGPFNGSITVDEENGGIKANGTFIKVIYADSPELVDYTAYGIHDALVVDNTGIWKDDKELSIHFKSKGAAKVLLTAPAKGEVHNVVYGVNHSMIQPQDRIVSAASCTTNAITPVLKALNDEYGIKNGHVETVHSYTNDQNLIDNYHKAERRGRAAPLNMVITSTGAASAVAKALPELKGKLTGNAIRVPTPNVSMAILSLNLNKTTNREELNSYLQKVALFSELQDQIDFTSSTEIVSSDLVGSRYAGVVDSQATIVQDDRCVLYVWYDNEFGYSTQVIRVMNEMAGIKYPTLTYQQ

SEQ ID NO: 93826 - protein, 263 aa, Unknown
  Bacterial polypetide isolated from the Sargasso Sea
IIYDDYGIKNPVVIDNTGIWRDEKSLSVHLKSGASKVILTAPAKDNVKNIVYGINDDEINKKDQIISAASCTTNAIVPILKVINDKFIINNGHIETVHAYTNDQNLIDNFHKKDRRGRGAPLNMVITSTGAVNAVAKALPELNGKLTGNAIRVPTPNVSLAILSLNLDQEVSEVIINDYLRSIAFHSKYREIIGFVNSTEIVSTDFYSSPFATVVDSQATITNGKQVTIYCWYDNEYGYSKQVISLAKKVSNITLPRLPKPIS

SEQ ID NO: 93827 - protein, 276 aa, Unknown
  Bacterial polypetide isolated from the Sargasso Sea
AKISHSDKAIEINGKKINMMHETEITKINWKKYNVNVVLECTGKFNTKEKSSQHIKSGAEKVLVSAPCKGAKNIIFGVNEKDVKSEDKVISAASCTTNCLAPVAHVLNEEFEIERGFMTTIHSYTTDQRLLDNSHKDFRRARSAPNSMVPTTTGATKSLGDVIPSLKDKIEGISIRVPTPNVSLVEFVFSSSKKLTTEKINNSFIKASKSKLKNILDVSNEPLVSSDFNHNSNSAIVDTALTKVIDNKMGKVSAWYDNEWGFACRMCDLANYFGKI

SEQ ID NO: 93828 - protein, 165 aa, Unknown
  Bacterial polypetide isolated from the Sargasso Sea
KHGTITTIHNVTNSQTIVDKPAGNIRRGRSALNSLFPSTTGSAAAISLIFPELKGKLNGHAVRVPVLNASLTDCVFEIKRKITANEINALFEHASKHELTGILGYEKRELVSADYVNNPLSTIIDASSTMVVNDTQLKIYAWYDNEWGYTCRMTDIANLIKKAHE

SEQ ID NO: 93829 - protein, 263 aa, Unknown
  Bacterial polypetide isolated from the Sargasso Sea
GKKIAMIHETEIAKINWKKHKVDLVLECTGKFNTKEKSAEHIKSGAKKVLVSAPCKGAINIVFGVNHSVLKKSDQVISAASCTTNCLATVAHVINEEFGIERGFMTTIHSYTTDQRLLDNSHKDLRRARSAPNSMIPTTTGATKSLGDIIPSLKGKIEGVSIRVPTPNVSLIEFVFSSQKNLTADKINNSFINASKSKLKNILEVNNEPLVSSDFNHNSNSAIVDTALTKVIDNKMAKVSAWYDNEWGFACRMCDLTNYFGKI

SEQ ID NO: 93830 - protein, 293 aa, Unknown
  Bacterial polypetide isolated from the Sargasso Sea
CEIDVGEIAVKCPFFEDIKNDDSNIGDYIDAELESVINKKSNRPSEPANIVLYGFGRIGRLVARMMTQTTGPGNYFKLRAIVIRKATDDDIFKRASLLTKDSVHGPFDGTVRVDEENSSLVINGNPVKVIYASGPDKVKYSDHGINDPVVIDNTGIWRDEEALSVHIKSGALKVILTAPAKGDIKNIVYGINDSILEENDHLISAASCTTNAIVPVLKTINDEFKINGGHIETVHAYTNDQNLIDNFHKKDRRGRGAPLNMVITSTGAVNAVAKALPELKGKLTGNAIRVPTP

SEQ ID NO: 93831 - protein, 175 aa, Unknown
  Bacterial polypetide isolated from the Sargasso Sea
MVRLAINGFGRIGRNVLRALYESGRNQFIQVVAINEIADPDGMAHLLKYDTSHGRFACHVERQGEQLTVAGDVIRLCHQTEITGLPWAELGVDIVLECTGQYTDKASGLAHIEAGAKKVLFSQPGAPDMDNTIIYGCNEDTLLPEHKVVSNGSCTTNCIVPVIQVLDYAFGVESG

SEQ ID NO: 93832 - protein, 195 aa, Unknown
  Bacterial polypetide isolated from the Sargasso Sea
VLKKSDQVISAASCTTNCLAPVAHVINEEFGIEQGFMTTIHSYTTDQRLLDNSHKDLRRARSAPNSIIPTTTGATKSLGDVIPSLKGKVEGISIRVPTPNVSLIEFVFSSTKNLTVEKINNSFIKASKSNLKNILEINNEPLVSSDFNHNSNSAIIDAALTKVIDNKMAKVSAWYDNEWGFACRMCDLANYFGKI

SEQ ID NO: 93833 - protein, 194 aa, Unknown
  Bacterial polypetide isolated from the Sargasso Sea
MIHVGINGFGRIGRAVTKIISRSKNIKVSVINEIDDDINNLYYLLKYDSIYGKFDQKVKVDNKKKIISIGKNKIKIFSKKNIDDVNWKNFKLDLVIDATGVEKNIINAKKIINNKLSKVIITHSPDKYVDTTIILGVNEKSYSFKKHNIISSSICDATALGPVLSELEKVYGIEKGFVTTLHPRLSYQNILDGS

SEQ ID NO: 93834 - protein, 213 aa, Unknown
  Bacterial polypetide isolated from the Sargasso Sea
AGEEALNVVYGINDQLYDPSRHRLVTAASCTTNCLAPVVKVVHEGFGIRHGMITTIHDITNTQVPIDAFKSDLRRARSGLTSLIPTTTGSAKAIAMIFPELKGKLNGHAVRVPLLNGSLTDAVFELEQSVTVEQVNTAFKAAAAGSLKGILGYEERPLVSCDYTNDSRSSIIDALSTMVVNDTQVKVFAWYDNEWGYSCRMADLTCRLVELES

SEQ ID NO: 93835 - protein, 289 aa, Unknown
  Bacterial polypetide isolated from the Sargasso Sea
RWGKDIEVKEEEIIIGEKKLAYTSFKNYLDVPWEKSSVDIILECTGKNKKPDKLNPYFDSLGMKRVIVACPVKGIVAGEESLNIVYGINQSLYDPSKHKLVTAASCTTNCLAPIVKVINENFSIKHGAITTIHDVTNTQVPVDFYKSDLRRARGCMQSLIPTTTGSAKAIAEIFPELKGKLNGHAVRVPLLNGSLTDAVFELNNEVTVEQVNLALKEASETYLKGILGYEERPLVSADYVNDSRSSIVDSLSTMVVNSNLLKIYAWYDNEWGYSCRLADLTEYVIKKEI

SEQ ID NO: 93836 - protein, 126 aa, Unknown
  Bacterial polypetide isolated from the Sargasso Sea
HFYRCFKSLGEIIPELKGKLEGLAMRVPTPNVSLVDLVFNSKSKLSVNKINNSFKKASKKELKNVLETTNEKLVSIDFNHNPNSSIVDLSLTNVVGDKMGKVSAWYDNEWGFASRMCDLVEYIHKV

SEQ ID NO: 93837 - protein, 181 aa, Unknown
  Bacterial polypetide isolated from the Sargasso Sea
CTTNNAAAMLWVLKKLTLIESASITTIHSYTSDQKIHDSPHKDLRRARSAGLSIIPTTTGAAKTIGDVLPSLKGKIKGSSFRVPVANGSITEITIIGNKEVSKADINAAIKKAAKTELKNILSYTEEPLVSSDIIGLKDSCLFDGNLTQVNNGLIKVVGWYDNEIGYSNRLIDLAMKINSF

SEQ ID NO: 93838 - protein, 58 aa, Unknown
  Bacterial polypetide isolated from the Sargasso Sea
MTLRVAINGFGRIGRNFMRCWLSRGAYTNIEVVGINVTSDPKTNAHLLKYDSVLGKLD

SEQ ID NO: 93839 - protein, 137 aa, Unknown
  Bacterial polypetide isolated from the Sargasso Sea
MTLRVAINGFGRIGRNFMRCWLSRGAYTNIEVVGINVTSDPKTNAHLLKYDSVLGQLDGVDIQYTDDTFVINNKTIKCFSDRNPMNLPWKDWGVDLVIESTGVFNTDVGASKHLEVGAKKVILTAPGKGDGVGTYVV

SEQ ID NO: 93840 - protein, 230 aa, Unknown
  Bacterial polypetide isolated from the Sargasso Sea
ESKIEDINWKKFDVDYVFECTGKFNSKEKLKAHLKNGAKKVIVSAPCKNADKTIVFGVNESVMTKNDKIISAASCTTNCLAPIANVLNENFKIEKGFMTTIHAYTSDQRILDNSHKDPRRARSANQSIVPTSTGASKSIGEIIPSLKGKLEGVAMRVPTPNVSLIELVFCTKVNIDKEKINKAFKLASKNQSKKVLEITSEELVSIDFNHNSASAIVDASLTNVVGKIHG

SEQ ID NO: 93841 - protein, 294 aa, Unknown
  Bacterial polypetide isolated from the Sargasso Sea
VVSNLLMYDSVHGKFDAKIKFTEKNITINNKKISFSQHSKIEEINWKQHNVDIVFECTGKFNSKEKLLTHLKNGAKKVIVSAPCKNADKTVVFGVNEMEIKKEDSIISAASCTTNCLAPVAYVLNQNFEIEKGFMTTIHSFTSDQRILDNSHKDPRRARSASQSIVPTSTGASKAIGEIIPSLKGKLEGIAMRVPTPNVSLVELVFCTKKDLSIDKINSAFQKYIEKQKQKVIEITSEKLVSIDFNHNSASSIVDASLTNVVGKNMGKISAWYDNEWGFSNRMCDIAEFIHKNS

SEQ ID NO: 93842 - protein, 243 aa, Unknown
  Bacterial polypetide isolated from the Sargasso Sea
MVKRASLLRRDSVHGRFDGTIRVDLENELLVINGNPVKFIYSSSPNEINYSEFKIDSPIVIDNTGIWRDENDLSQHLKSGASKVILTAPAKGDIRNIVFGVNDSALQESDTIISAASCTTNAIVPVLKLISDNYGISNGHIETVHSYTNDQNLIDNFHKGDRRGRSAALNMVITSTGAVKAVSKAIPELKDKLTGNAIRVPTPNVSLAVLVLNIDTSVTRDDLNNFLKESAFTSKYREIIGYT

SEQ ID NO: 93843 - protein, 43 aa, Unknown
  Bacterial polypetide isolated from the Sargasso Sea
MKIGINGFGRIGRLVFRALWDRADIEITHINEIAGDSNAAAHL

SEQ ID NO: 93844 - protein, 301 aa, Unknown
  Bacterial polypetide isolated from the Sargasso Sea
GSFQGTIRVDEENSCIIANGNVIRFLYANSPDELNYEDYDISRAILIDNTGVWRDRDGLSKHLESKGVAKVVLTAPGKGDMKNVVSGVNSHLIDAEDEIIAAASCTTNAIVPPLKAINEEFSIVSGHMETVHAYTPDQNLIDNYHKSNRRGRSAPLNMVITETGASSAVTKLLPELDGKLTGNAIRVPTPNVSLAILNLTVGRETTLEEVNNYLRESCIHGDMQRQMDFTYSPEVVSSDFVGNRHACIIDGEATIVKDNRLVLYVWYDNEFGYSCQVVRVVQKIAGITYPLIPNDVYKMGF

SEQ ID NO: 93845 - protein, 168 aa, Unknown
  Bacterial polypetide isolated from the Sargasso Sea
MTTIHAYTNDQNLSDVAHSDPYRARAAAHSMIPTKTGAAAAIGLVMPELQGKLDGLAVRVPTLNVSLVDLTFTASRSTSADEINAIMLRAAESDQFGVLDFNTQPLVSIDFNHNSYSSNFDANHTRVQDRLVKVLAWYDNEWGFSNRMLDTGLAIGSTLAKQGLGVAA

SEQ ID NO: 93846 - protein, 432 aa, Unknown
  Bacterial polypetide isolated from the Sargasso Sea
MNAHRFVRETENNEMSEFETYQVIVALGDLELGPAEVDIGIIAAAYLFDDKDLSIEDFVKESVYDLIGTKGSILEQAQDVVLYGFGRIGRLLTRMLIQDSGGGDNLRLRAIVVRKAVDDDIIKRANLMRTDSVHGPFKGTIRVIEEEDKLIINGNEVKIIYANDPSEIDYTDYGIKNALLIDNTGVWRTKEGLSTHLNCNGISKVLLTAPAKEGIKNIVHGINNEIIENDEILGAASCTTNAIVPTLKVLNDEFNIISGHIESVHSYTNDQNLIDNFHKKARRGRSAALNMVITETGAGKAVGQVLPELIGKLTANAVRVPTPNVSLAIMNLQLGNEISLEELNNFLRQQAFHSDLKEQIGFTNSPEVVSTDFVGDRHAGIIDSAATIVNGDKCVLYVWYDNEYGYTAQLLGLAKEMVGLTYQRYPNFSETS

SEQ ID NO: 93847 - protein, 111 aa, Unknown
  Bacterial polypetide isolated from the Sargasso Sea
MSVRVAINGFGRIGRNILRAIVETARDDIIVVGINDLGPVETNAHLLRYDSVHGKFPADVKISGNDLDVGHGPIKVTSIRDPKDLPWKELDVDIAMECTGIFASREKLSCI

SEQ ID NO: 93848 - protein, 211 aa, Unknown
  Bacterial polypetide isolated from the Sargasso Sea
GINDNILEDEDSIISAASCTTNAIVPVLKAVNDKYKIKGGHIETVHAYTNDQNLIDNFHKGDRRGRGAPLNMVITTTGAVKAVAKALPELEGKLTGNAIRVPTPNVSLAILSLALKEKVTDIQINDYLKSIAFHSKYREIIGFVNSPEIVSTDFYSSPFASIIDSQATIASKNRVTLYCWYDNEYGYSKQVIGLTKKVAKINLPRLPNPVN

SEQ ID NO: 93849 - protein, 171 aa, Unknown
  Bacterial polypetide isolated from the Sargasso Sea
NENFSIKHGAITTIHDVTNTQVPVDFYKSDLRRARGCMQSLIPTTTGSAKAIAEIFPELKGKLNGHAVRVPLLNGSLTDAVFELNNEVSTEQVNLALKLASETYLKGILGYEERPLVSADYVNDSRSSIVDSLSTMVVNSNLLKIYAWYDNEWGYSCRLADLTEYVIKKEI

SEQ ID NO: 93850 - protein, 265 aa, Unknown
  Bacterial polypetide isolated from the Sargasso Sea
IDYTDFGINKALLIDNTGVWRTKEGLNTHLSCNGISKVLLTAPAKEGIKNIVHGINNEIIDNDEILGAASCTTNAIVPTLKVLNDEFNIISGHIESVHSYTNDQNLIDNFHKKARRGRSAALNMVITETGAGKAVGQVLPELIGKLTANAVRVPTPNVSLAIMNLQLGKETSLEELNNFLRQQAFHSDLKEQIGFTNSPEVVSTDFVGDRHAGIIDSAATIVNGDKCVLYVWYDNEFGYTAQLLGLAKEMVGLTYQRYPNFSETS

SEQ ID NO: 93851 - protein, 220 aa, Unknown
  Bacterial polypetide isolated from the Sargasso Sea
EGIKNIVHGINNEIIEDDSILGAASCTTNAIVPTLKVLNDEFSIVAGHIESVHSYTNDQNLIDNFHKKERRGRSAALNMVITETGAGKAVGQVLPELIGKLTANAVRVPTPNVSLAIINLQLGRDITVEEVNDFLRQKAFHSDLKEQIGFTNSPEVVSTDFVGDRHAGIIDSAATLVNGDKCVLYVWYDNEYGYTAQLLGLAKEMVGLTYKRYPNFSETS

SEQ ID NO: 93852 - protein, 338 aa, Unknown
  Bacterial polypetide isolated from the Sargasso Sea
MIRVAINGYGRIGRSILRALYESGKRQQIQIVAINELAKPEAIVHLTQYDTTHGRFQPRVKLVDDQMLIGDDAIKILHEPDPAKLPWREMDIDIVYEATGAILDRQSCEAHIHAGAKQVLISHPSSADVDGTIVYGVNQELLRAEHTVVSNASCTTNCIVPVIDVLDKHFGVKSGAITTIHSAMNDQQVIDAYHDDLRRTRAAGQSIIPVDTKLARGIERILPHMKDKFEAISVRVPTINVTAIDLSVTLDKTVDIATVNQVLELAANGRFNGILGYTDEPLVSCDFNHDPRSSIVDGTQTRVSAGQLVKLLLWCDNEWGFANRMLDTSLAMIAAKQS

SEQ ID NO: 93853 - protein, 338 aa, Unknown
  Bacterial polypetide isolated from the Sargasso Sea
MIRVAINGYGRIGRSILRALYESGKRQQIQIVAINELAKPEAIIHLTQYDTTHGRFQPRVKLVDDQMLIGDDVIKILHEPDPAKLPWGEMDIDIVYEATGAILDRNSCEAHIHAGAKQVLISHPSSADVDGTIVYGVNQDLLRAEHTVVSNASCTTNCIVPVIDVLDKHFGVKSGAITTIHSAMNDQQVIDAYHDDLRRTRAAGQSIIPVDTKLARGIERILPHMKDKFEAISVRVPTINVTAIDLSVTLDKTVDIATVNQVLELAANGRFNGILGYTDEPLVSCDFNHDPRSSIVDGTQTRVSAGQLVKLLLWCDNEWGFANRMLDTSLAMIAAKQS

SEQ ID NO: 93854 - protein, 119 aa, Unknown
  Bacterial polypetide isolated from the Sargasso Sea
MKKIKLGINGFGRIGRLALRASFDWPEFEFVQINDPAGDAATFAHLLNFDSVHGRWQHQAEAQGNTVVIQGQSIAVTHNKAINDTDWSGCDVVIECSGKMKSTELLQAYLDQGVKRVVV

SEQ ID NO: 93855 - protein, 438 aa, Unknown
  Bacterial polypetide isolated from the Sargasso Sea
EILKAHRFARQVDNNELSELETFPILQRLVTLNLADCEIDIGELTLRCPFFKELRDNPLEKIDEYLNKELSSVIDVESKRPESSKDIVLYGFGRIGRLMARLLVETTGPGNYFRLRAVVVRKGASEDDLLKRASLLRRDSVHGKFSGTIRVDSDSDSLIVNGNPIKFIYANGPESFKYSDFDIDKPIVIDNTGVWRDEAGLSKHLETGADKVVLTAPGKGSIKNIVFGVNEEILDEKDQIISAASCTTNAIVPVLKIMNDKYRINSGHIETVHSYTNDQNLIDNYHKGDRRGRSAALNMVITSTGAVKAVAKAIPELENKLTGNAIRVPTPNVSLAVLVLNLNEEVNKSEVNTFLRDSAFRSEYRKILGFVNSSEIVSTDFYSSEFASVIDAQATIADGKKVTLYCWYDNEYGYSKQVLNLTRKIAHIELPILPLSIN

SEQ ID NO: 93856 - protein, 207 aa, Unknown
  Bacterial polypetide isolated from the Sargasso Sea
MNKKINIALFGFGRIGRNIFRLGYTNPNLNFVAISDLGHAEALHYLLMRDSIHGSLDDEIKVDGNYFISKNQNVRILSGGKPGTIPWDTFDVDFVIDATGKYLNKEELEQHLNSGAKRVLVTRTPNDDIDRIVIPGINEETANINDKIISATSSTTQVLALMLKILDKNFSVNKAMMTTIHAYTADQPLADAVGIDLRRSRSAVENI

SEQ ID NO: 93857 - protein, 320 aa, Unknown
  Bacterial polypetide isolated from the Sargasso Sea
VVVRDSENPEDLIKRASLLRNDSVHGTFPGTIRVNRKNNSLIVNGNEIVFIYASDPRKVDYKKYGIKKATIIDNTGVWRDEDGLKKHVKNPSVERVVLTAPGKGKIKNIVYGINDHKVSEEDKILGAASCTTNAIVPALKVVDDNFKILSGHIETVHAYTNDQNLIDNYHSADRRGRSAALNLVITDTGAAKAISSILPELKGKITANAIRVPTPNVSLAIMHLNIKKGVSVEDLNQCFRNAAFHSNLRTTIDYSNSLDAVSSDFYSNEFACVFDSQATISNFNNITIYCWYDNEYGYSRQVARLLNKALGINLVRYPKQ

SEQ ID NO: 93858 - protein, 63 aa, Unknown
  Bacterial polypetide isolated from the Sargasso Sea
MKIGINGFGRIGRLAFRCAWEHPAWDIVQINDPAGDALTWSHLVNFDSVQGKWQHSAASTREA

SEQ ID NO: 93859 - protein, 354 aa, Unknown
  Bacterial polypetide isolated from the Sargasso Sea
MTDLTKNPDLRSREKIDDYFGDWKWREGLAELMVPIVGRLYRHGVHVMIYGQSLVNKSPIDIMHAHRFVRQIEANELSELETYPLLERLSKMDLPDCEIDLGELAMRCSFFKDLPSNPDSIDDFLNEQISVNDLTINRPENPQNIVLYGFGRIGRLMARMLAQTTGPGNYFRLKGVVVRKTGDNDLVKRASLLRRDSVHGRFEGTIRVDLENELLVINGNPVKFIYSNSPKEVDYSELGINAPIVIDNTGIWRNEEDLSQHLDSGASKVILTAPAKGDIRNIVFGVNDSALKDSDKIISAASCTTNAIVPVLKIISDNYGIDSGHIETVHSYTNDQNLIDNFHKGDRRGRSAPL

SEQ ID NO: 93860 - protein, 335 aa, Unknown
  Bacterial polypetide isolated from the Sargasso Sea
MKNVNFAINGLGRIGKLLFRALFDKGLSIKLVNEINGNLEINSELLIHDSIHGKWDKDIFLNKNDLKINNSIIKFSNYKNLNDIQLSDIDILIDCTGKNKNFEYLSNYIKKGVKKVIVSAPIDDPKILNLVYGVNHHLYNENEHNIITGASCTTNCIAPIVKVIHDNLKINHGSITTIHNITNSQTIIDKPSSDLRRSRASMTNLIPTTTGSAKAINLIYPELKGKLNGHAIRVPVINASLTDCVFEVKQNTSKEEVNELLKEASKNKLKNILGYEEKLLVSSDYLNDPRSTIIDADSTMVVNETHVKVYAWYDNEWGYVNRLADIASMVGKSIC

SEQ ID NO: 93861 - protein, 72 aa, Unknown
  Bacterial polypetide isolated from the Sargasso Sea
SASEGSLKGILGYTDEDVVSSDFIGSTYSSIYDAGAGIGLNDKFFKLVSWYDNEMGYSARLIDLVEYMETRN

SEQ ID NO: 93862 - protein, 102 aa, Unknown
  Bacterial polypetide isolated from the Sargasso Sea
RVPVPNGSVVDLVVEVEKEVTIDDINNAVKKASENELKGILDYSDIPLVSTDILKNPHSSIYDASSTQILNNNHIKVVCWYDNEWGYSNRVVDLLEKLSKDE

SEQ ID NO: 93863 - protein, 500 aa, Unknown
  Bacterial polypetide isolated from the Sargasso Sea
MGDERDINFQSTERQKRILPEDSFGDWKWREALAELMVPLIGSLYRDGVNLMIYGKSLVNESPVAIMKAHRFARQSDNNELSEFETYPMIEYISTLNLHDCEIDIGEIAVKCPFFDEIKEDQSKIKDYLNKELESVIDVETVRPDEPKSIVLYGFGRIGRLLARMMTQTTGPGNYFRIKAIVIRKASDDDIFKRASLLSRDSVHGPFDGTVRVDEENTSLVVNGNAIKVIYASSPDEVKYAEHNIIDPIVIDNTGVWRDEDSLSKHLKSGASKVILTAPAKGDIKNIVFGINDDILNNKDAIISAASCTTNAIVPVLKAINDEYSIKGGHIETVHAYTNDQNLIDNFHKGDRRGRGAPLNMVITTTGAVKAVAKALPELEGKLTGNAIRVPTPNVSLAILSLQLNKEVSVTHVNEYLRTVAFHSQYREIIGYVNSSEIVSTDFYSSPFASVIDSQATIASNKSITLYCWYDNEYGYSKQVLGLVKKVANIELPRLPKPIV

SEQ ID NO: 93864 - protein, 292 aa, Unknown
  Bacterial polypetide isolated from the Sargasso Sea
VHGRWVKDIKVKEEEIIIDGKKLTYTSFKNYLDVPWEKSSVDIILECTGKNKKPDKLNPYFDTLGMKRVIVACPVKGIVAEAESLNIVYGINQSLYDPTKHKLVTAASCTTNCLAPIVKVINENFSIKHGAITTIHDVTNTQVPVDFYKSDLRRARGCMQSLIPTTTGSAKAIAEIFPELKGKLNGHAVRVPLLNGSLTDAVFELNKEVTTEQVNMALKEASETYLKGILGYEERPLVSADYVNDSRSSIVDSLSTMVVNLNLLKIYAWYDNEWGYSCRLADLTEYVIKKEI

SEQ ID NO: 93865 - protein, 490 aa, Unknown
  Bacterial polypetide isolated from the Sargasso Sea
MAKDQPDKRLRPEPPKDPFGDFQYRQALAEEMLPMIGRIYRSNVHLLLYGKPLVNLSVSEIMNAHRFVRETENNELSEFETYQVIVALSELELGPAEVDIGIIAAAYLFEDKGLSLDDFVKESVEDLIGKAGAILDKAQDVVLYGFGRIGRLLTRMLIEDSAGGDNLRLRAIVVRKAIDDDLIKRANLMRTDSVHGPFKGTIRVVEEDDLLIINGNEVKVIYSNDPTNINYLEYGIEDALLIDNTGVWRTKEGLGQHLNCAGISKVLLTAPAKDEIKNIVHGINNEIIDNDDILGAASCTTNAIVPTLKVLNDEFKIKSGHIESVHSYTNDQNLIDNFHKKERRGRSAALNIVITETGAGKAVGQVLPELHGKLTANAVRVPTPNVSLAIMTLELGKEVSVEILNDFLRQKAFHSDLKEQIGFTNSPEVVSTDFVSDSHAGIIDSVATIVNGNKCTLYVWYDNEYGYTAQLLGLAKEMVGLTYKRYPNFS

SEQ ID NO: 93866 - protein, 70 aa, Unknown
  Bacterial polypetide isolated from the Sargasso Sea
MRVGINGFGRIGRSVFRVLNNRDDIDVVAINDIFDKDALTYLLKYDTVMGRFPGDISLDSDILSAGNQKV

SEQ ID NO: 93867 - protein, 111 aa, Unknown
  Bacterial polypetide isolated from the Sargasso Sea
MTLRVAINGFGRIGRNFMRCWLSRGAYTNIEVVGINVTSDPKTNAHLLKYDSVLGQLDGVDIQYTDDTFVINNKTIKCFSDRNPMNLPWKDWGVDLVIESTGVFNTDVGAS

SEQ ID NO: 93868 - protein, 269 aa, Unknown
  Bacterial polypetide isolated from the Sargasso Sea
MTKIAINGIGRIGKLVLKLLISNDYKVTYLNELNGNHSSLLHSLEFDSIHGKWDASFKLDNEKISINKKVIQSTFSKNIENLDLNNIDILIDCTGAHNNSSDLKKYFDKGVKKVVVSAPVNEENIANIAYGVNQNIYNPNKHNIITAASCTTNCIAPIIKVIHENIGIVHGSITTIHNLTNSQTLVDIPQNNLRRARSAVNNLIPTTTGSAKAISLIYPELKGKLNGHAVRVPLLNASLTDCVFEMKRPVNEDEVNTMLKNSSENELKG

SEQ ID NO: 93869 - protein, 296 aa, Unknown
  Bacterial polypetide isolated from the Sargasso Sea
TYKHLLKYDSAYGRLNIDIECDKDYLYIGDRKIKCFRENDPSKIPWKNEDVEIVIESSGKFNDKKGASKHIRDSVKKVLLTAPGKNEDVTIVVGVNEGIYDNKNHNVISNSSCTTNCLAPIVKVLEDNFGIESGFMTTIHSYTNDQNILDNSHKDLRRARAGATSIIPTTTGAAKSVGKVIKSVEGKIDGMAFRVPTPSCSVVDLNVVLKEKVTANKINEVFTEYSKNQLKGIIDVTDEELVSIDFLGNPHSSIIDLNSTLEVGNNMFKVVGWYDNEWGYAHRTIDLLQILLTKLD

SEQ ID NO: 93870 - protein, 490 aa, Unknown
  Bacterial polypetide isolated from the Sargasso Sea
MVKRFNPDKRRRPKLDDYFGDWKWREALAESMVPIVGKLYRNGVRILMYGRPLLNCSALEIMKLHRFVREVEGNELSEIETYPVLEQISKMKLLPCEIDIGEMVVHLLENKQLDSEKYIDKCLAEQKRTKRSYPLRPKDIVIYGFGRIGRILTRILISDTGAGAKWRLRAIVLRDSGHHDDLIKRAGLLRNDSVHGAFPGTIRVNKQNNSLIINGNEVSFIYSDNPKKVKYKDFDIKKATVIDSTGVWRDEEGLSQHVKNPSVERVLLTAPGKGKIKNIVFGVNDEKASPEDKMLAAASCTTNAIVPALKLIDNNFKIVNGHIETVHSFTNDQNLIDNFHPSDRRGRSAALNLVITDTGAAKAVAKILPELKGKITANAIRVPTPNVSLAIISLTVKRGVGVDEVNECFRKAAFSSNLRETIDYSNSIDAVSSDYYSNEFALVYDSQATISNFNNVTIYCWYDNEYGYSRQVVRLLKKVLDVNLVRYPKQ

SEQ ID NO: 93871 - protein, 235 aa, Unknown
  Bacterial polypetide isolated from the Sargasso Sea
QHLKCKGISKVLLTAPAKDDIKNIVHGINNDIMNNDDILGAASCTTNAIVPTLKVLNDEYDIKSGHIESVHSYTNDQNLIDNFHKKERRGRSAALNIVITETGAGKAVGQVLPELLGKLTANAVRVPTPNVSLAIMSLELGKKVTVEALNDFLRQKAFHSDLKEQIGFTNSPEVVSTDFVSDSHAGIVDSAATIVNGNKCTLYVWYDNEYGYTAQLLGLAKEMVGLTYKRYPNFS

SEQ ID NO: 93872 - protein, 228 aa, Unknown
  Bacterial polypetide isolated from the Sargasso Sea
TATAHLNSGAKKVVISAPSADAPMFVMGVNHLDAKPGDLIVSNASCTTNCLAPIAKVLNDNFGIEEGLMTTVHAATASQFTVDGPSKKDFRGGRSTLLNIIPSSTGAAKAVTKVIPSLEGKLTGMAFRIPTANVSVVDLTVRLSKKTSYEQIKKQMLDASQKDLNGILGYCDDLVVSQDFIGDKRTSIFDANAGMELNPNFFKIVSWYDNECGYSNKLLDLSEHIFSI

SEQ ID NO: 93873 - protein, 289 aa, Unknown
  Bacterial polypetide isolated from the Sargasso Sea
MTIKVGINGMGRIGRMIVRSIYENHKGKIIIKHINNRSSSEICANLLKYDSIHGNFSSLVKSGENYIKINKEKISYTQHTMIDDIKWKKYGVDYVFECTGKFNSKHQLLPHLKNGVNKVIVSAPCKMADKTVVFGVNHKKIHKNDRIISAASCTTNCLAPVADVINKNFIIINGFMTTIHAYTSDQRILDNSHKDPRRARSASQSIVPTSTGASKSIGDIIPSLKGKLEGIAMRVPTPNVSLVEFIFNVKKNISVKRLNDSLSSASRRNLKNILDVTNEKLVSIDFNHQ

SEQ ID NO: 93874 - protein, 325 aa, Unknown
  Bacterial polypetide isolated from the Sargasso Sea
VLEKNLNLLATAECLDNGKPIRECMAADLPLVIDHWRYFAGVIRAEEGSIAEIANNQYSYNFHEPLGVVGQIVPWNFPLLMATWKLAPALAAGNCSVLKPAEQTPASIMVMMELIGDLLPPGVVNIVSGFGLEAGKPLASSKRVAKVAFTGETTTGRLIMQYAAQNIIPITLELGGKSPNIFFEDIMEKDDDFFDKCIEGFVMFNLNQGEVCTCPSRALIQESIYDKFMERAIARTKAVVQDNPLKMETMIGAQASVEQMEKIKSYLELGKKEGAKVLTGGSAAKLNSGLEKGNYIQPTIFEANNSMRISQEEIFGPVVSVINLK

SEQ ID NO: 93875 - protein, 334 aa, Unknown
  Bacterial polypetide isolated from the Sargasso Sea
MKKIKVVINGFGRIGRLALRASFNWPEFEFVQINDPAGDAATFAHLLNFDSVHGRWQYQAEAQGHSVIIQGHSITVTHNKAINDTNWSGCDLVIECSGKMKSTAQLQAYLDQGVKRVVVSAPVKEAGVLNVVMGVNHQLFDAATHQIVTAASCTTNCLAPVVKVIHEKLGIKHGSITTIHDLTNTQSILDTPHKDLRRARACGSSLIPTTTGSATAITEIFPELKGRLNGHAVRVPLANASLTDCVFEVERATTAEEVNALLKAASEQELKDILGYEERPLVSVDYKTDPRSSIIDALSTMVVNGTQVKIYAWYDNEWGYANRTVELAKMVGSI

SEQ ID NO: 93876 - protein, 287 aa, Unknown
  Bacterial polypetide isolated from the Sargasso Sea
DSVMGILDRKVSVAGDKLIVDDRTIQLTSIKDPAELPWKEMDVDVVVESTGIFRDSESLNKHLDAGAKKVLLTVPPKDDIDATIVLGVNDGDLKPENKIVSNASCTTNCLAPIAKVLDDNFGIISGLMTTVHAYTNDQALAETTHSDFRRGRSATQNIIPTSTGAAKAVGMVLPELNGKLDGMAMRVPVPDGSVVDLVVELEKKVSIDDINKAVKNAADNELNGILEYSEVPLVSTDILNNPHSSIYDASSTQLLEGNHVKVVCWYDNEWGYSNRVVDLIGNLLDNG

SEQ ID NO: 93877 - protein, 146 aa, Unknown
  Bacterial polypetide isolated from the Sargasso Sea
MKIGINGFGRIGRLVFRALWDRADIEITHINEIAGDSNAAAHLLEFDSVHGRWGKDIKVKEEEIIIEGKKLDYTSFKNYLDVPWEKSSVDIILECTGKNKKPDKLNPYFDSLGMKRVIVACPVKGVVAEAESLNIVYGINQSLYDP

SEQ ID NO: 93878 - protein, 238 aa, Unknown
  Bacterial polypetide isolated from the Sargasso Sea
MTIRVAINGFGRIGRNVLRALLAQEHSDIELVACNDLGDPKVHAHLLEFDTTHGPLGMPVELQDDIMTVGPHRIQFLSEPQPKNLPWKDMNIDLVMECTGLFAKRGKAQWHCDAGAKKVLISAPAGKDVDATIVFGVNHHMLRASDTIVSNASCTTNCLAPIVKPLAEAVGFEHGLMTTIHAVTNDQKLTDVYHSDVRRARSGTQSMIPTKTGAAQAVGLVLPEMAGKLDGVAIRVPT

SEQ ID NO: 93879 - protein, 318 aa, Unknown
  Bacterial polypetide isolated from the Sargasso Sea
GRNVMRALYESGRTDELQVLAINDLGDANSNAHLTKYDTAHGQFPYSVEARDDALIVNGDEIKVFAERDPEQLPWGELGVDVVLECTGFFAKKELASKHIKAGAKKVVISAPAGTDIDATIVYGVNHDTLSKDDTVISNASCTTNCLAPLVKPIHESIGLESGIMTTIHAYTNDQVLTDVMHSDLRRARSATQSMIPTKTGAAAAVGLVLPELDGKLDGFSVRVPTINVSLVDLSFIASRETSVDEINEVVKAASDGALKGVLDYSDGPLVSIDFNHNPASSTYDATMTKVQEGTLVKVCSWYDNEWGFSNRMLDTTL

SEQ ID NO: 93880 - protein, 264 aa, Unknown
  Bacterial polypetide isolated from the Sargasso Sea
QNIKVFAERDPAKLPWGKVGADVVLECTGFFLDKASAGKHIQAGAKKVIISAPAKEVDFTLVQGVNSKELKKDHNIISNGSCTTNCLAPVAMVLEKTFGITYGYMTTIHSYTGDQKLLDTLHKDLRRARATEGSMIPTSTGAAKAMSLVLPSLKGKLDGTAIRVPTPNVSLIDLTLVTEKEVTPESINNAMSKAAKGELKGILDINQKPLVSKDFNHNPHSSIFDATQTQVVKGKFSRVLSWYDNEWGFSNRMCDTAIQIATLI

SEQ ID NO: 93881 - protein, 136 aa, Unknown
  Bacterial polypetide isolated from the Sargasso Sea
AASLSMIPTSTGAAKAVGLVMPELSGKLDGTAIRVPTPNVSLIDFKFVSKKRMTVDSINKAMSAAAKSNKLNGVLDVNSKPLVSSDFNHNPASSNFDLTQTQVIDGKFGRVLSWYDNEWGFSNRMCDTAVAMKRSR

SEQ ID NO: 93882 - protein, 113 aa, Unknown
  Bacterial polypetide isolated from the Sargasso Sea
MIKVGINGFGRIGRLILRALLENYKDKIQIVGINDLGSIDTNAHLIKYDSTHGTLPHDVSISKDGFKILNQNIKVFAEKDPASLPWGKIGADIVLECTGLFLNKETAGKHLKA

SEQ ID NO: 93883 - protein, 200 aa, Unknown
  Bacterial polypetide isolated from the Sargasso Sea
MTIKVGINGFGRIGRLALRAAFDWPEVEFVQINDPAADAATLAHLLNFDSVHGIWHHTAVAEGNNIVINGKAVAVSSNKAIANNDWSGCDVVIEASGKMKSTALLEAYLAQGVKRVVVSAPVKEPGVLNIVMGVNHQLYNKQQHRIVTAASCTTNCLAPVVKVIHEKLGIKHGSMTTIHNLTNTQSILDTPHKDLRRARA

SEQ ID NO: 93884 - protein, 302 aa, Unknown
  Bacterial polypetide isolated from the Sargasso Sea
MVPAENLAYLMKYDSTHGRFPGNVEIDGNNILIDGKSIECVSERDPEQLGWGDKEVDFVIESTGLFTTLEKAELHLKAGAKKVVISAPAKSKEISTFVMGVNHETYQPSSDQVVSNASCTTNCLAPVVKVLLDNFGIEEGLMTTIHAVTATQPTVDGPSKKDFRGGRGGFQNIIPASTGAAKAVGLCIPEVQGKLTGMAMRVPTANVSVVDLTARLSKSTSYDAINQAMKSASEGPMKGILGYTEEDVVSSDFNGSSLSSIYDAGAGIGLSDQFFKVVSWYDNEMGYSCRLLDLIEYMDSRG

SEQ ID NO: 93885 - protein, 252 aa, Unknown
  Bacterial polypetide isolated from the Sargasso Sea
MGNKGVDYVIESTGLFTTLEKAELHLKAGAKKVVISAPAKSKEISTFVMGVNHETYQPSSDQVVSNASCTTNCLAPVVKVLLDNFGIEEGLMTTIHAVTATQPTVDGPSKKDFRGGRGGFQNIIPASTGAAKAVGLCIPEVQGKLTGMAMRVPTANVSVVDLTARLSKSTSYDAINQAMKSASEGPMKGILGYTEEDVVSSDFNGSSLSSIYDAGAGIGLSDQFFKVVSWYDNEMGYSCRLLDLIEYMDSRG

SEQ ID NO: 93886 - protein, 275 aa, Unknown
  Bacterial polypetide isolated from the Sargasso Sea
MKVSSVLDTSHLKVKFPFKAKYGNYINGKFVEPLSGKYFDNVSPISNEKICSVARSNEKDVEAALDAAHAAFPEWGKTDITTRSNILYKIADVLEKNLNLLAVAECLDNGKPIRECMAADLPLVIDHWRYFAGVIRAEEGSIAEIANNQYSYNFHEPLGVVGQIVPWNFPLLMATWKLAPALAAGNCSVLKPAEQTPASIMIMMELIGDLLPPGVVNIVSGFGLEAGKPLASSKRVAKVAFTGETTTGRLIMQYAAQNIIPITLELGGKSPKYFL

SEQ ID NO: 93887 - protein, 156 aa, Unknown
  Bacterial polypetide isolated from the Sargasso Sea
MADGGHRASWSRPAGTTVTAIRGDCVSIKVGINGFGRIGRNFFRALLSSGANVEIVGINDLTDTTALAHLLKYDSVLGRIDVPVEAAENAIVVDGTSIPVFAERDPASLPWASVGAAVVVESTGIFTSADDARKHVDAGASKVIISAPAKGEDITI

SEQ ID NO: 93888 - protein, 285 aa, Unknown
  Bacterial polypetide isolated from the Sargasso Sea
MKIGINGFGRIGRLVFRALWDRADIEITHINEIAGDSNAAAHLLEFDSVHGRWGKNIEVKEEEIIIDGKKLAYTSFKNYLDVPWEKSSVDIILECTGKNKKPDKLNPYFDTLGMKRVIVACPVKGIVAEAESLNVVYGINQSLYDPSKHKLVTAASCTTNCLAPIVKVINENFSIKHGAITTIHDVTNTQVPIDFYKSDLRRARGCMQSLIPTTTGSAKAIAEIFPELKGKLNGHAVRVPLLNGSLTDAVFELNNEVTTEQVNIALKEASETYLKGILGYEERPL

SEQ ID NO: 93889 - protein, 286 aa, Unknown
  Bacterial polypetide isolated from the Sargasso Sea
MTVKIGINGLGRIGRMIIRSLIENNNKKVEIKHINSRSDSEVVSSLLKYDSIHGKFNCEIKYGDNHLNINGKKITFSQHSNLNEINWKKLGVDYVLECTGKFNSKEKLHTHIKNGAKKVIVSAPCKNADKTIVYGVNHKSISKKDLVISAASCTTNCLAPIAYILNKEFKIEKGFMTTIHSYTSDQRLLDNSHKDPRRARSAAQSMVPTSTGASKAIGEIIPELKGKLEGLAIRVPTPNVSLVDLVFNSKNKLTIKKINDSFKKASKKELKNVLFATDEKLVSIDF

SEQ ID NO: 93890 - protein, 272 aa, Unknown
  Bacterial polypetide isolated from the Sargasso Sea
MAIRVGINGFGRIGRNFFRAAKLSGAKIEFVAVNDLGSLETLAHLLKNDSVHGKFGGSVKAVRGGISVDGQKLAVLSERNPGDLPWGDLGVDVVIESTGIFADKEKAQPHIEAGAKKVIISAPASCDATFVVGVNDDDYDPKKHHIISNASCTTNCFVPMIKVLDDAFGVQEGLMTTTHAYTGDQAIVDGPHSDLRRARAAAVNIIPTSTGAARATGLVLKKMQGKLDGIAMRVPIPDGSVTDFTGIMRKTPSVEAVNEAFKEAARRGPLKN

SEQ ID NO: 93891 - protein, 202 aa, Unknown
  Bacterial polypetide isolated from the Sargasso Sea
MTIRIGINGFGRIGRLVMRAAAERNDIEVVAINDLLDTDYIAYLLKYDSTHGLFDGEVTVDNNSLVVNGKTIRITSERDPAALKWDEVDVDVVVESTGLFLTKETAAKHIEAGAKKVVMSAPSKDDTPMFVMGVNQESYAGETIVSNASCTTNCLAPLAKVLNDKFGIVDGLMTTVHATTATQKTVDGPSMKDWRGGRGAGQ

SEQ ID NO: 93892 - protein, 247 aa, Unknown
  Bacterial polypetide isolated from the Sargasso Sea
MSLKVGINGFGRIGRMVLRSIIENNRKDIEVVAINNRGNSEISSFLLKHDTIHGKLKAKVSHSEKAIEVNGKKINIIHETEISKIDWKKYKVEVVLECTGKFNSKEKSSQHIKSGAKKVLVSAPCKGAINIVFGVNQEILKKSDVIVAAASCTTNCLAPIAKVVNDNFGIERGFMTTIHSYTTDQRLLDNSHKDLRRARSAPNSMIPTTTGATKSLGDIIPDLKNKVEGISIRVPTPNVSLVELFFF

SEQ ID NO: 93893 - protein, 269 aa, Unknown
  Bacterial polypetide isolated from the Sargasso Sea
MTLRVAINGFGRIGRNFMRCWLSRGAYTNIEVVGINVTSDPKTNAHLLKYDSVLGQLDGVDIQYTDDTFVINNKTIKCFSDRNPLNLPWKEWGVDLVIESTGVFNTDVGASKHLEVGAKKVILTAPGKGDGVGTYVVGVNADTYKHKDYDILSNASCTTNCLAPVVKVLDQTFGINKGLMTTIHSYTGDQRILDNSHRDLRRARAAATNIVPTSTGAAKAVALVYPEMKGKLTGIAMRVPTPNVSAVDFVFESSKSVTAEEVNNALKEA

SEQ ID NO: 93894 - protein, 208 aa, Unknown
  Bacterial polypetide isolated from the Sargasso Sea
MTLRVAINGFGRIGRNFMRCWLSRGAYTNIEVVGINVTSDPKTNAHLLKYDSVLGQLDGVDIQYTDDTFVINNKTIKCFSDRNPMNLPWKDWGVDLVIESTGVFNTDVGASKHLEVGAKKVILTAPGKGDGVGTYVVGVNADTYKHKDYDILSNASCTTNCLAPVVKVLDQTFGINKGLMNTIHSYTGDQRILKNSHRDLRRARAAAT

SEQ ID NO: 93895 - protein, 285 aa, Unknown
  Bacterial polypetide isolated from the Sargasso Sea
MTVKIGINGLGRIGRMIIRSLIENNNKKVEIKHINSRSNSGVVSSLLKYDSVHGKFNCEIKSGDNYLKLNGKNITFSQHSNLNEINWRKFGVDYVLECTGKFNSKEKLYTHIKNGAKKVIVSAPCKNADKTIVYGVNHKSISKKDLVISAASCTTNCLAPIVYVLNNEFKIEKGFMTTIHSYTTDQRLLDNSHKDPRRARSATQSMVPTSTGASKAIGEIIPELKGKLEGLAIRVPTPNVSLVDLVFNSKNKLTVKKINDSFKKASKKELKNVLFATDEKLVSID

SEQ ID NO: 93896 - protein, 288 aa, Unknown
  Bacterial polypetide isolated from the Sargasso Sea
MKKIKLGINGFGRIGRLALRASFDWPEFEFLQINDPAGDAATFAHLLNFDSVHGRWTHQADAEGNTVVIQGQRIAVTHNKAINDTDWSACDVVIECSGKMKSSAQLQAYLDQGVKRVVVSAPVKEAGVLNVVMGVNHHLFNALTHKIVTAASCTTNCLAPVVKVIHEKVGIKHGSITTIHDLTNTQSILDTPHKDLRRARACGSSLIPTTTGSATAITEIFPELKGRLNGHAVRVPLANASLTDCVFEVERATTADEVNAFLKAASQQELKDILGYEERPLVSVDYKT

SEQ ID NO: 93897 - protein, 135 aa, Unknown
  Bacterial polypetide isolated from the Sargasso Sea
MSINIGINGFGRIGRMVLRAGINNPNVRFVAINDLVPAENLAYLMKYDSTHGRFPGNVETDGNSIMIDGKSIECVSERDPEQLGWGDKGVDYVIESTGLFTTLEKAELHLKAGAKKVIISAPAKSKEISTFVMGV

SEQ ID NO: 93898 - protein, 209 aa, Unknown
  Bacterial polypetide isolated from the Sargasso Sea
MVKVGINGFGRIGRLILRALLENYKGKIQVVGINDLGSIEANAHLIKFDSTHGTLNHEVKTTKDGFQIGDQNIKVFAERDPAKLPWGKIGADVVLECTGFFLDKKSAGKHIEAGAKKVIISAPAKEVDFTVVQGVNSKDLKKEHNIISNGSCTTNCLAPVAMVLENTFGIEYGYMTTIHSYTGDQKLLDTLHKDLRRARASGDAMIPTS

SEQ ID NO: 93899 - protein, 141 aa, Unknown
  Bacterial polypetide isolated from the Sargasso Sea
MTTTLAINGFGRIGRCVLRALIESNRTDLDIVAINDLAPIETTAHLLKYDSVHGRFHADVAVDGDHLVINGHRIRVTAEREPAKLPWAGVDVALECTGIFTTRTKAAAHLENGAGKVLISAPADGADKTIVFGVNDDTLTA

SEQ ID NO: 93900 - protein, 78 aa, Unknown
  Bacterial polypetide isolated from the Sargasso Sea
MTVRVGINGFGRIGRLVLRAGWNTPDIDFCHINEIKGGAKCAAHLLEFDSVQGRFEHNIHAHNDKITLDGHKIGFSGI

SEQ ID NO: 93901 - protein, 91 aa, Unknown
  Bacterial polypetide isolated from the Sargasso Sea
MVKVGINGFGRIGRLILRALLENYKGKIQVVGINDLGSIEANAHLIKFDSTHGTLNFDVKTTKEGFQIGDQNIKVFAERDPAKLPLGKNWS

SEQ ID NO: 93902 - protein, 187 aa, Unknown
  Bacterial polypetide isolated from the Sargasso Sea
TLVQGVNSKELKKDHNIISNGSCTTNCLAPVAMVLEKTFGITYGYMTTIHSYTGDQKLLDTLHKDLRRARATEGSMIPTSTGAAKAMSLVLPSLKGKLDGTAIRVPTPNVSLIDLTLVTEKEVTPKSINDAMSKAAKGDLKGILDINQKPLVSKDFNHNPHSSIFDATQTQVVKGKFSRVLSWYDNE

SEQ ID NO: 93903 - protein, 235 aa, Unknown
  Bacterial polypetide isolated from the Sargasso Sea
LVIDHWRYFAGVIRAEEGSVAEISNSQYSYNIPEPLGVVAQIVPWNFPLLMATWKLAPALAAGNCSVLKPAEQTPASIMVMMELIGDLLPPGVVNIVSGFGLEAGKPLASSKRVAKVAFTGETTTGRLIMQYAAQNIIPITLELGGKSPNIFFEDIMDKDDDFLDKCVEGFVMFNLNQGEVCTCPSRALVQESIYDKFMEKCIARTKAVIQDNPLKMETMIGAQASVEQMEKIKS

SEQ ID NO: 93904 - protein, 303 aa, Unknown
  Bacterial polypetide isolated from the Sargasso Sea
DIVAINELGTIDSSYHLINFDSTHGRLPVNIQKTKTGLKYKNKKISFFSEINPKNLPWKKLNVDVVLECSGVFTSKEKSQAHIEAGAKKVIISAPAANADATIVQGVNSNTLKRKHNIISNGSCTTNCLAPVAMVLDKTIGIQSGFMTTVHSFTGDQRTVDQTHSDFRRARTASTSMIPTSTGAAKAIGLVLPKLIGKLDGTAIRVPTPNVSLIDLTFLSKKKTSVEFINKSIINASKKTNLSGILTINDLPLVSIDFNHNSSSSIFDLTQTQVVNDKFCRILSWYDNEWGFSNRMIDTLMCL

SEQ ID NO: 93905 - protein, 123 aa, Unknown
  Bacterial polypetide isolated from the Sargasso Sea
TGAAKAVTKVIPSLEGKITGMAFRVPTANVSVVDLTVKLAKETSYEEVMSTLKNASENELKNILGYTEEAVVSQDFIGDSRTSIVDAKAGIQLNSKFYKIISWYDNEAGYSNKLLDLAKHFCS

SEQ ID NO: 93906 - protein, 162 aa, Unknown
  Bacterial polypetide isolated from the Sargasso Sea
MTLRVGINGFGRIGRNVLRAIIESQREDIKVVAINNRSSIQVCAHLLKYDSIHGRFPFDVSTNENIIAVDNNNIHVSNELTIDEIRWDKNNVDLVMECTGKFNSAKECQKHISAGAKKVLISAPAKDADLTVVYGVNEQDINSSHNIISNASCTTNCLAPIA

SEQ ID NO: 93907 - protein, 230 aa, Unknown
  Bacterial polypetide isolated from the Sargasso Sea
MKKIKVGINGFGRIGRLALRASFNWPEFEFVQINDPAGDAATFAHLLNFDSVHGRWNHQAEAQGNSVIIQGHSIAVTHNKAINDTDWSGCHLVIECSGKMKSSAQLQAYLDQGVKRVVVSAPVKEAGVLNVVMGVNHQLFDAATHKIVTAASCTTNCLAPVVKVIHEKLGIKHGSITTIHDLTNTQSILDTPHKDLRRARACGSSLIPTTTGSATAITEIFPELKGRLNG

SEQ ID NO: 93908 - protein, 183 aa, Unknown
  Bacterial polypetide isolated from the Sargasso Sea
YTNCLAPVAKILDEGLGIESGFMTTIHSYTGDQRTVDQNHSDMRRARGAAISMIPTSTGAAKALSLVLPKLKGKLDGTAIRVPTPNVSLIDLTFVSKKKATVEKINNLILKASKSKKLKNILTTNDLPLVSIDFNHNSSSSIFDLTQTQVLNNKFCRVLSWYDNEWGFSNRMVETMMDLKKFI

SEQ ID NO: 93909 - protein, 145 aa, Unknown
  Bacterial polypetide isolated from the Sargasso Sea
MVKIGINGFGRIGRLILRALLENYKGKIQVVGINDLGSVEANAHLIKYDSTHGILNNDVKTTKEGFQIGDQNIKVFAERDPANLPWGKIGADIVLECTGLFLNKETAGKHLKAGAKKVIISAPGKDVDFKIVQGVNSKQLKKEHN

SEQ ID NO: 93910 - protein, 166 aa, Unknown
  Bacterial polypetide isolated from the Sargasso Sea
MTVRVGINGYGRIGRNILRALHESEGEKQIEIVAINDLGDAKTNAHLTRFDTAHGRFPGTVELGDKEMIVNGKQIKVLSERDPAKLPWGDLGVDVVHECTGFFANKTAASAHLQGGAQKVLISAPAGTEVDATIVYGVNHSNLKATDEIVSNASCTTNCLAPLVKP

SEQ ID NO: 93911 - protein, 177 aa, Unknown
  Bacterial polypetide isolated from the Sargasso Sea
MALRVGINGFGRIGRNVLRAIIESQREDIKVVAINNRSSIQVCAHLLKYDSIHGRFPFDVSTTENIITVDNNNIHVSNELTIDEIRWDKNDVDLVMECTGKFNSAKECQKHISAGAKKVLISAPAKDADLTVVYGVNEQDINSSHSIISNASCTTNCLAPIAKVLNDNFGIEEGFMT

SEQ ID NO: 93912 - protein, 203 aa, Unknown
  Bacterial polypetide isolated from the Sargasso Sea
MAIKVGINGFGRIGRQVLRIALSNKDIEVVAINDIADLKTCSQLLKYDSIFGVLDADIDLLDDGISIDGRKVRFFSEMSPSDIKWTDEKCDIVIESTGIFTTQEKASMHLGGTVKKVVISAPASGDVDLTTVMGANDSLYNNKKHNIISNASCTTNCLAMIVKVLRDSFGLQSGHMTTVHSYTNDQPIVDSPHKDLRRARAGG

SEQ ID NO: 93913 - protein, 258 aa, Unknown
  Bacterial polypetide isolated from the Sargasso Sea
MRIAINGFGRIGRNILRSYLAREQVWKKFNQIEIVAINDLGSPSDNAHLLKYDSVHGKLKNEVECSETSIKVDGFDIACFSEKDPAKLPWAKLNIDIVFECTGLFTSKDKAEQHIQAGAKRVLISAPGQNVDKTIVFGVNHETLTNEDRIISNASCTTNCLAPLAKIIHEEYKILNGLVNTIHAYTNDQSLLDVHHSDLLRARAASLSMIPTKTGAASAVGDVLPELRGKLDGLAVRVPVSNVSLLDFTFTTEKDFSI

SEQ ID NO: 93914 - protein, 292 aa, Unknown
  Bacterial polypetide isolated from the Sargasso Sea
MTIKVAINGFGRIGRNVLRANYESGYDKDIEIVAINDLGDAEINAHLLKYDTAHGPFNKSVEIKNKKILIDGKDEVTVLSERNPEKLPWKDLGIDVVLECTGFFASKSASMSHIKAGAKKVLISAPAKEVDATVVYGVNHNIIKTEDQVVSNASCTTNCLATLIKDIHEKLNIENGIMTTIHSYTNDQVLTDVYHSDLRRARSATQSMIPAKTGAASAVGLVLPDLNGKLDGFAIRVPTINVSLVDLCFNISKKSSISELNNIIKNASETSLKGILGYNVDPLVSIDFNHSS

SEQ ID NO: 93915 - protein, 124 aa, Unknown
  Bacterial polypetide isolated from the Sargasso Sea
GAAKAMSLVLPSLKGKLDGTAIRVPTPNVSLIDLTLVTEKDVTPEIINNAMIKAAEGELKGILDVNQKPLVSKDFNHNPHSSIFDVTQTQVVKGKFSRVLSWYDNEWGFSNRMCDTSIQIAGLI

SEQ ID NO: 93916 - protein, 74 aa, Unknown
  Bacterial polypetide isolated from the Sargasso Sea
MIKVGINGFGRIGRLILRALLENYKGKIQVVGINDLGSIEANAHLIKFDSTHGTLTQDVKTSSEGFQIGDQNIK

SEQ ID NO: 93917 - protein, 287 aa, Unknown
  Bacterial polypetide isolated from the Sargasso Sea
LEKKIKNVQIVAINELGSLESSMHLLKYDSIHGIIPYNISKTNKGIKLGSHNINFYSENDPSKLPWKSLNIDVVLECSGVFTSKEKTIAHINAGAKKVIISAPGTNVDKTVVQGVNNHELNKKHNIISNGSCTTNCLAPLAMVLDKGLGIESGFMTTIHSYTGDQRTVDQTHKDLRRARAAAESMIPTSTGAAKALSLVLPKLKGKLDGTAIRVPTPNVSLIDFTFISRKKTSPNQINTLVLKASKSKALKNILSVNNMPLVSIDFNHNHNSSIFDSTQTQVVKKNL

SEQ ID NO: 93918 - protein, 168 aa, Unknown
  Bacterial polypetide isolated from the Sargasso Sea
DSFGIEEALMTTVHAVTATQFTVDGPSKKDYRGGRSSLLNIIPASTGAAKAVTKVIPSLEGKITGMAFRVPTANVSVVDLTVKLSKETSYEEVMKTIKKASESELHNILGYTEEPVVSQDFIGDSRTSIVDAKAGIQLNSMFYKIISWYDNEAGYSNKLLDLAKHFSS

SEQ ID NO: 93919 - protein, 60 aa, Unknown
  Bacterial polypetide isolated from the Sargasso Sea
MSIKVGINGFGRIGRLALRAAWNWPELEFVQINDPAGDAATHAHLLNFDSVHGRWQHEAS

SEQ ID NO: 93920 - protein, 194 aa, Unknown
  Bacterial polypetide isolated from the Sargasso Sea
MLISPEHKIISNASCTTNCLAPIAHVLHNTCGIKQGFMTTIHSYTGDQRILDTEHKDLYRSRAAALNMIPTTTGAAKAVGLVLPELNGKLDGVAIRVPTPNVSAVDFVFEPVKQISADEINQFIKIAADGELKNVLDFTERELVSTDFNHHPASSIAHIDQTRVMPDGMARIFSWYDNEWGFSNRMLDTVSCMG

SEQ ID NO: 93921 - protein, 156 aa, Unknown
  Bacterial polypetide isolated from the Sargasso Sea
MRVGINGFGRIGRNVLRAFWETSRSDIEIVAVNDIADIQTAAFLLEYDSVHGRLAAPVTYDGDVIRTAKCEVRYFSERDPSALPWGKLGVDVVFECTGIFTAAEKARVHIEAGAKKVLISAPSSGADITVVYGVNHTALRPEHRIISNASCTTNCL

SEQ ID NO: 93922 - protein, 248 aa, Unknown
  Bacterial polypetide isolated from the Sargasso Sea
MKIAINGFGRIGKLVFRAFLEQKLKGVEVVAINELGSLDSSIHLLQFDSLHGKLPIDIKKTKDGIGYKNKKIKFLSERNPLNLPWRKLKVDVVLECSGIFTSKEKATAHLVAGAKKVIISAPGSKVDATIVQGVNNQILSKKHKIISNGSCTTNCLAPVAMILDKGVGIENGFCTTIHSYTGDQKILDQSHSDLRRARGAAISMIPTSTGAAKALSLVLPKMKDKLDGTAIRVPTPNVSLIDFTVISK

SEQ ID NO: 93923 - protein, 151 aa, Unknown
  Bacterial polypetide isolated from the Sargasso Sea
MSIKVGINGFGRIGRLALRAAWDWPELEFVRINDPAGDAATHAHLLNFDSVHGRWQHEAGSNAEQVLIEGKAITVTANRALADTDWSDCDLVIEASGKMKTLASLQPYLDQGVKRVVVCAPVKEPGALNVVMGVNQDRFDPQQHRIVTAAS

SEQ ID NO: 93924 - protein, 280 aa, Unknown
  Bacterial polypetide isolated from the Sargasso Sea
GNCSVFKPAEQTPASIMVMMELIGDLLPPGVVNIVSGFGLEAGKPLASSKRVAKVAFTGETTTGRLIMQYAAQNIIPITLELGGKSPNIFFEDIMDKDDDFLDKCVEGFVMFNLNQGEVCTCPSRALVQESIYDKFMEKCIARTKAVIQDNPLKMETMIGAQASVEQMEKIKSYLDLGKKEGAKVLAGGEVGKLNSGLEKGNYIQPTIFETNNKSRISQEEIFGPVVSVIKFKDEAEALEIANDTLYGLGAGVWTRNGNIAYRMGRAIQAGIVWTNCYPC

SEQ ID NO: 93925 - protein, 110 aa, Unknown
  Bacterial polypetide isolated from the Sargasso Sea
MVKVGINGFGRIGRLILRAILENYKNKIQVVAINDLGSIETNAHLIKYDSTHGIINEDIQTTKEGFKISNQEIKVFAEKDPANIPWGKIGVDVVLECTGIFLDKTSAEKH

SEQ ID NO: 93926 - protein, 168 aa, Unknown
  Bacterial polypetide isolated from the Sargasso Sea
MFGIERGYMTTIHSYTGDQPTLDTMHKDLYRARAAGLSMIPTSTGAAKALGLVLPELKGKLDGSSIRVPTPNVSVVDLKVVAGREVTVEEINAALQAAADGPMNGVLFTTTDPLVSHDLNHIAASSTAALPQTQVVDGKLARVLSWYDNEWGFATRMSDTALQMAKFL

SEQ ID NO: 93927 - protein, 219 aa, Unknown
  Bacterial polypetide isolated from the Sargasso Sea
GASKVIISAPGKEVDNTVVFGVNHKTLTDKQQVISNASCTTNCLATVIKNIHKNLEITNGLMTTIHSYTNDQVLTDVYHSDLRRARSATQSMIPTNTGAAAAVGLVMPDLNGKLDGFAIRVPTTNVSVVDLCFNTSKSTSVAELNNLVLQSSEGDMKNIVGYNNLPLVSIDFNHSSYSSVFDESLTRASDDKLYKICAWYDNEWGFSNRMLDVTMHWVN

SEQ ID NO: 93928 - protein, 273 aa, Unknown
  Bacterial polypetide isolated from the Sargasso Sea
MRIAINGFGRIGKLVFRSFLERKIPKVDLVAINELGDIASSHHLLKYDSVHGKIQTEIQQVRNGLKYNNKFTSFFSEKNPNDLPWKKLKIDIVLECSGVFTSKEKSIAHLQAGAKKVIISAPAKNVDATIVQGVNENILRKNHNIISNGSCTTNCLAPVAMVLDKKVGIVSGFMTTIHSYTGDQRTVDQVHSDLRRARAAAESMIPTSTGAAKAISLVLPKLKNKLDGTAIRVPTPNVSLIDLTFISRKKTSAKEINNFILKESRTKKLKNIL

SEQ ID NO: 93929 - protein, 264 aa, Unknown
  Bacterial polypetide isolated from the Sargasso Sea
SITVLSQRDPQKLPWKRMTIDVALECTGLFTSKDKAAMHIKAGAKKVLVSAPCTNADKTIVYGVNEDEITKEDLVVSNASCTTNCLAPVAKVLHDKFKIVHGYMTTIHAFTGDQSVLDTFHSDLRRARAASLSMIPTSTGAAKAVGLVMPELSGKLDGTAIRVPTPNVSLIDFKFVSKKRMTVDSINKAMSAAARSNKLNGILDVNSKPLVSSDFNHNPASSNFDLTQTQVIDGKFGRVLSWYDNEWGFSNRMCDTAVAMKRSR

SEQ ID NO: 93930 - protein, 194 aa, Unknown
  Bacterial polypetide isolated from the Sargasso Sea
KKEHNVISNGSCTTNCLAPVAMVLENSFGIEYGYMTTIHSYTGDQKLLDTLHKDLRRARSTEGAMIPTSTGAAKAMSLVLPSLKGKLDGTAIRVPTPNVSLIDFTLVTKKDVTADTINEAMTKASNGELKGILGINKHPLVSKDFNHDAHSSIFDITQTQVIKNKFSRVLSWYDNEWGFSNRMCDTSIQISKLI

SEQ ID NO: 93931 - protein, 259 aa, Unknown
  Bacterial polypetide isolated from the Sargasso Sea
MTVRVAVNGFGRIGRNVVRALYESSKRAEMEIVAINGRGSPEQITHLFKYDSAHGKFPHEVHCDGKSLVIDDKDKIKFIYDRDPTKLPWNDLDIDVVLECTGAFRDHETASKHLDAGARKVLISAPGKNMDATIVFGVNHNILSDEHKIVSNASCTTNCLAPLVNPLYKTIGIKHGSMTTIHSYTNDQVLTDAFHSDPRRARSATMSQVPTKTGAAKGLGQVIPELDGRLDGFAMRVPTLNVSAVDLSFVPERETSEEE

SEQ ID NO: 93932 - protein, 231 aa, Unknown
  Bacterial polypetide isolated from the Sargasso Sea
VIISAPSKDADTPTIVVGVNTEDYDSATMNVVSCASCTTNGLAPLVKTINEKFGIKQGLMTTVHAATASQLTVDGSMKGADWRAGRAASANIIPSSTGAAKAVAKAYPVMKGKLTGMAFRVPTVDVSVVDLTCELETPTTYEEIKAEVKLASETYAKGIVGYTEDQVVSSDFVGETCSTVFDAGAGIMLTPTFVKLVSWYDNEWGYSTRLVDLVANMAVADGVLAKEAMLA

SEQ ID NO: 93933 - protein, 192 aa, Unknown
  Bacterial polypetide isolated from the Sargasso Sea
MVFRAIADRGLLGKDIEVVAINDLVPADNLAYLLKYDSIQGRFKGTVENEGADTLVVNGHKIKCLALREGPAALPWKDLGVDIVIESTGLFTQDEKAMGHLEAGAKKVIISAPGKGNMKTVVVGVNDHILGADDNIISNASCTTNCLAPITKVMLDNFGIAEGLMTTIHSYTSTQKVVDGPSHKDWKGGRTA

SEQ ID NO: 93934 - protein, 298 aa, Unknown
  Bacterial polypetide isolated from the Sargasso Sea
LKVKFPFKAKYGNYINGKFVEPKSGKYFDNVSPISNEKICSVARSNDKDVESALDAAHAAFKEWGKTDITTRSNILNKIADVIEKNLNLLAVAECLDNGKPIRECMAADLPLVVDHWRYFAGVIRAEEGSIAEIANNQYSYNFHEPLGVVGQIIPWNFPLLMATWKLAPALAAGNCVVLKPAEQTPASINVLMELIGDLLPPGVVNIVSGFGLEAGKPLASSKRVAKVAFTGETTTGRLIMQYAAQNIIPITLELGGKSPNIFFEDVLEKDDDFFDKCIEGFVMFNLNQGGSLYCPSR

SEQ ID NO: 93935 - protein, 89 aa, Unknown
  Bacterial polypetide isolated from the Sargasso Sea
MKVAINGFGRIGKLVFRALLEKNPKDINIVAINELGSVESSAHLLKYDSVHGILKDEISSIKNGLKIGKHKINFYSERDQITFPWNHSR

SEQ ID NO: 93936 - protein, 169 aa, Unknown
  Bacterial polypetide isolated from the Sargasso Sea
NIGIESGYMTTVHSVTGDQNTIDTFHKDLRRARNSLLSMIPTSTGAARAVSEVLPNLKGKLDGSAIRVPTANVSLVDFSFMTKKNTSENEINRIFINAEKNEFKGIVETISAPLVSSDFNHNSHSSVVDLTETKVINERFCRILSWYDNEWGFSNRLVDIILELSNENL

SEQ ID NO: 93937 - protein, 278 aa, Unknown
  Bacterial polypetide isolated from the Sargasso Sea
VSLDGDMLHAGKQKVKLIAEKNPSELPWGELGINIVIESTGIFRTREQLEQHLTAGCKKVVLTVPAKDEIDYTVVLGVNDKGLKAEHKIVSNASCTTNCLAPMAKVLNENFGIELGVINTIHAYTNDQRLADVPHSDWRRSRAAAENVIPTTTGAARAVGVVLPELNGKLDGIAMRVPVPDGSVVDFNVQLNNDVTVDQINEAVREASINGSLKGILEYSTLPVVSSDIIGNSHSSIFDAPFTRVIGGNYVKTLNWYDNEWGYSNRVVDLVSLLGSIG

SEQ ID NO: 93938 - protein, 140 aa, Unknown
  Bacterial polypetide isolated from the Sargasso Sea
DFRGGRSSLLNIIPASTGAAKAVTKVIPSLEGKLTGMAFRIPTANVSVVDLTVELEKSTDYEGIKKVMKNASETSMKNVLGYEDEPVVSQDFIGDERTSIFDANAGIKLNDNFFKIISWYDNECGYSSKLISLAQLINNT

SEQ ID NO: 93939 - protein, 286 aa, Unknown
  Bacterial polypetide isolated from the Sargasso Sea
MVNIAINGFGRIGRLFLRALSESKNAKNIKVKIINDLADLESNIHLFKYDSVHGTYNRKIKNYKNSFDIGFGKIKIISETNPAKLPWKKNNIDVVIECTGILTSKKDSLKHLKSGAKKVIISAPSDNPDITVVFGVNHKEINNNHRIISNASCTTNCLAPVVSILNNSIGIETGHMTTIHSYTGDQRIVDTFHKSDLRRARSAASSLIPTKTGAAKAIGLVIPELEGRLDGTAIRVPTPNVSLIDFVFNASRDTSENEINKICINSSERHLKNILSITNEPLVSID

SEQ ID NO: 93940 - protein, 315 aa, Unknown
  Bacterial polypetide isolated from the Sargasso Sea
KNKREVKNMSAEALKVSSALDTSHLKVDFPYKAKYGNFINGKFVEPLSGKYFDNPSPISNEIICSVARSNEKDVEAALDAAHAAFPEWGKTDITTRSIILNKIADVLEQNKDKLAVAECLDNGKPIRECMAADIALVIDHWRYFAGVIRAEEGSVAEISNSQYSYNIPEPLGVVAQIVPWNFPLLMATWKLAPALAAGNCSVLKPAEQTPASIMVMMELIGDLLPPGVVNIVSGFGLEAGKPLASSKRVAKVAFTGETTTGRLIMQYAAQNIIPITLELGGKSPNIFFEDIMDKDDDFLDKCVEGFVMFNLNQGE

SEQ ID NO: 93941 - protein, 258 aa, Unknown
  Bacterial polypetide isolated from the Sargasso Sea
MKVAINGFGRIGKLVFRAFLEKNLKGVEIVAINELGSLDSSLHLMQFDSIHGKIPEEIKKTKDGLKYKNKEIKFFSERDPSNLPWRKLKVDVVLECSGVFASKEKASSHLIAGAKKVIISAPASNVDATIVQGVNNSVLKSKHNVISNGSCTTNCLAPVAMVLNKTVGIESGFMTTIHSYTGDQRTVDQNHSDLRRARGAAISMIPTSTGAAKALSLVLPKLKGRLDGTAIRVPTPNVSLIDYTFTSKKKTSVEKIND

SEQ ID NO: 93942 - protein, 249 aa, Unknown
  Bacterial polypetide isolated from the Sargasso Sea
QGVDFVIESTGIFTNREAAGQHLDAGAKKIIISAPSKNPDITLVLGVNEETYLPEQHNIISNASCTTNCLAPVAKVLHDNFFIEKGLMTTIHSYTNDQRILDLPHTDLRRARAANVSMIPTTTGAAKAVALVLPEIAGRLDGMAIRVPTPNVSLIDLVVEVKKKTSNKEVNEVFKEAAREGLKNILRVEDNPLVSIDYNGDPYSSIIDGLSTKVMKDNMIKVLAWYDNEWGYSNRVKDLLKFIVSKNNS

SEQ ID NO: 93943 - protein, 272 aa, Unknown
  Bacterial polypetide isolated from the Sargasso Sea
MRIAINRFGRIGKLVLRAFLEKKIKNVEVVAINELGSIDSSIHLLKYDSIHGILPLKITKTKKGIKVGNNKINFYSEKSPENLPWKLLNVDVVLECSGVFTSKEKAKSHINAGAKKVIISAPGSNVDKTIVQGVNNNQLTKKHNIISNGSCTTNCLAPLAMVLDNGIGIERGFMTTIHSYTGDQRTVDQSHNDLRRARAAAESIIPTSTGAAKAISLVLPSLKDKLDGTAIRVPTPNVSLIDFTFVSKKKTSVKKINSLILKASKSKSLKNI

SEQ ID NO: 93944 - protein, 258 aa, Unknown
  Bacterial polypetide isolated from the Sargasso Sea
MTIKIGINGFGRMGRLSMRAAFDWDDIEIIQINDPAGNAETLGHLMTFDSVHGRWHHEANHEGDSIIINNKAIPCTQNKATQDTDWSKCDVVIEASGKIKTKALLQAYLDQGVKRVVVTAPVKEDGVLNIVMGVNENLYDKAIHPIVTAASCTTNCLAPVVKVIHEKIGIKHGSMTTIHDITNTQTILDAPHKDLRRARACGMSLIPTTTGSATAITHIFPELKGKLNGHAIRVPLTNASITDCVFEVERATTVEEVN

SEQ ID NO: 93945 - protein, 300 aa, Unknown
  Bacterial polypetide isolated from the Sargasso Sea
KGIDIVAINELGSLDASIHLMQYDSIHGKLPVKINKTKDNLKYKNKTIKFFSERDPLNLPWKKLNVDVVLECSGVFASKEKASAHLKAGAKKVIISAPGSNVDATIVQGVNNHILQKKHRVISNGSCTTNCLAPVAMVLDKGVGIENGFMTTIHSYTGDQRTVDQTHSDFRRARGAAISMIPTSTGAAKALSLVLPKLKGKLDGTAIRVPTPNVSLIDLTFTSKKKTSVEEINKLMIKASKTKKLKDILTTNELPLVSIDFNHNSSSSVFDLTQTQVLNGKFCRVLSWYDNEWGFSNRMI

SEQ ID NO: 93946 - protein, 262 aa, Unknown
  Bacterial polypetide isolated from the Sargasso Sea
MTVKIGINGLGRIGRMIIRSLIENNNKKVEIKHINSRSNSEVVSSLLKYDSIHGKFNCEIKYGDNYLKLNGKNITFSQHSNLNEINWKKFGVDYVLECTGKFNSKEKLYTHIKNGAKKVIVSAPCKNADKTIVYGVNHKSISKKDLVISAASCTTNCLAPIAYVLNKEFKIEKGFMTTIHSYTTDQRLLDNSHKDPRRARSAAQSMVPTSTGASKAIGEIIPELKGKLEGLAIRVPTPNVSLVDLVFNSKNKLTVKKINDSF

SEQ ID NO: 93947 - protein, 118 aa, Unknown
  Bacterial polypetide isolated from the Sargasso Sea
GLVMPELDGKLDGVAIRVPTPNVSVVDLTFESSKSTTESEINSFIENASLSDLKGILGFTKEKLVSMDVNHDPHSSIFAADQTKVLQNNMVRVLSWYDNEWGFSNRMSDTALEMAKFL

SEQ ID NO: 93948 - protein, 93 aa, Unknown
  Bacterial polypetide isolated from the Sargasso Sea
MKIGINGFGRIGRLVFRALWDRADIEITHINEIAGDSNAAAHLLEFDSVHGRWGKDIKVKDKEIIIDGKKLTYTSFKNYIDVPWQKSSVDIIL

SEQ ID NO: 93949 - protein, 304 aa, Unknown
  Bacterial polypetide isolated from the Sargasso Sea
MVKVGINGFGRIGRLILRAILENYKNKIHVVAINDLGPIETNAHLIKYDSTHGIINEEIQISKEGFKIGNQEIKVFAEKDPANIPWGKVSADVVLECTGIFIDKSSAEKHIKGGAKKVIISAPGKEVDFTIVQGVNSKELKKEHNIISNGSCTTNCLAPVAMVLEKTFGISYGYMTTIHSYTGDQKLLDTLHKDLRRARSTEGAMIPTSTGAAKAMSLVLPSLKGKLDGTAIRVPTPNVSLIDLTLVTEKEITIESINNAMSKAAKGELKGILDVNEKPLVSKDFNHNPHSSIFDLTQTQVIKG

SEQ ID NO: 93950 - protein, 154 aa, Unknown
  Bacterial polypetide isolated from the Sargasso Sea
MKIGINGFGRIGRLVFRALWDRADIEITHINEIAGDSNAAAHLLEFDSVHGRWGKNIEVKEEEIIIEGKKLDYTSFKNYLDVPWEKSSVDIILECTGKNKKPDKLNPYFDSLGMKRVIVACPVKGVVAEAEALNIVYGINQSLYDPFKHKLVTA

SEQ ID NO: 93951 - protein, 310 aa, Unknown
  Bacterial polypetide isolated from the Sargasso Sea
GRIGRLVSRALWGRPGIELVHVNDPAGDAATAAHLLEFDSVHGRWDRGITSSADGFSVEGSALTWSSEKDPTAVPWSDRGVEMVLEASGKIKTPETLNPYFDQLGLKRVVVACPVKGVVAGEDALNIVYGINHHLYEPARHKLVTAASCTTNCLAPVVKVVHESFGIEHGLITTIHDITNTQVPIDSFKSDLRRARSGLTSLIPTTTGSAKAIAMIFPELKGKLNGHAVRVPLLNGSLTDAVFELKQSVTVEQVNAAFKAAAEGPLKGILGYEERPLVSCDYTNDNRSSIVDALSTMVVDGNQLKVFACT

SEQ ID NO: 93952 - protein, 108 aa, Unknown
  Bacterial polypetide isolated from the Sargasso Sea
MKINVAINGFGRIGRLTLRAFLERKVNDFNIVAVNDLGNLESNIHLLKYDSVHGNLTYSIKKTGSSIKIEDHNIHFLSESDPLKLPWKKLGIDVVIESTGVFTNREKA

SEQ ID NO: 93953 - protein, 249 aa, Unknown
  Bacterial polypetide isolated from the Sargasso Sea
GDLGIDVVLECTGIFTSKESAGAHLKAGAKKVLISAPASGADLTIVQGVNDNKLRKSHKVVSNASCTTNCLAPVAAVLNKAIGIKHGFMTTVHSYTGDQPVLDTLHSDLHRARGAATSIIPTSTGAARAVGLVLPELAGKLDGTAVRVPTPNVSMVDLVVEAKKNTTAEAVNAAIEKAAAKGPLKGILTTNAAPLVSADFNHNPASSVFDLTQTQVTDGRMVRVLSWYDNEWGFSNRMSDTAVLMGKLG

SEQ ID NO: 93954 - protein, 64 aa, Unknown
  Bacterial polypetide isolated from the Sargasso Sea
MSVKVAINGFGRIGRNILRASIENNRKDIEVVAINDLGSPEMNVHLLKYDSVHGRFPLDLSIHK

SEQ ID NO: 93955 - protein, 206 aa, Unknown
  Bacterial polypetide isolated from the Sargasso Sea
MKIGINGFGRIGRLVFRALWGRADIEITHINEIAGDSNAAAHLLEFDSVHGRWVKDIKVKEEEIIIDGKKLTYTSFKNYLDVPWEKSSVDIILECTGKNKKPDKLNPYFDTLGMKRVIVACPVKGIVAEAESLNIVYGINQSLYDPSKHKLVTAASCTTNCLAPIVKVINENFSIKHGAITTIHDVTNTQVPVDFYKSDLRRARGC

SEQ ID NO: 93956 - protein, 177 aa, Unknown
  Bacterial polypetide isolated from the Sargasso Sea
MTVKVAINGFGRIGRLVLRAILESNRKDIKVVAINDLGSVDANAHLLSYDSVHGKLDKKIIVENGSIKTPHGIIEVFSERNPEQLPWKKLDIDVALECTGLFTKKDDASKHLIAGAKKVLISAPGKDVDYTVVYGVNDKGLNSNHNIVSNASCTTNCLAPVAQVLNELVGIESGIYD

SEQ ID NO: 93957 - protein, 70 aa, Unknown
  Bacterial polypetide isolated from the Sargasso Sea
MSINIGINGFGRIGRMVLRAGINNPNIRFVAINDLVPAENLAYLMKYDSTHGRFPGNVETDGNNILIDGK

SEQ ID NO: 93958 - protein, 297 aa, Unknown
  Bacterial polypetide isolated from the Sargasso Sea
MTLRVQINGFGRIGRNFMRCWLSRGAYTNIEVVGINVTSDPKTNAHLLKYDSVLGQLDGVDIQYTDDTFVINNKTIKCFSDRNPMNLPWKDWGVDLVIESTGVFNTDVGASKHLEVGAKKVILTAPGKGDGVGTYVVGVNADTYKHKNYDILSNASCTTNCLAPVVKVLDQTFGINKGLMTTIHSYTGDQRILDNSHRDLRRARAAATNIVPTSTGAAKAVALVYPEMKGKLTGIAMRVPTPNVSAVDFVFESSKSVTAEEVNNALKEASLSSMKGIIKYGDEPLVSSDYAGTNESS

SEQ ID NO: 93959 - protein, 243 aa, Unknown
  Bacterial polypetide isolated from the Sargasso Sea
VVLECTGFFAKKELASKHIKAGAKKVVISAPAGTDIDATIVYGVNHDTLSKDDAVISNASCTTNCLAPLVKPIHESIGLESGIMTTIHAYTNDQVLTDVMHSDLRRARSATQSMIPTKTGAAAAVGLVLPELDGKLDGFSVRVPTINVSLVDLSFIASRETSVDEINEVVKAASEGALKGVLDYSDGPLVSIDFNHNPASSTYDATMTKVQEGTLVKVCSWYDNEWGFSNRMLDTTLALVNAE

SEQ ID NO: 93960 - protein, 201 aa, Unknown
  Bacterial polypetide isolated from the Sargasso Sea
MTLRVGINGFGRIGRNVLRAIIESQREDIKVVAINNRSSIQVCAHLLKYDSIHGRFPFDVSTTENFITVDNNNIHVSNELTIDEIRWDKNDVDLVMECTGKFNSAKECQKHISAGAKKVLISAPAKDADLTVVFGVNEQDINSSHNIISNASCTTNCLAPIAKVLNDNFGIEEGFMTTVHSYTGDQPTIDRDHKDVYRARA

SEQ ID NO: 93961 - protein, 150 aa, Unknown
  Bacterial polypetide isolated from the Sargasso Sea
RLWTGPLKKDWRGGRGGNQNIIPASTGAAKAVGICIPEIAGKITGMSFRVPTPNVSVVDLTVKLSKSTSYDDINASMESASKGNLKGILGYTDEDVVSSDFIGSTYSSIYDAGAGIGLNDKFFKLVSWYDNEMGYSARLIDLVEYMETRN

SEQ ID NO: 93962 - protein, 84 aa, Unknown
  Bacterial polypetide isolated from the Sargasso Sea
MVKVGINGFGRIGRLILRAILENYKDKIQVVAINDLGSIETNAHLIKYDSTHGIINDEITTSKDGFKISNQNIKVFSERDPENI

SEQ ID NO: 93963 - protein, 212 aa, Unknown
  Bacterial polypetide isolated from the Sargasso Sea
ASNVDATIVQGFNNDILSKKHNVISNGSCSTNCLAPVVMVLDNGVGIENGFMTTVHSYTGDQRTVDQTHSDFRRARGAAISMIPTSTGAARALSLVLPKMKGKLDGTAIRVPTPNVSLVDFTFTSKKKTSIEKINNLFIKASKTKALKNILTTNKLPLVSIDFNHNSSSSVFDLTQTQVLNGKFCRVLSWYDNEWGFSNRMIDTMLNFKKLL

SEQ ID NO: 93964 - protein, 182 aa, Unknown
  Bacterial polypetide isolated from the Sargasso Sea
KDPAKIPWGNVGADVVLECTGIFLDKSSAQNHIKGGAKKVIISAPAKEVDFTIVQGVNSKELKKDHNIISNGSCTTNCLAPVAMVLENNFGIEYGYMTTIHSYTGDQKLLDTLHKDLRRARSTEGSMIPTSTGAAKALSLVLPSLKGKLDGTAIRVPTPNVSLIDFTVVTKKEVSADTINDA

SEQ ID NO: 93965 - protein, 260 aa, Unknown
  Bacterial polypetide isolated from the Sargasso Sea
MAIKVAINGFGRIGRNVFRAMFESGQQDQFEVVAVNDLGDAATISHLLQYDTAHGRFSQDVSVDGDAFMVGNRRVKVLAERDPAKLPWGELGVDVVMECTGFFTSKEKASAHLAGGAKKVIISAPGGSDVDATVVYGVNHDVLKASDTVISNASCTTNCLAPLVKPLHDAIGVVGGLMTTIHAYTNDQVLTDVYHTDLRRARSATQSMILTKTGAAAAVGLVLPELNEKLDGFAIRVPTINVSMVDLTFEAARETTVEEV

SEQ ID NO: 93966 - protein, 242 aa, Unknown
  Bacterial polypetide isolated from the Sargasso Sea
MTLRVAINGFGRIGRNFMRCWLSRGAYTNIEVVGINVTSDPKTNAHLLKYDSVLGQLDGVDIQYTDNTFVINNKTIKCFSDRNPMNLPWKEWGVDLVIESTGVFNTDVGASKHLEVGAKKVILTAPGKGAGVGTYVVGVNADQYNHKDYDILSNASCTTNCLAPVVKVLDQTFGINKGLMTTIHSYTGDQRILDNSHRDLRRARAAATNIVPTSTGAAKAVALVYPEMKGKLTGIANESSNP

SEQ ID NO: 93967 - protein, 295 aa, Unknown
  Bacterial polypetide isolated from the Sargasso Sea
GALKSKRKDIEFVAINDLGSLEMNALLLQNDTTHGRLSNRVRKTATGINAGSGTIKVFSERDPEALPWGKLGVDVVLECTGIFTKREQAVQHLKAGAKKVLISAPASGEDLTVVYGVNDQRLRKSHKIVSNASCTTNCLAPVAAVMHKAFEIQQGYMTTIHAYTGDQRILDTLHSDPRRARAAGQSMIPTSTGAAKAVGLVLPELNGKLDGTSIRVPTPNVSVIDFTFIPKKKTNVEAVNSAAIRASKSNRLKGIFNVNEQPLVSSDFNHDPASSTFDLTQTQVIDGKLVRVVSW

SEQ ID NO: 93968 - protein, 167 aa, Unknown
  Bacterial polypetide isolated from the Sargasso Sea
GIRTGYMTTIHSYTGDQPSLDTMHKDLYRARAASLSMIPTSTGAAKAVSLVLPELEGKLDGSAIRVPTPNVSCVDLKFVSEKPVTALEINQAIKIAATNELLGILGYEERALVSIDFNHISESSTVAAQETKVLPSGMARILAWYDNEWGFSNRMADTAVTMGDLIK

SEQ ID NO: 93969 - protein, 256 aa, Unknown
  Bacterial polypetide isolated from the Sargasso Sea
MTIKIGINGLGRIGRMVIRSIIETNNKKIEIKLINNRTDLKNCSQLLKYDSVHGKFNADIKYNEKYLFINKKKISYSREIELDKINWKKNNVDIVLECTGKYNSKEKSFQHIKNGAKKVIVSAPCKNADKTIVYGVNHKSINKNDLVISAASCTTNCLAPIAYVLNQKFKIEKGFMTTIHSYTTDQRLLDNSHKDQRRARSAGQSIVPTSTGASKALAEIIPELKGKIEGVAMRVPTPNVSLVDLVFNSSKNLSVN

SEQ ID NO: 93970 - protein, 215 aa, Unknown
  Bacterial polypetide isolated from the Sargasso Sea
LDLPWKEWGIDLVIESTGVFNTDEKASMHIQAGAKKVILTAPGKGPGVGTFVVGVNADQYRHEDFDILSNASCTTNCMAPIVKVIDQEFGIVKGSMTTVHSYTGDQRILDASHRDLRRARAAAMNIVPTTTGAAKAVALVYPEVKGKLDGLALRVPTPNVSLVDMVFNVSKNTSRDEVNAVLKAASEGAYKGIIKYSTLPLVSSDLAGTDDSTDR

SEQ ID NO: 93971 - protein, 263 aa, Unknown
  Bacterial polypetide isolated from the Sargasso Sea
INGFGRIGKLVLRAFLEKKIKNYEIVAINELGSIDSSIHLLKFDSVHGILPFNIKKSANKILVEKNNISFFSEKDPNNLPWKSLNVDVVLECSGVFTSKESAKAHLKAGAKKVIISAPASNVDATIVQGVNNDILKSKDNIISNGSCTTNCLAPIAMILDKGIGIESGFMTTIHSYTGDQRTVDQTHKDLRRARAAAESMIPTSTGAAKALSLVLPNLKGKLDGTAIRVPTPNVSLIDLTFTSKKKTNVDKINSLIVKESKTK

SEQ ID NO: 93972 - protein, 227 aa, Unknown
  Bacterial polypetide isolated from the Sargasso Sea
MAHLKNGSKRVLVSAPSSGADKTIVYGVNHNTLTGDELIVSNASCTTNCLAPVAMVLNRALGIKTGYMTTVHSYTGDQPSLDTMHKDLYRGRAASLSMIPTSTGAAKAVSLVLPELEGKLDGSAIRVPTPNVSCIDFKFLTEKVVSAEEINETIKKASEGELRGILGFENRSLVSIDFNHWPASSIFASQETKVLAGGMARILSWYDNEWGFSNRMADTAIKMGSLV

SEQ ID NO: 93973 - protein, 120 aa, Unknown
  Bacterial polypetide isolated from the Sargasso Sea
MRIGINGFGRIGRLVLRALWGRENIEITHINDPLGDAKGAAHLLEYDSVHGRWNKAISNDQNNLNIEGHPISFSQESDFTKVPWKEKGTELILECSGKFKTPQTLNPYFDTLGMKRSCRC

SEQ ID NO: 93974 - protein, 226 aa, Unknown
  Bacterial polypetide isolated from the Sargasso Sea
MRVAINGFGRIGKLVFRAFLEKNLKGVDIVAINELGSLDSSLHLMQYDSIHGKLPIQINKAKDGLKYKKKIIKFFSERDPLNLPWKKLNVDVVLECSGVFASKEKAGAHLNAGAKKVIISAPGSNVDATIVQGVNNQILKKKHKVISNGSCTTNCLAPVAMVLDKGIGIENGFMTTIHSYTGDQRTVDQTHSDLRRARGAAISMIPTSTGAAKALSLVLPKVKRQA

SEQ ID NO: 93975 - protein, 161 aa, Unknown
  Bacterial polypetide isolated from the Sargasso Sea
GYMTTIHSYTGDQPVLDTLHSDYYRARAASLNMIPTSTGAAQAVSLVLPELKGKLDGSAIRVPTPNVSCVDLKCILTNEHSIKEINEAIHKASNTTLDGILAYEDAPLVSSDLNHHPASSIFAGAQTKVLAGGMARVLSWYDNEWGFSNRMLDTATYLGLI

SEQ ID NO: 93976 - protein, 109 aa, Unknown
  Bacterial polypetide isolated from the Sargasso Sea
MSINIGINGFGRIGRMVLRAGINNPNIRFVAINDLVPAENLAYLMKYDSTHGRFPGNVETDGNNILIDGKSIECVSERDPEQLGWGDKGVDYVIESTGLFTTLKKLSFT

SEQ ID NO: 93977 - protein, 227 aa, Unknown
  Bacterial polypetide isolated from the Sargasso Sea
MAIKIGINGFGRIGRMVLRSIIENKRKDIEVVAINNRSNAEVSSFLLAHDTIHGSLKNKISHSAQSISVDGKKISMIQENEISNINWQKYKVDVVLECTGKFNSKEKSAQHLNSGVKKVLVSAPCKGANNIVFGVNHKSLNVKDEVISAASCTTNCLAPVAKVLNDNFVIERGFMTTIHSYTTDQRLLDNSHKDLRRARAAANSMIPTTTGATKSLGDIIPQIKRQS

SEQ ID NO: 93978 - protein, 248 aa, Unknown
  Bacterial polypetide isolated from the Sargasso Sea
MIKVGINGFGRIGRLILRALLENYKGKIQVVGINDLGSVEANAHLIKFDSTHGTLTQEVKTSSEGFQIGDQKIKVFAEKDPAKLPWGKIGADVVLECTGFFLDKASAGKHIEAGAKKVIISAPAKEVDFTVVQGVNSKELKKEHNIISNGSCTTNCLAPVAMVLENTFGIEYGYMTTIHSYTGDQKLLDTLHKDLRRARASGDAMIPTSTGAAKAMSLVLPSLKGKLDGTAIRVPTPNVSLIDLTFVP

SEQ ID NO: 93979 - protein, 225 aa, Unknown
  Bacterial polypetide isolated from the Sargasso Sea
MRIGINGFGRIGRLVFRALWGRPGIELVHVNDPAGDAATAAHLLEFDSVHGRWDRSITSSADGFSVEGSQLTWSSQKDPTAVPWTDRGVEMVLEASGKIKTPETLNPYFDQLGLKRVVVACPVKGEVAGEEALNIVYGINHHLYEPARHKLVTAASCTTNCLAPVVKVVHESFGIEHGMITTIHDITNTQVPIDAFKSDLRRARSGLTSLIPTTTGSAKAIAMIF

SEQ ID NO: 93980 - protein, 276 aa, Unknown
  Bacterial polypetide isolated from the Sargasso Sea
RALYTQNYRQHLQVVAINDLGDSAINAHLLQYDSVHGHFPEEVKVDGESLWIKGDRIAVSAIRNPAELPWKTHQVDVVLECTGLFTERDKAAAHLAAGARKVLISAPAKGADATVVYGVNEQVLTPDMQIISNASCTTNCLAPVAQVLHRELGIEQGLMTTIHAYTNDQNLSDVYHSDLYRARSATQSMIPTKTGAAEAVGLVLPELAGKLTGMAVRVPVINVSLVDLTLQVKRETTAEEVNALLKAASEKSPVLGYNALPLVSCDFNHNPLSSIF

SEQ ID NO: 93981 - protein, 101 aa, Unknown
  Bacterial polypetide isolated from the Sargasso Sea
MVKIGINGFGRIGRLILRALLENYKGKIQVVGINDLGSIETNAHLIKYDSTHGILNQDVKTTSDGFKIGDQNIKVFAEKDPSKLPWGKIGADVVLECTGFF

SEQ ID NO: 93982 - protein, 234 aa, Unknown
  Bacterial polypetide isolated from the Sargasso Sea
GEKATEHLNAGAKKVIISAPTKSPDIKTLVMGVNHKNYDPDKDNIVSNASCTTNCLAPIVKVVLDQYGVEEGLMTTVHAVTATQPTLDGPSKKDWRGGRGSNQNIIPASTGAAKAVGLCIPEIAGKLTGMSFRVPTPNVSVVDLTVKLSKSTTYEDVNASMKSASEGSLKGILGYTDENVVSSDFIGSTYSSIYDAGAGIGLNDKFFKLVSWYDNEMGYSARLIDLVEYMEIRN

SEQ ID NO: 93983 - protein, 249 aa, Unknown
  Bacterial polypetide isolated from the Sargasso Sea
KEINKISNEQFSIEENKVTVTSERNPIDLKWSDKNVDIILECTGVFASKDKAMSHVESGASKVIVSAPCSGADITIVQGVNNKNINLDHQVISNASCTTNCLAPVAFVIDQEFGIENGYMTTIHSYTGDQNTVDTFHKDLRRARAAANNIIPTSTGAAKAVGLVLPHLKGKLDGTAIRVPTPNVSLVDFKFNTKKNISIESLNNKFQEYANNSLKNILGVDRDPKVSSDYNHDSRSSILDLSETTTVSD

SEQ ID NO: 93984 - protein, 160 aa, Unknown
  Bacterial polypetide isolated from the Sargasso Sea
MTVKIAINGYGRIGRNVMRALYESGRTDELQVLAINDLGDANSNAHLTKYDTAHGQFPYSVEARDDALIVNGDEIKVFAERDPEQLPWGELGVDVVLECTGFFAKKELASKHIKAGAKKVVISAPAGTDIDATIVYGVNHDTLSKDDAVISNASCTTNCL

SEQ ID NO: 93985 - protein, 215 aa, Unknown
  Bacterial polypetide isolated from the Sargasso Sea
MVKVGINGFGRIGRLILRALLENYKGKIQVVGINDLGSIETNAHLIKYDSTHGILNHEVKTTGDGFQIGDQNIKVFAEKDPAKLPWGKVGADVVLECTGFFLDKDSAGKHIQAGAKKVIISAPAKEVDFTLVQGVNSKELKKDHSIISNGSCTTNCLAPVAMVLEKTFGITYGYMTTIHSYTGDQKLLDTLHKDLRRARATEGSMIPTSTGAAKA

SEQ ID NO: 93986 - protein, 312 aa, Unknown
  Bacterial polypetide isolated from the Sargasso Sea
CINNDDFNLVSVNDLLDIDHLAYLLKYDSVHGSFDGSVEVSDNKLIINGKPIKITAERDPNNIDWSGMGVEIVAECTGIFTSIDKASSHINSGAKKVVISAPSPDAPMFVMGVNHKEVKSSDTIVSNASCTTNCLAPIAKVLNDNYLIEEGLMTTVHAATATQFTVDGPSKKDFRGGRSSLLNIIPSSTGAAKAVTKVIPSLEGKLTGMAFRIPTANVSVVDLTVRLKKDTSYEEIKKVMKDSSNNELSGILGYCDDLVVSQDFIGDIRTSIFDANAGMELNSNFFKIISWYDNECGYSNKLLDLSKHIYSI

SEQ ID NO: 93987 - protein, 270 aa, Unknown
  Bacterial polypetide isolated from the Sargasso Sea
AFTGETTTGRLIMQYAAQNIIPITLELGGKSPNIFFEDIMDKDDDFLDKCVEGFVMFNLNQGEVCTCPSRALVQESIYDKFMEKCIARTKAVIQDNPLKMETMIGAQASVEQMEKIKSYLDLGKKEGAKVLAGGDVGKLNSGLEKGNYIQPTIFEADNSMRISQEEIFGPVVSVIKFKDEAEALEIANDTLYGLGAGVWTRNGNIAYRMGRAIQAGIVWTNCYHAYPAHSPFGGYKQSGVGRETHKMMLNHYRQNKNLHVSYAEQKLGFF

SEQ ID NO: 93988 - protein, 250 aa, Unknown
  Bacterial polypetide isolated from the Sargasso Sea
DWGVDLVIESTGVFYTDVGASKHLEVGAKKVILTAPGKGDGVGTYVVGVNADTYKHKDYDILSNASCTTNCLAPVVKVLDQTFGINKGLMTTIHSYTGDQRILDNSHRDLRRARAAATNIVPTSTGAAKAVALVYPEMKGKLTGIAMRVPTPNVSAVDFVFESSKSVTTEEVNNALKEASLNSMKGIIKYGDEPLVSSDYAGTNESSIVDSDLTMCIGDNLVKVLAWYDNEWGYSQRVVDLAEIVAKNWE

SEQ ID NO: 93989 - protein, 144 aa, Unknown
  Bacterial polypetide isolated from the Sargasso Sea
MKIGINGFGRIGRLVFRALWDRADIEITHINEIAGDANAAAHLLEFDSVHGRWGKDIKVKEEEIIIDGKELTYTSFKNYLDVPWEKSSVDIILECTGKNKKPDKLNPYFDSLGMKRVIVACPVKGIVAKAESLNVVYGINQSLY

SEQ ID NO: 93990 - protein, 265 aa, Unknown
  Bacterial polypetide isolated from the Sargasso Sea
YHNIKVFAEKDPSNIPWSKVGADVVLECTGIFLDKSSAEKHIKGGAKKVIISAPGKEVDFTIVQGVNSKELKKEHNIISNGSCTTNCLAPVAMVLDKNFGINYGYMTTIHSYTGDQKLLDTLHKDLRRARSTEGAMIPTSTGAAKAMSLVIPSLKGKLDGTAIRVPTPNVSLIDFTLVTEKEVSVETINDAMDQAAKGYLKGILNINKKPLVSKDFNHNPHSSIFDVTQTQVIKGKFSRVLSWYDNEWGFSNRMCDTAIQISKLI

SEQ ID NO: 93991 - protein, 247 aa, Unknown
  Bacterial polypetide isolated from the Sargasso Sea
GVDIVIESTGIFRQKSQLEDHLIAGAKKVVLTVPAKDEIDYTVVLGVNDQGLIPEHKIVSNASCTTNCLAPMAKVLNDEFGIELGVINTIHAYTNDQRLADVPHSDWRRSRAAAENVIPTTTGAARAVGKVLPELNGKLDGIAMRVPVPDGSVVDFNIRLKKDVTVDQINDAVRSAADNGPLKYVLDYSTLPVVSTDIIGNPHSSIFDAPFTRVVEGNFVKTLNWYDNEWGYSNRVADLLSILYKLG

SEQ ID NO: 93992 - protein, 91 aa, Unknown
  Bacterial polypetide isolated from the Sargasso Sea
MVKIGINGFGRIGRLILRALLENFKGKIQVVGINDLGSVEANAHLIKYDSTHGILNNDVKTTKEGFQIGDQNIKVFAERDPANLPWGKIGA

SEQ ID NO: 93993 - protein, 259 aa, Unknown
  Bacterial polypetide isolated from the Sargasso Sea
MAIRIAINGFGRIGRMVVREANKNPNVEVVAINDLVPSDNLAYLLKYDSTHGRFNGEVVVGQNNIVINGKNIECLSEKSPKDLPWGDLEIDYVIESTGLFTAGEKASEHLKAGAKKVIISAPTKSPEIKTLVMGVNHEKYDPNKDNIVSNASCTTNCLAPIVKVVLDKYGVEEGLMTTVHAVTATQPTLDGPSKKDWRGGRGSNQNIIPASTGAAIAVGLCIPEIAGKLTGMSFRVPTPNVSVIDLTVKLSISTNYEDI

SEQ ID NO: 93994 - protein, 134 aa, Unknown
  Bacterial polypetide isolated from the Sargasso Sea
MIKVGINGFGRIGRLVLRAILENYKSKIQVVAINDLGSIEINAHLIKYDSTHGTINEDIQTSSDGFKISNQNIKVFGERDPANIPWGKVGADIVLECTGIFLDKKSSEKHIKAGAKKVIISAPGKEVDFTIVQG

SEQ ID NO: 93995 - protein, 153 aa, Unknown
  Bacterial polypetide isolated from the Sargasso Sea
NDQRLADVPHSDWRRSRAAAENIIPTTTGAAGAVGKVLPELEGKLDGIAMRVPVPDGSVVDGVFRLKKDTTVKDINELVLDISEKESMKNVVEYSTLPVVSTDIIGNPHSSIFDAPFTKVIDGSLVKTLNWYDNEWGYSNRVADLVNILSRFN

SEQ ID NO: 93996 - protein, 298 aa, Unknown
  Bacterial polypetide isolated from the Sargasso Sea
MSIKVGINGFGRIGRLALRAAWSWPEFEFVQINDPAGDAATHAHLINFDSVHGRWNNEARAEGDDVVIGGKRIKVTANKAIADTDWSGCDLVIEASGKMKTVAVLQAYLDQGVKRVVVCAPVKEKGALNVVMGVNQHLFDPAQHRIVTAASCTTNCLAPVVKVIHENLGIRHGSITTIHDLTNTQSILDQPHKDLRRARASGMSLIPTTTGSATAIAEIFPELRGKLNGYAVRVPLANASLTDCVFEVERATTADEVNALLKAAADGPLKNILGYEVRPLVSIDYRTDPRSSIIDALS

SEQ ID NO: 93997 - protein, 101 aa, Unknown
  Bacterial polypetide isolated from the Sargasso Sea
MVKVGINGFGRIGRLILRAILENYKDKIQVVAINDLGSIETNAHLIKYDSTHGIINDEITTSKDGFKISNQNIKVFSERDPENIPWGKAGADIILECTGIF

SEQ ID NO: 93998 - protein, 189 aa, Unknown
  Bacterial polypetide isolated from the Sargasso Sea
PASNADLTMVLGVNENEYDPKNHKILSNASCTTNCAAPLVKVLHDNFGINQGLMTTVHSYTNDQKVLDGNHKDLRRARTAAGNIIPTSTGAAKTCAVVMPELQGKVHGVALRVPTQTVSVVDFVATLDKKVTSEDINQAYKNAAETSMEGIIEYCDEPLVSSDFRGSPYSCIFDSLSTMVLGNSMVKIL

SEQ ID NO: 93999 - protein, 202 aa, Unknown
  Bacterial polypetide isolated from the Sargasso Sea
YGVNHNKLTKDHLIVSNASCTTNCLAPIAMVINQGVGISQGFMTTIHSYTGDQPTLDTMHSDMYRARAAAGNMIPTSTGAAKAVGLVLPELNGKLDGVSMRVPTQNVSVVDFKFNAVKSTSVEEINNLIKKASNNELKNILGYTDEPLVSSDFNHDSRSSIFHMDQTKVMDNSFVRVLSWYDNEWGFSNRMSDTAVAMGKTI

SEQ ID NO: 94000 - protein, 179 aa, Unknown
  Bacterial polypetide isolated from the Sargasso Sea
LAPIVKVVLDNYGIEEGLMTTVHAVTATQPTLDGPSKKDWRGGRGGHQNIIPASTGAAKAVGLCIPEIAGKLTGMSFRVPTPNVSVVDLTVKLLKSTTYEHVNSSMKSASEEGLKGILGYTDEDVVSSDFIGSTYSSIYDAGAGIGLNDKFFKLVSWYDNEMGYSARLIDLVEYMETQN

SEQ ID NO: 94001 - protein, 177 aa, Unknown
  Bacterial polypetide isolated from the Sargasso Sea
MVKVGINGFGRIGRLILRALLENYKGKIQVVGINDLGSIEANAHLIKFDSTHGTLNHDVRITKDGFQIGDQNIKVFAERDPSKLPWGKIGADVVLECTGFFLDKKSAGKHIEAGAKKVIISAPAKEVDFTVVQGVNSKDLKKEHNVISNGSCTTNCLAPVAMVLENTFGIEYGYMTT

SEQ ID NO: 94002 - protein, 192 aa, Unknown
  Bacterial polypetide isolated from the Sargasso Sea
MGNVAINGFGRIGRSILRIIVENNSDLNVVAINDLGNYENLAYLLKHDSVMGILDSDVKVDGDNLLVGDRVIKLTSIKDPAELPWNELDVDVVIESTGIFRDNESLNKHISAGAKKVLLTVPPKDEIDATIVLGVNDNDLKSDDKIVSNASCTTNCLAPIAKVLDDNFGIKSGLMTTVHAYTNDQALAETTH

SEQ ID NO: 94003 - protein, 74 aa, Unknown
  Bacterial polypetide isolated from the Sargasso Sea
KEAANGPMKGFLEYTEDQVVSTDFVGDTHSSIFDAKAGIMLSSTFVKLVSWYDNEYGYSNRVVDLINYMASKDA

SEQ ID NO: 94004 - protein, 290 aa, Unknown
  Bacterial polypetide isolated from the Sargasso Sea
MTLRVAINGFGRIGRNFMRCWLSRGAYTNIEVVGINVTSDPKTNAHLLKYDSVLGQLDGVDIQYTDDTFVINNKTIKCFSDRNPLNLPWKDWGVDLVIESTGVFNTDVGASKHLEVGAKKVILTAPGKGDGVGTYVVGVNADTYKHQDYDILSNASCTTNCLAPVVKVLDQTFGINKGLMTTIHSYTGDQRILDNSHRDLRRARAAATNIVPTSTGAAKAVALVYPEMKGKLTGIAMRVPTPNVSAVDFVFESSKSVTTEEVNNALKEASLSSMKGIIKYGDEPLVSSDY

SEQ ID NO: 94005 - protein, 232 aa, Unknown
  Bacterial polypetide isolated from the Sargasso Sea
MVKIGINGFGRIGRLILRALLENYKDKIQVVAINDLGSIETNAHLIKYDSTHGTLNHDVKTSKDGFEISNQKIKVFSEKDPGKIPWGKVNADVVLECTGRFLDKPSAQNHIKGGAKKVIISAPAKEVDLTIVQGVNSKELKKDHNIISNGSCTTNCLAPVAMVLENNFGIEYGYMTTIHSYTGDQKLLDTLHKDLRRARSTEGAMIPTSTGAAKALSLVLPSLKGKLDGTAI

SEQ ID NO: 94006 - protein, 168 aa, Unknown
  Bacterial polypetide isolated from the Sargasso Sea
GINQGYMTTVHAFTGDQSILDSLHSDERRARASSVSMIPSSTGAAKAVGLVLPELQGRLDGTAVRVPTPNVSMIDLVFNSKKKIDANTINNAMIKASKGELKGVLGVEDKPLVSIDYNHNPLSSIFDLSQTQVIKGRLGRILSWYDNEWGFANRMGDTASLIGKLIKS

SEQ ID NO: 94007 - protein, 173 aa, Unknown
  Bacterial polypetide isolated from the Sargasso Sea
MTVKIAINGYGRIGRNVLRALYESGRTDELQVLAINDLGDANSNAHLTKYDTAHGPFPYSVEARDDALVVNGDEIKVFAERDPEQLPWGDLGVDVVLECTGFFAKKELASKHINAGAKKVVISAPAGTDIDATIVYGVNHDTLSKDDAVISNASCTTNCLAPLVKPIHESIGL

SEQ ID NO: 94008 - protein, 291 aa, Unknown
  Bacterial polypetide isolated from the Sargasso Sea
ETNLHLLKYDSIHGTLADKMEKINSDLFKINEKQIKKFSSKDPTDIPWGELDIDLVLECTGKFNDKKLSVKHINAGAKKVLVSAPAKGVDITAVFGVNHLEIKPDHKVISNASCTTNALAPLAMVLNDTVGIDTAFMTTIHSYTGDQPTLDRNHKDLYRSRSAAQSIIPTTTGAAISVGEVIPQLKGKIDGIAMRVPIPNVSAIDLKFTTNKDTSINQINEILVQASKNQFQNILNTTNDKLVSVDINHDSHSAVIALDQTRVTNKKLVRVMAWYDNEWGFSQRMCDMARH

SEQ ID NO: 94009 - protein, 268 aa, Unknown
  Bacterial polypetide isolated from the Sargasso Sea
RSIIESKRKDINVVAINDLAPVDTNAFLLANDTVHGPLNEKISVKKNKMTIGRKTISVLNERDPQKLPWKKMKIDVALECTGLFTSKEKASMHIKAGAKKVLVSAPCSEADKTIVYGVNEQEITRNDLVVSNASCTTNCLAPVVKVLHEKFGIVHGYMTTIHAFTGDQSVLDTFHPDLRRARAASMSMIPTSTGAAKAVGLVMPELSGKLDGTAIRVPTPNVSLIDFKFVSKKTMKVDSVNKAMTAASRSNKLKDILNVNSEPLVRQI

SEQ ID NO: 94010 - protein, 191 aa, Unknown
  Bacterial polypetide isolated from the Sargasso Sea
MRIGINGFGRIGRSVFRVLNNRDDIDVVAINDIFDKDALTYLLKYDTVMGRFPGDISLDSDILSAGNQKVKLIAERVPEKLPWGELGVDIVIESTGIFRMKSQLESHLNAGAKKVILTVPAKDEIDYTVVLGVNDEGLKPEHRIVSNASCTTNCLAPMAKVLNESFGIELGVITQYMLIQMIRDWLMSLIL

SEQ ID NO: 94011 - protein, 228 aa, Unknown
  Bacterial polypetide isolated from the Sargasso Sea
GAHLSAGAKKVIISAPAKDVDATVVYGVNHDVITKDMTIISNASCTTNCLSPIAKPLNDALGIESGLMTTIHAYTNDQRLSDVYHTDVRRARAAAMSMIPTQTGAAAAVGLVVPELKGKFDGLAVRVPTLNVSLVDLSFIAGRNTTVEEVNDIIRKAAAQSPMNQVLAVNDLPLVSVDFNHNPMSSIFDASETRVNGRLVKVMAWYDNEWGFSNRMLDNTVELMKFSK

SEQ ID NO: 94012 - protein, 228 aa, Unknown
  Bacterial polypetide isolated from the Sargasso Sea
MPTKIGINGFGRIGRQVLRAIRERHPNTLEVVAINDLTDTKTNAHMFKYDTNYGVSPETVEFTENSIIVGGYPISVLAERDPSNLPWGKLGVDIVIESTGFFTSGDKASGHLKGGAKKVIISAPAKGEDITMVMGVNENQYQPDKHNVLSNASCTTNCIAPMAKILDDEFGINHGLMSTIHSYTNDQKVLDQVASDLRRARAAAMNIIPTSTGAAKAVGLVLPHLNGK

SEQ ID NO: 94013 - protein, 245 aa, Unknown
  Bacterial polypetide isolated from the Sargasso Sea
MKIKVGINGMGRIGRMIVRSIIENNYSDFDIKHINNRTNTETCSNLLKYDSIHGKFDADIEFDENNLIIDKNKISFTQETDINKINWKQFDVDYVFECTGKFNSKDKLIPHLNNGAKKIIVSAPCKNADKTVVFGVNENKIKKEDNIISAASCTTNCLAPVANVLNKEFEIEKGFMTTIHAFTSDQRILDNSHKDPRRARAAGQSIVPTSTGASKSIGEIIPELKGKLEGVAMRVPTPNVSLIEL

SEQ ID NO: 94014 - protein, 163 aa, Unknown
  Bacterial polypetide isolated from the Sargasso Sea
GVINTIHAYTNDQRLADVPHSDWRRSRAAAENVIPTTTGAARAVGKVLPELNGKLDGIAMRVPVPDGSVVDFNVRLEKDVTVDQINDAVHSSAESGPLKNVLEYSTMPVVSTDIIGNPHSSIFDAPFTRVIEGNFVKTLNWYDNEWGYSNRVADLLGKLYSLD

SEQ ID NO: 94015 - protein, 169 aa, Unknown
  Bacterial polypetide isolated from the Sargasso Sea
NNSIGINYGYMTTIHAYTGDQNVQDTLHSDLRRSRSAAQSMIPTSTGAAKAVGLVLPELKGKLDGTAIRVPTANVSLIDFKFLAKKNTSVDEINKLIKKESNSKLKGILEINDKPLVSCDFNHNSASSIFDLTQTQVMEKRFCRVLSWYDNEWGFSNRMLDTAAAMGKL

SEQ ID NO: 94016 - protein, 220 aa, Unknown
  Bacterial polypetide isolated from the Sargasso Sea
KVILTVPAKDQIDYTIVLGVNDEGLKPEHRIVSNASCTTNCLAPMAKVLNESFGIELGVINTIHAYTNDQRLADVPHSDWRRSRAAAENVIPTTTGAARAVGVVLPELNGKLDGIAMRVPVPDGSVVDFNVRIKTDVTVDQVNDAVRSASESGSLKNILEYSTLPVVSSDIIGNSHSSIFDAPFTRVVEGNYIKTLNWYDNEWGYSNRVVDLVSMLGQVG

SEQ ID NO: 94017 - protein, 228 aa, Unknown
  Bacterial polypetide isolated from the Sargasso Sea
MRIAINGFGRIGKLVFRAFLEKKIKNIEIVAINELGTIESSIHLLKFDSIHGIVPLNISKTKKGIKVGNKNINFYAEKDPNNLPWKSLKIDVVLECSGVFTSKEKAMAHINAGAKKVLISAPGTNVDKTIVQGVNNIQLNKKHNIISNGSCTTNCLAPLAMVLNKGIGIESGFMTTIHSYTGDQRTVDQAHQDLRRARAAAESMIPTSTGAAKALSLVLPELEGKLDG

SEQ ID NO: 94018 - protein, 276 aa, Unknown
  Bacterial polypetide isolated from the Sargasso Sea
MVKVAINGFGRIGKLVFRAIIEKNLKNVQIVAINELGSLESSLHLVNFDSTHGELKTKLYKNNRGIKYNNKNIIFYSERDPAKLPWKKLGVDVVLECSGVFTSKEKSQSHILAGAKKVIISAPAQNVDATIVQGVNNNILNKKHNIISNGSCTTNCLAPVAMVLDEAVGIEAGFMTTVHSFTGDQRTLDQTHSDLRRARTATSSMIPTSTGAAKALSLVLPKLKGKLDGTAIRIPTPNVSLIDFTFSSKKKVSVDLINHAMIKASKTKNLKGILTV

SEQ ID NO: 94019 - protein, 252 aa, Unknown
  Bacterial polypetide isolated from the Sargasso Sea
LPWKKLGVDVVLECSGVFTSKEKSHSHILAGAKKVIISAPAKNVDATIVQGVNNNILNKKHNIISNGSCTTNCLAPVAMVLDKVLGIEAGFMTTVHSFTGDQRTLDQTHSDMRRARTATSSMIPTSTGAAKALSLVLPKLKGKLDGTAIRIPTPNVSLIDFTFSSKKKASVDLINNSMIKASKTKDLKGILTVNNLPLVSIDFNHNPSSSIFDLTQTQVVRDKFCRVLSWYDNEWGFSNRMIDTLISLKKFL

SEQ ID NO: 94020 - protein, 119 aa, Unknown
  Bacterial polypetide isolated from the Sargasso Sea
KAVGKVIPELNGKLTGMAFRVPTPNVSVVDLTVNLAKPASYDEICAAMKEASEGELKGIMGYTEDAVVSNDFLGDARTSVFDATAGIALTDTFVKLVSWYDNEWGYSNKVLDLVAHISK

SEQ ID NO: 94021 - protein, 74 aa, Unknown
  Bacterial polypetide isolated from the Sargasso Sea
MVKIGINGFGRIGRLILRALLENYKDKIQVVAINDLGSIETNAHLVQYDSTHGILKHDVKISKDGFEISNQKIK

SEQ ID NO: 94022 - protein, 232 aa, Unknown
  Bacterial polypetide isolated from the Sargasso Sea
MTVRIAINGFGRIGRMVVREASKNSNVEIVAINDLVPSNNLAYLLKYDSTHGRFKGDVVAGQNSIGINGKNIECLSEKKPSDLPWSDLNIDYVIESTGLFTTGEKAAEHLKAGAKKVIISAPTKSPEIKMFVMGVNHEKYDPGKDNIVSNASCTTNCLAPIVKVVLDKYGIEEGLMTTVHAVTATQPTLDGPSKKDWRGGRGATQNIIPASTGAAKAVGICIPEIAGKLTGM

SEQ ID NO: 94023 - protein, 273 aa, Unknown
  Bacterial polypetide isolated from the Sargasso Sea
MTVRVGINGFGRIGRLVLRAGWNTPEIDFCHINEIKGGAKCAAHLLEFDSVQGRFEHHIHAHNDKITLDGHTIGFSEFDTPEGFDWGSKNIDIVLECSGQFRSTKQLEKYFQRKVNKVIVAAPVKTAGALNIVYGINHKEYDPDRDHILTAASCTTNCIAPIIKVVHENFKIKHGSITTIHNVTNTQVMVDAPHADLRRARSGLNSLIPTTTGSATAITLIYPELEGRLDGHAVRVPTLTGSMTDCVFEIERASSAREINSYFEAASKKLLRG

SEQ ID NO: 94024 - protein, 329 aa, Unknown
  Bacterial polypetide isolated from the Sargasso Sea
FGRIGRSILRIIIEQDIDINIVAINDLGDYENLAYLFKHDSIMGILNADISIQNDIFKINDREIKLISISDPSKLPWDELNVDIVVESTGIFTNKDSLNKHLKAGAKKVLLTVPPKDEIDATIVLGVNDETLNNDSKLISNASCTTNCLAPIAKVLNDNFTIISGLMTTVHAYTNDQALAETTHSDFRRGRNATQNIIPTSTGAAKAVGMVMPELDGKLDGMAMRVPVPNGSVVDLIVELEKSVTVNEINKVVKKASENELKGILSYSDIPLVSTDILGNPNSSIYDATSTEILENKHVRVVCWYDNEWGYSNRVVDIVKKLIIENANG

SEQ ID NO: 94025 - protein, 103 aa, Unknown
  Bacterial polypetide isolated from the Sargasso Sea
MVKIGINGFGRIGRLILRALLENYGDKIKVVAINDLGSIETNAHLIKYDSTHGTLNHDVKTSKDGFEISNQKIKVFAEKDPGKIPWGKVGADVVLECTGRFLD

SEQ ID NO: 94026 - protein, 63 aa, Unknown
  Bacterial polypetide isolated from the Sargasso Sea
KGIMGYTEDAVVSNDFLGDARTSVFDATAGIALTDTFVKLVSWYDNEWGYSNKVLDLVAHISK

SEQ ID NO: 94027 - protein, 192 aa, Unknown
  Bacterial polypetide isolated from the Sargasso Sea
KNDLIISAASCTTNCLAPIAYVLNKEFKIEKGFMTTIHSYTSDQRLLDNSHKDLRRARSAAQSMVPTSTGASKSLGEIIPELKGKIEGLAIRVPTPNVSLVDLVFDSKEKISIKKINDCFKKASKKELKEILEVTEEKLVSIDFNHNPNSAIVDLSLTSVIGNNMGKVSAWYDNEWGFASRMCDLAEYIHKN

SEQ ID NO: 94028 - protein, 208 aa, Unknown
  Bacterial polypetide isolated from the Sargasso Sea
MSIKVGINGFGRIGRQVLRISLDRSDIEVVAINDIADLKTCFQLLKYDSVFGQLNREVNILDDGLQVDGKNIKFFSEMSPSEIDWTSMKCDIVIESTGIFTTKEKASMHIGGSVKKVVISAPASGQIDLTTVMGANDELYDPSSHNVVSNASCTTNCLAMIVKVLRDNFGLKNGHMTTVHSYTNDQRIVDSPHKDIRRGRAGAFIMIP

SEQ ID NO: 94029 - protein, 252 aa, Unknown
  Bacterial polypetide isolated from the Sargasso Sea
MRIAINGFGRIGKLVFRAFLEKNLKGAEIVAINELGSLDSSLHLMQFDSIHGKLPVDIKKTKDGLKHKNKTIKFFSERDPVNLPWKKLKVDIVLECSGVFASKEKSNSHIIAGAKKVIISAPASNVDATIVQGVNNQILTKKHNIISNGSCTTNCLAPIAMILDNGVGIESGFMTTIHSYTGDQRTVDQNHSDLRRARGAAISMIPTSTGAAKALSLVLPKMKGKLDGTAIRVPTPNVSLIDFTFTSKKKTT

SEQ ID NO: 94030 - protein, 281 aa, Unknown
  Bacterial polypetide isolated from the Sargasso Sea
PENVELNDDILAAGDQQVKLISERIPENLPWKDLGIDIVVESTGIFRQREQLQKHLDAGCKKVILTVPPKDEIDYMVVLGVNHDGLKKEHQIISNASCTTNCLAPMAKVLNDNFGIELGVINTIHAYTNDQRLADVPHSDWRRSRAAAENVIPTTTGAARAVGKVLPELDGKLDGIAMRVPVPDGSVVDLNVRLKQDVTINMINDAVLDASNQDSMSDVLEYSNLPVVSTDIIGNKHSSIFDAPFTRVIDKTFVKTLNWYDNEWGYSNRVVDLMTVLGKFL

SEQ ID NO: 94031 - protein, 226 aa, Unknown
  Bacterial polypetide isolated from the Sargasso Sea
MAIQVGINGFGRIGRLVFRAAMGQGGIDVVAVNDLTDPGTLAHLLKYDSTHGKYPGEVSAGDGSLVVDGKEIKVLSERDPASLPWGDLGAKIVVESTGFFTDRDSAGKHLEGGAEFVIISAPATGDLPTLVMGINDGVLTDDDRVVSNASCTTNCLAPMVKVLNDNFGVEHGLMTTIHAYTGDQKMLDAPHSDLRRARSAAVSMIPTTTGAASAVGKVIPELNGKL

SEQ ID NO: 94032 - protein, 261 aa, Unknown
  Bacterial polypetide isolated from the Sargasso Sea
RLIMQYAAQNIIPITLELGGKSPNIFFEDIMDKDDDFLDKCVEGFVMFNLNQGEVCTCPSRALVQESIYDKFMEKCIARTKAVIQDNPLKMETMIGAQASVEQMEKIKSYLDLGKKEGAKVLAGGDVGKLNSGLEKGNYIQPTIFEADNSMRISQEEIFGPVVSVIKFKDEAEALEIANDTLYGLGAGVWTRNGNIAYRMGRAIQAGIVWTNCYHAYPAHSPFGGYKQSGVGRETHKMMLNHYRQNKNLHVSYAEQKLGFF

SEQ ID NO: 94033 - protein, 267 aa, Unknown
  Bacterial polypetide isolated from the Sargasso Sea
MVKVGINGFGRIGRLILRALLENYKGKINVVGINDLGSIEANAHLIKFDSTHGTLTQEVKTSSDGFQIGDQNIKVFAERDPAKLPWGKIGADVVLECTGFFLDKTLAGKHISAGAKKVIISAPAKEVDFTVVQGVNSKDLKKEHNIISNGSCTTNCLAPVAMVLENAFGIEYGYMTTIHSYTGDQKLLDTLHKDLRRARASGDAMIPTSTGAAKAMSLVLPSLKGKLDGTAIRVPTPNVSLIDLTFVPKKEVTAESINEAMSKAAIG

SEQ ID NO: 94034 - protein, 182 aa, Unknown
  Bacterial polypetide isolated from the Sargasso Sea
MSETLPPLPLSPLTRPVPRAPAASFRVSADASDDVSDVPKLRVGINGFGRIGRLVMRACLERPDVEVVAVNDPFVAADYMAYMFKYDTVHGKFLGEAKTSAAVDCASGEECPLEFSVNGAPVAVFAERDPENIPWGDLGVDFVVESTGVFTSKEKAQKHIKAGAKKVVISAPSPDAPMFVMG

SEQ ID NO: 94035 - protein, 271 aa, Unknown
  Bacterial polypetide isolated from the Sargasso Sea
IVINGKAIPCTQNKATQDTDWSHCDVVIEASGKIKTKALLQAYLDQGVKRVVVTAPVKEEGVLNIVMGVNDYLYDKAIHPIVTAASCTTNCLAPVVKVIHEKIGIKHGSMTTIHDITNTQTILDAPHKDLRRARACGISLIPTTTGSATAITHIFPELKGKLNGHAIRVPLANASITDCVFEVACGTTVEEVNQLLKQAADTELKGIMGYEERPLVSVDYKTDPRSSIIDALSTMVVNDTQVKLYVWYDNEWGYANRTAELARKVGLADKE

SEQ ID NO: 94036 - protein, 189 aa, Unknown
  Bacterial polypetide isolated from the Sargasso Sea
LVISAASCTTNCLAPIAYVLNKEFEIKKGFMTTIHSYTTDQRLLDNSHKDPRRARSAGQSMVPTSTGASKAIGEIIPELKGKLEGLAIRVPTPNVSLIDLVFNSKSKLTVKKINDSFTKASKKELKNILYATDEKLVSIDFNHNPNSSIVDLSLTNVVGDDMGKVSAWYDNEWGFASRMCDLAEYIHKI

SEQ ID NO: 94037 - protein, 282 aa, Unknown
  Bacterial polypetide isolated from the Sargasso Sea
GVDIHILMNTFVINNKTIKCFSDRNPLNLPWKDWGVDLVIESTGVFNTDVGASKHLDVGAKKVILTAPGKGDGVGTYVVGVNADKYKHNDYDILSNASCTTNCLAPVVKVLDQTFGINKGLMTTIHSYTGDQRILDNSHRDLRRARAAATNIVPTSTGAAKAVALVYPEMKGKLTGIAMRVPTPNVSAVDFVFESSKSVTVEEVNNALKEASLSSMKGIIKYGDEPLVSSDYAGTNESSIVDSDLTMCIGDNLVKVLAWYDNEWGYSQRVVDLAEIVAKNWE

SEQ ID NO: 94038 - protein, 148 aa, Unknown
  Bacterial polypetide isolated from the Sargasso Sea
MKVAINGFGRIGKLVLRAFLEKKLKGVDVVAINELGSLDSSLHLIKYDSTHGRLPVEIKKTKDGLKYKNKKIKFFSERDPINLPWNKLKVDVVLECSGVFSSKEKASYHISAGAKKVIISAPGSNVDATIVQGVNNHILSKKHQIVSN

SEQ ID NO: 94039 - protein, 230 aa, Unknown
  Bacterial polypetide isolated from the Sargasso Sea
LQKHLDAGCSKVILTVPPKDEIDYMVVLGVNDKGLTKEHQIISNASCTTNCLAPMAKVLNDNFGIELGVINTIHAYTNDQRLADVPHSDWRRSRAAAENVIPTTTGAARAVGKVLPELNGKLDGIAMRVPVPDGSVVDLNVRLKQDVTINMINEAVLEASNDGSMSNVLEYSNLPVVSTDIIGNKHSSIFDAPFTRVIDNNFVKTLNWYDNEWGYSNRVVDLMAILGKLL

SEQ ID NO: 94040 - protein, 77 aa, Unknown
  Bacterial polypetide isolated from the Sargasso Sea
MTVRVGINGFGRIGRNFFRAIQKQGADVEIVAVNDLGDQATMAHLLKYDSVLGNLSNDIAAVDGGISIDDKVFEGPV

SEQ ID NO: 94041 - protein, 124 aa, Unknown
  Bacterial polypetide isolated from the Sargasso Sea
MIRVAINGFGRIGRNVFKIALENKNIEIVAINDLTEPKTLAHLLKYDSVHGRFNGEINASENGIIVNGKEIKIYSIRNPKELPWKELNVDVAIEATGIFASGKSEKGGYLDNIDAGAKKVILTV

SEQ ID NO: 94042 - protein, 299 aa, Unknown
  Bacterial polypetide isolated from the Sargasso Sea
TPASIMVMMELIGDLLPPGVVNIVSGFGLEAGKPLASSKRVAKVAFTGETTTGRLIMQYAAQNIIPITLELGGKSPNIFFEDIMEKDDDFLDKCVEGFVMFNLNQGEVCTCPSRALVQESIYDKFMERCIKRTKAVVQDNPLKMETMIGAQASVEQVEKIKSYLDLGKKEGAKVLTGGSQAKLNSGLEKGNYIQPTIFEAKNNMRISQEEIFGPVVSVIKFKDEADALRIANDTLYGLGAGVWTRNGNIAYRMGRAIQAGIVWTNCYHAYPAHSPFGGYKQSGVGRETHKMMLNHYRQN

SEQ ID NO: 94043 - protein, 248 aa, Unknown
  Bacterial polypetide isolated from the Sargasso Sea
VAEISNSQYSYNIPEPLGVVGQIVPWNFPLLMATWKLAPALAAGNCSVLKPAEQTPASIMVMMELIGDLLPPGVVNIVSGFGLEAGKPLASSKRVAKVAFTGETTTGRLIMQYAAQNIIPITLELGGKSPNIFFEDIMDKDDDFLDKCVEGFVMFNLNQGEVCTCPSRALVQESIYDKFMEKCIARTKAVVQDNPLKMETMIGAQASIEQMEKIKSYLDLGKKEGAKVLAGGNTAKLNSGLEKGNYIE

SEQ ID NO: 94044 - protein, 166 aa, Unknown
  Bacterial polypetide isolated from the Sargasso Sea
MTVKIAINGYGRIGRNVMRALYESGRTDELQVLAINDLGDANSNAHLTKYDTAHGQFPYSVEARDDALIVNGDEIKVFAERDPEQLPWGELGVDVVLECTGFFAKKELASKHIKAGAKKVVISAPAGTDIDATIVYGVNHDTLSKDDAVISNASCTTNCLCSHCQT

SEQ ID NO: 94045 - protein, 154 aa, Unknown
  Bacterial polypetide isolated from the Sargasso Sea
MGDQRTVDQTHSDFRRARGAAISMIPTSTGAAKALSLVLPKLKGKLDGTAIRVPTPNVSLIDLTFTSKKKTSVEEINKLMIQASKTKNLKNILTTNELPLVSIDFNHNSSSSVFDLTQTQVLNGKFCRVLSWYDNEWGFSNRMIDTMLDFKKLL

SEQ ID NO: 94046 - protein, 201 aa, Unknown
  Bacterial polypetide isolated from the Sargasso Sea
MTITVGINGFGRIGRCTLAHIAQSGRNDVQVVKVNATGPLETAAHLMRYDSVHGRFGHDIKIGEGTMDLGRGPMQMFSTYDMDELDWSGCDVVMECTGNFNDGLKANKHFERGAKKVLLSAPGKNVDKTIVYGVNHRDLAANDNMVSNGSCTTNCLAPLAKVLNDAIGIESGIMTTIHSYTGDQPTLDRRHNDLYRARAAA

SEQ ID NO: 94047 - protein, 227 aa, Unknown
  Bacterial polypetide isolated from the Sargasso Sea
HIFSAGVKKVIISAPVKDKDALNLVYGINHDLYDGSQNLITAASCTTNCLAPIVKVIHENLGIKHGSITTIHDVTNTQTIVDRPSKDMRRARSALNNLIPTTTGSAKAITMIYPELKGKLNGHAVRVPLLNASLTDCVFEVERATSAKEVNALFEEASNKSLKGILGFEKRPLVSSDYTNDPRSSIVDGLSTMVVNKTQVKVYAWYDNEWGYSCRLGDITRMVAGSL

SEQ ID NO: 94048 - protein, 283 aa, Unknown
  Bacterial polypetide isolated from the Sargasso Sea
MNVAINGFGRIGRSVFRILNSQKNIDVVAINDIADNEAMAYLLKYDTVMGPFKDSVEINGDILKTSYNEIKMLAEKEPSHLPWNEMEVDVVIESTGIFRTKKQLDDHIKAGAKRVVLTVPAKDEIDYTLVIGVNDKGLNDSHKIISNASCTTNCLAPMAKILNDNFGIEHGVINTIHAYTNDQRLADVPHSDWRRSRAAAENIIPTTTGAARAVGKVLPELNGKLDGIAMRVPVPDGSVVDSVFKLEKSVTIDEINNVVKAAADAEDMKSVVEYSNLPVVSTD

SEQ ID NO: 94049 - protein, 142 aa, Unknown
  Bacterial polypetide isolated from the Sargasso Sea
DFRRARTASVSMIPTSTGAAKALGLVLPKLKGKLDGSAIRVPTPNVSLIDFKFISKKTTSIENINKEMISASKNKNLKGILTVNKQPLVSIDFNHNSSSSIFDLTQTKVLNNKFCRILSWYDNEWGFSNRMIETLLNLKKFI

SEQ ID NO: 94050 - protein, 153 aa, Unknown
  Bacterial polypetide isolated from the Sargasso Sea
MRIAINGFGRIGKLVLRAFLEKKFQNVNIVAINELGSLDSSIHLLKYDSVHGKIPSKILKTKNGIKIGGNNINFYSEKDPNNLPWKSLKVDVVLECSGVFTSKEKAMAHINAGAKKVIISAPAINVDKTIVQGVNNQQLTKKHNIISNGSCTT

SEQ ID NO: 94051 - protein, 119 aa, Unknown
  Bacterial polypetide isolated from the Sargasso Sea
MVKVGINGFGRIGRLILRALLENYKGKIQVVGINDLGSIEANAHLIKFDSTHGTLNHDVKTTKDGFQIGDQNIKVFAERDPSKLPWGKIGADVILECTGFFLDKKSAGKHIEAGAKKVI

SEQ ID NO: 94052 - protein, 156 aa, Unknown
  Bacterial polypetide isolated from the Sargasso Sea
MVKVGINGFGRIGRLILRAILENYKDKIQVVAINDLGSIETNAHLIKYDSTHGIINDEIITSKDGFKISNQNIKVFSERDPENIPWGKAGADIVLECTGIFLDKKTSEKHLKGGAKKVIISAPGKEVDFTIVQGVNSKELKKDHNIISNGSCTTNC

SEQ ID NO: 94053 - protein, 197 aa, Unknown
  Bacterial polypetide isolated from the Sargasso Sea
MTVRIAINGFGRIGRMVIREANKKPNFEIVAINDLVPSENLAYLLKYDSTHGRFNGEVVTGQNSIVINGKKIVCLSEKNPGNLPWNDLEIDYVIESTGLFTASEKASEHLKAGAKKVVISAPTKSPEIKTLVMGVNHKIYDPSIDNIVSNASCTTNCLAPVVKVILEKYGIEEGLMTTVHAVTATQPTLDGPSKKDW

SEQ ID NO: 94054 - protein, 316 aa, Unknown
  Bacterial polypetide isolated from the Sargasso Sea
GRIGRMIVRSIFENYNKKIQIKHINNKSNIEICANLLKNDSIHGKFNAEVKTHKNILKINKDFVSYSQHANIENIDWKQYDVDYVFECTGRFNSKDQLLPHIINGAKKVIVSAPCKKADKTVVYGVNQNIIKKNDKIISAASCTTNCLAPVADVINKNFTILNGFMTTIHAYTSDQRILDNSHKDLRRARAASQSIVPTSTGASKAIGEIIPSLKGRLEGIAMRVPTPNVSLVEFVFNVKKNISVGKLNDSFSKASNKYLKNILEITKEELVSIDFNHNKASAIIDSSLTNIIGNKMGKISAWYDNEWGFSNRMCD

SEQ ID NO: 94055 - protein, 157 aa, Unknown
  Bacterial polypetide isolated from the Sargasso Sea
MTVKIAINGYGRIGRNVMRALYESGRTDELQVLAINDLGDANSNAHLTKYDTAHGQFPYSVEARDDALIVNGDEIKVFAERDPEQLPWGELGVDVVLECTGFFAKKELASKHIKAGAKKVVISAPAGTDIDATIVYGVNHDTLSKDDAVISNASCTT

SEQ ID NO: 94056 - protein, 213 aa, Unknown
  Bacterial polypetide isolated from the Sargasso Sea
MTINVAINGFGRIGRNVFRANYESGYNSEINIVAINDLGDTKINAHLLKYDTAHGPFGKSVEIKENTIIIDGKDEVLVLSERDPSKLPWKDLNIDVVMECTGFFASKEKSMSHINAGAKKVLISAPAADVDATIVYGVNHSILNETHKIISNASCTTNCLAPLIKNIHEELTVESGIMTTIHSYTNDQVLTDVYHSDLRRARSATQSMIPAKT

SEQ ID NO: 94057 - protein, 254 aa, Unknown
  Bacterial polypetide isolated from the Sargasso Sea
SNHEIKVFAEKDPANIPWGKVGADVVLECTGIFLDKSSAEKHIKGGAKKVIISAPGKEVDFTIVQGVNSKELKKEHNIISNGSCTTNCLAPVAMVLEKTFGISYGYMTTIHSYTGDQKLLDTLHKDLRRARSTEGAMIPTSTGAAKAMSLVLPSLKGKLDGTAIRVPTPNVSLIDLTLVTEKEATPEIINESMIKAAKDELKGILDVNQKPLVSKDFNHNPHSSIFDVTQTQVIKGKFSRVLSWYDNEWGFSNR

SEQ ID NO: 94058 - protein, 164 aa, Unknown
  Bacterial polypetide isolated from the Sargasso Sea
MVKIGINGFGRIGRLILRAILENYKEKIQVVGINDLGSIETNAHLIKYDSTHGILNQDVKTTKEGFQIGDQNIKVFGERDPAKLNWKKVGADVVLECTGFFLDKASAGKHIDAGAKKVIISAPAKEVDFTLVQGVNSKELNKNHSIISNGSCTTNCLAPSRPWF

SEQ ID NO: 94059 - protein, 169 aa, Unknown
  Bacterial polypetide isolated from the Sargasso Sea
NNFGIEYGYMTTIHSYTGDQKLLDTLHKDLRRARSTEGAMIPTSTGAAKALSLVLPSLKGKLDGTAIRVPTPNVSLIDFTVVTKKEVSVDTINDAMTKASQNSLKGILGINKKPLVSKDFNHDPHSSIFDVTQTQVIKGKFSRVLSWYDNEWGFSNRMCDTSIQISKLI

SEQ ID NO: 94060 - protein, 307 aa, Unknown
  Bacterial polypetide isolated from the Sargasso Sea
MSTQQKSSSKLSSQLDTSHLKVKFPFKAKYGNYINGKFVEPKSGKYFDNTTPITNEVICSVPRSNEKDVESALDAAHAAFVDWGKTDITTRSNILMKIADRIEQNLNMLAVAECLDNGKPIRECMAADLPLVIDHWRYFAGVIRAEEGSVAEISNSQYSYNIPEPLGVVGQIIPWNFPLLMATWKLAPALAAGNCVVLKPAEQTPASIMVMMELIGDLLPPGVVNLVSGYGLEAGKPLASSKRIAKMAFTGETTTGRLIMQYAAQNIIPITLELGGKSPNIFFEDVMAKDDDFLDKCVEGFVMFNLN

SEQ ID NO: 94061 - protein, 127 aa, Unknown
  Bacterial polypetide isolated from the Sargasso Sea
TSTGAAKAMSLVLPSLKGKLDGTAIRVPTPNVSLIDFTLVTKKDVTVDSINDAMTKAANGELKGILGINKQPLVSKDFNHDAHSSIFDVTQTQVVKNKFSRVLSWYDNEWGFSNRMCDTSIQISKLI

SEQ ID NO: 94062 - protein, 137 aa, Unknown
  Bacterial polypetide isolated from the Sargasso Sea
MKIGINGFGRIGRLVFRALWDRADIEITHINEIAGDSNAAAHLLEFDSVHGRWVKDIKVKEEEIIIDGKKLTYTSFKNYLDVPWEKSSVDIILECTGKNKKPDKLNPYFDTLGMKRVIVACPVKGIVAEAESLNIVY

SEQ ID NO: 94063 - protein, 307 aa, Unknown
  Bacterial polypetide isolated from the Sargasso Sea
GRIGRNFMRCWLSRGAYTNIEVVGINVTSDPKTNAHLLKYDSVLGQLDGVDIQYTDDTFVINNKTIKCFSDRNPLNLPWKDWGVDLVIESTGVFNTDVGASKHLDVGAKKVILTAPGKGDGVGTYVVGVNADKYKHKDYDILSNASCTTNCLAPVVKVLDQTFGINKGLMTTIHSYTGDQRILDNSHRDLRRARAAATNIVPTSTGAAKAVALVYPEMKGKLTGIAMRVPTPNVSAVDFVFESSKSVTAEEVNNALKESSLSSMKGIIKYGDEPLVSSDYAGTNESSIVDSDLTMCIGDNLVKVLAW

SEQ ID NO: 94064 - protein, 202 aa, Unknown
  Bacterial polypetide isolated from the Sargasso Sea
MAIKVAINGFGRIGRCVARIIEKRDDVELVAINDTATDEMLEYITKYDTVHGTFDGEVKVENGYLKMGSVNAKLYSTRDAAQLTFTKECGAEVILECTGAYLTQEKCQVHLDNGAKKVVMSAPAKDDTPTFVMGVNESEYAGQAIISNASCTTNCLGPVAKIIDDAFGIEKGLMTTIHSYTNDQNILDVKHQKDKRRARAGA

SEQ ID NO: 94065 - protein, 112 aa, Unknown
  Bacterial polypetide isolated from the Sargasso Sea
MLKIGINGFGRIGRMVLRAALNRNDVQVVAINDLLDVNHLAYLLKYDSVHGVCKAEIKVSNGNLVVNNNEISISAERDPSLINWENRGVEIALECTGIFTSLEKANLHIEGG

SEQ ID NO: 94066 - protein, 176 aa, Unknown
  Bacterial polypetide isolated from the Sargasso Sea
MVKVGINGFGRIGRLILRALLENYKGRIQVVGINDLGSIETNAHLIKYDSTHGILNHDVKTTGDGFQIGDQNIKVFAERDPAKLPWGKVGADVVLECTGFFLDKDSAGKHIQAGAKKVIISAPAKEVDFTLVQGVNSKGLKKDHNIISNGSCTTNCLAPVAMVLEKTFGITYGYMT

SEQ ID NO: 94067 - protein, 118 aa, Unknown
  Bacterial polypetide isolated from the Sargasso Sea
PWSNLNVDVVYECTGIFVSKEKAGGHIKAGASKVIISAPGKEVENTVVFGVNHETLTSKQEVISNASCTTNCLATVIKNIHKNLEITNGLMTTIHSYTNDQVLTDVYHSDLKRARSAT

SEQ ID NO: 94068 - protein, 184 aa, Unknown
  Bacterial polypetide isolated from the Sargasso Sea
SCTTNCLAPIAKVLDDNFGIEEGLMTTVHAATATQFTVDGPSKKDFRGGRSTLLNIIPSSTGAAKAVTKVIPSLEGKLTGMAFRIPTANVSVVDLTVRLVKKTSYEKIKRVMKESSENELSGILGYCDELVVSQDFIGDKRTSIFDANAGMELNSNFFKIISWYDNECGYSNKLLDLSKHIHSI

SEQ ID NO: 94069 - protein, 217 aa, Unknown
  Bacterial polypetide isolated from the Sargasso Sea
VLVSAPASGMDLTVVYGVNHQKISQDHLFISNASCTTNCLAPVAMALNNGVGINQGFMTTIHSYTGDQPTLDTMHSDLYRSRAAAGNMIPTSTGAAKAVGLVLPELNGKLDGVSVRVPTQNVSVVDFKFNASRSTSVDEINNIIKESANGELKNILGFTDELLVSSDFNHDSRSSIFHMDQTKVMDNTFVRVLSWYDNEWGFSNRMSDTAVAIGKTI

SEQ ID NO: 94070 - protein, 277 aa, Unknown
  Bacterial polypetide isolated from the Sargasso Sea
MSAEALKVSSALDTSHLKVEFPFKAKYGNYINGKFVEPKSGKYFDNPSPISNEVICSVARSNEKDVEAALDAAHAAFKEWGKTDITTRSNIMMKIADVLEKNLNLLATAECLDNGKPIRECMAADLPLVIDHWRYFAGVIRAEEGSVAEISNSQYSYNIPEPLGVVGQIVPWNFPLLMATWKLAPALAAGNCSVLKPAEQTPASIMVMMELIGDLLPPGVVNIVSGFGLEAGKPLASSKRVAKVAFTGETSTGRLIMQYAAQNIIPITLELGGKSPN

SEQ ID NO: 94071 - protein, 185 aa, Unknown
  Bacterial polypetide isolated from the Sargasso Sea
SCTTNCLAPVVKVLLDNFGIEEGLMTTIHAVTATQPTVDGPSKKDFRGGRGGFQNIIPASTGAAKAVGLCIPEVQGKLTGMAMRVPTANVSVVDLTARLSKSTSYDAINQAMKSASEGPMKGILGYTEENVVSSDFNGSSLSSIYDAGAGIGLSDQFFKVVSWYDNEMGYSCRLLDLIEYMDSRG

SEQ ID NO: 94072 - protein, 205 aa, Unknown
  Bacterial polypetide isolated from the Sargasso Sea
KTVVFGVNHLTLTRDDLIVSNASCTTNCLAPIAKVVNENFGIKVGYMTTIHSYTGDQPVLDTLHKDYYRARGAALSMIPTSTGAAKAVSLVLPELEGRLDGSAIRVPTPNVSCVDLKCVLEKSATAEEINSSVKKAAEGELRGVLSYEDEPLVSTDLNHVPSSSIFAAPQTKALKEGMVRILSWYDNEWGFSNRMVDTAGFMGSL

SEQ ID NO: 94073 - protein, 186 aa, Unknown
  Bacterial polypetide isolated from the Sargasso Sea
ASCTTNCLAPVAKVLHDKFKIVHGYMTTIHAFTGDQSVLDTFHSDLRRARAASLSMIPTSTGAAKAVGLVMPELSGKLDGTAIRVPTPNVSLIDFKFVSKKRMTVESINKAMSAAAKSNKLNGILDVNSKPLVSSDFNHNPASSNFDLTQTQVIDGKFGRVLSWYANEWGFSNRMCDTAVAMKRSR

SEQ ID NO: 94074 - protein, 122 aa, Unknown
  Bacterial polypetide isolated from the Sargasso Sea
MALRIAINGFGRIGRLAFRAILERNESDIEVICINDLGPTESNAHLLKYDSVHGILPFEVGVKEDHLLVGDRKITVTSEREPKNLPWKDMDIDIVFECTGFFASKKAASEHLTAGAKKVLIS

SEQ ID NO: 94075 - protein, 222 aa, Unknown
  Bacterial polypetide isolated from the Sargasso Sea
IKAGASKVIISAPGKEVDNTVVFGVNHETLTGKHEVISNASCTTNCLATVIKNIHKNLEITHGLMTTIHSYTNDQVLTDVYHTDLRRARSATQSMIPTNTGAAAAVGLVMPDLNGKLDGFAIRVPTTNVSVVDLCFNTSKSTSVDELNNLVLQSSEGDMKNIVGYNKLPLVSIDFNHSSYSSVFDESLTRASDDKLYKICAWYDNEWGFSNRMLDVTMHWVS

SEQ ID NO: 94076 - protein, 258 aa, Unknown
  Bacterial polypetide isolated from the Sargasso Sea
GLKYKNKKIKFFSEKDPINLPWKKLKVDIVLECSGVFTSKEKASVHINAGAKKVIISAPGSNVDATIVQGVNNQTLTKKHNIISNGSCTTNCLAPIAMVLDKGVGIESGFMTTIHSYTGDQRTVDQSHSDLRRARGAAISMIPTSTGAAKALSLVLPKMKGKLDGTAIRVPTPNVSLIDFTFTSKKKTTVEKINNLAINASKTKGLKNILTTNALPLVSIDFNHNSSSSVFDLTQTQVLNGKFCRILSWYDNEWGFSN

SEQ ID NO: 94077 - protein, 255 aa, Unknown
  Bacterial polypetide isolated from the Sargasso Sea
AIKWADAGAVYVVESTGVFTDIAKASAHMTGGAKKVVISAPSADAPMFVMGVNNKAYDGSPNVVSNASCTTNCLAPLAKVIDTNFGIVEGLMTTVHATTATQKTVDGPSGKDWRGGRGAAQNIIPSATGAAKAVGKVLPQLNGKLTGMAFRVPTPDVSVVDLTCKLAKPASYDAICSAIKAATTDPEYCGVIDYTEDEVVSTDFVGNSFSSIFDKKAGIALTDTFVKLVSWYDNEWGYSNRVVDLVAHMATVDKL

SEQ ID NO: 94078 - protein, 163 aa, Unknown
  Bacterial polypetide isolated from the Sargasso Sea
EGLMTTVHATTATQFTVDGLSKKDFRGGRSSLINIIPASTGAAKAVTKVIPDLVGKLTGMAFRVPTANVSVVDLTVRLTKETSYEEIKNTMRKHSETDLKNILGYTEEPVVSQDFIGDTRTSIFDANAGMELNSKFFKIISWYDNECGYSNKLIDLAKHINQL

SEQ ID NO: 94079 - protein, 292 aa, Unknown
  Bacterial polypetide isolated from the Sargasso Sea
HLTKYDTAHGPFPYSVEARDDALVVNGDEIKVFAERDPEQLPWGDLGVDVVLECTGFFAKKELASKHINAGAKKVVISAPAGTDIDATIVYGVNHDTLSKDDAVISNASCTTNCLAPLVKPIHESIGLESGIMTTIHAYTNDQVLTDVMHSDLRRARSATQSMIPTKTGAAAAVGLVLPELDGKLDGFSVRVPTINVSLVDLSFIASRETSVDEINEVVKAASDGALKGVLDYNEGPLVSIDFNHNPASSTYDATMTKVQEGTLVKVCSWYDNEWGFSNRMLDTTLALVNAD

SEQ ID NO: 94080 - protein, 253 aa, Unknown
  Bacterial polypetide isolated from the Sargasso Sea
MKIGINGFGRIGRLVFRALWDRADIEITHINEIAGDSNAAAHLLEFDSVHGRWVKDIKVKEEEIIIDGKKLDYTSFKNYLDVPWEKSSVDIILECTGKNKKPDKLNPYFDTLGMKRVIVACPVKGIVAGEESLNIVYGINQSLYDPSKHKLLTAASCTTNCLAPIVKVINENFSIKHGAITTIHDVTNTQVPVDFYKSDLRRARGCMQSLIPTTTGSAKAIAEIFPELKGKLNGHAVRVPLQNGSLTDAVFEL

SEQ ID NO: 94081 - protein, 298 aa, Unknown
  Bacterial polypetide isolated from the Sargasso Sea
MLEFDSVHGRWDRGITSSADGFSVEGSALTWSSEKDPTAVPWSDRGVEMVLEASGKIKTPETLNPYFDQLGLKRVVVACPVKGVVAGEDALNIVYGINHHLYEPARHKLVTAASCTTNCLAPVVKVVHESFGIEHGLITTIHDITNTQVPIDSFKSDLRRARSGLSSLIPTTTGSAKAIAMIFPELKGKLNGHAVRVPLLNGSLTDAVFELKQSVTVEQVNAAFQAAAEGPLKGILGYEERPLVSCDYTNDNRSSIVDALSTMVVDGNQLKVFAWYDNEWGYSCRMADLTCHVVGLDG

SEQ ID NO: 94082 - protein, 336 aa, Unknown
  Bacterial polypetide isolated from the Sargasso Sea
MSINVAINGFGRIGRNVFRANYESANNNEINIVAINDLGDTKINAHLLKYDTAHGKFDKSIDIKDDKIVIDSKDEVLVLSERDPAKLPWKDLNIDVVMECTGFFASKEKSMSHIDAGAKKVLISAPAANVDATIVYGVNHSILNETHKIVSNASCTTNCLAPLIKNIHEELTVQSGIMTTIHSYTNDQVLTDVYHPDLRRARSATQSMIPAKTGAASAVGLVLPELNGKLDGFAIRVPTINVSLVDLCINIKKESSLDDINSILKEASKNDLSGILGYNSEPLVSIDFNHSAYSSVYDESLSRVMDNKFFKICSWYDNEWGFSNRMLDVAKILANT

SEQ ID NO: 94083 - protein, 336 aa, Unknown
  Bacterial polypetide isolated from the Sargasso Sea
MTIRVAINGYGRIGRNTLRAFYENGKKHDIEIVAINDLGDAKTNAHLTQYDTAHGKFPGEVSVDGDYLVVNGDKIRVLANRNPAELPWGELGVDVVMECTGFFTTKEKASAHLKGGAKKVIISAPGGKDVDATIVYGVNHDVLKAEHTVISNASCTTNCLAPLVKPLNDKIGLETGLMTTIHAYTNDQVLTDVYHEDLRRARSATHSQIPTKTGAASAVGLVLPELNGKLDGYAIRVPTINVSIVDLSFIAKRDTTVEEVNAIMKEASEGALKGILGYNEAPLVSIDFNHNPASSTFDATLTKVSGRLVKVSSWYDNEWGFSNRMLDTAVAFANAK

SEQ ID NO: 94084 - protein, 336 aa, Unknown
  Bacterial polypetide isolated from the Sargasso Sea
MTAKIGINGMGRIGRMVFRSIIENKNKNLKIQHINNRSNPEATCKLIKYDSVHGKFNSDIDFGGDKLIINKNEVTFSQETKIEDIDWKKYDVDYVFECTGKFNSKENLVPHIKNGAKKVIVSAPCKNADKTIVFGVNDEFLTKDDQIISAASCTTNCLAPVLHVLNENFKIEKGFMTTIHAFTSDQRILDNSHKDPRRARSASQSIVPTSTGASKAISEIIPSLKGKIEGIAMRVPTPNVSLIELVFCTNKNIDKEKINNAFELASKKRLKKILEITNEKLVSIDFNHHPASAIVDSSLTSVVGKNMGKISAWYDNEWGFSNRMCDIALHLHKSFN

SEQ ID NO: 94085 - protein, 288 aa, Unknown
  Bacterial polypetide isolated from the Sargasso Sea
MTVKIGINGLGRIGRMIIRSLIENNNKKVEIKHINSRSNSEIVSSLLKYDSIHGKFNCEIKYGDNHLNLNGKKITFSQHSNLNEINWKRFGVDYVLECTGKFNSIEKLYTHIKNGAKKVIVSAPCKNADKTIVYGVNHKSISKKDLIISAASCTTNCLAPIAYVLNKEFKIEKGFMTTIHSYTTDQRLLDNSHKDPRRARSAAQSMVPTSTGASKAIGEIIPELKGKLEGLAIRVPTPNVSLVDLVFNSKKKLTIKKINDSFKKASKKELKNVLFATDEKLVSIDFNH

SEQ ID NO: 94086 - protein, 334 aa, Unknown
  Bacterial polypetide isolated from the Sargasso Sea
MIKVGINGFGRIGRLILRALLENYKGKIQVVGINDLGSIEANAHLIKFDSTHGTLNHDVKTTSEGFQIGDQNIKVFAERDPAKLPWGKIGADVVLECTGFFLDKASAGKHIEAGAKKVIISAPAKEVDFTVVQGVNSKELKKEHNIISNGSCTTNCLAPVAMVLENSFGIEYGYMTTIHSYTGDQKLLDTLHKDLRRARASGDAMIPTSTGAAKAMSLVLPSLKGKLDGTAIRVPTPNVSLIDLTFVPNKEVTAESINDAMSKAANGPLRGILATNSAPLVSKDFNHNPHSSIFDLTQTQVIKGKFSRVLSWYDNEWGFSNRMCDTAIQIAGLI

SEQ ID NO: 94087 - protein, 300 aa, Unknown
  Bacterial polypetide isolated from the Sargasso Sea
MTVRVAVNGFGRIGRNVVRALYESSKRAEMEIVAINGRGSPEQITHLFKYDSAHGKFPHEVHCDGKSLVIDDKDKIKFIYDRDPTKLPWNDLDIDVVLECTGAFRDHETASKHLDAGARKVLISAPGKNMDATIVYGVNHNILSDEHKIVSNASCTTNCLAPLVSPLHKTIGIKHGSMTTIHSYTNDQVLTDAFHSDPRRARSATMSQVPTKTGAAKGLGQVIPELDGRLDGFAMRVPTVNVSAVDLSFVPERETSEEEINQIMLDASLGELKGVLEYCEEPLVSIDFNHNPASAIYDST

SEQ ID NO: 94088 - protein, 517 aa, Unknown
  Bacterial polypetide isolated from the Sargasso Sea
MSTQQAKSSKVSSALDTSHLKVKFPFKAKYGNYINGKFVEPKSGKYFDNVSPINNEKICSVARSNEKDVDAALDAAHAAFPAWGKTDITTRSNILNKKGDVIEKNLNLLATAECLDNGKPIRECMAADLPLVIDHWRYFAGVIRAEEGSIAEISNNQYSYNFHEPLGVVGQIIPWNFPLLMATWKLAPALAAGNCVVLKPAEQTPASINVLMELIGDLLPPGVVNIVSGYGLEAGKPLASSKRVAKVAFTGETTTGRLIMQYAAQNIIPITLELGGKSPNIFFEDVMEKDDDFFDKCIEGFVMFNLNQGEVCTCPSRALIQESIYDKFMERAIARTKAVKQDNPLKMETMIGAQVSLEQMEKIKSYLDLGKKEGAKVLAGGSVAKLNSGLEKGNYIQPTIFEAKNNMRISQEEIFGPVVSVIKFKDEAEALKIANDTLYGLGAAVWTRDGNTAHRMGRGIQAGIVWTNCYHAYPAHSPFGGYKQSGVGRETHKMMLNHYRQNKNLHVSYAEKKLGFF

SEQ ID NO: 94089 - protein, 334 aa, Unknown
  Bacterial polypetide isolated from the Sargasso Sea
MSIKIGINGMGRIGRMVLRAIIESKNRNIEIKHINNRTNSEISSSLLKYDSVHGKFNANILFNKNSLIINKNKISFSQKTNIEDIQWKKYGVDYVFECTGKFNSKEKLLQHIKNGSKKVIVSAPCKNADKTIVYGVNHKSLNKNDLIISAASCTTNCLAPVAYVLNKEFKIQSGFMTTIHSYTTDQRLLDNSHKDIRRARSAGQSIVPTSTGASKALGEIIPELKGKLEGLAMRVPTPNVSLIDLVFNSKKNLTVKKINDSFKKASNKELKNVLETTEEKLVSIDFNHNSNSAIVDLSLTSVVGDKMGKISAWYDNEWGFASRMCDLAEYIHKS

SEQ ID NO: 94090 - protein, 341 aa, Unknown
  Bacterial polypetide isolated from the Sargasso Sea
MRIGINGFGRIGRLVLRALWDRENIEISHINDPFGDAKGAAHLLEYDSVHGRWNKAISNDQNNLSIEGQPISFSQESDYTKVPWNEKGIELILECSGKFKTPQTLNPYFDTLGMKRVVVACPVKGSIQGEDTLNIVYGINHDLYEPNKHRLVTAASCTTNCLAPVVKVVNQAFGIKHGSITTLHDLTNTQVIVDSFKSDLRRARSGSQSLIPTTTGSAKAIGMIFPELQGKLNGHAVRVPLLNGSLTDAVFELEKEVTQEEVNHVFKEASEGELKGILGYEEKPLVSIDYVNDSRSSIIDAPSTMVINKSQLKVYIWYDNEWGYSCRMADLVCHVINLEKD

SEQ ID NO: 94091 - protein, 334 aa, Unknown
  Bacterial polypetide isolated from the Sargasso Sea
MKVAINGFGRIGKLVFRALLEKNPKDINIVAINELGSVESSAHLLKYDSVHGILKDEISSIKNGLKIGKHKINFYSERDPNNLPWKSLKVDVVLECSGVFTSKEKAISHLNAGAKKVIISAPASNVDATIVQGVNNDTIKKNHNVISNGSCTTNCLAPLAMVLDEKLGIESGFMTTIHSYTGDQRTVDQTHSDFRRARAAAESMIPTSTGAAKALSLVLPKLKGKLDGTAIRVPTPNVSLIDLTFVSKKKTSPEKINSIVLQASKTKKLNGILTTNSLPLVSIDFNHNSSSSVFDMSQTQVVKDKFCRVLSWYDNEWGFSNRMVDTMVDLKKFI

SEQ ID NO: 94092 - protein, 391 aa, Unknown
  Bacterial polypetide isolated from the Sargasso Sea
ADLPLVIDHWRYFAGVIRAEEGSVAEISNSQYSYNIPEPLGVVGQIVPWNFPLLMATWKLAPALAAGNCSVLKPAEQTPASIMVMMELIGDLLPPGVVNIVSGYGLEAGKPLASSKRVAKVAFTGETTTGRLIMQYAAQNIIPITLELGGKSPNIFFEDIMNKDDDFLDKCVEGFVMFNLNQGEVCTCPSRALVQESIYDEFMERCIKRTKAVVQDNPLKMETMIGAQASVEQMEKIKSYLDLGKKEGAKVLTGGSVGKLNSGLEKGNYIQPTIFEAKNDMRISQEEIFGPVVSVIKFKDEADALRIANDTLYGLGAGVWTRNGNIAYRMGRAIQAGIVWTNCYHAYPAHSPFGGYKQSGVGRETHKMMLNHYRQNKNLHVSYAEKKLGFF

SEQ ID NO: 94093 - protein, 337 aa, Unknown
  Bacterial polypetide isolated from the Sargasso Sea
MTINVAINGFGRIGRNILRAKYENEEYSDIKIVAINDLGNSETNAHLLQYDTAHGKFKLDVKSEKNKIIVDNSDEISVYSERDPSNLPWKKLSVDIVLECTGFFASKSLSSAHISAGAKKVIISAPAKEVDATIVYGVNHDILNGSHTVISNASCTTNCLATLINNIHKEFTIKSGLMTTIHAFTNDQVLTDVYHSDLRRARSATQSMIPTKTGAASAVGLVLPDLEGKLDGFAIRVPTINVSIVDLCFNTLKKTSIDKINSSLLEASQTNLKGILGYTSEPLVSTDFNHTSYSSVYDESLTREMDGDFIKICAWYDNEWGFSNRMLDVSRILNQNA

SEQ ID NO: 94094 - protein, 336 aa, Unknown
  Bacterial polypetide isolated from the Sargasso Sea
MTTNIAINGFGRIGRLVLRAIFESGREDLRVVAVNDLGTVATNAHLLKWDSNHGRFPGEISVHEDAIDIGFGPIKFTSERDPKQLPHEELDVDIVMECTGIFTDRARAARHIEGGAKRVIVSAPAKNADITVVFGVNHDKIGKEHEVISSASCTTNCLVPVAYVLNNTVGIETGYMTTVHSYTGDQPTLDTFHGDLRRARGAASSMVPTSTGAAKAVGLVLPELAGKLDGAAIRVPTSNVSLIDLKFMPKRPTNVEEINSAMIEAANNGPLRGILGINDEPLVSVDFNHNSNSSTFDLNQTQVLDGGLVRVLAWYDNEWGFSTRMSDTAAFLADML

SEQ ID NO: 94095 - protein, 318 aa, Unknown
  Bacterial polypetide isolated from the Sargasso Sea
MTLRVAINGFGRIGRNFMRCWLSRGAYTNIEVVGINVTSDPKTNAHLLKYDSVLGKLDGVDIQYTDDTFVINNKTIKCFSDRNPMNLPWKDWGVDLVIESTGVFNTDVGASKHLEVGAKKVILTAPGKGAGVGTYVVGVNADQYKHSDYDILSNASCTTNCLAPVVKVLDQTFGINKGLMTTIHSYTGDQRILDNSHRDLRRARAAATNIVPTSTGAAKAVALVYPEMTGKLTGIAMRVPTPNVSAVDFVFESSKSVTSQEVNNALKESSLGSMKGIIKYGDEPLVSSDYAGTNESSIVDSDLTMSIGDNLVKVLAWY

SEQ ID NO: 94096 - protein, 333 aa, Unknown
  Bacterial polypetide isolated from the Sargasso Sea
MRIGINGFGRIGRSVFRVLNNRDDIDVVAINDIFDKDALTYLLKYDTVMGRFPGDISLDSDILSAGNQKVKLIAERVPEKLPWGELGVDIVIESTGIFRMKSQLESHLSAGAKKVILTVPAKDEIDYTVVLGVNDEGLKPDHRIVSNASCTTNCLAPMAKVLNESFGIELGVINTIHAYTNDQRLADVPHSDWRRSRAAAENVIPTTTGAARAVGVVLPELNGKLDGIAMRVPVPDGSVVDFNVRIKVDVTVDQVNDAVRSASESGSLKNILEYSTLPVVSSDIIGNSHSSIFDAPFTRVIEGNYIKTLNWYDNEWGYSNRVVDLVSLLGQVG

SEQ ID NO: 94097 - protein, 253 aa, Unknown
  Bacterial polypetide isolated from the Sargasso Sea
EISKIDWKKYQVDVVLECTGKFNTKEKSAQHIKSGAKKVLVSAPCKGAINIVFGINQKTLKNSDQIISAASCTTNCLSPVAKVINDNFEIDTGFMTTIHSYTSDQKLLDNSHKDLRRARSASNSIIPTTTGATKSLGDVIPELKGKVEGISIRVPTPNVSLVEFVFSSKKNLSVEKINNSLLKASKSELKNILDTTSEQLVSSDFNHNSHSAIVDLSLTKVVETKMAKVSAWYDNEWGFACRMCDLANYFGKI

SEQ ID NO: 94098 - protein, 514 aa, Unknown
  Bacterial polypetide isolated from the Sargasso Sea
MSAEALKVSSALDSSHLKVEFPYKAKYGNFINGKFVEPLSGKYFDNPSPISNEIICSVARSNEKDVESALDAAHAAFKEWGKTDITTRSNIMMKIADVLEQNKDMLAVAECLDNGKPIRECMAADIALVIDHWRYFAGVIRAEEGSVAEISNSQYSYNIPEPLGVVAQIVPWNFPLLMATWKLAPALAAGNCSVLKPAEQTPASIMVMMELIGDLLPPGVVNIVSGFGLEAGKPLASSKRVAKVAFTGETTTGRLIMQYAAQNIIPITLELGGKSPNIFFEDIMDKDDDFLDKCVEGFVMFNLNQGEVCTCPSRALVQESIYDKFMEKCIARTKAVIQDNPLKMETMIGAQASVEQMEKIKSYLDLGKKEGAKVLAGGDVGKLNSGLEKGNYIQPTIFETDNKSRISQEEIFGPVVSVIKFKDEAEALEIANDTLYGLGAGVWTRNGNIAYRMGRAIQAGIVWTNCYHAYPAHSPFGGYKQSGVGRETHKMMLGHYRQNKNLHVSYAEKKLGFF

SEQ ID NO: 94099 - protein, 434 aa, Unknown
  Bacterial polypetide isolated from the Sargasso Sea
MKAHRFARQSDNNELSELETFPILEYISSLNLADCEIDIGEIAVKCPFFEDIKKDPSKLSAYLNEELESVIDKKSNRPEEPANIVLYGFGRIGRLVARMMIQTTGPGNYFKLRAIVIRKATDDDIFKRASLLTKDSVHGPFDGTVRVDEDNSCLVINGNPVKIIYASGPNQVSYKDYDINDPIVIDNTGIWRDEKELSVHIQSGASKVILTAPAKGKIKNIVNGINDSIISESDNLISAASCTTNAIVPILKSINDEFSIKGGHIETVHAYTNDQNLIDNFHKKDRRGRGAPLNMVITSTGAVKAVAKALPELEGKLTGNAIRVPTPNVSLAILSLELNKNVTVEVINNYLRSIAFHSKYREIIGYVNSSEVVSTDFYSSPFATIVDSQATITNENRITLYCWYDNEYGYTKQVISLAKKIAKIDLPRLPKPIK

SEQ ID NO: 94100 - protein, 318 aa, Unknown
  Bacterial polypetide isolated from the Sargasso Sea
MSTQQSKNSNVSSALDTSHLKVKFPFKAKYGNFINGKFVEPKSGKYFDNVSPINNEKICSVARSNEKDVEAALDAAHAAFVEWGKTDITTRSNILYKIADVLEKNLNLLATAECLDNGKPIRECMAADLPLVIDHWRYFAGVIRAEEGSVAEISNSQYSYNIPEPLGVVGQIVPWNFPLLMATWKLAPALAAGNCSVLKPAEQTPASIMVMMELIGDLLPPGVVNIVSGYGLEAGKPLASSKRVAKVAFTGETTTGRLIMQYAAQNIIPITLELGGKSPNIFFEDIMNKDDDFLDKCVEGFVMFNLNQGEVCTCPSRA

SEQ ID NO: 94101 - protein, 337 aa, Unknown
  Bacterial polypetide isolated from the Sargasso Sea
MAIKIGINGFGRMGRLALRAAWEWDDVEFVQINDPAGDAATLAHLLEFDSVHGRWRYPVTANQDGIQIQEKTIRTTRNKTISETDWSGCDVVIEASGVMKTKALLQAYLDQGVKRVVVTAPVKEEGVLNVVMGVNHQLYDPAIHPIVTAASCTTNCLAPVVKVIHEQIGIKHGSMTTIHDITNTQTILDAPHKDLRRARACGLSLIPTTTGSATAITHIFPELKGKLNGHAVRVPLANASLTDCVFELERSVAEAEVNALLQTAAEGELKGILGYEERPLVSVDYKTDPRSSIVDALSTMVVNGTQLKLYVWYDNEWGYANRTAELARLVGQLDLPR

SEQ ID NO: 94102 - protein, 336 aa, Unknown
  Bacterial polypetide isolated from the Sargasso Sea
MAVNVAISGFGRIGRLVLRSIIESKRKDINVIAINDLAPVDTNAFLLANDTVHGPLNEKISVKKNKMTIGRKTISVLNERDPQKLPWKKMKIDVALECTGLFTSKEKASMHINAGAKKVLVSAPCSEADKTIVYGVNEQEITRNDLVVSNASCTTNCLAPVVKVLHEKFGIVHGYMTTIHAFTGDQSVLDTFHPDLRRARAASMSMIPTSTGAAKAVGLVMPELSGKLDGTAIRVPTPNVSLIDFKFVSKKTMKVDSVNKAMTAASRSNKLRGILNVNSEPLVSTDFNHNPASSNFDLTQTQVIEGKFGRVLSWYDNEWGFSNRMCDTAVAMKRSK

SEQ ID NO: 94103 - protein, 197 aa, Unknown
  Bacterial polypetide isolated from the Sargasso Sea
MVLRLSLNRSDVEVIAINDLLDINHLVYLLKYDSVHGKINSSVSVEGNNLIIDGQKIKITSEKNPKQIGWDNIGVDVVLECTGIFTTLDTAQHHIDGGAPKVVISAPSKDAPMYVMGVNHETIDKSDLIISNASCTTNCLAPPIKVLNDNFGVEEALMTTVHAVTATQFTVDGPSKKDFRAGRSSLLNIIPASTGAA

SEQ ID NO: 94104 - protein, 334 aa, Unknown
  Bacterial polypetide isolated from the Sargasso Sea
MNNVAINGFGRIGRSILRIIVEQDLDINVVAINDLGDYDNLAYLFKHDSIMGVLDADISVTKDLLKINNRNINLISISEPSELPWKELNVEIVIESTGIFTDNESLNKHINAGANRVLLTVPPKDEVDATIVLGVNDDTLTNDSRLISNASCTTNCLAPIAKVLNDNFTIQSGLMTTVHAYTNDQALAETTHKDFRRGRNATQNIIPTSTGAAKAVGMVMPELKGKLDGMAMRVPVPNGSVVDLIVELDKSVTVDEINKAVKKASENELNGILSYSEVPLVSTDILGNPNSSIYDATSTEILENKHVRVVCWYDNEWGYSNRVVDLISKLIEEY

SEQ ID NO: 94105 - protein, 323 aa, Unknown
  Bacterial polypetide isolated from the Sargasso Sea
MRCWLSRGAYTNIEVVGINVTSDPKTNAHLLKYDSVLGQLDGVDIQYTDDTFVINNKTIKCFSDRNPMNLPWKDWGVDLVIESTGVFNTDVGASKHLEVGAKKVILTAPGKGDGVGTYVVGVNADTYKHKDYDILSNASCTTNCLAPVVKVLDQTFGINKGLMTTIHSYTGDQRILDNSHRDLRRARAAATNIVPTSTGAAKAVALVYPEMKGKLTGIAMRVPTPNVSAVDFVFESSKSVTAEEVNNALKEASLSTMKGIIKYGDEPLVSSDYAGTNESSIVDSDLTMCIGDNLVKVLAWYDNEWGYSQRVVDLAEIVAKNWE

SEQ ID NO: 94106 - protein, 490 aa, Unknown
  Bacterial polypetide isolated from the Sargasso Sea
MVKRFNPDKRRRPKVDDHFGDWKWREALAESMVPMIGKLYRNGIRLLMYGRPLINCSAIEIMKLHRFVREVEGNELSELETYPVIEQISKMKLMPCEIDVGEVVVHLLDNDKLDPVKHVKNMLKEQIRTKRSHPLRPKDIVLYGFGRIGRILTRILVSETGPGVNWRLRAVVVRDSENPEDLIKRASLLRNDSVHGTFPGTIRVNRKNNSLIVNGNEIVFIYASDPRKVDYKKYGIKKATIIDNTGVWRDEDGLKKHVKNPSVERVVLTAPGKGKIKNIVYGINDHKVSEEDKILGAASCTTNAIVPALKVVDDNFKILSGHIETVHAYTNDQNLIDNYHSADRRGRSAALNLVITDTGAAKAISGVLPELKGKLTANAIRVPTPNVSLAIMHLNIKKGVSVEDLNQCFRNAAFHSSLRTTIDYSNSLDAVSSDFYSNEFACVFDSQATISNFNNITIYCWYDNEYGYSRQVARLLNKALGINLVRYPKQ

SEQ ID NO: 94107 - protein, 334 aa, Unknown
  Bacterial polypetide isolated from the Sargasso Sea
MKVAINGFGRIGKLVFRALLEKNPKDINIVAINELGSVESSAHLLKYDSVHGILKDEISSIKKGLKIGKHKINFYSERDPNNLPWKSLKVDVVLECSGVFTSKEKAVSHLNAGAKKVIISAPASNVDATIVQGVNNETIKKNHNVISNGSCTTNCLAPLAMVLDEKLGIESGFMTTIHSYTGDQRTVDQTHSDFRRARAAAESMIPTSTGAAKALSLVLPKLKGKLDGTAIRVPTPNVSLIDLTFVSKKKTSPEKINSIVLQASKTKKLNGILTTNSLPLVSIDFNHNSSSSVFDMSQTQVVKDKFCRVLSWYDNEWGFSNRMVDTMVDLKKFI

SEQ ID NO: 94108 - protein, 339 aa, Unknown
  Bacterial polypetide isolated from the Sargasso Sea
MEVNVAISGFGRIGRLVLRSIIESKRKDINVVAINDLAPIETNAFLLSNDTVHGPLKEKVTVKNGKMIIGKKSINVLSERDPKKLPWKKMKIDVALECTGFFTSKETASMHITAGAKKVLVSAPCSNADKTIVFGVNDDEISKKDTVISNASCTTNCLAPVAKVIDEKFGIVHGYMTTIHSYTGDQKVLDTYHSDLRRARGAALSMIPASTGAAKAVGLVMPHLSGKLDGTAIRVPTPNVSLIDFKFVTNKKISKESINKAMAAASKSKRLKGILNVNSDPLVSSDFNHNSASSSFDLTQTQVIDESFGRVLSWYDNEWGFSNRMCDTAVKMNNTKKND

SEQ ID NO: 94109 - protein, 334 aa, Unknown
  Bacterial polypetide isolated from the Sargasso Sea
MNNVAINGFGRIGRSILRIIVEQDLDINVVAINDLGDYENLAYLFKHDSIMGVLDAEITIKKDMLKINDRDIKLISISDPSELPWKDLNVEIVVESTGIFTDSDSLNKHIIAGAKKVLLTVPPKDEIDATIVLGVNDDNLTSESKLISNASCTTNCLAPIAKVLNDNFTIQSGLMTTVHAYTNDQALAETTHKDFRRGRNATQNIIPTSTGAAKAVGMVMPELNGKLDGMAMRVPVPNGSVVDLIVELDKSVTVEEINKAVKKASENELNGILSYSEVPLVSTDILGNPNSSIYDATSTEILENKHVRVVCWYDNEWGYSNRVVDLINKLIEEY

SEQ ID NO: 94110 - protein, 290 aa, Unknown
  Bacterial polypetide isolated from the Sargasso Sea
MEFDSVHGRWGKNISWQDGLLIFNGQKIRVSHMKIVEAIALKKNNIDVVIDCTGKFKTSSKIAPYFSAGVKKVIISAPVKDKDALNLVYGINHDLYDGSQNLITAASCTTNCLAPIVKVIHENLGIKHGSITTIHDVTNTQTIVDRPSKDMRRARSALNNLIPTTTGSAKAITMIYPELKGKLNGHAVRVPLLNASLTDCVFEVERATSEQEVNSLFEEASNKSLKGILGFEKRPLVSSDYTNDPRSSIVDGLSTMVVNKTQVKVYAWYDNEWGYSCRLGDITRMVAGSL

SEQ ID NO: 94111 - protein, 334 aa, Unknown
  Bacterial polypetide isolated from the Sargasso Sea
MIRVAINGFGRIGRSVFRVLNQRDEIELVAINDIFDKEALVYLLKYDTVMGRFPGNVELNDDMLTAGEQHVKLVSERIPENLPWKDLGIDIVVESTGIFRQKEQLQKHLDAGCSKVILTVPPKDEIDYMVVLGVNDKGLSKEHQIVSNASCTTNCLAPMAKVLNDNFGIELGVINTIHAYTNDQRLADVPHSDWRRSRAAAENVIPTTTGAARAVGKVLPELNGKLDGIAMRVPVPDGSVVDLNVRLMQDVTIDMINEAILAASNDGSMSNVLEYSNLPVVSTDIIGNKHSSIFDAPFTRVIDNNFVKTLNWYDNEWGYSNRVVDLMALLGKLL

SEQ ID NO: 94112 - protein, 334 aa, Unknown
  Bacterial polypetide isolated from the Sargasso Sea
MVKIGINGFGRIGRLILRALLENYKDKIQVVGINDLGSIDTNAHLIKYDSTHGTLPHDVSTSKDGFKILNQNIKVFAERDPANLPWGKVGADIVLECTGLFLNKETAGKHLKAGAKKVIISAPGKDVDFTIVQGVNSKDLKKEHNVISNGSCTTNCLAPVAMVLENSFGIEYGYMTTIHSYTGDQKLLDTLHKDLRRARSTEGAMIPTSTGAAKAMSLVLPSLKGKLDGTAIRVPTPNVSLIDFTLVTKKDVTADSINDAMTKAANGELKGILGINKQPLVSKDFNHDAHSSIFDVTQTQVVKNKFSRVLSWYDNEWGFSNRMCDTSIQISKLI

SEQ ID NO: 94113 - protein, 490 aa, Unknown
  Bacterial polypetide isolated from the Sargasso Sea
MVKRFNPDKRRRPKVDDHFGDWKWREALAESMVPMIGKLYRNGIRLLMYGRPLINCSAIEIMKLHRFVREVEGNELSELETYPVIEQISKMKLMPCEIDLGEVVVHLLDNDKLDPIKHVKSMLKEQIRTKRSHPLRPKDIVLYGFGRIGRILTRILVSETGPGVNWRLRAVVVRDSGNTEDLIKRASLLRNDSVHGTFPGTIRVNRKNNSLIVNGNEIVFIYGNDPKKVDYKKHGIKKATVIDNTGVWRDEDGLKMHIKNPSVERVVLTAPGKGKIKNIVYGVNDQKISKDDKILGAASCTTNAIVPALKVVDDNFKILSGHIETVHAYTNDQNLIDNYHTSDRRGRSAALNLVITDTGAAKAISGVLPELKGKLTANAIRVPTPNVSLAIMHLNVKKGVSVEDLNQCFRNAAFHSGLRTTIDYSNSLDAVSSDFYSNEFACVFDSQATISNFNNITIYCWYDNEYGYSRQVARLLNKALGINLVRYPKQ

SEQ ID NO: 94114 - protein, 315 aa, Unknown
  Bacterial polypetide isolated from the Sargasso Sea
MVKIGINGFGRIGRLILRALLENYKDKIQVVGINDLGSIDTNAHLIKYDSTHGTLPHDVSTSKDGFKILNQNIKVFAERDPANLPWDKVGADIVLECTGLFLNKETAGKHLKAGAKKVIISAPGKDVDFTIVQGVNSKDLKKEHNVISNGSCTTNCLAPVAMVLENSFGIEYGYMTTIHSYTGDQKLLDTLHKDLRRARSTEGAMIPTSTGAAKAMSLVLPSLKGKLDGTAIRVPTPNVSLIDFTLVTKKDVTADTINEAMTKAANGELKGILGINKDPLVSKDFNHDRHSSIFDVTQTQVVKNKFSRVLSWYDN

SEQ ID NO: 94115 - protein, 229 aa, Unknown
  Bacterial polypetide isolated from the Sargasso Sea
MTIKVGINGFGRMGRLSFRAAFDWADVEFVRINDPAGDAASLAHLITFDSVHGRWHHEASSDGDEMVIGNHRILCTRNKEIGQTDWSDCDVVIEASGKMKTKALLNAYLEQGVKRVVVTAPVKEEGVLNVVMGVNHQLYDKAQHPIVTAASCTTNCLAPVVKVIHEQLGIKHGSMTTIHDITNTQTILDAPHADLRRARACGLSLIPTTTGSATAITHIFPELKGKLNG

SEQ ID NO: 94116 - protein, 272 aa, Unknown
  Bacterial polypetide isolated from the Sargasso Sea
MIKVGINGFGRIGRLILRAILENYKNKIQVVAINDLGSIETNAHLIKYDSTHGIIHEDIQTSKDGFKIGNQEIKVFAEKDPANIPWGKVGADVVLECTGIFLDKSSAEKHIKGGAKKVIISAPGKEVDFTIVQGVNSKELKKEHNIISNGSCTTNCLAPVAMVLEKTFGISYGYMTTIHSYTGDQKLLDTLHKDLRRARSTEGAMIPTSTGAAKAMSLVLPSLKGKLDGTAIRVPTPNVSLIDLTLVTDKEATPKSINEAMINAARGELKGI

SEQ ID NO: 94117 - protein, 333 aa, Unknown
  Bacterial polypetide isolated from the Sargasso Sea
MTVNLGINGFGRIGRSTISHIKESARNDVHVTKINATGPIQTNAHLLKYDSTHGRFAGDIVVEKDTLDIGYGPVKVFSTYEPEELDWSGCDVVLECTGMFNDGLKSKVHIQQGAKSVLISAPASNVDKTIVYGVNHRSLTSSDKIVSNGSCTTNCLAPLAKVLNDNIGIERGIMTTIHSYTGDQPTLDRRHHDLYRARSAATSMIPTSTGAAKALGEVLPELHGKLDGTALRVPTPNVSAVDLTFEASTPVTVEGVNSVVEQAARNEMVQVLAYDSEPKVSIDFNHTTHSCIFAPDQTKVVGKHTVRVLAWYDNEWAFSCRMADVASTMGRLL

SEQ ID NO: 94118 - protein, 173 aa, Unknown
  Bacterial polypetide isolated from the Sargasso Sea
LYSNESIGIENGFMTTIHSYTGDQPTLDTMHSDLYRSRAAAGNMIPTSTGAAKAVGLVLPELDGKLDGVAIRVPMQNVSVVDLKIVSKKETSIEEINSVVKEAADGKLKRILGYNEEQLVSSDFNHNPMSSIFHADQTKVMNGTLVRVMSWYDNEWGFSNRMCDTVEEISKYI

SEQ ID NO: 94119 - protein, 331 aa, Unknown
  Bacterial polypetide isolated from the Sargasso Sea
MIIGINGFGRIGRCIARLAISNSKIQKIHVNDLAGQSDLMHLLKYDSIHGSLKFSFEYKNNDIVFENGTILSFSKQAQPKNIPWKKSGAEIILECTGRFLSEQTAKDHFIGGAKKIILSAPAKDETIPSIVLGINNEKITPDKSLFSNASCTTNCAAPLVSVINNLSKINACNISTIHSFTSVQNIHDAPHKDLRRARAASLSIIPTSTGAVKAIEQIFPDLKNKVSGGCFRVPVANGSITEIILSTENNLSIEEINKAMKKAANGHLKGILGYTEEPIVSTDIIGSKYSSIYDAQLTSSANKLIKISGWYDNEMGYSNRMLDLAFIIHQK

SEQ ID NO: 94120 - protein, 337 aa, Unknown
  Bacterial polypetide isolated from the Sargasso Sea
MTIKVAINGFGRIGRNILRALYECGLTEQVKVVAINELADAKGIAHLLKYDTSHGRFGFPVELTAQGLLVNGDPIALFCQADPAQLPWNELDIDVVLECTGVFHSRADAQLHLDAGAKKVLFSHPADADIDATVIYGINQHLLTDEMTVVSAGSCTTNCIVPVIQVLDQHFGVESGTITTIHASMNDQQVIDAYHTDLRRTRAASQSIIPVDTKLARGIERIMPHLAGRFEAIAVRVPTVNVTAMDLSVTLHQDVDVTQINQVLQRARAGELAGILDYTEEPLVSVDFNHDAHSCIVDGSQTRVSHKRLVKCLIWCDNEWGFANRMIDTTRAMMRFV

SEQ ID NO: 94121 - protein, 131 aa, Unknown
  Bacterial polypetide isolated from the Sargasso Sea
MIPTSTGAAKAVGLVMPELSGKLDGTAIRVPTPNVSLIDFKFVSKKTMKVDSVNKAMTAASRSNKLKGILNVNSEPLVSSDFNHNPASSNFDLTQTQVIDGKFGRVLSWYDNEWGFSNRMCDTAVAMKRSK

SEQ ID NO: 94122 - protein, 297 aa, Unknown
  Bacterial polypetide isolated from the Sargasso Sea
MVKIGINGFGRIGRLILRALLENYKGKIQVVGINDLGSIETNAHLIKYDSTHGILNQEVKTTKDGFQIGDQNIKVFAERDPSKLPWGQIGADVVLECTGFFLDKASAGKHIQAGAKKVIISAPAKEVDFTLVQGVNSKELKKEHNIISNGSCTTNCLAPVAMVLEKNFGITYGYMTTIHSYTGDQKLLDTLHKDLRRARATEGSMIPTSTGAAKAMSLVLPSLKGKLDGTAIRVPTPNVSLIDLTLVTEKEVTSDSINDAMSKAAKGELKGILEINQKALVSKDFNHNPHSSIFDST

SEQ ID NO: 94123 - protein, 162 aa, Unknown
  Bacterial polypetide isolated from the Sargasso Sea
MVKIGINGFGRIGRLILRALLENYKDKIQVVGINDLGSIDTNAHLIKYDSTHGTLPHDVSTSKDGFKILNQNIKVFAERDPVNIPWGKLGADVVLECTGLFLNKETAGKHLKAGGKKVIISAPAKDVDFTIVQGVNSKDLKKDHSIISNGSCTTNCLAPVAM

SEQ ID NO: 94124 - protein, 119 aa, Unknown
  Bacterial polypetide isolated from the Sargasso Sea
MVKIGINGFGRIGRLILRALLENYKDKIQVIGINDLGSIDTNAHLIKYDSTHGTLPHEVSTSKDGFKILNQNIKVFAERDPANLPWGKVGADIVLECTGLFLNKETAGKHLKAGAKKVI

SEQ ID NO: 94125 - protein, 340 aa, Unknown
  Bacterial polypetide isolated from the Sargasso Sea
MKIGINGFGRIGRLVFRALWDKADIEITHINEIAGDSNAAAHLLEFDSVHGRWVRDIKVKEEEIIIGEKKLAYTSFKNYLDVPWEKSSVDIILECTGKNKKPDKLNPYFDSLGMKRVIVACPVKGIVAGEESLNIVYGINQSLYDPSKHKLVTAASCTTNCLAPIVKVINENFSIKHGAITTIHDVTNTQVPVDFYKSDLRRARGCMQSLIPTTTGSAKAIAEIFPELKGKLNGHAVRVPLLNGSLTDAVFELNNEVSTEQVNMALKEASETYLKGILGYEERPLVSADYVNDSRSSIVDSLSTMVVNSNLLKIYAWYDNEWGYSCRLADLTEYVIKKEI

SEQ ID NO: 94126 - protein, 336 aa, Unknown
  Bacterial polypetide isolated from the Sargasso Sea
MTIKVAINGFGRIGRNVARAIISDHSHEIDLLAINDSAPVETNLHLLKYDSIHGTLAVKMEKINSDLFKINKKQIKKFSSKDPKDIPWGELDIDLVLECTGKFNDKKLSVKHINAGAKKVLVSAPAKGVDITAVFGVNHLEIKPDHKIISNASCTTNALAPLAMVLNDTVGIDTAFMTTIHSYTGDQPTLDRNHKDLYRSRSAAQSIIPTTTGAAISVGEVIPQLKGKIDGIAMRVPIPNVSAIDLKFTTNKDTSINQINEILVQASKNQFQNILNTTNDKLVSVDINHDSHSAVIALDQTRVTNKKLVRVMAWYDNEWGFSQRMCDMARHISSLP

SEQ ID NO: 94127 - protein, 333 aa, Unknown
  Bacterial polypetide isolated from the Sargasso Sea
MSAEAIKVSSVLDTSHLKVQFPFKAKYGNYINGKFVEPKSGKYFDNVSPISNEKICSVARSNEKDVEAALDAAHAAFPEWGKTDITTRSNILYKIADVLEKNLNLLATAECLDNGKPIRECMAADLPLVIDHWRYFAGVIRAEEGSIAEIANNQYSYNFHEPLGVVGQIVPWNFPLLMATWKLAPALAAGNCSVLKPAEQTPASIMVMMELIGDLLPPGVVNIVSGFGLEAGKPLASSKRVAKVAFTGETTTGRLIMQYAAQNIIPITLELGGKSPNIFFEDIMEKDDDFFDKCIEGFVMFNLNQGEVCTCPSRALIQESIYDKFMERAIART

SEQ ID NO: 94128 - protein, 385 aa, Unknown
  Bacterial polypetide isolated from the Sargasso Sea
LAVAECLDNGKPIRECMAADLPLVIDHWRYFAGVIRAEEGSIAEIANNQYSYNFHEPLGVVGQIVPWNFPLLMATWKLAPALAAGNCSVLKPAEQTPASIMVMMELIGDLLPPGVVNIVSGFGLEAGKPLASSKRVAKVAFTGETTTGRLIMQYAAQNIIPITLELGGKSPNIFFEDIMEKDDDFFDKCIEGFVMFNLNQGEVCTCPSRALVQESIYDKFMERAVARTKAVVQDNPLKMETMIGAQASVEQMEKIKSYLELGKKEGAKVLTGGSVGKLNSGLEKGNYIQPTIFEANNQMRISQEEIFGPVVSVIKFKDEAEALKIANDTLYGLGAAVWTRNGNIAHRMGRAIQAGIVWTNCYHAYPAHSPFGGYKQSGVGRETHK

SEQ ID NO: 94129 - protein, 156 aa, Unknown
  Bacterial polypetide isolated from the Sargasso Sea
VLLGDQRTLDQTHSDLRRARTATSSMIPTSTGAAKALSLVLPKLKGKLDGTAIRVPTPNVSLIDFTFSSKKKASVDLINRSMIKASKTKNLKGILTVNNLPLVSIDFNHNQSSSIFDLTQTQVVKDKFCRVLSWYDNEWGFSNRMIDTLISLKKFL

SEQ ID NO: 94130 - protein, 336 aa, Unknown
  Bacterial polypetide isolated from the Sargasso Sea
MTIRVAINGYGRIGRNVLRALYESEKAYPIKIVAINDLGDASINAHLTKYDSVHGRFNAKVEHDAEAIYVNGDKILTFQERDPGKLPWGDLQVDVVFECTGIFTSKESVQPHLAAGAKKVIISAPGKNVDATVVYGVNNNVLTADMTVISNASCTTNCLAPFAKPLNDEIGIESGLMTTIHAYTNDQRLSDVYHTDLRRARAAALSMIPTKTGAAAAVGLVVPELQGKFDGLAVRVPTVNVSLVDLSFIAARDTTVEEVNAIIERAAAVAPLSEVLAVNKEPLVSIDFNHNAFSSNFDATQTRVNGRLVKVMAWYDNEWGFSNRMLDNAVALMNAK

SEQ ID NO: 94131 - protein, 332 aa, Unknown
  Bacterial polypetide isolated from the Sargasso Sea
MSIKIGINGFGRIGRLVFRSAIENDDFEVICVNDLLEVEHLAYLLKYDSVHGTFNGSVEIVNGNLIVNGKTITVSSEKNPELIKWGDMSVDVVAECTGLFTTKEKAGLHINGGCKKVVISAPSSDVPMFVMGVNHNNVNGNDLVVSNASCTTNCLAPIAKVLNDNFLIEEGLMTTVHAVTATQFTVDGPSKKDYRGGRSSLLNIIPSSTGAAKAVTKVIPSLEGKLTGMAFRIPTANVSVVDLTVRLKKDTSYEEIKKVMLQASKNELKGILGYCDEPVVSQDFIGDKRTSIFDASAGMELNSNFFKIISWYDNECGYSNKLLDLAKHIHTI

SEQ ID NO: 94132 - protein, 336 aa, Unknown
  Bacterial polypetide isolated from the Sargasso Sea
MTTNIAINGFGRIGRLVLRAIFESGRKDLKVVAVNDLGTVATNAHLLKWDSNHGRFPGEITVQDDSIDIGFGPIKFTSERDPKQLPHKELDVDIVMECTGIFTDRDKAARHIEGGAKRVIVSAPSRNADITVVFGVNHDKITKEHEVISSASCTTNCLVPVAYVLNNAIGIETGYMTTVHAYTGDQPTLDTFHGDLRRARGAASSMVPTSTGAAKAVGLVLPELAGKLDGAAIRVPTSNVSLIDLKFIPKRPTTVEEINSTIIEAASNSPLKGILGTNDEPLVSIDFNHNSNSSTFDLNQTQVIEGGLVRVLAWYDNEWGFSTRMSDTAAFLTEML

SEQ ID NO: 94133 - protein, 460 aa, Unknown
  Bacterial polypetide isolated from the Sargasso Sea
ICSVARSNEKDVEAALDAAHAAFPEWGKTDITTRSNILNKIADVLEKNLNLLAVAECLDNGKPIRECMAADLPLVIDHWRYFAGVIRAEEGSIAEISNNQYSYNFHEPLGVVGQIVPWNFPLLMATWKLAPALAAGNCSVLKPAEQTPASIMVMMELIGDLLPPGVVNIVSGFGLEAGKPLASSKRVAKVAFTGETTTGRLIMQYAAQNIIPITLELGGKSPNIFFEDVMDKDDDFFDKCIEGFVMFNLNQGEVCTCPSRALIQESIYDKFMERAIARTKAVVQDNPLKMETMIGAQASVEQMEKIKSYLELGKKEGAKVLTGGSVGKLNSGLEKGNYIQPTIFEANNSMRISQEEIFGPVVSVIKFKDEAEALKIANDTLYGLGAAVWTRNGNIAHRMGREIQAGIVWTNCYHAYPAHSPFGGYKQSGVGRETHKMMLNHYRQNKNLHVSYAEKKLGFF

SEQ ID NO: 94134 - protein, 202 aa, Unknown
  Bacterial polypetide isolated from the Sargasso Sea
MVKVGINGFGRIGRLILRAILENYKGKIQVVGINDLGSIEANAHLIKFDSTHGTLNNDVKTSKEGFQIGDQNIKVFAERDPAKLPWGKIGADVVLECTGFFLDKKSAGKHLDAGAKKVIISAPAKEVDFTVVQGVNSKDLKKEHNIISNGSCTTNCLAPVAMVLENTFGIEYGYMTTIHSYTGDQKLLDTLHKDLRRARASG

SEQ ID NO: 94135 - protein, 75 aa, Unknown
  Bacterial polypetide isolated from the Sargasso Sea
MTVRIGINGFGRIGRMVVREAAKNSNVEIVAINDLVPSNNLAYLLKYDSTHGRFNGEVVAGQNSIGINGKNIECL

SEQ ID NO: 94136 - protein, 176 aa, Unknown
  Bacterial polypetide isolated from the Sargasso Sea
MAKILNESFGIQMGVINTIHAYTNDQRLADVPHSDWRRSRAAAENVIPTTTGAARAVGKVLPELDGKLDGIAMRVPVPDGSVVDLNVRLDKEVTTDEVNDVIRSASESGPLKNVLQYSNLPVVSTDIIGNPHSSIFDAPFTRVIQGNFVKTLNWYDNEWGYSNRVVDLLETLHALD

SEQ ID NO: 94137 - protein, 340 aa, Unknown
  Bacterial polypetide isolated from the Sargasso Sea
PLLMATWKLAPALAAGNCSVLKPAEQTPASIMVMMELIGDLLPPGVVNIVSGYGLEAGKPLASSKRVAKVAFTGETTTGRLIMQYAAQNIIPITLELGGKSPNIFFEDIMNKDDDFLDKCVEGFVMFNLNQGEVCTCPSRALVQESIYDKFMERCIKRTKAVVQDNPLKMETMIGAQASVEQMEKIKSYLDLGKKEGAKVLTGGSVGKLNSGLEKGNYIQPTIFEAKNNMRISQEEIFGPVVSVIKFKDEADALRIANDTLYGLGAGVWTRNGNIAYRMGRAIQAGIVWTNCYHAYPAHSPFGGYKQSGVGRETHKMMLNHYRQNKNLHVSYAEKKLGFF

SEQ ID NO: 94138 - protein, 260 aa, Unknown
  Bacterial polypetide isolated from the Sargasso Sea
MSKNVGINGFGRIGRQILRIIAEENIDINITAINGRSDLETYKHLLKYDSAYGKIKLTVDCDDKFLYLGDRKIRFFSESIPENIPWQEEDVKIVVESSGKFNSKEKASGHMKNGVEKVLLTAPGKNEDATIVMGVNENIYDHSNHEIISNSSCTTNCLAPVIKILEDNFQIKNGFMTTIHSYTNDQNILDNSHKDLRRARAGASSIIPTTTGAAKSVGKVIESVEGKLDGMAFRVPTPSCSVVDLNVVLEKKTNAKEINI

SEQ ID NO: 94139 - protein, 450 aa, Unknown
  Bacterial polypetide isolated from the Sargasso Sea
IYGKSLVNESPVAIMKAHRFARQTDNNELSELETYPILQHISTLELQDCEIDIGEIAVSCPFFGDIKDDSSKIPNYINSELESVINIDSKRPEVPANIVLYGFGRIGRLVARMMTQTTGPGNYFRLKAIVIRKASDDDIFKRASLLTRDSVHGPFDGTVRVDEENSTLVINGNPVKVIYATNPDEVNYADHEIHNPIVIDNTGVWRDKKGLSKHIESGASKVILTAPAKGDLKNIVYGINDDILDDNDSIISAASCTTNAIVPILKAVNDEYKIKGGHIETVHAYTNDQNLIDNFHKGDRRGRGAPLNMVITTTGAVKAVAKALPELEGKLTGNAIRVPTPNVSLAILSLALDNEVTVDQINQYLKSIAFHSKYREIIGFVNSSEIVSTDFYSSPFASIIDSQATIASKNRVTLYCWYDNEYGYSKQVIGLTKKVAKIELPRLPNPVNKA

SEQ ID NO: 94140 - protein, 402 aa, Unknown
  Bacterial polypetide isolated from the Sargasso Sea
DCEIDIGEIVVDFMRENNSLDDSQIDSHIKSYILDPLDKVDQQRPSKPQDIVLYGFGRIGRLVSRIMAQMTGPGNYYRLRAIVVRKVSDTNDLLKRASLLRRDSVHGSFHGTIRVDNETETLVINGNPVKIIYANGPNDFNYSDYDIDNPIVIDNTGVWRDEKDLSLHLESGASKVVLTAPGKGQIKNIVNGINNDILNESDNVISAASCTTNAIVPVLDILNKEYSITSGHIETVHAYTNDQNLIDNYHKKDRRGRSAALNMVITSTGAVKAVSKALPELDGKLTGNAIRVPTPNVSLAVMSITVKKNDLNKEDVNEFLRKTAFNSKYREIVGFVNSTEIVSSDFYSSPFASVIDSQATIVSDNKITLYCWYDNEYGYSVQVVNLVKNIAGINLIRLPVKV

SEQ ID NO: 94141 - protein, 337 aa, Unknown
  Bacterial polypetide isolated from the Sargasso Sea
MAIKIGINGFGRMGRLALRAAWDWDEVEFVQINDPAGDAATLAHLLEFDSVHGRWCYSVTASNDQIHIQDKSIRTTRNKTIAETDWAGCDVVIEASGVMKTKALLQAYLDQGVKRVVVTAPVKEEGVLNVVMGVNHQLYDPAMHPIVTAASCTTNCLAPVVKVIHEQIGIKHGSMTTIHDITNTQTILDAPHKDLRRARACGLSLIPTTTGSATAITHIFPELKGKLNGHAVRVPLANASLTDCVFELERSVTEEEVNALLQTAAEGELKGILGYEERPLVSVDYKTDPRSSIVDALSTMVVNGTQLKLYVWYDNEWGYANRTAELARLVGQLDVPR

SEQ ID NO: 94142 - protein, 222 aa, Unknown
  Bacterial polypetide isolated from the Sargasso Sea
MSIKIGINGFGRIGRLVFRTAIENDDFEVMCINDLLEVEHLAYLLKYDSVHGIFNGSVETVNGNLIVNGKTITVSSEKNPELIKWGDMSVDVVAECTGLFTTKDKAGLHISGGCKKVVISAPSSDVPMFVMGVNHKDVNGNDLVVSNASCTTNCLAPIAKVLNDNFLIQEGLMTTVHAVTATQFTVDGPSKKDYRGGRSSLLNIIPSSTGAAKAVTKVIPSL

SEQ ID NO: 94143 - protein, 132 aa, Unknown
  Bacterial polypetide isolated from the Sargasso Sea
GAMIPTSTGAAKAMSLVLPSLKGKLDGTAIRVPTPNVSLIDLTVVTEKEVTVDEINSSMKKAAKGDLKGILDVNEKPLVSKDFNHNAHSSIFDLTQTQVIKGKFSRVLSWYDNEWGFSNRMCDTTIQIAGLI

SEQ ID NO: 94144 - protein, 304 aa, Unknown
  Bacterial polypetide isolated from the Sargasso Sea
LIGDLLPPGVVNIVSGYGLEAGKPLASSKRVAKVAFTGETTTGRLIMQYAAQNIIPITLELGGKSPNIFFEDIMNKDDDFLDKCVEGFVMFNLNQGEVCTCPSRALVQESIYDKFMERCIKRTKAVVQDNPLKMETMIGAQASVEQMEKIKSYLDLGKKEGAKVLTGGSVGKLNSGLEKGNYIQPTIFEAKNNMRISQEEIFGPVVSVIKFKDEADALRIANDTLYGLGAGVWTRNGNIAYRMGRAIQAGIVWTNCYHAYPAHSPFGGYKQSGVGRETHKMMLNHYRQNKNLHVSYAEKKLGFF

SEQ ID NO: 94145 - protein, 146 aa, Unknown
  Bacterial polypetide isolated from the Sargasso Sea
QNHSVLRRARGASISMIPTSTGAAKALSLVLPKLKGKLDGTAIRVPTPNVSLIDLTFVSKKKTSAEKINNLILKASRTSSLKNILSTNNLPLVSIDFNHNASSSIFDLTQTQVLNNKFCRILSWYDNEWGFSNRMVETMMDLKKFV

SEQ ID NO: 94146 - protein, 338 aa, Unknown
  Bacterial polypetide isolated from the Sargasso Sea
MKKKVAINGFGRIGRLVYRAFLERLNEFSNQYEISYINDLADIDSNIHLLKYDSIHGPLNKEVNKISNEQFSIGENTVTVTSEKNPIDLKWKDKKVDIILECTGVFASKEKAMSHIESGASKVIVSAPCSGADITVVQGVNNKNINIDHQVISNASCTTNCLAPVAFVIDQEFGIENGYMTTIHSYTGDQNTVDTFHKDLRRARAASSNIIPTSTGAAKAVGLVLPHLNGKLDGTAIRVPTPNVSLVDFKFNTKKNITIENLNNKFQEYANSSLKDILGVDTDPKVSSDYNHDARSSILDLSETTTVSDNFGRVLTWYDNEWGFSNRMLETTAQVCNL

SEQ ID NO: 94147 - protein, 262 aa, Unknown
  Bacterial polypetide isolated from the Sargasso Sea
MTIRIGINGFGRIGRLVMRAAAERNDIEVVAINDLLDTDYIAYLLKYDSTHGLFDGEVTVDNNSLVVNGKTIRITSERDPAALKWDEVGVDVVVESTGLFLTKETATKHIEAGAKKVVMSAPSKDDTPMFVMGVNQDSYAGENIVSNASCTTNCLAPLAKVLNDKFGIVDGLMTTVHATTATQKTVDGPSMKDWRGGRGAGQNIIPSSTGAAKAVGKVIPELNGKLTGMAFRVPTPNVSVVDLTVNLAKPASYAEICAARKK

SEQ ID NO: 94148 - protein, 336 aa, Unknown
  Bacterial polypetide isolated from the Sargasso Sea
MAVNVAISGFGRIGRLVLRSIIESKRKDINVVAINDLAPIETNAFLLANDTVHGPLNEKVSFKRNKMIIGRKNITVLSQRDPKKLPWKRMKIDVALECTGLFTSKDKAAMHIKAGAKKVLVSAPCTNADKTIVYGVNEDEITKEDLVVSNASCTTNCLAPVAKVLHDKFKIVHGYMTTIHAFTGDQSVLDTFHSDLRRARAASLSMIPTSTGAAKAVGLVMPELSGKLDGTAIRVPTPNVSLIDFKFVSKKRMTVDSINKAMSAAAKSNKLNGILDVNSKPLVSSDFNHNPASSNFDLTQTQVIDGKFGRVLSWYDNEWGFSNRMCDTAVAMKRSR

SEQ ID NO: 94149 - protein, 341 aa, Unknown
  Bacterial polypetide isolated from the Sargasso Sea
MTLRVAINGFGRIGRNVMRGWISRGADTGLEIVGMNSTSDPKTSAHLLTYDSILGKLDPSVKIETTDDTMLVNGKEIKFFADRNPLNCPWKDWGVDLVIESTGVFNTDEKASMHLEAGASKVILTAPGKGDGVGTFVVGVNDDQYRHEDWNILSNASCTTNCLAPIVKVLDQNFGLDWGLMTTIHSYTGDQRILDNSHRDLRRARAAALNMVPTTTGAAKAVALVYPEVKGKLTGFAMRVPTPNVSAVDLTFGPSRATSVDEVKAVIKAASENGMKGIIKYSDLPLVSTDYAGTNESTIFDADLTYAMGDKAVKILAWYDNEWGYSQRVVDLAEVVARNWK

SEQ ID NO: 94150 - protein, 101 aa, Unknown
  Bacterial polypetide isolated from the Sargasso Sea
MVKIGINGFGRIGRLILRALLENYKDKIQVVGINDLGSIDTNAHLIKYDSTHGTLPHDVSTSKDGFKILNQNIKVYAERDPANLPWGKVGADIVLECTGLF

SEQ ID NO: 94151 - protein, 340 aa, Unknown
  Bacterial polypetide isolated from the Sargasso Sea
MKIGINGFGRIGRLVFRALWDRADIEITHINEIAGDSNAAAHLLEFDSVHGRWGKDIKVKEEEIIIEGKKLDYTSFKNYLDVPWEKSSVDIILECTGKNKKPDKLNPYFDSLGMKRVIVACPVKGVVAEAESLNIVYGINQSLYDPSKHKLVTAASCTTNCLAPIVKVINENFSIKHGAITTIHDVTNTQVPVDFYKSDLRRARGCMQSLIPTTTGSAKAIAEIFPELKGKLNGHAVRVPLLNGSLTDAVFELNKEVTTEQVNLALKEASETYLKGILGYEERPLVSADYVNDSRSSIVDSLSTMVVNSNLLKIYAWYDNEWGYSCRLADLTEYVIKKEI

SEQ ID NO: 94152 - protein, 340 aa, Unknown
  Bacterial polypetide isolated from the Sargasso Sea
MTLRVAINGFGRIGRNFMRCWLSRGAYTNIEVVGINVTSDPKTNAHLLKYDSVLGQLDGVDIQYTDDTFVINNKTIKCFSDRNPLNLPWKDWGVDLVIESTGVFNTDVGASKHLEVGAKKVILTAPGKGDGVGTYVVGVNADKYKHKDYDILSNASCTTNCLAPVVKVLDQTFGINKGLMTTIHSYTGDQRILDNSHRDLRRARAAATNIVPTSTGAAKAVALVYPEMKGKLTGIAMRVPTPNVSAVDFVFESSKSVTAEEVNNALKEASLSTMKGIIKYGDEPLVSSDYAGTNESSIVDSDLTMCIGDNLVKVLAWYDNEWGYSQRVVDLAEIVAKNWE

SEQ ID NO: 94153 - protein, 261 aa, Unknown
  Bacterial polypetide isolated from the Sargasso Sea
YLQSENPGSIPWSSEDVQIVVESTGFFTDATKAVAHKRDSVKKVVISAPAKNEDLTMVLGVNDSAYDPSKHHVISNASCTTNGLAPVAKVLHETYGIDRGLLTTVHAYTNSQRTVDTAAKDLRDARAAALNIVPSGTGAAKAVGLVIPELQGKFTGMAFRVPTPTVSVVDFTAILNKDAPPEDINAAMKKAADGPLKGILRYTDKPLVSTDMRGDPHSSIFSAVDTIGLGNFVKVVSWYDNEWGYSNRVADLLNFLENKGL

SEQ ID NO: 94154 - protein, 289 aa, Unknown
  Bacterial polypetide isolated from the Sargasso Sea
MLRYDSVHGPFPGTITVSDSSIDLGNGSIAVLNERYPSKLPWDDLQVDVALECTGLFTSRDAAGQHISAGAKKVLISAPSNDADFTVVYGVNHDQISPDHKIISNASCTTNCLAPVVDVLNKSIGIERAFMTTVHAYTLDQNILDSLHSDLRRARSAGSSMIPTSTGAAKAVGIVLPELKGKIDGTAIRVPTANVSMVDLKFVSSKQTNIEEINLAISKASETHLKNVLGYNEEPLVSVDFNHNPCSSSFDATQTNVVDKTLCRVLTWYDNEWGFSNRMGDVAALLGAL

SEQ ID NO: 94155 - protein, 263 aa, Unknown
  Bacterial polypetide isolated from the Sargasso Sea
MTVKIGINGLGRIGRMIIRSLIENNNKKVEIKHINSRSNSKVVSSLLKYDSIHGKFNCEIKYGDSHLNINGKKITCSQHSNLNEINWKKYGVDYVLECTGKFNSKEKLNTHIKNGAKKVIVSAPCKNADKTIVYGVNHKSISKKDLVISAASCTTNCLAPIAYVLNKEFKIEKGFMTTIHSYTTDQRLLDNSHKDPRRARSATQSMVPTSTGASKAIGEIIPELKGKLEGLAIRVPTPNVSLVDLVFNSKNKLTVKKINESFR

SEQ ID NO: 94156 - protein, 118 aa, Unknown
  Bacterial polypetide isolated from the Sargasso Sea
MTKIGINGFGRIGRLVLRALLENYKDKIQVVAINDLGSIETNAHLIKYDSTHGTLNHDVKTSKDGFEISNQKIKVFAEKDPGKISWGKVGADVVLECTGIFLDKSSAQNHIKGGAKKV

SEQ ID NO: 94157 - protein, 517 aa, Unknown
  Bacterial polypetide isolated from the Sargasso Sea
MSTQQAKSSKVSSALDTSHLKVKFPFKAKYGNYINGKFVEPKSGKYFDNVSPINNEKICSVARSNEKDVDAALDAAHAAFLEWGKTDITTRSNILNKIADVIEKNLNLLATAECLDNGKPIRECMAADLPLVVDHWRYFAGVIRAEEGSIAEISNNQYSYNFHEPLGVVGQIIPWNFPLLMATWKLAPALAAGNCVVLKPAEQTPASINVLMELIGDLLPPGVVNIVSGYGLEAGKPLASSKRVAKVAFTGETTTGRLIMQYAAQNIIPITLELGGKSPNIFFEDVMEKDDDFFDKCIEGFVMFNLNQGEVCTCPSRALIQESIYDKFMERAIARTKAVKQDNPLKMETMIGAQASVEQMEKIKSYLELGKKEGAKVLTGGSVAKLNSGLEKGNYIQPTIFEAKNNMRISQEEIFGPVVSVIKFKDEAEALKIANDTLYGLGAAVWTRDGNTAHRMGRAIQAGIVWTNCYHAYPAHSPFGGYKQSGVGRETHKMMLNHYRQNKNLHVSYAEKKLGFF

SEQ ID NO: 94158 - protein, 441 aa, Unknown
  Bacterial polypetide isolated from the Sargasso Sea
HAAFPEWGKTDITTRSNILYKIADVLEKNLNLLAVAECLDNGKPIRECMAADLPLVIDHWRYFAGVIRAEEGSIAEIANNQYSYNFHEPLGVVGQIVPWNFPLLMATWKLAPALAAGNCSVLKPAEQTPASIMVMMELIGDLLPPGVVNIVSGFGLEAGKPLASSKRVAKVAFTGETTTGRLIMQYAAQNIIPITLELGGKSPNIFFEDVMEKDDDFFDKCIEGFVMFNLNQGEVCTCPSRALIQESIYDKFMERAIARTKAVVQDNPLKMETMIGAQASVEQMEKIKSYLELGKKEGAKVLTGGSVAKLNSGLEKGNYIQPTVFEAKNDMRISQEEIFGPVVSVIKFKDEAEALKIANDTLYGLGAAVWTRNGNIAHRMGRAIQAGIVWTNCYHAYPAHSPFGGYKQSGVGRETHKMMLNHYRQNKNLHVSYAEKKLGFF

SEQ ID NO: 94159 - protein, 161 aa, Unknown
  Bacterial polypetide isolated from the Sargasso Sea
MTVKIAINGYGRIGRNVMRALYESGRTDELQVLAINDLGDANSNAHLTKYDTAHGQFPYSVEARDDALIVNGDEIKVFAERDPEQLPWGELGVDVVLECTGFFAKKELASKHIKAGAKKVVISAPAGTDIDATIVYGVNHDTLSKDDEVISNASCTTQLSC

SEQ ID NO: 94160 - protein, 334 aa, Unknown
  Bacterial polypetide isolated from the Sargasso Sea
MTVKIGINGLGRIGRMVVRSILESNNKNIEIKHINNRTESKNTSQLLKYDSVHGKFNTEIKFNDNNLIINNKKIYYSRETDINKINWKKNNVDIVLECTGKNNSKEKAIQHIKNGARKVIVSAPCKNADKTIVYGVNHKIINKKDLVISAASCTTNCLAPVAQILNDEFKIEKGFMTTIHSYTSDQRLLDNSHKDPRRARSAAQSIIPTSTGASKALSEIIPELEGKIEGMALRVPTPNVSLVDLVFNSKKNLSINKINDVFKKASKKNLKDILYATEEKLVSIDFNHNPNSAIVDLSLTNVVGEKMGKVSAWYDNEWGFASRMCDLAEYIHKI

SEQ ID NO: 94161 - protein, 311 aa, Unknown
  Bacterial polypetide isolated from the Sargasso Sea
ENVDVVAINDIFDKGALTYLLKYDTVMGRFPGEVTLDGDIIKTENQSVKLLAERDPASLPWNELGVDIVIESTGIFRQRNQLQNHITAGAKRVVLTVPSKDEIDYTVVLGVNDDGLRPEHKIVSNASCTTNCLAPMAKILNDSFGIQMGVINTIHAYTNDQRLADVPHSDWRRSRAAAENVIPTTTGAARAVGKVLPELDGKLDGIAMRVPVPDGSVVDLNVRLSEDVKVEDVNDAVMSAADSGSLKNVLEYSTLPVVSSDIIGNPHSSIFDAPFTRVIEGNFVKTLNWYDNEWGYSNRVADLLDTLYALD

SEQ ID NO: 94162 - protein, 393 aa, Unknown
  Bacterial polypetide isolated from the Sargasso Sea
MAADLPLVVDHWRYFAGVIRAEEGSIAEIANNQYSYNFHEPLGVVGQIIPWNFPLLMATWKLAPALAAGNCVVLKPAEQTPASINVLMELIGDLLPPGVVNIVSGFGLEAGKPLASSKRVAKVAFTGETTTGRLIMQYAAQNIIPITLELGGKSPNIFFEDVLDKDDDFFDKCIEGFVMFNLNQGEVCTCPSRALIQESIYDKFMERAIARTKAVVQDNPLKMETMIGAQVSLEQMEKIKSYLDLGKKEGAKVLSGGNVAKLNSGLEKGNFIEPTIFEAKNNMRISQEEIFGPVVSVIKFKDEAEALKIANDTLYGLGAAVWTRDGNRAHRMGRGIQAGIVWTNCYHAYPAHSPFGGYKQSGVGRETHKMMLNHYRQNKNLHVSYAEKKLGFF

SEQ ID NO: 94163 - protein, 331 aa, Unknown
  Bacterial polypetide isolated from the Sargasso Sea
MKIGINGFGRIGRLAFRCAWEHPTWDIVQINDPAGDALTWSHLVNFDSVQGKWQHSAESAREEIIVGEKRINCTRNLQLKQTDWSNCDLVIEASGQMKTSELLSEYLNQGVKQVVVTAPIKEPEILNLVFGVNHELFDQEKPSIITASSCTTNCIAPAIKVIHEQFGIVHGSITTVHDITNTQVVLDQGHKDLRRARSSGNNLIPTTTGSAKAIAQIFPELEGKLNGHAIRVPLANASLTDCVFELNKKTNADEVNRALEQAAAGSLKGILGFEEKPLVSTDYVGDSRSSVVDALSTMVINDTQLKLYLWYDNEWGYSNRVIDLVEYISNA

SEQ ID NO: 94164 - protein, 251 aa, Unknown
  Bacterial polypetide isolated from the Sargasso Sea
METLLPPGVVNIVSGFGLEAGKPLASSKRVAKVAFTGETTTGRLIMQYAAQNIIPITLELGGKSPNIFFEDIMEKDDDFFDKCIEGFVMFNLNQGEVCTCPSRALVQESIYDKFMERAVARTKAVVQDNPLKMETMIGAQASVEQMEKIKSYLELGKKEGAKVLTGGSVGKLNSGLEKGNYIQPTIFEANNQMRISQEEIFGPVVSVIKFKDEAEALKIANDTLYGLGAAVWTRNGNIAHRMGRAIQAGIV

SEQ ID NO: 94165 - protein, 274 aa, Unknown
  Bacterial polypetide isolated from the Sargasso Sea
CKSLRLLGETSTGRLIMQYAAQNIIPITLELGGKSPNIFFEDIMEKDDDFLDKCVEGFVMFNLNQGEVCTCPSRALVQESIYDKFMEKCIARTKAVVQDNPLKMETMIGAQASVEQMEKIKSYLDLGKKEGAKVLTGGAVGKLNSGLEKGNYIQPTIFETNNKSRISQEEIFGPVVSVIKFKDEAEALEIANDTLYGLGAGVWTRNGNIAYRMGRAIQAGIVWTNCYHAYPAHSPFGGYKQSGVGRETHKMMLSHYRQNKNLHVSYAEKKLGFF

SEQ ID NO: 94166 - protein, 337 aa, Unknown
  Bacterial polypetide isolated from the Sargasso Sea
MTVRVAVNGFGRIGRNVVRALYESSKRAEMEIVAINGRGSPEQITHLFKYDSAHGKFPHKVHCDGKSLVIDDKDKIKFIYDRDPTKLPWNDLDVDVVLECTGAFRDHETASKHLDAGARKVLISAPGKNMDATIVYGVNHNILNDEHKIVSNASCTTNCLAPLVKPLHKAIGIKHGSMTTIHSYTNDQVLTDAFHNDPRRARSATMSQVPTKTGAAKGLGQVIPELDGKLDGFAMRVPTVNVSAVDLSFVPERETSEEEINQIMLDASLGELKGVLEYCEEPLVSIDFNHNPASAIYDSTLTKVMQGSFVKVIAWYDNEWGFSQRMLDTALAMTSKR

SEQ ID NO: 94167 - protein, 205 aa, Unknown
  Bacterial polypetide isolated from the Sargasso Sea
MFVMGVNHREAKSSDTIVSNASCTTNCLAPIAKVLNDNFGIEEGLMTTVHAATATQFTVDGPSKKDFRGGRSSLLNIIPSSTGAAKAVTKVIPSLNGKLTGMAFRIPTANVSVVDLTVRLNKKTSYEEIKNSMLDASKKDLNGILGYCDDPVVSQDFIGDKRTSIFDANAGMELNSNFFKIISWYDNECGYSNKLLDLSKHIFSI

SEQ ID NO: 94168 - protein, 336 aa, Unknown
  Bacterial polypetide isolated from the Sargasso Sea
MAVNVAISGFGRIGRLVLRSIIESKRKDINVVAINDLAPIETNAFLLANDTVHGPLNEKVSFKRNKMIVGRKNITVLNQRDPQKLPWKRMKIDVALECTGLFTSKDKAAMHIKAGAKKVLVSAPCTNADKTIVYGVNEDEITKEDLVVSNASCTTNCLAPVAKVLHDKFKIVHGYMTTIHAFTGDQSVLDTFHSDLRRARAASLSMIPTSTGAAKAVGLVMPELSGKLDGTAIRVPTPNVSLIDFKFVSKKRMTVDSINKAMSAAAKSNKLNGVLDVNSKPLVSSDFNHNPASSNFDLTQTQVIDGKFGRVLSWYDNEWGFSNRMCDTAVAMKRSR

SEQ ID NO: 94169 - protein, 333 aa, Unknown
  Bacterial polypetide isolated from the Sargasso Sea
MRVAINGFGRIGRSVFRILNFRENFDVVAINDIADNEAMAYLLKYDTVMGPFNDLVEIKGDVLNTSHNAVKMLAEKDPNQLPWGEMGVDVVIESTGIFRTKNELEQHLRSGAKKVILTVPSKDEIDYTLVIGVNDGGLTDEHKIISNASCTTNCLAPIAKILNDNYGIEYGVINTIHAYTNDQRLADVPHSDWRRSRAAAENIIPTTTGAARAVGKVLPELDGKLDGIAMRVPVPDGSVVDSVFRLEKRVTTDEINQMVKHAADEPSMRSVMEYSTLPVVSTDIIGNPHSSIFDAPFTKVIDGTLVKTVNWYDNEWGYSNRVVDLVSILKKFN

SEQ ID NO: 94170 - protein, 334 aa, Unknown
  Bacterial polypetide isolated from the Sargasso Sea
MKTRIGINGFGRIGRSVFRVLNSRDDIEIVAINDIFDKEALTYLLKYDTVMGRFPSEVTLDGDMLHAGKQKVKLIAERNPSDLPWGELGIDIVIESTGIFRTREQLEQHLTAGCKKVVLTVPAKDEIDYTVVLGVNDKGLKTEHKIVSNASCTTNCLAPMAKVLNENFGIELGVINTIHAYTNDQRLADVPHSDWRRSRAAAENVIPTTTGAARAVGVVLPELNGKLDGIAMRVPVPDGSVVDFNVQLNKDVTIDQINEAVREASINGSLKGILEYSTLPVVSSDIIGNSHSSIFDAPFTRVIGGNYVKTLNWYDNEWGYSNRVVDLVSLLGSI

SEQ ID NO: 94171 - protein, 221 aa, Unknown
  Bacterial polypetide isolated from the Sargasso Sea
MVKVGINGFGRIGRLILRALLENYKGKIQVVGINDLGSIEANAHLIKFDSTHGTLNHDVKITKDGFQIGDQNIKVFAERDPSKLPWGKIGADVVLECTGFFLDKKSAGKHIEAGAKKVIISAPAKEVDFTVVQGVNSKDLKKEHNVISNGSCTTNCLAPVAMVLENTFGIEYGYMTTIHSYTGDQKLLDTLHKDLRRARASGDAMIPTSTGAAKAMSLVLP

SEQ ID NO: 94172 - protein, 275 aa, Unknown
  Bacterial polypetide isolated from the Sargasso Sea
RVAKVAFTGETTTGRLIMQYAAQNIIPITLELGGKSPNIFFEDVLDKDDDFFDKCIEGFVMFNLNQGEVCTCPSRALIQESIYDKFMERAIKRTKAVVQDNPLKMETMIGAQASVEQMEKIKSYLDLGKKEGAKVLCGGKVAKLNSGLEKGNYIEPTIFEAKNNMRISQEEIFGPVVSVIKFKDEAEALKIANDTLYGLGAAVWTRNGNIAHRMGRAIQAGIVWTNCYHAYPAHSPFGGYKQSGVGRETHKMMLNHYRQNKNLHVSYAEKKLGFF

SEQ ID NO: 94173 - protein, 172 aa, Unknown
  Bacterial polypetide isolated from the Sargasso Sea
MTVKIAINGYGRIGRNVLRALYESGRTDELQVLAINDLGDANSNAHLTKYDTAHGPFPYSVEARDDALVVNGDEIKVFAERDPEQLPWGDLGVDVVLECTGFFAKKELASKHINAGAKKVVISAPAGTDIDATIVYGVNHDTLSKDDAVISNASCTTNCLAPLVKPIHESMD

SEQ ID NO: 94174 - protein, 337 aa, Unknown
  Bacterial polypetide isolated from the Sargasso Sea
MATKVAINGFGRIGRLALRAIIESGRRDLDVVAINDLGSAKFNAHLLQYDSVHGTLSKKVTGRKSSIGIGNKSIKIFSERNPEDLPWGDLGVDVVMECTGIFTSKEKAKLHLNAGAKRVLISAPATNADITVVYGVNHKKIRKSHKIISNASCTTNCLAPVAKVLNKICGINQGYMTTVHAFTGDQSILDTLHSDERRARASSVSMIPSSTGAAKAVGLVLPELQGRLDGTAVRVPTPNVSMIDLVFNSKKKIDAETINNAMIKASKGELKGVLGVEDKPLVSIDYNHNPLSSIFDLTQTQVIKGRLGRVLSWYDNEWGFANRMGDTASLIGKLIKS

SEQ ID NO: 94175 - protein, 258 aa, Unknown
  Bacterial polypetide isolated from the Sargasso Sea
MKEIRPKLPWGKIGADVVLECTGFFLDKKSAGKHIEAGAKKVIISAPAKEVDFTVVQGVNSKDLKKEHNVISNGSCTTNCLAPVAMVLENTFGIEYGYMTTIHSYTGDQKLLDTFHKDLRRARASGDAMIPTSTGAAKAMSLVLPSLKGKLDGTAIRVPTPNVSLIDLTFVPNKEVTSESINDAMSKAASGPLKGILATNSAPLVSKDFNHNPHSSIFDLTQTQVIKGKFSRVLSWYDNEWGFSNRMCDTAIQISGLI

SEQ ID NO: 94176 - protein, 173 aa, Unknown
  Bacterial polypetide isolated from the Sargasso Sea
MVLEKTFGISYGYMTTIHSYTGDQKLLDTLHKDLRRARSTEGAMIPTSTGAAKAMSLVLPSLKGKLDGTAIRVPTPNVSLIDLTLVTDKEATPESINEAMTKAARGELKGILDVNQKPLVSKDFNHNPHSSIFDVTQTQVIKGKFSRVLSWYDNEWGFSNRMCDTSIQIAGLI

SEQ ID NO: 94177 - protein, 340 aa, Unknown
  Bacterial polypetide isolated from the Sargasso Sea
MTLRVAINGFGRIGRNFMRCWLSRGAYTNIEVVGINVTSDPKTNAHLLKYDSVLGQLDGVDIQYTDDTFVINNKTIKCFSDRNPMNLPWKDWGVDLVIESTGVFNTDVGASKHLEVGAKKVILTAPGKGDGVGTYVVGVNANTYKHKDYDILSNASCTTNCLAPVVKVLDQTFGINKGLMTTIHSYTGDQRILDNSHRDLRRARAAATNIVPTSTGAAKAVALVYPEMKGKLTGIAMRVPTPNVSAVDFVFESSKSVTAEEVNNALKESSLSSMKGIIKYGDEPLVSSDYAGTNESSIVDSDLTMCIGDNLVKVLAWYDNEWGYSQRVVDLAEIVAKNWE

SEQ ID NO: 94178 - protein, 334 aa, Unknown
  Bacterial polypetide isolated from the Sargasso Sea
MAIKIGINGMGRIGRMVLRSIIENKNKKIIIKHINNRSDPGVTFSLLKYDSIHGKFNANLNFNKKNFFVNKKKISFSQETNIENINWKKFGVDYVFECTGKFNSKEKLLPHLKNGAKKVIVSAPCKNSDKTIVFGVNEKTLLKSDKIISAASCTTNCLAPTLKVLNDNFKIEKAFMTTIHAYTTDQRILDNSHKDPRRARSASQSIVPTSTGASKAIGEIIPSLRGKIEGVAMRVPTPNVSLIELIFCTKKQINTDQINKAFSDASKKKLKNILEVTFEKLVSIDFNHNPASAIVDLSLTNVVGKNMGKISAWYDNEWGFSNRMCNIVEHLHKI

SEQ ID NO: 94179 - protein, 454 aa, Unknown
  Bacterial polypetide isolated from the Sargasso Sea
MKVSSVLDTSHLKVKFPFKAKYGNYINGKFVEPKSGKYFDNVSPISNEKICSVARSDEKDVEAALDAAHAAFPEWGKTDITTRSNILYKIADVLEKNLNLLATAECLDNGKPIRECMAADLPLVVDHWRYFAGVIRAEEGSIAEISNSQYSYNIPEPLGVVGQIVPWNFPLLMATWKLAPALAAGNCSVLKPAEQTPASIMVMMELIGDLLPPGVVNIVSGFGLEAGKPLASSKRVAKVAFTGETTTGRLIMQYAAQNIIPITLELGGKSPNIFFEDIMDKDDDFFDKCIEGFVMFNLNQGEVCTCPSRALVQESIYDKFMERAIARTKAVVQDNPLKMETMIGAQASVEQMEKIKSYLELGKKEGAKVLTGGSVAKLNSGLEKGNYIQPTVFEAKNDMRISQEEIFGPVVSVIKFKDEAEALKIANDTLYGLGAAVWTRNGNIAHRMGRAIQA

SEQ ID NO: 94180 - protein, 334 aa, Unknown
  Bacterial polypetide isolated from the Sargasso Sea
LKVKFPFKAKYGNYINGKFVEPKSGKYFDNVSPISNEKICSVARSNEKDVEAALDAAHAAFPEWGKTDITTRSNILYKIADVLEKNLNLLAVAECLDNGKPIRECMAADLPLVIDHWRYFAGVIRAEEGSIAEISNNQYSYNFHEPLGVVGQIVPWNFPLLMATWKLAPALAAGNCSVLKPAEQTPASIMVMMELIGDLLPPGVVNIVSGFGLEAGKPLASSKRVAKVAFTGETTTGRLIMQYAAQNIIPITLELGGKSPNIFFEDIMEKDDDFFDKCIEGFVMFNLNQGEVCTCPSRALIQESIYDKFMERAIARTKAVVQDNPLKMETMIGA

SEQ ID NO: 94181 - protein, 344 aa, Unknown
  Bacterial polypetide isolated from the Sargasso Sea
MNIGINGLGRIGRLVIRDFFGGTNRKFNTSNLSIFHLNDPHCNADNLCHLLKYDSVHGIWDALIKTLGHDRISINGSEIKLTNFINPSDVNWSDSNCNVVLDCTGKFLSKEKLQGYFNSDIKKVIVSAPINDPEILNIVFGVNDHLYDPSKYNIITAASCTTNCLAPIVSVVHKNLEILKGQITTIHNPTNTNVLLDKPHKDLRRARSTMLSMHPTSTGSAKAIGLIFPELKGKLDGHAVRVPVINSSLTDCVFQLKKKTTINEVNELFEQASKSDLKGILGIEFNLLVSIDFLNDTRSSIVDANSTLITDNNLLKVYSWYDNETGYACRMNDLAEMVCKSLNV

SEQ ID NO: 94182 - protein, 340 aa, Unknown
  Bacterial polypetide isolated from the Sargasso Sea
MRIGINGFGRIGRLVFRALWGRPGIELVHVNDPAGDAATAAHLLEFDSVHGRWDRNITSDANGFSVEGSPLTWSSEKDPTAVPWTARGVEMVLEASGKIKTPETLNPYFDQVGLKRVVVACPVKGQVAGEEALNIVYGINHDLYEPERHKLVTAASCTTNCLAPVVKVVHESFGIEHGMITTIHDITNTQVPIDAFKSDLRRARSGLTSLIPTTTGSAKAIAMIFPELKGKLNGHAVRVPLLNGSLTDAVFELKQNVSVEQVNAAFKAASEGALKGILGYEERPLVSCDYTNDNRSSIIDALSTMVVDDNQLKVFAWYDNEWGYSCRMADLTCQVVGLDA

SEQ ID NO: 94183 - protein, 482 aa, Unknown
  Bacterial polypetide isolated from the Sargasso Sea
MPQDSFGDWKWREALAELMVPLIGSLYRNGINIMIYGKSLVNESPVAIMKAHRFARQTDNNELSELETYPILQHISSLKLQDCEIDIGEIAVKCPFFNDIKDDTSKIPDYINGELKSVINKKSNRPNNPKNIVLYGFGRIGRLVARMMTQTTGPGNYFRLKAIVIRKAADDDIFKRASLLTRDSVHGAFDGTVRVDEENSTLVINGNPVKIIYASSPDEIKYKDFDIIDPIVIDNTGVWRDEDSLSKHLKSGASKVILTAPAKGDLKNIVYGINDNILKDNDSIISAASCTTNAIVPVLKAVNDEYKIKGGHIETVHAYTNDQNLIDNFHKGDRRGRGAPLNMVITTTGAVKAVAKALPELEGKLTGNAIRVPTPNVSLAILSLALEQEVTDTQINDYLKSIAFHSKYREIIGFVNSPEIVSTDFYSSPFASIIDSQATIASKNRVTLYCWYDNEYGYSKQVIGLTKKVAKINLPRLPNPVN

SEQ ID NO: 94184 - protein, 476 aa, Unknown
  Bacterial polypetide isolated from the Sargasso Sea
MTHEHYLQAWQESQELAEAMQPLIGRLYRQQGIEITIFGRPLQNASTIDILKAHRVVRRHQGAPLPIQQSFPLLQAIQALNPSAAEIDLGKLAVGYWQDHQDEAGIDDYLRARLAPALGRGVPAPTDVVLYGFGRIGRLLARLLIERTGAANSLRLRAIVVRGGREGDLEKRASLLRRDSVHGPFNGSIEVDVERSAIIANGTFIQVIYANSPADIDYTAYGIHYALIVDNTGVWRDEAGLSEHLKARGAARVLLTAPGKGEMKNVVFGVNHEVIGPDDKIISAASCTTNAITPVLKVMQDKYGIRHGHVETVHSYTNDQNLIDNYHKGERRGRSAALNMVMTSTGAAKAVAKALPELKGKLTGNAIRVPTPNVSLAIINLSLEQTTDRESLNAYLQQMALSSALHRQIDFSASTELVSSDMVGSRFAGIVDSQATIAEGDHCVLYVWYDNEFGYSCQVVRVMEQMAGAVRQDLPV

SEQ ID NO: 94185 - protein, 154 aa, Unknown
  Bacterial polypetide isolated from the Sargasso Sea
MAVRVAINGFGRIGRLVLRAILESRRNDLEVVGINDLGSPETNGHLLKYDSVHGNLDMAISVDGDNMDAGTGPIKVTAERDPARLPWRELNVDVAMECTGLFTKRDDAAKHLAAGARKVLISAPGTDVDKTIVFGVNHQSLSGDDSIVSKCVVH

SEQ ID NO: 94186 - protein, 268 aa, Unknown
  Bacterial polypetide isolated from the Sargasso Sea
TKPIRTTRIKTMPETDWSGCDVVIEASGVMKTKALLQAYLDQGVKRVVVTAPVKEEGVLNVVMGVNHQLYDPAIHPIVTAASCTTNCLAPVVKVIHEQIGIKHGSMTTIHDITNTQTILDAPHKDLRRARACGLSLIPTTTGSATAITHIFPELKGKLNGHAVRVPLANASLTDCVFELERSVTEAEVNALLQSAAEGELKGILGYEERPLVSVDYKTDPRSSIVDALSTMVVNGTQLKLYVWYDNEWGYANRTAELARLVGQLDLPR

SEQ ID NO: 94187 - protein, 336 aa, Unknown
  Bacterial polypetide isolated from the Sargasso Sea
MKIKVGINGMGRIGRMVLRSIFENNLKDIEIKHINNKSNLEIFANLIKYDSVHGKFSADVSFDKKHLFINKNKISYSQHSNLEDIQWKNLDVDYVFECTGNFNSKEKLQAHLKNGAKKVIVSAPCKNADKSIVYGVNQNVLNDNDQIISAASCTTNCLAPVANVIHENFEIEKGFMTTIHSFTSDQRVLDNSHKDPRRARSASQSIVPTSTGASKALSEIIPSLKGKLEGIAMRVPTPNVSLIELVFLSKKNLSIKAINDAFINASENKLKGIIEITNEKLVSIDFNHNKASSVIDGSLTNVVGDNMGKISAWYDNEWGFSNRMCDIARYLHKKFN

SEQ ID NO: 94188 - protein, 334 aa, Unknown
  Bacterial polypetide isolated from the Sargasso Sea
MNNIGINGFGRIGRSILRIIVESNSDLNVIAINDLGDRENLVYLFKHDSIMGVLDLHVELKGDDLIVGDRTIKLISHDDPANIPWSDLGVDLVVESTGFFRDKSSLEKHISSGAKKVVLTVPPKDEIDATVVLGVNDDSLTENDNLISNASCTTNCLAPIAKVLNDNFKIKSGLMTTVHAYTNDQALAETTHSDFRRGRSATQNIIPTSTGAAKAVGMVLPELNGKLDGMAMRVPVPNGSVVDLVVEVEENVTVNDVNNAVKKAAENELKGILEYSEIPLVSTDILQNSHSSIYDASSTQIVNKNHIKVVCWYDNEWGYSNRVVDLLEKLSTRE

SEQ ID NO: 94189 - protein, 167 aa, Unknown
  Bacterial polypetide isolated from the Sargasso Sea
MAINVAINGFGRIGRSILRALYESNNKEIKIVAINDVGDIKVSALLIKYDSVHGFFDKSVESNENELIIEGDKIPIYSDRDPTHLDWAKHNVDVVYECTGKFTKKEDAKVHIEVGGAKKVIISAPGQNADSTIVYGVNEDSIGSDDQIISNASCTTNLYCSSFKSSK

SEQ ID NO: 94190 - protein, 336 aa, Unknown
  Bacterial polypetide isolated from the Sargasso Sea
MTIRVAINGYGRIGRNVLRALYESEKAYPIKIVAINDLGDASINAHLTKYDSVHGRFNAKVEHDAEAIYVNGDKILTFQERDPGKLPWGDLQVDVVFECTGIFTSKDSVQPHLAAGAKKVIISAPGKNVDATVVYGVNNNVLTADMTVISNASCTTNCLAPFAKPLNDEIGIESGLMTTIHAYTNDQRLSDVYHTDLRRARAAALSMIPTKTGAAAAVGLVVPELQGKFDGLAVRVPTVNVSLVDLSFIASRDTTVEEVNAIIERAASVAPLSEVLAVNKEPLVSIDFNHNAFSSNFDATQTRVNGRLVKVMAWYDNEWGFSNRMLDNAVALMNAK

SEQ ID NO: 94191 - protein, 356 aa, Unknown
  Bacterial polypetide isolated from the Sargasso Sea
YKIADVLEKNLNLLAVAECLDNGKPIRECMAADLPLVIDHWRYFAGVIRAEEGSIAEIANNQYSYNFHEPLGVVGQIVPWNFPLLMATWKLAPALAAGNCSVLKPAEQTPASIMVMMELIGDLLPKGVVNIVSGFGLEAGKPLASSKRVAKVAFTGETTTGRLIMQYAAQNIIPITLELGGKSPNIFFEDVMDKDDDFFDKCIEGFVMFNLNQGEVCTCPSRALIQESIYDKFMERAIARTKAVVQDNPLKMETMIGAQASVEQMEKIKSYLELGKKEGAKVLTGGSVANLNSGLEKGNYIQPTVFEAKNNMRISQEEIFGPVVSVIKFKDEADALKIANDTLYGLGAAVWTRMEI

SEQ ID NO: 94192 - protein, 471 aa, Unknown
  Bacterial polypetide isolated from the Sargasso Sea
REGLAELMVPIIGSLYRNGTNILVYGKSLVNESPVAIMKAHRFARQSDNNELSELETYPILKYIETLDLADCEIDVGEIAVKCPFFEDIKNDDSKIGEFIDAELESVINKQSNRPSEPANIVLYGFGRIGRLVARMMTQTTGPGNYFKLRAIVIRKATDDDIFKRASLLTKDSVHGPFDGTVRVDEENSSLVINGNPVKVIYASGPDKVKYSDYGINDPVVIDNTGIWRDEEALSVHIKSGASKVILTAPAKGDIKNIVYGINDSILEENDQLISAASCTTNAIVPVLKTINDEFKINGGHIETVHAYTNDQNLIDNFHKKDRRGRGAPLNMVITSTGAVNAVAKALPELKGKLTGNAIRVPTPNVSLAILSLELDKKVSVEIVNDYLRSMAFHSEYREIIGFVNSSEVVSTDFYSSPFATVIDSQATITNDKRVTLYCWYDNEYGYTKQVINLAKKVAKINLPRLPKPIS

SEQ ID NO: 94193 - protein, 326 aa, Unknown
  Bacterial polypetide isolated from the Sargasso Sea
NGFGRIGRLVLRAIIESKRNDIKVLAINDLGSVEANAHLLSYDSVHGKLNSTVNVTSEGINTDHGDIKVFSERNPEDLPWGDLDIDIALECTGLFTKKEDANKHIIAGAKKVLISAPGNGVDYTVVYGVNEKGITNDHKIISNASCTTNCLAPVAKILNELVGIESGFMTTVHAFTGDQPVLDTLHSDLRRARAASSSMIPTSTGAAKAVGLVLPELSGKLDGTAVRVPTVNVSMVDLTFYAQKATSIEEINKSINEAALGSLSGVLTYNNAPLVSIDFNHNPASSNFDATQTQVVKEKLVRVLSWYDNEWGFSNRMADVAVLMGK

SEQ ID NO: 94194 - protein, 419 aa, Unknown
  Bacterial polypetide isolated from the Sargasso Sea
MVKKTKKRKKSKKSVKSKSKKKATKKISKSLKKKSLKTKSKNVRNKNNGGKMSAEAMKVSSVLDTSHLKVKFPFKAKYGNYINGKFVEPKSGKYFDNTSPISNEKICSVARSNEKDVDAALDAAHAAFPEWGKTDITTRSNILYKIADVLEKNLNLLAVAECLDNGKPIRECMAADLPLVIDHWRYFAGVIRAEEGSIAEIANNQYSYNFHEPLGVVGQIVPWNFPLLMATWKLAPALAAGNCSVLKPAEQTPASIMVMMELIGDLLPPGVVNIVSGFGLEAGKPLASSKRVAKVAFTGETTTGRLIMQYAAQNIIPITLELGGKSPNIFFEDVMDKDDDFFDKCIEGFVMFNLNQGEVCTCPSRALIQESIYDKFMERAIARTKAVVQDNPLKMETMIGAQASVEQMEKIKSYLELGK

SEQ ID NO: 94195 - protein, 514 aa, Unknown
  Bacterial polypetide isolated from the Sargasso Sea
MSAEAMKVSSVLDTSHLKVKFPFKAKYGNYINGKFVEPKSGKYFDNVSPISNEKICSVARSDEKDVEAALDAAHAAFPEWGKTDITTRSNILYKIADVLEKNLNLLATAECLDNGKPIRECMAADLPLVIDHWRYFAGVIRAEEGSIAEIANNQYSYNFHEPLGVVGQIVPWNFPLLMATWKLAPALAAGNCSVLKPAEQTPASIMVMMELIGDLLPPGVVNIVSGFGLEAGKPLASSKRVAKVAFTGETTTGRLIMQYAAQNIIPITLELGGKSPNIFFEDIMEKDDDFFDKCIEGFVMFNLNQGEVCTCPSRALIQESIYDKFMERAIARTKAVVQDNPLKMETMIGAQASVEQMEKIKSYLELGKKEGAKVLTGGSAAKLNSGLEKGNYIQPTVFEANNSMRISQEEIFGPVVSVIKFKDEAEALKIANDTLYGLGAAVWTRNGNIAHRMGRAIQAGIVWTNCYHAYPAHSPFGGYKQSGVGRETHKMMLNHYRQNKNLHVSYAEKKLGFF

SEQ ID NO: 94196 - protein, 296 aa, Unknown
  Bacterial polypetide isolated from the Sargasso Sea
EDHKDLVLIKNGANEAASDLAEDEGISLFSATGSCEMGRALAPIVAKRLGRSLLELGGNNAAIVCPSADLELTIKAITFSAAGTTGQRCTTLRRLFVHKDIYKEVVDKLKTSFDGLKIGDPMDREVQVGPLISEDSFQQMQKKLDSCRNKSLEVSGGDRLDIDGGVYVKPALVEVTEHIKEMNEETFAPILYVMPFENLKEAIDLQNSVKQGLSSSIFTNDVRESELFLSAEGSDCGIANVNIGTSGAEIGGAFGGEKDTGGGRESGSDSWKAYMRRTTATVNYGDDLPLAQGVEF

SEQ ID NO: 94197 - protein, 118 aa, Unknown
  Bacterial polypetide isolated from the Sargasso Sea
MNEETFAPILYAMPFDNLKEAIDLQNSVKQGLSSSIFTNDVRESELFLSAEGSDCGIANVNIGTSGAEIGGAFGGEKDTGGGRESGSDSWKAYMRRTTATVNYGDDLPLAQGVEFEEK

SEQ ID NO: 94198 - protein, 257 aa, Unknown
  Bacterial polypetide isolated from the Sargasso Sea
GGNHQQSLGDSADLKKASDRIWNGKLMNAGQTCIAPDYVYVKEEMLGDWIEATKDSISSMYPSVFDNEDYTSVVNDGHYQRLHGYIEDAREKGADVFEINPANESESEKTHNKMMPTVILNATEEMLVMQEEIFGPIMPIKTYNQIDEVVDYVNMHERPLGLYYFGNKKSEEDFVMSNTVSGGAALNDVIFQFIQEDLPFGGIGPSGMGHYHGIEGFRTFSHARGIYKQTPLEGLLKLMRPPFGKLIDQVISTKIKK

SEQ ID NO: 94199 - protein, 268 aa, Unknown
  Bacterial polypetide isolated from the Sargasso Sea
IGDPFDRNIQVGPLISEQSYNAMKKTLDACSSKAKKIHGGQKLDIEGGTYVQPAIVEVDSHIDEMKDETFAPILFVMPFNKLTDAIELQNSVKQGLSSSIFTNDFRESELFLGPEGSDCGIANVNIGTSGAEIGGAFGGEKETGGGRESGSDAWKAYMRRTTATLNYGTELPLAQGVEFGDKGKIMYEGMTFVRTENELIPQVAIHNRQRIEWIAEAGEDGRTYEEINAPNSYYRKCIKRRTYHGNHSSILQDLRYDVARGYIRLKHE

SEQ ID NO: 94200 - protein, 289 aa, Unknown
  Bacterial polypetide isolated from the Sargasso Sea
KGSIIGEQMIKDPRLPLVSFTGSTSMGRHVNKTVSERFGKTILELGGNNAIIIDETAEMELAIPAVVFGAVGTAGQRCTSTRRIIVHESIHDSFISKLINAYKQVVIGNPLDSKTLMGPLINQQAVDDYLKAIEMVTASGGKLLFGGNVLSLDGHFVTPAIVSAQNSWEIVQKETFAPILYVIKYSTIEEAMNLHNNVPQGLSSSIFTTSIRNAETFLSNRGSDCGIANVNIGTSGAEIGGAFGGEKETGGGRESGSDSWKQYMRRQTNTINWSKDLPLAQGIEFNLDK

SEQ ID NO: 94201 - protein, 308 aa, Unknown
  Bacterial polypetide isolated from the Sargasso Sea
QLYVLTMPSERPNHRLQELWHPLGVIGCITAFNFPMAVFAWNFCLAAVCGNSIIWKPSPHSNLCAKGIKDAWDKVSDEFADLILILEGEKEEAVAMCEDPAISLISATGSTQMGKELAPLVSKRLGKLLLELGGNNAAIVCPSADLDLTIKGIAFSACGTTGQRCTSLRRLFVHEDIYDDCVLRLKTCFEELIIGCPAKESSQIGPLISEASYQSMQATLTSLKDKKIEVIGGERLEIEDPNEYYVKPALVLVDKVEDEMLQETFAPILYIKTYKEINEAIQMQNDVSQGLSSSIFTNDIRESELFLS

SEQ ID NO: 94202 - protein, 59 aa, Unknown
  Bacterial polypetide isolated from the Sargasso Sea
MEWYDNRWVNCYHSYPAHAAFGGYKNSGIGRETNKMMLNHYQQTKNVLVSYAESPDGFF

SEQ ID NO: 94203 - protein, 161 aa, Unknown
  Bacterial polypetide isolated from the Sargasso Sea
IKKIAFTGCTEVGKQIISSTSNTNKKLTMELGGKSPFIVFEDADLDSAVEGVVDAIWFNQGQVCCAGSRLLIQESIEKKFIKKLKNRMERLRVGNPLDKSIDIGAIVAPIQLKKINSLVQRGVKEGAKLWQPSWSCPREGLFYPPTLFTNVTPASFISQIE

SEQ ID NO: 94204 - protein, 316 aa, Unknown
  Bacterial polypetide isolated from the Sargasso Sea
FEDADLDSAIEGVVDAIWLNQGQVCCAGSRLLVQESIEKKFIQKLKKRMEKLRVGDPLDKSIDIGAIVAPFQLKKINSLVNKAQKDGNKLWQPSWSCPTNGLFYPPSLFTNVTPSSFIAQVEIFGPVLTTMTFRTPSEAVSIANNTPYGLAASIWSENINLALDIAPKVKAGVIWINSTNLFDAACGFGGYKESGFGREGGSEGIRAYSKLALPLSKSKRGNKLSKVTPSNSIDRTPKLYIGGKQKRPDSGYSFSSYDAQNNFICDVPNANRKDVRDTVEVASKAVSKSSTNFNRAQILYYLAENLQDRKNTFSNL

SEQ ID NO: 94205 - protein, 223 aa, Unknown
  Bacterial polypetide isolated from the Sargasso Sea
DLKKASDRIWNGKLMNAGQTCIAPDYVYVKEEMLGDWIEATKDSISSMYPSVFDNEDYTSVVNDGHYQRLHGYIEDAREKGADVIEINPANESESEKTHNKMMPTVILNATEEMLVMQEEIFGPIMPIKTYNQIDEVVDYVNMHERPLGLYYFGNKKSEEDFVMSNTVSGGAALNDVIFQFIQEDLPFGGIGPSGMGHYHGIEGFRTFSHGRGIYKQTPLEGL

SEQ ID NO: 94206 - protein, 255 aa, Unknown
  Bacterial polypetide isolated from the Sargasso Sea
CGNSIIWKPSPHSNDCAKGIKEVWDKVSGEFADLVLVLEGGNEEAVALCEDKRIDLISATGSTQMGKELAPIVSARLGKLLLELGGNNAAIVCPSADLDLTIKGIAFSACGTTGQRCTSLRRLFVHEDIYEDCTKRLQKCFDELIIGCPTKESSQIGPLISEASFNSMQDTINSLKDKGITVFGGDRIEIEDPKEFYVKPALVLVNEIEEEMLSETFAPILYVKSYKNIEEAIQMQNNVSQGLSSSIFTNNIRES

SEQ ID NO: 94207 - protein, 118 aa, Unknown
  Bacterial polypetide isolated from the Sargasso Sea
MLSETFAPILYVKSYKNIEEAIQMQNNVSQGLSSSIFTNNIRESELFLSEAGSDCGIANVNIGTSGAEIGGAFGGEKDTGGGRESGSDAWKNYMRRMTATVNYGEELPLAQGVEFDEN

SEQ ID NO: 94208 - protein, 170 aa, Unknown
  Bacterial polypetide isolated from the Sargasso Sea
PLISEDSFQQMQQKLDSCRNKSLEVIGGNRLDIDGGVYVKPALVEVTEHIEEMNEETFAPILYVMPFNNLKEAIDLQNSVKQGLSSSIFTNDVRESELFLSAEGSDCGIANVNIGTSGAEIGGAFGGEKDTGGGRESGSDSWKAYMRRTTATVNYGDDLPLAQGVEFDEN

SEQ ID NO: 94209 - protein, 311 aa, Unknown
  Bacterial polypetide isolated from the Sargasso Sea
GIKDAWEKVSDDFADLILILEGEKEEAVAMCEDPTISLISATGSTQMGKELAPLVSKRLGKLLLELGGNNAAIVCPSADLDLTIKGIAFSACGTTGQRCTSLRRLFVHEDIYDDCVARLKTCFEELIIGCPTKESSQIGPLISEASYQSMQAILTSLKDKKIEVIGGERLEIENPNEYYVTPALVLVDEVEDEMLQETFAPILYIKTYKEINEAIQMQNDVSQGLSSSIFTNDMRESELFLSECGSDCGIANVNIGTSGAEIGGAFGGEKDTGGGRESGSDAWKNYMRRVTATVNYGDELPLAQGVEFDES

SEQ ID NO: 94210 - protein, 457 aa, Unknown
  Bacterial polypetide isolated from the Sargasso Sea
MNRDNYNQLVNKSHEISIKWRSLPAPQRGEYIRKFGEELRKQKVNLAALITEEARKIKTESLGEVQEAIDMCDFAVGLSRQLYGLTMPSERANHRLQEIWHPLGIVGCITAFNFPMAVFAWNFCLAAVCGNSIIWKPSPRSNECARGIKNAWDKISDDFSDLILILEGGNEESVALCEDNKISLISATGSTQMGKELAPIVSARLGKLLLELGGNNAAIICPSADLDLTVKGVVFSACGTTGQRCTSLRRLFVHEEIYDECVSRLKDYVNNLIIGCPSKDSSQVGPLISEESFNNMQVILDSLRSKDVEILGGERLEIEDPKEFYVRPALVLVDQIEDEMLKETFAPILYIKKFSDLKDAISMQNNVKQGLSSSIFTNDMRESELFLSESGSDCGIANVNIGTSGAEIGGAFGGEKETGGGRESGSDAWKNYMRRVTATINYGEELPLAQGVEFDET

SEQ ID NO: 94211 - protein, 508 aa, Unknown
  Bacterial polypetide isolated from the Sargasso Sea
MDSILNKLGINEFNYGACSGKDKWSENSNAKILESFNPANGKLLASVYMAEESDYNNILNQSIESFKEFRKVPAPVRGELVRQMGDALRDKKDALGSLVSLEMGKIKQEGDGEVQEMIDIADFAVGQSRMLYGKTMHSERPDHRMYEQWHPLGPVGVISAFNFPVAVWAWNAFIAAICGNTTIWKPSSSTPLTAIAVQKICNDVMQKNGYSGIFSLMVGSGSVVGEKLITDKRVPLISFTGSTNMGRHVSEVVGSRFGKCILELGGNNAMIIDDTATLSLAIPAIAFGAVGTAGQRCTSTRRVIAHEKIYDELKDQLINAYNQVSIGDPLDPNTLMGPLINENAITSYEKALERVVESGGNILCGGERIDQNGNFVTPAIAEVQNEWDIVQEETFAPILYLIKYKTIDEALNLHNDVPQGLSSSIFTNNIQNAEYFLSHRGSDCGIANVNIGTSGAEIGGAFGGEKETGGGRESGSDSWKQYMRRQTNTINWSSDLPLAQGIEFNLDK

SEQ ID NO: 94212 - protein, 450 aa, Unknown
  Bacterial polypetide isolated from the Sargasso Sea
MSKLTEQSKKAFLQWRTLPAPQRGEYIRKFGEALRERKTEVAEQITTEAKKIISEGEGEVQEVIDMCDFATGLSRQLYGLTMPSERPNHRLQEIWQPLGVVGCVTAFNFPVAVFGWNFCLAAVCGNSIIWKPSPHSEGCAKLVKEIWDSVAEDHKDLVLIKNGANEAASDLAEDEGISLFSATGSCEMGRALAPIVAKRLGRSLLELGGNNAAIVCPSADLDLTIKAITFSAAGTTGQRCTTLRRLFVHKDIYKEVVDKLKTSFDGLKIGDPMDRNVQVGPLISEDSLQQMQQKLDSCRNKSLKVTGGDKLDIDGGVYVKPALVEVTEHIEEMNEETFAPILYAMPFDNLKEAIDLQNSVKQGLSSSIFTNDVRESELFLSAEGSDCGIANVNIGTSGAEIGGAFGGEKDTGGGRESGSDSWKAYMRRTTATVNYGDDLPLAQGVEFDEK

SEQ ID NO: 94213 - protein, 457 aa, Unknown
  Bacterial polypetide isolated from the Sargasso Sea
MANNEFETIVNKSKEISLKWRALPAPQRGEFIRKFGEELRQQKESLAHIITKEARKIGTESLGEVQEAIDMCDFAVGLSRQLYGLTMPSERPNHRLQELWHPLGIVGCITAFNFPMAVFAWNFCLAAVCGNSIIWKPSPHSNECARGIKEAWDKVSGDFSDLILILEGGNEEAVSICEDNRIALVSATGSTQMGKELAPIVSARLGKLLLELGGNNAAIVCPSADLDLTIKGIAFSACGTSGQRCTSLRRLFVHQDIYDDCVERLKKCFDDLIIGCPTKEDSQIGPLISERSYNSMQQTLDSLKNKNVKVLGGERLHIEDPKEYYVKPALVLVENIEDEMLSETFAPILYVKKYKDLKDAISMQNNVSQGLSSSIFTNEMRESELFLSESGSDCGIANVNIGTSGAEIGGAFGGEKDTGGGRESGSDAWKNYMRRMTATINYGDELPLAQGVEFDES

SEQ ID NO: 94214 - protein, 126 aa, Unknown
  Bacterial polypetide isolated from the Sargasso Sea
MNKDIREMNYGPSLESSELAFKWLSKNNNKFGHFINGKMTTPKNTFETINPANSDILASISKGSLSDVNNAVKSAKVAFKNWKNLKPFERSKYLYALARLIQKNSRILAVLETLDNGKPIRETRDL

SEQ ID NO: 94215 - protein, 145 aa, Unknown
  Bacterial polypetide isolated from the Sargasso Sea
GQRLDIEDSNEYYVKPALVLVKEIEDEMLSETFAPILYVKSYEKIEEAIHMQNDVSQGLSSSIFTNDIRESELFLSESGSDCGIANVNIGTSGAEIGGAFGGEKDTGGGRESGSDAWKNYMRRVTATVNYGEDLPLAQGVEFDES

SEQ ID NO: 94216 - protein, 231 aa, Unknown
  Bacterial polypetide isolated from the Sargasso Sea
VAKRIVSGKFVNCGQTCIAPDYIVVNQHVKSDLISAIKENIIKTFGNKPIESESYGRIINKNNLIRLENIIKDQVIEFGGKINIDKLYIEPTIIVDPEINSEIMNEEIFGPILPILSYENESEIKNILDINPTPLAFYIFSKNQMFIDNLIENNKFGGCVINDTLIHYINPNLPFGGIGDSGMGAYRGKFSFDTFSHQKPVLRKKNMIDIPFRYGPYPKSFNFIRKILEKI

SEQ ID NO: 94217 - protein, 349 aa, Unknown
  Bacterial polypetide isolated from the Sargasso Sea
ITAFNFPMAVFAWNFCLSAVCGNSIIWKPSPHSNECAKGIKKAWDEISGEFSDLIQIIEGGNEEAVLICEDKRISLVSATGSTQMGKELAPIVSARLGKLLLELGGNNAAIVCPSADLDLTIKGIAFSACGTTGQRCTSLRRLFVHKDIYDDCVERLEKCFEELVIGCPSKDSSQIGPLISEDSFNSMQKTLESLKAKNVSVIGGERLDIEDSNEYYVKPALVLVKEIEDEMLSETFAPILYVKSYEKIEDAIRMQNDVSQGLSSSIFTNDMRESELFLSESGSDCGIANVNIGTSGAEIGGAFGGEKDTGGGRESGSDAWKNYMRRVTATVNYGEDLPLAQGVEFDES

SEQ ID NO: 94218 - protein, 457 aa, Unknown
  Bacterial polypetide isolated from the Sargasso Sea
MDKNKYSELVKKSKETSNRWRSLPAPQRGEYVRLFGEELRAKKNELAATITKEARKIKTESLGEVQEAIDMCEFAVGLSRQLYGLTMPSERPNHRLQELWHPLGIVGCITAFNFPMAVFAWNFCLAAVCGNSVIWKPSPHSNECAKGIKDAWDNVSGEYADLILVLEGGNEEAVALCEDKRINLVSATGSTQMGKELAPIVSARLGKLLLELGGNNAAIVCPSANLDLTIKGIAFSACGTTGQRCTSLRRLFVHEDIYDDCVKRLENCFADLVIGCPTKESSQIGPLISEQSFNSMQDTINSLKQKGVNVLGGERIEIEDPNEFYVKPALVLVDQIEDEMLSETFAPILYVKSYKSIEEAIKMQNDVSQGLSSSIFTNDIRESELFLSEAGSDCGIANVNIGTSGAEIGGAFGGEKDTGGGRESGSDAWKNYMRRMTATVNYGEELPLAQGVEFDES

SEQ ID NO: 94219 - protein, 540 aa, Unknown
  Bacterial polypetide isolated from the Sargasso Sea
MGEKHSDLINKSRAAFLKWRALPAPERGNYIRLFGEALREQKKEVANQITFEAKKIISESEGEVQEVIDMCDFATGLSRQLYGLTMPSERPNHRLQEIWQPLGIVGCITAFNFPVAVFGWNFCLAAVCGNSIIWKPSPHSEGCADLTKKIWDSVAGEYKDLVLIKKGANEASVELAKDENIALLSATGSCAMGKAIAPLVSARLGRSLLELGGNNAAIICPTADLNLTIKGVTFSAAGTTGQRCTTLRRLFVHEDIYEEAINKLIPSFESLKIGDPFDRNIQVGPLISEQSYEAMKKTLDDCLSKAKKIHGGQKLDIEGGTYVQPAIVEVDSHIDEMKDETFAPILFVMPFNKLTDAIELQNSVKQGLSSSIFTNDFRESELFLGPEGSDCGIANVNIGTSGAEIGGAFGGEKETGGGRESGSDAWKAYMRRTTATLNYGTELPLAQGVEFGDKGKIMYEGMTFVRTENEIMPQVAIQNRQRIEWIAEAGEDGRTYEEINAPNSYYRKCIKRRTYHGNHSSILQDLRYDVARGWIRLKHE

SEQ ID NO: 94220 - protein, 450 aa, Unknown
  Bacterial polypetide isolated from the Sargasso Sea
MSKLTEQSKKAFLHWRILPAPQRGEYIRKFGEALRERKTEVAEQITTEAKKIISEGEGEVQEVIDMCDFATGLSRQLYGLTMPSERLNHRLQEIWQPLGVVGCVTAFNFPVAVFGWNFCLAAVCGNSIIWKPSPHSEGCAKLVKEIWDSVAEDYKDLVLIKNGANEAASDLAKDEGIGLFSATGSCEMGRALAPIVAKRLGRSLLELGGNNAAIVCPSADLKLTVKAITFSAAGTTGQRCTTLRRLFVHKDIYKEVVDKLKTSFDGLKIGDPMDREVQVGPLISEDSFQQMQQKLDSCRNKSLEVSGGERLDIDGGVYVKPALVEVIEHIEEMNEETFAPILYVMPFDNLKEAIDLQNSVKQGLSSSIFTNDVRESELFLSAEGSDCGIANVNIGTSGAEIGGAFGGEKDTGGGRESGSDSWKAYMRRTTATVNYGDDLPLAQGVEFDEN

SEQ ID NO: 94221 - protein, 205 aa, Unknown
  Bacterial polypetide isolated from the Sargasso Sea
CSKDIYDDCVERLEKCFEELVIGCPSKDSSQIGPLISEDSFNSMQKTLESLKAKNVSVIGGERLDIEDSNEYYVKPALVLVKEIEDEMLSETFAPILYVKSYEKIEEAIRMQNDVSQGLSSSIFTNDMRESELFLSESGSDCGIANINIGTSGAEIGGAFGGEKDTGGGRESGSDAWKNYMRRVTATVNYGEDLPLAQGVEFDES

SEQ ID NO: 94222 - protein, 508 aa, Unknown
  Bacterial polypetide isolated from the Sargasso Sea
DLDSAVEGVVDAIWFNQGQVCCAGSRLLVQESIEKKFIQKLKKRMEKLRVGDPLDKSIDIGAIVALVQLKKINSLVNKAQKDGNKLWQPSWSCPTNGLFYPPSLFTNVTPSSFIAQVEIFGPVLTTMTFRTPSEAVSIANNTPYGLAASIWSENINLALDIAPKVKAGVIWINSTNLFDAACGFGGYKESGFGREGGSEGIRAYSKLPLPLSKSKRGKKSSKGQSSNSIDRTPKLYIGGKQKRPDSGYSFSSYDAHNNFICDVPNANRKDVRDTVEVASKAVSKSSTNFNRAQILYYLAENLQDRKNTFSSLLSSLISISQKDAEKEFDQSIERLFYYGAMADKFEGSIHNPPIRGLTLAVKEPIGVVANILNDDYPLLSLITTLGANFAAGNASIIIPGQNTSLLATELYQLLETSDVPAGYINILTTKQNSLNKILSEHENIDGIWFFSENNNERLKVIQSTTSNLKRTWCPQSKNLDWSSKEEDFLEEFLYQSTQVKNIWIPYGE

SEQ ID NO: 94223 - protein, 430 aa, Unknown
  Bacterial polypetide isolated from the Sargasso Sea
EKIPAPKRGELVRQFGEKLRENKEELGTLVSYEMEKSYQEGLGEVQEMIDICDFAVGLSRQLHGLTMHSERPEHRMYEQYHPLGIVGIISAFNFPVAVWSWNVALAWVCGNVTVWKPSEKTPLCSIICQRLISSVFKENNIPEGVSSLINGDYKIGELLSSDIRMPLVSATGSTRMGKKVAEKVGSRLGKTLLELGGNNAIIVTPDADLKMMLMGTVFGAVGTCGQRCTSTRRLIVHETVYDKVKSSLKEAYNQIKIGNPLNSENHVGPLIDKDAVKNYLDALNMIEEQGGSFLVPGGVLNGQEFESGCYVKPVIAEINHSKKIVQEETFAPILYLIKYSGSVESAIEIQNEVKQGLSSAIMTNNLQDAERFLSHWGSDCGIANVNIGTSGAEIGGAFGGEKETGGGRESGSDAWKVYMRRQTNTINFSP

SEQ ID NO: 94224 - protein, 388 aa, Unknown
  Bacterial polypetide isolated from the Sargasso Sea
ADFAVGQSRMLYGKTMHSERPDHRMYEQWHPLGPIGVISAFNFPVAVWAWNAFIAAICGNTTIWKPSSSTPLCAIAVQNICNKVMEENGYSGIFSVIIGKGSIVGEEMIKDPRLPLISFTGSTSMGRHVNKTVSERFGKTILELGGNNAIVIDESAEMELAIPAVVFGAVGTAGQRCTSTRRLIIHESIYDSFLEKLINAYKQVKIGDPLDNSTLMGPLVNEQSVDNYLNAIETATDSGGKVIFGAKILTSDGYYVKPTIISAQNHWEIVQEETFAPILYVMKYSSIDEAISLHNDVPQGLSSSIFTTNIRNAERFLSNRGSDCGIANVNIGTSGAEIGGAFGGEKETGGGRESGSDSWKQYMRRQTNTINWSKDLPLAQGIEFNLDN

SEQ ID NO: 94225 - protein, 296 aa, Unknown
  Bacterial polypetide isolated from the Sargasso Sea
AVILLYWKPSPHSNDCAKGIKEVWDKVSGEFADLVLVLEGGNEEAVALCEDKRINLISATGSTQMGKELAPIVSARLGKLLLELGGNNAAIVCPSADLDLTIKGIAFSACGTTGQRCTSLRRLFVHEDIYEDCTKRLQKCFDELIIGCPTKESSQIGPLISEGSFNSMQDTINSLKNKGITIFGGDRIEIEDPKEFYVKPALVLVNEIEEEMLSETFAPILYVKSYKNIEEAIQMQNNVSQGLSSSIFTNDIRESELFLSEAGSDCGIANVNIGTSGAEIGGAFGGEKDTGGGRES

SEQ ID NO: 94226 - protein, 221 aa, Unknown
  Bacterial polypetide isolated from the Sargasso Sea
GGKAANIVYNDAALDQAVEGVVNGIFFNQGHVCCAGSRLLLQEDIHDEFINKLEKRMQTLRVGNPLDKNTDIGAINSKEQLDKITSLVNEGVNDGGELFQIECELPSEGYWYRPSLFTNVQPSYNIAREEIFGPVLTTLTFRTPEEAVDIANNTEYGLSAGVWTEKGSKILWTADRLDAGVIWANTFNKFDPSSPFGGYKESGFGREGGRHGLLSYLKVRS

SEQ ID NO: 94227 - protein, 76 aa, Unknown
  Bacterial polypetide isolated from the Sargasso Sea
GAGVWTRNGNIAYRMGREIQAGRVWTNCYHAYPAHAAFGGYKQSGIGRETHKMMLNHYRQVKNLHVSYSEKKLGFF

SEQ ID NO: 94228 - protein, 224 aa, Unknown
  Bacterial polypetide isolated from the Sargasso Sea
EPYGNVLIITPWNYPFQLSLTPLIGAIAAGNAVIIKPSELAPATSRVLKELIDSVFPQNMATVIEGDAGIAKYLLDKKWDYIFFTGSTRIGKIIAEKAAKNLTPITLELGGKSPCIVDSGVDIDKVAKRIVSGKFVNCGQTCIAPDYIVVNQHVKSDLISAIKENIIKTFGNRPLESESYGRIINTENLIRLENIIKDQVIEFGGKINMDKLYIEPTIIVDPQN

SEQ ID NO: 94229 - protein, 249 aa, Unknown
  Bacterial polypetide isolated from the Sargasso Sea
ELGGKSPCIVDSGVDIDKVAKRIVSGKFVNCGQTCIAPDYIVVNQHVKSDLISAIKENIIKTFGNKPIESESYGRIINKNNLIRLKNITKDQVIEFGGKINIDKLYIEPTIIVDPQIDSEIMKEEIFGPILPILSYENESEIKNILDTNPTPLAFYIFSKNQMFIDNLIENNKFGGCVINDTLIHYINPNLPFGGIGDSGMGAYRGKFSFDTFSHQKPVLSKKNMIDIPFRYGPYPKSFNFIRKILEKI

SEQ ID NO: 94230 - protein, 321 aa, Unknown
  Bacterial polypetide isolated from the Sargasso Sea
NLSESSIKTSLIVSEIINSVFESSHVSVIQGDASVASILLKKRWDYIFYTGSTQVGKIVAKAAAENLTPTTLELGGKSPCIIDESVPIKKTAKRIIWSKYINCGQTCIAPDYLVVQKSIKSILVNNLINEIKSAFGDNPINSSDYGRIIHKKHFDKLSSSLNGQKILYGGVTDVKQLYFSPTIVDEPTNESDLMQQEIFGPILPIVSFGSEDEMHQILKGKEKPLAFYIFSNKKRFVNNIFSKYSFGGGVANDAIVHFANDNLPFGGVGNSGMGEYHGKYSFKIFSHYKPIVKRSFLFDLPQRYAPYPKSLSFLKFLINRL

SEQ ID NO: 94231 - protein, 47 aa, Unknown
  Bacterial polypetide isolated from the Sargasso Sea
HAYPAHAAFGGYKQSGIGRETHKMMLNHYRQVKNLHVSYSEKKLGFF

SEQ ID NO: 94232 - protein, 320 aa, Unknown
  Bacterial polypetide isolated from the Sargasso Sea
LISAVAAGNTVCLKPSEIASNTSSVMSAILNKELNDPCVSVVEGGVNETTVLLDQKFDKIFFTGSTKVGKIVYEKAAKNLTPVILELGGKSPAIFTPSCNLEMGVKRMIWAKFLNAGQTCIAPDYCVVHSSIKTQFLKLVKEEIIRAKYSISNDNYVSIINKSNTERILNLLENADIYYGGNHNIDERYISPTIVNNVNFDQEIMDSEIFGPILPVIEYENLDIAFKEINKKPKPLAAYLFTSQKTDKNKFIKELPFGGGGINEVIMQFSNPKLPFGGVGESGFGSYHGKNGFIAFSHYKSIMDKPTFFELPLKYAPYSL

SEQ ID NO: 94233 - protein, 281 aa, Unknown
  Bacterial polypetide isolated from the Sargasso Sea
QNYVLKQIYPVGVINIITGDGSTGELITSHPEIQKVAFTGSTEIGKKIIQSTSTTNKKLTMELGGKSPFIVFEDADLDSAVEGVVDAIWFNQGQVCCAGSRLLIQESIEKKFIKKLKQRMEKLRIGNPLDKSIDIGAIVAPVQLQKINSLVKKGIKDGAKLWQPSWSCPTEGLFYPPSLFTNVTPASFIAQVEIFGPVLTSLTFRKPSEAVAIANNTPYGLAASIWSENINLALDIAPKIKAGVIWINSTNLFDASCGFGGFKESGFGREGGSEGIRAYTK

SEQ ID NO: 94234 - protein, 274 aa, Unknown
  Bacterial polypetide isolated from the Sargasso Sea
MDYKDIDKVIESQVKFVKDNSNSVNNRIQILNSLLISIKNNESRIYEALKQDLNKHEFESFLSEILLVKKEIKLFVRKLRSWSKKKRVSGSILNFPSGNYLIPEPYGNVLIITPWNYPFQLSLTPLIGAIAAGNAVIIKPSELAPATSRVLKELIDSVFPQNMATVIEGDAGIAKYLLDKKWDYIFFTGSTRIGKIIAEKAAKNLTPITLELGGKSPCIVDSGVDIDKVAKRIVSGKFVNCGQTCIAPDYIVVNQHVKSDLISAIKENIIKTFG

SEQ ID NO: 94235 - protein, 290 aa, Unknown
  Bacterial polypetide isolated from the Sargasso Sea
EVGKKIIQTNTNPDKKMTMELGGKSPFIVFEDADLDSAVEGVVDAIWFNQGQVCCAGSRLLVQESIEKKFIQKLKKRMEKLRVGDPLDKSIDIGAIVAPVQLKKINSLVNKAQKDGNKLWQPSWSCPTNGLFYPPSLFTNVTPSSFIAQVEIFGPVLTTMTFRTPSEAVSIANNTPYGLAASIWSENINLALDIAPKVKAGVIWINSTNLFDASCGFGGYKESGFGREGGSEGIRAYSKLPLPISKSKRGKKLSKGSSFNSIDRTPKLYIGGKQKRPDSGYSFSSYDARK

SEQ ID NO: 94236 - protein, 93 aa, Unknown
  Bacterial polypetide isolated from the Sargasso Sea
KDEKEALEIANDTLYGLGAGVWTRNGNLAYRMGREIQAGRVWTNCYHAYPAHAAFGGYKQSGIGRETHKMMLNHYRQVKNLHVSYSEKKLGFF

SEQ ID NO: 94237 - protein, 272 aa, Unknown
  Bacterial polypetide isolated from the Sargasso Sea
STEVGKKIIQSTASSEKKLTMELGGKSPFIVFEDADLDSAVEGIVDAIWFNQGQVCCAGSRLLIQESIEKKFVTKLKNRMEKLRVGNPLDKSIDIGAIVAPVQLKKIKQIVKKGEKEGSSLWQPKWACPKEGLFYPPSIFTNVSPSSFIAQVEIFGPVLTVLNFRKPSEAVSIANNTPYGLAASIWSENINLALDIAPKIKAGVIWINSTNLFDASVGFGGYKESGFGREGGIEGIRSYREINLPEITPKKIKKNNIKLKLPKIDTTPKLYI

SEQ ID NO: 94238 - protein, 263 aa, Unknown
  Bacterial polypetide isolated from the Sargasso Sea
AGPTGAAIVNHSDVIKIAFTGSTGVGKVIMKAIAGTEKKSTMELGGKAANIIFEDAPLDQAVEGVINGIYFNQGHVCCAGSRLFIQESVYDIVLRKLKDRIQALVLGDPLDKNTDIGAINSKEQLATINKYLKIGQKEGADMFQLSCDIPKKGFWCPPTLFTNVSQSHAIAKEEIFGPVLAVQTFRTIDEVITKANNTPFGLSAGVWTDKGSKIFNLTSQMRAGVVWANTYNKFDPTSPFGGYKESGHGREGGLHGLLPYLNI

SEQ ID NO: 94239 - protein, 296 aa, Unknown
  Bacterial polypetide isolated from the Sargasso Sea
PLLMMAWKIAPAIAVGNTVVLKPAEFTSLTALYFAELCQKARIPKGVINIITGDGSTGELITSHGDIKKIAFTGSTEVGKKIIQSSSQQEKKLTMELGGKSPFIVFEDADLDSAVEGVVDAIWFNQGQVCCAGSRLLVQESVEKLFIKKLKARMEKLRVGNPLDKSIDIGAIVAPVQLKKIQSIVKKGEKEGSKLWQPSWACPTDGLFYPPSIFTNVSPSSFIAQVEIFGPVLSILSFRTPSEAVSIANNTPYGLAASIWSENINLALDIAPKIKAGVIWINSTNLFDAACGFGGL

SEQ ID NO: 94240 - protein, 285 aa, Unknown
  Bacterial polypetide isolated from the Sargasso Sea
MDYKDIDKVIESQVKFVKDNSNSVNNRIQILNSLLISIKHNESRIYKALKQDLNKHEFESFLSEILLVKKEIKLFVRKLRSWSKKKRVSGSILNFPSGNYLIPEPYGNVLIITPWNYPFQLSLTPLVGAIAAGNAVIIKPSELAPATSRVLKELIDSVFPQNMATVIEGDASIAEYLLDKKWDYIFFTGSTRIGKIIAEKAAKNLTPITLELGGKSPCIVDSGVDIDKVAKRIVSGKFVNCGQTCIAPDYIVVNQHVKSDLISAIKENIIRTFGNKPIESESYGR

SEQ ID NO: 94241 - protein, 529 aa, Unknown
  Bacterial polypetide isolated from the Sargasso Sea
PDKKMTMELGGKSPFIVFEDADLDSAVEGVVDAIWFNQGQVCCAGSRLLVQESIEKKFIQKLKKRMEKLRVGDPLDKSIDIGAIVAPVQLKKINSLVNKAQKDGNKLWQPSWSCPTNGLFYPPSLFTNVTPSSFIAQVEIFGPVLTTMTFRTPSEAVSIANNTPYGLAASIWSENINLALDIAPKVKAGVIWINSTNLFDAACGFGGYKESGFGREGGSEGIRAYSKLPLPLSKSKRGKKLSKGQSSNSIDRTPKLYIGGKQKRPDSGYSFSSYDAHNNFICDVPNANRKDVRDTVEVASKAVGKSSTNFNRAQILYYLAENLQDRKNTFSSLLSSLIGISQIDAEKEFDQSIERLFYYGAMADKFEGSIHNPPIRGLTLAVKEPIGVVANILNDDYPLLSLITTLGSNFAAGNASIIVPGQKTSLLATELYQLLETSDVPAGYINILTTKQNSLNKILSEHENIDGIWFFSENNNERLKVIQSTTSNLKRTWCPQSKNLDWSSKEEDFLEEFLYQSTQVKNIWIPYGE

SEQ ID NO: 94242 - protein, 239 aa, Unknown
  Bacterial polypetide isolated from the Sargasso Sea
MLLYFAELCQKARIPKGVINIITGDGSTGELITSHVDTKKIAFTGSTEVGKKIIQSTATQEKKLTMELGGKSPFIVFEDADLDSAVEGVVDAIWFNQGQVCCAGSRLLVQESVEKIFIKKLKARMEKLRVGNPLDKSIDIGAIVAPVQLKKIQSIVKKGEKEGSKLWQPSWACPTDGLFYPPSIFTNVSPSSFIAQVEIFGPVLSVLSFRTPSEAVSIANNTPYGLAAQYLVRKILILL

SEQ ID NO: 94243 - protein, 457 aa, Unknown
  Bacterial polypetide isolated from the Sargasso Sea
MDKNKFSELVTKSKAISNKWRSLPAPQRGEYIRLFGEELRTKKEALASTITKEARKIKTESLGEVQEAIDMCDFAVGLSRQLYGLTMPSERPNHRLQELWHPLGVVGCITAFNFPMAVFAWNFCLAAVCGNSIIWKPSPHSNGCARGIKEVWDKVSGEFADLVLVLEGGNEEAVALCEDKRIDLISATGSTQMGKELAPIVSARLGKLLLELGGNNAAIVCPSADLDLTIKGIAFSACGTTGQRCTSLRRLFVHEDIYEDCTKRLQKCFDELVIGCPTKESSQIGPLISEASFNSMQDTINSLKDKGITVFGGDRIEIEDPKEFYVKPALVLVNEIEEEMLSETFAPILYVKSYKNIEEAIQMQNNVSQGLSSSIFTNNIRESELFLSEAGSDCGIANVNIGTSGAEIGGAFGGEKDTGGGRESGSDAWKNYMRRMTATVNYGEELPLAQGVEFDEN

SEQ ID NO: 94244 - protein, 412 aa, Unknown
  Bacterial polypetide isolated from the Sargasso Sea
MTMELGGKSPFIVFEDADLDSAVEGVVDAIWFNQGQVCCAGSRLLVQESIEKKFIQKLKKRMEKLRVGDPLDKSIDIGAIVAPVQLKKINSIVNKAQKDGNKLWQPSWSCPTNGLFYPPSLFTNVTPSSFIAQVEIFGPVLTTMTFRTPSEAVSIANNTPYGLAASIWSENINLALDIAPKVKAGVIWINSTNLFDASCGFGGYKESGFGREGGAEGIRAYSKLPLPRYKSNRVKKLSKVQSSNSIDRTPKLYIGGKQKRPDSGYSFSSYDSKNNFICDVPNANRKDVRDTVEAASKAVSKSSSNFNRAQILYYLAENLQDRKNTFSNLLSSLIGISQKDADKEFDQSIERLFYYASMTDKFEGSIHNPPIRGLTLAVKEPIGVVANILNDDFPLLSLITTLGANFAAGNAN

SEQ ID NO: 94245 - protein, 296 aa, Unknown
  Bacterial polypetide isolated from the Sargasso Sea
MAPSIEAINHISLKKKYGLFINGKFKDPISKKYFSTINPSTENKIAMIAEARASDVDFAVKSARKAYDGVWSKMPLKERSKYIFRIARMIQEKSKELAIIETIDGGKPIRESRDIDVPLAAAHFFYYAGWVDKLNYAFPNRNPKPLGVAGQIIPWNFPLMMAAWKIAPALATGNTVVLKPSESTSLTALKLAEIIQEADLPPGVVNIITGPGSTGELIVNHGDIDKIAFTGSTSVGKLIMKSIVGTKKKSTMELGGKAANIIFEDAPIDQAVEGVINGIYFNQGHVCCAGSRLFVQ

SEQ ID NO: 94246 - protein, 168 aa, Unknown
  Bacterial polypetide isolated from the Sargasso Sea
MIGAMASAEQYEKVKSYLDLGKKEGAEVLVGGDVAQMSGDLANGYYIQPTIFKGHNKMRIFQEEIFGPVVSVCTFKTDEEALEIANDTLYGLGAGIWTRDLNTSYRFGRAIKAGRVWTNCYHDYPAHAAFGGYKQSGIGRENHLMMLNHYQQTKNLLVSYSPKKLGFF

SEQ ID NO: 94247 - protein, 273 aa, Unknown
  Bacterial polypetide isolated from the Sargasso Sea
AVAPVGRKVLEGAAAHLTPVTLELGGKSPALVLEGADLTVSARRLIWGKGLNAGQTCIAPDHLIVQPGLKAELLKAMASARTEMYGTDPLASEQLACIVNNRQFQRLEALLDKAQQEGRVLIGGEVNRDQRRIAPTVIRVDDRQDPLMAYELFGPLLPVLELADLPQTLAEIRQGPKPLALYLFGGNEAQQQQVLETTSSGGVCLNDVVMQAGVPDLPFGGVGGSGMGSYHGQAGFDTFSHAKAVLRRPFRLDFKLRYPPYGIDLNLLRRLAG

SEQ ID NO: 94248 - protein, 241 aa, Unknown
  Bacterial polypetide isolated from the Sargasso Sea
KSPNIFFKDIAEADDDFFDKCIEGFVMFALNQGEVCTCPSRALIHEDIYDKFIARCIERTKAIVQGDPLDSNTMIGAMASAEQYEKVKSYLDLGKKEGAEVLIGGDVAQMSGEMANGYYIQPTIFKGHNKMRIFQEEIFGPVVSVCTFKTDEEALEIANDTLYGLGAGIWTRDLNTSYRFGRAIKAGRVWTNCYHDYPAHAAFGGYKQSGIGRENHLMMLNHYQQTKNLLVSYSPKKLGFF

SEQ ID NO: 94249 - protein, 313 aa, Unknown
  Bacterial polypetide isolated from the Sargasso Sea
DLKKIAFTGSTEVGRIIRNQTADSEKKLTLELGGKSPFIVFEDADLDSAIEGLVDAIWFNQGQVCCAGSRLLVQESVAEKVTNRLKARMTKLRVGDPLDKSMDMGAVIAPIQKKRIQKLVNQGKKEGAKIWQWQGTLPKNGCFFPPTLLTNVAPASTVAQTEIFGPVLSSMTFRTPEEAVMLANNSAYGLAASVWSENINQSLHLAPKLKVGVVWINCTNQFDASVGFGGYRESGYGREGGQEGMFGYLKLKKGAYGSVQRIKVKKIAKTYKLIQNKIDRTAKLYIGGKQTRPDSGYSIPVFNSDGSLAGEIG

SEQ ID NO: 94250 - protein, 156 aa, Unknown
  Bacterial polypetide isolated from the Sargasso Sea
KIKSYLDLGKKEGAKVLCGGNVAKVNSGLEKGNYIEPTIFEGNNSMRIFQEEIFGPVVSVTKFKDEAEALKIANDTLYGLGAGVWTRNGNIAYRMGREIQAGRVWTNCYHAYPAHAAFGGYKQSGIGRETHKMMLNHYRQVKNLHVSYSEKKLGFF

SEQ ID NO: 94251 - protein, 328 aa, Unknown
  Bacterial polypetide isolated from the Sargasso Sea
MNKIIKNFKNIKYGPAPEDDTEVINWINKISSPNKNYINGKWNTSKGSKKIKVINPSTNKKLFNLTISTKKDVDLAVNSAKKAQKKWSSISPFQRSKYLYALARLIQKHSRFLAVLESIDNGKPIRETRDIDIPLVARHFYYHAGWAEKLDKNLKPIGVVGQIIPWNFPLLMLAWKIAPAIACGNTVVLKPAEYTSLTALYFAELCTKANLPNGVINIITGDGSTGELITSHPEIQKIAFTGSTEIGKKIIQSTSSTNKKLTMELGGKSPFIVFEDADLDSAVEGVVDAIWFNQGQVCCAGSRLLIQESIEKKFIKKLKQRMEKLRIG

SEQ ID NO: 94252 - protein, 231 aa, Unknown
  Bacterial polypetide isolated from the Sargasso Sea
MDKDDDFFDKCLEGFAMFTLNQGEVCTCPSRVLIQESIYDKFMKKAIARTKAVKQDNPLKMETMIGAQASLEQMEKIKSYLDLGKKEGAKVLTGGSVAKLNSGLEKGNYIQPTIFEGNNKMRIFQEEIFGPVVSVTKFKDESEALEIANDTLYGLGAGVWTRNGNLAYRMGREIQAGRVWTNCYHAYPAHAAFGGYKQSGIGRETHKMMLNHYRQVKNLHVSYSEKKLGFF

SEQ ID NO: 94253 - protein, 213 aa, Unknown
  Bacterial polypetide isolated from the Sargasso Sea
HLTKGEVCTCPSRVLVQESIYDKFMKKAIARTKAVKQDNPLKMETMIGAQASLEQMEKIKSYLDLGKKEGAKVLTGGSVAKLNSGLEKGNYIQPTIFEGNNKMRIFQEEIFGPVVSVTKFKDEAEALEIANDTLYGLGAGVWTRNGNLAYRMGREIQAGRVWTNCYHAYPAHAAFGGYKQSGIGRETHKMMLNHYRQVKNLHVSYSEKKLGFF

SEQ ID NO: 94254 - protein, 294 aa, Unknown
  Bacterial polypetide isolated from the Sargasso Sea
EFAVLESLDGGKPIKESRDFDLPQVAANFFYFAGWADKLDLSWSTKTLKPYGVVGQIIPWNFPLLMLAWKIAPALATGNTVVLKPAETTPLTALLFAEICEQAGLPAGVVNIVTGDGSTGSQIVNHKDINKIAFTGSTQVGKLIQKSLAGRDVGLTLELGGKAANIVYEDAAIDQAVEGVVNGIFFNQGHVCCAGSRLLLQESIHDQFISKLEKRMQSLRVGNPLDKNTDIGAINSKEQLDKITNLVNEGLEDGGELFQTECELPGNGFWFRPSLFTNVQPSYSIAREEIFGPV

SEQ ID NO: 94255 - protein, 138 aa, Unknown
  Bacterial polypetide isolated from the Sargasso Sea
GGNVAKVNSGLEKGNFIEPTIFEGNNSMRIFQEEIFGPVVSVTTFKDEADAVKIANDTLYGLGAGVWTRNGNIAYRMGRAIEAGRVWTNCYHAYPAHAAFGGYKQSGIGRETHKMMLNHYRQVKNLHVSYSEKKLGFF

SEQ ID NO: 94256 - protein, 238 aa, Unknown
  Bacterial polypetide isolated from the Sargasso Sea
PNIFFPDIMNHEPEFIDKCAEGLVLGYFNQGEVCTCPSRAIIHEDIYDAFMEKVIEKIQKIKRGNPLDTDTMVGAQASNEQFEKILKYIDIGRAEGAEVVTGGEKEQLEGFDGGYYIQPTILKGQNHMRVFQEEIFGPVIAVQTFKTEEEAIEIANNTSFGLGAGVWSRDANTAFRVGRAIEAGRVWTNCYHLYPAHAAFGGYKKSGIGRETHKMMLDHYQQTKNLLVSYDINPLGFF

SEQ ID NO: 94257 - protein, 263 aa, Unknown
  Bacterial polypetide isolated from the Sargasso Sea
MVATVSTLHSPAQEIERLHALHHQQLEAFRADPMPDAAARIEKLRKLKTALVQQQDSLVKAVNEDFSCRAEGDTLIAEIMTTVQALNYMVKNVRKWMRPSGRHVNMLFAPASNEVVYQPLGVIGIMVPWNYPIQLALVPIATALAAGNRAMVKMSEFTPATNRALKDMLASVFDEDEVAIIEGEVDVSSAFSEVPWNHLIFTGSTAVGKHVMAAAAKNLTPVTLELGGKSPALIAPDANLEHAAERICFGKSLNAGQTCIAPD

SEQ ID NO: 94258 - protein, 317 aa, Unknown
  Bacterial polypetide isolated from the Sargasso Sea
TVSSKKDVDQAVKAAKKAFPKWSKLSSFERSKYLYALARMIQKNSRFLSVLETIDNGKPIRETRDIDIPLVARHFYYHAGWSAKDTRSKNKPIGVVGQIIPWNFPLLMLAWKIAPALATGNTVVLKPAEYTSLTALFFAELCQKANLPDGVVNIVTGDGSTGKYITNHKDIKKIAFTGSTEVGKHIIKQNPDPDRKLTMELGGKSPFIVFEDADLDSAVEGIVDAIWFNQGQVCCAGSRLLIQESIEKLFIKKLKKRMEKLRVGNPLDKSIDIGAIVAPTQLQQINQLVKKAEKEGNKLWQPSWSLSKDGLFYPPSL

SEQ ID NO: 94259 - protein, 314 aa, Unknown
  Bacterial polypetide isolated from the Sargasso Sea
MSKIIKNFKNISYGPAPEDSKDVMSWINSLNKPNHLFINGAWVKSRSSKKLKVINPATNKKLTSLAISNKADVNAAVGAAKKAFNSWSIISSDERAKYLYALARLIQKHSRFLSVLETIDNGKPIRETRDIDIPLVARHFYYHAGWAKKIDTTKNKPIGVIGQIIPWNFPLLMMAWKIAPAIAAGNTVVLKPAEFTSLTALYFAELCQKARIPKGVINIITGDGSTGEIITSHLDTKKIAFTGSTEVGKKIIQSTSKQEKKLTMELGGKSPFIVFEDADLDSAVEGVVDAIWFNQGQVCCAGSRLLVQESIEKS

SEQ ID NO: 94260 - protein, 223 aa, Unknown
  Bacterial polypetide isolated from the Sargasso Sea
SRCVEGFLHAYFNQGEVCTCPSRAVIHEDIYEPFMAMVEERVNMLNCGTPFDLNTQVGAQASNEQFEKIMSYMDVGVQEGAKVLFGGGKRQMEGSLSGGYYVAPTAFKGDNSMRIFQEEIFGPVVSVTTFKDEAEALSIANDTLYGLGAGVWSRDANTCYRMGRGIQAGRVWVNNYHSYPAHAAFGGYKNSGIGRETHKMMLNHYQQTKNVLVSYAEEPDGFF

SEQ ID NO: 94261 - protein, 160 aa, Unknown
  Bacterial polypetide isolated from the Sargasso Sea
AQFDKILSYIEIGKKEGAQVLIGGHVEELNDDLNGGYYIQPTILKGTNDMRVFQEEIFGPVISMSTFKDEAEALRLANSSEFGLGAGVWTRNMNRAYHFGRKIEAGRVWTNCYHMYPAHAAFGGYKKSGIGRETHKLALNHYQQTKNLLVSYSEDPLGFF

SEQ ID NO: 94262 - protein, 279 aa, Unknown
  Bacterial polypetide isolated from the Sargasso Sea
LTLRPLISALAAGNTAVLKPSEHASAITDLIARLIPQHFEPDVVQVVQGDGAVAANLVAMPFDHIFFTGGGSIGRKVLEGAAAHLTPVTLELGGKSPAIVLEGADLTVGARRLIWGKGINAGQTCIAPDHLLVPPALRSPLLKAMEEARTEMYGSDPLNSNQLGQIINERQFNRLEQLLESARADGRILIGGEISREQRRIAPTVIRVDDRNDPLMAEELFGPLLPVLVLDDLTTALQEIRQGPKPLALYLFGGSEAQQQQVLTTTSSGGVCLNDVVMQ

SEQ ID NO: 94263 - protein, 291 aa, Unknown
  Bacterial polypetide isolated from the Sargasso Sea
TLKNICAMDESPQGCTPLVAQPARSSLQPEPLGTVLIIGAWNYPVQLTLAPYVAALAAGNCALLKPSELAPASSALMASLIPKYLDSDAVAVVEGDKDVASELLSLPFDHIFYTGGEAVGKIVMTAAAQNLTPVTLELGGKSPCVVDANTDIATTARRIVWGKWTNAGQTCIAPDYVLVERSCADALIDRIDKEITRQFSNQPLQSKDYGRIVNERHLTRLKQYIEGHEIVIGGQLDEAQMKLAPTVILNPDIDTPVMQEEIFGAVLPVIEVSSVNEAIDFIKRRHSRWRR

SEQ ID NO: 94264 - protein, 273 aa, Unknown
  Bacterial polypetide isolated from the Sargasso Sea
GVALAAGYCVVLKPAEQTPLSALHLADLFAEAGFPDGVVNIVTGFGDAGSYLADHMDVDKVAFTGSTEVGHEIVKASAANLKRVSLELGGKSPSIVFPDADLDIAAQGVAGAIFFNQGQCCCAGSRLLLHKDIYSDVIERVADQAKNIKVGPGMCADTNMGPLVSREQQEKVLNYIRSGETAGARTLTGGKAIGGNLEKGCYVEPTVFENVDHEMKIVKEEIFGPVVVAAPFEDIDSVIAKGNDTEYGLAASVWTKDINKAHKVAKGLKAGTV

SEQ ID NO: 94265 - protein, 308 aa, Unknown
  Bacterial polypetide isolated from the Sargasso Sea
ALAADLGKPPTEAFFEIVALRQELKLAQRQLRRWMRPRRFTVPLAQRPGRADVIPEPLGCVLIIGPWNYPFSLTLQPLISALAAGNTAVLKPSEHAPAVAALISRLIAEHFEPEVVRVDQGDGAVAAALVALPFDHIFFTGGGAIGRKVLEGAAAHLTPVTLELGGKSPALVLEGADLTVSARRLIWGKGLNAGQTCIAPDHLIVQPGLKAELLKAMDSARTEMYGTDPLASEQLACIVNDRQFQRLEALLDQAQQAGRVLIGGEINRDQRRIAPTVIRVDDRQDPLMADELFGPLLPVLELADLPQT

SEQ ID NO: 94266 - protein, 298 aa, Unknown
  Bacterial polypetide isolated from the Sargasso Sea
SDTRAKYMYALARLIQKHSRFLSVLETIDNGKPIRETRDIDIPLVARHFYYHAGWAKKIDTKIHKPIGVIGQIIPWNFPLLMMAWKIAPAIAAGNTVVLKPAEFTSLTALFFSELCQKARIPKGVINIITGDGSTGELITSHVDTKKIAFTGSTEVGKKIIQSTAIQEKKLTMELGGKSPFIVFEDADLDSAVEGVVDAIWFNQGQVCCAGSRLLVQESVEKLFIKKLKARMEKLRVGNPLDKSIDIGAIVAPVQLKKIQSIVKKGEKEGSKLWQPSWACPTDGLFYPPSIFTNVSPS

SEQ ID NO: 94267 - protein, 262 aa, Unknown
  Bacterial polypetide isolated from the Sargasso Sea
EQHEQEVLAALAADLGKPPTEAFFEIVALRQELKLAQRQLRRWMRPRRVTVPLAQRPGRADVIPEPLGCVLIIGPWNYPFSLTLQPLISALAAGNTAVLKPSEHAPAVAALISRLISEHFDPEVVRVDQGDGAVAAALVALPFDHIFFTGGGAIGRKVLEGAAAHLTPVTLELGGKSPALVLEGADLTVSARRLIWGKGLNAGQTCIAPDHLIVQPGLKAELLKAMASARTEMYGTDPLASEQLACIVNNRQFQRLEALLDK

SEQ ID NO: 94268 - protein, 239 aa, Unknown
  Bacterial polypetide isolated from the Sargasso Sea
SLSGRSSPSINPATGAVLTNIPMANKEDVDAAVKSARKALAVWGQTSPQERQQALLAIASRLEARAEEFAILETLDNGKPVRETRQIDVPLAIDHFRYFAGVIRSHSDEAVQLDNNTLSLVLNEPVGVVGQIIPWNFPLLMAAWKLAPALAAGNTVVIKPSEMTSITLLTLGEILNDVLPPGVVNIVTGQGAEAGQALLDHPDVDKLAFTGSTAVGYRVAKAAAEKLIPATLELGCVNR

SEQ ID NO: 94269 - protein, 263 aa, Unknown
  Bacterial polypetide isolated from the Sargasso Sea
MGRLIMQYASQNLIPITLELGGKSPNIFFEDVMDKDDDFFDKCMEGFAMFTLNQGEVCTCPSRVLVQESIYDKFMEKAVARTKAVKQGNPLQMETMIGAQASVEQMEKIKSYLDLGKKEGAKVLCGGNVAKVNSGLEKGNFIEPTIFEGNNSMRIFQEEIFGPVVSVTKFKDEADAVKIANDTLYGLGAGVWTRNGNIAYRMGRAIEAGRVWTNCYHAYPAHAAFGGYKQSGIGRETHKMMLNHYRQVKNLHVSYSEKKLGFF

SEQ ID NO: 94270 - protein, 238 aa, Unknown
  Bacterial polypetide isolated from the Sargasso Sea
WSALSGHQRARYLYAIARQIQKHSRLFAVMESMDNGKTIRETRDIDVPLVIRHFYHHAGWAQTLESEFPDHTSIGPVGQIIPWNFPLMLLSWKIAPALAAGNTVVLKPAEFTPLTALLFAEICSQTGLPPGVLNVITGPGSTGSMMVKHPDLKKIAFTGSTEVGRIIREQTANSDKRLTLELGGKSPFIVFEDADIDSAIEGLVDAIWFNQGQVCCAGSRLLVQESIADKVTERLKAR

SEQ ID NO: 94271 - protein, 297 aa, Unknown
  Bacterial polypetide isolated from the Sargasso Sea
PIGVIGQIIPWNFPLLMLAWKIAPAIAAGNTVVLKPAEFTSLTALYFAELCQKARIPKGVINIITGDGSTGELITSHVDTKKIAFTGSTEVGKKIIQSSSQQEKKLTMELGGKSPFVVFEDADLDSAVEGVVDAIWFNQGQVCCAGSRLLVQESVEKLFIKKLKARMEKLRVGNPLDKSIDIGAIVAPVQLKKIQSIVKKGEKEGSKLWQPSWACPTDGLFYPPSIFTNVSPSSFIAQVEIFGPVLSILSFRTPSEAVSIANNTPYGLAASIWSENINLALDVAPKIKAGVIWINST

SEQ ID NO: 94272 - protein, 256 aa, Unknown
  Bacterial polypetide isolated from the Sargasso Sea
AETTPLTALLFAELCEEVGLPKGVFNLVTGDGTTGSELVNHEGISKIAFTGSTSVGKYIQNAVGERDIGLTLELGGKAANIVYNDAALDQAVEGVVNGIFFNQGHVCCAGSRLLLQEDIHDEFINKLEKRMQTLRVGNPLDKNTDIGAINSKEQLEKITSLVNEGVNDGGELFQIECDLPSSGYWFRPSLFTNVQPSYNIAREEIFGPVLTTLTFRTPEEAVEIANNTEYGLSAGVWTEKGSKILWTADRLDAGVI

SEQ ID NO: 94273 - protein, 316 aa, Unknown
  Bacterial polypetide isolated from the Sargasso Sea
REPVGVCGQIIPWNFPLLMAAWKIAPALTAGCTIVLKPAEQTPLSALRLTEIIHDAGILPEGVLNVVTGFGEEAGAPLAEHPMVDKVAFTGSTEVGKIITKAASGNLKKVSLELGGKSPTIIFPDADIDAAIAGAASAIFFNHGQCCCAGSRLFAHEKVFDKVSEGIAKIAENIKVGPGMEASTEMGPLVSDEQYQKVAGYIESGKTEGGEVIAGGNYDNSSGGHFVHPTVFAKTNADMTLVKEEIFGPVVCAQPFSDESLEKIANEANNTNFGLAASVWTKDISVAHKMAAKIRAGTVWVNCHNIFDASLPFGGI

SEQ ID NO: 94274 - protein, 284 aa, Unknown
  Bacterial polypetide isolated from the Sargasso Sea
VGRRVAQAAAAHLTPTTLELGGKSPCIVSTDCDLKEAALKIAHGKLVNAGQTCIAPDYVLLPRGQEAEFAEAFRAAAQRLFPRFAGNPDYAAILTKRHLARLRQMLRQAQGMGAHVEWMEDGGASQEGADMAWGDAVERQMAPALVFNATSQMQLMQEEIFGPILPVISYDRLDDVVSAINAGPRPLALYWFGRDEKVRDAVLSRTISGGVTVNDTLLHFAHENLPFGGVGDSGWGAYHSEQGFARLSHQKAVFVQSRWSGAAMLYPPYGAKFDRIMELMRRWL

SEQ ID NO: 94275 - protein, 271 aa, Unknown
  Bacterial polypetide isolated from the Sargasso Sea
GVFNLLTGSGTTGAMLASHPGISKIAFTGSTEVGRQIRENTASSDKKLTLELGGKSPFLVFADADLDSTVEGIVDAIWFNQGQVCCAGSRMLVQERIANRLLEKLRDRMKKLRVGDPLDKGMDMGAIIAPVQLKRIKNLLEQGLEEGGDVWQWEGSLPKSGCFFPPTLISNVDPASMLAQTEIFGPVLVSSTFRTHNEALALANNTAYGLAASVWSENINLALDVAPRLKAGVVWINCTNQFDASSGFGGYRESGFGREGGHEGMFEYLKP

SEQ ID NO: 94276 - protein, 319 aa, Unknown
  Bacterial polypetide isolated from the Sargasso Sea
KPAEQTPASIMLLMNLIGDLLPAGVVNVVSGYGLEAGKPLASSKRIKKIAFTGETTTGRLIMQYASQNLIPITLELGGKSPNIFFEDVMSKNDDFFDKCLEGFAMFTLNQGEVCTCPSRALVQESIYDKFMEKAIARTKAVKQDNPLKMETMIGAQASLEQMEKIKSYLDLGKKEGAKVLTGGSVAKLNSGLEKGNYIQPTIFEGKNNMRIFQEEIFGPVVSVTKFKDEKEALEIANDTLYGLGAGVWTRDGNIAYRMGRGIQAGRVWTNCYHAYPAHAAFGGYKQSGIGRETHKMMLNHYRQDKNLHVSYSEKKLGFF

SEQ ID NO: 94277 - protein, 286 aa, Unknown
  Bacterial polypetide isolated from the Sargasso Sea
NSDNSIGVVGQIIPWNFPLLMLAWKIAPAIALGNTVVLKPAEYTSLTALYFAELCEKAKIPKGVINIITGDGSTGEYITSHKDIKKIAFTGSTEVGKKIIQTNTNADKKMTMELGGKSPFIVFEDADLDSAVEGVVDAIWFNQGQVCCAGSRLLVQESIEKKFIQKLKKRMEKLRVGDPLDKSIDIGAIVAPVQLKKINSLVNKAQKDGNKLWQPSWSCPTNGLFYPPSLFTNVTPSSFIAQVEIFGPVLTTMTFRTPSEAVSIANNTPYGLAASIWSENINLALD

SEQ ID NO: 94278 - protein, 162 aa, Unknown
  Bacterial polypetide isolated from the Sargasso Sea
SLEQMEKIKSYLDLGKKEGAKVLTGGSVAQLNSGLEKGNYIQPTIFEGNNKMRIFQEEIFGPVVSVTKFKDEAEALEIANDTLYGLGAGVWTRNGNLAYRMGREIQAGRVWTNCYHAYPAHAAFGGYKQSGIGRETHKMMLNHYRQVKNLHVSYSEKKLGFF

SEQ ID NO: 94279 - protein, 285 aa, Unknown
  Bacterial polypetide isolated from the Sargasso Sea
EAGKPLASSKRIKKIAFTGETTTGRLIMQYASQNLIPITLELGGKSPNIFFEDVMDKDDDFFDKCLEGFAMFTLNQGEVCTCPSRVLVQESIYDKFMEKAIARTKAVKQDNPLKMETMIGAQASLEQMEKIKSYLDLGKKEGAKVLCGGNVAKINSGLEKGNYIEPTIFEGNNSMRIFQEEIFGPVVSVTKFKDEAEALEIANDTLYGLGAGVWTRNGNIAYRMGREIQAGRVWTNCYHAYPAHAAFGGYKQSGIGRETHKMMLNHYRQVKNLHVSYSEKKLGFF

SEQ ID NO: 94280 - protein, 286 aa, Unknown
  Bacterial polypetide isolated from the Sargasso Sea
LIDEHTEELAQLESLDNGKPVAIAAGADVALSSDIFRYMAGWATKIEGETIPISVPYTPGAQYHSYTLREPVGVVAQIIPWNFPLLMAAWKLSVALTAGCTIVLKPAEQTPLSALRLTEIINDAGILPEGVLNLVTGFGEEAGAPLAAHPHVDKVAFTGSTEVGKLITKASAGNLKKVSLELGGKSPTIIFPDADIDAAIAGAASAIFFNHGQCCCAGSRLMAHEKVFDKVTEGISKIASNIKVGPGMDSASEMGPLVSDEQFKKVSGYIEAGKSDGGEIVAGGKY

SEQ ID NO: 94281 - protein, 259 aa, Unknown
  Bacterial polypetide isolated from the Sargasso Sea
LKPAEQTPLSSLRLTEIIHDAGILPEGVLNVVTGFGEDAGAPLAEHPMVDKVAFTGSTEVGKIITKAASGNLKKVSLELGGKSPTIIFPDADIDAAIAGAASAIFFNHGQCCCAGSRLFAHEKVFDKVSEGIAKIAENIKVGPGMEASTEMGPLVSDEQYQKVAGYIESGKSEGGKVIAGGNYDNSSGGHFVHPTVFAKTNADMTLVKEEIFGPVVCAQPFSDESLEKIAAEANNTNFGLAASVWTKDISVAHKMAAKI

SEQ ID NO: 94282 - protein, 293 aa, Unknown
  Bacterial polypetide isolated from the Sargasso Sea
ARKLTLNGSKLSSFDRSKYLYALARLIQKNSRFISVLETIDNGKPIRETRDIDIPLVARHFYYHAGWAARNTNNSDDSIGVVGQIIPWNFPLLMLAWKIAPAIALGNTVVLKPAEYTSLSALYFAELCEKAKIPQGVINIITGDGSTGEHITSHKDIKKIAFTGSTEVGKKIIQTNTNPDKKMTMELGGKSPFIVFEDADLDSAVEGVVDAIWFNQGQVCCAGSRLLVQESIEKKFIQKLKKRMEKLRVGDPLDKSIDIGAIVAPVQLKKINSLVNKAQKDGNKLWQPSWSCP

SEQ ID NO: 94283 - protein, 251 aa, Unknown
  Bacterial polypetide isolated from the Sargasso Sea
DTKINKPIGVVGQIIPWNFPLLMLAWKIAPAIAAGNTVVLKPAEFTSLTALYFAELCEKARIPKGVINIITGDGSTGELLTAHPDIKKIAFTGSTEVGKKIIQSTAKHEKKLTMELGGKSPFIVFEDADLDSAVEGVVDAIWFNQGQVCCAGSRLLIQESVEKLFIKKLKARMEKLRVGNPLDKSIDIGAIVAPVQLKKIQSIVKKGEKEGSKLWQPSWACPTEGLFYPPSIFTNVSPSSFIAQVEIFGPV

SEQ ID NO: 94284 - protein, 288 aa, Unknown
  Bacterial polypetide isolated from the Sargasso Sea
PNKNYINGKWNTSKGSKKIKVINPSTNKKLFNLAISTKKDVNLAVNAASKAQKNWSSISPFKRSKYLYALARLIQKHSRFLAVLESIDNGKPIRETRDIDIPLVARHFYYHAGWAEKLDKNLKPIGVVGQIIPWNFPLLMLAWKIAPAIACGNTVVLKPAEYTSLTALYFAELCIKANLPNGVINIITGDGSTGELITSHPDIQKIAFTGSTEIGKKIIQSTSSSNKKLTMELGGKSPFIVFEDADLDSAVEGVVDAIWFNQGQVCCAGSRLLIQESIEKKFIKKLKQ

SEQ ID NO: 94285 - protein, 291 aa, Unknown
  Bacterial polypetide isolated from the Sargasso Sea
KNLNKPNKIFINNKFVKSSGTKKLDIINPSNKKILGKLSVSSKKDVDNAVRAAKKAFPKWSKLTGFQRSKYLYALARMIQKNSRFISVLETIDNGKPIRETRDIDIPLVARHFYYHAGWSSKDTSSNNKPIGVIGQIIPWNFPLLMLAWKIAPAIATGNTVVLKPAEYTSLTALYFAELCKKANLPEGVINIITGDGSTGEYITSHKEIKKIAFTGSTEVGKKIIKNNSNPNIKLTMELGGKSPFIVFEDADIDSAVEGVVDAIWFNQGQVCCAGSRLLEQESMKKNLLIN

SEQ ID NO: 94286 - protein, 299 aa, Unknown
  Bacterial polypetide isolated from the Sargasso Sea
FYYHAGWAKILEDKFPKKNPIGVIGQIIPWNFPLLMLSWKIAPALATGNTVVLKPAETTPLTAMFFAELCIEAKIPPGVVNIVNGDGETGSLIVNNDKISKIAFTGSTDVGRFIRKETAGKNKKLTLELGGKSAFIVFDDADLDSAVEGVVDSIWFNQGEVCCAGSRLLVQEGIKDRFITKLKRRMSKLRLGNPLDKSTDIGAINSLQQLKRIKSLVISGTKEGANIYQPKIEVPKSGYYYPPTLLENTNQSMNVCQTEIFGPVLSVIPFRTPNEAVSIANNSKYGLSSSVGLKISIWD

SEQ ID NO: 94287 - protein, 117 aa, Unknown
  Bacterial polypetide isolated from the Sargasso Sea
FEGKNNMRIFQEEIFGPVVSVTTFKDEKEALEIANDTLYGLGAGVWTRDGNIAYRMGRGIEAGRVWTNCYHAYPAHAAFGGYKQSGIGRETHKMMLNHYRQVKNLHVSYSEKKLGFF

SEQ ID NO: 94288 - protein, 241 aa, Unknown
  Bacterial polypetide isolated from the Sargasso Sea
STPLTALKLAEIIQESDLPPGVVNIITGDGATGELLVNNPNVDKIAFTGSTEVGKMIIKSIANSKKKYSLELGGKAANIICEDASIDQAVEGIINSIFFNQGHVCCAGSRLYVQESVSSQIISKLKDRMDHLILGDPLDKNTDIGAINSNEQLKKINMYLDIGKKEGGGFYQSKHTIPKKGYWCAPTLFTDTSQSHRIVQEEIFGPVLAIQTFRTIDEVIDKANNTPYGLSGGIWTDKGSK

SEQ ID NO: 94289 - protein, 206 aa, Unknown
  Bacterial polypetide isolated from the Sargasso Sea
CTCPSRALIQKSIYDKFMEKAIARTKAVKQDNPLKMETMIGAQASLEQMEKIKSYLDLGKKEGAKVLCGGSEAKINSGLEKGNYIQPTIFEGKNNMRIFQEEIFGPVVSVTTFKDEKEALEIANDTLYGLGAGVWTRDGNIAYRMGRGIEAGRVWTNCYHAYPAHAAFGGYKQSGIGRETHKMMLNHYRQVKNLHVSYSEKKLGFF

SEQ ID NO: 94290 - protein, 257 aa, Unknown
  Bacterial polypetide isolated from the Sargasso Sea
MSLENFLVNQLKNLVLSGETRYEKWRREQLNALSNLLENHQEEILNALNQDLGKPTTEAFFEIIAVKQEIKVAQKNLSKWMKTKQINVPVSLRPAKALMQPDPLGCILIIGPWNYPFSLTLQPLVGALAAGNTAVLKPSEHAPNVSTLIKKLIEKYFPPEIVQVFEGDGTIASDLMTKQFDHVFFTGGESIGKKVMEAASKNLTPVTLELGGKSPAIVIDGANLEVTAKRIIWGKNLNVGQTCIAPDHLLIEHKLFD

SEQ ID NO: 94291 - protein, 259 aa, Unknown
  Bacterial polypetide isolated from the Sargasso Sea
QKAKIPNGVINIITGDGKTGEQLTNHNLINKIAFTGSTEVGKKIISSTANSNKKLTMELGGKSPFIVFDDADLDSAVEGVVDAIWFNQGQVCCAGSRLLVQESVEKKFIKKLKQRMEKLRVGNPLDKSIDIGAIVAPVQLKKIDSLVKKGVKEGAKLWQPTWSCPKDGLFYPPSLFTNVTPASLIAQVEIFGPVLTSLTFRTPSEAVAIANNTPYGLAASIWSENINLAMDIAPKIKAGVVWINSTNLFDAACGFGGFK

SEQ ID NO: 94292 - protein, 296 aa, Unknown
  Bacterial polypetide isolated from the Sargasso Sea
FKSVNPSNGETIANLSQASNKDVNNAVKTAKNAFRSWSETNPHERAKVLYSIARILQKNSRLFSVLETIDNGKPIRESRDIDIPLAQRHFYYHAGLAQIYKTKIRDMEPIGVCGQIIPWNFPLLMLAWKIAPALAAGNTVVLKPAEYTSLTALLFAEICIEAGVPEGVVNIITGDGSVGEMLVDHPDIKKIAFTGSTEVGRIIRKRTAGTGKLLTLELGGKSPFIVFDDADLDSAVEGLVDAIWFNQGQVCCAGSRLLIHESIEEKFHQKIRNRMNKLRVGPPLDKSIDMGAIVDK

SEQ ID NO: 94293 - protein, 293 aa, Unknown
  Bacterial polypetide isolated from the Sargasso Sea
ILSIKKKYTNFVGGKFVEPKSKKYINSISPSTEEVLSKVPLSNEQDINSAVKSARKGLEVWSKLTPNQRSRYLFKIARLIQERSREFAVLESLDGGKPIRESRDFDLPQVAANFFYFAGWADKLDLSWATKSLKPYGVVGQIIPWNFPLLMLAWKIAPALATGNTVVLKPAETTPLTALLFAEICEQAGLPYGVVNIVTGDGSTGSLIVNHKDINKIAFTGSTQVGKLIQKSLAGRDVGLTLELGGKAANIVYEDAAIDQAVEGVVNGIFFNQGHVCCAGSRLLLQESIHDQF

SEQ ID NO: 94294 - protein, 278 aa, Unknown
  Bacterial polypetide isolated from the Sargasso Sea
KKLTTLSISNKPDVNAAVGAAKKAYISWSKTSSDTRAKYLYALARLIQKHSRFLSVLETIDNGKPIRETRDIDIPLVARHFYYHAGWAKKIDTTKYKSIGVIGQIIPWNFPLLMMSWKIAPAIAAGNTVVLKPAEFTSLTALYFAELCQKARIPKGVINIITGDGSTGELITSHVDTKKIAFTGSTEVGKKIIQSTAKQEKKLTMELGGKSPFIVFEDADLDSAVEGVVDAIWFNQGQVCCAGSRLLVQESVEKLFIKKLKTRMEKLRVGNPLDKSID

SEQ ID NO: 94295 - protein, 298 aa, Unknown
  Bacterial polypetide isolated from the Sargasso Sea
LKTTWGKCKTEAMVAEQGFLLSDIKHTLKHLGKWAKPRKVSTPMVAWPGKSFRKPEPLGTVLIIGAWNYPLQLLLAPYIAAIAAGNCAVLKPSELAEETSSLVAKLIPQYMDTSCVAVIEGGKDEATALLACKWDHIFYTGGEAVGKIVMNAAARHLTPVTLELGGKSPCFVDKDTNLTVTARRLVWGKWMNAGQTCIAPDYVIVEKGFEQKFIEAVKKELKKQYGKKPLLSRDYGNIINHRHLKRLESYLENVNVVYGGELDEARPAMAPTLVLEPSLDSPLMKEESLANSAYHHGR

SEQ ID NO: 94296 - protein, 313 aa, Unknown
  Bacterial polypetide isolated from the Sargasso Sea
KEPLGVIGQIIPWNFPLLMLSWKIAPALAAGNTVVLKPAETTPLTAMFFAELCIEAQIPPGVVNIVNGDGETGSFIVNNKQISKIAFTGSTKVGRLIRKETAGKDKKISLELGGKSAFIVFEDADLDSAIEGVVDSIWFNQGEVCCAGSRLLVQEGIQNKFIIKLKRRMSKLRLGNPLDKSTDIGAINSLQQLKKIKSLVASGSKEGANIYQPKIEIPKKGFFYPPTLLENTHQSMNICQTEIFGPVLSVIPFRTPKEAVSIANNSRYGLSSSIWTENINLGLDIAPKIKAGVVWINSTNLFDASARFWWISR

SEQ ID NO: 94297 - protein, 131 aa, Unknown
  Bacterial polypetide isolated from the Sargasso Sea
NSGLEKGNYIEPTIFEGNNSMRIFQEEIFGPVVSVTKFKDEAEALKIANDTLYGLGAGVWTRNGNIAYRMGREIQAGRVWTNCYHAYPAHAAFGGYKQSGIGRETHKMMLNHYRQVKNLHVSYSEKKLGFF

SEQ ID NO: 94298 - protein, 111 aa, Unknown
  Bacterial polypetide isolated from the Sargasso Sea
MRVFQEEIFGPVLAVTTFKTMEEALEIANDTQYGLGAGVWSRNGNLAYKMGRGIQAGRVWTNCYHAYPAHAAFGGYKQSGIGRETHKMMLEHYQQTKCLLVSYSDKPLGLF

SEQ ID NO: 94299 - protein, 291 aa, Unknown
  Bacterial polypetide isolated from the Sargasso Sea
KNSRFISVLETIDNGKPIRETRDIDIPLVARHFYYHAGWAARNTNNSDNSIGVVGQIIPWNFPLLMLAWKIAPAIALGNTVVLKPAEYTSLSALYFAELCEKAKIPQGVINIITGDGSTGEHITLHKDIKKIAFTGSTEVGKKIIQTNTNPDKKMTMELGGKSPFIVFEDADLDSAVEGVVDAIWFNQGQVCCAGSRLLVQESIEKKFIQKLKKRMEKLRVGDPLDKSIDIGAIVAPVQLKKINSLVNKAQKDGNKLWQPSWSCPTNGLFYPPIFVYKCNAFLFYCSSRNI

SEQ ID NO: 94300 - protein, 217 aa, Unknown
  Bacterial polypetide isolated from the Sargasso Sea
FAMFTLNQGEVCTCPSRALIQKSIYDKFMEKAIARTKAVKQDNPLKMETMIGAQASLEQMEKIKSYLDLGKKEGAKVLCGGSAAKINSGLEKGNYIQPTIFEGKNNMRIFQEEIFGPVVSVTTFKDEKEALEIANDTLYGLGAGVWTRDGNIAYRMGRGIEAGRVWTNCYHAYPAHAAFGGYKQSGIGRETHKMMLNHYRQVKNLHVSYSEKKLGFF

SEQ ID NO: 94301 - protein, 518 aa, Unknown
  Bacterial polypetide isolated from the Sargasso Sea
PARAWLAQHEAGFGHFIGGAWHAPAAGERFVSHAPATGERLADIAQGDAADVDAAVAAARAAQPGWLALGGAGRARHLYALARMVQRHSRLFAVLEALDNGKPIRETRDIDVPLVARHFLHHAGWAQLQESEFADYAPLGVIGQIVPWNFPLLMLAWKIAPAIAMGNCVVLKPAEYTPLTALLFAELAHRAGLPAGVLNVVTGDGRTGAALVEHPQVDKIAFTGSTEVGRLIRAATAGSGKSLTLELGGKSPFIVFDDADLDGAVEGVVDAIWFNQGQVCCAGSRLLVQEGIEARFIAKLKRRMETLRVGTSLDKSIDIGAIVDPVQLERIQSLVETGRREGCAVWQSPDTAMPAGGCFYPPTLVTGVAPASILAQEEIFGPVLVAMSFRTPDEAIALANNSRYGLAASVWSETIGRALDIAPRLLCQSGVDQRDQSVRRGRWFRGVSRVGLWPGRRSRGYLRISEAARLAQAGRPSGRAHRTRWTGSRPRRARVVVERHADRPYCEAFHRWQAGASG

SEQ ID NO: 94302 - protein, 492 aa, Unknown
  Bacterial polypetide isolated from the Sargasso Sea
FKAKYGNYIGGEFVAPVDGNYFSNTSPVNGKPIADFPRSTAKDIDKALDAAHAAADAWGKTSAQDRSLVLLKIADRIEQNLELLAITETWDNGKAVRETLNADIPLAADHFRYFAGCIRAQEGSSAEINELTAAYHFHEPLGVVGQIIPWNFPLLMAAWKLAPALAAGNCVVLKPAEQTPLGISVLMELIGDLLPPGVLNVVHGFGKEAGEALATSKRIAKIAFTGSTPVGSHIMHAAAENIIPSTVELGGKSPNIFFADIMKAEPAFIEKAAEGLVLAFFNQGEVCTCPSRALVEESIYDDFMKVVMKKVESIKRGDPLDTDTMVGAQASEQQFDKILSYLEIAKGEGAQLLTGGKVEKLTGDLATGYYIQPTLLKGTNDMRVFQEEIFGPVVSITTFKDEAEALAIANDTEFGLGAGLWTRDINRAYRMGRAIKAGRVWTNCYHLYPAHAAFGGYKKSGVGRETHKMMLDHYQQTKNLLVSYDINPLGFF

SEQ ID NO: 94303 - protein, 424 aa, Unknown
  Bacterial polypetide isolated from the Sargasso Sea
TMGKPIRESRDMIFPLAQRHFYYHAGMAQLMQTELPKRSPIGVCGQIIPWNFPLLMLSWKIAPAIAMGNAVVLKPAEYTSLTALLFAEICTSAGVPNGLINIVTGDGKVGEMIVGHKDINKIAFTGSTEVGKLIRERTAGSGKSLTLELGGKSPFVVFDDADLDSAVEGVVDAIWFNQGQVCCAGSRLLVHEAISEKFYNKLRNRMKNLRLGSPLDKSIDMGAIIDKKQHKKISGMVSQTQGKVFQAGSPLPQEGCFFPPTLITDLHTADPLMHEEIFGPVLVSTTFRTPSEAIELSNNTTFGLAASVWSENINLCLELAPKIKAGVIWINGTNMFDAAAGFGGVKQSGFGREGGWEGLLAYSKPKNQFSPKIKSTPVKNQISKADYIDRTAKLYIGGKQCRPDSGYSQSIFDHNGKPVTQVPL

SEQ ID NO: 94304 - protein, 250 aa, Unknown
  Bacterial polypetide isolated from the Sargasso Sea
PITLEWGGKSPNIFFEDIMLEDDAYLSKCFEGFAMFAFNQGEVCTCPSRALVQESIYEKFMEKALERVKNIKQDNPLISDTALGAQASVEQMEKIKSYLDLGKKEGAEVLAGGDIANLNSGLEKGNYIQPTVFKGHNKMRIFQEEIFGPVVSVTTFKDKAEALEIANDTLYGLGAGVWTRNINTAYKFGRSIEAGRVWTNCFHAYPAHAAFGGYKQSGIGRETHKMMLNHYRQTKNLLVSYKEEPDGFYL

SEQ ID NO: 94305 - protein, 506 aa, Unknown
  Bacterial polypetide isolated from the Sargasso Sea
MIYAQPGTAGAIVNFKEKYANFIGGKWVAPVNGEYFDNRSPVNGQNFCKIPRSDYRDIELALDAAHAAKDAWGKTSVTERANLLLRIADRVEQNLEYLAVAETWENGKAVRETLNADLPLFVDHFRYFAGCIRAQEGSAADIDGNTVSYHFPEPLGVVGQIIPWNFPLLMAAWKIAPALAAGNCVVLKPAEQTPVSILVLLELIEDLLPPGILNVVNGFGAEAGQALATSKRIAKLAFTGSTEVGYHILKCAAESLIPSTVELGGKSPNLYFADVMDHEDEYLDKAVEGMLLAFFNQGEVCTCPSRVLIQESIYDRFIEKVLARAQTIKQGNPLDTATQVGAQASQEQFDKILSYLAIGKDEGAQVLLGGSLCQLESDQSKGYYISPTIMKGHNKMRIFQEEIFGPVISVTTFKDEAEALAIANDTEYGLGAGVWTRDMNRAQRLGRGIQAGRVWINCYHAYPAHAAFGGYKKSGIGRETHKMMLNHYQNTKNLLVSYDINPLGFF

SEQ ID NO: 94306 - protein, 494 aa, Unknown
  Bacterial polypetide isolated from the Sargasso Sea
MAKNSKVKKSDSIDWDYSVALESTDHISISQEYKLFIGGKFVKPLSKKYFNSINPSNEKILSKIASAGKADINKAVLAAKSAYDTIWSKMDNAERGKYLYRIARLIQEKSRELAVIESLDGGKPIRESRDIDIPLAAAHFFYYAGWADKLDYAFPGSKVSSIGVAGQIIPWNFPLLMAAWKIAPALATGNTVVLKPAESTPLTALKLAEIIQESDLPPGVVNIITGDGATGELLVNNPNVDKIAFTGSTEVGKMIIKSIANSKKKYSLELGGKAANIICEDASIDQAVEGIINSIFFNQGHVCCAGSRLYVQESVSSQIISKLKDRMDHLILGDPLDKNTDIGAINSNEQLKKINMYLDIGKKEGGGFYQSKHTIPKKGYWCAPTLFTDTSQSHRIVQEEIFGPVLAIQTFRTIDEVIDKANNTPYGLSGGIWTDKGSKIFQVSKKMRAGVIWANTFNKFDPASPFGGYKESGIHREGGLEGLAPYVNFDNRTL

SEQ ID NO: 94307 - protein, 337 aa, Unknown
  Bacterial polypetide isolated from the Sargasso Sea
MATWKLAPALAAGNCVVLKPAEQTPASIMILMEIIGDLLPKGVVNVVSGYGLEAGKPLASSKRIKKIAFTGETTTGRLIMQYASQNLIPITLELGGKSPNIFFEDVMDKDDDFFDKCLEGFAMFTLNQGEVCTCPSRVLVQESIYDKFMKKAIARTKAVKQDNPLKMETMIGAQASLEQMEKIKSYLDLGKKEGAKVLTGGSVAKLNSGLEKGNYIQPTIFEGNNKMRIFQEEIFGPVVSVTKFKDEAEALEIANDTLYGLGAGVWTRNGNLAYRMGREIQAGRVWTNCYHAYPAHAAFGGYKQSGIGRETHKMMLNHYRQVKNLHVSYSEKKLGFF

SEQ ID NO: 94308 - protein, 337 aa, Unknown
  Bacterial polypetide isolated from the Sargasso Sea
MSLENFVLNELQDLVLSGKTRNEKWRRAQLKSLSNLLENHQQEILKALSQDLGKPATEAFFEIIAVKQEIKLAQKSLSNWMKTRQINVPVSLKPAQALVQPDPLGCILIIGPWNYPFSLTLQPLVGALAAGNTAVLKPSEHAPNVSNLIKKLIEEYFPPEIVQVFEGDGSIAAGLMTRQFDHVFFTGGENIGKKVMEAASKNLTPVTLELGGKSPAVVIDGANLEVTAKRVIWGKSLNAGQTCIAPDHLLVEDKLFDSLISNLINSINDFYGNMPLDSKHLGSIINEKQFNRLNNLLKQAKKNNQIIYGGDSNEKEKRISPTLIKIDNRNVLLEGRT

SEQ ID NO: 94309 - protein, 438 aa, Unknown
  Bacterial polypetide isolated from the Sargasso Sea
MNNWEYAESIESEKIVKIEKKYGHFINGEFVSPNSKKYLDTISPSSEEVLSSISIGNEKDVDFAVNAAKEGLKQWSKTSPSERSKYLFKLARLIQERSREFAVLESLDGGKPIKESRDFDLPQVAQNFFYYAGWADKIDLAWGSGISKPYGVVGQIIPWNFPLLMLSWKVAPALATGNTVVLKPAETTPLTALLFAELCDEVGLPKGVFNLITGDGTTGSELVNHKDIKKIAFTGSTSVGKYIQKSLAGRDVGLTLELGGKAANIVYNDAALDEAVEGVVNGIFFNQGHVCCAGSRLLVQEDIHDVFINKLEKRMQTLRVGNPLDKNTDIGAINSKDQLDKITDMVNEGVSDGGELFQIECELPKNGFWFKPSLFTGVQANYKIATEEIFGPVLTTLTFRTPEEAVEIANNTEYGLSAGIWTEKGSKILWTADRLDAG

SEQ ID NO: 94310 - protein, 354 aa, Unknown
  Bacterial polypetide isolated from the Sargasso Sea
MSKVIKNFKNLKYGPAPENDSEVLEWIKKLDKPNHIFINGNWVKSKSKKIINCINPSNKKTLTKLVISSKEDVNSAVKSAKNAFRSWSRQTPFERSKYLYALARLIQKHSRFISVLESIDNGKPIRETRDIDIPLVARHFYYHAGWAEKMVNEKINPIGVIGQIIPWNFPLLMLSWKIAPAIACGNTVVLKPAEFTSLTALFFAELCQKANLPKGVVNIITGDGSTGELITKHDKIDKIAFTGSTEIGKKIITSTSGSGKKLTMELGGKSPFIVFEDADLDSAVEGVVDAIWFNQGQVCCAGSRLLVQESIEKIFIKKLKKRMEKLRVGNPLDKSIDIGAIIAPVQLKKINKLV

SEQ ID NO: 94311 - protein, 479 aa, Unknown
  Bacterial polypetide isolated from the Sargasso Sea
MDKWEYSESIESDSIVSIQSKYGHFIDGKFSTPNSKKYLKTVSPSTEEVLASISIGNKNDVDSAVNSAKEGLKIWSKTAPSERAKYLYKLARLIQERSREFAVLESMDGGKPIKESRDFDLPQVAANFFYFAGWADKLDISWGTKEMKPYGVVGQIIPWNFPLLMLAWKVAPALATGNTVVLKPAETTPLTALLFAELCEEIGLPKGVFNLVTGDGTTGSELVNHEGISKIAFTGSTSVGKYIQNAVGERDIGLTLELGGKAANIVYNDAALDQAVEGVVNGIFFNQGHVCCAGSRLLLQEDIHDEFINKLEKRMQTLRVGNPLDKNTDIGAINSKEQLEKITSLVNEGVNDGGELFQIECDLPSSGYWFRPSLFTNVQPSYNIAREEIFGPVLTTLTFRTPEEAVEIANNTEYGLSAGVWTEKGSKILWTADRLDAGVIWANTFNKFDPSSPFGGYKESGFGREGGRHGLLSYLKVQS

SEQ ID NO: 94312 - protein, 785 aa, Unknown
  Bacterial polypetide isolated from the Sargasso Sea
MNKIIKNFKNIKYGPAPEDDTEVINWIKKISSSNKNYINGKWNTSKGSKKIKVINPSTNKKLFDLTISTKKDVDLAVNSARKAQKKWSSISSFQRSKYLYAIARLIQKHSRFLAVLESIDNGKPIRETRDIDIPLVARHFYYHAGWAEKLDKNLKPIGVVGQIIPWNFPLLMLAWKIAPAIACGNTVVLKPAEYTSLTALYFAELCTKANLPNGVINIITGDGSTGELITSHPEIQKIAFTGSTEIGKKIIQFTSSTNKKLTMELGGKSPFIVFEDADLDSAVEGVVDAIWFNQGQVCCAGSRLLIQESIEKKFIKKLKQRMEKLRIGNPLDKSIDIGAIVAPVQLQKINSLVKKGIKDGAKLWQPSWSCPTEGLFYPPSLFTNVTPASFIAQVEIFGPVLTSLTFRKPSEAVAIANNTPYGLAASIWSENINLALDIAPKIKAGVIWINSTNLFDASCGFGGFKESGFGREGGSEGIRAYTKNKLPEKKINNKVNKKTKYNLPIIDRTPKLYIGGKQKRPDGGYSFGLNSTNGTFICDIAQSNRKDVRDCVEIAAKTFLKQLNNFNRSQLLFYLAENLQIRKNTFIELIVALSGSTLSNANKEFDASCERLFYYASMADKFEGNIHNPPMRGLTLAVKEPLGVITSLLNDDLPLLNLITVLGSIFSTGNTNIIVPGEKTSLIATELYQVLDTSDIPGGYINILTAKQNDLTETLSLHENIDGIWYFGHEHSQKSIVKKNSISNLKRFWCPDEKNIDWFSNNNHFLNEFLCQSTQIKNIWIPYGE

SEQ ID NO: 94313 - protein, 479 aa, Unknown
  Bacterial polypetide isolated from the Sargasso Sea
MNNWEYAESIESEKIVNIEKKYGHFIQGEFVSPNSKKYLDTISPSTEEVLSSISIGDEKDVDFAVNAAKEGLKQWSKTSPSERSKYLFKLARLIQERSREFAVLESLDGGKPIKESRDFDLPQVAQNFFYYAGWADKIDLAWGNGISKPYGVVGQIIPWNFPLLMLSWKVAPALATGNTVVLKPAETTPLTALLFAELCDEIGLPKGVFNLVTGDGTTGSHLVNHKDIKKIAFTGSTSVGKYIQKSLSGRDVGLTLELGGKAANIVYNDAALDEAVEGVVNGIFFNQGHVCCAGSRLLVQEDIHDVFIDKLEKRMQTLRVGNPLDKNTDIGAINSKDQLDKINELVNEGVNDGGELFQIECELPKNGFWFKPSLFTGVQANYKIATEEIFGPVLTTLTFRTPDEAVEIANNTEYGLSAGIWTEKGSKILWTADRLDAGVVWANTFNKFDPASPFGGYKESGFGREGGRHGLLSYLKASS

SEQ ID NO: 94314 - protein, 344 aa, Unknown
  Bacterial polypetide isolated from the Sargasso Sea
DYAFPGSRLSSIGVAGQIIPWNFPLLMAAWKIAPALATGNTVVLKPAESTPLTALKLAEIIQESDLPPGVVNIITGDGATGELLVNNPNVDKIAFTGSTEVGKMIIKSIANSKKKYSLELGGKAANIICEDASIDQAVEGIINSIFFNQGHVCCAGSRLYVQESVSSQIISKLKNRMDRLILGDPLDKNTDIGAINSNEQLKKINMYLDIGKKEGGGFYQSKHTIPKKGYWCAPTLFTDISQSHRIVQEEIFGPVLAIQTFRTIDEVIDKANNTPYGLSGGIWTDKGSKIFQVSKKLRAGVIWANTFNKFDPASPFGGYKESGIHREGGLEGLAPYVNFDNRTL

SEQ ID NO: 94315 - protein, 310 aa, Unknown
  Bacterial polypetide isolated from the Sargasso Sea
MEYSESIESQDIVSIKDKYQNFVNGKFQQPNSKKYIDTISPSSEEFLSKIVISNEKDVDKAVESAQMGFEKWTNTTPYERSKYLFKLARLIQERSREFAVLESLDGGKPIKESRDFDLPQVAANFFYFAGWADKIDLSWGAKSLKPYGVVGQIIPWNFPLLMLAWKVAPALATGNTVVLKPAETTSLTALLFAELCEQAGIPDGVVNIITGDGTTGSLIVNHKDINKIAFTGSTQVGKLIQKSLAGRDVGLTLELGGKAANIVYEDAAIDQAVEGVVNGIFFNQGHVCCAGSRLLLQESIHDEFITKLEK

SEQ ID NO: 94316 - protein, 261 aa, Unknown
  Bacterial polypetide isolated from the Sargasso Sea
AAAHLTPVTLELGGKSPALVLEGADLTVSARRLIWGKGLNAGQTCIAPDHLIVQPGLKAELLKAMASARTEMYGTDPLASEQLACIVNERQFHRLEALLDQAQQEGRVLIGGEINRDQRRIAPTVIRVDNRQDPLMADELFGPLLPVLELADLPQTLAEIRQGPKPLALYLFGGNEAQQQQVLETTSSGGVCLNDVVMQAGVPDLPFGGVGGSGMGSYHGQAGFDTFSHAKAVLRRPFRLDFKLRYPPYGINLNLLRRLAG

SEQ ID NO: 94317 - protein, 376 aa, Unknown
  Bacterial polypetide isolated from the Sargasso Sea
WARPRRVGTGLRTFPSMAYVQPEPYGSVLIISAWNYPLQLALAPLVAVLSAGNCAVVKPSELAPATSAIMARLLPLYLDKEAVVVIEGGVAETTELLKLPFDHIMYTGNGQVGKIVLRAAAEHLTPVTLELGGKSPVYVDSSADLKLTAQRIAWGKWLNAGQTCIAPDYILAHKDIAQALTEEIKAQLHQMYGDDPKLSPDYGRIINLRHLQRVRSYLDGLDVYCGGVVDEEQLYFSPTLVLDPPLDSRLMTEEIFGPVLPLLPISSFDAAVRFVQKRDKPLSAYLFSNNSTQQQQWVEQISSGSQCINDVLMFMAVSELPFGGVGPSGMGQYSGKAGFEQFSHLKSVLKRPLWPEPPVRFAPYADWKRKVLGWLS

SEQ ID NO: 94318 - protein, 479 aa, Unknown
  Bacterial polypetide isolated from the Sargasso Sea
MNNWEYSESIESEKIVNIEKKYGNFIDGKFVTPKSKQYIDTISPSTEKILSSISIGNQQDVDYAVASAKEGLKKWSKTNPSERAKYLFKLARLIQERSREFAVLESLDGGKPIKESRDFDLPQVAQNFFYYAGWADKLDIAWGNEQYKPYGVVGQIIPWNFPLLMLSWKVAPALATGNTVVLKPAETTPLTALLFAELCEEVGLPDGVFNLVTGDGSTGSHLVNHKDIKKIAFTGSTGVGKYIQKSLAGRDVGLTLELGGKAANIVYSDAALDEAVEGVVNGIFFNQGHVCCAGSRLLVQEDIEEKFIKKLEKRMQTLNVGNPLDKNTDVGAINSKDQLDKIEKLVNEGVADGGDLFQIECELPKNGFWFKPSLFTSVQANYKIATEEIFGPVLTTLTFRTPEEAVEIANNTEYGLSAGIWTEKGSKILWTADRLEAGVIWANTFNKFDPASPFGGYKESGFGREGGRHGLLSYLKVSS

SEQ ID NO: 94319 - protein, 552 aa, Unknown
  Bacterial polypetide isolated from the Sargasso Sea
MLVNHPDISKIAFTGSTEVGRVIREKTAGSGKSLTLELGGKSPFIVFDDADLDSAVEGLVDAIWFNQGQVCCAGSRLLIHESIEDKFHKKIRNRMDKLRVGDPLDKSVDMGAIVDKSQLTRIKNLVSETEGQVYYAECEIPKKGLYYKPTLITGLSPSDKLMQEEIFGPVLVSTTFRTPKEACDLANDTTYGLAASIWSENINLALGLAPKIKAGVVWVNGTNMFDAAIGFGGVKESGFGREGGWDGLKSYLKHSINFSTNKAKIKQSHSNKGSVNLDRTAKLYIGGKQARPDGGYSQKVFDAANNYAGHVPSSNRKDIRNAVEAMNKASNWSTSSGHLRAQIIYFMAENLHARREEFSKRIDQMSGNKSGKKEVEFSIRRLFSYAAWADKFDGSISGVPVRGVGLTMREAVGNIIVFCPSSEPLLSLISCIAPAIAMGNRVTTISPFIGSLTATDFYQVLETSDIPPGVINILTGNHLDLAPHASSHMDVNAVWSFSEEEITKTIEFEAAKNIKRTWCLKNIDWFDTRTEGEMFLDAATETKSVWIPYGEG

SEQ ID NO: 94320 - protein, 457 aa, Unknown
  Bacterial polypetide isolated from the Sargasso Sea
IESSDIVSIEKKYGHFINGSFVSPKSKRYFDSISPSTEDLLSQVSFGNKADINLAVSSAREGFKTWQKVKPIDRSKYLFKIARLIQERSREFAVLESMDGGKPIRESRDVDLPQVSANFFYYAGWADKLDLSWGSVGLKPYGVAGQIIPWNFPLLMLAWKVAPALATGNSVVLKPAETTPLTALLFAEVCVEAGLPDGVFNLVTGDGETGAFLVDHVDVDKVAFTGSTNVGKQIQSSIAGSKKGLTLELGGKAANIVYEDASIDQAVEGVVNGIFFNQGHVCCAGSRLLIQESIQDEFIEKLERRMQQLRVGDPLDKNTDIGAINSKQQLEKISELVESGVSDGGAIYQPECELPGNGFWFKPTLFTDVQPAYRIAREEIFGPVLTTISFRTPEEAVEIANNTEYGLSAGIWSEKGSKILWTADNLDAGVVWANTFNKLDPSSPFGGYKESGLGEKG

SEQ ID NO: 94321 - protein, 506 aa, Unknown
  Bacterial polypetide isolated from the Sargasso Sea
MIYAQPGTAGAIVNFKEKYANFIGGKWVAPVNGEYFDNRSPVNGQNFCKIPRSDYRDIELALDAAHAAKDAWGKISVTERANLLLRIADRVEQNLEYLAVAETWENGKAVRETLNADLPLFVDHFRYFAGCIRAQEGSAADIDGNTVSYHFPEPLGVVGQIIPWNFPLLMAAWKIAPALAAGNCVVLKPAEQTPVSILVLLELIEDLLPPGILNVVNGFGAEAGQALATSKRIAKLAFTGSTEVGYHILKCAAESLIPSTVELGGKSPNLYFADVMDHEDEYLDKAVEGMLLAFFNQGEVCTCPSRVLIQESIYDRFIEKVLARAQTIKQGNPLDTATQVGAQASQEQFDKILSYLAIGKDEGAQVLLGGSLCQLEGEQSKGYYISPTIMKGHNKMRIFQEEIFGPVISVTTFKDEAEALAIANDTEYGLGAGVWTRDMNRAQRLGRGIQAGRVWINCYHAYPAHAAFGGYKKSGIGRETHKMMLNHYQNTKNLLVSYDINPLGFF

SEQ ID NO: 94322 - protein, 231 aa, Unknown
  Bacterial polypetide isolated from the Sargasso Sea
MAKDDDFLDKCLEGFAMFTLNQGEVCTCPSRVLVQESIYDKFMEKAIARTKAVKQDNPLKMETMIGAQASLEQMEKIKSYLDLGKKEGAKVLCGGNVAKINSGLEKGNYIEPTIFEGNNSMRIFQEEIFGPVVSVTKFKDEAEALQIANDTLYGLGAGVWTRNGNIAYRMGREIQAGRVWTNCYHAYPAHAAFGGYKQSGIGRETHKMMLNHYRQVKNLHVSYSEKKLGFF

SEQ ID NO: 94323 - protein, 468 aa, Unknown
  Bacterial polypetide isolated from the Sargasso Sea
MPNRPSLHAVETGVCFVDVVHKLNDSFDTGKTQSLEWRKSQLKALETLLKDNQHDILQALKNDLGKCKTEAMVAEQGFLLSDIKHTLKHLDKWAKPRKVSTPMVAWPGKSFRKPEPLGTVLIIGAWNYPLQLLLAPYIAAIAAGNCAVLKPSELAEETSSLVAKLIPQYMDNSCVAVIEGGKDEATALLACKWDHIFYTGGEVVGKIVMSAAAKHLTPVTLELGGKSPCFVDKNTNLAVTARRLVWGKWMNAGQTCIAPDYVIVEKGFEQKLIDAVKKELKKQYGKAPLSSRDYGNIVNLRHLKRLESYLENVNVVYGGELDESRPAMAPTLVLEPSLDSPLMKEEIFGPILPIITVDNMEAGIKFVNSRPKPLALYAFSDKDDVLDNIISKTSSGSVCTNDTMLFMTNPELPFGGVGNSGMGSYHGQAGFDTFSHIKTVMKRSFALDVFFRYAPFSKFKLSLLKKFL

SEQ ID NO: 94324 - protein, 357 aa, Unknown
  Bacterial polypetide isolated from the Sargasso Sea
MDESKINDIINSQKDFLDSNSNSINSRILLLKKLLINIKLFEEEIYEALSKDLNKAKFESFLTEILLVEKEIKLFIKKINKWSKDKKVKASILNFPSRNYLKPEPYGRVLIITPWNYPFQLSLTPLIGAFGSGNTVVIKPSELAPNTSSVLSKLIKETFPENIVSVIEGDAEVSKNLLSKKWNYIFFTGSTRVGKIVASEAAKNLTPITLELGGKSPCIIDKDINVEKTAKRIVSGKFINCGQTCIAPDYILVNDKIKSKLINHLKIEILKTYGNKPNQSNNYGRIISKNHLDRLTKIIAGQNIVFGGHSNKEDKYIEPTLIIDPDINSAIMSEEIFGPILPIISYNDVGEIEKVIL

SEQ ID NO: 94325 - protein, 624 aa, Unknown
  Bacterial polypetide isolated from the Sargasso Sea
MSKIIQNFKNISYGPAPEDSKDVMSWINSLNNPNHLFINGVWVKSKSSKKLQVINPASNKKLTTLSISNKTDVNLAVGAAKKAFNSWSKTSSDTRAKYLYALARLIQKHSRFLSVLETIDNGKPIRETRDIDIPLVARHFYYHAGWAKKIDTKINKPIGVVGQIIPWNFPLLMLSWKIAPAIAAGNTVVLKPAEFTSLTALYFAELCKKARIPKGVINIITGDGSTGELLTAHPDTKKIAFTGSTEVGKKIIQSTAKHEKKLTMELGGKSPFIVFEDADLDSAVEGVVDAIWFNQGQVCCAGSRLLIQESVEKLFIKKLKARMEKLRVGNPLDKSIDIGAIVAPVQLKKIQSIVKKGEKEGSKLWQPSWACPTDGLFYPPSIFTNVSPSSFIAQVEIFGPVLSVLSFRTPSEAATIANNTPYGLAASIWSENINLALDIAPKIKAGVIWINSTNLFDAACGFGGYKESGFGREGGVEGIRAYQDNTLPEASKIINKVNKNKVELSTIDATPKLYIGGKQKRPDSGYSFNQLSSQKEFICDIARANRKDVRDTVEAASKSKIGTLSNFNRAQILFYLAENLSQRKETFVNLLMSIVGANRSQATKEFEQACERIFYYASMADKLK

SEQ ID NO: 94326 - protein, 505 aa, Unknown
  Bacterial polypetide isolated from the Sargasso Sea
MIYAKPGSEGSVVSFKESYGNFINGEWVAPVKGEYFTATSPVDGSDIAQIPRSTSEDIELALDAAHAAKKGWADTSVAERSTILLKIADRIEENLELLAVAETWDNGKAVRETLNADIPLCADHFRYYAGCIRSQEGTIGEIDKNTVAYHFHEPYGVVGQIIPWNFPLLMAAWKLAPALVTGNVVVLKPAEQTPVSILLFAELIQDLLPPGVLNIVNGFGAEAGQALATSTRIAKIAFTGSTPVGGHILRCAAENLIPSTVELGGKSPNLFFPDIMNHEPEFIDKCAEGLVLGYFNQGEVCTCPSRAIIHEDIYDAFMEKVLEKIQKIKRGNPLDTDTMVGAQASNEQFEKILKYIDIGKSEGAQVVTGGEKEQLPGFDGGYYIQPTILKGENHMRVFQEEIFGPVIAVQTFKTEEEAIEIANNTSFGLGAGVWSRDANVAFRVGRAIEAGRVWTNCYHLYPAHAAFGGYKKSGIGRETHKMMLDHYQQTKNLLVSYDINPLGFF

SEQ ID NO: 94327 - protein, 786 aa, Unknown
  Bacterial polypetide isolated from the Sargasso Sea
MSKIIQNFKNISYGPAPEDSKDVMLWINSLNHPNLLFINGKWIKSKSSKKIQVINPATNKKLTTLAVSNKSDVNEAVGAAKKAFASWSKTSSDTRAKYLYALARLIQKHSRFLSVLETIDNGKPIRETRDIDIPLVARHFYYHAGWAKKIDTNKQKPIGVIGQIIPWNFPLLMLAWKIAPAIAAGNTVVLKPAEFTSLTALYFAELCQKARLPKGVINIITGDGSTGEIITSHQDTKKIAFTGSTEVGKKIIQSSAEQEKKLTMELGGKSPFIVFEDADLDSAVEGVVDAIWFNQGQVCCAGSRLLVQESVEKLFIKKLKARMEKLRVGNPLDKSIDIGAIVAPVQLKKIQSIVKKGEKEGSKLWQPSWACPTDGLFYPPSIFTNVSPSSFIAQVEIFGPVLSVLNFRTPSEAVSIANNTPYGLAASIWSENINLALDIAPKIKAGVIWINSTNLFDAACGFGGYKESGFGREGGLEGIRAYQDKTLPEAPKTAIKINKNKVVLPSIDTTPKLYVGGKQKRPDSGYSFNQMSAQREFICDIARANRKDVRDAVEAASKSKIGILNNFNRSQILFYLAENLSQRKETFVNLLMSITGVNKITALKEFEQSCERIFYYASMADKFEGNIHNPPMRGLTLAVKEPIGIIASLMCEYKPLLSLTTTISSLFANGNASLIVPSEKTSLIATSLYQVFETSDIPAGSINILTSRNNELNTTLAQHENIDGIWSFSNNSSIRSDIIKDTVFNLKRYWCPKNNRIDWSNESEEFLNAFLHESSQVKNIWIPYGE

SEQ ID NO: 94328 - protein, 328 aa, Unknown
  Bacterial polypetide isolated from the Sargasso Sea
GQIIPWNFPLLMAAWKIAPALASGNTVILKPGETTPLTALKLAEIIQESDLPPGVVNIITGDGTTGNLLVNNPNVDKIAFTGSTEVGKMIINSLAASKKKYSLELGGKAANIICEDAPIDQAVEGIINSIFFNQGHVCCAGSRLYVQESISSQIISKLHNRMDHLILGDPLDKNTDIGAINSKAQLNKIKMYLDIGKKDGGVIYQSKHTIPKKGYWCAPTLFTDISQSHRIVQEEIFGPVLAIQTFRTIDEVIAKANNSPYGLSGGIWTDKGSKIFQVSKEIRAGVIWANTFNKFDPTSPFGGYKESGMGREGGLEGLYPYVNTVNRI

SEQ ID NO: 94329 - protein, 565 aa, Unknown
  Bacterial polypetide isolated from the Sargasso Sea
MVKKTKKRKKSKKSVKSKSKKKATKKISKSFKKKSLKTKSKNVRNKNNGGKMSAEAMKVSSVLDTSHLKVKFPFKAKYGNYINGKFVEPKSGKYFDNTSPISNEKICSVARSNEKDVDAALDAAHAAFPTWGKTSITERSNILLKIADIIEKNLNVLATAECLDNGKPIRECMAADLPLVIDHWRYFAGVIRAEEGSVAEISNNEYSYHIPEPLGVVGQIIPWNFPLLMATWKLAPALAAGNCVVLKPAEQTPASIMLLMELIGDLLPPGVVNVVSGFGLEAGKPLASSKRIKKIAFTGETTTGRLIMQYASQNLIPITLELGGKSPNIFFEDVMAKDDDFLDKCLEGFAMFTLNQGEVCTCPSRVLIQESIYDKFMEKAIARTKAVKQDNPLKMETMIGAQASLEQMEKIKSYLDLGKKEGAKVLCGGNVAKINSGLEKGNYIEPTIFEGNNSMRIFQEEIFGPVVSVTKFKDEKEALEIANDTLYGLGAGVWTRNGNIAYRMGREIQAGRVWTNCYHAYPAHAAFGGYKQSGIGRETHKMMLNHYRQVKNLHVSYSEKKLGFF

SEQ ID NO: 94330 - protein, 572 aa, Unknown
  Bacterial polypetide isolated from the Sargasso Sea
MAKTKKKKAVKKRRKKTKKSIKKRRKLKSGTTKKLSKSRKKLKKIKSKSKSIRKTNGGKMSAEMKVSSVLDTSHLKVKFPFKAKYGNYINGKFVEPKSGKYFDNTSPISNEVICSVARSNEKDVDAALDAAHAAFPTWGKTSITERSNILIKIADVLEKNLNTLAVAECLDNGKPIRECMAADLPLVIDHWRYFAGVIRAEEGSVAEISNNEYSYHIPEPLGVVGQIIPWNFPLLMATWKLAPALAAGNCVVLKPAEQTPASIMVMMEMIGDLLPKGVVNIVSGFGLEAGKPLASSKRIKKIAFTGETTTGRLIMQYASQNLIPITLELGGKSPNIFFEDVMDKNDDFFDKCLEGFAMFTLNQGEVCTCPSRVLVQESIYDKFMEKAIARTKAVKQDNPLKMETMIGAQASLEQMEKIKSYLDLGKKEGAKVLCGGNVAKINSGLEKGNYIEPTIFEGKNNMRIFQEEIFGPVVSVTKFKDEKEALEIANDTLYGLGAGVWTRNGNLAYRMGREIQAGRVWTNCYHAYPAHAAFGGYKQSGIGRETHKMMLNHYRQVKNLHVSYSEKKLGFF

SEQ ID NO: 94331 - protein, 567 aa, Unknown
  Bacterial polypetide isolated from the Sargasso Sea
MAKTKRKAIKRERKKTKKSIKRKKKLKSGTTRKLSRSSKKAKSKSKKSKTNGGKMSAEMKLSSVLDTSHLKVKFPFKAKYGNYINGKFVEPKSGKYFDNTSPISNEKICSIARSNEKDVDAALDAAHAAFPSWGKTSITERSNMLLKVADAIEKNLNTLAVAECLDNGKPIRECMAADLPLVIDHWRYFAGVIRAEEGSIAEISSGEYSYHIPEPLGVVGQIIPWNFPLLMATWKLAPALAAGNCVVLKPAEQTPASIMVLMELIGDILPPGVVNIVSGFGLEAGKPLASSKRIRKVAFTGETTTGRLIMQYASQNLIPITLELGGKSPNIYFEDVMDKDDDFFDKCLEGFAMFTLNQGEVCTCPSRALVQESIYDKFMERAVARTKAVKQDNPLKMETMIGAQASLEQMEKIKSYLDLGKKEGAKVLCGGNVAKINSGLEKGNYIEPTIFEGKNDMRIFQEEIFGPVVSVTKFKDEKEALEIANDTLYGLGAGVWTRNGNRAFRMGREIQAGRVWTNCYHAYPAHAAFGGYKQSGIGRETHKMMLNHYRQVKNLHVSYSEKKLGFF

SEQ ID NO: 94332 - protein, 158 aa, Unknown
  Bacterial polypetide isolated from the Sargasso Sea
HAGEIGAIWIYRGILATSRNSEVRDFARQHLETEKQHLKLIDGFLDRNHRSCLLPLWRVAGFLTGALPSIFSSQAVFATVSTVETFVVSHYMAQINRLQSHNSHNSICRTLQSCCDDEARHESEASDLLNGKPSFFLRAWCFLVSSGSNLAVKCARII

SEQ ID NO: 94333 - protein, 106 aa, Unknown
  Bacterial polypetide isolated from the Sargasso Sea
LIPTFRGLLSGIYVEMKKKITPKKIHNELVKFHRKNHFVKVSPFNKNIGTSNVINSNFCEISVCKVRLKNKILILSAIDNLIKGAGGQAVQNMNLIFGFRENLGLK

SEQ ID NO: 94334 - protein, 44 aa, Unknown
  Bacterial polypetide isolated from the Sargasso Sea
EVAATKMIAVPGCYPTASLTALKPLKNLLTSAYPVINAVNDAVG

SEQ ID NO: 94335 - protein, 137 aa, Unknown
  Bacterial polypetide isolated from the Sargasso Sea
SKKKLKKYSIISCPGCYPTSVQLPLIPLIQKKMINNDEIYIDSKSGYSGAGKNIKKKFNHKNLFHSVLAYGVGSHRHMAEIDQELSKVSKKKIKVFFTPHLIPTFRGILSTIYLKTKKNISAKKIYLALKKYHKKNI

SEQ ID NO: 94336 - protein, 229 aa, Unknown
  Bacterial polypetide isolated from the Sargasso Sea
MNDIDIIFTALPNGQAQVISKYLLKKNTLIDLAADFRLNKSSDYKKWYKQKHYAINNIKKSIYALPEITDKKVKDFGIIGCPGCYPTSILLPLIPLLKKNSINTNNIHIDSKSGYSGAGRGVYKKYKNKNLYESISAYGIGFHRHNSEIEQEIKKYVKSKINFLFTPHLSPMFRGILSTFYLDLKKGFSIKKIHEILKRFHKKNKFVKILSINSLISTNNVINTNNCII

SEQ ID NO: 94337 - protein, 239 aa, Unknown
  Bacterial polypetide isolated from the Sargasso Sea
MSLNKINIAVAGATGYVGLDLIKILSSHPRVSIKYLCAQKKIGKNIQFFDKRIKKKLPKISNLKNVEWNKIDVLFCSLPTGQSQILAKKLIKKYNLKIIDLSADFRLSNKKDFYKFYKLKHSAPELLKFSKYSLTEFAKKDLKKFKIIACPGCYPTSIQLPILPLLKKKLLNTKDIIIDSKSGYSGAGKNLKKKFTHKNIFFAIKAYGILNHRHTAEIDQEFKKVTKSKIHYNFTPHLI

SEQ ID NO: 94338 - protein, 279 aa, Unknown
  Bacterial polypetide isolated from the Sargasso Sea
IHKDLLGLTKLKFTNIPEKEIDVLFLCAGHGNSLKFLKKNKFLKTTKIIDLSNDFRIRKNNELNNLKFIYGLPELNKETIKKANAIANPGCFATAIQLSLIPMAKHNLIKDTIHVNATTGSTGAGMKNSDTTHFSWRNNNISWYKAFNHQHLLEINQTLNRLNQKSKLIFIPQRGNFTRGIFSTSYTKYVGNLNEIKNIYKNYYKNHPFTEISDEEISLKSVINTNNCYIHLCKHENILLITSIIDNLTKGASGQALQNLNLMMNWDENIGLKLKASIY

SEQ ID NO: 94339 - protein, 192 aa, Unknown
  Bacterial polypetide isolated from the Sargasso Sea
MSKLNALIAGSTGYIGIQLVKLLIKHPNINIKYLCGNTSKGKSITYFDQSIKTNKLPKIIKFNNNLLNDVDIVFTALPNGQAQKISNKLLKKNILIDLSADFRLKSAKEYLKWYKINHSSKYNLKNSIYALPEISKKKLKNYKIISCPGCYPTSVLLPLIPLIKNKLIADNNIIIDSKSGYSGAGRGVHKNI

SEQ ID NO: 94340 - protein, 176 aa, Unknown
  Bacterial polypetide isolated from the Sargasso Sea
MDKLNVLIAGSTGYIGTQLVKLLCKHKNVKIKYLCGNTSVGKNISYYDKDLKKYKLPKIIKINYKLFKNVDVIFTSLPNGESQKIANKLLKNNIMIDLSADFRITNAKIYNKYYGIKHISLNNLKKSIYGLTEINKKNLSKGKIIACPGCYPTSILLPLFPLIKKNLIDLKICYDS

SEQ ID NO: 94341 - protein, 129 aa, Unknown
  Bacterial polypetide isolated from the Sargasso Sea
MREIKQTLSSLIKNKFEIIFLPHRGNFTRGIFSTSYLNYQGSLESANELYDDYYKNDPFTHISKNEISLKNVVNSNNCFIHLHKHNNILLITSVIDNLIKGASGQAIQNLNIMMGWNETLGLKLKSNIY

SEQ ID NO: 94342 - protein, 204 aa, Unknown
  Bacterial polypetide isolated from the Sargasso Sea
MHKLNILVAGSTGYIGVQLIKLLSKHRKVFIKYLCGNTSVGKKISYFDKSLKSKKLPNIIKFNKNLLKNVDLIFTALPNGEAQTISKYMLKKNVLIDLAADFRLEKVKKYLKWYKQKHKAAYNIKNSIYALPELNSNKIKNFKIISCPGCYPTSILLPLIPLIKKKLINQKNIIIDSKSGYSGAGRNVHKKYANKNLYESLSAY

SEQ ID NO: 94343 - protein, 144 aa, Unknown
  Bacterial polypetide isolated from the Sargasso Sea
MLKKVFIDGKEGTTGLQIYERLDKHPNVEILKINPDKRKCLLEKKKIMEKADLVFLCLPDKASRETVDLGEQLEDNCPIFIDASTAHRTSTMWSYGLPELSEEYRNSIINSKLIAVPGCYATGSNLIIFPLTKMGLILFSHHLL

SEQ ID NO: 94344 - protein, 126 aa, Unknown
  Bacterial polypetide isolated from the Sargasso Sea
MTKVGIIGGSGFTGEELIKLLSLHDSTSLIAISSRELKNTPVSDLFQGSDLNFVDPEDQIFFQCDVVFFATPHGTAMDKANSFIQKGIKVIDLSADFRLKDPSIWKEWYGSNHRDLENLKNSIYGL

SEQ ID NO: 94345 - protein, 218 aa, Unknown
  Bacterial polypetide isolated from the Sargasso Sea
MSKLNALVAGSTGYIGVQLIKILVKHKYINIKYLCGNSSVGKHIKFYDKSLSKYKLPKILKFNKKLLKDVHVIFTALPNGEAQDISKHLSKNHTLIDLAADFRLEKASDYLKWYKQKHRATNLIKKSIYLLPEINRKEIKKYNIISCPGCYPTSILLPLFPLFKKNLIKLNNIIIDSKSGYSGAGRGVHKKYKDKNLYESLSAYGVGFHRHNSEIDQV

SEQ ID NO: 94346 - protein, 190 aa, Unknown
  Bacterial polypetide isolated from the Sargasso Sea
MSKINVLIAGSTGYIGVQLTKILVNHKKVNIKYLCGSTSIGKKITYYDKGLKKYKLPKIVKFNKSFLSNVDIVFTALPNGQSQKISKLLLKKNILIDLSADFRLKKVSDFLKWYKIKHKAKNLIKDSVYALPEFKRNIIKSSKIISCPGCYPTSILLPLIPLLKKNLISNNNIIIDSKSGYSGAGRGVHK

SEQ ID NO: 94347 - protein, 122 aa, Unknown
  Bacterial polypetide isolated from the Sargasso Sea
MLKKFTKKKFQFSFTPHLSPMFRGILSTIYLDLKNKITPNTIYNELSKFYKNKKFVKVLKRDSLVSTNNVINTNNCYISICKSKYKNKVIILSAIDNLIKGGAGQAVQNLNIKFNFPEKTAL

SEQ ID NO: 94348 - protein, 59 aa, Unknown
  Bacterial polypetide isolated from the Sargasso Sea
DPEELNNTNRIRLFVFSNEEYDQIVLTAQLDNLGKGAAGQAIQNLNLMLRLPETSGLEG

SEQ ID NO: 94349 - protein, 149 aa, Unknown
  Bacterial polypetide isolated from the Sargasso Sea
KKFKNKNLYGSTSAYGIGSHRHNAEIQQELSYIKKNIEFTFTPHILPMFRGILSTIYLNYKSKANLNKIYNELRRFYMKHKFIKILKNKALSTNDVINTNNCQISVCKSKDKKKLIILSSIDNLIKGGAGQAVQNLNLIFKFKLNEGLK

SEQ ID NO: 94350 - protein, 235 aa, Unknown
  Bacterial polypetide isolated from the Sargasso Sea
MPKLNALVAGSTGYIGVQLIKLLVKHKYINIKYLCGNSSVGKHVKFYDKSLSKYKLPKILKFNKKLLKDVHVIFTALPNGEAQDISKHISKNHTLIDLAADFRLEKASDYLKWYKQKHRATNLIKKSIYLLPEINRKEIKNYNIISCPGCYPTSILLPLFPLFKKNLIKFNNIIIDSKSGYSGAGRGVHKKYKDKNLYESLSAYGVGFHRHNSEIDQVLRKFTKKKFQFSFTPHL

SEQ ID NO: 94351 - protein, 83 aa, Unknown
  Bacterial polypetide isolated from the Sargasso Sea
SELKKYYKNERFVKISNPDTFLSTNDVINTNNCIISVCNSKYKSKLIILSVIDNLIKGGSGQAVQNMNIRCKFNESEGLNGKI

SEQ ID NO: 94352 - protein, 270 aa, Unknown
  Bacterial polypetide isolated from the Sargasso Sea
MSTPLVFIDGDQGTTGLQIHERLRGRVERQDLTLLTLPAGARKDAQRRAEAINACDIAILCLPDVAAREAVAAIVNPRVRVIDASSAHRTTPGWVYGFPEMSDEQAQRVAGASRVTNPGCYPTGAIGLLRPLVQAGLVPADYPISIHAVSGYSGGGRAAVETYEGPEAANALPFQVYGLGLAHKHTPEIQLHAGLTQRPMFVPAYGAYRQGIVLTVPLELRLLNAGVDATALHACLADHYAGAPHVDVMPQQAPSALPHLDPQALNGTND

SEQ ID NO: 94353 - protein, 293 aa, Unknown
  Bacterial polypetide isolated from the Sargasso Sea
MTQKVFIDGEAGTTGLQILERLNGRPEIELIHLGDSQRKDTAARADALNTADVSILCLPDDASREAVSLVDTPTARIIDASIAYRTDPDWIFGFPEWAPGQRDKIAAATRVTNPGCYACGSIAILHPLVSAGLVPTNHATAINAVSGYSGGGKKLIAAFEDDQAQNTPNSAFYLYGLGLEHKHTEEIRVHAGLNTRPLFVPSVGRFAQGMIVSVPLHLWALPGAPSVSDVHAVLTDHYASQHFVTVESLENADAHGAHLDPEGLNGTNHMSLCVFGNEARQQVVVTAVLDNLG

SEQ ID NO: 94354 - protein, 301 aa, Unknown
  Bacterial polypetide isolated from the Sargasso Sea
VGKSISFYEKSLSKNKLPKIINFNKQLLKDVQIIFTALPNGEAQDISKHLNNKHTLIDLAADFRLDKASDYLKWYKQKHRASNLINKSVYLLPEINRKEIKKYNIISCPGCYPTSILLPLIPLFKKNLIKLNNIIIDSKSGYSGAGRGVHKKFKDKNLYESLSAYGVGFHRHNSEIDQMLRKYTKKKFQFSFTPHLSPMFRGILTTIYVELERNVSQQKVLKILNSFYKKENFVKILKSNAMISTNDVINTNNCYISVCRSKYSNKIIILSAIDNLIKGGAGQALQNLNNKFNFPGKTGLK

SEQ ID NO: 94355 - protein, 58 aa, Unknown
  Bacterial polypetide isolated from the Sargasso Sea
MIRIGIVGATGYTGAELLRLLSLHDDVEVTIVTSNSRKGEYLTDVFPSLKHYDLRFVD

SEQ ID NO: 94356 - protein, 299 aa, Unknown
  Bacterial polypetide isolated from the Sargasso Sea
LGSTGYTGLELINILNKHPKIDIVFLGSKNSKGKKLQNIYPTFKKYNLPVLKDYSEINYNNVDLVFLSLPHKISQKTICKDYGKTKFIDLSGDFRLKNHKVYSENYKTKHICKNLLKKFVYGLPELNYDLIKSASNISVPGCYPTSILIPIAPLISKNLIKTDNIIIDSKSGYSGAGKKFNIEKLIKKNNLNFYNYNTNQHRHICEIKQELEKISSSKVKFSFNPHILPIFRGMMSTIYCDLENNIKKRDVIENIKKHYLKSYFVKILNKNKTADFYTVNYSNNCLIKFYDHYDNKKNY

SEQ ID NO: 94357 - protein, 266 aa, Unknown
  Bacterial polypetide isolated from the Sargasso Sea
CAQKKLGKKIQFFDKRIKKKLPKISHLRQVNWNNIDVLFTSLPTGASQILSKELFKYKKLKIIDLSADFRLSDKEKFKKFYSKKHKAANLLKYSIYSLSEFVKEKIKNYKIIACPGCYPTSIQLPLIPLLKKGLIKKNDIIIDSKSGYSGAGKNLKKKFSHKNLYSSIHAYGIYKHRHTSEIDQEFSKISKSKINYTFTPHLIPTFRGMLSSIYVQPKNKVAITKIKNELKKYHKRNYFVKVLPVSKDLGTENVLNTNFCEISILN

SEQ ID NO: 94358 - protein, 166 aa, Unknown
  Bacterial polypetide isolated from the Sargasso Sea
KFDKKYLKDVDIVFTALPNGEAQAISKDLNDKNVLIDLAADFRLEKASDYKKWYNQKHKALANIKKSIYSLPEITGKKVKDFKIISCPGCYPTSILIPLLPLLKSKLIKKNNIIIDSKSGYSGAGRGVHKKYKDKNLYESLSAYGIGSHRHNQEIDQMIKRFTKVK

SEQ ID NO: 94359 - protein, 181 aa, Unknown
  Bacterial polypetide isolated from the Sargasso Sea
MSKKNVLICGATGYIGLQLTKLLCTHKKVNIKYLCGSTSVGKKIDSFEQELKKYKLPKISKFKKEYLSDVDIIFTALPNGEAQSISKFLNKNNLLIDLAADFRLNNKKDYEKWYKIKHKALNQIKKSIYSIPEISGQLIKKFSIVSCPGCYPTSVLIPLIPLIKKNLINNQTIIIDSKSGY

SEQ ID NO: 94360 - protein, 253 aa, Unknown
  Bacterial polypetide isolated from the Sargasso Sea
MSTPLVFIDGDQGTTGLQIHERLRGRVERQDLKLLTLPADARKDGQRRAEAINACDIAILCLPDAAARDAVAAIVNPRVRVIDASSAHRTTPGWVYGFPEMSEGQADRVAAASRVTNPGCYPTGAIGLLRPLVQAGLVPADYPISIHAVSGYSGGGRGAVETYEGQEAANALPFQVYGLGLAHKHTPEIQLHAGLTQRPMFVPAYGAYRQGIVLTVPLELRLLNAGVDATALHACLAEHYAGAPHVDVMPLQA

SEQ ID NO: 94361 - protein, 203 aa, Unknown
  Bacterial polypetide isolated from the Sargasso Sea
MHKLNALIAGSTGYIGIQLIKLLVKHKNINIKYLCGNTSVGKKVSFYENSLKSKKLPKITKFNNKYLKDVDIIFTALPNGEAQTISKYLLKKNILIDLAADFRLKKSSEYLKWYKQKHKAINNIKKSIYALPEITGKKIKNYDIIGCPGCYPTSILLPLIPLVKTKSINTKNIIIDSKSGYSGAGRGVHKKYKHKNLYESLSA

SEQ ID NO: 94362 - protein, 229 aa, Unknown
  Bacterial polypetide isolated from the Sargasso Sea
MKDSINIAIAGATGYIGLELIKILSKHPKAKILYLCATKSIGKSISSFDKRISNKKLPLISKIEKIDWNNIDVIFTALPNGEAHKIANFLPSKVKLIDLSADFRLKDPKVFKKWYGINHKSIKFINKSIYSVSEFSKEKLKKYNIISCPGCYPTSVQLPLIPLIKKKFIKVDNIIIDSKSGFSGAGKKIKEKFKFKHLFDSVRAYGVGSHRHMAEIDQELSKIAKKKVK

SEQ ID NO: 94363 - protein, 55 aa, Unknown
  Bacterial polypetide isolated from the Sargasso Sea
EVINTNNCYISVCKSKYSNKIIILSALDNLIKGGAGQAVQNMNNKFNFSETTGLQ

SEQ ID NO: 94364 - protein, 213 aa, Unknown
  Bacterial polypetide isolated from the Sargasso Sea
MSKINALVAGATGYIGIQLVKLLTKHKRVKIKYLCGDTSVGKKISSYDKYFNKYKLPNIVKFNKELLKSVDVVFTALPNGEAQKISKNLNNKNILIDLAADFRLKSASDYLKWYKIKHNAPKLIKKSIYSLPELNNQNIKKYKIISCPGCYPTSILLPLVPLINKNIVKSNNIIIDSKSGYSGAGRNVHKKYNNKFLNETLSAYGLAFHRHNS

SEQ ID NO: 94365 - protein, 234 aa, Unknown
  Bacterial polypetide isolated from the Sargasso Sea
MSKINVLIFGSTGYIGIQLTKILANHKKVNIKYLCGSSSIGKKISTYDKSLDKYNLPKIVKFNKNFLSSVDVVFTALPNGESQKISKLLLKKNILIDLSADFRLNKSSDFFKWYKIKHKAKNMIKHSIYALPEIKRNNIKNSKIISCPGCYPTSILIPLIPLLKKDLISNNNIIIDSKSGYSGAGRGVHKKYKNQNLYESLKAYGLAVHRHNSEIQQELDINTSKINNFQFTPH

SEQ ID NO: 94366 - protein, 194 aa, Unknown
  Bacterial polypetide isolated from the Sargasso Sea
MPKLNALVAGSTGYIGVQLIKLLVKHKHINIKHLCGNSSVGKHVKFYDKSLSKYKLPKILKFNKKLLKDVHVIFTALPNGEAQDISKHLSKNHTLIDLAADFRLEKASDYLKWYKQKHRATNLIKKSIYLLPEINRKEIKKYNIISCPGCYPTSILLPLFPLFKKNLIKLNNIIIDSKSGYSGAGRGVHKKYKN

SEQ ID NO: 94367 - protein, 42 aa, Unknown
  Bacterial polypetide isolated from the Sargasso Sea
SKYKDKIIILCAIDNLIKGGGGQAVQNMNYYFKFNEGEGLNV

SEQ ID NO: 94368 - protein, 104 aa, Unknown
  Bacterial polypetide isolated from the Sargasso Sea
EVYLVQFIVDLKKGVPLNKANIELKKFYKNERFVKICNLNTYLSTNDVINTNNCIISVCNSKYKDKLIIISVIDNLIKGGSGQAVQNMNIRYNFDENEGLNGKI

SEQ ID NO: 94369 - protein, 129 aa, Unknown
  Bacterial polypetide isolated from the Sargasso Sea
MKKKIKVAVLGSTGYVGMELVKILSNHSYVDINFLGSETIHGGYLNNIDNTKVYNQLPLLKPNDSFNAEDSDYIFLALPHAVSNKYVKKYFNKINIIDLSADFRLDNFEVYKKNYGNEHECKEYLNNFI

SEQ ID NO: 94370 - protein, 257 aa, Unknown
  Bacterial polypetide isolated from the Sargasso Sea
KVSDCIKLDTDLDKKFLEPSADNLSHCDVVFFASPNGVAMDMARDLVKNDIRLIDISADFRIPDAEIWEKWYGQKHTSPELIEQSVYGLPEMKNQRDKISNAKIIANPGCYPTSSLLSLLPILDMIGEQRIIINATSGITGAGRNLNPDKLFAPGTENYQAYAVAKHRHYPEMLNQIQHINKNADVLFVPHLSSIERGIYSTHYLTLRDLDLDHLYHIYNDYYKDSQFIKIINQTYPKLGEVNTTNDCLISLFSSSE

SEQ ID NO: 94371 - protein, 41 aa, Unknown
  Bacterial polypetide isolated from the Sargasso Sea
TNVKDKIVIFSAIDNLIKGASGQAIQNMNLTFKFPETLGLK

SEQ ID NO: 94372 - protein, 154 aa, Unknown
  Bacterial polypetide isolated from the Sargasso Sea
NLKKKFSHKNIYSSIQSYAIYNHRHRSEIDQELSTASKSKVKYVFTPTLIPTFRGILSAIYVDKNKGVTLKKIHNELVRSHKKNHFVKILKPNINIGTGNVINTNICEISVCELKLKNKVLILSAIDNLIKGAGGQAVQNMNIIFGLKENVGLK

SEQ ID NO: 94373 - protein, 148 aa, Unknown
  Bacterial polypetide isolated from the Sargasso Sea
KDKNLYHSLSAYGVGFHRHNSEIDQMLRKFTKKKFQFSFTPHLSPMFRGILSTIYVDLENNISQTKVLKTLISFYKNESFVKILKSGTLLSTNDVINTNNCYISVCKSKYSNKIIILSAIDNLIKGGAGQAVQNLNNKFNFPEKTGLK

SEQ ID NO: 94374 - protein, 268 aa, Unknown
  Bacterial polypetide isolated from the Sargasso Sea
STGYVGMELVKLLSNHPFINIVFLGSDSLSNEYLKDIENKKTYVNLPILKNNKSFDASTSDYVFLALPHAVSNIFVKKYYNKCKIIDLSADFRLDSLNTYKDNYGDNHTCGEYLNNFIYGLPEINRSNISKAKNISVPGCYPTSILLPLIPLFEKQLIFTEEIIVDSKSGYSGAGKNFDNKNIKSKNNLNFYNYNTNTHRHIAEIKQELLKKTSNQKISFSFNPHILPNFRGMMSTIYCDLNNNIKKNDIIYIYKNFEKNNYFIKYIE

SEQ ID NO: 94375 - protein, 80 aa, Unknown
  Bacterial polypetide isolated from the Sargasso Sea
IDCFKSSPFIRVQNNTKLSNVIGSNYCDISLSFKDNRHFVVEACLDNLVKGASGNAVECMNIIFDFDQTLGLKQMIPLYL

SEQ ID NO: 94376 - protein, 112 aa, Unknown
  Bacterial polypetide isolated from the Sargasso Sea
FTFTPHLSPMFRGILSTIYVDLKSNININHINTKLRNFYNKDNFIKILPINSLISTNDVINTNFCHVSVCKSKHKNKLIILSAIDNLIKGGAGQAVQNLNYYFNYNIKKGLL

SEQ ID NO: 94377 - protein, 149 aa, Unknown
  Bacterial polypetide isolated from the Sargasso Sea
FKHKNLYDSTHAYSTKYHRHIAEIDQEFRKYSKKNINFSFNPYILPTFRGILTSIYAELNEGSSSKKLRNELIKYYKKDKFIKILKLNSELGSGNVINTNNCEISICNTRIKNKIVIFSAIDNLIKGASGQAIQNMNLIFKFPENLGLK

SEQ ID NO: 94378 - protein, 230 aa, Unknown
  Bacterial polypetide isolated from the Sargasso Sea
MSADFRLKKAKNYKNWYKQNHKSKKNIANSIYALPEISRDRIKKFKIIACPGCYPTSVLLPLIPLLKEKIVNEKNIIIDSKSGYSGAGRGVHIKYKNKNLYESLSAYGVSNHRHNPEIEQELNKYTKLGVQFSFTPHLSPMFRGIISTIYLDLKKKSNVSKISKHLTKFYKKDNFIKILKPNTFLSTNDVINTNYCYISVCKSKYKNKIIVLSAIDNLIKGGTGQAIQNL

SEQ ID NO: 94379 - protein, 208 aa, Unknown
  Bacterial polypetide isolated from the Sargasso Sea
EINRNEIKKYNIISCPGCYPTSILLPLVPLFKKNLIKFNNIIIDSKSGYSGAGRGVHKKYKDKNLYESLSAYGVGFHRHNSEINQMLRKFTKKKFQFSFTPHLSPMFRGILSTIYVDLEKNVSQSKILKILNSFYKNENFIKILKTNTLISTNDVINTNNCYISVCESKYSNKIIILSAIDNLIKGGAGQALQNLNNKFNFPEKTGLK

SEQ ID NO: 94380 - protein, 123 aa, Unknown
  Bacterial polypetide isolated from the Sargasso Sea
VNKKLKIIDLSADFRLSDSSVYKKFYGREHAAKKLINNSIYALSEFTKNKLKKFKIIACPGCYPTSIQLPLIPLLKKNLINKKNIIIDSKSEYSGAGKNLKKKFKHKNIFSSIHAYGTFKHRH

SEQ ID NO: 94381 - protein, 155 aa, Unknown
  Bacterial polypetide isolated from the Sargasso Sea
YSLPEISKHEVKKFNIIACPGCYPTSILLPLIPLVQKKLINLKNIIIDSKSGYSGAGRGVHKKYKYQNLYESISAYGVGFHRHNSEIEQTLKKYSKKKIVFNFTPHLTPMFRGILSTIYIEVKNNVSQNKIKKVLTDYYKNDIFIKILKNNSFIS

SEQ ID NO: 94382 - protein, 210 aa, Unknown
  Bacterial polypetide isolated from the Sargasso Sea
MSYNKIKVAVAGATGYVGLDLVKILSSHPKVDILYLCAQKKLGKKIQFFDKRIKKKLPKLTNLQSVEWKKLDVLFTSLPTGQSQVLVNKLIKFKNLKVIDLAADFRINDKSVYKEYYGKDYRSNDILKSSIYSLSEFVKDKIKKFNIISCPGCYPTSIQIPLLPLIKKKLINKDNIIIDSKSGFSGAGKNIKKKFSHKNIFSSIHAYSIY

SEQ ID NO: 94383 - protein, 169 aa, Unknown
  Bacterial polypetide isolated from the Sargasso Sea
NSGHIIIDSKSGISGAGKKSVEENLVNELKNNFYSYSVTSHKHFPEIDQEIKKVSKKISFTFIPNLLPVFCGLQSNIYIDHKDVELNQIRDVIDGYYDGEFFIKIKKEIPVKLSEVQGTNNVLINIFEDYEKKKILIISSIDNLIKGASGQAIQNMNLMFGFKENESLI

SEQ ID NO: 94384 - protein, 204 aa, Unknown
  Bacterial polypetide isolated from the Sargasso Sea
MRADLKVAIIGPSGYTGHEIIRILLKHPNVKIKILIGNKSEGKHISEIFSSLSQIALPKIKSLKAVNFSNIDIVFSCMPSGNLDSIIQLIPKDVVVIDLSADFRIKDVKLFEKYYSKHQSPKYLKKFTYGLTEFNRNKIKRSRYIACPGCYPTSILIPILPLIKKNIISNNDIIVDSKSGLSGAGRNTKQDLLFSENYNSFKAY

SEQ ID NO: 94385 - protein, 208 aa, Unknown
  Bacterial polypetide isolated from the Sargasso Sea
MVNKLNIAIAGATGFVGLELIKKIYYHPSVEIKYLFVKDSIDENIYENLPKEINKLPELKKFDVSLINKCDVFFSSLPHSELHKVINDISEKVIIIDLSADFRLPNSKTYQKWYNTEHKSPNLLNKAVYGLSEIYRDQIKSSDLIACPGCYPTSILLPLIPLLKTKDIELENIIADSKSGYSGAGKKIYSSDQYPNLNQNIAIYGVGN

SEQ ID NO: 94386 - protein, 198 aa, Unknown
  Bacterial polypetide isolated from the Sargasso Sea
MSKLNVLIAGSTGYIGVQLIKLLIKHKHVNIKYLCGSSSIGKKISYYEKSLRSKNLPKIIKFNKKLLNNIDVIFTALPNGETQKISKSLLKKNTLIDLSADFRLRKAKDFKKWYKIKHKAKNLIKKSIYSLPEITGTKIKKYSIISCPGCYPTTILLPLIPLIKKNLINNKNIIIDSKSGYSGAGRSVHKKYKNKNLY

SEQ ID NO: 94387 - protein, 112 aa, Unknown
  Bacterial polypetide isolated from the Sargasso Sea
YTFNPHLIPSFRGILSSIYINKKKNVPLNRIVKALKSFYKNNYFINVYKPNTQMGTGNVLNTNFCDISVCQTRLKNKIVIFSAIDNLIKGAAGQAIQNMNLLYNLKENSGLK

SEQ ID NO: 94388 - protein, 162 aa, Unknown
  Bacterial polypetide isolated from the Sargasso Sea
MPNGEAQAISKNLNDKNVLIDLAADFRLEKASDYKKWYNKKHKALANIKKSIYSLPEITGKKLKNFKIISCPGCYPTSILIPLLPLLKSKLIKKNNIIIDSKSGYSGAGRGVHKKYKDKNLYESLSAYGIGSHRHNPEIDQMIKKFTKVKSNFDFTPHLSPM

SEQ ID NO: 94389 - protein, 168 aa, Unknown
  Bacterial polypetide isolated from the Sargasso Sea
MKKNVFIDGEIGTTGLQVHEKLIKHPNVKILSVNQDKRKDPDYKKEMFKASDVSFLCLPDDGAIESVETANQLGNKSPIIIDASTAHRINPNWAYGLPELGLEFRKKLLNSKRIAVPGCYSTGANVILKPLLQNNFLSNKNPIVIYAVSGYSGGGKAMINYFKGEDHE

SEQ ID NO: 94390 - protein, 97 aa, Unknown
  Bacterial polypetide isolated from the Sargasso Sea
QITPPRPNIWEVLDQVYASERYVNVHSIENALAYSDPAFDPRSTNGTNRVDISVIPNAIGHALIIIQIDNLGKGASGAAVQNMNLMLGLPENAGLTS

SEQ ID NO: 94391 - protein, 187 aa, Unknown
  Bacterial polypetide isolated from the Sargasso Sea
MSVKKLNIVIAGATGFVGLDLIKFLSNHPKVKIKYLCAQKKIGKKIQYFDKRITKNLPKISKITSVDWAMIDILFTALPNGESQIISKTLVNKKLKIIDLSADFRLSDSSVYKKFYGKEHTAKKLINNSIYALSEFTKNKLKKFKIIACPGCYPTSIQLPLIPLLKRNLINKKNIIIDSKSGYSGAG

SEQ ID NO: 94392 - protein, 219 aa, Unknown
  Bacterial polypetide isolated from the Sargasso Sea
KNINKSIYALPELSKSDVKKYKIISCPGCYPTSILIPLIPLIKKKLININNIVIDSKSGYSGAGRGVHKKYKDKNLYESLSAYGVGFHRHNSEIAQELNKITNKHVNFLFTPHLSPMFKGILSTIYVDLTTKSNLSKIHNELIKFYKNDYFVKIFKPNTFLTTNDVINTNFCNISICKSKYKNKVIILSTIDNLIKGGAGQAVQNLNHYYNFNIKMGLK

SEQ ID NO: 94393 - protein, 179 aa, Unknown
  Bacterial polypetide isolated from the Sargasso Sea
MSKINVLIAGSTGYIGIQLVKILNNHKKINIKYLCGSSSVGKKISFFDKTLSKHRLPKIIKFNKRLLPKVDVIFTALPNGQSQKISKYLLKHNTLIDLSADFRLKKTKDFFKWYKIKHKAKKMIKNSIYALPEIKKNLIKNKKIISCPGCYPTSILLPLIPLLKKKLISNNNIIIDSKS

SEQ ID NO: 94394 - protein, 194 aa, Unknown
  Bacterial polypetide isolated from the Sargasso Sea
CPGCTPTSILLPLIPLIKTKLVKTSNIIIDSKSGYSGAGRGVHKKYINKNLYESLSAYGIGFHRHNPEIKQYFTKYSKKKVSFIFTPHLSPMFRGILSTIYVDCEKNVTQNKIISKLKSFYKKDHFVKILKKDQSISTNDVINTNNCVISVCKSSVHNKLIILSSIDNLIKGGAGQAIQNLNIKFNFPKKMALI

SEQ ID NO: 94395 - protein, 153 aa, Unknown
  Bacterial polypetide isolated from the Sargasso Sea
VHKKYKDKNLYESLSAYGVSFHRHNSEIDQMFKKFTKKKFQFSFTPHLSPMFRGILSTIYLDLESNISQTKVLKTLTNFYKKEKFVKILKSDALLSTNDVINTNNCHISVCKSKYSNKIIILSAIDNLIKGGAGQAVQNLNNKFNFSENTGLK

SEQ ID NO: 94396 - protein, 127 aa, Unknown
  Bacterial polypetide isolated from the Sargasso Sea
MTYSTSTNATPQKVFIDGQSGTTGLQIDRLLACHEQIEILRIPDSDRKDPEAKQAFLDDADIVVLCLPDDAARETASQCRDTTRILDASTAHRVDPAWTYGLPELTQDRRQKIADANRVSNPGCWPT

SEQ ID NO: 94397 - protein, 307 aa, Unknown
  Bacterial polypetide isolated from the Sargasso Sea
VSGPWDEISFEVQRGEVLGFLGPNGAGKSTTMKMLTCYLPPTSGNAEVNGFSIKSQRLKVQEQIGYLPESAPSYNEMQVEEFLSFIGEVRGYTGAELRRRVGRVLELTSLQEARKQIIDTLSKGFRQRTCLAQALIHDPPVLILDEPTDGLDPNQKHEVRELIRRMSEERTILVSTHILEEVEAVCTRALIISEGRLVGLGTPDELLSQSIYRNAITLSVSGVNAETLLEDLNGLEQVYSVERLEDMPNGAITVRVFPKDRESISSELEKFLKKKKMSIEQFFVERGRLDEVFRKLTLGELSWGWNE

SEQ ID NO: 94398 - protein, 248 aa, Unknown
  Bacterial polypetide isolated from the Sargasso Sea
LSKHSKANILYLCANKSAGKSIYSFDKKINKKKLPKITKIKNVDWKKINILFTSLPNGEAQKIANFLPQHIKLIDLSADFRLDNHKDYKKLYGINHNCKKLIIKSIYAITEFSRNSLDKYKVISCTGCYPTSVQIPLIPLIKKKVINTNNIIIDCKSGYSGAGKNIKKKFNFKNLFNSVSAYGVGSHRHMAEIDQELSKISKRKIQVFFTPHLIPMFRGILSTIYLETKENYNAFKIFKLIKKYHKNN

SEQ ID NO: 94399 - protein, 53 aa, Unknown
  Bacterial polypetide isolated from the Sargasso Sea
KTQINCEISICKTKIKNKIIIFSAIDNPVKGASGQAIQNMNLIFKFPEKTGLK

SEQ ID NO: 94400 - protein, 60 aa, Unknown
  Bacterial polypetide isolated from the Sargasso Sea
LSTNNVINTNNCHISVCKSKYKDKVIILSVIDNLIKGGGGQAVQNMNICFGFKENEGLNV

SEQ ID NO: 94401 - protein, 265 aa, Unknown
  Bacterial polypetide isolated from the Sargasso Sea
CDLVFTAVPHGTATDIVKALYDRGMKIIDLSADYRLHNPEDYGKWYGWEHPHPDYLAKSTFGVPELHREEIKKSQLVSCPGCMAVTSMLALNPLIKNDLIDTDHIIVDSKIGSSGAGAGAGTSHAMRAGVIRPYKPAKHRHTGEIEQELSQTAGKKIKVAMSPHAVDVVRGILCTNHTFLKKDIDEKDLWKIYRSEYSEERFIRLIRDKEGLHKFPDPKFLVGSNFCDIGFDLDRENNRLIALSASDNLMKGAAGSAIQNMNVMS

SEQ ID NO: 94402 - protein, 129 aa, Unknown
  Bacterial polypetide isolated from the Sargasso Sea
MPKIVKFNKKYLNDVDVVFTSLPNGEAQIISKNLLKKNLLIDLSADFRLESSKIYKKYYKIPHGAKKQIKDSIYSIPELSKKKVKNYKIISCPGCYPTSILIPLIPLIKNNLISSNIVADSKSGYSGAG

SEQ ID NO: 94403 - protein, 122 aa, Unknown
  Bacterial polypetide isolated from the Sargasso Sea
MNSTLTKVGILGGSGFTGEELLRILSSHPKTKVMAVSSRELLGQSTNEIVEGSNLVFVEPEDDIFYDCDVVFFATPHGVSMNMVSTFINKNIKVIDLSADFRLKNVKIWEEWYNSPHTQEEL

SEQ ID NO: 94404 - protein, 219 aa, Unknown
  Bacterial polypetide isolated from the Sargasso Sea
MSKINALVAGATGYIGIQLVKLLTKHKRVKIKYLCGDTSVGKKISSYDKYFNKYKLPNIVKFNKELLKNVDVIFTALPNGEAQKISKNLNNKNILIDLAADFRLKSANDYLKWYKIKHNAPKLIKKSIYSLPELNNQNIKKYKIISCPGCYPTSILLPLVPLINKNIVKSNNIIIDSKSGYSGAGRNIHKKYNNKFLNETLSAYGLAFHRHNSEIDQEL

SEQ ID NO: 94405 - protein, 226 aa, Unknown
  Bacterial polypetide isolated from the Sargasso Sea
MKQKLNAGIIGSTGYTGREICRLLLNHNSINKIIPFAREDNTFESVHPNLLGSELEFVNINKLENIVDDLDVVFFCAPSGTAMNMIPKIYNNDIKLIDLSADFRFKDTNLYFNTYGMKHKCPKILEDAVYGLTELNRNQIKDAKLIANPGCYVITIILGLYPLIKENIINLDKFIHVNAVNGTTGAGIKPKKELLFSELDSNVLPYNLEGHRHGPELESHLTYYSS

SEQ ID NO: 94406 - protein, 182 aa, Unknown
  Bacterial polypetide isolated from the Sargasso Sea
YPLINENLIRLKDIIIDSKSGYSGAGRGVHKKYKNKNLYSSLSAYGIADHRHNSEIQQELNKVCNKKIEFTFTPHLSPMFRGILSTIYLNLNKNVSIYKITNVIKKYYSLHKFIKIAKPNTFISTNEVINTNYCKISVNSSKSKKKIIILSAIDNLIKGGAGQAVQNLNIICGFKKDMGLNV

SEQ ID NO: 94407 - protein, 228 aa, Unknown
  Bacterial polypetide isolated from the Sargasso Sea
MKDSLKIAVAGATGYVGLELIKILSNHPKVKIVYLCAQKSIGKSINMFDKQIKKKNLPKISNVNKIDWKNINIIFTALPNGEAQKIAKKIPSKVKLIDLSADFRLNNSKLYKKWYGINHNCKYLIKKSVYAITEFSRKNIENYKIISCPGCYPTSVQIPLVPLVKKGMININNIIIDSKSGYSGAGKGIKKKFSFKNLFNSVSAYGVGSHRHMAEIDQELSIASKKKV

SEQ ID NO: 94408 - protein, 241 aa, Unknown
  Bacterial polypetide isolated from the Sargasso Sea
ATYRQEAAAQQRQDDALCQQSVYGLVEWAGDALAEAQLVGAPGCFPTASLLALMPLLQQGLIEGDGIVIDAKTGTSGGGRAAKEHLLLAEAAESVSPYGVVGHRHTAEIELLASRAAGRPIQLQFTPHLMPMVRGLLATVYGRLRDPGLTAEDLTTVYQVTYRDHPCVEVLPVGTYPATKWVRQTNRAVLSVAVDQRTRQVVVMSAIDNLLKGQAGQAVQCLNVMAGLAQQSGLPLLPFYP

SEQ ID NO: 94409 - protein, 185 aa, Unknown
  Bacterial polypetide isolated from the Sargasso Sea
MPKLNVLIAGSTGYIGVQLTKLLAKHKNVNIKYLCGNSSVGKKISSYDDSLKSKKLPRITKYNKKYLSYVDIIFTALPNGEAQTISKDLLKKNTLIDLAADFRLKKGSDYLKWYKQKHKALSNIKKSIYALPEIIGKSVKKFSIIGCPGCYPTSILLPLIPLVKKKSINLNNIIIDSKSGYSGAG

SEQ ID NO: 94410 - protein, 340 aa, Unknown
  Bacterial polypetide isolated from the Sargasso Sea
MRKLNVLIAGSTGYIGLELLKILIRHENLNIKYLCANSSAGKKLSKFENYFKNKKLPKLIKFNKKLLKDVDVIFTALPVGEAQKISKYLLKRNTLIDLAGDFRISNSKKFTEWYKKKHKAKNLIKNSIYALPEITKNKVKNFQILSCPGCYPTSVLLPLIPLVKNDMIFLDNIVIDSKSGYSGAGRSVHKSYKNKNLYSSIKAYGISTHKHNAEIDEQLNKYTKKKIKVFFTPHISPMYRGIISTIYLKLKNNLSSKKVINKLKKFYKTEKFVKIEKFNKLLSTNDVVNTNYCKISLCKSRYKNHYIILSVIDNLIKGGSGQAVQNLNLKYNFPKYKGLI

SEQ ID NO: 94411 - protein, 341 aa, Unknown
  Bacterial polypetide isolated from the Sargasso Sea
MSKLNVLVCGSTGYIGIELVKILARHKKIHIKYLCGNSSVGKKISFYDKSLSKNKLPIIRKFQRKLLKEVDVIFSALPNGEAQKMSKFLLDKNLLIDLSADFRLKNKNEYLKWYKIKHSAQKLIKNSIYSLPELKKNQFKNQKVISSPGCYPTSILLPLAPLIQKNFISNKNIVIDSKSGYSGAGRNVHKKYKNKNLYESISAYGIANHRHNSEIQQELDLYTKKKNYFDFTPHLSPMFRGIITTINVDLKKNVDAKKIHRFLSKFYKKSKFIKIKKINSLLSTNEVINTNNCLISICNSKNKNKLIILSAIDNLIKGGGGQAVQSMNIYYGFKEDEALNV

SEQ ID NO: 94412 - protein, 315 aa, Unknown
  Bacterial polypetide isolated from the Sargasso Sea
MSTKVFVDGQEGTTGLKIFEYLSQRADVEILRIEEAKRKDLEERRRLINASDVTFLCLPDVASRESASLVENDRTVLIDASTAFRTSADWAYGLPELARSQRERLRTAKRIAVPGCHASAFVLAMRPLVETGVVAPDFAAHAYSITGYSGGGKKMIADYEAGGNDKLKSPRPYALGLTHKHLPEMAAHTGLNSAPVFTPIVGDFYKGLAVTTFFSPNQMAKKTTPQDVRALFAEYYAGEAFVHVAPFDSEANLDGGFFDVQANNDTNRVDLFVFGNEERFVTVARLDNLGKGASGAAIQCMNLAIGAAEEAGLKR

SEQ ID NO: 94413 - protein, 340 aa, Unknown
  Bacterial polypetide isolated from the Sargasso Sea
MRKLNVLIAGSTGYIGIQLVKLLVNHKNIKIKYLCGSSSVGKNIEYFDISLKNKKLPKIVKFNKKYLKYVDIIFTALPNGQAQSLSNLLNKNNILIDLSADFRLTKAKEYFKWYGIKHNSVGNINKSIYALPEISKKTIKNYKIISCPGCYPTSILLPLIPILKRKLIDNKNIIIDSKSGYSGAGRGVHKKYKNKNLYESLSAYGVGFHRHNSEIEQELNKHSKGNVTFNFTPHLSPMFKGILSTIYVNIDSKNSVSKIRNYLSSYYKNDKFIKILKVDSLISTNDVINTNNCYISVCKTQYKNKIIILSAIDNLIKGGAGQGVQNMNILYNFKYSEGLK

SEQ ID NO: 94414 - protein, 701 aa, Unknown
  Bacterial polypetide isolated from the Sargasso Sea
MYRFIKRSGALSSAAVFFATPALAQTSKPSDDAEPKLLAPVVVQGQAGHSLTSSTPAQQKRKLDETAGSVGFVDSESYTNTYAFTLRDVLKDVPGVFVQNRYGQELRLSIRGSGIARSYHTRGLEILQDGIPTNQADGSGDYYQIDPLALQATEVYKGGNGLAYGSSTLGGAIDFLTPTAHTAVAPNILRLEGGSFGTVRSSAQFSRVVGPLDFIGTFTVDHNDGFRQHSRGQYEQFNANIGYRFSPNVETRFYLGAYIVDQQLPGTLSLSDALNNPTKAAASALSGDQARNTRTERIANRTTVKLDVGQLDIDTWAIHKSLYHPIFQVIDQDGWTYGVAPRYTATLNLGGMRNDVIAGARFFGGNTQARQYVNVAGNRGTQTLDASQNAYNYEAYVENRLFFLPTVALMTGVKALRDVREYVDHGGLAADPTYKSASQTYNGINPKLGLLWQPNREIQAFVDITRSQDTPDFTDLAQSFASTTRFTPLQSQHAWTLEVGTRGTRGAVSWDLTAYQSMVRDQLLQYTTNPDIPAATFNANKTVLRGIEAGASVDVWRDVFKPGSGDRITLSGLWNLSDFRFRDDPQYGSNRIAGVPVNVLRAALSYARPDGFHVSATVDWVPAGAWADDANTLRVPGYTLLGLQAGMDFRNGVSVFVDARNLTNKRYVSDISTVANAATASGAIFYPGEGRSVFAGIRYAF

SEQ ID NO: 94415 - protein, 141 aa, Unknown
  Bacterial polypetide isolated from the Sargasso Sea
MKKIGIINITSYSGLELLRILRAHPEVEITQVTGRSMAGKKLSNVFSFYNGNLVIQDELKDSVDLIFSCLPHKASAEVIGKFVNNGINTIDLSADFRLPVELYESTYESKHPYPSLINKFIYGLPELNRNKISSSKFFKPR

SEQ ID NO: 94416 - protein, 148 aa, Unknown
  Bacterial polypetide isolated from the Sargasso Sea
YKDKNLYESLSAYGVGFHRHNSEIDQMLKKFTKKKFQFSFTPHLSPMFRGILSTIYLDLENKITPNTIYNELSKFYKNKKFVKVLKRDSLVSTNNVINTNNCYISICKSKYKNKAIILSAIDNLIKGGAGQAVQNLNIKFNFPEKTAL

SEQ ID NO: 94417 - protein, 89 aa, Unknown
  Bacterial polypetide isolated from the Sargasso Sea
NLRDYEDYFSSHPFVNVLNKAPVVKDVRGTNFCNLFIQKLKDKEGLNIYRIISVIDNLTKGASGQAIQNMNLMSNFEETLGLNNMALYP

SEQ ID NO: 94418 - protein, 214 aa, Unknown
  Bacterial polypetide isolated from the Sargasso Sea
MKDSLKIAIAGATGYTGIQLIKILLKHPKVKISYLCAQKSIGKSISLFDKSIKEKKLPKISNVSNIDWNSINILFTALPNGEAQKIARIIPKHILLIDLSADFRIEDHKVYKKWYGLEHKAKHLIKESIYAISEFTKHKIKNYRIISCPGCYPTSIQLPLIPLIKDRMINVKNIIVDSKSGYSGAGKKIEKKFKHKYLYESVSAYGVGSHRHMA

SEQ ID NO: 94419 - protein, 108 aa, Unknown
  Bacterial polypetide isolated from the Sargasso Sea
MNVAILGATGYGGIQAVNLLKKNKNYKITFLGGNKTSGSKWNDNFPFIYLDNDPYIEEISVDNISKNADVALLCLPNGLSSTLTRKLLDRGVKVIDLSADYRYKSLDE

SEQ ID NO: 94420 - protein, 161 aa, Unknown
  Bacterial polypetide isolated from the Sargasso Sea
MPKLNALVAGSTGYIGTQLIKILVKHKYINIKYLCGNSSVGKSISFYEKSLSKFKLPKIRKFNKNLLDDADIIFTALPNGEAQDLSKYLNKKNILIDLAADFRLEKASEYKKWYKQKHRAIKLIKKSIYSLPEINRKEIKNYNIISSPGCYPTSILLPLIP

SEQ ID NO: 94421 - protein, 151 aa, Unknown
  Bacterial polypetide isolated from the Sargasso Sea
KKYKDKNLYQSLSAYGVGFHRHSSEINQELKKYTKSKINFMFTPHLSPMFRGILSTIYLEIKKGQSVNKVHRILKKFHRKNRFVKILNMNSMISTNDVINSNNCFISICKTKYSNKIIILSCIDNLIKGGAGQAIQNMNIKFDFKYDEGLR

SEQ ID NO: 94422 - protein, 155 aa, Unknown
  Bacterial polypetide isolated from the Sargasso Sea
MDKKNVLICGATGYIGLQLTKLLCKHKKVNIKYLCGSTSVGKKIDSYEEDLKRYKLPKISKFKKEYLLDVDIIFTALPNGEAQSISKFLNKNNLLIDLAADFRLNNKKDYEKWYKIKHKALNQIKKSIYSIPEISGKLIQKFPIVSCPGCYPTSV

SEQ ID NO: 94423 - protein, 77 aa, Unknown
  Bacterial polypetide isolated from the Sargasso Sea
KKTFVNKKFVHIKKPNTFISTNDVINSNFCYISVCKTRFKNKFIILSAIDNLIKGGSGQAVQNMNIRFNLPQSTGLV

SEQ ID NO: 94424 - protein, 169 aa, Unknown
  Bacterial polypetide isolated from the Sargasso Sea
MHRHLGEFDQELSKIAGRAVNIQFTPHLIPANRGILATAYVLGNYQAVRKALSQRYENEHFIHILPNGETPSTHHVRGSNECHIGIVSDRIENRCIIVAALDNLTKGSSGQAVQNANLMLGIDEDCWSQFSASFSVVHEKFKKTTSNTSNFYYFYFSSFSDGTYRLCNA

SEQ ID NO: 94425 - protein, 273 aa, Unknown
  Bacterial polypetide isolated from the Sargasso Sea
MTSEIFIDGEAGTTGLVIRELLAERPDLSFISLDDSERKNETARKNALNSCKLAVLCLPDEAAREAITLIENPNLKVIDTSTAHRVSPEWVYGFPEMTNGQTELIKKATRVSNPGCYPTGAISLIRPLIENSVIPSSYPITINAVSGYSGGGKSLIERFETMTNEAPPIYFYGTTLSHKHLPEMQKYIGLENPPIFVPSVAKYKQGMIVQVPIHLSKNLGVVGSPQKIHDALSQHYDGSKFITVNPLDTAQGLVEISPEKHNHSNMLGNKCFF

SEQ ID NO: 94426 - protein, 159 aa, Unknown
  Bacterial polypetide isolated from the Sargasso Sea
SGAGRGVHKKYKDKNLYESLSAYGVGFHRHNSEIDQVLRKFTKKKFQFTFTPHLSPMFRGILSTIYVDLKNNISQTKVLKTLISFYKNESFVKILKSGTLLSTNDVINTNNCYISVCKSKYSNKIIILSAIDNLIKGGAGQAIQNLNNKFNFSETTGLK

SEQ ID NO: 94427 - protein, 316 aa, Unknown
  Bacterial polypetide isolated from the Sargasso Sea
MSTKVFVDGQEGTTGLKIFEYLSARSDIEILRIEEAKRKDVDERRRLINASDVTFLCLPDVASRESASLVENPNTTLIDASTAFRTSADWAYGLPELTRAQREKIRTSKRIAVPGCHASAFVLAMRPLVDAGIVAPTFAAHSYSITGYSGGGKSMIAEYENAAPGGKLASPRPYALGLAHKHLPEMAAHTGLANPPIFTPIVGPFLKGLAVTTYFTPEQLAKRATPQDVQRVFAEYYADEAFVRVAPFDADANLDGGFFDVQANNDTNRVDLFVFGNAERFVTVARLDNLGKGASGAAIQCMNLNIGAAEDAGLKR

SEQ ID NO: 94428 - protein, 112 aa, Unknown
  Bacterial polypetide isolated from the Sargasso Sea
FTFTPHLSPMFRGILSTIYLDLKKNISINYVNSKLERFYKNDAFVKILPINSFISTNDVINTNYCHLSVCKIKNKNRFIILSAIDNLIKGGAGQAVQNLNNYFGYNVKKGLV

SEQ ID NO: 94429 - protein, 63 aa, Unknown
  Bacterial polypetide isolated from the Sargasso Sea
INSFLSTNDVMNTNYCFISVCKTKFKDKIIILSVIDNLIKGGAGQAVQNMNLKFGFKNNEGLL

SEQ ID NO: 94430 - protein, 126 aa, Unknown
  Bacterial polypetide isolated from the Sargasso Sea
MNVAIVGATGYGGIQAVNLLKKNKKYKISFLGGNKTSGSKWNDNFPFIYLDNDPYIEDISVDNISKNSDVALLCLPNGISSTLTRKLLDRGVKVIDLSADYRYKSLEEWEKVYSKEAAIYKRSDDD

SEQ ID NO: 94431 - protein, 106 aa, Unknown
  Bacterial polypetide isolated from the Sargasso Sea
MNVAIVGATGYGGIQAVNLLKKIKKYKISFLGGNKTSGSKWNDNFPFIYLDNDPYIEEISIDNISKNADVALLCLPNGLSSTLTRKLLDRGLKVIDLSADYRYKSL

SEQ ID NO: 94432 - protein, 120 aa, Unknown
  Bacterial polypetide isolated from the Sargasso Sea
MPSVGSFAQGMVVSVPLHYDQLNEVGRSAERLQACLSERYADGTYVSVRDLNRMDDLERGAFMRPDSLANTNKLELSVYANDVKRTAVLVARLDNLGKGASGAAVQNMNLALGLEETSGL

SEQ ID NO: 94433 - protein, 89 aa, Unknown
  Bacterial polypetide isolated from the Sargasso Sea
GININKIINVLNVQYKNHKFIKICKINTFLSTNDVINTNNCFISLCKSKYKDKIIILSAIDNLIKGGGGQAVQNMNNYYDFNQSEGLNV

SEQ ID NO: 94434 - protein, 169 aa, Unknown
  Bacterial polypetide isolated from the Sargasso Sea
KNIIIDSKSGYSGAGRGVHKKYKNKNLYETLSVYGIKTHRHNSEIQQELDIETGKKVEFTFTPHLSPMFRGILTTIYCNLTKKNNINSILNYLKKFYKKEMFVKISKKNSLISTNDVINTNNCLISVCESKSKKQLIILSAIDNLIKGGGGQAVQNMNLIFNFKKNMGL

SEQ ID NO: 94435 - protein, 84 aa, Unknown
  Bacterial polypetide isolated from the Sargasso Sea
KIYSFLKKYYKNNKFIKILKPNTFLGTNEVINTNNCHISVCESKYKNKIIILSAIDNLIKGGSGQAVQNMNILFGYKSDEGLNL

SEQ ID NO: 94436 - protein, 263 aa, Unknown
  Bacterial polypetide isolated from the Sargasso Sea
MSKINALVAGATGYIGIQLVKLLTKHKRVKIKYLCGDTSVGKKISSYDKYFNKYKLPNIVKFNKELLKSVDVVFTALPNGEAQKISKNLNNKNILIDLAADFRLKSTSDYFKWYKIKHNAPKLIKKSIYSLPELNNKSIKKYKIISCPGCYPTSILLPLVPLINKNIVKSNNIIIDSKSGYSGAGRNIHKKYNNKFLNETLSAYGLAFHRHNSEIDQELKIKTGKKVKFQFTPHLSPMFRGILTTMYLDLKRNDSLKKIYSFL

SEQ ID NO: 94437 - protein, 294 aa, Unknown
  Bacterial polypetide isolated from the Sargasso Sea
IKLLVKHKYINIKYLCGNSSVGKHVKFYDKSLSKYKLPKILKFNKKLLKDVHVIFTALPNGEAQDISKHLSKNHTLIDLAADFRLEKASDYLKWYKQKHRATNLIKKSIYLLPEINRNEIKKYNIISCPGCYPTSILLPLFPLFKKNLIKFNNIIIDSKSGYSGAGRGVHKKYKDKNLYESLSAYGVGFHRHNSEIDQVLRKFTKKKFQFSFTPHLSPMFRGILSTIYVDLENNISRSKVLKTLISFYKNENFIKILKSGTLLSTNDVINTNNCYISVCKSKYSNKIIILSAID

SEQ ID NO: 94438 - protein, 253 aa, Unknown
  Bacterial polypetide isolated from the Sargasso Sea
KNLEFLKLPKLSLNNDFNFSNSDVVFLALPHGISHKYVKEYYNKIKIIDLSADFRLDSEEIYNDNYKTIHSCSKLLQEFAYGLPEINKKLIMHKNNIAVPGCYPTSILLPLIPLIKDKLIHTDNIIIDSKSGYSGAGKKFEISNIKNSNDLNFYNYKTNNHQHICEIKQELEKNNSNNNITLSFNPHIMPIFRGIMSTIYCDLNANITTNDIKDCYNNYYKDLPFVTIKKDEEKFDFFTVQNTNNCYIKLFPQ

SEQ ID NO: 94439 - protein, 206 aa, Unknown
  Bacterial polypetide isolated from the Sargasso Sea
MGNKVKDFKIISCPGCYPTSILLPLLPLLKNKLIKKDNIIIDSKSGYSGAGRGVHKKYKDKNLYESISAYGIGFHRHNPEINQMIRKFTKVDAIFDFTPHLSPMFRGILSTIYVDMNKSSSQLKIIKTLCSFYKNSNFVKVMSKDKLISTNDVINSNNCHISICKTKNKNRIIILSVIDNLIKGGAGQAIQNMNIKFGFPIKTGLK

SEQ ID NO: 94440 - protein, 222 aa, Unknown
  Bacterial polypetide isolated from the Sargasso Sea
VQEYLKNFIYGLAEINRDKILNSKNIAVPGCYPTSILLPLIPLIKNTLIDTKNIIIDSKSGYSGAGKKFDINKIKSKNHYNFYNYNTNNHRHIAEIKQELNKHNSDNEVKFSFNPHILPNFRGMISTIYCDLKDSVQKNDIINLFQDLQKINPFIKYIDNDEILDFFSIQNSNYCKIKIFDHYSEDKLIIVSAIDNLIKGAAGQAVQCFNISANIEETVSLV

SEQ ID NO: 94441 - protein, 292 aa, Unknown
  Bacterial polypetide isolated from the Sargasso Sea
FFDKKLKNKKLPKITKFKKEFLKKIDVIFTALPNGQAQKISNFLLSKNYLIDLSADFRLNKAKEYLKWYKINHSSKKNIKKSIYALPEIKKDKIKKYKIISCPGCYPTSILLPIIPLIKKNLINSKNIIIDSKSGYSGAGRSVHKKHKGKNLYESLSAYGIGFHRHNSEIEQELYINTGKKISFSFTPHLSPMFRGILSTIYVDLKKNSNLFLVNKSLIDFYKKDFFVKVVQPNKMISTNDVINTNYCNISVCKTKDKKKLIILCAIDNLIKGGSGQAVQNFNILFNYPIYK

SEQ ID NO: 94442 - protein, 308 aa, Unknown
  Bacterial polypetide isolated from the Sargasso Sea
MPFLGGRGYVGSEIIKILNNHEHFYLAKVFSSSAAGTLVEIYSKDKSLKYEQLNKNIDLSNIDFVILALPNNASEPYINLIDNKYKKITIIDISSDNRFNKNWFYSIPELSKMNSNVSTRISNPGCYASAMQFSILPIKSMVKGKIHSFGISGYSGAGASPNKRNNLKNLENNIIPYNINGHSHEKEVSFHCYQDISFTPNVASFFRGILMTSHFSLKEKVPIDDLIELYEEFYKDFPLVQITKDIPMIQDTINKHITKLGGFSLDASGKTLKVFCTLDNLLKGAATQVIQNLNISLGINNTTGITYE

SEQ ID NO: 94443 - protein, 187 aa, Unknown
  Bacterial polypetide isolated from the Sargasso Sea
MSLNVCIFGVSGYTGSKLLYYLDKHKQIKIHGVFGNSTAGIKLGDLFKNLNKSNKIKISKYEDFDFSKTDLIFSCLPNGKLQKEIIKNLNPKISIIDLSGDFRLKSKSEYQKFYNMTHRSYSLKEKFCYGLSEIYRSKINKSKFISNPGCYPTSILIPLIPLIKEKKLRIQDIIIDSKSGISGAGKQ

SEQ ID NO: 94444 - protein, 123 aa, Unknown
  Bacterial polypetide isolated from the Sargasso Sea
EIKKISKSKISYIFVPHLIPTFRGMLTSIYLDLKPGIKITKIFSELKKYHKNNFFVKIKPLNKNIGTENVINTNFCEISVCKLKEKRKILILSAIDNLVKGAAGQAIQNMNILKGFKENLGLK

SEQ ID NO: 94445 - protein, 215 aa, Unknown
  Bacterial polypetide isolated from the Sargasso Sea
NSIYSLPEITGKKVQDYKIISCPGCYPTSILLPLIPLLKNRLIKNHNIIIDSKSGYSGAGRGVHKKYKDKNLYESLSAYGVASHRHNSEIEEMIKKYVKGNIQFDFTPHLSPMFRGILSTIYVELNKTSSASKILNTLKKYYKKANFIKILNKDKLISTNDVINTNNCNISVCKSKNKNKIVILSAIDNLIKGGAGQAIQNMNMKFNFPKDAGFK

SEQ ID NO: 94446 - protein, 157 aa, Unknown
  Bacterial polypetide isolated from the Sargasso Sea
AGRNVHKKFKGKNLYESLSAYGIALHRHNPEISQELNLYSDKKIRFSFTPHLTPMFRGILSTIYVDLNKNVNQNKLINVLRQYYKGKTFIKIANKDNLLSTNDVIGTNKCIISVCKSKYKDKIILLSAIDNLIKGGSGQAVQNMNLRLGFKEREGIQ

SEQ ID NO: 94447 - protein, 246 aa, Unknown
  Bacterial polypetide isolated from the Sargasso Sea
MLIDLSADFRIKDPIIYKKFYKMTHKSKDNIKKSIYLLPELNKKKINKFKILSCPGCYPTSLLIPIIPLLKKKAIHKKKIIIDSKSGYSGAGRSVHKKFKNKNLYESVSSYGVGFHRHNSEINQEFIKISKNIDYNFTPHLIPMFRGILSSIYIDLPKNMSAKKIFLLLQKEYKNAKFIKFAKFNQPLSTNDVINTNNCLLSVCETKNKNRIILFSAIDNLIKGGAGQAVQNMNIYFGFKENLGLI

SEQ ID NO: 94448 - protein, 254 aa, Unknown
  Bacterial polypetide isolated from the Sargasso Sea
SIDYVFNCLPNENLHKRSDLLRSDISIIDLSVDFRLDDKNEYENWYGFKHCNFEVNDEFQYGLTEFNRDKIKKCKHIANPGCYATSILIPLIELIKQNAINTNDIVIDSKSGYSGAGKTKGRKELIKEVNENIRTYGIGDHKHIAEINQELSKIKNTQTEVFFAANILPVERGILSNIYIDTNKTSQNDIYDILQKRFNDEHFIQLLPMNEIPSSRDVVGTNNLVIGLKKGYKENKLCIVSVLDNLVKGAAGQA

SEQ ID NO: 94449 - protein, 176 aa, Unknown
  Bacterial polypetide isolated from the Sargasso Sea
MNVAIVGATGYGGIQAVNLLKKNKNYKISFLGGNKTIGSKWNDNFPFIYLDNDPYIEEISVENISNNANVALLCLPNGISSTLTRKLLDRGVKVIDLSADYRYKSLDEWKKVYSKEAVIYKRNDDDLCKEAVYGLPEINKEAISKGRLIACPGCYPTSALIPLAPYLSQGIMKMKE

SEQ ID NO: 94450 - protein, 267 aa, Unknown
  Bacterial polypetide isolated from the Sargasso Sea
GNTSSGKKLSFYDKTLKNKKLPKIIKFNKNLLKKVDVIFTALPDGQAQIISKKLLNNNILFDLSADFRLLKSTDYLKWYKFSHKAKKNIKKSIYALPEIKKSKIKNYKIISCPGCYPTSILLPIIPLIKKKLIETKNIVIDSKSGYSGGGRGIHKKYAKQNLYESLSAYGMGFHRHNSEIQQELNICSNKKINFIFTPHLSPMFRGILSTIYVDIKKNVSLKKIQRALKNFYKNEKFVNIKKINYQVSTNHVINSNYCNISVCKTKI

SEQ ID NO: 94451 - protein, 199 aa, Unknown
  Bacterial polypetide isolated from the Sargasso Sea
QIVSCPGCYPTSVLIPLIPLIKKNLIDNQTIIIDSKSGYSGAGRGVHKKYKDKNLYESLSAYGLANHRHNSEIQQELDLKTGKKNKFHFTPHLTPMFRGILSTIYVDLKKGININKIINVLNDQYKNQRFIKISKINTFLSTNDVINTNNCLISVCRSKYKDKIIILSAIDNLIKGGGGQAVQNMNNYYGFNQSEGLNV

SEQ ID NO: 94452 - protein, 252 aa, Unknown
  Bacterial polypetide isolated from the Sargasso Sea
HIKFYDKSLSKYKLPKILKFNKKLLKDVHIIFTALPNGEAQDISKHLSKNHTLIDLAADFRLEKASDYLKWYKQKHRATNLIKKSIYLLPEINRKEIKKYNIISCPGCYPTSILLPLFPLFKKNLIKLNNIIIDSKSGYSGAGRGVHKKNKDKNLYESLSAYGVGFHRHNSEINQMLRKFTKKKFQFSFTPHLSPMFRGILSTIYVDLENNISQTKVLKTLISFYKNESFVKILKSGTLLSTNDVINTNNCY

SEQ ID NO: 94453 - protein, 294 aa, Unknown
  Bacterial polypetide isolated from the Sargasso Sea
YTGEELARLLANHPNVKLKSLTSKTHEGKEINAIFKLNEKIPGKFKSPQVENLNDCDVVFFATPNGVAMNMANALIEQGIKVIDISADFRLTSAEQFTEWYEMKHSSPDLLHESVYGLPEMRGQREKIQHAQLVANPGCYPTSILLGVLPIIESLPEQTIIVDAKSGISGAGRNLNSKKLFNQGEENFQAYAVKNHRHYPETLNILQNYQSNLDLLFVPHLSSMYRGIFSTIYMHTKNIDIEEIRETFHNYYNGSEFVKIADDGEFPRISDVSNSKKCRIALNEVRNSYGKTNL

SEQ ID NO: 94454 - protein, 198 aa, Unknown
  Bacterial polypetide isolated from the Sargasso Sea
IISCPGCYPTSVLIPLIPLIKKNLINNKTIIIDSKSGYSGAGRGVHKKYKDKNLYESLSAYGLANHRHNSEIQQELDLKTGKKNKFHFTPHLTPMFRGILSTIYVDLKKGININKIIKALNVQYKNQKFIKISKINTFLSTNDVINTNNCLISVCKSKYKDKIIILSVIDNLIKGGGGQAVQNMNNYYDFNENEGLND

SEQ ID NO: 94455 - protein, 260 aa, Unknown
  Bacterial polypetide isolated from the Sargasso Sea
MVRIGIIGAAGLSGIELLHLLSRHSEVNVKLVTSTKYQGKNVSEIFPDLYRYSLSFNSNEAEVLDCDAVFLAVPNQASLKIVPKLLDQGVRVIDLSGAFRLADTKIFEKFYKLEHTYPELLKEAVFGLPEFFSQQIKRARIVANPGCYSTCALLGLLPLAELLGELDRPPIIDAKSGVSGAGGRTEDGSMNYVSINENFKAYKIFSHQHQPEIQQYLNDLSTYSSKKNGDVIFTPHLLPVNRGILSTNLYSFSEISRQGP

SEQ ID NO: 94456 - protein, 34 aa, Unknown
  Bacterial polypetide isolated from the Sargasso Sea
MSAIDNLMKGASGQAVQNMNIMFGLKESTGLVKI

SEQ ID NO: 94457 - protein, 262 aa, Unknown
  Bacterial polypetide isolated from the Sargasso Sea
MRKLNILIAGSTGYIGVQLIKLLIKHRYINIKYLCGSSSVGKNISLYDKDLKNAKLPKIVKFNKNLLNKVDVIFTALPNGESQKISNFLTKNNVLIDLSADFRLKSSYEYSKWYKIRHSSIKNINKSIYALPEIKGNLIKNKKIIACPGCYPTSILLPLIPLIKKGIVKHKNIIIDSKSGYSGAGRNIHKKFANKNLYESLSAYGISNHRHNSEIQQELNYETKKNVEFSFTPHLTPMFRGILSTIYLDLNKNINSNKISLI

SEQ ID NO: 94458 - protein, 208 aa, Unknown
  Bacterial polypetide isolated from the Sargasso Sea
MKNKIKVAVLGSTGYVGMELVNILSNHSYVDINFLGSETIHGSYLNNINSTKEYNDLPLLKPNNSFNAEDSEYVFLALPHAVSNKYVKKYFNKINIIDLSADFRLDNFDVYKKNYGNAHECKEYLNNFIYGLVEINREKILDSKNIAVPGCYPTSILIPLIPLIKNKLIDTKNIIIDSKSGYSGAGKKFDFNKMKSKNDYNFYNYNTN

SEQ ID NO: 94459 - protein, 159 aa, Unknown
  Bacterial polypetide isolated from the Sargasso Sea
MSLNRIKTLVAGATGFVGLDLVYLLSKHPNVKIKYLCAKKNIGKKINSFDKRIKKKLPKISNIRSAKLSEIDLIFLALPNGEAQRMINKIYTKYPNIKFIDLSADFRIQNPIKYKRWYNNNHKAHKLIKSSLYSISEFVKNKMKSYRIIANPGCYPTSI

SEQ ID NO: 94460 - protein, 300 aa, Unknown
  Bacterial polypetide isolated from the Sargasso Sea
QEKKINKFDKKIKKKLPKIVKFEKSLLKNVDVVFTALPNSEAQKISNFLLPKNVLIDLSADFRLDKAKDYLKWYKIQHKSKKNIKKSIYSLPELCKSKLKNFKIISCPGCYPTSILLPLIPLFKSRLVKTNSIIIDSKSGYSGAGRIIHTKYNQFELNETLGAYGVGYHRHNSEIEQELEKNTNSKVEFSFTPHLSPMFRGILSTIYLDMNKNASINKIYTYLKKFYKKDYFINIEPINTFLNTKKVINSNFCNISICKTKNKNKIIVLSAIDNLIKGGAGQAVQNLNLYYKYKLTKGLI

SEQ ID NO: 94461 - protein, 234 aa, Unknown
  Bacterial polypetide isolated from the Sargasso Sea
KIEKIDWNKIDVIFTALPNGEAHKIANLLPTRVKLIDLSADFRLRNPKVYKKWYGINHKSTKFIPKSIYSISEFAKRSLKKYNIISCPGCYPTSIQIPLIPLIEKKLIKVDNIIIDSKSGFSGAGKKIKQKFKFKHLFNSVRAYGVGSHRHMAEIDQELSKAAKKKVNVSFTPHLIPMFRGILSTIYIESKKNIKAKNIYNFLKKYHKNNFFVKMSKFNRPIGTGDVINSNYCQ

SEQ ID NO: 94462 - protein, 191 aa, Unknown
  Bacterial polypetide isolated from the Sargasso Sea
MSKIKINIVVIGATGYTGLDLVFLLSKHPKANIINLCATKNLGKKISFFDKRIKKKLPKLSSINNIDWNKVDLAFLSLPNGEAQKIIAKIFHKYQKIKFIDLSADFRIKDAKKYELNYNIKHKAKKLIKNSIYSISEFVKKDIKKYRIIANPGCYPTSIQIPLIPLIKKKLIKINNLTIDSKSGYSGAGKI

SEQ ID NO: 94463 - protein, 247 aa, Unknown
  Bacterial polypetide isolated from the Sargasso Sea
KNISYYDKSLSKKKLPKIVKFNPKLLNGIDVVFTALPNGEAQDIAKKLNDNITLIDLAADFRLKKANDYLKWYKQKHRAPKLQKKSIYCLPEINRSELKNYNIISCPGCYPTSILLPLVPLIKKKLVKLDNIIIDSKSGYSGAGRGVHKKYKDKNLYESLSAYGVGFHRHNSEIHQFLSNFTNKNFIFSFTPHLSPMFRGILSTIYLDLEKNVNQSKIIKTLVKSYKGENFVKILDSDKLSSTNDVI

SEQ ID NO: 94464 - protein, 198 aa, Unknown
  Bacterial polypetide isolated from the Sargasso Sea
CYPTSALIPLVPYLSQGIIENEGIVIDSKSGTSGGGREPNQKLLLSECGEGLSAYGLINHRHTSEIEQVASLISGNKIELLFTPHLVPISRGMHSTIYGRLRDPGLTSDDCRILLDNYYRNFKNIKVLPVDTFPSTKWVKNTNQIYLSVKVDIRNGRIVILSVIDNLLKGQTGQAIQNLNIMSGFSMDEGLDLTNNYP

SEQ ID NO: 94465 - protein, 237 aa, Unknown
  Bacterial polypetide isolated from the Sargasso Sea
MKSKKLPRITKYNKKYLTNVNIIFTALPNGEAQLISKDLLKKNTLIDLAADFRLKKASDYLKWYKRKHKASSNIKNSVYAIPEITGKLIKKYNIIGCPGCYPTSILLPLIPLVKKRSISLKNIIIDSKSGYSGAGRGVHKKYKNKNLHESISPYGLVFHRHNSEILQELKNYTSSKINFTFTPHIIPMFRGILSTIYLDLKPGTTLNKVQNILKKFHKKNKFVKIKSVNSFLSTMML

SEQ ID NO: 94466 - protein, 246 aa, Unknown
  Bacterial polypetide isolated from the Sargasso Sea
VGKKVSSYDNSRSVKNLPKIIKFSKKYLKDVDIVFTALPNGEAQVISKDLNNKNVLIDLAADFRLEKASDYKKWYNQKHKALANIKKSIYSLPEITGKKVKDFKIISCPGCYPTSILLPLLPLLKSKLIKKNNIIIDSKSGYSGAGRGVHKKYKDKNLYETLSAYGIGSHRHNPEIDQMIKRFTKVKSSFDFTPHLSPMFRGILSTIYVDLNKSSSQSKIIKNLSNFYKKSTFVKIMSKDRLISTN

SEQ ID NO: 94467 - protein, 40 aa, Unknown
  Bacterial polypetide isolated from the Sargasso Sea
KEKRKILIWSAIDNLVKGAAGQAIQNMNIINNFKENLGIK

SEQ ID NO: 94468 - protein, 232 aa, Unknown
  Bacterial polypetide isolated from the Sargasso Sea
MKNKIRAAVLGSTGYVGMELVKILSNHSYVDINFLGSETIHGSYLNNIDNTKEYNQLPLLRPNNSFNTEDSDYVFLALPHAVSNKYVKKYFNKINIIDLSADFRLDNFDVYKENYGSEHECKEYLKNFIYGLAEINRDKIENSKNIAVPGCYPTSILLPLIPLINNKLIDTKNIIIDSKSGYSGAGKKFDFNKMKSKNDYNFYNYNTNNHRHIAEIKKELNKHSSKNEVKFS

SEQ ID NO: 94469 - protein, 95 aa, Unknown
  Bacterial polypetide isolated from the Sargasso Sea
MKNIGIIGASGYTGAELLRLIAEHPEFNLQIATGETQAGTAIRDLYPSLSTAYPNAHFDSFTPEIVDGLDLVFCALPHGVSQNVIPDIYETVGHI

SEQ ID NO: 94470 - protein, 154 aa, Unknown
  Bacterial polypetide isolated from the Sargasso Sea
NLKKKFTHKNIFSSIKVYGISNHRHTAEIDQEFKKVSKSKIHYNFTPHLVPTFRGMLSTIYVEPKGNVTINKIHKELKNFHKKNIFVKILPINKNLGTENVINTNLCEISVCKLKGSKKIMILSAIDNLIKGASGQAVQNMNIIYNLNEKIGLK

SEQ ID NO: 94471 - protein, 109 aa, Unknown
  Bacterial polypetide isolated from the Sargasso Sea
MTPMFRGILSTIYVDIKNNVTKNKINKYLKDFYKSTKFVHIAKTDTLLSTNDVINTNNCIISVCESKYKNKLIILSVIDNLLKGGSGQAVQNMNLIYNFKENEGLNVKN

SEQ ID NO: 94472 - protein, 71 aa, Unknown
  Bacterial polypetide isolated from the Sargasso Sea
NPFIQIMPKGQFPDLRSTVHSNRCSIGWASDISGSQWMVQTSIDNLVKGASGQAIQNMNLMFGLTETCGLT

SEQ ID NO: 94473 - protein, 307 aa, Unknown
  Bacterial polypetide isolated from the Sargasso Sea
MLGSTGYIGVQLIKLLIKHKNVNIKYLCGNSSVGKKISSYDTSLKSKKLPKITKYNKKYLNNVDIIFTALPNGEAQEISKDLLKKNTLIDLAADFRLKKGSEYLKWYKQKHKALNNIKNSIYALPEITGEIVKKFSIIGCPGCYPTSILLPLIPLVKRKSVNLKSIIIDSKSGYSGAGRGIHKKFKNKNLYESLSAYGVGFHRHNSEIQQELKNYSSSKINFTFTPHIIPMFRGILSTIYLDLKPGITLNKVQNILKKFHKKNKFVKVKSVNSFLSTNDVMNTNYCFISVCKTKFKDKIIILSAIDQ

SEQ ID NO: 94474 - protein, 186 aa, Unknown
  Bacterial polypetide isolated from the Sargasso Sea
MSKVAIVGATGFTGIELLKILKVHSKIIKIDLFSFSNPGKKINDFCSDLKFDDTLNDFSSIIYKDYDLVFFACPNGTVMKAYSDFKDEEVKIIDLAADFRLDDEKIWREYYGEKHICPNLLSKTVYGLTELNREKIRDATIVANPGCYPTAAIISLFPLLKEKLIEEKNIIIDAKSGYSGAGRVNL

SEQ ID NO: 94475 - protein, 228 aa, Unknown
  Bacterial polypetide isolated from the Sargasso Sea
MNNKIRVAVLGSTGYVGMELVKILSNHLYVDINFLGSETIHDSYLNNIDNTKEYNQLPLLKPNDSFNVENSDYVFLALPHAVSNKYVKKYFKKINIIDLSADFRLDNFDIYKKNYGNEHECKEYLKSFIYGLAEINRDKILNSKNIAVPGCYPTSILLPLIPLIKNELIDTKNIIIDSKSGYSGAGKKFDFHKMQSNNDYNFYNLHTNNHRHIAEINKNFINIIQNMK

SEQ ID NO: 94476 - protein, 250 aa, Unknown
  Bacterial polypetide isolated from the Sargasso Sea
MPKFININDINYDNIDLVFSGLPHDNLHNLINTIPRNIKVIDMSSDFRFKNVDIYNQYYETEHNSKELLKDSVYGLTEIYRNNIKKARIVACPGCYPTAVLLSIIPLVKSNIIDLEDIIADAKSGVSGAGRGLKNELLFSEIAESMKPYNVSKHRHTPEIEEKIYLESNKQIKISFTPHLVPINRGELVTLYLKLSKNHKLNDAIACLNHFYKDDEFIIISDSGNPANTSNVRGSNNCLISVFEDRIQGR

SEQ ID NO: 94477 - protein, 272 aa, Unknown
  Bacterial polypetide isolated from the Sargasso Sea
ISFFDKRIKKKLPKLSSIKNINWSLLDLVFLSLPNGEAQKIIKKTYYKYKKLKYLDLSADFRIKNPNIFYKNYKIKHKAKELIKDSIYSISEFNKSKIQNYRIISNPGCYPTSIQIPLIPLLLKRLIKLNDIVIDAKSGYSGAGKNFEVKFKHKNLYTSAFAYAVKSHRHICEIDQEFEKICKSKIHYTFNPHLLPTFRGILTSIYLKPNKHTNISKIRNALLKFYKNSKFIKIHNLDTEIGSGNVLNTNNCEISVCKTKDKNKIVIFSAID

SEQ ID NO: 94478 - protein, 312 aa, Unknown
  Bacterial polypetide isolated from the Sargasso Sea
FNKFCYQNTQWVNITNLCAKKNLGKKIVYFDKRIKKKLPKITSIKDIDWKKIDLVFLSLPNGEAQKIIKKTYYKFDKLKYIDLSADFRIRNSKIYKKNYGLNHKAKDLIKNSIYSVAEFTKSKIKDFRIISNPGCYPTSIQIPLVPLIKKKVIKLDNIVIDSKSGYSGAGKNFEKKFTHKNLYKSTFAYGIKKHRHVCEIDQEFSKHTNKKVKFTFNPHLIPTFRGILSSIYINTNKNINSNKIRSALKKFYEKNRFVKILNINTQIGSGNVLNTNNCEISVCDTRIKGRIVIFSALDNLIKGASSQAVQNM

SEQ ID NO: 94479 - protein, 133 aa, Unknown
  Bacterial polypetide isolated from the Sargasso Sea
SHKHMAELDQELSKISKKRVEVFFTPHLIPMFRGILSTIYIDTHNNIDAKKIYKYLKNYHKKNYFVKFAKFNQPIGTGEVMNTNFCNISVCKSRIKNKVIILSTIDNLIKGASGQAVQNMNVAFKYKESLGLV

SEQ ID NO: 94480 - protein, 99 aa, Unknown
  Bacterial polypetide isolated from the Sargasso Sea
TIYFQSNEKIDLKEYVSYFSEHPFVNVLNESPKVKDVRGTNNCNLFIQELKKNNDLNSYRIISVIDNLTKGASGQAVQNMNLMFDFKEMLGLNNMPLYP

SEQ ID NO: 94481 - protein, 185 aa, Unknown
  Bacterial polypetide isolated from the Sargasso Sea
ILGLLPLVKNKLPIDSIIIDAKSGISGAGRTKVNENLKDDIHENFRAYATGGHRHLPEIIEVLEGIYGSSLKINFLPHLIPAMRGIYSTIYVNFEDAQNKSIEEIYRDFYQDSLNIELMLDGQVPEILKVAETNNCQIGIYQSAIENQIVIISAIDNLVKGAAGQAIECYNLITGNYQLKGINDG

SEQ ID NO: 94482 - protein, 174 aa, Unknown
  Bacterial polypetide isolated from the Sargasso Sea
MTKNSINIVVAGATGYVGLDLVYLLSKHPNIKIKHLCAQRNLGKQINFFDKRIKRKLPKITAINSVDWNEIDLLFLSLPNGEAQKLIKKLYEKYQNLKFIDLSADFRLENKSKYQTTYLKKHKAKSLINKSIYSVSELKGSNLKDFRIVANPGCYPTSIQIPLIPLFKKKLINL

SEQ ID NO: 94483 - protein, 85 aa, Unknown
  Bacterial polypetide isolated from the Sargasso Sea
ISEKQIINIYKNFYENEFFINIEESKIVELKDVVNTNNVSISCHANKKNKLIIVSAIDNLLKGAAGQAIQNMNLMLGVDEKTSLK

SEQ ID NO: 94484 - protein, 265 aa, Unknown
  Bacterial polypetide isolated from the Sargasso Sea
LLPNKQLYKIIKDLPSEISVIDLSIDFRLNNEQDYLNWYEFKHDNPDLIEDFKYGLTELNRSQIKAARHIANPGCYATSVLIPLTILVQEKAIRTDNIIIDAKSGYSGAGKTKDKHQLLKDVHENIKTYGVGDHKHIAEINQELTIHNNGKNIEVFFSANLIPVERGILSNIYISPVELSAEEIQRILYDKFKDEAFIKTLPLNEIPTTREVLGTNNLIIGVKKGYKNDTICIVSALDNLVKGAAGQAMQNFNLMNEIDEGIALI

SEQ ID NO: 94485 - protein, 94 aa, Unknown
  Bacterial polypetide isolated from the Sargasso Sea
YVEPKESVTINKIHKELKNFHKKNNFVKILPINKNLGTENVINTNLCEISVCKLKGSKKIMILSAIDNLIKGASGQAVQNMNIIYNLNEKIGLK

SEQ ID NO: 94486 - protein, 282 aa, Unknown
  Bacterial polypetide isolated from the Sargasso Sea
KFYDKSLSKYKLPKILKFNKKLLKDVHVIFTALPNGEAQDISKHLSKNHTLIDLAADFRLEKASDYLKWYKQKHRATNLIKNSIYLLPEINRKEIKKYNIISCPGCYPTSILLPLFPLFKKNLIKLNNIIIDSKSGYSGAGRGVHKKYKDKNLYQSLSAYGVGFHRHNSEIDQMLRKFTKRKFQFSFTPHLSPMFRGILSTIYLDLENNISQSKVLSTLAKFYKNEKFVKILKPDSFLSTNDVINTNNCYISVCKSKYSNKIIILSAIDNLIKGGAGQAIQN

SEQ ID NO: 94487 - protein, 136 aa, Unknown
  Bacterial polypetide isolated from the Sargasso Sea
MTKVFIDGQSGTTGLQIFDMLRSRSDLEIITIPETQRKIPEARKELLNSSDITILCLPDDAAIEAAKFRESETRIIDASTAHRIDDQWVYGLPELSEDHRQQIRDAELVSNPGCYPQGFILLVKPLIDAGILERQA

SEQ ID NO: 94488 - protein, 260 aa, Unknown
  Bacterial polypetide isolated from the Sargasso Sea
MGKKNVLICGATGYIGLQLTKLLCTHKKIDIKYLCGSTSVGKKIDFYEQELKKYKLPKISKFKKEYLSDVDIIFTALPNGEAQSISKFLNKNNLLIDLSADFRLNNKKNYEKWYKIKHKALNQIKKSIYSIPEISGKLIKKFPIVSCPGCYPTSVLIPLIPLIKKNLINNQTIIIDSKSGYSGAGRGVHKKYKDKNLYESISAYGLANHRHNSEIQQELDLKTGKKNKFHFTPHLTPMFRGILSTIYVDLKKGIKINKII

SEQ ID NO: 94489 - protein, 141 aa, Unknown
  Bacterial polypetide isolated from the Sargasso Sea
DIFNKYYQTSHKSPEILEVSVYGLSEIFRNDIKNARVVACPGSYPTAALLSIIPLIEGGIISLEEIIIDAKSGVSGAGRSNKEELMFSEVSESMKPYNIGKHRHTPEIEKGIESISGKEIKINFTPHLIPINRGELLTIYL

SEQ ID NO: 94490 - protein, 155 aa, Unknown
  Bacterial polypetide isolated from the Sargasso Sea
MKNKIRVAVLGSTGYVGMELVKILSNHSYVDINFLGSETIHGCYLNNIDNTKEYNQLPLLKPNVSFNPDDCDYVFLALPHAVSNKYVKKYFDKIKILDLSADFRLDNFDVYKKNYGNEHECKEHLKDFIYGLAEIYREKILGSKNIAVPGCYPTS

SEQ ID NO: 94491 - protein, 280 aa, Unknown
  Bacterial polypetide isolated from the Sargasso Sea
NIVVIGATGYTGLDLFFLLSKHPKANIINLCATKKLGKKINFFDKRIKKKLPKISSIKKINWKKINLVFLSLPNGEAQKIIKKIYYKYQNIKFIDLSADFRIKDEKKYKKYYKKKHKATKLIKNSIYAISEFVKNEIYKYRIVANPGCYPTSIQIPLIPLIKKNLINTKNITIDSKSGYSGAGKNLEKKFRHKNLYYSTFAYSTKNHRHISEIDQEFKEHTKKNIKFTFNPHILPTFRGILTSIYIELTKNSSSKKIRNELIKYYRNDKFIKIMKLNSEV

SEQ ID NO: 94492 - protein, 228 aa, Unknown
  Bacterial polypetide isolated from the Sargasso Sea
WYKKDHKAKYNIKNSIYSLPEITGKKVQDYKIISCPGCYPTSILLPLIPLLKNRLIKNYNIIIDSKSGYSGAGRGVHKKYKDKNLYKSLSAYGVASHRHNSEIEEMIKKCVKGNIQFDFTPHLSPMFRGILSTIYVELNKTSSASKILNTLKKYYKKANFIKILNKDKLISTNDVINTNNCNISVCKSKNKNKIIILSAIDNLIKGGAGQAIQNMNMKFNFPKDAGFK

SEQ ID NO: 94493 - protein, 260 aa, Unknown
  Bacterial polypetide isolated from the Sargasso Sea
MISVGIVGASGYTGEELIKLLIAHPEASIDVLTSRTYAGKCVDDIYPFDEKLEKYFLEPVVDNLLSCDVVFFASPNGVAMNMAKELIKNNIRIIDISADFRIPDVDIWEKWYGQKHTCPELIEEAVYGLPEIKNQKEKISKAKIIANPGCYPTASLLSLLPIISLIQQQRIIINSTSGISGAGRNLNPEKLFSAGTDNYQAYAIAKHRHYPEMLAQINSINKGIDLLFVPHLSSIDRGIYSTHKITLPNLNLKQLYDIYN

SEQ ID NO: 94494 - protein, 260 aa, Unknown
  Bacterial polypetide isolated from the Sargasso Sea
EAQDISKHLNKNHTLIDLAADFRLAKASDYLKWYKQKHRATNLINKSIYLLPEINRKEIKKYNIISCPGCYPTSILLPLIPLFKKNLIKFNSIIIDSKSGYSGAGRGVHKKYKNKNLYESLSTYGVGFHRHNSEIDQMLRKFTKKKFQFIFTPHLSPMFRGILSTIYLDLEKNISQSKVLNALANFYKNEKFVKILKSDTLLSTNDVINTNDCHISVCKSKYTNKIIILSAIDNLIKGGAGQAVQNLNNKFNFPEKTGLK

SEQ ID NO: 94495 - protein, 179 aa, Unknown
  Bacterial polypetide isolated from the Sargasso Sea
TPKLLEQGIRVIDLSGVYRIRDIKIFEESYALKHSSPGLLEEAVFGLPEYFRSSLSDARLVANPGCYPTGALLGILPFGDLLESLYRPPIIDAKSGVSGAGGRVEDDATNYVEVNENFKAYKAFKHQHQPEIKQYLEDLSPFESKTIGEPVFTPYLLPLSRGILSGIYLHFNRRINESE

SEQ ID NO: 94496 - protein, 197 aa, Unknown
  Bacterial polypetide isolated from the Sargasso Sea
MQQGAIIPLKPLVENFSIKNIVVDAKVGSSASGAHVSQGTHHPERQGVVRSYKPSMHRHIAEMQQELNKDGKISMNFSPHAVELVRGIQSTIHIFMENDFDERDIWQAYLKYYKDEPFVRFIREKSGGYRFPEPKIVMGTNLCDIGFEKDPLTGRLIVISAIDNLVKGAAGQAIQCMNICTGLDESTGLNQLGFHPI

SEQ ID NO: 94497 - protein, 267 aa, Unknown
  Bacterial polypetide isolated from the Sargasso Sea
LKNSINLIIRNNYDIRNYKDIDVVFSCMPQGELSKNFSKFKFQKNQCLIDLSADFRLPENLNQKWYGIKRNKDIYKKFQYILPELNTKKIRTKFVSNPGCYATSIALAIAPLNKVLSTEIIIDSKSGISGAGKNTNIQYLFNEANENFSIYNAGEHRHAPEVENFIKVNYKKKINIFMVPQLLPITRGILSNVYVTLRKNITETSLKNIFIKFYKDKNFIKVLNSGLPSIKDVLNTNNCIIGIKKIKNTQTFMITSVIDNLLKGASG

SEQ ID NO: 94498 - protein, 120 aa, Unknown
  Bacterial polypetide isolated from the Sargasso Sea
IYGSSLKINFLPHLIPAMRGIYSTIYVNFEDTQNKSIEEIYRDFYQDSLNIELMLDGQVPEILKVAETNNCQIGIYQSAIENQIVIISAIDNLVKGAAGQAIECYNLITGNYQLKGINNG

SEQ ID NO: 94499 - protein, 269 aa, Unknown
  Bacterial polypetide isolated from the Sargasso Sea
ILSKHPNVNIVFFGTENNPDTLLGDIDPTIKLYSKSLTQLNEKFDHSSVDTVFMALPHGVSHNYVKSFYDKLQIIDLSADFRLDNIEIYKKNYNEKHSASNLLNEFQYGLVEINRNFLLNKKNIAVPGCYPTSALIPLIPLLKNEIIDSKNIIIDSKSGYSGAGKKFDLDNIKNPKDYNFYNYNTNSHRHICEIKQELMKHTKLSDVLFSFNPHILPNFRGMLSTMYCDLLPGMNKNNVINCLNEIAINNEFIKFIHDDQRADFFLFKY

SEQ ID NO: 94500 - protein, 208 aa, Unknown
  Bacterial polypetide isolated from the Sargasso Sea
MSYNKLKIAVIGATGYTGLDLVYFLSKHPKVKITYLIATKNLGKKISFFDKRINKKLPKISSIKSIDWKKLDLIFLSLPNGEAQRLIKKTFYKYKKLKYIDLSADFRISNAKLYSKTYKKKHYANDLIKYSLYSISELNKHRIKNFRIIANPGCYPTSIQLPLIPIIKKNLIDFNNIIIDSKSGYSGAGKNFKKKFTHDNLFSSTFAY

SEQ ID NO: 94501 - protein, 161 aa, Unknown
  Bacterial polypetide isolated from the Sargasso Sea
MSKNNKNPVLVSIIGGSGYTGAELIRLISKHSYFQLYQVVANRNAGKKIQDIFPHLRHLKLPDFISFEQMNFDNVDLIFCALPHSKSQEIIVKIPRGKKIIDLSADFRLERIEEYERWYGSKHIAYSLQEEAVYGLTEIYKEEIKNGSLIACTGCNSAATL

SEQ ID NO: 94502 - protein, 117 aa, Unknown
  Bacterial polypetide isolated from the Sargasso Sea
NNFQFTPHLAPMFRGILSTIYVDLNNGIKIKNVNAELKKYFKNEYFIKIADPGTFISTNDVINTNNCIISVCNSKNKNKLIILSAIDNLIKGGSGQAVQNMNIRFNFKENEGLNVKN

SEQ ID NO: 94503 - protein, 170 aa, Unknown
  Bacterial polypetide isolated from the Sargasso Sea
MYKIAILGASGYTGAELIRILSNHPEMEIEVLAAHSKASQKMEIVFPHLRSLKLPSLVTIDDVDFSKIDLCFCALPHKTSQEVIRVLPKHLKIIDLSADFRLQDAAEYEKWYGNSHQALEIQDKAVYGLTEFYRKEIRGARVVAGTGCNAATGLYILRPLVEKALLILKT

SEQ ID NO: 94504 - protein, 306 aa, Unknown
  Bacterial polypetide isolated from the Sargasso Sea
MSIKHKLKIAVMGATGYTGLDLVYILSKHPKVEIVNLCATKNLNKNISFFDKRIKKKLPKTSSINKINWNDLDLVFLSLPNGEAQKIIKKTYYKFKNLKYIDLSADFRITNPKEYYKTYNIKHNAKELIKKSLYSISEFNKFNIQNYRIISNPGCYPTSIQLALNPLLIKKLISIKDITIDSKSGYSGAGKGLKNKFKHKNLFNSTFAYSVKNHRHMSEIDQEFYKITKNKVNYTFNPYLLPTFRGILSSIYVNTKGKIKAEKIRNELKRFYKKSKFIRILKLNSELGSGDVLNTNNCEISVCETR

SEQ ID NO: 94505 - protein, 196 aa, Unknown
  Bacterial polypetide isolated from the Sargasso Sea
MNKQVKVAVLGATGYVGIELVKILFTHPHVKINFLGCENINSKISERKDTIFDNSELPNLSINNEFNPINSDLVFLALPHGVSHKYINKYYKKIRIIDLSADFRLDSVLSYKTYYNIDHSCPELLDKFIYGLPEINHSKIINNYNISVPGCYPTSILLPLIPLMKKDLIKCDNIIIDSKSGYSGAGKKFEKKNIKN

SEQ ID NO: 94506 - protein, 266 aa, Unknown
  Bacterial polypetide isolated from the Sargasso Sea
MPKLNALVAGSTGYIGVQLIKLLIKHKYINIKYLCGNSSVGKNISYYDKSLSKKKLPKIVKFNQKLLNGVDVVFTALPNGEAQDIAKKLNHNIILIDLAADFRLEKVNDYLKWYKQKHRAPKLQKKSIYCLPEINRSELKNHNIISCPGCYPTSILLPLVPLFKKKLVKLDNIIIDSKSGYSGAGRGVHKKYKDKNLYESLSAYGVGFHRHNSEIHQFLRKFTNKNFQFSFTPHLSPMVRGILSTIYLDLEKNVKSSKIIQTLKGV

SEQ ID NO: 94507 - protein, 54 aa, Unknown
  Bacterial polypetide isolated from the Sargasso Sea
VQNTNYVRIGVFADISKRKTIIISTIDNLVKGAAGQAIQNMNLMFGFNESESLV

SEQ ID NO: 94508 - protein, 236 aa, Unknown
  Bacterial polypetide isolated from the Sargasso Sea
MKNKFKVAVLGSTGYVGMELVKILSNHSYVDINFLGSETIHKSYLKNIENTKEYNQLPLLKPNDSFNAEHSDYVFLALPHSVSNKYVKKYFDKINIIDLSADFRLDNFDVYKKNYGNEHKCPEHLKNFIYGLAEINRDKIVNSKNIAVPGCYPTSILLPLIALIKNKLIDTKNIIIDSKSGYSGAGKKFDFNKMKSKNDYNFYNYNTNNHRHIAEIKQELNKHNSDNEVKFSFNPH

SEQ ID NO: 94509 - protein, 207 aa, Unknown
  Bacterial polypetide isolated from the Sargasso Sea
MIKVGIINVTGYGGAELARILYNHKSVKIVSVTGRSLVGKKLNEVFPHLYDMDLTIKESITENCDVIFSALPHTASAEQIKNYVNDDVKIIDLSADFRLNNINDYEKWYQAEHPLENYLNKFTYGLTELYREQIKESSYIALPGCFPTSTLLALAPALSNKLINPPLIIDSKTGVSGAGRKLSLNTHFSEINENVKAYSVFGHRHLS

SEQ ID NO: 94510 - protein, 177 aa, Unknown
  Bacterial polypetide isolated from the Sargasso Sea
MTHSIFIDGAAGTTGLQVADRLARHPGVTAHALNDKERKDKGARQQLMAASDLTILCLPDAAARKAADMAAQTGARLIDASSAHRTHAEWVYGFAELDTGQRDAVAKAMRISNPGCYPTGFLALTRPLIDAGILPRDALLTVPAVSGFSGGGNGMIARQANGALPRYSSYGVTWHTS

SEQ ID NO: 94511 - protein, 271 aa, Unknown
  Bacterial polypetide isolated from the Sargasso Sea
YLCGNSSIGKKISFYDKTIKKELPRISKLDKSKMNECDIIFTALPNGDAQKISKLLNKKNTLIDLSADFRLNNSKSYFKWYKQKHKSVKNIKNSIYSLPELNQKNIKKYQIISCPGCYPTSILLPLIPLIKKKLILLDNIIIDSKSGYSGAGRGVHKKYASKNLYESLSAYGVGFHRHNSEIEQEMKTYINSKFKVTFTPHLTPMFRGILSTIYIDLKNSITQSKIIKELKKFYKNKKFVKIMNKDKILSTNDVINTNYCYISVCKTKYKN

SEQ ID NO: 94512 - protein, 167 aa, Unknown
  Bacterial polypetide isolated from the Sargasso Sea
MTRKVSVAILGSTGFVGIELVKILSNHPNVNIVFFGTENNPNTLLKDIDPRINLQNNPSTELNTNFDYSIADTVFLALPHGVSNKYVKSFYNKLQIIDLSADFRLDDINMYKINYDEMHSAPNLLNEFIYGLPEINKNILNNKNNIAVPGCYPTSVLIPINPSIKNN

SEQ ID NO: 94513 - protein, 145 aa, Unknown
  Bacterial polypetide isolated from the Sargasso Sea
SLENDLKNNFKAYSPEFHRHQPEIKSFLASIKGTNNKIVFTPHLLPLFRGEYITAYLEVENFNEDLNNCYENYYNESKFVRILKKGTIPELSKVQNTNFCDIGVFINENTVVVHSAIDNLIKGAAGQAIQCLNLMIGEKEEYILE

SEQ ID NO: 94514 - protein, 251 aa, Unknown
  Bacterial polypetide isolated from the Sargasso Sea
MHKLDVLVAGSTGYIGVQLVKLLANHKNINIKYLCGNSSVGKNISFFDKKLKNKKLPKIVKFKKVFLKDVDIIFTALPNGEAQDLSNYLLKKNILIDLAADFRLDDANQYKKWYKLKHKSKKNILNSIYALPENNKKSFKKYKIIACPGCYPTSILLPLLPLVKNNLIKLNNIVIDSKSGYSGAGRSIHIRNAKKNLYESLSAYGLATHRHNSEIEQELKKVTSKKFAFTFTPHLSPMFRGILSTIYLDIP

SEQ ID NO: 94515 - protein, 101 aa, Unknown
  Bacterial polypetide isolated from the Sargasso Sea
GIYSTIYIQLEETVYLNIQDLYELFYEDSPNVKIMQPGQVPDIKSITNTNNCNISVNNSNIPNQLVLISSIDNLVKGAAGQAVECYNLMNGFNQSTGIKNG

SEQ ID NO: 94516 - protein, 211 aa, Unknown
  Bacterial polypetide isolated from the Sargasso Sea
MPEFSESKLKNYNIISCPGCYPTSILLPLIPLIKKKIINLKNIIIDSKSGYSGAGRSVHKKYKNLNLYESIKAYGVGFHRHNSEIEQEIKKITKKDNFNITFTPHLTPMFRGILSTIYIETKKGYKLKDINKEIKKTFLNKKFVHIKKPNSLISTNDVINSNFCYISVCKTKYKNRFIILSAIDNLIKGGSGQAVQNMNIRFNLPQTSGLI

SEQ ID NO: 94517 - protein, 285 aa, Unknown
  Bacterial polypetide isolated from the Sargasso Sea
MRKLNVLIAGSTGYIGIELIKLLVKHKNINIKYLCGQSSVGKNISIYEKSLKNKDLPKIIRFNKNLLKEVDVIFTALPNGEAQEISNKLLNNNILIDLSADFRLRKSNDYKKWYKQKHKSIKNIKNSIYSLPEISKDKVKKFNIISCPGCYPTSILLTLIPLLKMKLILTNNIIIDSKSGYSGAGRGVHKKYKQKNLYESLSAYGVGFHRHNSEIEQELKKFSQNNINFSFTPHLSPMFRGILSTIYIDLKNNVKIKKVQDTLKKFYKNEKFVKILKIDSQIKYE

SEQ ID NO: 94518 - protein, 296 aa, Unknown
  Bacterial polypetide isolated from the Sargasso Sea
MTKLNVLVAGSTGYIGVQLIKLLIKHKNINIKYLCGNSSVGKKISFYDRTIKKKLPKIIKLDKSKINECDIIFTALPNGDAQKISKFLNKKNTLIDLSADFRLNDSKSYQKWYKQKHKCVKNIKNSIYSLPELNQKNIDKYQIISCPGCYPTSILLPLIPLIKKKLILLNNIIIDSKSGYSGAGRGVHKKYLSKNLYESLSAYGVGFHRHNSEIEQEMKAYINSKFNVTFTPHLTPMFRGILSTIYIDVKNNITQNIIIKELKKFYKNKKFVKIMNKDKLLSTNDVINTNYCYISV

SEQ ID NO: 94519 - protein, 156 aa, Unknown
  Bacterial polypetide isolated from the Sargasso Sea
MFCTVDENFSAYGLLSHRHTPEIEQALATEGNGNKREDISLLFTPHLAPMNRGILATCYAKVKAELDTDTAIQVLAETYSGMPFIVVDEKSPSTKSTFGSNAAHITARVDPRTGWLISLCAIDNLGKGASGQAVQCANIVLGLDETEGLSAVGISP

SEQ ID NO: 94520 - protein, 247 aa, Unknown
  Bacterial polypetide isolated from the Sargasso Sea
MSKKKINIAVIGATGYTGLDLVFLLSKHPSANIKNLCATRNLGKKISFFDQRIKKKLPKISSINKVHWSKIDLVFFSLPNGEAQKIIKKIYYKYKKIRFIDLSADFRITDPSKYRKNYKKKHKATKLIKDSIYAISEFVKKNIYKYRIIANPGCYPTSIQIPLVPLIKKNLININNLTIDSKSGYSGAGKNLEKKFKHKNLYNSTFAYSTKNHRHISEIDQEFKKYTKKNVKFTFNPQYNSNHLGEF

SEQ ID NO: 94521 - protein, 219 aa, Unknown
  Bacterial polypetide isolated from the Sargasso Sea
MSFKKKIKVAIIGATGYTGLDLVYLLSKHSKVKILNLCATKNLGKKISYFDKRIKKKLPIISSIKKINWSKIDLVFLSLPNGEAQKIIKKIFYKYKSIKFIDLSADFRLSNVNTYYKNYKIKHKAPSLISSSIYSVTELSRDYIKKYRIIANPGCYPTSIQIPLIPLLKKRLIKNQYITIDSKSGFSGAGKNIKKKFTHKNLLSSTFAYGIYFHRHVCE

SEQ ID NO: 94522 - protein, 269 aa, Unknown
  Bacterial polypetide isolated from the Sargasso Sea
MKNKIKVAVLGSTGYVGMELVKILSNHSYVDINFLGSETIQGSYLSNIDNTKEYNQLPLLKPNNSFNVEDSDYVFLALPHAVSNKYVKKYFNKINIIDLSADFRLDKFDVYKENYGNEHECKEHLNNFIYGLAEINRDKILNSKNIAVPGCYPTSILLPLIPLIQNKFIDTKNIIIDSKSGYSGAGKKFNFNKMKSKNDYNFYNYNTNNHRHIAEIKQELNKYNSENLVKFSFNPHILPNFRGMISTIYCDLNDSIKKTHIINLFQDYK

SEQ ID NO: 94523 - protein, 307 aa, Unknown
  Bacterial polypetide isolated from the Sargasso Sea
MSKLNALIAGSTGYIGIQLVKLLLKHPNINIKYLCGNTSKGKSISYYDKIFKKKKLPKIIKFSKNLLEDTNLVFTALPNGQAQKISNKLLKKNILIDLSADFRLRSAKEYLKWYKIKHSSKNNIKKSIYALPELSKKKLKNYKIISCPGCYPTSVLLPLIPLVKNNLIQINNIIIDSKSGYSGAGRGVHKKYANKNLYESLSAYGVSSHRHNSEIEQELNSYTKKNIKFSFTPHLSPMFRGILSTIYLDLNKNISVKHINSNLKKFYKKDLFVKILPINSHISTNDVINTNYCHISVCKSKYKNKLI

SEQ ID NO: 94524 - protein, 117 aa, Unknown
  Bacterial polypetide isolated from the Sargasso Sea
AKNKFHFTPHLTPMFRGILSTIYVDLKKGININKIIKVLNIQYKKQKFIKIGKINTFLSTNDVINTNNCLISVCKSKYKDKIIILSAIDNLIKGGGGQAVQNMNNYYGFNESEGLNV

SEQ ID NO: 94525 - protein, 209 aa, Unknown
  Bacterial polypetide isolated from the Sargasso Sea
ISKGRLIACPGCYPTSALIPLAPYLSQGIIENEGIVIDSKSGTSGGGREPKQKLLLSECGEGLSAYGLINHRHTSEIEQVASLISGNKIELLFTPHLVPITRGMHSTIYGRLRDPGLTSDDCRILLDNYYRNFKNIKVLPVDTFPSTKWVKNTNQIFLSVKVDIRNGRIIILSVIDNLLKGQTGQAIQNLNIMSGFSMDEGLELTNNFP

SEQ ID NO: 94526 - protein, 270 aa, Unknown
  Bacterial polypetide isolated from the Sargasso Sea
MELYQYSLTFNSNETDVLGCDVVFLAVPNEASLALVPKLLEQGIRVIDLSGAYRLADTKVFEKFYKLTHTYPELLKEAVFGLPEFFSKQISAAKLVSNPGCYSTCALLGILPLAEMLGELDQPPVIDAKSGVSGAGGRVEDDSMNYVSVNENFKAYKVFSHQHQPEIQQYLNELSSYSSDINGEVILTPHLLPVNRGILSTIYIHFREAVDPDKIVRSYSEFADKQKFVEFLGKAHFPDIKMTSHTNRCMIGIECDQSGQNLVIVSSLDN

SEQ ID NO: 94527 - protein, 139 aa, Unknown
  Bacterial polypetide isolated from the Sargasso Sea
HAYGIFKHRHRSEMDQEFSKISRNKVKYTFIPHLIPTFRGMLSSIYVELNNNVSIQRIHNELKKYHKKNHFVKILSLNKNLGTENVINTNFCELSICKLEGKNKVLILSAIDNLIKGAAGQAVQNMNIIKYYKENLGLR

SEQ ID NO: 94528 - protein, 158 aa, Unknown
  Bacterial polypetide isolated from the Sargasso Sea
MAGGGQGRVAVIGASGYGGLQTIRLLQDHPSLTVTFLGGERSAGRRWSSICSFLPLPDDPVVQSADAERIAEAADYAVLSLPNGLACQLAPELLQRGVRVVDLSADFRYRSLEQWSQVYAQEANRLSRDDSDLCQQAVYGLPEWHGPAIAEARLVAAP

SEQ ID NO: 94529 - protein, 188 aa, Unknown
  Bacterial polypetide isolated from the Sargasso Sea
MSNYKLKIAIAGATGYVGLDLVNLLSKHPKIKLVNLCATKNLGKQIHIFDKRLKKTLPKISRLNQVKWNEIDLLFLSLPNGAAHNIIKKLYYKYSHLKFIDLSADFRIKNHLIYKRYYKKKHNAKNLINNSLYSIAELKKKIITNYRIISNPGCYPTSIQLALYPLIKKKLIKFDDIIIDSKSGYSGA

SEQ ID NO: 94530 - protein, 223 aa, Unknown
  Bacterial polypetide isolated from the Sargasso Sea
MPNGQAQKLVSKVFYRYLNLKFIDLSADFRIFDIHEYKKNYKMKHKCPELLKDTIYSISEFVKKDINKFRIIANPGCYPTSVQLPIIPLLKKKLIKNNITIDSKSGYSGAGKNLEKKFKHKNLYNSTFAYGTKKHRHIVEIDQEMNKHLGQKINFTFNPHLLPTFRGILTSIYVDLKKGKKIETLRNELINFYKKDRFIKILKLNSQIGSGNVIHTNKCEISV

SEQ ID NO: 94531 - protein, 115 aa, Unknown
  Bacterial polypetide isolated from the Sargasso Sea
PVGYSFIPHLIPTFRGLLSAMYVEKEKNVTLKKIHKELIRFHKKNYFIKIAKINKNIGTESVINSNFCEISVCKLRFKNKILILSAIDNLVKGAGGQAIQNMNLIFGFKENLGLK

SEQ ID NO: 94532 - protein, 77 aa, Unknown
  Bacterial polypetide isolated from the Sargasso Sea
ERFKEEKFIEVLPIGDIPKTKDVVGTNNLVIGLKKGYKENKVCIVSALDNLLKGAAGQAIQNFNIMNDFDEGEGILM

SEQ ID NO: 94533 - protein, 304 aa, Unknown
  Bacterial polypetide isolated from the Sargasso Sea
GYLGIELIRILSMHPNVKLSKIFQRELPIDQEFPHLQSLNLKDIQTENLDDFKNLDCVFLALPHGSAHEYVKELISKVKIIDLSSDFRISSQEDYNKYYKSNFDVNTQSQFQYGFIENSGDEIKKSSNISNPGCFALTTQLSLLPFHSIIKNVSVTAITGSSGGGKNPTNKNHHSTRSKDIFSYNINSHRHLAEIYQSFPNLRKNLSFVPLSGPFSRGIYLTSHIETKETINNDFLDTCLADCFKSAPFIRIQNNTKLSNVVGSNFCDISVSFKDENHFVVEACLDNLVKGASGNAVECMNLIL

SEQ ID NO: 94534 - protein, 199 aa, Unknown
  Bacterial polypetide isolated from the Sargasso Sea
MTKKVSVAILGSTGFVGLELVKILSNHPNVNIAFFGTENNPDKLLKDIDPSIDLSTNPSTKLNENFDPSKVDTVFLALPHGASHKYVKSFYNKVQIIDLSADFRLDEIAIYERNYNEKHSAPNLLKDFLYGLPEINKNILSNKKNIAVPGCYPTSILIPLIPLLKNNIIDSKNIIIDSKSGYSGAGKKFDLLYIKNSKD

SEQ ID NO: 94535 - protein, 255 aa, Unknown
  Bacterial polypetide isolated from the Sargasso Sea
KRDLLKSDVSIIDLSVDFRLDDKNEYENWYGFKHGNFEVNDEFQYGLTEFNRDKIKKCKHIANPGCYATSILTPLIELIKQNAIKTDDIVIDSKSGYSGAGKTKGKKELIKEVNENIRTYGIGDHKHIAEINQELSKIKNIQTEVFFAANILPVERGILSNIYIDTNEVSQNDIYDILQKRFNDEHFIQLLPMNEIPSSREVVGTNNLVIGLKKGYKENKLCIVSVLDNLLKGAAGQAIQNFNLMNDYDERLGLE

SEQ ID NO: 94536 - protein, 197 aa, Unknown
  Bacterial polypetide isolated from the Sargasso Sea
IAVPGCYPTSILLPLIPLIKNKLIDTKNIIIDSKSGYSGAGKKFDFNKIKSKNDYNFYNYNTNNHRHIAEIKQELNKHNSDKELKFSFNPHILPNFRGMISTIYCDLNSSIQKTDIINLFHDLQKINPFIKFIDNDEVLDFFSVQNSNYCKIKIFNHHSEDKIIIVSAIDNLIKGAAGQAVQCFNITENIEETVSLV

SEQ ID NO: 94537 - protein, 264 aa, Unknown
  Bacterial polypetide isolated from the Sargasso Sea
LPNGEAQKISNHLLKKNILIDLSADFRLKNYKDYKKWYKIKHSSIKNIKNSIYALPEVNRNDIKNYKIISCPGCYPTSVLIPLIPLIKKNLIKQNNIIIDSKSGYSGAGRQIHRIKKKENLYDSLSSYGIRYHRHNSEIQQELNSHSKKNIEFTFTPHLSPMFRGILSTIYVDVNKNINFINVYKYLKKYYQSEKFIKVLGPNKMISTNDVINTNLCKLSICKSKQNNKIIILSAIDNLIKGGSGQALQNFNIKFNFNEKLGLI

SEQ ID NO: 94538 - protein, 222 aa, Unknown
  Bacterial polypetide isolated from the Sargasso Sea
HRATNLIKKSIYLLPEINRKEIKNYNIISCPGCYPTSILLPLIPLFKKRLIKFNNIIIDSKSGYSGAGRGVHKKYKDKNLYESLSAYGVGFHRHNSEIDQMLRKFTKKKFQFSFTPHLSPMFRGILSTIYLDLENKITTNNIYKELHKFYKNQKFVKVLKRDTLVSTNNVINTNNCYISICKSKYKNKVIILSAIDNLIKGGAGQAVQNLNIKFNFPEKTAL

SEQ ID NO: 94539 - protein, 245 aa, Unknown
  Bacterial polypetide isolated from the Sargasso Sea
VDVVILAMPNGKAKSYFDIINKINNQIIFIDISSDFRTDNAWHYRLPELRKYNGSKTISNPGCYATAMQLSIAPIMDLVDGDINSIGISGYSGAGATPNSRNNQSKLENNLIPYSLSGHAHENEVRMNLYKQIHFSPHVASFFRGILVTSKLKLKKKNSVENIFNMYKNFYENSKLINIKKDIPMINEIINTHTVEIGGFSLDENKQHLTLCCTLDNLLKGAATQVIQNINAACGFDDLTGVNYE

SEQ ID NO: 94540 - protein, 242 aa, Unknown
  Bacterial polypetide isolated from the Sargasso Sea
LCGNSSVGKKISYYDKTLSNKKLPKIIKFNKKLLKEIDVIFTALPNGEAQVISSHLNKNKILIDLAADFRLEKSSEYLKWYKKKHKAIKLIKKSLYSLPEINGKEVKKYQIISCPGCYPTSILLPLIPLFKNKLVKVKNIIIDSKSGYSGAGRSVHKKYKDKNLYGSLSAYGVGFHRHNSEIEQMLNKYTSKKIDFNFTPHLTPMFRGILSTIYIDLDSNVTQHKVIKKLTEYYKNYKFVKI

SEQ ID NO: 94541 - protein, 159 aa, Unknown
  Bacterial polypetide isolated from the Sargasso Sea
MTVRGGRGERAGSSARRTPSVVTRAVKRVFIDGEAGTTGLQVRERLQARSDIELIQLDESKRKDLDARKKALNECDAAILCLPDAAAIEAVKLVENDTTVVIDASTAFRVADGWTYGFPELAPGHRDKVKTSKRISNPGCYPTGFIALTRPLVDAGILS

SEQ ID NO: 94542 - protein, 313 aa, Unknown
  Bacterial polypetide isolated from the Sargasso Sea
MLKHNKVNIKYLCGNSSVGKKISFFDKSIKKKLPLITKLSQSKINNSDVIFAALPNGEAQLISKLINKKKVLIDLSADFRLNDSKSYLKWYKQKHKAIKNIKNSIYSLPELNLKSVKKYNIISCPGCYPTSILLPLIPLIKKKLIKTNNIIVDSKSGYSGAGRGVHKKYKKKNLYESLSVYGVGFHRHNSEIEQEIKKYCREEFKITFTPHLVPMFRGILSTIYIDLKSKKSKLNVLNQLKKFYKKSKFVKVMKKNSFLSTNDVINTNNCYISVCDTKYINKIIIVSAVDNLIKGGSGSAIQNMNLKFTLKRA

SEQ ID NO: 94543 - protein, 154 aa, Unknown
  Bacterial polypetide isolated from the Sargasso Sea
MSTEINVAVLGSTGYVGYELVKMLIKHPKVKINFLGCDSKIKNSLFNEDKNLEFSKLPKLSLNDDFDVSSSDIVFLALPHGISHKYVKNYYNKIKIIDLSADFRLDSEEVYTSNYKTTHSCSKLLQEFVYGLPEINKKLIINRNNIAVPGCYPT

SEQ ID NO: 94544 - protein, 154 aa, Unknown
  Bacterial polypetide isolated from the Sargasso Sea
NIKNKFKFKNLFNSVSAYGVGRHRHMAEIDQELSKIAKKGIKVIFTPHLIPMFRGILSTIYLETNRKITPRKIYNVLKKYHKSNFFVKIAKYNTPIGTGDVMNTNYCKISVCKNREKNSVIIISAIDNLLKGGSGQAVQNMNVSFNLRETLGLI

SEQ ID NO: 94545 - protein, 54 aa, Unknown
  Bacterial polypetide isolated from the Sargasso Sea
SNKCLVYPQVINGTAIVISVIDNLLKGASGQAVQNMNLMCGLEETLGLKIKNSV

SEQ ID NO: 94546 - protein, 197 aa, Unknown
  Bacterial polypetide isolated from the Sargasso Sea
ISCPGCYPTSVLIPLIPLIKKNLINNQTIIIDSKSGYSGAGRGVHKKYKDKNLYESLSAYGLANHRHNSEIQQELDLKTGKKNKFHFTPHLTPMFKGILSTIYVDLKKGININKIINVLNVQYKNHKFIKICKINTFLSTNDVINTNNCFISVCKSKYKDKIIILSAIDNLIKGGGGQAVQNMNNYYGFNQSEGLNV

SEQ ID NO: 94547 - protein, 158 aa, Unknown
  Bacterial polypetide isolated from the Sargasso Sea
MAKIQLGIAGASGYGGQELLRLAVRHDDVEIAVAMSSAANNETQELPALKNLWNGQIEPFSIEKLIAKSEVVFLGLPDGISAELAPKLVKNQRKVFDLSGAFRLRDKELRKQWYPKSPSLPATTTYGLPEWNREDLSTANLVACAGCYPTAAILALKP

SEQ ID NO: 94548 - protein, 255 aa, Unknown
  Bacterial polypetide isolated from the Sargasso Sea
MGETQAGSAIRDLYPSLSTAYPNTYFDSFSPEIVDGLDLVFCALPHGVSQSVIPDIHGTVGHIVDLGSDFRLKDPSLYQEWYGSEHTCPELLNDFVYGLPELFRDEIEGADLIAATGCNAAAAIFALAPFVQSQTIDSGSMIVDLITGVSGAGRPPKENTTFCAVSGNITPYGLLTHRHTPEIEQALTTFVGDTSSVLFTPHLAPIDRGIIATCYGRAKSAISTDEALNQLETFYKEEPFFVVDERPPSTKSTLG

SEQ ID NO: 94549 - protein, 70 aa, Unknown
  Bacterial polypetide isolated from the Sargasso Sea
FIDLLNDDSRSDFFSVQRTNKCVLKLLKGHKKDKIIIISLIDNLVKGAAGQATQCFNLSFNIEESTALKL

SEQ ID NO: 94550 - protein, 259 aa, Unknown
  Bacterial polypetide isolated from the Sargasso Sea
MRKINALVAGSTGYIGVQLIKLLIKHKFVNIKYLCGNSSIGKKISKFDKSLNSLKLPKIIKFDKKYIKNVDVIFTALPNGEAQKISKYINKDVVLIDLAADFRLEKPSDYLKWYKQKHKAKNKIKESIYSLPEITGNKLKNYNIISCPGCYPTSILLPLIPLILKKLINVSNLIADSKSGYSGAGRSIHKIKKKDNLYESLSAYGVGFHRHNSEIEQMLKKYINKDFKLIFTPHLTPMFRGILSTIYIELNNGVSISQI

SEQ ID NO: 94551 - protein, 205 aa, Unknown
  Bacterial polypetide isolated from the Sargasso Sea
KLVAAPGCFPTASLMPLLPFLKQGLIETSGIIIDAKTGTSGGGRVPKEAMLLAEASESIAPYGVIGHRHTSEIEQMAMEVAGQEVRVQFTPHLVPMVRGLLSTVYARLRDPGLTAEDCTTVLEAIYRHHPCVQVLPVGTYPATKWARHTNRALLSVQVDTRTGQLVLMSAIDNLIKGQAGQGVQCLNLMAGLAPQTGLPLQSFYP

SEQ ID NO: 94552 - protein, 150 aa, Unknown
  Bacterial polypetide isolated from the Sargasso Sea
MTKIIKKPVSVSIIGGSGYTGAELIRLLSKHPYFKLFQVVANRNVGKKIQTVFPHLRHLDLPDFISFEEMNFEEVDIIFCALPHATSQEIIVKIPQGKKIIDLSADFRLERLEEYERWYGKKHIAPALQEKAVYGLTEIYKKKIKEGSLI

SEQ ID NO: 94553 - protein, 174 aa, Unknown
  Bacterial polypetide isolated from the Sargasso Sea
MSLNVCVFGVTGYTGSKLLYYLNKHKKITIVGVFGKSKVGKNLDELHPNIKGLPKLRISDHNDFDFSKADLVFSCLPPGMFQSKIIENLDPNIPIIDLSGDFRLENKKTYEHFYETSHKNFHLKNKFVYGLSEINKDLIKKSRFISNPGCYPTSILIPLVPLLENKIVNSGHII

SEQ ID NO: 94554 - protein, 179 aa, Unknown
  Bacterial polypetide isolated from the Sargasso Sea
KEIDVVFSALLNGQAQKISNKLTKRNVLIDLSADFRLKDPNLYSKYYKIKHSAVKNIKKSIYALPEIKNKKIKNYNIIGCPGCYPTSILLPLIPLIKRNLISKKNIIIDSKSGYSGAGRGIHKKYKNKNLYESLSAYGIKSHRHNSEIQQELNIETKYKIDFTFTPHLTPMFRGILSTI

SEQ ID NO: 94555 - protein, 131 aa, Unknown
  Bacterial polypetide isolated from the Sargasso Sea
ICEIKQELIKHAKLSDVLFSFNPHILPNFRGMLSTIYCDLLPGMNKNNVINCLNEIAINNEFIKFIHDDERADFFSIQNTNNCILKIFDHYDSSKIIIVSLIDNLVKGAAGQAVQCFNVSNGFAENTALIK

SEQ ID NO: 94556 - protein, 200 aa, Unknown
  Bacterial polypetide isolated from the Sargasso Sea
KKNIAVPGCYPTSVLIPLIPLLKNGIIDSKNLIIDSKSGYSGAGKKFDLENIKNSKDYNFYNYNTNSHRHICEIKQELIKHAKLSDVLFSFNPHILPNFRGMLSTMYCDLLPGMNKKDVINCLNEIAINNEFIKFIDDNQRADFFSIQKTNNCILKIFDHYDSSKIIIVSLIDNLLKGAAGQAVQCFNVSNGFQESTALI

SEQ ID NO: 94557 - protein, 279 aa, Unknown
  Bacterial polypetide isolated from the Sargasso Sea
KLLKIKLNKEFDCNQSDIVFLCLPHKISQSYVKKFYGKIKIIDLSADFRLDNANTYYKNYSIKHSSPKLLKKFIYGLYEINYDKIKKNKYIAVPGCYPTSVLLPLIPLVKNNLIETDEIIIDSKSGYSGAGKNFDKNNLFKFGENLNFYNYNTNDHRHICEIKQELEKNTKNKVNFSFNPHILPIFRGMMSTMYCNLKRNISIKKLNDTLKKSYKNFEDIEIITNDIRVDFNSVQNTNKCFIKLFNHYNSSKVVIVSLIDNLQKGAAEQAIQCMTLINN

SEQ ID NO: 94558 - protein, 273 aa, Unknown
  Bacterial polypetide isolated from the Sargasso Sea
MPKLNALVAGSTGYIGVQLIKLLVKHKYINIKYLCGNSSKGKSIKSYDKSLSKYKLPKILKFNKKLLKHVQVIFTALPNGGAQDISKHLSKNHTLIDLAADFRLAKASDYLKWYKQKHRASNMIKKSIYLLPEINRKDIKKYNIISCPGCYPTSILLPLIPLFKKNLIKFDSIIIDSKSGYSGAGRGVHDKYKDKNLYESLSAYGVGLHRHNSEIDQMLRKFTKKKFQFSFTPHLSPMLRGILSTIYLDLEKNISQSKVLNTLTNFYKNEKFI

SEQ ID NO: 94559 - protein, 216 aa, Unknown
  Bacterial polypetide isolated from the Sargasso Sea
MSKKKINIAVIGATGYTGLDLVFLLSKHPNANIINLCATKNLGKHISFFDKRIKKKLPKISSINKINWKKIDLVFLSLPNGEAQKIIKKIYYKYKDIRFIDLSADFRITNPDKYKENYKKEHKAVKLIKKSIYSISEFVKKDIYKYRIIANPGCYPTSIQIPLIPLIKKNLININNLTIDSKSGYSGAGKNLEKKFKHRNLYQSTFAYSTKQHRHI

SEQ ID NO: 94560 - protein, 260 aa, Unknown
  Bacterial polypetide isolated from the Sargasso Sea
LSKHPNVNIVFFGTENNPDTLIKDIDPTIKFYSNSFTQLNEKFNNSSVDTVFMALPHGVSHNFVKLNYDKLQIIDLSADFRLDDIEIYKKNYNEKHSASNLLNEFQYGLVEINRNFLKNKKNIAVPGCYPTSALIPLIPLLKNKIIDSKNIIIDSKSGYSGAGKKFDLENIKNPKDYNFYNYNTNSHRHICEIKQELMKHAKLSDVLFSFNPHILPNFRGMLSTMYCDLLPGMNKNNVINCLNEIAINNEFIKFIRDEQR

SEQ ID NO: 94561 - protein, 193 aa, Unknown
  Bacterial polypetide isolated from the Sargasso Sea
MNKIIKVAVLGSTGYVGLELVKILMKHPKVLINFLGCENNPNKRLKNFDDSINDKKLPLLNLNKNFNCTNSNIVFLALPHGVSQNFVKKFYNKIRIIDLSADFRLDSKNIYKLNYGIIHKCPDLLNKFVYGLPEINKKNIIKNTNIAVPGCYPTSILLPLIPLLRKKLINTNNIIIDSKSGYSGAGKKFDIHK

SEQ ID NO: 94562 - protein, 324 aa, Unknown
  Bacterial polypetide isolated from the Sargasso Sea
MIKVGIIGANGYLGVELIRILSVHPKVKLSKIFQREMEIDEEFPHLQSLNMKDLQTSNLDDFKNLDCVFLSLPHGSAHEYVKELLSKVKIIDLSSDFRISNQEDYSKYYKSNFDADIQSKFQYGFIENSIDDIKKSSNISNPGCFALTAQLSLLPFQSIIKKVSITAITGSSGGGKNPSMKNHHSTRSKDIFSYNINSHRHLAEIYQSFPNLKETLSFVPLSGPFSRGIYLTSHIETYEDSTYESLNSILIDCFKSSPFIRVQDNTKLSNVVGSNYCDISMSYKDERHFVIEACLDNLVKGASGNAIECMNIIFDLDQTLGLKQ

SEQ ID NO: 94563 - protein, 336 aa, Unknown
  Bacterial polypetide isolated from the Sargasso Sea
MNIAIVGATGNVGRKIIEILEKKQINIENLFLLASKNSEGKKINYNGKEHVVTDLEKFDFSNVKIAFFAAGSGVAEKWAHVAAEKTIVIDNSKYFRKDPDIPLIVPEVNSKKLSDVKNKNIIANANCSVIPVVVALKPLHDLYDINRIVASTYQSVSGAGKSAMDELLSQTENYFQNKKISSKNFTKQIAFNAIPHIDSFLENGYTKEEQKTNDEIKKILDKKIKVTSTCVRIPVLVSHCISANVEFNKKCYLDEIRTVLSTSPGCKVVDEHQDGGYITPIEAEDKFETFISRIRLDESRENTINLWIVSDNLVKGAALNAVQIAESLIKNDFYGR

SEQ ID NO: 94564 - protein, 283 aa, Unknown
  Bacterial polypetide isolated from the Sargasso Sea
MLNVGIINITGYAGSEIARLVYSHPELNLVSATGRSKAGQYLDEVFPHLEKINIKIQEELSDNVDFVFSALPHAASAEKLSQYVDSGIPSIDISADFRLKDLGTYEEWYDIKHPRPELISQATYGLPELHRNEIKSSKLVANPGCFPTGGILSMAPAVQNDLVEELIIVDSKTGISGAGRTAKEAFGFSELNDNCAAYGTKGHRHQPEMAQELNFLGENKVKVLFTPHLVSMTRGILGTNYGSLKKDLDENEVVELYKEFYKNEPFIKIVSAPPATKHTWGSN

SEQ ID NO: 94565 - protein, 339 aa, Unknown
  Bacterial polypetide isolated from the Sargasso Sea
MPKLNALVVGSTGYIGVQLIKLLVKHKYINIKYLCGNTSVGKKITYYDKSLSNKGLPKIVKFNKNLLKDIDVIFTALPNGEAQDISKYLTKNITLIDLAADFRLEKTSDYLKWYKQKHRAKNLIKKSIYSLPEINGKELNNYQIISCPGCYPTSILLPLIPLFESNLVKVKNIIMDSKSGYSGAGRGVHKKYKDKNLYESLSAYGVGFHRHNSEIDQMLKKYTKKEINFSFTPHLTPMFRGILSTIYIDLEIGVTQSNVVKKLSTFYQKDNFVRILKQNTLISTNDVINTNNCHISVCKSKYKNKIVILSAIDNFIKGGAGQAVQNLNMKFNFPLKTAL

SEQ ID NO: 94566 - protein, 348 aa, Unknown
  Bacterial polypetide isolated from the Sargasso Sea
MKVGIVGASGYVGGEVLRLLLSHPKVEVSMVTSRQHAGKFLHRAQPSLRGFTDLKFSELDYEKMSDSCDLVFTAVPHGTATEIVKSLYDRGMKIIDLSADYRLHNPEDYGKWYGWEHPHPDYLAKSVFGVPELHREEIKKSQLVSCPGCMAVTSMLALNPLIKNDLIDTDHIVVDSKIGSSGAGAGAGTSHAMRAGVIRPYKPAKHRHTGEIEQELSQTAGKKIKVAMSPHAVDVVRGILCTNHTFLKKDVDEKELWKIYRAEYSEERFVRLIRDKEGLHKFPDPKFLVGSNFCDIGFDLDKENNRLIALSASDNLMKGAAGSAIQNMNVMSGFDEFEGIMYSPLTPV

SEQ ID NO: 94567 - protein, 340 aa, Unknown
  Bacterial polypetide isolated from the Sargasso Sea
MSKLNVLIAGATGYIGIQLTKLLLDHSNIKIKYLCGNTSKGKSIKYFDKSINAKNLPKITKFNYTNLKDVKVIFTALPNGEAQKISKKLLPHNILIDLSADFRLKSSKEYFKWYKIKHKSNSNIKNSIYSIPEFSKKNVKNYKIISCPGCYPTSILLPLVPIIKKKLIGIKNIIIDSKSGYSGAGRGVHKKYANKNLYESLSAYGVGFHRHNSEIQQELNFHSNNKVNFNFTPHLTPMFRGILSTIYIDLKPGVSISKIHKELNNFYKKDFFIKILPLNSLISTNDVINTNYCNISICKTKYKDKIIILSAIDNLIKGGAGQAVQNLNFYYKFNSKKGLI

SEQ ID NO: 94568 - protein, 256 aa, Unknown
  Bacterial polypetide isolated from the Sargasso Sea
MQYVSKILSAGVKIIDLSADYRFNDADRWKKNYDTDHIDPINLKESIYGLPELYRDDIKISNLVAVPGCYPTASLLSLMPIMSQLKSNDIIIDAKSGFSGAGKAKSEGGLAESMKDNFKVYSPDFHRHEDEIKYYADKIMDKKFNVSFVPHLLPHFRGEYITAYVEPEDINKDFQKIYENYYADEKLVKVLKKGTVPEIINISGMHTCEIAVSAKKSSNKLIINAALDNLLKGAASQAVQCFNLMHDIDEFHSLKY

SEQ ID NO: 94569 - protein, 348 aa, Unknown
  Bacterial polypetide isolated from the Sargasso Sea
MKVGIVGASGYVGGEVLRLLLSHPKVEVSMVTSRQHVGKFLHRAQPSLRGFTDLKFSELDYEKMSDSCDLVFTAVPHGTATDIVKALYDRGMKIIDLSADYRLHNPEDYGKWYGWEHPHPDYLAKSTFGVPELHREEIKKSQLVSCPGCMAVTSMLALNPLIKNDLIDTDHIIVDSKIGSSGAGAGAGTSHAMRAGVIRPYKPAKHRHTGEIEQELSQTAGKKIKVAMSPHAVDVVRGILCTNHTFLKKDIDEKDLWKIYRSEYSEERFIRLIRDKEGLHKFPDPKFLVGSNFCDIGFDLDRENNRLIALSASDNLMKGAAGSAIQNMNVMSGFDEFEGIMYSPLTPV

SEQ ID NO: 94570 - protein, 340 aa, Unknown
  Bacterial polypetide isolated from the Sargasso Sea
MPKLNALVAGSTGYIGTQLIKILVKHKHINIKYLCGNSSVGKSIVSYDKSLSKYKLPKIKKFNKDLLNDVDVIFTALPNGEAQDISKHLNNKNILIDLAADFRLEKASEYKKWYKQKHRAVKLIKKSIYSLPEINREELKKYNIISSPGCYPTSILLPLIPLFNKNFINFKNIIIDSKSGYSGAGRGVHKKYKNKNLYESLKAYGVGHHRHNSEIDQMLKKFTKKKIEVSFTPHLSPMFRGILSTIYLDLNKNVNQSKIISLLSKFYKKEKFIKISKSDTLISTNDVINTNNCLISVCKSKFKNKIIILSAIDNLIKGGAGQAVQSLNNKFNYPETTGLI

SEQ ID NO: 94571 - protein, 211 aa, Unknown
  Bacterial polypetide isolated from the Sargasso Sea
MISVGIIGASGYTGEELVKILQNHPNVEIKSLTSRTHVGKKISEVFELDKPINDVFKKPTTENLIGCDVVFFATPNGIAMDMAAELINKNIRIIDISADFRLKNPDTWEKWYGKNHSAKSLLSECVYGLPEIPSQKEKIKKALIVANPGCYPTSALLALLPIVKDLEKQKIILNSTSGISGAGRNLDSKKLFSEGEDNYQAYAVRSHRHYP

SEQ ID NO: 94572 - protein, 340 aa, Unknown
  Bacterial polypetide isolated from the Sargasso Sea
MSKLKVLIAGSTGYIGIQLITFLCKHKNVEIKYLCGKSSVGQNISYYSKKLKKKKLPKITKFKKELLYNVDLIFTALPNGEAQEISKYLLKKNVLIDLAADFRLKNPKDYFKWYKQKHKAIRNIKKSIYLLPELNKEKLNNYQIISCPGCYPTSILLPLIPLIKKKLINLNNIIIDSKSGYSGAGRGVHKKYANKNLYDSLRAYGVGFHRHNSEIQQEINKVTNKKIGFIFTPHLSPMFRGILSTLYISTKNSISINKIHNCLNSFFRKSEFVKIMKVNSLIGTNAVMNTNKCIISVCKTKHKNKFVILSSLDNLIKGGSGQAIQNMNLKFNFPSSRGLK

SEQ ID NO: 94573 - protein, 334 aa, Unknown
  Bacterial polypetide isolated from the Sargasso Sea
MKNVVILGASGFVGYELYNMCKVHPNINLSALSANKSAGELVDDKELEQSLRYKTIENIDFENVDFIFNCLPNIQMHKLIHNLNKNIRIIDLSIDFRLDEKEEYKNWYNFDHESFELNENFQFGLTEFNRESIKESKHVANPGCYATSVLVPLIELVSKDAIEQDDIIIDAKSGYSGAGKTKPKHELIKEVSENIATYGVGDHKHIAEINQELSKNTKNKVEVFFAANLIPVERGILSNIYVNLNNKTLNELYEILVERFKEEKFIEVLPIGDIPKTKDVVGTNNLVIGLKKGYKEKKICIVTALDNLLKGAAGQAIQNFNVMNDFDEGEGILM

SEQ ID NO: 94574 - protein, 319 aa, Unknown
  Bacterial polypetide isolated from the Sargasso Sea
MKNIAILGASGFVGNELISMCINHPEINIAGLSANRSAGEQINLEDIKKKNKSELYYKKIEEIDFSNIDFVFNCLPNEQFYKIIKDLPSELSVIDLSIDFRLNNKKDYLDWYKFKHDNPDLIEDFKYGLTELNRSQIKRAKHIANPGCYATSVLIPLTILVQEKAIRTDNIIIDAKSGYSGAGKTKGKHQLLKDVHENIKTYGVGDHKHIAEINQELTIHNDGKNVEVFFSANLIPVERGILSNIYISPVELSAEEIQKILYDKFKDEAFIKTLPLNEIPNTREVVGTNNLIIGVKKGYKNDTICIVSVLDNLVKGAAG

SEQ ID NO: 94575 - protein, 186 aa, Unknown
  Bacterial polypetide isolated from the Sargasso Sea
MIPLIPLIKKNLINNKTIIIDSKSGYSGAGRGVHKKYKDKNLYESLSAYGLANHRHNSEIQQELDLETGKKNRFHFTPHLTPMFRGILSTIYVDVKKGVSLRRVQSVLNNHYKSHKFVKISKTNTFLSTNDVINTNNCLISVCNSKYKDKIIILSVIDNLIKGGGGQAVQNMNYYFNFNESDGLNV

SEQ ID NO: 94576 - protein, 164 aa, Unknown
  Bacterial polypetide isolated from the Sargasso Sea
KSGISGAGRSTVENVLKTEIQENFRAYATSGHRHLPEIKQVLQESYGSSLEINFLPHLIPAMRGIYATIHVNFEEKVEENFRNLFYEFYKNSPNILLMGEDEVPEIIKVSNTNNCQIGVYSSAIDNQIVIISAIDNLVKGAAGQAMECYNLLTGNNQLKGLDNG

SEQ ID NO: 94577 - protein, 338 aa, Unknown
  Bacterial polypetide isolated from the Sargasso Sea
MDKLNVLIAGSTGYIGTQLVKLLCKHKNVKIKYLCGNTSVGKNISSYDKDLKKYKLPKIIKINYKLFKDVDVIFTSLPNGESQKIANKLLKNNIMIDLSADFRLTNAKIYNKYYGIKHISLNNLKKSIYGLTEINKKNLAKGKIIACPGCYPTSILLPLFPLIKKNLIDSKNIVIDSKSGFSGAGRGVHKKFKNKNLYGSTSAYGIASHRHNAEIQQELSYVKKNIEFTFTPHILPMFRGILSTIYLNYKSKSNLNKIYNELRRYYMKDKFIKILKNKALSTNDVINTNNCQISVCKSKDKKKLIILSSVDNLIKGGAGQAVQNLNFIYNFKFNEGLK

SEQ ID NO: 94578 - protein, 119 aa, Unknown
  Bacterial polypetide isolated from the Sargasso Sea
MGKKNKFHFIPHLTPMFRGILSTIYVDAKKGVSLRKIQGVLVNHYKAHKFVKISKTNTFLSTNDVINTNNCLISVCNSKYKDKIIILSAIDNLIKGGGGQAVQNMNYYFNYNESDGLNV

SEQ ID NO: 94579 - protein, 334 aa, Unknown
  Bacterial polypetide isolated from the Sargasso Sea
MKNVVILGASGFVGYELYNMCKSHPNINLSALSANKSAGELVDDKELDQSLRYQTIESIDFENIDFIFNCLPNMQMHKLIHNLNKNVRIIDLSIDFRLDEKEEYKKWYNFDHESFELNENFQFGLTEFNRESIKKSKHVSNPGCYATSVLVPLIELVSKEAIQQDDIIIDAKSGYSGAGKTKPKHELRKEVSENIATYGVGDHKHIAEINQELSKNTKNKVEVFFAANLIPVERGILSNIYVDLNNNTLNELHEILVERFKEEKFIKVLPIGDIPKTKDVVGTNNLVIGLKKGYKDNKICIVSALDNLLKGAAGQAIQNFNIMNNFDESEGILM

SEQ ID NO: 94580 - protein, 325 aa, Unknown
  Bacterial polypetide isolated from the Sargasso Sea
AVLGSTGYVGLELVYLLTKIENITIKFLGSENNKDNDILKFDSRIKKELPKIKHNSEFNIKNIDLLFLALPHKISQEFVKKYYNKIKIIDLSADFRLDDHEIYKNNYDTEHICPELLNKFVYGLYEINHNDIQKSNNIAVPGCYPTSVLLPLIPLLKDQIIKSSNIIIDSKSGYSGAGKNFNKKNLFKTNNDLNFYNYNTNNHRHICEINQELNKHSLEEIKFSFNPHILPIFRGLMSTIYCDLNKDISLQDVNFFLKNFYNDFDNIKVITDDERLDFNVVQNTNNCIIKCFKHYTKSKIIIVSVIDNLQKGAAGQAIQCMKAIL

SEQ ID NO: 94581 - protein, 195 aa, Unknown
  Bacterial polypetide isolated from the Sargasso Sea
MAIKTYIDGAEGTTGLQLKQRLLSHPEIQIISADVNKRKDLNYKLDQFSNSDLIFLCLPDNEALLITNKIHENFGNEKVIIDASSAHRVSDGWVYGFPELNSSQRQFLKNSNRITNPGCYPTGALSIIRPLVENNFIDNTSKLIINAVSGYTGGGKKLIDYFSNNKKDKFFYYSTFLNHKHTKEIKHYGLLEHSP

SEQ ID NO: 94582 - protein, 301 aa, Unknown
  Bacterial polypetide isolated from the Sargasso Sea
MGKHVKFYDKSLSKYKLPKILKFNKKLLKDVQVIFTALPNGEAQDISKHLSKNHTLIDLAADFRLEKASDYLKWYKQKHRATNLIKKSIYLLPEINRKEIKKYNIISCPGCYPTSILLPLFPLFKKNLIKFNNIIIDSKSGYSGAGRGVHKKYKDKNLYESLSAYGVGFHRHNSEIDQMLRKFTKKKFQFNFTPHLSPMFRGILSTIYVELENNISQTKLLKTLVSFYKNESFVKILKFDTLLSTNDVINTNNCYISVCKSKYSNKIIILSAIDNLIKGGAGQAIQNLNNKFNFPEKTGLK

SEQ ID NO: 94583 - protein, 315 aa, Unknown
  Bacterial polypetide isolated from the Sargasso Sea
MSHPTVYIDGDQGTTGLLIHERLRGRDDLQLVTLPDAERKDPVRRAEAINAADIAILCLPDAAAREAVGFIRNPAVRVIDASSAHRTQPDWVYGFPEMANGHAQTIAHARRVTNPGCYPTGAIALLRPLQQAGLLPRDYPVSIHAVSGYSGGGRAAVDAFESNDASQAKPLQVYGLALAHKHVPEIQLHAGLTNRPMFVPAYGAYRQGIVLTVPIELRLLPAGVTGEQLHACLAHHYAGARHVDVTPLAATQAITHLDPQALNGTNDLRLGVFVNADHGQVLLSAVFDNLGKGASGAAVQNLDLMLGAVEVAKAA

SEQ ID NO: 94584 - protein, 281 aa, Unknown
  Bacterial polypetide isolated from the Sargasso Sea
PNDSFNTDDSDYVFLALPHAVSNKFVKKYFNKINIIDLSADFRLDNFDVYKENYGNEHECKEHLNNFIYGLAEINREKIENSKNIAIPGCYPTSILLPLIPLIKNNLINTKNIIIDSKSGYSGAGKKFDVNKMKSKNDYNFYNYNTNNHRHIAEIKQELNKYSSENEVKFSFNPHILPNFRGMISTIYCDLTNSIKKTDVINLFKELQKINPFLKYIDNDETLDFFSVQNSNYCKIKIFNHHSEDKIIIVSAIDNLIKGAAGQAVQCFNISEDIEETVSLV

SEQ ID NO: 94585 - protein, 333 aa, Unknown
  Bacterial polypetide isolated from the Sargasso Sea
MKKKNIGIVGGSGYAGEELLSLISKHQYMNILAVSSREFEGQPISSVFKSFIDPELTFLNPTDKKFFECDVVFFCTPHGSSMSMAKKFLDSEIKIIDLSADFRIKDKDTWEQWYGMKHEQPELIEQSVYGLVDIYANHIKKADLVAVPGCYPTASLLGISPLLNKEINISNIVIDAKSGMTGAGRSTVEGGMKKEMHENLRAYGVLGHRHSPEIIQEVNKASGKEINLSFIPHLIPMMRGIYASIYIHTDSKALNNDIFQEFYKESPSVKVIEDIPKISDVVNTNKCEISLFNTSVDGQYLVITAIDNLLKGASGQAIQCFNLMFGLELEESF

SEQ ID NO: 94586 - protein, 241 aa, Unknown
  Bacterial polypetide isolated from the Sargasso Sea
ADFRLKDVNTWEQWYNTPHTQKDLLSESIYGLTELNLRNLKSAKIVAVPGCYPTASILGVLPLLKSEFNIESIIIDAKSGISGAGRNSVKNGLSNDIKENFRAYGLEGHRHLPEIREIVELVSGYPIKLNFLPHLIPAMRGIYSTIYLQLKETQGLNVQDLYESFYKDSPNVRIMKPSNAPDIKSVAHTNNCDISVNYSNIENQVIVISSIDNLLKGAAGQAVECYNLMKGFNQSAGLNNG

SEQ ID NO: 94587 - protein, 348 aa, Unknown
  Bacterial polypetide isolated from the Sargasso Sea
MKVGIVGASGYVGGEVLRLLLSHPKVEVSMVTSRQHVGKFLHRAQPSLRGFTDLKFSELDYEKMSDNCDLVFTAVPHGTATDIVKALYDRGMKIIDLSADYRLHNPEDYGKWYGWEHPHPDYLEKSTFGVPELHREEIKKSQLVSCPGCMAVTSMLALNPLIKNDLIDTDHIIVDSKIGSSGAGAGAGTSHAMRAGVIRPYKPAKHRHTGEIEQELSQTAGKKIKVSMSPHAVDVVRGILCTNHTFLKKDVDEKELWKIYRSEYSEERFIRLIRDKEGLHKFPDPKFLVGSNFCDIGFDLDRENNRLIALSASDNLMKGAAGSAIQNMNVMAGFDEFEGIMYSPLTPV

SEQ ID NO: 94588 - protein, 176 aa, Unknown
  Bacterial polypetide isolated from the Sargasso Sea
KKTINLKNIIIDSKSGYSGAGRGVHKKFKNKNLYESLSAYGVGFHRHNSEIDQELKNNTSLKINFTFTPHIIPMFRGILSTIYLDLKPGNTLNKVQNILKKFHKKNKFVKIKSVNSFLSTNDVMNTNYCCISVCKTKFKDKIIILSVIDNLIKGGAGQAVQNMNLKFGFKNSEGLI

SEQ ID NO: 94589 - protein, 342 aa, Unknown
  Bacterial polypetide isolated from the Sargasso Sea
MKKKIRVAVLGSTGYVGMELVKILSNHSYVDINFLGSETVHDSYLNNIDNTQEYNQLPLLRPNNSFNTEDSDYVFLALPHAISNKYVKKYFNKINIIDLSADFRLDNFDVYKENYGNEHECKEYLNNFIYGLAEINRDKIVNSKNIAVPGCYPTSILLPLIPLIKNKLIDTKNIIIDSKSGYSGAGKKFDFNKMKSKNDYNFYNYNTNNHRHIAEIKQELNKHSTENEVRFSFNPHILPNFRGMISTIYCNLNNSIKKTDIINLFNDLQKINPFIKYIDNDETLDFFSVQNSNYCKIKIFNHHSEDKIIIVSAIDNLIKGAAGQAVQCFNIAENIQETVSLV

SEQ ID NO: 94590 - protein, 251 aa, Unknown
  Bacterial polypetide isolated from the Sargasso Sea
LKKNILIDLSADFRLKSAKEYLKWYKIKHNSKNNIKNSIYALPEISKKKLKNYKIISCPGCYPTSVLLPLIPLVKNNLIETSNIIIDSKSGYSGGGRGVHKKYSKKKLYESLSAYGVGFHRHNSEIQQELNNYSKNKIEFTFTPHLSPMFRGILSTIYLDLKKNISINYVNSKLEKFYKNDAFVKILPINSFISTNDVINTNYCYVSVCKIKNKNRFIILSAIDNLIKGGAGQAVQNLNNYFGYNVKKGLV

SEQ ID NO: 94591 - protein, 304 aa, Unknown
  Bacterial polypetide isolated from the Sargasso Sea
MNQLNVLVAGSTGYIGVQLVKLLCNHKYIKIKYLCGNSSIGKNIYAYDKTLKKYNLPKIVKVNYRYFKEVDVIFTALPNGQSQIIGNNLNKKNILIDLSADFRIKDVNVYKKFYKIKHKSKKLLIDSVYGLSELYEQEIKNKKIIACPGCYPTSIITPLFPLFKKKYLKINKVIIDSKSGYSGAGRSILKKEKKMNLFNSLTAYGIPNHRHNAEIYQELSFISKKIKFNFTPHIIPMFRGILSTIYVEKKNNISTEKILNFLKRFYKKNKFIRICKKNMLIGTKNVINTNYCDISVCETKMIKV

SEQ ID NO: 94592 - protein, 321 aa, Unknown
  Bacterial polypetide isolated from the Sargasso Sea
MKVGIVGASGYVGGEVLRLLLSHPKVEVSMVTSRQHVGKFLHRAQPSLRGFTDLKFSELDYEKMSDSCDLVFTAVPHGTATDIVKALYDRGMKIIDLSADYRLHNPEDYGKWYGWEHPHPDYLAKSTFGVPELHREEIKKSQLVSCPGCMAVTSMLALNPLIKNDLIDTDHIIVDSKIGSSGAGAGAGTSHAMRAGVIRPYKPAKHRHTGEIEQELSQTAGKKIKVAMSPHAVDVVRGILCTNHTFLKKDIDEKDLWKIYRSEYSEERFIRLIRDKEGLHKFPDPKFLVGSNFCDIGFDLDRENNRLIALSASDNLMKGAA

SEQ ID NO: 94593 - protein, 161 aa, Unknown
  Bacterial polypetide isolated from the Sargasso Sea
MSLKIGIIGATGITGLELVNILQNHPSVSEITPFSFSSAGKSLNSLDERISQEINKCLSFEAINFSSFDCFFFCTENGVSMSFYEKILKSECKVIDLSADFRIKNTNTWEKFYNLKHCVSNHANVTVYGLSEFYRNEIQSSQIIANPGCYPTAALLPLIPL

SEQ ID NO: 94594 - protein, 173 aa, Unknown
  Bacterial polypetide isolated from the Sargasso Sea
MSLNVCIFGVSGYTGSKLLYYLDKHKQVKINGVFGNSTVGIKLGDLFKNLNSSNKIKISNYEDFDFSKTDLIFSCLPNGKLQKEIIKNLNPKISIIDLSGDFRLKSKLEYQKFYNIPHRSHPFKEKFCYGLSEVYRRKINKSKFISNPGCYPTSILIPLIPLIKEKKLRIQDI

SEQ ID NO: 94595 - protein, 83 aa, Unknown
  Bacterial polypetide isolated from the Sargasso Sea
KIIYEDFYENHPFTFLSKNDMNLKEVINTNNCHLKIEFHENIIHITTVLDNLLKGASGQAVQNLNIIYGYEESLGLNFKGSIY

SEQ ID NO: 94596 - protein, 256 aa, Unknown
  Bacterial polypetide isolated from the Sargasso Sea
MSKKVSVAILGSTGFVGLELIKLLSKHPKVELVIFGTENNPNNLSTQLNEKFDYSSIDTVFLALPHGVSHKYVKSFYNKVQIIDLSADFRLDDIETYKNNYDDKHSAPNLLSEFVYGLPEINQKILINKNNIAVPGCYPTSVLIPLIPLLKNKIISSKNIIIDSKSGYSGAGKKFDLNNIKNSEDFNFFNYNTNNHRHICEIRQELKKIITSSEVLFSFNPHILPNFRGMMFTMYCDLLSGMTKNDVISCFKDMAK

SEQ ID NO: 94597 - protein, 308 aa, Unknown
  Bacterial polypetide isolated from the Sargasso Sea
MATKDINVGVIGASGYTGSDLIRMLSGHPKIDLKYVSANNHAGQRVGEIYPYLNGKVDLFLEKWEDINWSVVDVIFSCLPHGIFHEIFPMLPAEKIIIDLSADFRLSNAKDYAEWYNFEHKSVETINHFVYGLTELNRSNIKKSEKVACPGCYPTATLLALYPLIADDLIDINHITIDAKSGISGAGRSPKRDLLFSEISESFRPYSVTGHRHIIEIEQQLMLHSKKDIRINFIPHLVPMNRGELVTSHVRLSKDIKLNEIIEIYQSKYRNDNFINIMSNGNVPNTINVRGTNNCDIAVIPGRVDKTL

SEQ ID NO: 94598 - protein, 128 aa, Unknown
  Bacterial polypetide isolated from the Sargasso Sea
MYKIAILGASGYTGAELIRIITNHPEMEIEVLAAHSKAGLRVDNVFPHLRSLELPTLIKIEDVDYSNIDLCICALPHKTSQEVIKRIPTDLRIIDLSADFRLQNADDYERWYGNAHQALESKMRQFTA

SEQ ID NO: 94599 - protein, 233 aa, Unknown
  Bacterial polypetide isolated from the Sargasso Sea
RLNQKSHNKWYESKRNKNTFKDFHYILPEINKAKINKNKNISNPGCYATSILLGLSPINKILKKSENIIVDTKSGISGAGKSGKLEHSFTECNENLSTYNVGSHRHAPEIEQLLNREFKKNVNVIMVPHLLPIKRGIMSNIYILRNTTFNEKNIINEFKKYYSKSSFVKILDNRLPEIKEVQNTNYCYIGIKVLPNNKSLLISCVIDNLLKGAASQAIQNMNLLFGLEENLGL

SEQ ID NO: 94600 - protein, 137 aa, Unknown
  Bacterial polypetide isolated from the Sargasso Sea
FEVSLQAYGVLGHRHTPEIEAYLGTPVIFTPHLGNFKRGILATVTVKVKAGTTSAQLEKAYTDAYADKPIVRLRKSFPKIDDVAHTPFVDLHWKLDEASGYAVVTAAIDNVMKGAASQAIQCLNIMTKQPIETGLVL

SEQ ID NO: 94601 - protein, 204 aa, Unknown
  Bacterial polypetide isolated from the Sargasso Sea
LIKKFPIVSCPGCYPTSVLIPLIPLIKKNLINNQTIIIDSKSGYSGAGRGVHKKYKDKNLYESLSAYGLANHRHNSEIQQELDLKTHKKNKFIFTPHLTPMFRGILSTIYVDLKKGVNINKINNVLNVQYKNQKFIKISKLNTFLSTNDVINTNNCLISVCKSKYKDKIIILSAIDNLIKGGGGQAVQNMNNYYGFNQSEGLNV

SEQ ID NO: 94602 - protein, 172 aa, Unknown
  Bacterial polypetide isolated from the Sargasso Sea
NTKGIIIDSKSGYSGAGKNLKKKFTHKNIFSAIKTYGISNHRHTAEIDQEFKKSTKSKILYNFTPNLIPTFRGMLSTIYVEPKGNVTIRKIHNELRKFHKKNHFINILPINKNLGTENVLNTNLCEISVCKLKGSKKIMILSAIDNLIKGASGQAVQNMNLLYNLNEKIGLK

SEQ ID NO: 94603 - protein, 91 aa, Unknown
  Bacterial polypetide isolated from the Sargasso Sea
FNRRINESEIEERFIAFAENKPFIQIMPKGQFPDLRSTVHSNRCAIGWASDSSGSQWLVQTSIDNLVKGASGQAIQNMNLMFGFTETSGLT

SEQ ID NO: 94604 - protein, 334 aa, Unknown
  Bacterial polypetide isolated from the Sargasso Sea
FCGATGYIGLQLTKLLCKHKHVNIKYLCGSSSVGKKISFYDKELKKYKLPKISKFNKKNLLDVDIIFTALPNGEAQLISKFLNKNNVLIDLAADFRLNTKNEYEKWYKIKHNASNLIKQSIYSIPEISGTLLKNFKIISCPGCYPTTILIPLIPLIKKNLINNKTIIIDSKSGYSGAGRGIHKKYKNKNLYESLSAYGLANHRHNSEIQQELDLKTGKKNKFHFTPHLTPMFRGILSTIYVDLKKNVSLNKIQSVLTNHYKSHKFVNISKTNTFLSTNDVINTNNCFISVCKSKYKDKIIILSAIDNLIKGGGGQAIQNMNYYFNFNESDGLNV

SEQ ID NO: 94605 - protein, 309 aa, Unknown
  Bacterial polypetide isolated from the Sargasso Sea
MSYKKIGLIGGRGYVGQEIISLLNNHNQLNIVSVYSSSKAGQPVNIDSLGEMTYQDLALDKIDLGDEEAFILALPNMESQRYVDLITNYNSEAIIIDLSSDHRFDEDWEYRIPELSDPVSSNKISNPGCYASAMQFMIAPILNILVGPVNLFGVSGYSGAGASPNQRNDRELLNDNILPYSLVNHLHEREVQTHSYPNIFFTPHVGNFFRGIMMTGNFFLTKQSDPEEIINLFIDFYQGMNLISIQESPPNLQKVQNTSSVIIGGFEVDQATNRLTFCCALDNLLKGAATQAVQNLNSAFGWDDNAGII

SEQ ID NO: 94606 - protein, 339 aa, Unknown
  Bacterial polypetide isolated from the Sargasso Sea
MPKLNALVAGSTGYIGVQLIKLLTKHKYINIKYLCGNSSVGKNVSYYDKSLSKKKLPKIVKFNQKLLNGVDVVFTALPNGEAQDIAKQLNHNITLIDLAADFRLEKVNDYFKWYKQKHRAPNLQKKSIYCLPEINRDELKNHNIISCPGCYPTSILLPLVPLFKKKLVKLDNIIIDSKSGYSGAGRGVHKKYRDKNLYESLSAYGIGFHRHNSEIHQFLRKFTNKNFQFSFTPHLSPMFRGILSTIYLDLEKNVNQSKIIKTLKKSYKSENFVKILDSDKLLSTNDVINTNDCFITVCKTKYKNKIIIISAIDNLIKGGAGQAVQNLNNKFNFPEKTAL

SEQ ID NO: 94607 - protein, 281 aa, Unknown
  Bacterial polypetide isolated from the Sargasso Sea
MLKKNVLICGATGYIGLQLTKLLCKHKHINIKYLCGSSSVGKKIDFYDKDLKKFKLPKISKFNKKYLSDVDIIFTALPNGEAQSISKYLNKNNLLIDLAADFRLNTKNEYEKWYKIKHSASNLIKDSIYSIPEISGKLIRKFKIISCPGCYPTTVLIPLIPLIKRNLINNKTIIIDSKSGYSGAGRGVHKKYKNKNLYESLSAYGLANHRHNSEIQQELDLKTGKKNKFHFTPHLTPMFRGILSTIYVDIKKGTSIRKIQNVLINHYKSHKFVKISKTNTF

SEQ ID NO: 94608 - protein, 312 aa, Unknown
  Bacterial polypetide isolated from the Sargasso Sea
MTKVFIDGQSGTTGLQIFDMLRSRSDLEIITIPETQRKIPEARKELLNSSDITILCLPDDAAIEAAKFRESETRIIDASTAHRIDDQWVYGLPELSVTHRQQIRDAELVSNPGCYPQGFILLVKPLIDAGILERQAALSCNAVSGYSGGGRQMIEEFEIGDIAKKQLLAVNDYSLTLNHKHVPEMRKHSGLTTNPLFLPTVANYYKGMIVRIPIHLGTLAESKGDTIVECLKERYRKCQFIRVHDYNNVDLLEKGRLNPIGCNDTNFMDLMCFGNGSQLVLLARYDNLGKGAAGAAVQNLNIMLGIEEEKGL

SEQ ID NO: 94609 - protein, 332 aa, Unknown
  Bacterial polypetide isolated from the Sargasso Sea
MPKLNVLVAGSTGYIGIQLIKLLNKHKYVKIKYLCGNTSVGKKISYYDKTIGLKRLPKIVKFNKKFLNEIDVVFTALPNGEAQVISKYLNKQNVLIDLAADFRLQKALDYKKWYKKDHKAKYNIKNSIYSLPEITGKKVQDYKIISCPGCYPTSILLPLIPLLKSRLIKNYNIIIDSKSGYSGAGRGVHKKYKNKNLYESLSAYGVASHRHNSEIEEMIKRCVKGNIQFDFTPHLSPMFRGILSTIYVELNKTSSASKILNTLKKYYKKANFVKILDKDKLISTNDVINTNNCNISVCKSKNKNKIIILSAIDNLIKGGAGQAIQNMNMKLI

SEQ ID NO: 94610 - protein, 291 aa, Unknown
  Bacterial polypetide isolated from the Sargasso Sea
KSIKYNLPLITKITKSRINECDIIFSALPNGEAQSISKNLKKHNVLIDLSGDFRLKSSKEYLKWYKKKHSAVNNIKKSIYNLPELSNLKLKNYQIISCPGCYPTSILIPLVPLIMKKIIKTQNIIIDSKSGYSGAGRGVHKKFKDKNLYESLSAYGITLHRHNSEIMQELNFYSKRNIKFTFTPHLTPMFRGILSTIYIDVNKNINQNKVLNILKQYYKGKKFIKIANKDTFLSTNDVIGTNKCIISVCKSKYKDKIIILSAIDNLIKGGSGQAVQNMNLRFGLKENEGIQ

SEQ ID NO: 94611 - protein, 323 aa, Unknown
  Bacterial polypetide isolated from the Sargasso Sea
GTQLVKLLCKHKNIKIKYLCGNTSVGKNISSYDKDLKKYKLPKIIKINYKLFKDVDVIFTSLPNGESQKIANKLLKKNIMIDLSADFRLKNPKIYNKYYGIKHKSLDNLKKSVYGLSEINKKNLSKAKIIACPGCYPTSILLPLFPLIKKNLIDFKNIIIDSKSGFSGAGRGVHKKFKNKNLYGSTSAYGIGSHRHNAEIQQELSYIKKSIEFTFTPHILPMFRGILSTIYLNYKSKANLNKIYNELRRFYMNHKFIKILKNKALTTNDVINTNNCQISVCKSKDKKKLIILSSIDNLIKGGAGQAIQNLNLIFNFRLNEGLK

SEQ ID NO: 94612 - protein, 311 aa, Unknown
  Bacterial polypetide isolated from the Sargasso Sea
MSSPVVFIDGDQGTTGLQIHERLRNRTDLKLLTLPAAERKDPRRRAEAINACDIAILCLPDAAARDAVDAIVNPAVRVIDASSAHRTQPGWTYGFPEMAAGQAERIANARRVTNPGCYPTGAIGLLRPLLQAGLIPDNYPVSIHAVSGYSGRGRAGVEEHEGHGAVNAPSYVVYGLELAHKHTPEIQQHAGLAQRLIFVPAYGSFRQGIVLTVPLDLRLLAPGVDGATLHACLARHYAEAAHVHVLPLHESCALKQLDPQALNGTNDMRLSVFPNMEHGHVLLSAVFDNLGKGASGAAVQNLNLMLAQQSR

SEQ ID NO: 94613 - protein, 311 aa, Unknown
  Bacterial polypetide isolated from the Sargasso Sea
NIENLFLIASKNSEGKKINYNGKEHTVTDLEKFDFSNVKIAFFAAGSSIAEKWALAAAEKTIVIDNSKYFRKDPDIPLIVPEVNPKKLADVKNKNIIANANCSVIPVVVALKPLHDLYNINRIVASTYQSVSGAGKSAMDELLSQTKDYFQNKEIASKNFTKQIAFNAIPHIDSFLENGYTKEEQKTTDEIKKILDKKIKVTSTCVRIPVLVSHCISTNVEFNKKCDLNEIKKVLSSSPGCKVVDDREDGGYITPIEAEDKFETFISRIRLDESRENTINLWIVSDNLVKGAALNAVQIAESLITNDFYGK

SEQ ID NO: 94614 - protein, 197 aa, Unknown
  Bacterial polypetide isolated from the Sargasso Sea
MIKVGIVGGTGYTGVELLRLLAQHPQAQVEVITSRSEAGIRVDEMYPNLRGHYDNLAFSVPDVATLGACDVVFFATPHGVAHALAGELLAAGTKVIDLSADFRLQDADEWAKWYGQPHGAPDLLPEAVYGLPEVNRDAIKQARLIAVPGCYPTAAQLALIPLLEAGLADTTQVIADCKSGVSGAGRGASVGSLFSEA

SEQ ID NO: 94615 - protein, 220 aa, Unknown
  Bacterial polypetide isolated from the Sargasso Sea
MKNIAIIGASGYTGAQLTALVHAESELSIQGLYVSENSLDKGRALADLYPVYSHIDLALSPLTEAAKAKIVAEADAVVLATEHSVSLHLAAWFYNQGLAVFDLSGAYRFSDVAQYPKWYGFEHEYPEVLAKAVYGLAEWNAKEVAATKMIAVPGCYPTASLTALKPLKNLLTSAYPVINAVSGVTGAGRKAQLHTSFCEVSLTPYGVLGHRHQPEIATQL

SEQ ID NO: 94616 - protein, 272 aa, Unknown
  Bacterial polypetide isolated from the Sargasso Sea
EILFTSLPTGYSQVIAKKLFKYKNLKIIDLSADFRLSNPKKFKEFYLTNHKAPNLQKYSIYSVSEFVKQKIKNYKIISCPGCYPTSVQIPLIPLIKSGIIENKDIIIDSKSGYSGAGKNLKKKFSHKNLYSSIYAYGVSKHRHTSEIDQEFSKITKNKINYVFTPHLIPTFRGMLSSIYVKPKKNKTIRNIYNELTKFHKKNYFIKIHPINKNFGTENVLNTNFCEISVCKVRNKNRVLILSAIDNLVKGAAGQAIQNMNIIYDFKENLGLK

SEQ ID NO: 94617 - protein, 168 aa, Unknown
  Bacterial polypetide isolated from the Sargasso Sea
ITIDSKSGYSGAGKGLKNKFKHKNLFNSTFAYNVKNHRHMIEIDQEFYKITKNKVNYTLNPHLLPTFRGILSSIYVNTKGKVKAEKIRNELKRFYKKSKFIKILKLNSELGSGDVLNTNNCEISVCETRIKNKLIIFSAIDNLVKGASGQAVQNMNLLYKFSETLGLK

SEQ ID NO: 94618 - protein, 194 aa, Unknown
  Bacterial polypetide isolated from the Sargasso Sea
MRVAVLGASGYTGAELIRLLSCHQKVDLTLLTSERYAGKDIGQVFPQLGRLGLPTLCKIEEVNWEKTDIDVVFCALPHGTTQDVVSGLLVPEEKWSENGCHYLRYKNNNFIWGEGIKIIDLSADFRLANFDVYEKWYGQPHRAQRLQHVALYGLTELCRDKLLISNLIACPGCYPTTSLLPAYTINRCENNYVG

SEQ ID NO: 94619 - protein, 230 aa, Unknown
  Bacterial polypetide isolated from the Sargasso Sea
DSTHPELLSQTVYGLSELHREKIKSAQIVANPGCYPTSVILALAPLMKTDWVDLTSIISDSKSGVSGAGRKLSTTTHFSEVNEGVTPYCLAGHRHTPEMEQELAGLARKPIKISFSPHLIPMSRGMLSTVYINLKTKLNEDDLIEHYQKFYSNEYFVRILSKGKLASTHAVSHSNFCDIGIKIDTRVGRLIITSALDNLVKGASGQAIQNMNIMQGFEEKLGLQSPGIFP

SEQ ID NO: 94620 - protein, 265 aa, Unknown
  Bacterial polypetide isolated from the Sargasso Sea
PNGGAQKIIKKTIKYKNLKFIDLSADFRLNDTNNYRKWYKKKHLAKNLISDSIYSIPELVNKDIKKYKIISNPGCYPTSIQLALIPLLKKRLFKPKNIIIDSKSGFSGAGKNFKKKFKFKNIDNSVFAYGIKKHRHMSEMDQEFKKNTKSKVLYTFNPHVIPTFRGILSCIYIEKNRGQSIKKLHSELVKFYKNNQFIKIMKLNNPISTGNVIDTNNCEISVCETRDKKKFVIFSAIDNLIKGASGQAIQNMNIIYGFRETLGLI

SEQ ID NO: 94621 - protein, 273 aa, Unknown
  Bacterial polypetide isolated from the Sargasso Sea
IKKNLPKISSIKKIKWKELDLVFLSLPNGEAQKIIKKIYYLNKKLKFIDLSADFRIRNIKTYKKYYKINHTAPSLILDSLYSISEFNKNKIKNYRIIANPGCYPTSVLIPLIPLIKKNLIKNNDITIDSKSGYSGAGKNLNKKFKHKNLYKSTFAYNVRNHRHVSEMNQEIMKQTKKKILYSFNPHLIPTFRGILSSIYIKIPKSVTANALRTELVKYYKNSSFIKILNLNKQIGSGNVLNTNNCEISVCNSMVRDKVIIFSAIDNLVKGAAG

SEQ ID NO: 94622 - protein, 282 aa, Unknown
  Bacterial polypetide isolated from the Sargasso Sea
FAVLSLPNGLACQLAPQLLERGVRVVDLSADFRYRSLDQWLQVYAKEAGSLNRKDAELCSNAVYGLPEWNGPAIAEANLVAAPGCFPTASLLPLLPFLKQGLIETNGIVIDAKTGTSGGGRVPKEAMLLAEASESIAPYGVIGHRHTSEIEQMATEVAGQEVRLQFTPHLVPMVRGLLSTVYARLRDPGLTAEDCTTVLDAIYRHHPCVEVLPVGTYPATKWARHTNRALLSVQVDTRTGQLVLMSAIDNLIKGQAGQGVQCLNLMAGLAPETGLPLQSFYP

SEQ ID NO: 94623 - protein, 218 aa, Unknown
  Bacterial polypetide isolated from the Sargasso Sea
MSGSIYGLPEIPGQREKIKKASIVANPGCYPTSALLALMPIVKNLKKQKIIVNATSGISGAGRNLDSRKLFPEGEDNYQAYAVRSHRHYPEILQTLSDDNDDLDVLFVPHLSSMTRGIYSTLYLKHDFEEIEEVVQGYKDFYGKSSFIEITDPEAFPKLSEVTMTNKCKISLHKVDSAHGDVNLVILSAMDNLVKGASGQAVQNMNIMFDMDEKHSLV

SEQ ID NO: 94624 - protein, 248 aa, Unknown
  Bacterial polypetide isolated from the Sargasso Sea
IKIIDLSADFRLSNISEYKKYYGKKHKAKNLIKKSIYSISEFVKKDIKKYEIISCPGCYPTSIQLPLIPLIKKRFIKSNGIIIDSKSGYSGAGKSLKKKFNHKNIYSSIHAYGIFKHRHTSEIDQEFKKVSKKKINYVFVPNLIPTFRGMLSSIYIDLSYGITAKKIFLELKKYHKKNFFIRVLPFNKDLGTENVLNTNFCEISVCKLKDKRKVLILSAIDNLVKGAAGQAIQNMNILYGLKENLGLK

SEQ ID NO: 94625 - protein, 234 aa, Unknown
  Bacterial polypetide isolated from the Sargasso Sea
LHYIQNFIKKNIWAKDLIHKSIYSVSEFVKDKIRNYKIISCPGCYPTSIQLPLLPLLKKNIINTKNIIIDSKSGYSGAGKNFKIKFKHKNIFSSIHAYGIYKHRHTSEIDQEIKKVTKSKVNYIFVPHLIPTFRGMLTSIYLNLKPGISAKKIYNELKQYHKKNYFVKMTPFNKNLGTENVLNTNFCEISVCKLRVQNKIVILSAIDNLVKGAAGQAIQNMNIIYKFNENLGLK

SEQ ID NO: 94626 - protein, 287 aa, Unknown
  Bacterial polypetide isolated from the Sargasso Sea
AACSDFAVLSLPNGLACQLAPQLLERGVRVVDLSADFRYRSLEQWLQVYAKEAGSLNRQDAELCSSAVYGLPEWNGPAIADAKLVAAPGCFPTASLLPLLPFLKQGLIETSGIIIDAKTGTSGGGRVPKEAMLLAEASESIAPYGVIGHRHTSEIEQMAMEVAGQEVRLQFTPHLVPMVRGLLSTVYARLRDPGLTAEDCTTVLEAIYRHHPCVQVLPVGTYPATKWARHTNRALLSVQVDTRTGQLVLMSAIDNLIKGQAGQGVQCLNLMAGLAPETGLPLQSFYP

SEQ ID NO: 94627 - protein, 116 aa, Unknown
  Bacterial polypetide isolated from the Sargasso Sea
FVPHLVPMIRGIEATLYAELSDAADFDRLQALYEERYRNEPFVDVMPFGSHPETRSVRGANSCRMALHRQEQSNIVIVTSVIDNLVKGAAGQAVQNMNIMFGLDETLGLQAPALLP

SEQ ID NO: 94628 - protein, 224 aa, Unknown
  Bacterial polypetide isolated from the Sargasso Sea
MISVGIVGASGYTGEELARLLANHPNVELKSLTSKTHEGKEINTIFKLDEKIPGKFKSPQVENLNDCDVVFFATPNGVAMNMADALIEQGIKVIDISADFRLTSAEQFTEWYEMKHSSPDLLHESVYGLPEMRGQREKIQHAQLVANPGCYPTSILLGVLPIIESLPEQTIIVDAKSGISGAGRNLNSKKLFSQGEENFQAYAVKNHRHYPETLNILQNYQSNL

SEQ ID NO: 94629 - protein, 234 aa, Unknown
  Bacterial polypetide isolated from the Sargasso Sea
MELHKDVRNVGIIGASGFAGEELIRFLDSHSYSSILAVSSRELRGQTTSNFVNGTNLTFVDPDDDIFYECDVVFFATPHGISMQKAKSFLERGIKVIDLSADFRLKNPEVWKKWYTSNHEDLTGLKSAVYGLTELNADLIKDANLIAVPGCYPTASILGLAPIIKNNTNIDSIIIDAKSGISGAGRSSVENNLRDDIKENFKAYATSGHRHLPEIEQILEEMCGSSLRIISYLI

SEQ ID NO: 94630 - protein, 286 aa, Unknown
  Bacterial polypetide isolated from the Sargasso Sea
YTGVELLRLLSQRDDIKLCCVTSRELDGQTVCSRFPNLRGKVDLRFSNPDSSDLKNCEVVFFATPHAVAMHSVPELIEYGTKVIDLSADFRINDIKIWETWYQTSHTCPELVDMAVYGLPEVNRDDIKQAQLIAVPGCYPTAIQLGFLPLLEMNVVDTMSLIADAKSGVSGAGRKAADPYILCEATESLKAYGMAGHRHHPEICQQLNIASNSKVGLTFIPHLAPMSRGIFATLYAKPTGDESLSGHVLREIYQKRYAEEPFVDILETGEAPATRDVRGANNCKIS

SEQ ID NO: 94631 - protein, 246 aa, Unknown
  Bacterial polypetide isolated from the Sargasso Sea
MYNVSIIGASGYTGAQLVELVQQHPELTLSGTYVSSNSADANKPIGELHGKLAHVDATLIPISDSILESLAHDVDFIFLATPHEASHDWMPLLTSGSAKVLDLSGAFRLKDTEVFEAFYGFSHKQQASLDNAVYGLAEWYSSSIEQAKIIAVPGCYPTASLSALKPLGENNLLDSAVRPVINAVSGVSGAGRKASLTTSFFEVSLHAYGVLGHRHTPEIEAYLGTPVIFTPHLGNFKRGILATVTV

SEQ ID NO: 94632 - protein, 122 aa, Unknown
  Bacterial polypetide isolated from the Sargasso Sea
LKNILKKDISFTFNPHLLPTFRGILSSIYVKLETGKNIKMLRNELKKFYKNSKFIKIAKINSPLGSGNVLNTNRCEISVCETRVKNKILILSAIDNLVKGASGQAVQNMNLMFKYPETLGLK

SEQ ID NO: 94633 - protein, 75 aa, Unknown
  Bacterial polypetide isolated from the Sargasso Sea
VLGDNPFIQIMPKGQFPDLRSTVHSNRCAIGWASDSSGSQWLVQTSIDNLVKGASGQAVQNMNLMFGFTETSGLT

SEQ ID NO: 94634 - protein, 241 aa, Unknown
  Bacterial polypetide isolated from the Sargasso Sea
MAGGGQGQGRVAVVGASGYGGLQTLRLLQGHPSLTVTFLGGERSAGRRWSSICSFLPLPDDPVVQSADPDRIAEAADYAVLSLPNGLACQLAPELLQRGVRVVDLSADFRYRSLEQWSQVYSQEASRLSRQDSDLCREAVYGLPEWHGPAIAEAMLVAAPGCFPTASLMPLLPFLKQGLIETDGIIIDAKTGTSGGGRVPKEAMLLAEASESIAPYGVIGHRHTSEIEQMAQEVAGQDVRL

SEQ ID NO: 94635 - protein, 278 aa, Unknown
  Bacterial polypetide isolated from the Sargasso Sea
AVMLARNPYFELSYAFASAGRAAEPFSNLYPRYQNVVDIQVQPWTDDLVEELAGKLDVAFLALPHEVSEAVTPLLLAKGIAVFDLSGAFRLKDPALYPKYYGYEHQHPELLGQAVYSLMEWLDKPLPQLVSVPGCYPTACSLALLPLLKAGLVADGCIPVINATSGVSGAGRKAALNTSFCEVGLNAYGFFKHRHRPEIEQNLGRKVVFTPHLGNFKRGILATSVVTLKSGVTAEQVSAVFQQAYAAKPLVRLVKHSPNVADVAGTPFCDIHCNRMVS

SEQ ID NO: 94636 - protein, 154 aa, Unknown
  Bacterial polypetide isolated from the Sargasso Sea
SAYPVINAVSGVTGAGRKAQLHTSFCEVSLTPYGVLGHRHQPEIATQLGQEVIFTPHLGNFKRGILATITVQLKPGTTTADVAAAYSVYDQAPLVTVKQNQFPKVDDVVLTPNCHLGWKFDENSGYLVVASAIDNLMKGAASQALQCIKIHFNL

SEQ ID NO: 94637 - protein, 217 aa, Unknown
  Bacterial polypetide isolated from the Sargasso Sea
FKYSIYSLSEFVKEKIRNFKIIACPGCYPTSIQLPLIPLLKKGLINKNDIIIDSKSGYSGAGKNLKKKFSHKNLYSSIHAYGIYKHRHTSEIDQEFLKISKRKINYIFTPHLIPTFRGMLSSIYIQPKNRVTITKIKNELKKYHKRNYFVKVLPANKNLGTENVLNTNFCEISICKLKEKNRILILSAIDNLVKGAAGQAIQNMNILFGYRESTGLK

SEQ ID NO: 94638 - protein, 275 aa, Unknown
  Bacterial polypetide isolated from the Sargasso Sea
YLSYVDIIFTALPNGEAQLISKDLLKKNTLIDLAADFRLNKASDYLKWYKQKHKALSNIKKSIYALPEITGKLVKKFSIIGCPGCYPTSILLPLVPLVKERSINLKNIIIDSKSGYSGAGRGVHQKFKNKNLYESLSAYGVGFHRHNSEIDQELKNNSSSKINFTFTPHIIPMFRGILSTIYLDLKPGTTLNKVQNILKIFHKNNKFVKIKSINSFLSTNDVMNTNYCFISVCKTKFKDKIIILSVIDNLIKGGAGQAVQNMNLKFGFKNSEGLL

SEQ ID NO: 94639 - protein, 265 aa, Unknown
  Bacterial polypetide isolated from the Sargasso Sea
LLDRGLKVIDLSADYRYKSLDEWKKVYSKEASIYKRNDDDLCKEAVYGLPEINKEEISKGRLIACPGCYPTSALIPLAPYLSQGIIENEGIVIDSKSGTSGGGREPNQKLLLSECGEGLSAYGLINHRHTSEIEQVASLISGNKIELLFTPHLVPISRGMHSTIYGRLRDPGLTSDDCRILLDNYYRNFKNIKVLPVDTFPSTKWVKNTNQILLSVKVDNRNGRIIMLSVIDNLLKGQTGQAIQNLNIMSGFSMDEGLDLTNNFP

SEQ ID NO: 94640 - protein, 296 aa, Unknown
  Bacterial polypetide isolated from the Sargasso Sea
GTENNPDTLIKDIDPTIKFYSNSFTQLNEKFDHSSVDTVFMALPHGVSHNYVKSFYDKLQIIDLSADFRLDDIEIYKKNYNDKHSASNLLNEFQYGLVEINRDFLINKKNIAVPGCYPTSCLIPLIPLLKNEIIDSKNIIIDSKSGYSGAGKKFDLENIKNAKDYNFYNYNTNSHRHICEIKQELMKHAKLSDVLFSFNPHILPNFRGMLSTMYCDLSPGMNKNNVIDCLNEIAINNEFIKFIHDDQRADFFSIQNTNNCILKIFDHYDSSKIIIVSLIDNLVKGAAGQAVQCFNV

SEQ ID NO: 94641 - protein, 303 aa, Unknown
  Bacterial polypetide isolated from the Sargasso Sea
SSNVHVAVLGASGYTGGEMLRLLNNHPACKPVALTGERHAGMALGNIFPNFVNSGLPDLIRLEQVNWEEIEVVFCCLPHGKTHEVVKSLPDKIKIIDLSADFRFSNVTKYESVYGVKHAAKKLQEEAVYGLTEFFKNEISQAKLVACPGCYPTGAQIPLIPLFEQNLILPNNIVIDAKSGVSGAGRELKQDLLFSEINENFRAYGVGVHRHGPEIEQGLSIAYGQNVQINFTPHIVPITRGILTTIYVNLKSGQDINDIRQCLIKRFNNEPFVDVLDEGTNPSIKNVHGTNRCLISFSKAGFR

SEQ ID NO: 94642 - protein, 214 aa, Unknown
  Bacterial polypetide isolated from the Sargasso Sea
LEYFRSSLSDARLVANPGCYPTGSLLGILPFGDLLESLDRPPIIDAKSGVSGAGGRVEDDATNYVEVNENFKAYKAFKHQHQPEIKQYLEDLSPFESKNIGEPVFTPYLLPLSRGILSGIYLHFNRRINESEIEERFNAFAEDNPFIQIMPKGQLPDLRSTVHSNRCAIGWASDSSGSQWLVQTSIDNLVKGASGQAIQNMNLMFGFTETSGLT

SEQ ID NO: 94643 - protein, 196 aa, Unknown
  Bacterial polypetide isolated from the Sargasso Sea
YPTAVQLGFLPLLEQGLVNPARLIADAKSGASGAGRQGKIGMLHGEIGESFKAYGASGHRHLPEIRQGLMAAAGKGVGVTFVPHLIPMIRGIEATLYAELDNPQDFDRLQALYEARYKNEPFVDVMPFGSHPETRSVRGANHCRMALHRQEDSNIVIVSSVIDNLVKGAAGQAVQNMNIMFGLDETMGLNAPALLP

SEQ ID NO: 94644 - protein, 317 aa, Unknown
  Bacterial polypetide isolated from the Sargasso Sea
FSKILSSHPKVKIKYLCAQKKIGKKIQFFDKRIKKNLPKITKLDKVDWKSIDVLFTSLPTGNSQVLANKLIKYKKLKIIDLSADFRLSNKNKFKEFYLKKHKASNLLKFSIYSLTEFVKEKIKNYKIIACPGCYPTSIQIPLIPLIKKGLIKTNDIIIDSKSGYSGAGKNLKKKFPHKNIYSSIHAYGILKHRHTSEIDQEFSKVYKGKINYTFTPNLIPTFRGMLSSIYVKLNGKTKIKSIHNHLKIYHKNNYFIKVLPINKALGTENVLNTNFCEISVCKLKEKNRILILSAIDNLIKGAAGQAVQNMNLIYDLK

SEQ ID NO: 94645 - protein, 245 aa, Unknown
  Bacterial polypetide isolated from the Sargasso Sea
MNGEKVYSKEASIYKRDDDDLCKEAVYGLPEINKEAIAKGRLIACPGCYPTSALIPLAPYLSQGIIENEGIVIDSKSGTSGGGREPNQKLLLSECGEGLSAYGLINHRHTSEIEQVASLISGNKIELLFTPHLVPISRGMHSTIYGRLRDPGLTSDDCRILLDNYYRNFKNIKVLPVDTFPSTKWVKNTNQIYLSVKVDIRNGKIIILSVIDNLLKGQTGQAIQNLNIMSGFSMDEGLELTNNFP

SEQ ID NO: 94646 - protein, 301 aa, Unknown
  Bacterial polypetide isolated from the Sargasso Sea
SGSYVSEGSLDKHKLLSDLYPEHLGLLDTPLLPLTKSAFDDINANADYVCLCTDHKVSVDLAPQFLAMGKKVFDLSGGYRLASNDDYVTYYGFEHKHPELLNESAYGLAEWNSNDIANANLVAVAGCYPTAALNALKPLQQAGLLSDDKIIINAVSGVTGAGRKASVGTHFCEVSLAPYGLFNHRHGPEIEQHLGHQVLFTPHLGNFARGILETIYVQLKPNVTSEQVAKAYSVLENEPLIRLLGSKIPSIKGVAKQPYVDIGWQQQGSQLIVMAAIDNLLKGAAGQALQCINLSMNLDHT

SEQ ID NO: 94647 - protein, 120 aa, Unknown
  Bacterial polypetide isolated from the Sargasso Sea
KISNKKINYTFIPHLIPTFRGMLSTIYLEKTEGFSIKKIHQELKKYYRKDYFIKIQPINKDVGTENVINTNFCEISVCEIKSKNKIIILSAIDNLVKGAAGQAVQNMNLLFNLKEYAGLK

SEQ ID NO: 94648 - protein, 216 aa, Unknown
  Bacterial polypetide isolated from the Sargasso Sea
PKLIDAKNFKYVLPEISKNVAKGNIANPGCYATSILLGLSPLAKDINKKNIIVDTKSGVSGAGKSNKAEHIFNEANENLSTYAVGSHKHKPEIEYILKKNFKSDINLLMVPHLLPITRGILSNIYIQFETKVNINSIHKKFTDFYKNQKFIKVFKDELPAIKDVQFTNNCHIGLKTFKNSNVLLVSAVIDNLIKGASGQAVQNMNLMYSLDESLGF

SEQ ID NO: 94649 - protein, 101 aa, Unknown
  Bacterial polypetide isolated from the Sargasso Sea
RGILSTIYLDINKKSSLKKIRDELIRYYKNSPFVKILKLNNEIGSGNVMNTNICEISICQTRVKNKIIIFSAIDNLVKGASGQAIQNMNLLYDFLETDGLK

SEQ ID NO: 94650 - protein, 209 aa, Unknown
  Bacterial polypetide isolated from the Sargasso Sea
SEFNKFNIQNYRIISNPGCYPTSIQLALNPLLKKKLINIKDITIDSKSGYSGAGKGLKNKFKHKNLFNSTFAYNVKNHRHISEIDQEFYKITKNKVNYTLNPHLLPTFRGILSSIYVNTKGKVKAEKIRNELKRFYKKSKFIKILKLNSELGSGDVLNTNNCEISVCETRIKNKLIIFSAIDNLVKGASGQAVQNMNLLYKFSETLGLK

SEQ ID NO: 94651 - protein, 164 aa, Unknown
  Bacterial polypetide isolated from the Sargasso Sea
VSGAGRGASVGALLCETSDSFKAYAASGHRHLPEIRQALTEVAQQRVGLTFVPHLVPMIRGIEATLYGRLNDLSVDLTALYQKRYEKEPFVDVMPDGSHPDTRSVRGSNTVRIACHRPQDGNTAVILAVEDNLVKGAAGQAIQNMNLMFGLAETEGLQAAALWP

SEQ ID NO: 94652 - protein, 186 aa, Unknown
  Bacterial polypetide isolated from the Sargasso Sea
AEQVKKTRMIAVPGCYPTASLTALKPLKPLLTDMFPVINAVSGVTGAGRKAQLHTSFCEVSLTPYGVLGHRHQPEIATQLGQEVIFTPHLGNFKRGILATITVQLKAGTTEADVAKAYSVYDSSPIVTVKHNQFPKVDDVVLTPNCHLGWKYDASTGYLVVASAIDNLMKGAASQGLQCIKIHFGV

SEQ ID NO: 94653 - protein, 280 aa, Unknown
  Bacterial polypetide isolated from the Sargasso Sea
DLSECDVVFLAVPNKASLEYTPKLLDQGIRVIDLSGVYRIRDIKIFEESYALKHSSPGLLKEAVFGLPEYFRSSLSDARLVANPGCYPTGALLGILPFGDLLESLDRSPIIDAKSGVSGAGGRVEDDATNYVEVNENFKAYKAFKHQHQPEIKQYLEDLSTFESKNMGEPVFTPYLLPLSRGILSGIYLHFNRRINESEIEERFNAFAEENPFIQIMPKGQLPDLRSTVHSNRCAIGWASDSSGSQWLVQTSIDNLVKGASGQAIQNMNLMFGFTETSGL

SEQ ID NO: 94654 - protein, 242 aa, Unknown
  Bacterial polypetide isolated from the Sargasso Sea
SADFRLKNTKIWEEWYNSPHTEEELLSESVYGLTELNLKKIKSARLVAVPGCYPTSSLLGVLPLLNSELKIDSIIIDAKSGISGAGRTTVESGLLEEIQDNFRAYGLEGHRHLPEIQEILELVSGYPIKINFLPHLIPAMRGIYSTIYLQLEELFDLNIQDLYKSYYEGSPNVKIMKSGNAPDIKSIAKTNNCNISINSSNIKNQIIVISSIDNLVKGAAGQAVECYNLMNGFSQNTGLDNG

SEQ ID NO: 94655 - protein, 246 aa, Unknown
  Bacterial polypetide isolated from the Sargasso Sea
MSKRKTHFNRANIAILGASGYTGIEAIRLLVNNSNYNIVALTADSNAGMSVSEVYPHLSRINLPDLKKIEDINFSKIDAVISCLPHGKSQKILSSLPKNIKICDLSADFRFGDVQSYEKVYNKSHEAKGLQKEAVYGLTEINRDKIKKARFVANPGCYPTSALLPILPLIDSDIIKYGTIVVDSKSGVSGAGRTLKNNLLYSEVSEGFSAYGLVNHRHSPEIQSQITYFGSSEYKVLFTPHLLPIK

SEQ ID NO: 94656 - protein, 133 aa, Unknown
  Bacterial polypetide isolated from the Sargasso Sea
HTSFCEVSLTPYGVLGHRHQPEIATQLGQEVIFTPHLGNFKRGILATITVQLKPGTTTADVAAAYSVYDQAPLVTVKQNQFPKVDDVVLTPNCHLGWKFDENSGYLVVASAIDNLMKGAASQALQCIKIHFNL

SEQ ID NO: 94657 - protein, 293 aa, Unknown
  Bacterial polypetide isolated from the Sargasso Sea
KELKKYKLPKISKLKKEYLLDVDVIFTALPNGEAQSISKFLNKNNLLIDLAADFRLNNKKDYEKWYKIKHKALNQIKKSIYSIPEISGKLIQKFPIVSCPGCYPTSVLIPLIPLIKKNLINNQTIIIDSKSGYSGAGRGVHKKYKDKNLYESLSAYGLANHRHNSEIQQELDLKTGKKNKFHFTPHLTPMFRGILSTIYVDLKKGVNINKIINVLNVQYKNQKFIKISKINIFLSTNDVINTNNCLISVCKSKYKDKIIILSAIDNLIKGGGGQAVQNMNNYYGFNQSEGLNV

SEQ ID NO: 94658 - protein, 191 aa, Unknown
  Bacterial polypetide isolated from the Sargasso Sea
CYPTSSLLGVLPLLNSELQIESIIVDAKSGISGAGRKTVEDGLSEEIKENFRAYGIEGHRHLPEIREIVELVSGYSIDINFLPHLIPAMRGIYSTIYLQLSDLQDLNIQTLYESFYEDSPNIRIMKPGKVPDIRSIANTNNCNISVNYSNITNQIIVISSIDNLVKGAAGQAVECYNLMNGFNQSTGLDNG

SEQ ID NO: 94659 - protein, 300 aa, Unknown
  Bacterial polypetide isolated from the Sargasso Sea
ELKNTPVSDLFQGTDLNFVDPEDQIFYQCDVIFFATPHGTAMDKANSFIQKGIKVIDLSADFRLKDPSIWREWYGSNHRDLENLKNSVYGLTELNAELIETSNLIAVPGCYPTASILGLLPLVSNKLPIDSIIIDAKSGISGAGRTKVNDSLKDDIQENFRAYATGGHRHLPEITEVLEGIHGSSLKINFLPHLIPAMRGIYSTMYVNFENTHNQSIEEIYSDFYQDSLNVELMLDGQVPEILQVAETNNCQIGIYKSAIENQIVIISAIDNLVKGAAGQAIECYNLITGNYPLKGLNNG

SEQ ID NO: 94660 - protein, 281 aa, Unknown
  Bacterial polypetide isolated from the Sargasso Sea
KFKKEYLSNVDIIFTALPNGEAQFISKFLNKNNLLIDLAADFRLNNKKDYEKWYKIKHKALNQIKKSIYSIPEISGKLIKKFPIVSCPGCYPTSVLIPLIPLIKKNLINNQTIIIDSKSGYSGAGRGVHKKYKDKNLYESLSAYGLANHRHNSEIQQELDLKTGKKNKFHFTPHLTPMFRGILSTIYVDLKKGINLNKIIKVLNIQYKSQKFIKISKINTFLSTNDVINTNNCLISVCESKYKDKIIILSVIDNLIKGGGGQAVQNMNNYYGFNQSEGLNV

SEQ ID NO: 94661 - protein, 317 aa, Unknown
  Bacterial polypetide isolated from the Sargasso Sea
VGLELIKILTKHPKVKILYLCANKSSGKSIYNFDKKILKKNLPRITKIKDVDWYKVDIIFTALPNGEAQKIANLIPPHVKLIDLSADFRLKDFNIYKEWYGKEHKSKKLINKSIYAITEFTRKKLNQYQIISCPGCYPTSVQLPLIPLMKNKMVNLENIVIDSKSGYSGAGKNIKDKFKFNNLFNSVSAYGVGHHRHMPEIEQELSKASNKKIKVIFTPHLIPMFRGILSTIYLETKGNFNAKKIFKYLKNYHKKNFFVKLAKFNSPIGTGDVMNTNFCKISVCKNREKNKVIIISAIDNLIKGASGQAVQNMNIAF

SEQ ID NO: 94662 - protein, 256 aa, Unknown
  Bacterial polypetide isolated from the Sargasso Sea
DASRESVSMIDNPLVKVIDASTAHRVAEDWVYGMPEYDRDQRGRIADAKRVSNPGCYAIASIGLLHPLTSIGLLPSDFPITINAISGYSGGGKSMIAEFENPEEESYTEVPFRVYGMKLEHKHVPEIEKWSGLSGRPLFVPSVGRYHRGMIVQVPLQLWALPKKPTAAEVQEALEKHYNGCRFVTVESVDDVEKVGFLTPEKINDTNELRLYVFGNEQREQAVLVGLLDNLGKGASGQAVQNMNIMLGLPEEAGLQ

SEQ ID NO: 94663 - protein, 213 aa, Unknown
  Bacterial polypetide isolated from the Sargasso Sea
LYSISEFNKIKIKNYRIISNPGCYPTSIQLVLIPLIMKNLIKTKDIIIDSKSGFSGAGKNLEKKFKHKNLYNSTYAYGIESHRHICEIDQELYKHTKKKIRFSFNPYLLPTFRGILTSIYLKIDDKNSPNIIRNALVNFYKGSRFIKILKLNSQIGSGNVINTNNCEISVCKTREKNRIIIFSAIDNLIKGAAGQAVQNMNLLYGFKETLGLK

SEQ ID NO: 94664 - protein, 289 aa, Unknown
  Bacterial polypetide isolated from the Sargasso Sea
SGTDLNFCRSGRSDLFSCDVVFFATPHGTAMDKANSFIQKGIKVIDLSADFRLKDPSIWREWYGSNHRDLENLKNSIYGLTELNAELIETSNLIAVPGCYPTASILGLLPLVKNKLSIDSIIIDAKSGISGAGRTTVNESLKDDIQENFRAYATGGHRHLPEIIEVLEGIYGSSLKINFLPHLIPAMRGIYSTIYVNFEDTNHQSIEEIYRDFYQDSLNIELMIDGQVPEILKVAETNNCQIGIYQSAIENQIVIISAIDNLVKGAAGQAIECYNLMTGNYQLKGINNG

SEQ ID NO: 94665 - protein, 76 aa, Unknown
  Bacterial polypetide isolated from the Sargasso Sea
NFYIDEPFIKIYSGNKIPKVKEVQNTNNLALNLFSDYSKRKIVIVSCIDNLVKGAAGQAIQNMNIMFDFEETESLI

SEQ ID NO: 94666 - protein, 285 aa, Unknown
  Bacterial polypetide isolated from the Sargasso Sea
SNDANIVNCDVVFLAVPNQASLELVPKLLDQGIRVIDLSGAYRLDDIKIFEKFYKLKHIYPELLKEAVFGLPEFFREKIESARLVANPGCYSTCALLGILPLAEMLGKLDQSPVIDAKSGVSGAGGRVEDDSTNYISVNENFKAYKVLSHQHQPEIQQYLNTLSSYNSKKNGEVIFTPHLLPVNRGILSTIYIHFQEAVDEDLVVKKFSEFTDKQKFVGFLGMAHFPDIKMTAHTNRCMIGIESDQSGQNWVIVSSLDNLIKGAAGQAIQNMNIMFGLEEGLGLE

SEQ ID NO: 94667 - protein, 281 aa, Unknown
  Bacterial polypetide isolated from the Sargasso Sea
KVGIINVTGYSGMELARILSGHPEVKIVSVTGRSAVGKKVNEILPHLHDIDLTIEPEISGSLDFVFSALPNVFSAEALKSVISSGIKCIDIAADFRLNDLKVYEKWYNSKHPCPEFLKDSVYGLPELYRSDISKSNLVANPGCYPTASILGLAPALESKIISSDILIDAKSGVSGAGRGLSLKTHFDEVDESVSAYGLDGHRHMPEIKQELSLISNKNVSVTFVPHLIPMNRGILATIYAPLSESFKEKNTNLSSSVQTIYKNYYQKEPFVNVQDSPPATK

SEQ ID NO: 94668 - protein, 246 aa, Unknown
  Bacterial polypetide isolated from the Sargasso Sea
VIDLSADFRLKNTKIWEDWYDSPHTQEELLFESVYGLTELNLREIKSARLVAVPGCYPTCSLLGVLPLLNSKLEVDSIIIDAKSGISGAGRKTVENGLSEDIQENFRAYGLDGHRHLPEIQEILELVAGYPIKLNFLPHLIPAMRGIYSTIYIQLRELLDLNIQDLYESYYEDSPNVKIMKSGKVPDIKSIAKTNNCNISINYSNIKNQIIVISSIDNLLKGAAGQAVECYNLMNGFNQSTGLDNG

SEQ ID NO: 94669 - protein, 244 aa, Unknown
  Bacterial polypetide isolated from the Sargasso Sea
DWKKVYTKEAAIYKRNDDDLCKEAVYGLPEINKEAISNGRLIACPGCYPTSALIPLVPYLSQGIIENEGIVIDSKSGTSGGGREPNQKLLLSECGEGLSAYGLINHRHTSEIEQVASLISGNKIELLFTPHLVPISRGMHSTIYGRLRDPGLTSDDCRILLDNYYRNFKNIKVLPVDTYPSTKWVKNTNQIFLSVKVDNRNGRIIILSVIDNLLKGQTGQAIQNLNIMNGFSMDEGLDLTNNFP

SEQ ID NO: 94670 - protein, 336 aa, Unknown
  Bacterial polypetide isolated from the Sargasso Sea
MGKKNVLICGATGYIGLQLTKLLCTHKKISIKYLCGSTSVGKKIDFFEQELKKYKLPKISKFKKKYLSNVDIIFTALPNGEAQSISKFLNKNNLLIDLAADFRLNNKKDYEKCYKIKHKALNEIKKSIYSIPEISGKLIKKFPIVSCPGCYPTSVLIPLIPLIKKNLINNKTIIIDSKSGYSGAGRGVHKKYKDKNLYESLSAYGLANHRHNSEIQQELDLKTRKKNKFHFTPHLTPMFRGILSTIYVDLRKGININKVINVLNVQYKNHKFIKICKINTFLSTNDVINTNNCFISVCKSKYRDKIIILSAIDNLIKGGGGQAVQNMNNYYGFNQN

SEQ ID NO: 94671 - protein, 313 aa, Unknown
  Bacterial polypetide isolated from the Sargasso Sea
MHTPVVFIDGDQGTTGLQIHARLKGRTDLRLLTLPEAERKDPQRRCEAINSADIALLCLPDDAAREAVAAIHNPQVRVIDASSAHRTTPGWVYGLPELDEQQAERIAQSKRVSNPGCYPTGAITLLHPLVKAGFLPADYPLSIHAVSGYSGGGRAAVERHEQPGAAKAPALQLYGLELAHKHVPEIQQHAGLSARPMFMPGYGAYRQGIVLSIPLQLRLLPGHISAEQLQACLEQHYQGARHVQVMPLHQCGAAANLDPEALNDSNDLRLALYANPEHGQVLLTAVFDNLGKGASGAAVQNLDLMLGALQAHG

SEQ ID NO: 94672 - protein, 335 aa, Unknown
  Bacterial polypetide isolated from the Sargasso Sea
MTKVGIIGGSGFAGEELIKLLSLHDSTSLIAISSRELKNTPVSDLFQGSDLNFVDPEDQIFFQCDVVFFATPHGTAMDKANSFIQKGIKVIDLSADFRLKDPSTWKEWYGSNHRDLENLKNSIYGLTELNAELIETSNLVAVPGCYPTASILGLLPLVSNKLPIDSIIIDAKSGISGAGRTTVNESLKDDIQENFRAYATGGHRHLPEIIEVLEGIHESPLKINFLPHLIPAMRGIYSTIYVNFEDTQNQSIEEIYSDFYQDSLNIELMLDGQVPEILKVAETNNCQIGIYQSAIENQIVIISAIDNLVKGAAGQAIECYNLITGNYQLKGINNG

SEQ ID NO: 94673 - protein, 340 aa, Unknown
  Bacterial polypetide isolated from the Sargasso Sea
MKVGIINITGYAGSELARIIAQHPEVELVSATGRSAAGQNIGEVFPHLASLDLTLTEELDDNVDIVFSALPHKASAEALLPFIEAGLKVIDISADFRLKDPQVYEKWYQTVHPKPELLENAVYGLPELYREEITESHIIANPGCYPTSAILGLAPAIKNNLIKKNVIIDSKSGVSGAGRGLNLTTHYSEINENVHAYSVNGHRHLPEISQELCSINDDEFDVTFIPHLIPMTRGILSTCYAEFDEHISEAEMDSVIDSYKDFYSEQDFVDVTDSAPQTKQTLGNNRCLVYPVVHKETRKLIVISCIDNLVKGAAGAAVQNMNLMSGFPETMALEGLAVYP

SEQ ID NO: 94674 - protein, 335 aa, Unknown
  Bacterial polypetide isolated from the Sargasso Sea
MRSAVLGAAGYSGAELAVMLARNPYFELSYAFASAGRAAEPFSNLYPRYQNVVDIQVQPWTDDLVEELAGKLDVAFLALPHEVSEAVTPLLLAKGIAVFDLSGAFRLKDPALYPKYYGYEHQHPELLGQAVYSLMEWLDKPLPQLVSVPGCYPTACSLALLPLLKAGLVADGCIPVINATSGVSGAGRKAALNTSFCEVGLNAYGFFKHRHRPEIEQNLGRKVVFTPHLGNFKRGILATSVVTLKSGVTAEQVSAAFQQAYATKPLVRLVKHSPNVADVAGTPFCDIHWQQDAEQLVIVSAIDNLLKGAAAQAMQAANIKFGAPETAGLFAGAAE

SEQ ID NO: 94675 - protein, 236 aa, Unknown
  Bacterial polypetide isolated from the Sargasso Sea
KNVDVWKEWYGSPHLQEELLLESVYGLTELNQDKIKSARLIAVPGCYPTASLLGVLPFLNEGVQIESIIIDAKSGISGAGRKTVENGLSVEINENFKAYGIQGHRHLPEITEIVELVSGYPISINFLPHLIPAMRGIYSTIYVQLKDLENLDIQNLYDSFYVDSPNVRIMNTEEVPDIKSIANTNNCNISVNKSNIENQVIVISSIDNLVKGAAGQAVECYNLMYGFNQSTGLDNG

SEQ ID NO: 94676 - protein, 347 aa, Unknown
  Bacterial polypetide isolated from the Sargasso Sea
MIKVGIVGGTGYTGVELLRLLSQRDDIELCCVTSRELDGQTVCSRFPNLRGKVDLCFSNPDSSDLKNCEIVFFATPHAVAMHSVPELIDCGIKVIDLSADFRMNNIEIWETWYQTPHTCPELVEMAVYGLPEVNRDEIKQAQLIAVPGCYPTAIQLGFLPLLEMNVVDTMSLIADAKSGVSGAGRKAADPYILCEATESLKAYGMAGHRHHPEICQQLKIASNSEVGLTFIPHLAPMSRGIFATLYAKPTSDENLSGHVLREIYQKRYAGEPFVDILEKAEAPATRDVRGANNCKISVTHIEHSNTVVVLSVIDNLVKGASGQAIQCMNLLLGIDETRGLEGIALTP

SEQ ID NO: 94677 - protein, 335 aa, Unknown
  Bacterial polypetide isolated from the Sargasso Sea
MTKVGIIGGSGFAGEELIKLLSLHDSSSIVAISSRELKNTPVSDLFQGTDLNFVDPEDQIFFQCDVVFFATPHGTAMNKADSFIQKGIKVIDLSADFRLKDPSIWKEWYGSNHKDLENLKNSIYGLTEINAELIETGTLIAVPGCYPTASILGLLPLVSKKLPIDSIIIDAKSGISGAGRTKVNESLKDDIQENFKAYATGGHRHLPEIIEVLEGIHGSSLKINFLPHLIPAMRGIYSTMYVNFEDTQYQSIEDIYRDFYQDSLNIELTLDGQVPEILKVAETNNCQIGVYQSAIENQVVIISAIDNLVKGAAGQAIECYNLMTGNYQLEGIHNG

SEQ ID NO: 94678 - protein, 207 aa, Unknown
  Bacterial polypetide isolated from the Sargasso Sea
IFRNELKDAKAVAVPGCYPTSAILALKPFVDAGQILTHGGIVVDAASGVSGAGRAPKPNTTFATVDENFSAYGLLTHRHTPEIEQETGCQVLFTPHLAPMVRGILSTCYARPANSGFSTEDALELLCNYYFEEPFVVVDEASPSTKATLGANTVHLTARVDQRTGWLIIISALDNLVKGASGGAIQCANIAMGIDESAGLPVSGLMP

SEQ ID NO: 94679 - protein, 326 aa, Unknown
  Bacterial polypetide isolated from the Sargasso Sea
MKNIAIIGASGYTGAQLTALVHAESELSIQGLYVSENSLDKGRALADLYPVYSHIDLALSPLTEAAKAKIVAEADAVVLATEHSVSLHLAAWFYNQGLAVFDLSGAYRFSDVAQYPKWYGFEHEYPEVLAKAVYGLAEWNAKEVAATKMIAVPGCYPTASLTALKPLKNLLTSAYPVINAVSGVTGAGRKAQLHTSFCEVSLTPYGVLGHRHQPEIATQLGQEVIFTPHLGNFKRGILATITVQLKPGTTTADVAAAYSVYDQAPLVTVKQNQFPKVDDVVLTPNCHLGWKFDENSGYLVVASAIDNLMKGAASQALQCIKIHFNL

SEQ ID NO: 94680 - protein, 304 aa, Unknown
  Bacterial polypetide isolated from the Sargasso Sea
LPFSNLRGQVDLSFSNPDSSNLKDCEIVFFATPHAVAMHSVPELIDHGVKVIDLSADFRIKDLELWETWYKTRHSCPELLSMAVYGLPETNRDEIKRARLIAVPGCYPTAIQLGFLPLLENNLIEPEKLIADAKSGVSGAGRKAADAYLLCEATESLKAYGISGHRHHPEICQQLNLASRSEVNLTFIPHLVPMSRGILATLYGTLRLKEGASDESLQMLYQNRYVNEPFIDILVNGETPETKNVRGANNCQISVNYVASTNTIVVLSVIDNLVKGASGQAIQNMNLMLGIEETKGLEGVALTP

SEQ ID NO: 94681 - protein, 341 aa, Unknown
  Bacterial polypetide isolated from the Sargasso Sea
MGKKNVLICGATGYIGLQLTKLLCTHKKISIKYLCGSTSVGKKIDYYEKELKKYKLPKISKFKKEYLLDVDIIFTALPNGEAQSISKFLNKNNLLIDLAADFRLNNKKDYEKWYKIKHKALNQIKKSIYSIPEISGQLIKKFPIVSCPGCYPTSVLIPLIPLIKKNLINNQTIIIDSKSGYSGAGRGVHKKYKDKNLYESLSAYGLANHRHNSEIQQELDLKTGKKNKFHFTPHLTPMFRGILSTIYVDLKKGININKIIKALNIQYKNQKFIKICKINTFLSTNDVINTNNCLISVCKSKYKDKIILLSAIDNLIKGGGGQAVQNMNNYYGFNESEGLNV

SEQ ID NO: 94682 - protein, 358 aa, Unknown
  Bacterial polypetide isolated from the Sargasso Sea
MKDKNLTIRIAVLGASGYTGSELIKLALLHPFIEIVFLSSERHIGKRIDDIFPHFSGSNLPNFSKIDNLFKQDLGLDFIFCCLPHSTSQAIIKRIFEEKNFKNKIKVIDLSADFRISDPENYEKIYGKKHIALDLQQKAIYGLTEINRSKIKNSDLVACPGCYPTSVLLPLIPLIQGQLVDINNILIDAKSGVTGAGRTLTEGNLFSEISEGMKPYGLPQHRHQPEIEQELSLNNSKNISINFVPHLIPINRGIIASIYLNCSENSSPDMIRNKIINQYKEDEFVEVCEKGFFPSTSNVRGSNKCMISIFDNPKDNKVIIFSVIDNLLKGASGQAIQNMNLMTKIPESTGLNFIPLFP

SEQ ID NO: 94683 - protein, 334 aa, Unknown
  Bacterial polypetide isolated from the Sargasso Sea
MLNTLIVGASGYAGAELVTYVNRHPDMTITALTVSAQSNDAGKLISDLHPQLKGIVDLPLQPMSDISEFSAGVDVVFLATAHEVSHDLAPQFLQAGCVVFDLSGAFRVNDGAFYEKYYGFTHQHPELLEQAVYGLAEWNADKLKEANLIAVPGCYPTAAQLSLKPLIDAGLLDLSQWPVINATSGVSGAGRKAAISNSFCEVSLQPYGVFTHRHQPEIATHLGKEVIFTPHLGNFPRGIMETITCRLKAGVTHAQVAQTLQQAYGDKPLVRLYDKGVPALKNVVGLPFCDIGFAVQGEHLIVVATEDNLLKGAAAQAMQCANIRFGFAQTQSLI

SEQ ID NO: 94684 - protein, 338 aa, Unknown
  Bacterial polypetide isolated from the Sargasso Sea
MISVGIVGASGFTGEELVKLLLRHPNVSLDVLTSRTHAGKKVSDCIKLDTDLDKKFLEPSVDNLSHCDVVFFASPNGVAMDMARDLVKNDIRLIDISADFRIPDAEIWEKWYGQKHTSPELIEQSVYGLPEMKNQRDKITNAKIIANPGCYPTSSLLSLLPILDMIDEQRIIINATSGITGAGRNLNPDKLFAPGTENYQAYAVAKHRHYPEMLNQIQHINKNVDVLFVPHLSSIERGIYSTHYLTIKDLDLDHLYDVYNDYYKDSQFIKIINRTYPKLGEVNTTNDCLISLFSSSDRNDDSNLVIMSAIDNLMKGASGQAVQNMNIMFGHKESTGLV

SEQ ID NO: 94685 - protein, 351 aa, Unknown
  Bacterial polypetide isolated from the Sargasso Sea
MNVAIVGATGYGGIQAVNLLKKIKKYKISFLGGNKTSGSKWNDNFPFIYLDNDPYIEEISVDNISKNADVALLCLPNGLSSTLTRKLLDRGLKVIDLSADYRYKSLDEWKNVYSKEAAIYKRNDDDLCKEAVYGLPEINKEAISKGRLIACPGCYPTSALIPLVPYLSQGIIENEGIVIDSKSGTSGGGREPNQKLLLSECGEGLSAYGLINHRHTSEIEQVASIISGNKIELLFTPHLVPISRGMHSTIYGRLRDPGLTSDDCRILLDNYYRNFKNIKVLPVDKYPSTKWVKNTNQIFLSVKVDIRNGRIIILSAIDNLLKGQTGQAIQNLNIISGFSMDEGLDLTNNFP

SEQ ID NO: 94686 - protein, 340 aa, Unknown
  Bacterial polypetide isolated from the Sargasso Sea
MPKLNALVAGSTGYIGVQLIKLLVKHKYINIKYLCGNSSAGKHVKFYDKSLSKYKLPKILKFNKKLLKDVHVIFTALPNGEAQDISKHINKNHTLIDLAADFRLEKASDYLKWYKQKHRATNLIKKSIYLLPEINRKEIKKYNIISCPGCYPTSILLPLFPLFKKNLIKLNNIIIDSKSGYSGAGRGVHKKYKDKNLYESLSAYGVGFHRHNSEIDQMLRKFTKKKFQFSFTPHLSPMFRGILSTIYVDLENNISQTKVLKTLNNFYKKETFVKILKSDSLLSTNEVINTNNCYISVCKSKYSNKIIILSAIDNLIKGGAGQAVQNMNNKFNFSEKTGLK

SEQ ID NO: 94687 - protein, 337 aa, Unknown
  Bacterial polypetide isolated from the Sargasso Sea
MYSVSIIGASGYTGAQLVQLVIQHPKLALAGTYVSENSSDASKNIAELHGNLAHVNATLTPISDAALKEMADGVDFIFLATPHEASHDWMPVLSSGKAKVLDLSGAFRLKDTNVFEQFYGFPHTQEQSLAQAVYGLAEWHEAQIASADVIAVPGCYPTASLSALKPLAHNNLLDESVRPVINAVSGVSGAGRKASLTTSFFEVSLQAYGVLGHRHTPEIEAYLGTPVIFTPHLGNFKRGILATVTVKVKAGTTSAQLEQAYTDAYADKPIVRLRKSFPKIDDVAHTPFVDLHWKLDEASGYAVITAAIDNVMKGAASQAIQCLNIMTKQPVETGLVL

SEQ ID NO: 94688 - protein, 348 aa, Unknown
  Bacterial polypetide isolated from the Sargasso Sea
MNQNKINIAVLGASGYTGGDLIKILLNHDYVNISALSANSKLGMNPSNVHASLFNAQLPDFVSLDEIDFTQIDLVISGLPHNNLHNIINNIPNKCKVIDMSADFRFSDVNIYNQYYETSHNSSELLSETAYGLSEIFRDSIKESRIVACPGCYPTAVLLSILPLIKENIISLEDIIVDAKSGVSGAGRGNKEELMFSEISESMKPYNIAKHRHTPEIEQIIGDISGKEIKINFTPHLIPINRGELVTIYLKTINGSKAKEAISCLNSYYKEDSYVHISNQGIPSETSKVRGSNNCLISIFDDRIDGRIIISTSIDNLIKGSAGQAIQNMNIMFDFDESEGLTSFGMYP

SEQ ID NO: 94689 - protein, 221 aa, Unknown
  Bacterial polypetide isolated from the Sargasso Sea
MIRIGIVGATGYTGAELLRLLTFHEEVEVVAITSNSKKGEALTDIFPTLTDYSLNFVAHDSESLYTCDLVFFATPNAVAMNYVPILLEQGCRIIDLSADFRLRNSNTWQQWYKRKHSCPNLLDKAVYGLPEINRESISKASLIANPGCYPTSVILGLLPAVKYGLIETNSIIANAVSGKSGAGRKAVLSEAYSNFTESFKAYSPFSHRHLPEIEQVLEDYA

SEQ ID NO: 94690 - protein, 285 aa, Unknown
  Bacterial polypetide isolated from the Sargasso Sea
KDFLEPVTDNLLTCDVVFFASPNGVAMNMAKELIENNVKIIDISADFRIPDVDIWEKWYGQKHACPELIKESVYGLPEMKNQKEKISKANIIANPGCYPTASLLSLLPIISLIKQQRIIINSTSGISGAGRNLNPEKLFSAGTDNYQAYAVAKHRHYPEMLAQISDINKDIDLLFVPHLSSIERGIYSTHYVTMDNLNLDQVYDVYYEYFQGSDFVKIINQTYPKVGQVNNTNNCIISLFASSDTNQTSNLVIMCAIDNLIKGASGQAIQNMNIMFNLKDTFGLV

SEQ ID NO: 94691 - protein, 296 aa, Unknown
  Bacterial polypetide isolated from the Sargasso Sea
MRGHYPELAFSVPDVATLGACDVVFFATPHGVAHALAGELLAAGTRVIDLSADFRLQDAEEWAKWYGQPHGAPELLSEAVYGLPEVNREAIKTARLIAVPGCYPTATQLGLIPLLEAGLAETGSLIADCKSGVSGAGRGASVGSLFCEAGESMKAYSVKGHRHLPEIRQGLRQAAGSDVGLTFVPHLTPMIRGIHATLYARVADTSVDLQALFEKRYAGEPFVDVMPAGSHPETRSVRGGNVCRIAVHRPQGGDLVVVLSVIDNLVKGASGQAVQNMNILFGLDERLALSHAALLP

SEQ ID NO: 94692 - protein, 351 aa, Unknown
  Bacterial polypetide isolated from the Sargasso Sea
MNVAIVGATGYGGIQAVNLLKKNKKYKISFLGGNKTSGSKWNDNFPFIYLDNDPYIEEISVDNISKNADVALLCLPNGLSSTLTRKLLDRGLKVIDLSADYRYKSLDEWKKVYSKEAAVYKRNDDDLCKEAVYGLPEINKEAISKGRLIACPGCYPTSALIPLAPYLSQGIIENEGIVIDSKSGTSGGGREPNQKLLLSECGEGLSAYGLINHRHTSEIEQVASLISGNQIELLFTPHLVPISRGMHSTIYGRLRDPGLTSDDCRILLDNYYRNFNNIKVLPVDTFPSTKWVKNTNQILLSVKVDNRNGRIIILSVIDNLLKGQTGQAIQNLNIMSGFSIDEGLNLTNNFP

SEQ ID NO: 94693 - protein, 341 aa, Unknown
  Bacterial polypetide isolated from the Sargasso Sea
MAKKNVLICGATGYIGLQLTKLLCTHKKISIKYLCGSTSVGKKIDSYEQELKKYKLPKISKFKKEYLLDVDIIFTALPNGEAQSISKFLNKNNLLIDLAADFRLNNKKNYEKWYKIKHKALNQIKKSIYSIPEISGKLIKKFSIVSCPGCYPTSVLIPLIPLIKKNLINNKTIIIDSKSGYSGAGRGVHKKYKDKNLYESLSAYGLANHRHNSEIQQELDLKTGKKNKFHFTPHLTPMFRGILSTIYVDLKKGININKIINVLNVQYKKHKFVKISKINTFLSTNDVINTNNCLISVCKSKYKDKIIILSAIDNLIKGGGGQAVQNMNNYYNFNQSEGLNV

SEQ ID NO: 94694 - protein, 335 aa, Unknown
  Bacterial polypetide isolated from the Sargasso Sea
MNKVGIIGGSGFAGEELIRFLSFHESTSLVAVSSRELKGQSVAQFVEGSDLIFVDPDDEIFFSCDVVFFATPHGISMEKAKYFVQQGTKVIDLSADFRIKDLTIWKDWYNSDHKDPEGVEQSVYGLTELNGSLIKSSNLIAVPGCYPTASILGLLPLLDGRSKIDSITIDAKSGISGAGRSTVNSSLLSDIKENFKAYATLGHRHLPEIKQVLEGVYGSSLKINFLPHLIPAMRGIYSTMYVNLEAKPSGPLIDLYKNFYIESPNIQLMGEGEVPEILKVCQTNNCQIGIYPSAIENQVVIISAIDNLVKGAAGQAVECYNLLCGNSQMQGIDNG

SEQ ID NO: 94695 - protein, 264 aa, Unknown
  Bacterial polypetide isolated from the Sargasso Sea
MPNGEAQVISKQLNKHNTLIDLAADFRLNTSKSYLNWYKQKHKAIFNIKKSIYALPEITGSKVKNYKIISCPGCYPTSILIPLLPLIKKNLVNLKNIIIDSKSGYSGAGRSVHKKYINKNLYESLSAYGVGFHRHNSEIEQEIKKITNKKFNFTFTPHLTPMFRGILSTIYIETKKGVTINKIYSKLRSVYKNKNFVKILKINSYISTNDVINTNNCYISICKTKYKNKYIILSAIDNLIKGGAGQAVQNMNLKFNFSEKKGLL

SEQ ID NO: 94696 - protein, 121 aa, Unknown
  Bacterial polypetide isolated from the Sargasso Sea
SYNSDINGEVIFTPHLLPVNRGILSTIYIHFQETVDRDQIVEKFSEFADTQIFVKFLGMSHFPDIKMTSHTNCCMIGIESDQSGQNLVIVSSLDNLIKGAAGQAIQNMNIMFRLEERLGLE

SEQ ID NO: 94697 - protein, 357 aa, Unknown
  Bacterial polypetide isolated from the Sargasso Sea
MATVKGGRVAVIGASGYGGLQTIRLLQGHPGLSVSFLGGERSAGQRWSSVCSFLPLPDDPTVESADPDRIAACSDFAVLSLPNGLACQLAPQLLERGVRVVDLSADFRYRSLEQWLQVYAKEAGSLNRQDAELCSSAVYGLPEWNGPAIADAKLVAAPGCFPTASLLPLLPFLKQGLIETSGIIIDAKTGTSGGGRVPKEAMLLAEASESIAPYGVIGHRHTSEIEQMAMEVAGQEVRLQFTPHLVPMVRGLLSTVYARLRDPGLTAEDCTTVLEAIYRHHPCVQVLPVGTYPATKWARHTNRALLSVQVDTRTGQLVLMSAIDNLIKGQAGQGVQCLNLMAGLAPETGLPLQSFYP

SEQ ID NO: 94698 - protein, 339 aa, Unknown
  Bacterial polypetide isolated from the Sargasso Sea
MINDLTKVGIIGGSGFTGEELLRFLSNHPNTEVIAISSRALLGQSTNQIVEGSDLIFIEPDNDIFYDCEVVFFATPHGVSMNLVNLFINKNIKVIDLSADFRLKDKGIWEEWYNIPHSQEELLSESVYGLTELNSSKIESARLVAVPGCYPTASLLAILPLLSSKFKIESIIIDAKSGISGAGRQKVENGLYEEVKENFKAYGLEGHRHLPEIREITELVSGYPINLNFIPHLIPAMRGIYSTIYIQLEETVDLNIQDLYELFYEDSPNVKIMQPGQVPDIKSITNTNNCNISVNNSNIPNQLVLIASIDNLVKGAAGQAVECYNLMSGFNQSTGIKNG

SEQ ID NO: 94699 - protein, 326 aa, Unknown
  Bacterial polypetide isolated from the Sargasso Sea
MKNIAIIGASGYTGAQLTALVHAESELSIQGLYVSENSLDKGRALADLYPVYSHIDLALSPLTEEAKTKIVAEADAVVLATEHSVSLHLAAWFYNQGLAVFDLSGAYRFSDVAQYPKWYGFEHEYPEVLAKAVYGLAEWNAKEVAATKMIAVPGCYPTASLTALKPLKNLLTSAYPVINAVSGVTGAGRKAQLHTSFCEVSLTPYGVLGHRHQPEIATQLGQEVIFTPHLGNFKRGILATITVQLKPGTTTADVAAAYSVYDQAPLVTVKQNQFPKVDDVVLTPNCHLGWKFDENSGYLVVASAIDNLMKGAASQALQCIKIHFNL

SEQ ID NO: 94700 - protein, 340 aa, Unknown
  Bacterial polypetide isolated from the Sargasso Sea
MPKLNVLIAGSTGYIGVQLIKLLIKHKNINIKYLCGNSSVGKKISSYDTSLKSKKLPRITKYNKKYLSYVDIIFTALPNGEAQLISKDLLKKNTLIDLAADFRLNKASDYLKWYKQKHKALSNIKNSIYALPEITGKLVKKFSIIGCPGCYPTSILLPLIPLVKERSINLKNIIIDSKSGYSGAGRGVHKKFKNKNLYESLSAYGVGFHRHNSEIDQELKNNSSSKINFTFTPHIIPMFRGILSTIYLDLKPGTTLNKVQNILKIFHKKNKFVKIKSINSFLSTNDVMNTNYCFISVCKTKFKDKIIILSVIDNLIKGGAGQAVQNMNLKFGFKNNEGLI

SEQ ID NO: 94701 - protein, 227 aa, Unknown
  Bacterial polypetide isolated from the Sargasso Sea
MAEEHLAKKLINKSIYAISEFAKDKLRKFKIIACPGCYPTSIQLPLIPLLKKNLINNKNIIIDSKSGYSGAGKNLKKKFKHKNIFSSIHAYGTYKHRHISELDQELNKVSNTKINYVFIPHLIPTFRGMLSSIYLELKPGVTAKKVFTELKNFHKNNYFVKINPFNKNIGTENVLNTNFCEISICELKEKRKILILSAIDNLVKGAAGQAIQNMNIMNNFKENVGIK

SEQ ID NO: 94702 - protein, 223 aa, Unknown
  Bacterial polypetide isolated from the Sargasso Sea
PELIDQATYGLPEIHRDDIKKSKLVANPGCFPTGAILSMSPAVKNDLIEDMIIIDSKTGVSGAGRTAKEAFGFSELNDNCAAYGTKGHRHQPEIAQELNFLTNNEINVLFTPHLVSMTRGILGTNYGMLKKNITEKDAVELYKEFYKSEPFIKIVDAPPATKHTWGSNYVYLYPYVREDTNTLVVISALDNLVKGSAGAAIQNMNLMQGFEETMGISALPVYP

SEQ ID NO: 94703 - protein, 227 aa, Unknown
  Bacterial polypetide isolated from the Sargasso Sea
DDLCKEAVYGLPEINKEAISKGRLIACPGCYPTSALIPLAPYLSQGIIENEGIVIDSKSGTSGGGREPNQKLLLSECGEGLSAYGLIKHRHTSEIEQVASLISGNKIELLFTPHLVPISRGMHSTIYGRLRDPGLTSDDCRILLDNYYRNFKNIKVLPVDTYPSTKWVKNTNQIFLSVKVDIRNGRIIILSAIDNLLKGQTGQAIQNLNIMSGFSMDEGLDLTNNFP

SEQ ID NO: 94704 - protein, 274 aa, Unknown
  Bacterial polypetide isolated from the Sargasso Sea
SNVDIIFTALPNGEAQSISKFLNKNNLLIDLAADFRLNNQKDYKKWYKIKHKASNQIKKSIYSIPEISGQLIKKFQIVSCPGCYPTSVLIPLIPLIKKNLINNQTIIIDSKSGYSGAGRGVHKKYKDKNLYESLSAYGLANHRHNSEIQQELDLKTGKKNKFHFTPHLTPMFRGILSTIYVDLKKGININKIINVLDVQYKNQKFIKICKINTFLSTNDVINTNNCFISVCKSKYKDKIIILSAIDNLIKGGGGQAVQNMNNYYGFNQSEGLNV

SEQ ID NO: 94705 - protein, 283 aa, Unknown
  Bacterial polypetide isolated from the Sargasso Sea
SIICIKSGNAVILRGGTDSFFTSNKLQEIINDSFNAVGLPKNVVQMIDSTDRSNVDEMIKLDKFIDVIIPRGGKGLIKAINENSSIPVIKHLDGICHIFVEKDANLEKAKDIILNSKMRRPGICGAVESLLINESLYEQTLEILKPLINAGCEIRGDKLICKLSPEFKLADNNDWGTEYLEKIISVKIVKNVDEAIDHINTYSSGHTESIITEDIEKFNKFYKKINSAIILKNASTQFADGGEFGFGGEIGISTDKLHVRGPVGVEHLTSFKYVVQGNGQVRS

SEQ ID NO: 94706 - protein, 148 aa, Unknown
  Bacterial polypetide isolated from the Sargasso Sea
SAEDISSVLDNLKSQGCEIIGCSRLKDIYSIDRDATEEDWSTEYLDKKITVKLVDNVEECVEHINKYSSGHTESCLSNNQQSIEYFFQNCKSAILMNNASTQFADGGEFGFGAEIGISTDKLHVRGPVGAKHLTTFKYQVIGNHTTRP

SEQ ID NO: 94707 - protein, 192 aa, Unknown
  Bacterial polypetide isolated from the Sargasso Sea
MANIFEVPQPGNDLLGKAEKVRLASIKISQTENQNRIKALNFMADYLEKNSKEILEANDADYSSAKKKGISRALLSRLKLSKEKLNSGIEGVRKVGDLADPVNQVQIKRELSKGLILERKTVPIGVLGVIFESRPDAVMQISSLAIRSGNGVMLKGGSEANLTNTSIVKALQEGLNESGLDKNAICLLTSRK

SEQ ID NO: 94708 - protein, 192 aa, Unknown
  Bacterial polypetide isolated from the Sargasso Sea
DGICHVYIDLDSDPEKSIDIAFNAKTYRYGICGAMETLLIHEEVASRILPKLLDKYNAEGVEIRGCEVTQKIIKVKAANDEDWITEYLAPVLSIKVVKGLEEAIEHINLYGSSHTDSIVTENDENVAIFFDKVDSSSVMHNLPTCWADGFEYGLGAEVGISTDKIHARGPVGLEGLTSQKFIVKGNSQLRGS

SEQ ID NO: 94709 - protein, 69 aa, Unknown
  Bacterial polypetide isolated from the Sargasso Sea
KDKQLSFTNSIDSAIVMINTSTQFADGGEFGLGGEIGIATGKFHARGPVGINQLTSFKYIVRGDGHIRA

SEQ ID NO: 94710 - protein, 182 aa, Unknown
  Bacterial polypetide isolated from the Sargasso Sea
MDNIFEVPQPGNNLLEKADKVRLASIKISQTENQNRIKALNFMADYLEKNSKEILEANNADYSSAEKKGISRALLSRLKLSKAKLNSGIEGVRKVGDLADPVNQVQIKRELSKGLILERKTVSIGVLGVIFESRPDAVMQISSLAIRSGNGVMLKGGSEASLTNTSIVKALQEGLTESGLDK

SEQ ID NO: 94711 - protein, 91 aa, Unknown
  Bacterial polypetide isolated from the Sargasso Sea
MKSWSCIENCGACCHLDLTDRDNLSGVLSNKDIALINSMKSKDGWCKYLDRSSRKCMIYESRPHFCRVNKFSLSFKKYLKNGDKLLINCCT

SEQ ID NO: 94712 - protein, 144 aa, Unknown
  Bacterial polypetide isolated from the Sargasso Sea
KEIINALLKSGCEVRADKKVNKIFNGKLKKTTERDWKTEYLDAIISVKTVKNVNVAIDHILKYGTMHTDSIITNNKKNAEIFVNGVNSSIAMHNVSTQFADGGEFGFGGEIGISTNKLPPRGPVGINQLTSYKYVVYGNGIVRS

SEQ ID NO: 94713 - protein, 183 aa, Unknown
  Bacterial polypetide isolated from the Sargasso Sea
TANIKMAKDLIINAKMRRTSICGAVETLLIEEKALNSHAEEIIKSLLSSGCEVRADEKINKIFKGKLKKTIERDWKTEYLDAIISVKSVKNVNEAVEHILKYGTMHTDSIITSNKKFAEIFLNGVNSSIAMHNVSTQFADGGEFGFGGEIGISTNKLPPRGPVGINQLTSYKYLVSGNGIIRP

SEQ ID NO: 94714 - protein, 187 aa, Unknown
  Bacterial polypetide isolated from the Sargasso Sea
MANIFEVPQPSNDLLEKADKVRLASIKISQTENQNRIKALNFMADYLEKNSKEILNANNEDYERAEKRGISYALLSRLKLSKEKLNSGIEGVRKVGDLADPINQVQIKRELSKGLILERKTVPIGVLGVIFESRPDAVMQISSLAIRSGNGVMLKGGSEANLTNTAIVNALQQGLYKSGLDKNAIGL

SEQ ID NO: 94715 - protein, 186 aa, Unknown
  Bacterial polypetide isolated from the Sargasso Sea
MTALRAAGVELFGGPRGSKELNIPEAPALRHEYGGLQCTVELVNSMDNAIDYIHANGSAHTDCIITSNQKTADEFIARVDSACVFHNASTRFSDGFRFGLGAEVGISTSRIHARGPVGVEGLLTTRCLLRGKGQICNKDKGVDFTHKRLPLPKREGLFRAGALQKVASSVALLANTVVVFRAMMKK

SEQ ID NO: 94716 - protein, 260 aa, Unknown
  Bacterial polypetide isolated from the Sargasso Sea
RPLIARLTLNKEKVRGMAQGIRSVVALPDPVGIKQKSIELDENLTLHQVSCPIGVIGAIFESRPDAVPQISSLCLKSGNSVILKGGREAQNSNKVLVALLTESIKKVTDVPEAAVQMIETRSEVRDMLKEEKNINLIVPRGSNDFVKYIQDNTKIPVLGHSEGICHNYIDKEADLDKALRIALDSKLQYPAACNAMENLLVHQDVASEIIPQLVEKFLEKNVVLLGCEKSCVISTDLSPVLKNEWDKEYNDLKLSIKIVE

SEQ ID NO: 94717 - protein, 213 aa, Unknown
  Bacterial polypetide isolated from the Sargasso Sea
GGKNLIEKINSKSSIPVIKHLDGICHVFIDKEADIEKAKKIILNSKMRRPEICGATETLLIDKKIKQSTTNILESLVQSGCEIRGDEYIKSLNDDFKIATEDDWGTEYLDKILSVKLVEDVKGAINHINKYSSGHTEAIVTENEETFKMFYNNIDSAIILKNASTQFADGGEFGFGAEIGISTDKLHVRGPVGPQHLTSFKYIVHGNGHERSN

SEQ ID NO: 94718 - protein, 173 aa, Unknown
  Bacterial polypetide isolated from the Sargasso Sea
NAIETLLVHKDIASAFLEKAIPLFNSNDVKLIGDRRSVELGLKHEASAEDWQTEYLDLILSIKIVDDLDEAITHIQKYSSKHTDGIITENSNTANRFMNVVDSAGVFHNCSTRFADGFRYGFGAEVGISTQTLPPRGPVGLEGLVTYKYFLKGDGNIVDDFSLGKAIYTHKDL

SEQ ID NO: 94719 - protein, 273 aa, Unknown
  Bacterial polypetide isolated from the Sargasso Sea
LCFKSGNCVILRGGSEAYFTNKILANYFRTSLAKHKIDKNFVQFIEKKDRKLVDFMLSKMSKYIDVVIPRGGKNLVKKVQELSNVAVIGHLEGICHTYIDKDANLNMAKKIVKNAKMRNTSICGATETLLIHKNKLKNINEILEELTKNGCKIYGDKAIKKNFSGKTLIANNKTWSTEHLSSKISVKIVQNILEAIEHINKYGTMHTDAIITNNNKTAKFFIKSVNSSIAIQNSSTQFADGGEFGFGGEVGISTNKLPPRGPVGLNQLISYKY

SEQ ID NO: 94720 - protein, 128 aa, Unknown
  Bacterial polypetide isolated from the Sargasso Sea
MSIKDNILELGKNAKKASLDMKLCNNDQKNRALSNLIKNIAKNKDKILEANSIDLENGKKKSLSNPLINRLTLTNKSIDGLIKSIEDIITIQDPIGLTLEKWERPNGLKFRKISTPLGVLGVIYESRP

SEQ ID NO: 94721 - protein, 203 aa, Unknown
  Bacterial polypetide isolated from the Sargasso Sea
ISNVHVIGHLEGLCHIYIDKTADLKMAEKIVLNSKMRRTSICGAVETLLIEEKALKSHAVEIINSLKKSGCEVRVDKKINKIFEGKLKHAIERDWKTEYLDAIISIKTVKNVQEAVRHVLKYGTMHTDSIITRNSRNAKIFLNNVNSSIAMHNVSTQFADGGEFGFGGEIGISTNKLPPRGPVGINQLTSYKYVVSGKGITRP

SEQ ID NO: 94722 - protein, 202 aa, Unknown
  Bacterial polypetide isolated from the Sargasso Sea
FKVNVIGHLEGNCHVYVDKDANLNMAKKIVVNSKMRRTSICGAAETLLIDKKCLKSHAIPIIEELIFLGCEIIADNKINKLFGGKLKLAKESDWKTEYLNPKIAVKVVDGVNEAIEHILRYGTMHTDSIVTNNKKTASLFLNRINSAIAVHNASTQFADGGEFGFGGEIGISTNKLPPRGPVGINQLTSYKYILEGKGSIRS

SEQ ID NO: 94723 - protein, 145 aa, Unknown
  Bacterial polypetide isolated from the Sargasso Sea
SVILRGGSEAFNTNKIISNLFRKSLKVCGVNQNYVQFVNSKNRKIVDILLSKMKGKIDLIIPRGGKSLVKKVDDLSTIPYIGHLEGICHTYIDKKANLKMAIDILENAKMRNTSICGATETVLFHKSIAKKFINPVLKNLQKNRL

SEQ ID NO: 94724 - protein, 198 aa, Unknown
  Bacterial polypetide isolated from the Sargasso Sea
MADIFEVPKPGNDLLEKADQVRLASIKISQTENNNRIRALNFMADYLEKNTKEILEANNEDYTKAEKKGISNALLSRLRLSKEKLNLGIEGVRKVGDLADPVDQVQIKRELSKGLILERKTVPIGVLGIIFESRPDAVMQISSLAIRSGNGVILKGGSEANSTNTAIVKALKEGLHESGLDENAICLLTSRKDSMAML

SEQ ID NO: 94725 - protein, 46 aa, Unknown
  Bacterial polypetide isolated from the Sargasso Sea
RFTDGGQFGLGGELAISTDKLHQRGPIGLQHLVTNKWYVYGEGQIR

SEQ ID NO: 94726 - protein, 140 aa, Unknown
  Bacterial polypetide isolated from the Sargasso Sea
DRRSVELGLKHEASAEDWQTEYLDLILSVKIVDDLDEAITHIQKYSSKHTDGIITENSNTANRFMNVVDSAGVFHNCSTRFADGFRYGFGAEVGISTQTLPPRGPVGLEGLVTYKYFLKGDGNIVDDFSLGKAIYTHEDL

SEQ ID NO: 94727 - protein, 242 aa, Unknown
  Bacterial polypetide isolated from the Sargasso Sea
LVCFIKNTDRSLLEELLKAEGDVDVIIPRGGKSLIETISKNSKVPTIKHLEGLCHTFWDKGYDKDKATEVIANAKLRRPEICGATETLLIHSNNSAADISSVLDNLKSQGCEIIGCSRLKDIYSIDRDATEEDWSTEYLDKKITVKLVDNVEECVEHINKYSSGHTESCLSNNQQSIEYFFQNCKSAILMNNASTQFADGGEFGFGAEIGISTDKLHVRGPVGAKHLTTFKYQVIGNHTTRP

SEQ ID NO: 94728 - protein, 178 aa, Unknown
  Bacterial polypetide isolated from the Sargasso Sea
NFLGFIFYENSPRNVNNDFLRTINQTDFKDKKPVCVYVNASEEFVRETSSYFKNPLLQFHGDETNTFCKLFKKEFWKVIRFKDVNCLDKIHMYPDASGILLENYQKGVHGGTGKSFNWQLIPKKVLKEHKIILSGGINSKNVDNAIGIDPWCIDINSGVESTKGVKEIKLIKEIFKNF

SEQ ID NO: 94729 - protein, 251 aa, Unknown
  Bacterial polypetide isolated from the Sargasso Sea
MSFKEAQLPSDIAQMIPSTDREAVDCLLAMDNYVNVIIPRGGKSLIKKINDKSRIPVIKHLEGLCHIYVDKEANLDFAKKIIFNSKLRRPEICGAAETLLIDNALEDKALELIKPLYDAGCIIKGDKFIKSLDPNFEMASDTDWSTEYLDKIISVKIVKGVMGAIEHINNYSSNHTESIITENEKTFSDFYNNIDSAIILKNASTQFADGGEFGFGAEIGISTDKLHVRGPVGAKHFTHLNTLFMVTDNQG

SEQ ID NO: 94730 - protein, 187 aa, Unknown
  Bacterial polypetide isolated from the Sargasso Sea
HTYMIKSADLNTSISVVTNAKMRRPGICGALETLLIHKDQSEQLNNILDSLIEAGCEIRGCEKTLNLDDRASLANDIDWDSEYLSPILSVKIVDDIDEAIEHIQKHGTGHTDVIISEDKNSQDYFINQLDSAILMINASSQFADGGEFGMGGEIGIATGKFHARGPVSLEQLTSFKYVVRGSGQTRS

SEQ ID NO: 94731 - protein, 77 aa, Unknown
  Bacterial polypetide isolated from the Sargasso Sea
ETIVTENKLTAEKFLNHVDSAIVMHNASTQFADGGEFGMGAEIGISTGRLHARGPVGSEQLTSFKYIVRGTGQIRNI

SEQ ID NO: 94732 - protein, 115 aa, Unknown
  Bacterial polypetide isolated from the Sargasso Sea
DATEEDWSTEYLDKKITVKLVDNIEECVEHINKYSSGHTESCLSNNQQSIEYFFQNCKSAILMNNASTQFADGGEFGFGAEIGISTDKLHVRGPVGAKHLTTFKYQVIGNHTTRP

SEQ ID NO: 94733 - protein, 219 aa, Unknown
  Bacterial polypetide isolated from the Sargasso Sea
VNVIIPRGGKNLIKKINDKSRIPVIKHLEGLCHIYVDKEANLDIAKKIIFNSKLRRPEICGAAETLLIDNTIKDKALGLIKPLYDAGCIIRGDNFIKALDPKFEMATNTDWSTEYLDKIISVKIVDGVKGAIEHINDYSSNHTESIITENEKTFSDFYNNIDSAIILKNASTQFADGGEFGFGAEIGISTDKLHVRGPVGAKHLTTFKYIVHGNGQSRN

SEQ ID NO: 94734 - protein, 121 aa, Unknown
  Bacterial polypetide isolated from the Sargasso Sea
IYSIDRDATEEDWSTEYLDKKITVKLVDNVEECVEHINKYSSGHTESCLSNNQQSIEYFFQNCKSAILMNNASTQFADGGEFGFGAEIGISTDKLHVRGPVGAKHLTTFKYQVIGNHTTRP

SEQ ID NO: 94735 - protein, 190 aa, Unknown
  Bacterial polypetide isolated from the Sargasso Sea
CHTYIDKDADLKMAIKVVHNAKLRNTSICGATETILMHKSIVKKFCNPILNKLTESNCEIIADKVIREAFKGPSKKSNKKSWSTEYLSPKVSVKTVNNIDEAIYHINKFGTMHTDSIISKNKKSADYFLNKIKSSIAMHNTSTQFADGGEFGFGGEVGISTNTLPPRGPVGLNQLTSFKYFVLGNGQIRK

SEQ ID NO: 94736 - protein, 131 aa, Unknown
  Bacterial polypetide isolated from the Sargasso Sea
MSKTLEKIGSNAKIAFQNKISNKRKNQVLNYYIQLILKNQNKILVENAKDIKVAKSKKLKENLIKRLALNNDKIRAIIKSIKTISKFKDPVDVDIETWKRPNGLKLKKVSIPIGIIGVVYESRPNVTSDVS

SEQ ID NO: 94737 - protein, 197 aa, Unknown
  Bacterial polypetide isolated from the Sargasso Sea
MGIWEGNCHVYVDKDADLNMAKKVVLNSKMRRTSICGAAETLLIHDKCLKSHSLPIIRELILKGCDVLVDKKINKYFKNKLKFANENDWRTEYLSPKISIKSVNGVNDAIAHILKYGTMHTDAIITRNIKTAKIFLNGINSSIAVHNASTQFADGGEFGFGGEIGISTNKLPPRGPVGINQLTSYKYMVTGKGTIRP

SEQ ID NO: 94738 - protein, 208 aa, Unknown
  Bacterial polypetide isolated from the Sargasso Sea
KKVQNLSKVPIIGHLEGICHTYIDKDADLKMAVKIVHNAKLRNTSICGATETILMHKKIVKKFCNPVLSKLTENKCEVICDKIIRQNFKGPSKKSNLKSWSTEYLSSKVSVKTVNNIDDAINHINKFGTMHTDSIISKNKKRAEYFLKNIKSSIAMHNTSTQFADGGEFGFGGEVGISTNILPPRGPVGLNQLTSFKYVVLGNGQIRK

SEQ ID NO: 94739 - protein, 60 aa, Unknown
  Bacterial polypetide isolated from the Sargasso Sea
NIKSSIAMHNTSTQFADGGEFGFGGEVGISTNTLPPRGPVGLNQLTSFKYAVLGNGQIRK

SEQ ID NO: 94740 - protein, 115 aa, Unknown
  Bacterial polypetide isolated from the Sargasso Sea
MDSLGSLAKDASRILAQASEEQKNEALLNIGKTIDLKRQDILNENIKDLAEAKKKQIGDALVDRLELTEERIDSMISGLKVVSDLPDPVGEITDLKPTPSGIDVSKMRVPLGVVG

SEQ ID NO: 94741 - protein, 257 aa, Unknown
  Bacterial polypetide isolated from the Sargasso Sea
LKKNKINPNAVQYLKDPDRKYINEMLSMDEYIDLVIPRGGKELVNNVSKNAKMRAIFGGIGVSHLFVDEKIDEKSLLPILENAKTQAPSVCNALDTILLHEKQQNKLLPKIINHFVGLGIEMRIQPKLFQSAKKINSSRLIKKASDNDWGQEYLNLIVSLKTVSSIEEAIKHIDKHSYGHTDGIISDIAKNQKIFTEKVNSSAVTVNASTRFNDGGELGLGAEIAISTTKVSPRGPLGLSEITSYKWIITGKGHIRS

SEQ ID NO: 94742 - protein, 199 aa, Unknown
  Bacterial polypetide isolated from the Sargasso Sea
MPVLKHFSGNCHLYVDKDADLNMARSITVNAKCQRMGVCNAAESLIVHKEISAAFLPECSNELAAQGIEIRADESARVLIPSATKASESDYATEYLGPKISVVVVDSLDSAIRHINQYGSRHTDAIISNNQNAIDRFTNCVDTAAVMVNTSTRFNDGGELGLGAEIGISTDKLHARGPCGIKELTTYKYVVTGTGQVRT

SEQ ID NO: 94743 - protein, 115 aa, Unknown
  Bacterial polypetide isolated from the Sargasso Sea
MDSLGSLAKDASRILAQTSEEQKNEALLNIAKTIDLKRQDILNENIKDLAEAKKKQIGDALIDRLELTEERIDSMISGLKVVSDLPDPVGEITDLEPTPSGIDVSKMRVPLGVVG

SEQ ID NO: 94744 - protein, 157 aa, Unknown
  Bacterial polypetide isolated from the Sargasso Sea
ETILINEQITSSFMPKLVASLSDAECEIRCCDKTIGFDDRASLASEDDWFTEYLAPIVSVKSVTGIDEAITHIEKYGTGHTESIISENKEAQLKFTHSIDSAIVMINASTQFADGGEFGLGGEIGIATGKFHARGPVGVDQLTSFKYIVSGDGQIRD

SEQ ID NO: 94745 - protein, 123 aa, Unknown
  Bacterial polypetide isolated from the Sargasso Sea
QKLSTIAVAANAEDWSTEYLLPIVSVKIVKDIEEAIQHIEHFSTGHTESIITENLNHASIFQKSLDSAIVMHNASTQFADGGEFGLGGEIGIATGKFHARGPVGVDQLTSFKYLVNGDGHTRP

SEQ ID NO: 94746 - protein, 442 aa, Unknown
  Bacterial polypetide isolated from the Sargasso Sea
MDIKTALDTAFNASTQFHSFEKLSSFLDPSIIDEAFVEAGVATVRKRRLPLESVMWCVMGMSLFRQESVWNIATKMDIALPGKAPLVAPSAMVQARQRLGTEAVEQSFKKMAKHWYQQNEFETWNGLNLLGVDGVVWRTADTAENREKYGSGSTQYGDTAFPQIRMVCQMELTSHQLVNSAFDKYKSNEMVLAEQLIEDTPNHSLTMFDRGFYSLGLLHQWHSEGQERHWMIPARKGLQLDVLESYSRVDKRVKLTTTPQARKKFPTLPDEIEARLITKKIRGKECRILTSLTDVMCYPSDEIVDLYSHRWEIELGYREMKQTLLNSEYTLRSKRPDMVEQELWGLLLAYNLIRVAMTEAALRKGIWPNQLSFSGCSSAVVAFLLTTALTSPGKLPVLYENLINQLTYYELPTRREDRLYPRCVKPKPSKYPAKKKNASQLN

SEQ ID NO: 94747 - protein, 166 aa, Unknown
  Bacterial polypetide isolated from the Sargasso Sea
MANIFEVPQPDNDLLEKTEKVRLASIKISQTENQNRIKALNFMADYLEKNSKEILEANNADYLNAEKKGISSALLSRLKLSKSKLNSGIEGVRKVGELADPVNQVQIKRELSKGLILERKTVPIGVLGVIFESRPDAVMQISSLAIRSGNGVMLKGGSEAYLTNAS

SEQ ID NO: 94748 - protein, 67 aa, Unknown
  Bacterial polypetide isolated from the Sargasso Sea
CSEISKDIDSAIVMHNTSTQFADGGEFGLGGEIGIATGKFHARGPVGVDQLTSFKYLVNGSGHIRGK

SEQ ID NO: 94749 - protein, 295 aa, Unknown
  Bacterial polypetide isolated from the Sargasso Sea
VDLMLPSDVSSLCFKSGNVVILRGGSEAYNSNRILANLFRNALKINNIDQNYVQILKNKNRKSVDYLLSKMEKFIDVIIPRGGKNLVKKVKDLSSVPIIGHLEGICHTYIDKDADLNMAIKVVHNAKLRNASICGATETILMHNKIIKKFCNPVLEKLTKNNCKIFADRTVRKNFNGKSNLAKEKNWSTEYLSAKVSVKSVNNILEAVNHINKYGTMHTDSIITKNKKNADFFLKNIKSSIVMHNTSTQFADGGEFGFGGEVGISTNKLPPRGPVGLNQLISYKYEVLGKGQIRN

SEQ ID NO: 94750 - protein, 104 aa, Unknown
  Bacterial polypetide isolated from the Sargasso Sea
APILSIKVVEDMSEAIDHIQKYGSQHTDSIVTEDKNKAEYFFKNVDSSSVMHNLPTCWADGFEYGLGAEVGISTDKIHARGPVGLEGLTSQKFIVKGNSNLRGV

SEQ ID NO: 94751 - protein, 306 aa, Unknown
  Bacterial polypetide isolated from the Sargasso Sea
EVKNKVLNDYAKFIKNEKKLIISQNLKDINYARKKGLKENLIKRLHLNENKLNGIINSILKIAKLRDPIDITLEKWKRPNGLHIKRVSIPIGVIGVIYESRPNVTSDVASLCFKSGNVVILKGGSEAINSNKVLAKFFRKALKKNKVDENFIQFIDSKQRKLVDIMLSKMKKYIDVIIPRGGKNLVKKVLELSKVPIIGHLEGLCHTYIDKDAELKMAKEVVYNAKLRNTSICGATETILIHKNIVKKFSNPILQELENSGCKIIGDKILKSYYKGQVYPAKEKDWSTEYLTSIVSVKVVKNSEEA

SEQ ID NO: 94752 - protein, 249 aa, Unknown
  Bacterial polypetide isolated from the Sargasso Sea
MNILETINELSIKAKDASIKIRVLQKEKKMAAYECLEKNIEKSADLILSSNKLDIENAIKNDLSKPLINRLKVTEESILGIIKSINEIKNQPDPIGRVLENWEQPNGLKFSKISVPLGVLGVIYESRPNVTVDASCLALKSNNALILRGGSDSYHTSKQLVNIIQESFIEANLPENIIQMIPTTDREAVDHLLAMKDYVNVIIPRGGKSLIKKINEKSKIPVIKHLEGLCHVYVDKEKDIEIAKNIIFN

SEQ ID NO: 94753 - protein, 131 aa, Unknown
  Bacterial polypetide isolated from the Sargasso Sea
MAARSLSNIQRVMIIKKIINNLKNNNKIIIKKNSIDIKLAKQNNLSDALIDRLLINSDRVKTMINGLEEINTIPDTLYKKINKSKQSSGITVEQMRVPLGVIAMVYESRPNVTIDAAGLSLKSGNSIILRG

SEQ ID NO: 94754 - protein, 185 aa, Unknown
  Bacterial polypetide isolated from the Sargasso Sea
MNLIGIKARKASEYKVTTEVKNKVLNDYAKLIKNEKKFIINQNSKDINYAKKKGLKENLIKRLHLNENKLNGIINSILKIAKLRDPIDNTLDKWKRPNGLSIKRVSIPIGVIGVIYESRPNVTSDVASLCFKSGNVVILKGGSEAINSNKALANLFRKALKKNKVDENFIQFIDSKQRKLVDIML

SEQ ID NO: 94755 - protein, 296 aa, Unknown
  Bacterial polypetide isolated from the Sargasso Sea
IDSTLEKWKRPNGLNIKRVSIPIGVIGVIYESRPNVTSDVASLCFKSGNVVILKGGSEAINSNKALAKLFRKALKKNKVNENFIQFIDSTQRRLVDIMLSKMKKYIDVIIPRGGKNLVKKVLELSKVPIIGHLEGLCHTYIDKDAELKMAKEVVYNAKLRNTSICGATETILIHKNIVKKFSNPILQKLENSGCKIIGDKILKSYYNGQIYPAKEKDWSTEYLSSIVSVKVVKNSEEAIKHINKYGTMHTDSIITKNKKTAKYFLKNVKSSIAMHNTSTQFADGGEFGFGGEVGIS

SEQ ID NO: 94756 - protein, 271 aa, Unknown
  Bacterial polypetide isolated from the Sargasso Sea
MRNYLLKLGVQAKKASIEAIKADKKQKVLKDYCNLLLKNQSKIISANKKDLKKAIKKKLKENLINRLLIDKKNILQIISSIKTIIKFKDPVGQTLEKWKRPNGLKIAKTTTPIGVVAVIYESRPNVTSDVASLCFKSGNPVILKGGSEAYNSNKVFVNLFRKALQKNKLNKNYVQFIELKNRKVVDFLLTKMTKSIDVVIPRGGKSLVNKVQKFSKIPTIGHLEGVCHTYIDKNANLLMAKKITLNAKLRNTAICGATETILIHNDLLKKF

SEQ ID NO: 94757 - protein, 217 aa, Unknown
  Bacterial polypetide isolated from the Sargasso Sea
MNALNVAEYTHSLGLQAKTASALMAKAPAAIKNKALKALARLLRENVAQLQIDNAKDLERAVANGLAGPMVDRLKLTPKVLETCAEGCEQLAAMPDIIGEILGMKQQPSGIRVGQMRVPIGVFGMIYESRPNVTIEAASLSIKSGNACILRGGSEAIDSNKALAKLVQQALAEAGLPQDAVQLVQTTDREAVGQLIAMPQFCGRDHPARWQGADRTH

SEQ ID NO: 94758 - protein, 245 aa, Unknown
  Bacterial polypetide isolated from the Sargasso Sea
MIKIVKNSRIAFESKVSSIKKDKALKEFSKLILKNKKRILKENYKDINYARKKKLNENLIKRLELNEKKINSIIQSINQIRKIKDPTDKVLEKWKRPNGLIIKKVTIPIGIISVIYESRPNVTSDVASLCFKSGNAVILKGGSEAFNTNKIISNLFRASLKSCRINQNYVQFIQTKNRKIVDIILSKMKGYIDLVIPRGGKSLVKKVDQLSTIPYIGHLEGICHTYIDKKANLKMAIKVLENAKM

SEQ ID NO: 94759 - protein, 244 aa, Unknown
  Bacterial polypetide isolated from the Sargasso Sea
SKVTTPIGVISVIYESRPNVTSDVAALCFKSGNPVILKGGSEAYYSNKILSNLFRKALEKNKVNKNYVQFVNHKNRKVVDFILSKMNKFIDVIIPRGGKSLVKKVQDLSGIPVIGHLEGVCHTYVDFEADLKLANNVVINAKLRNTAICGATETILVHKKILKKFCNLVLLNLKNNGCKIIADSKIKKNFIGKIISAKESDWSKEYLAPIVSVKTVSNVEEAIKHINKYGTMHTDAIITKNSKV

SEQ ID NO: 94760 - protein, 115 aa, Unknown
  Bacterial polypetide isolated from the Sargasso Sea
SIKTVKSAEEAVEHISKFGSKHTEAIITEDSGLAEWFMKTVDAAGVFWNASTRFADGFRYGLGAEVGVSTGKTHARGPVGLEGLVIYKYKLYGNGHVARNYAEGKKDFIHTEIKM

SEQ ID NO: 94761 - protein, 207 aa, Unknown
  Bacterial polypetide isolated from the Sargasso Sea
MSDYFQEILNHSKRASSAMSKLSAEDRSRILMNISGFLLSNKNEILKANQADVERAKSNNISAPMINRLVLTSEKIDQLSRDVEKIAQMQDPLDQTLESWTNATNGLQFTKVSVPIGVIGIIYESRPNVTIDAACLCLRSGNISILRGGSECIETNKKLYECIQEALKDLNFDTHLVCFIQNTDRSFVEELLKAEGDIDVIIPRGGK

SEQ ID NO: 94762 - protein, 192 aa, Unknown
  Bacterial polypetide isolated from the Sargasso Sea
MKYLKKIGINARKAFEELREVNHNKIKSTLNTYNSTILKNKKKIIKENLKDVRNVKRKHLTDRLILNDKRIEGIRHSINEIAKFKNPVGRILEKWERPNKLKIQKVSTPIGVIGVIYESRPNVTADVAALSLKSGNCCILRGGTEAYNSNKLLTNLFRQSLSKNNINQNCVQFIEKKERKIVDALLSKMSNY

SEQ ID NO: 94763 - protein, 132 aa, Unknown
  Bacterial polypetide isolated from the Sargasso Sea
MKNYLIKLGKKAKKASIKSVTSKKKDKVLQDYYNLIFKNQSSIIKENKKDIKQAKNKRLKENLIKRLLIDKKKILQILKSIRMIKRFKDPVNQVLESWKRSNGLKISKVTTSIGVIAVIYESRPNVTSDVAS

SEQ ID NO: 94764 - protein, 299 aa, Unknown
  Bacterial polypetide isolated from the Sargasso Sea
ISKISIPIGVIGVIYESRPNVTTDVASLCFKSGNPVILKGGSEAFYSNKILSNLFRKALKINKVNQNFVQFIDIKNRRVVDFLLTKMINFIDVIIPRGGRNLVKKVQNISKIPTIGHLEGVCHSYVDKDADPKIATKVLVNAKLRNTAICGATETILLNERIIKKFGTHILKILEEKGCRIIGDNKIRKIYKGKIRKASIKDWSKEYLSASVSVKSVKNLQEAISHINKYGTMHTDCIITKNKKSAKKFLMGVKSSIAMHNTSTQFADGGEFGFGGEVGISTNVLPPRGPVGLEQLISY

SEQ ID NO: 94765 - protein, 143 aa, Unknown
  Bacterial polypetide isolated from the Sargasso Sea
MSIKNNIIELGKRAKTASLNMKVCSSNQKNLALTKLTKNLDKNRDKILEANKMDLENGEKKSLSKPLMNRLRLTEKSIDGLITSIEAIIEIPDPIGITLERWERPNGLKFRKISTPLGVLGVIYESRPNVTVDASCLSIKSGN

SEQ ID NO: 94766 - protein, 130 aa, Unknown
  Bacterial polypetide isolated from the Sargasso Sea
MLRKLKKIAIDSRKAFEKKIDPATKDKVLKKFAALLLANRKKIIIENIKDIKIAKKKKIKENLIKRLEINEKKINGIIKSINQIIKIKDPTNKILEHWKRPNGLHIKKVTVPIGVIAVIYESRPNVTSGM

SEQ ID NO: 94767 - protein, 293 aa, Unknown
  Bacterial polypetide isolated from the Sargasso Sea
GNEKKLILKQNLKDVNYARKIGIKNNLINRLLINESKLKDIQNSIIKIAKLKDPVGNTLEKWKRPNGLNISKISIPIGVIGVIYESRPNVTSDVASLCFKSGNPVILKGGSEAINTNRILAKIFRKALKVNKVDENFIQFIDTKQRRVVDIMLSGMKKYIDVIIPRGGKNLVKRVQDLSSVPIIGHLEGLCHTYVDKDANLTMAKKVVYNAKLRNTSICGATETILIHKKVAKDFCNPILNELQNKNCKIYGDRFLKKYYRGKILPAKEKNWSTEYLAPAVSVKIINNLEEKY

SEQ ID NO: 94768 - protein, 300 aa, Unknown
  Bacterial polypetide isolated from the Sargasso Sea
TNIILEKWKRPNGLQISKISIPIGIIGIIYESRPNVTSDVASLCFKSGNAVILKGGKEAFYSNRILSKLFRKSLKKNNIDENFVQFIDNRNRNVVNFLLTKMNKYIDVIIPRGGKNLVKKVQNLANLPIIGHLEGICHTFIDKDANPKIAKKIIINAKLRNTAICGATETILMHEKILKKSCNFILKGLENNGCKIFGDRNIRKFYKGKIFKATNKDWSKEYLSPIVSVKSVKNLNEAVMHINKYGTMHTDSIITQNKKNAKIFLSNVKSSIAMHNTSTQFADGGEFGFGGEVGISTNVL

SEQ ID NO: 94769 - protein, 145 aa, Unknown
  Bacterial polypetide isolated from the Sargasso Sea
MTKHMNLIGIKARKASEFKVTTKVKNKVLNDYAKLIRNEKKLIISQNLKDISYARKKGLKENLIKRLHLNENKLNGIINSILKIAKLKDPINNTLEKWKRPNGLNIQRVSIPIGVIGVIYESRPNVTSDVASLCFKSGNVVILKG

SEQ ID NO: 94770 - protein, 126 aa, Unknown
  Bacterial polypetide isolated from the Sargasso Sea
MNLIGIKSRKAAEKKINTYTKNKVLNTYALLIDKEKKSILRQNKKDIKFAESKKLKQNLINRLYINELKLRDIRDSIKKISKLKDPVNVTLKKWSRPNGLNIKKVSIPIGVIGVIYESRPNVTSDV

SEQ ID NO: 94771 - protein, 273 aa, Unknown
  Bacterial polypetide isolated from the Sargasso Sea
LTLKQKNKVLKDYHQLIEKNKNLIVHANKKDIKNAQKKGIKHHLVQRLILNDKKILEIINSIKIIIRLKDPTNVILEKWRRPNGLNISKISIPIGVIGVIYESRPNVTSDVASLCFKSGNSVILKGGSEAFNSNLILSKLFRKSLKKNKINENFVQFINVKKRKVVDFMLTKMNKFIDVVIPRGGKNLVKKIQNLSSIPTIGHLEGICHSYVDKDANPKIAKKIIHNAKLRNTAICGATETILLHEKIIKKFGYEILKNLQENGCKIIGDFKI

SEQ ID NO: 94772 - protein, 68 aa, Unknown
  Bacterial polypetide isolated from the Sargasso Sea
WNASTRFADGFRYGLGAEVGVSTCKTHARGPVGLEGMVIYKYKLYGNGQGVGSYSKGERKFMHQPLET

SEQ ID NO: 94773 - protein, 249 aa, Unknown
  Bacterial polypetide isolated from the Sargasso Sea
KAGLPKESVQLVETTDREAVRTLLHLDKFLDVVIPRGGKGLVQLISDESRVPVIKHLDGICHVYIDKDADFKKAEDIAFNAKTYRYGICGAMETLLVHKLVAESLLPKLMKRFTEKGVEVRGCQRTLQIIDALEADEVDWMTEYLAPILSIKVVEGMGDAIDHIQKYGSQHTDSIVTEDLTKAEFFFKNVDSSSVMHNLPTCWADGFEYGLGAEVGISTDKIHARGPVGLEGLTSQKFIVKGNSNLRGV

SEQ ID NO: 94774 - protein, 66 aa, Unknown
  Bacterial polypetide isolated from the Sargasso Sea
KNLFLRKVDSSSVMHNLPTCFADGFEYGLGAEVGISTDKLHARGPVGLEGLTSEKYIVEGNGQLRA

SEQ ID NO: 94775 - protein, 132 aa, Unknown
  Bacterial polypetide isolated from the Sargasso Sea
MFQKFNKIELICKKAKDASYKLAISSNKERNVALKLIASQISKSTKKIIAANKKDYMNAKKNKIPLHLLDRLLLNEERIKNMTKDIINITKLEDPIGKELIKKIRPNGLKITKVSVPLGVIAVIFESRPNVT

SEQ ID NO: 94776 - protein, 208 aa, Unknown
  Bacterial polypetide isolated from the Sargasso Sea
VKLISEESRVPVIKHLDGICHVYIDQDSELEKAIDIAFNAKTYRYGICGAMETLLVHKDVASKVLPKLLEKYSSEGVELRGCKATQEIIEVKTANEEDWLTEYLAPILSIKVVEGIEKAIEHINKYGSNHTDSIVTENNEKVKIFFDQVDSSSVMHNLPTCWADGFEYGLGAEVGISTDKIHARGPVGLEGLTSQKFIVKGNSQLRGS

SEQ ID NO: 94777 - protein, 209 aa, Unknown
  Bacterial polypetide isolated from the Sargasso Sea
LGHADGICHLFIDMEANLEMALSVALDSKIQYPAACNAIETLLVHKDIAPAFLEKAIPLFNSNNVKLVGDKRSVELGLNYEASLEDWQTEYLDLILSIKIVDDLEEAITHIQKYSSKHTDGIITENSNTANKFMNVVDSAGVFHNCSTRFADGFRYGFGAEVGISTQTLPPRGPVGLEGLVTYKYFLKGDGNIVDEFSSGKAIYTHKDL

SEQ ID NO: 94778 - protein, 101 aa, Unknown
  Bacterial polypetide isolated from the Sargasso Sea
MSIRIVEGLDEAIDHINKFGSHHTDVICTSSFENSRKFIRNVDSASVMVNSSSQFADGFEYGLGAEIGISTDKIHARGPVGLEGLTTEKYVVFGNGEIRKR

SEQ ID NO: 94779 - protein, 190 aa, Unknown
  Bacterial polypetide isolated from the Sargasso Sea
MKKLLFNIGKKSKKAFAHKLSSKKKDIVLRNFYQLIDKNRKLIINENKKDIKNAIRKKIKNNLIQRLILDDKKISNMINSIKRIIKLKDPTNITLEKWKRPNGLNISKISTPIGVIGVIYESRPNVTSDVASLCFKSGNTVILRGGTEAFYSNYILSRLFRKSLQKNCLDENFVQFINIKNRKVVDFILT

SEQ ID NO: 94780 - protein, 239 aa, Unknown
  Bacterial polypetide isolated from the Sargasso Sea
MNFGRNKNLSDSMLDRLYIDDTRLNGIIGSLEQIIALPDPVGMEIEEFSRPNGLTIKKVRTPLGVIGVIFESRPNVFVDAGALCFKSGNSSILRCGSESYNTSRALESCFVSSFREVGITEFCTQLVPTKERAAVEEMLKMNKYLDVIIPRGGKGLVGLVQEKARVPIFAHLEGIVHIYVHADADPDKARKVILNSKLRRPGICGAVECLLLDQQFVKKYGTSILSDLIASGVSVKVSS

SEQ ID NO: 94781 - protein, 275 aa, Unknown
  Bacterial polypetide isolated from the Sargasso Sea
MGIIKSINIITKLKDPINRILLKWKRPNGLIIKRVTIPLGVLAAIYESRPNVTSDISCLCFKSGNSVILKGGSEAFYTNKILANLFRKSLKENKVNPNFVQLINTKNRKVVDILLSRMSKFIDMVIPRGGKNLVKKVQKLSKVPIIGHLEGICHTYVDKFANLKMAINIIHNAKLRNTSICGATETILINEKVLKKFTNPILHKLQKYGCKVIADKKVKSIFKGKSKLSTEIDWKTEYLSAKVSVKSVKDLNDAINHINKYGTMHTDAIITNNKK

SEQ ID NO: 94782 - protein, 195 aa, Unknown
  Bacterial polypetide isolated from the Sargasso Sea
IKNKLNSAKIDRLSLNEERIKDIQDSLNEIINFEDPINKIIERRSRPSGIKIKKISTPIGLIGIIYESRPNVTIDAAALCIKSSNSAILRPGSESYQSCLALFNCINEGLVETGLPEHLIQIIPTTNRIAVKKLIQMTEYIDVIIPRGGKNLVKLIQDTAKVPVFAHLEGIVHTYIHKDADPKMVENLILNSKLR

SEQ ID NO: 94783 - protein, 130 aa, Unknown
  Bacterial polypetide isolated from the Sargasso Sea
MSVKISKILNEIGIKAKSASAILNTASSDQKNKFFDFAVKAIQENADLILEANKIDIKEARINMKDEAFIDRLALDKARLQGICDTLAEIKSFQDPVGRVLASWDRPNGLNISRVSTPLGVIGLIFESRP

SEQ ID NO: 94784 - protein, 280 aa, Unknown
  Bacterial polypetide isolated from the Sargasso Sea
VLNDYAKLIKNEKKYIINQNSKDINYARKRRLKENLIKRLHLDEIKLNGIINSILKIAKLRDPINNTLEKWKRPNGLNIKRVSIPIGVIGVIYESRPNVTSDVASLCFKSGNVVILKGGSEAINSNKALAKLFRKALKKNKVDENFIQFIDSKQRRIVDIMLSKMKKYIDVIIPRGGKNLVKKVLELSKVPIIGHLEGLCHTYIDKDAELKMAKEIVYNAKLRNTSICGATETILIHKNIVKKFSNPILQALENNGCKIIGDKILKSYYKGQVYPAKEKD

SEQ ID NO: 94785 - protein, 182 aa, Unknown
  Bacterial polypetide isolated from the Sargasso Sea
SKIQYPAACNAIETLLVHKDIAPAFLEKAIPLFNSNEVKLIGDKRSVELGLKYKACLEDWETEYLDLILSIKIVDDLQEAITHIQKYSSKHTDGIITENSNTAKKFMNEVDSAGVFHNCSTRFADGFRYGFGAEVGISTQTLPPRGPVGLEGLVTYKYFLQGDGNIVDDFSSGKAIYTHKDL

SEQ ID NO: 94786 - protein, 198 aa, Unknown
  Bacterial polypetide isolated from the Sargasso Sea
MKNYLRKIGVKSQKALKQQISEKIKNKVLYKFEKILKKNEKSILLENKKDQNKAKKLGIKLHMLKRLELDKKKFYQILSTIKKIRKMKDPTYKVLEKWKRPNGLTIKKVTIPLGVIAVIYESRPNVTVDVSCLCFKAGNSVILKGGKESFYTNKLLSSFFKKSLKDLKVDENYVQFIENKNRKVVDNILSDMTKYVDV

SEQ ID NO: 94787 - protein, 154 aa, Unknown
  Bacterial polypetide isolated from the Sargasso Sea
MIDKSIYKEYFPKILSKLSSMGCEIRGNAQIKDIFPQTENVSESDWATEYLDAIISVKVVKDIDQAISHIKEYGTGHTEAIITEDGKIAEYFFNQVNSSIILLNASTQFADGGEFGFGAEIGISTGKMHARGPIGLEQLTTFKYTVYGNGQTRP

SEQ ID NO: 94788 - protein, 207 aa, Unknown
  Bacterial polypetide isolated from the Sargasso Sea
VNENAKMPSITGGVGVCHTYVDSKIDTELALSVLDNAKTQNTSVCNAMDTVLIHKDSVDLIQPLFSLLLEKNVDIRADKESYDNFNNKSKIKLASSSDFGEEFLDLIVSVKTVENIDEAIKHIEKYGSKHSEAIITEDHNVAKYFLNKVDASAVFHNTSTRFNDGFELGLGAEVAVSTDKLHARGPMGINDLMTYKWVVSGKGQLRK

SEQ ID NO: 94789 - protein, 269 aa, Unknown
  Bacterial polypetide isolated from the Sargasso Sea
SKEILEANNADYLNAEKKGISRALLSRLKLSKSKLNSGIEGVRKVGDLADPVNQVQIKRELSKGLILERKTVPIGVLGVIFESRPDAVMQISSLAIRSGNGVILKGGSEANLTNTSIVKALQEGLNESGLDKNAICLLTSRKDSMAMLNLEKYINLIIPRGSNELVKFIQENTRIPVLGHADGICHLFIDIEANLEMALSVALDSKIQYPAACNAIETLLVHKDIAPDFLEKAIPLFNSNDVKLIGDKRSVELGLNYEASLEDWETEYL

SEQ ID NO: 94790 - protein, 294 aa, Unknown
  Bacterial polypetide isolated from the Sargasso Sea
GQNAKKAFETKISSKLKNKVLIDYIKLIRKNKKKIINENWKDLRAAQSKKLKENLIKRLTLDDKKIDSIIKSIETIVKIKDPVDKVLVQWKRPNGLRIKRVTIPIGVIAVIYESRPNVTSDISTLCFKSGNCVVLRGGSEAFNSNKLLANLFRMSLHKNKINKNYVQFIQDKNRKLVDYLLSKMSKFLDVIIPRGGKGLVKKVQDLSSVPVIGHLEGICHTYIDEDANDKMSLKVTLNAKLRNTSICGATETLLIHKKKSGLVNSILKELEKNKCEIVADKKVKKIYKGKSKLA

SEQ ID NO: 94791 - protein, 199 aa, Unknown
  Bacterial polypetide isolated from the Sargasso Sea
MKKYLEKIGSNAKNAFEKKISNKKKNKVLNYYTQLIKRNKRKILSENAKDVKIAKSKKLRENLIKRLTLDQNKINSIIKSIKTIANFKDPVDLNLDTWKRPNGLKIRKVSIPIGIIGVIYESRPNVTSDVSTLCFKAGNCVILRGGSEAYFSNKILAELFRKSLEKNKINKNFVQFIENKNRKLVDYMLSKMSKFIDVI

SEQ ID NO: 94792 - protein, 225 aa, Unknown
  Bacterial polypetide isolated from the Sargasso Sea
KQDEYIDVLVPRGGRGLIETVSKNANMPVIKHLDGVCHVFVDSSADLSKALDVVVNSKTHRFGTCNAMETLLVSQTIAEAFCSTLYPKLIEMGVEIRGCPRAIQFDKRVKTASNADWYEEYLAPILSVKIVDSLDEAIAHIEKYGSKHTDCIVTEDYSQARYFLKMVDSSSVMINTSTRFADGYEYGLGAEVGISTDKIHARGPVGLEGLTSEKWVVFGDGHVRS

SEQ ID NO: 94793 - protein, 254 aa, Unknown
  Bacterial polypetide isolated from the Sargasso Sea
MKKILINIGTRSKEAFSQPINTNKKNKVLKDYLKLIKKNQYLILKENKKDINQAIKIKLKDNLINRLILNEKKILSIINSIKELIKLKDPTNNIIEKWKRPNGLEFSKISIPIGVIGVIYESRPNVTSDIASLCFKSGNPVILKGGSEAFYSNKILSNLFRKALKNNNVNQNFIQFINIKNRKVVDYLLTKMGKFVDVIIPRGGKSLVKKVQSISKIPTIGHLEGVCHSYVDKDADPKIATKVIINAKLRNTAI

SEQ ID NO: 94794 - protein, 213 aa, Unknown
  Bacterial polypetide isolated from the Sargasso Sea
MNDLLKNICKKSRKAFSIQLDTKKKDKVLEDYLRLILKNKDLILSENLKDIKIANKKRLKDNLVKRLVLNNKKILDITKSIKSIIKLKDPTNIVLKKWKRPNGLNISKVSIPIGVIGVIYESRPNVTSDVASLCFKSGNSVILKGGSEAFYSNRILSKLFRKSLKKNKVDENFVQFIDFKNRKVVDLLLTKMNDFIDVIIPRGGKSLVRKVQK

SEQ ID NO: 94795 - protein, 280 aa, Unknown
  Bacterial polypetide isolated from the Sargasso Sea
INSIKNIIKLKDPTNIVFEKWRRPNGLNISKISIPIGIIGVIYESRPNVTSDVASLCFKSGNTVILKGGTEAFNSNFILSKLFRKSLQKNNLDENFVQFVNVKNRKVVDFLLTRMNNFIDIIIPRGGKSLVKKVQDLSTVPIIGHLEGICHSYVDKDANPKIADKIIHNAKLRNTAICGATETILLHEKIIKKFGNRILKNLEKNGCKIIGDNKIRKTYGKKIKKATNKDWSKEYLSPIVSVKSVKNINEAINHINKYGTMHTDCIITQNKKSAKKFLNE

SEQ ID NO: 94796 - protein, 239 aa, Unknown
  Bacterial polypetide isolated from the Sargasso Sea
ELSKGLILERKTVPIGVLGVIFESRPDAVMQISSLAIRSGNGVILKGGSEANLTNTSIVKALQEGLNESGLDKNAICLLTSRKDSMSMLNLEKYINLIIPRGSNELVKFIQENTRIPVLGHADGICHLFIDIEANLEMALSVALDSKIQYPAACNAIETLLVHKDIAPAFLEKAIPLFNSNDVKLIGDKRSVELGIKYEASLEDWKTEYLDLILSIKIVDDLEEAITHIQKYSSKHTDG

SEQ ID NO: 94797 - protein, 150 aa, Unknown
  Bacterial polypetide isolated from the Sargasso Sea
MNLIGRKARKASEYKVTTEVKNKVLNDYAKLIKNEKKFIIYQNLKDINYARKRGLKENLIKRLHLNEDKLNGIINSILKIAKLRDPIDNTLDKWKRPNGLKIKRVSIPIGVIGVIYESRPNVTSDVASLCFKSGNVVIMKGGSEAINSNK

SEQ ID NO: 94798 - protein, 133 aa, Unknown
  Bacterial polypetide isolated from the Sargasso Sea
MISNYLKNIGLKSKIAVKNLVKIDAKKRNKILETYSRELFKNKKKIIRENTKDVKTCKRGDLIDRLILDEKKIESIRNSINQIAKFKDPLGKVIKKWKRPNKLIIKKVTVPIGVIGIIYESRPNVTCDVSSLC

SEQ ID NO: 94799 - protein, 166 aa, Unknown
  Bacterial polypetide isolated from the Sargasso Sea
MSIESNIIELGKRAKTASLNMKVCNSEKKNLALIKLNENLDKNRNKILQANKIDLKIGEKKSLTKPLLNRLTLTEKSIDGLITSIEDIIQIPDPIGITLEKWERPNGLQFRKISTPLGVLGVIYESRPNVTVDASCLSIKSGNCIILRGGSDSFHSSKELVNNITN

SEQ ID NO: 94800 - protein, 303 aa, Unknown
  Bacterial polypetide isolated from the Sargasso Sea
IIKKVSIPIGVIGIIYESRSNVTSDVSALCFKSGNVVILRGGSEAFHSNKILAKLFRKALKKKKCNENCVQFVQSKKRHHVDYLLSSMKNYVDLIIPRGGKSLVKKVLKKSAVSIVGHYEGLCHVFVDKEADLNTAIKVVKNSKMRNVSICGAAETLLIDKKCLKTHCKPILDHLTELGCKIIGDKIIRKFISRKIKIATEKDWKMEYLSPIISVKSVNGVEDAINHINKYGSSHTDSIVTKNKQTAKKFLSNINSSIAIHNASTQFADGGEFGFGAEVGISTNKLHPRGPIGLDQLTTYKYI

SEQ ID NO: 94801 - protein, 172 aa, Unknown
  Bacterial polypetide isolated from the Sargasso Sea
MLINIGTRSRLAFDKQINTNKKNKVLNKYVKLIEKNKNLILKENKKDINQAIKKKLRDNLINRLILNEKKISSIISSIKKIIKLKDPTNNVIEKWKRPNGLVFTKMSIPIGVIGVIYESRPNVTSDVASLCFKSGNPVILKGGTEAFYSNKILSNLFRKALKINKVDQNFVQ

SEQ ID NO: 94802 - protein, 264 aa, Unknown
  Bacterial polypetide isolated from the Sargasso Sea
EVISFKDPTHKVIAKWKRPNNLIINRVTMPIGVLGVIYEARPNVTSDVAILSFKSGNSAILRGGKEALQSNIIISNLFRSSLKRNNINQDCIQLVNNTDRKIVDLMLSKMSDYIDIIIPRGGKSLVKKVLELSKVPTIGHLEGLCHVYLDNQYNYDIAEKLILNSKLRRTSICGAAETLLINKSVKKNDVYKILQKLNIKGCKIIGDNKTKKIFEKTILAKENDWSTEYLDSKISVKIVNDLKEAIQHIKKYGTNHTECIISKK

SEQ ID NO: 94803 - protein, 189 aa, Unknown
  Bacterial polypetide isolated from the Sargasso Sea
MSIKIENLVKQLGKKGRNACLLMSNISSYKKNKTLENISKMIEKNKNLILKANKIDLSNATKNKLNSAKIDRLSLNEERIKDIQGSLHDIINFEDPINKIIEKRSRPSGIKIKKISTPIGLIGIIYESRPNVTIDAAALCIKSSNSAILRPGSESYQSCLALFNCINEGLIKTGLPEHLIQIIPTTNRI

SEQ ID NO: 94804 - protein, 230 aa, Unknown
  Bacterial polypetide isolated from the Sargasso Sea
DPIDKTLDKWKRPNGLDIKRVSIPIGVIGVIYESRPNVTSDVASLCFKSGNVVILKGGSEAINSNKALAKLFRKALKKNKVDENFIQFIDSKQKRLVDIMLSRMKKYIDVIIPRGGKNLVKKVLELSKIPIIGHLEGLCHTYIDKDAELKMAKEVVYNAKLRNTSICGATETILIHKNIVKKFSNPILQELENSGCKIIGDKILKNYYKGQVYPAKEKDWSTEYLSSIVS

SEQ ID NO: 94805 - protein, 260 aa, Unknown
  Bacterial polypetide isolated from the Sargasso Sea
KADKVRLASIKISQTENQNRIKALNFMADYLEKNTEEILKANSEDYERAEKKGISNALLSRLKLSKEKLNSGIEGVRKVGELSDPINQVQIKRELSGGLILERKTVPIGVLGVIFESRPDAVMQISSLAIRSGNGVMLKGGSEANLTNTSIVKALQEGLNESGLDKNAICLLTSRKDSMAMLNLERYVNLIIPRGSNELVKFIQENTRIPVLGHADGICHLFIDNEANLEMALSVALDSKIQYPAACNAIETLLVHKDIA

SEQ ID NO: 94806 - protein, 310 aa, Unknown
  Bacterial polypetide isolated from the Sargasso Sea
LEKNSKEILEANNADYLSAEKKGISRALLSRLKLSKSKLNSGIEGVRKVGDLADPVNQVQIKRELSKGLILERKTVPIGVLGVIFESRPDAVMQISSLAIRSGNGVMLKGGSEANLTNTSIVKALQEGLNESGLDKNAICLLTSRKDSMAMLNLEKYINLIIPRGSNELVKFIQENTKIPVLGHADGICHLFIDIEANLEMALSVALDSKIQYPAACNAIETLLVHKDIAPAFLEKAIPLFNSNDVKLIGDKRSVELGLKYEAKIEDWKTEYLDLILSIKIVDDLEAAIKHIQKYSSKHTDGIITENSNT

SEQ ID NO: 94807 - protein, 146 aa, Unknown
  Bacterial polypetide isolated from the Sargasso Sea
MKNYLFKLGLQAKKASNKTIKSKKKEQVLKDYCNLLLKNQLKIISENKKDLKKAKEKKLKENLINRLKIDHKKILQIINSTKTIIKFKDPVGQILERWKRSNGLKITKVTIPIGVVAVIYESRPNVTSDVASLCFKSGNPVIMKGG

SEQ ID NO: 94808 - protein, 284 aa, Unknown
  Bacterial polypetide isolated from the Sargasso Sea
MLKGGSEANLTNTAIVKALQQGLNESGLDKNAICLLTSRKDSMAMLNLEKYINLIIPRGSNELVKFIQENTRIPVLGHADGICHLFIDIEANLEMALSVALDSKIQYPAACNAIETLLVHKDIAPAFLEKAIPLFNSNDVKLIGDKRSVELGLKYEASLEDWKTEYLDLILSIKIVDDLEEAITHIQKYSSKHTDGIVTENSNTANKFMNVVDSAGVFHNCSTRFADGFRYGFGAEVGISTQTLPPRGPVGLEGLVTYKYFLKGDGNIVDDFSLGKAIYTHKDL

SEQ ID NO: 94809 - protein, 256 aa, Unknown
  Bacterial polypetide isolated from the Sargasso Sea
VKSGNAVILKGGREAVHSNRVLAEILRQTADDFEEMPVNALSLVESRDEVSQLVQMSEELDLIIPRGSNELVQSIQARAQVPVLGHADGICHVFIDANADPVKARKVVLDSKTDYPAVCNALETLLVDRELSSELLKKIMEDLVQAGVEIRACPDTQKKLEGHSQLEMGNASEEDWKTEHLEMVLSVKTVAGMEEAIQHINRYGSNHTDSIVTESHETAERFMNEVDSAGCFLERLDPVCRRLPLRTWCGSRRQYL

SEQ ID NO: 94810 - protein, 34 aa, Unknown
  Bacterial polypetide isolated from the Sargasso Sea
MHNTSTQFADGGEFGLGAEIGIATGKLHARGPVG

SEQ ID NO: 94811 - protein, 63 aa, Unknown
  Bacterial polypetide isolated from the Sargasso Sea
FLNGINSAIALHNTSTQFADGGEFGMGAEIGIATGKLHARGPVGVEQLTTFKYVVRGSGQSRP

SEQ ID NO: 94812 - protein, 158 aa, Unknown
  Bacterial polypetide isolated from the Sargasso Sea
MSIITELAQQAKKAARTLAILSESQKNAVLTDMAAAIRANKSKIIEVNEKEVARAKENNLDAAMVDRLILNDERIESMAEGIEVIVELDDPVGKERVIGTRPNGIEIKKMRIPLGVVCMIYEARPNVTADAGALCFKSGNAVILRGGKEALDTSLAIS

SEQ ID NO: 94813 - protein, 231 aa, Unknown
  Bacterial polypetide isolated from the Sargasso Sea
MKKYLNKIGKNAQKAFLKKLDTKLKNKVLTKFAKLIKKNKNKIIKENIKDINFAKKKKIKENIIKRLELNNEKINQIIKSVIKISKFKDPINITLENWRRPNGLKIKKVTIPIGIVGVIYESRPNVTSDVSSLCFKSGNCVILKGGSEAYFSNKIIAKLFRESLEINKVNKNYVQFVESRDRSVVDLILSKMDRYIDVIIPRGGKNLVKKVQNLSSVPTIGHLERICHTYV

SEQ ID NO: 94814 - protein, 150 aa, Unknown
  Bacterial polypetide isolated from the Sargasso Sea
MKNYLIKLGRQAKKALVTPVSSKKKDKVLKDYCNLISNNQLNIIRENKKDLRQAKNKKLKENLIKRLIIDKKKILQIINSVKIIRKFKDPVNQVMESWERPNGLRISKVTTSIGVVAVIYESRPNVTSDVASLCFKSGNPVILKGGSEAY

SEQ ID NO: 94815 - protein, 133 aa, Unknown
  Bacterial polypetide isolated from the Sargasso Sea
MSDYFQEILNHSKRASSAMSKLSAEDRSRILMNISGFLLSNKNEILKANQADVERAKSNNISAPMINRLVLTSEKIDQLSRDVEKIAQMQDPLDQTLESWTNATNGLQFTKVSVPIGVIGIIYESRPNVTIDA

SEQ ID NO: 94816 - protein, 232 aa, Unknown
  Bacterial polypetide isolated from the Sargasso Sea
MKKLLINIGKKSKSAFSNQVKSKKKDQVLKNYHQLIKKNKKIIIKENKKDIKNAYKKKLKDNLIKRLILNDEKILDIIRSIKKIIKLKDPTNIVLEKWKRPNGLNISRISIPIGVIGVIYESRPNVTSDVASLCFKSGNTVILKGGSEAFYSNKILSKLFRDSLKKNKINQNFVQFIDIKKRNVVDFMLTKMSKFIDVIIPRGGKNLIKKIQNQSSIPTIGHLEGVCHSYVD

SEQ ID NO: 94817 - protein, 63 aa, Unknown
  Bacterial polypetide isolated from the Sargasso Sea
FLNTVGSAIVMHNTSTQFADGGEFGLGAEIGIATGKLHARGPVGLEGLTTYKYIVRGNGQVRP

SEQ ID NO: 94818 - protein, 286 aa, Unknown
  Bacterial polypetide isolated from the Sargasso Sea
YESRPNVTADVSCLCFKSGNSVILRGGSESYFSNKIISNLFRKALLAYKVDKNFVQFIDVKKRSAVNFMLSKMDKFIDIIIPRGGKKLVSTVKKLSTVPTIGHLEGVCHTYIDKNADLKMSENIILNAKMRNTSICGATETLLMHEKILKKFVNPILNRLEKSKCKIYADNKIKKIFKGKALKAKKNNWGKEYLSSKISVKSVKDIKEAVDHVNRYGTMHTDAIITKNKKNANFFLKNVKSSIAIHNSSTQFADGGEFGFGGEVGISTNKIPPRGPVGLEQLISYK

SEQ ID NO: 94819 - protein, 287 aa, Unknown
  Bacterial polypetide isolated from the Sargasso Sea
MNSIGTKAQKAIKQKINSNKKNKVLIDYAKLLDKEKKIIINQNLKDIKFAKKIGLSENLIDRLKLNQKKIDSIKDSIIKIAKLKDPVDNTLSKWKRPNGLSISRISIPIGVIGVIYESRPNVTSDVASLCFKSGNAVILKGGSEAINTNKVLARLFRASLKKNKVDENFVQFIDSKQRKLVDIMLSKMKTYIDVIIPRGGKKLVKRIQEVSTIPIIGHLEGLCHTYIDKDAELKMAREVVYNAKLRNTSICGATETIIIHKNIINKFINPILQKLESNGCKIYGDKI

SEQ ID NO: 94820 - protein, 122 aa, Unknown
  Bacterial polypetide isolated from the Sargasso Sea
AADKRVKNASESDWSTEYLDSIISIKQVTGVDDAIMHINRYGSEHTDAIVTNDENIAEEFLSGVNSAIVLHNASTQFADGGEFGMGAEIGIATGKLHARGPIGLEQLTTFKYVVRGNGQVRP

SEQ ID NO: 94821 - protein, 309 aa, Unknown
  Bacterial polypetide isolated from the Sargasso Sea
KFQKISVPLGVLGVIYESRPNVTIDASCLSLKSNNSLILRGGSDSFHTSFELVKIVTDSFNKAGLPKNIIQMIPTTKREAVDHLLSMNHYVNVIIPRGGKSLIKKINEKSKIPVIKHLEGLCHIFVDKEANIELAKKVIFNSKLRRPEICGATETLLIDSEIKEKAYQLLLPLHEAGCEIKGDEFIQTLDKNFNSATEEDWSIEYLDKIISVKIVNGVKGAIEHINKYSSNHTESIITENEQKFIEFYNNIDSAIILKNASTQYADGGEFGFGAEIGISTDKLHVRGPVGAKHLTTFKYVVHGSGQIRP

SEQ ID NO: 94822 - protein, 225 aa, Unknown
  Bacterial polypetide isolated from the Sargasso Sea
MSDYIDVIVPRGGKGLVGKVKKFSKVSVIGHLEGNCHVYVDKNSSLQMAKKIVLNSKMRRTSVCGAAETLLIDKKCLKSHGIPIINELIFSGCEVIADKKINKLFGNTLKTAKESDWETEYLNSKISAKVVNGVEEAVDHILRYGTMHTDSIVTNNKKTAQIFLNGINSSIAVHNASTQFADGGEFGFGGEIGISTNKMPPRGPVGIDQLTSYKYIVTGKGSIRS

SEQ ID NO: 94823 - protein, 199 aa, Unknown
  Bacterial polypetide isolated from the Sargasso Sea
MSIENNIIELGKRAKTASLNMKICSSDQKNLALTKLTKNLDKNRDKILEANKIDLENGEKKSLAKPLMNRLTLTEKSIDGLITSIEDIIEIPDPIGITLEKWERPNGLQFRKISTPLGVLGVIYESRPNVTVDASCLSIKSGNCIILRGGSDSFHSSKELVNNITNAFTEAGLPEHCVQMINTPEREAVDHLLSMRDYV

SEQ ID NO: 94824 - protein, 124 aa, Unknown
  Bacterial polypetide isolated from the Sargasso Sea
MNKKDIKKYVLRVCSSSYEASKVARTLSNAQRNKIISSIIASLRKDKNTIFKKNEIDIKAAKIKKMSESLIDRLLINDKRISSMIDGLKKIKSIPDSLFKKVNKTIQPSGITVEQMRVPLGVIG

SEQ ID NO: 94825 - protein, 211 aa, Unknown
  Bacterial polypetide isolated from the Sargasso Sea
KGLVKLISEESRVPVIKHLDGICHVYIDEDSDAKKSIDIAFNAKTYRYGICGAMETLLVHREVAKNILPQLSERYSSEGVELRGCKETKEIIKVKTANEEDWSTEYLAPILSVKIVGGIEEAIKHINLFGSSHTDSIVTENNEKVAIFFDQVDSSSVMHNLPTCWADGFEYGLGAEVGISTDKIHARGPVGLEGLTSQKFIVKGNSQLRGS

SEQ ID NO: 94826 - protein, 310 aa, Unknown
  Bacterial polypetide isolated from the Sargasso Sea
KNSKEILEANNADYLSAEKKGISSALLSRLKLSKAKLNAGIEGVRKVGELADPVNQVQIKRELSKGLILERKTVPIGVLGVIFESRPDAVMQISSLAIRSGNGVMLKGGSEANLTNTSIVKALQEGLNESGLDKNAICLLTSRKDSMAMLNLEKYINLIIPRGSNELVKFIQENTRIPVLGHADGICHLFIDNEANLKMALSVALDSKIQYPAACNAIETLLVHKDIASAFLEKAIPLFNSNDVKLIGDKRSVELGLKYEASLEDWKTEYLDLILSIKIVDDLEEAITHIQKYSSKHTDGIITENLNIAQ

SEQ ID NO: 94827 - protein, 194 aa, Unknown
  Bacterial polypetide isolated from the Sargasso Sea
MANIFEVPQPGNDLLEKADHVRLASIKISQTENQDRIKALNFMADYLEKNTKEILDANNVDYQSAEKKGISRALLSRLKLSKEKLNSGIEGVRKVGDLADPVNQVQIKRELSKGLILERKTVPIGVLGVIFESRPDAVMQISSLAIRSGNGVILRGGSEANLTNTAIVKALQEGLNESGLDKNAICLLTSRKDS

SEQ ID NO: 94828 - protein, 148 aa, Unknown
  Bacterial polypetide isolated from the Sargasso Sea
IANEFLPLIFDEFKKYEVELRGCEKTNEIININLAIEEDWKTEYLEPILSIKVVDGISEAISHINHFGSGHTDCIVTEDDSAKKIFLTNVDSSSVMHNLPTCYADGFEYGLGAEVGISTDKLHARGPVGLEGLTSQKFIVEGSGQLRK

SEQ ID NO: 94829 - protein, 256 aa, Unknown
  Bacterial polypetide isolated from the Sargasso Sea
MEKKELLNLAKKTKEASRELSILTNDQKNNILDKISINLKKYSSNILENNIIDIENAKKNKKDYSFIDRLTLSDKKIENMAHAIQEIINLKNPVGEILEERTLSGEMNLKKISVPLGVIGVIYESRPEITTDIGCLGIKSGNAVILKGGKESINTNIILEKIIKDSSKEVGCNPNIVNVIKSTDRKITEEFLLLDEYIDLMIPRGGESLVNMVGEKAKMPSISGGVGVSHIYVDEHADFEKAIKITFNAKVSKPSV

SEQ ID NO: 94830 - protein, 189 aa, Unknown
  Bacterial polypetide isolated from the Sargasso Sea
ALSVSLDSKIQYPAACNAIETLLVHKDIAPVFLENAIPLFNANDVKLIGDKRSVELGLIYKASLEDWQTEYLDLILSIKIVENLDEAITHIQKFSSKHTDGIITENLSTANKFMNVVDSAGVFHNCSTRFADGFRYGFGAEVGISTQTLPPRGPVGLEGLVTYKYFLKGNGNIVDDFSSGKAIYTHKDL

SEQ ID NO: 94831 - protein, 172 aa, Unknown
  Bacterial polypetide isolated from the Sargasso Sea
MKKYLTSIGKNSNKALSYKINFKTKNKVLKKFSELIKKNKLKIIKQNKKDIKFAEKKKLRKNLIDRLQLNDIKISEIIKSVNNIIKLKDPTNITLAKWKRPNGLIIKKVTIPIGVIGVIYESRPNVTADVSSLCFKSGNCVILRGGSESYFSNKILAHLFRKALKFNKVDQN

SEQ ID NO: 94832 - protein, 144 aa, Unknown
  Bacterial polypetide isolated from the Sargasso Sea
LSIILDELFKYNVKLRGCKNILNMNTNINPASEDDWYTEYLAPIIAIKIVKNIDEAIHHISKYGSSHTDAIVSSDKKSIDQFKKRVNSSSIMINTSTRFADGFEYGLGAEIGISTDKLHARGPVGLTGLTNLKYIVDSKGKIRN

SEQ ID NO: 94833 - protein, 157 aa, Unknown
  Bacterial polypetide isolated from the Sargasso Sea
MIKQKIKNYVLSVCRASHEASKLSRTLSNTERNKILNAIIDQLSDHKDHIFKRNSLDVKIAIKNKMSDALIDRLLINDKRISSMIEGLKKIKSIPDTLFKKINKTIQPSGISVEQMRVPIGVIGMIYESRPNVTIDAAGLSIKSGNSIILRGGSESI

SEQ ID NO: 94834 - protein, 158 aa, Unknown
  Bacterial polypetide isolated from the Sargasso Sea
MIEKLNSVELICKKAKDASYKLAISSNKERNIALKLIANQILKSINKITAANKKDYIAAKKNKIPSPLLDRLLLNEERIKNMAKDVLNISKLEDPIGKELIKKLRPNGLKITKVSVPLGVIAVIFESRPNVACDVACLCIKSGNAVILKGGKEAKHTR

SEQ ID NO: 94835 - protein, 129 aa, Unknown
  Bacterial polypetide isolated from the Sargasso Sea
MNYIKNIGEKSLKAFENLKNVEHSKIKRALKEYASLVKKNKFKILRENSKDIKKAKRKKLIDRLILNSAKINQIVSSIKTIEKFKNPVGQVLSKWKRSNKLKIEKVSIPIGVISVIYESRPNVTADVAS

SEQ ID NO: 94836 - protein, 136 aa, Unknown
  Bacterial polypetide isolated from the Sargasso Sea
MTDLSVYIEHLTKEARQASFAMSIASSEAKSFALNAIAARLDASRDQLKSANAKDLERSSDAGLEQALIDRLKLDDIAIDQMVEGIAQVDRLADPIGEITDLSFRPSGIQVGRMRVPLGTIGIIYESRPNVTADAA

SEQ ID NO: 94837 - protein, 296 aa, Unknown
  Bacterial polypetide isolated from the Sargasso Sea
ESRPNVTSDVSSLCFKSGNCVILRGGSEAYFTNKILVNLFRKSLKKNKVDENYVQFIDTKNRKAVDFMLSKMKNYIDIIIPRGGKNLVKKVQKLSNVPVIGHLEGICHTYIDKDANLKMTIKVLINAKLRNTAICGATETILLHKKIIKKFAKPIIKTLEINNCQVFADRNIRKTFKGKSKLASKKDWSTEYLSSKVSIKTVNNIQEAINHINEYGTMHTDAIITKNKNNAEIFLNDVKSSIAIHNASTQFADGGELGFGGEVGISTNKMPPRGPVGLNQLVSYKYKIVGTGQIRK

SEQ ID NO: 94838 - protein, 207 aa, Unknown
  Bacterial polypetide isolated from the Sargasso Sea
FIDAKADPEKATKLVLDSKTDYPAVCNALETLLVDRELSSELLKKIMEDLVQAGVEIRACPDTQKKLEGHSQLKMGNASEEDWKTEYLEMVLSVKTVAGLEEAIQHINRYGSNHTDSIVTESHEAAERFMNEVDSAGVFWNASTRFADGFRYGLGAEVGVSTCKTHARGPVGLEGMVIYKYKLYGSGQGAGSYSKGERKFMHQPLET

SEQ ID NO: 94839 - protein, 276 aa, Unknown
  Bacterial polypetide isolated from the Sargasso Sea
MLQNVKLARDASLTMANIETSQKNKILHDLAEALRANYDRILVENTKDMNIANKMLESGELTYSACRRVMLNKVKIDQMANNCECVADLPDPAGKTVKVTRLDDGLDLHCVSCPIGVIMVIFESRPDVVVQISALALKSGNSVILKGGKESKNSNRVLAGIIRNTLAKSDSALENVVILVETRDEVTELVKIGSGIDLIIPRGSYELVRHIQENARAPVLGHGDGICHVYLHSDAEQGKSLDVSLDAKLDYPAVCNALETLLVHQNIQTVGLRTYC

SEQ ID NO: 94840 - protein, 123 aa, Unknown
  Bacterial polypetide isolated from the Sargasso Sea
MKNYLNNIGIRSKNAFKNLGYVDLKRRNNVLKTYIKSLKSNKNKIIKENLKDIKLCKREELIDRLIIDNKKIENMRSSIYEIVKFKDPLGKVLEKWKRPNNLLIKKVTVPIGVIGIIYESRPD

SEQ ID NO: 94841 - protein, 124 aa, Unknown
  Bacterial polypetide isolated from the Sargasso Sea
MKELITIGKNARIASQTKIDKKTKNNVLEKFLFLIEKNKNEILLANNKDISSASKKNIPENFISRLRLDKQKIESIQKSIKKIKQLDDPTNKIIEKWKRPNGLIISKISTPIGVIGIIYESRPN

SEQ ID NO: 94842 - protein, 271 aa, Unknown
  Bacterial polypetide isolated from the Sargasso Sea
MKNFMYKIGLNAISASKNKINSKLKNRILYKYIYLIKKNNQLIIKENKRDIKLALQKKIRNNLINRLIIDKKKLNNICNSIKGIIKLKDPVDVTIKKWKRPNNLFIKKVSIPLGTIGVIFESRPNVACDVSSLCFKSGNSVILRGGSEALNSNKILVKLFRKALKINKVDPNFVQLIEKKSRSYVNFMLSNMSKYIDVIIPRGGKGLVKKVQKLSKVPTIGHLEGICHTYIDKEADLQMAIKIVHNAKLRNTSICGATETLLLHKKIAKKF

SEQ ID NO: 94843 - protein, 146 aa, Unknown
  Bacterial polypetide isolated from the Sargasso Sea
TACPNVVKGLLDSGCEVRGDSATQLLDDRVLAATAEDWDTEYLAPIVSIKVVDGLQDAILHVGKHGSHHTDSIITEDNRSAEEFMKRVDSGIVLHNASTQFADGGEFGMGAEIGISTGKLHARGPVGVEQLTSYKYLVRGEGQVRP

SEQ ID NO: 94844 - protein, 141 aa, Unknown
  Bacterial polypetide isolated from the Sargasso Sea
MSKELSTLLNEIGIKAKSASAILNTATSDQKNKFFDFAVASIQENADVILAANKLDIKAAENNKKDEAFIDRLALDKSRLQGICDTLTEIKSFNDPVGRVLASWDRPNGLNISRVATPLGVIGLIFESRPNVAADAGGLCL

SEQ ID NO: 94845 - protein, 173 aa, Unknown
  Bacterial polypetide isolated from the Sargasso Sea
LDAGKLRGAIDGVRKLASLRDPLGKRQMHRELDQGLVLERIAVPLGVVGVIFEARPDVVVQIASLAIRSGNGAMLKGGSEARCTNEAVMEALKLGLGSSAVAPDALTLLTTRQESLALLRLDGLVDLIIPRGSNELVRFIQDNTRIPVLGHADGICHLYVDAAADVDQAVRIA

SEQ ID NO: 94846 - protein, 72 aa, Unknown
  Bacterial polypetide isolated from the Sargasso Sea
FGGAAAKRFAARVDTAVVLVNASTRFNDGGELGLGAEIGISTDKLHARGPCGPRELTTYKYVVTGNGQTKGS

SEQ ID NO: 94847 - protein, 285 aa, Unknown
  Bacterial polypetide isolated from the Sargasso Sea
MNLIGIKARKASEYKVTTEVKNKVLNDYAKLIKNEKKFIINQNSKDINYARKKGLKENLIKRLHLNENKLDGIINSILKIVKLRDPIGSTLEKWKRPNGLNIKRVSIPIGVIGVIYESRPNVTSDVASLCFKSGNVVILKGGSEAINSNKALAKLFRKALKKNKVDENFIQFIDSKQRKLVDIMLSKMKKYIDVIIPRGGKNLVKKVLELSKVPIIGHLEGLCHTYIDKDAELKIAKKVVYNAKLRNTSICGATETILIHKNIVKKFSNPILQKLENSGCKIVEI

SEQ ID NO: 94848 - protein, 239 aa, Unknown
  Bacterial polypetide isolated from the Sargasso Sea
VNLEKYINLIVPRGSNELVKFIQENTRIPVLGHADGICHLFIDIEANLEMALSVALDSKIQYPAACNAIETLLVHKDIAPAFLEKAIPLFSSNDVKLIGDKRSVELGLKYEASLEDWKTEYLDLILAIKIVDDLDEAITHIQKYSSKHTDGIITENSHTANKFMNVVDSAGVFHNCSTRFADGFRYGLGAEVGISTQTLPPRGPVGLEGLVTYKYFLKGDGNIVDDFSSGKAIYTHEDL

SEQ ID NO: 94849 - protein, 40 aa, Unknown
  Bacterial polypetide isolated from the Sargasso Sea
GLGAEIGISTDKIHARGPVGLEGLTTEKYVVFGNGEIRKR

SEQ ID NO: 94850 - protein, 369 aa, Unknown
  Bacterial polypetide isolated from the Sargasso Sea
MNIRETIIDLGKKAKIASQEMRLIKNKEKNLALENLIKNINLNSEQIITANEKDVELALKKNLSSPLINRLKISSNNIKNLTKSINEIITQPDPIGITLEKWSQPNGLKFKKITIPLGVLGVIYESRPNVTVDASCISLKSGNSIILRGGSDSFNTSQILVKIISNSFNDVGIPKNIVQMIPFADRESVDHLLNMTNYVDVIIPRGGKSLIEKIKSTSKIPVIKHLEGICHVYVDFEANINIAKKIILNSKLRRPEICGATETLLIDERIKDRAIDLLLPLHDQGCEIRGDDFVKSLNNNFKKAKEIDWSTEYLEKILSVKVVNGVEDAINHINEYSSGHTDCIVTENEDTFQKFYNNIDSAIILKNAS

SEQ ID NO: 94851 - protein, 376 aa, Unknown
  Bacterial polypetide isolated from the Sargasso Sea
MIKRYFEIIGRRSKKAFENKVKNELKNKVLNHYAHSIQKNVKSILSQNKKDISYAKKIGLKDNFISRLELDTKKLRAIISSINSISKLKDPTDRILEQWRRPNGLKIKKVSVPIGVIGVIYESRPNVTSDVSCLCFKSGNSVILKGGSEAYFTNKILSNLFRRSLKFHKIDPNFVQFVDMRGRKVVDHMLSKMTKYIDIIIPRGGKSLVKKVQDTSKLPVIGHLEGLCHTYIDSSANLKMALKVVLNAKLRNTAICGATETILLNDKLIKKFSKLLITKLENNGCVVYTDNKIRKVYKGNSFLASEKDWMTEYLNSKISIKSVKNVIEAINHINKYGTQHTDAIICKNKKTSKIFLKNVKSSIAKHNTSTQFADGG

SEQ ID NO: 94852 - protein, 256 aa, Unknown
  Bacterial polypetide isolated from the Sargasso Sea
MKNYLKNIGIKSNYAFKTKIKENKKNEVLKKFIFLLKLNQNKIIRQNKRDLVKAKKKNIKYNLIQRLEINKIKIHQMIESIKKIIKLKDPTNKVIEKWKRPNGLIIKKVTVPIGIIAVIYESRPNVTSDIASLCFKAGSCVILRGGSEAYFTNKIISDLFRKALKINKVNLNFVQFIEKTDRDLVNDLLSKMENYIDIIIPRGGKNLVEKVKKLSSVPFIGHLAGVCHTYIDKDADLKKSIRIVFNAKLRNTAICG

SEQ ID NO: 94853 - protein, 255 aa, Unknown
  Bacterial polypetide isolated from the Sargasso Sea
MNLIGIKARKASEYKVTTEVKNKVLNDYAKLIKNEKKFIINQNSKDINYARKKGLKENLIKRLHLNENKLNGIINSILKIAKLRDPIDNTLEKWKRPNGLNIKRVSIPIGVIGVIYESRPNVTSDVASLCFKSGNVVILKGGSEAINSNKALAKLFRKALKKNKVDENFIQFIDSKQRRLVDIMLSKMKKYIDVIIPRGGKNLVKKVLELSKVPIIGHLEGLCHTYIDKDAELKMAKEVVYNAKLRNTSICGATE

SEQ ID NO: 94854 - protein, 380 aa, Unknown
  Bacterial polypetide isolated from the Sargasso Sea
MNKFMNLIGTKSRKASERKINTETKNKVLILYAQLIDKEKKSILRENIKDIAFAKNKGLKENLINRLRIDDIKLRAIKDSINQISKLKDPVNVTLKKWSRPNGLNIKRVTIPIGVIGVIYESRPNVTSDVASLCFKSGNSVILKGGSEALNTNRILAKLFRQALKKNKVNENYIQFVDSKDRKMVDIMLSKMKKYIDVIIPRGGKNLVKRVQEFSKVPIIGHLEGICHTFVDKDAELNMASKVIYNAKLRNTSICGATETILLHKKIVKNFCNPILKKLEDKNCKIYGDNLLRKYYKGKVYPAKEKDWSTEYLKAAVSVKVVKNSEEAINHINKYGTMHTDSIITKNKKTAKRFLKNVKSSIAMHNTSTQFADGGEFGFG

SEQ ID NO: 94855 - protein, 315 aa, Unknown
  Bacterial polypetide isolated from the Sargasso Sea
MNLIGIKARKASEYKVTTKVKNKVLNDYAKLIKNEKKFIINQNSKDINYARKKGLKENLIKRLHLNENKLDGIINSILKIAKLKDPIDSTLEKWKRPNGLNIKRVSIPIGVIGVIYESRPNVTSDVASLCFKSGNVVILKGGSEAINSNKALAKLFRKALKKNKVNENFIQFINSKQRKLVDIMLSKMKKYIDVIIPRGGKNLVKKVLELSKVPIIGHLEGLCHTYIDKDAELKIAKEVVYNAKLRNTSICGATETIIIHKNIVKKFSNPILQPLEDSGCKIIGDKILKSYYKGQIYPAKKKDWSTEYLASNCIC

SEQ ID NO: 94856 - protein, 393 aa, Unknown
  Bacterial polypetide isolated from the Sargasso Sea
MKNKVLNHYALSIKKNKKSILLQNKKDINYAKKIGLKYNFISRLELDTKKLGNIISSINSISKLKDPTDRILEQWKRPNGLKIKKVSVPIGVIGVIYESRPNVTSDVSCLCFKSGNSVILKGGSEAYFTNKILSNLFRRSLKFHKIDPNFVQFVDLRSRKAVDHMLSKMTKYIDIIIPRGGKSLVKKVQDTSKLPVIGHLEGLCHTYIDSSANLNMALKVVLNAKLRNTAICGATETILLNEKLIKKFSKSLITKLENNGCVVYTDNKIRKVYKGNSFLASEKDWMTEYLASKISIKSVKNVIEAINHINKYGTQHTDAIICKNKKTSKIFLKNVKSSIAMHNTSTQFADGGEFGFGAEVGISTNNLPPRGPVGLGQLVSYKYEVIGSGQIRK

SEQ ID NO: 94857 - protein, 199 aa, Unknown
  Bacterial polypetide isolated from the Sargasso Sea
IPVIQHFKGVCHLYVDKDANQDIALNLLLNGKTQRTGVCNALEGLLVHKDIAPRFLPRVAKALAEHQVKINACPQSAAYFDACTYMTEEDFGQEYLDLEIAIRQVDSFEVATQHIAKFGSHHTEVICTDNELTAARFQRAVNASVVMVNASSRFSDGSELGLGAEIGIATTKLHAYGPMGLEALTTEKYLVSGTGQIRA

SEQ ID NO: 94858 - protein, 189 aa, Unknown
  Bacterial polypetide isolated from the Sargasso Sea
ALSVALDSKIQYPAACNAIETLLVHKDIAPAFLEKAIPLFNANDVKLIGDKRSVELGLNYEASLEDWETEYLDLILSIKIVDDLEAAIIHIQKYSSKHTDGIITENSNTANRFMNVVDSAGVFHNCSTRFADGFRYGFGAEVGISTQTLPPRGPVGLEGLVTYKYFLKGDGNIVDDFSSGKAIYTHKDL

SEQ ID NO: 94859 - protein, 251 aa, Unknown
  Bacterial polypetide isolated from the Sargasso Sea
VSQLVQMSEELDLILPRGSNELVQSIQARAQVPVLGHADGICHVFIDANADPEKARKVVLDSKTDYPAVCNALETLLVDRELNPELLKKIMEDLVQAGVEIRACPDIQKKLEGHSQLKIGNASEEDWKTEHLEMVLSVKTVAGLEEAIQHINRYGSNHTDSIVTESHEVAERFMNEVDSAGVFWNASTRFADGFRYGLGAEVGVSTCKTHARGPVGLEGMVIYKYKLYGSGQGAGSYSKGEREFMHRPLET

SEQ ID NO: 94860 - protein, 230 aa, Unknown
  Bacterial polypetide isolated from the Sargasso Sea
MVQSIQARAQVPVLGHADGICHVFIDANADPEKAGKVVLDSKTDYPAVCNALETLLVDREFNPEFLKKIVEDLAQAGVEIRACPDTQKKLEGHSQLEIGNASEEDWKTEHLEMVLSVKTVAGLEDAIQHINRYGSNHTDSIVTESHETAERFMNEVDSAGVFWNASTRFADGFRYGLGAEVGVSTCKTHARGPVGLEGMVIYKYKLFGSGQGVGSYSKGERKFMHQPLKT

SEQ ID NO: 94861 - protein, 393 aa, Unknown
  Bacterial polypetide isolated from the Sargasso Sea
MRELINIGKNAKKAFSSSISSNKKNQVLDDYQKLILINQSKIIYENKKDLNFAIQKKLKENLIKRLSLNKEKISLIIKSIKSIKNFKDPVNNVLEKWQRPNGLKISKVTTPIGVIGVIYESRPNVTSDVASLCFKSGNPVILKGGSEAYYSNKILSNLFRKALKKNKINLNYVQFIEQKNHKIVDFILSKMSKYIDVIIPRGGKNLVKKVQSLSRIPVIGHLEGVCHTYIDLNANIKLAQKVVSNAKLRNTAICGATETILVHKKILKKFCDKILINLQNKGCKIIAEKKIKKYFKGKFIVAKKKDWSKEYLAPIVSVKIVNNFKDAIKHINQYGTMHTDAIITKNTSVAKIFLKEVKSSIAMQNTSTQYADGGEFGFGGEVGISTNTLPPRG

SEQ ID NO: 94862 - protein, 412 aa, Unknown
  Bacterial polypetide isolated from the Sargasso Sea
MNLIGRKARKASEYKVTTEVKNKVLNDYAKLIKNEKKFIINQNSKDINYARKRGLKENLIKRLHLNENKLNGIINSILKIAKLRDPIDNTLDKWKRPNGLNIKRVSIPIGVIGVIYESRPNVTSDVASLCFKSGNVVILKGGSEAINSNKALAKLFRKALKKNKVDENFIQFIDSKQRKLVDIMLSKMKKYIDVIIPRGGKNLVKKVLELSKVPIIGHLEGLCHTYIDKDAELKMAKEVVYNAKLRNTSICGATETILIHKNIVKKFSNPILQALENNGCKIIGDKILKSYYKGQVYPAKEKDWSTEYLASIVSVKVVKNSEEAIKHINKYGTMHTDSIITKNKKTAKYFLKNVKSSIAMHNTSTQFADGGEFGFGGEVGISTNTLPPRGPVGLNQLISYKYEITSNGKIRN

SEQ ID NO: 94863 - protein, 412 aa, Unknown
  Bacterial polypetide isolated from the Sargasso Sea
MNLVGAKARKACEHEVNTIVKNKVLNKYAQLLQKEKKLILKQNLKDIGYARKIGLKDNLVNRLLINETKLKDIQNSIIKISKLKDPINNTLEKWKRSNGLNISKVSIPIGVIGVIYESRPNVTSDVASLCFKSGNPVILKGGSEAINTNRILAKIFRKALKVNKVDENFIQFIDTKQRRVVDIMLSDMKKYIDVIIPRGGKNLVKRVQELSKVPIIGHLEGLCHTYVDKDANLNMAKKVVYNAKLRNTSICGATETILIHKKVVKDFCNPILSELENKSCKIYGDRFLKKYYKGKIFPAKEKNWSTEYLAPAVSVKTVNNLNEAIDHINKYGTMHTDSIITSNKKTAKNFLRNVKSSIAMHNTSTQFADGGEFGFGGEVGISTNTLPPRGPVGLNQLVSYKYEITSSGKIRK

SEQ ID NO: 94864 - protein, 415 aa, Unknown
  Bacterial polypetide isolated from the Sargasso Sea
MNILETINELGNKAKTASTKIRVLKPKEKKIAYEFLENNLKDNIKKILDANKLDIDNAIKNNLSPPLINRLKVTEESILGIIQSVSDIKNLPEPIGNILESWEQPNGLKFSKISVPLGVLGVIYESRPNVTIDASCLALKSNNALILRGGSDSFHSSFELVKIITNSFDKAGLPKNIIQMIPTTEREAVDHLLAMNNHINVIIPRGGKSLIKKINEKSKIPVIKHLEGLCHVYVDKEANIEVAKKVIFNSKLRRPEICGATETLLIDYSIKERSSELLFPLYEAGCEIKGDEFIQSLDKNFNPATEQDWSIEYLDKILSVKIVNGVQGAIDHINEYSSNHTESIITENDETFKEFYNNIDSAIILKNASTQYADGGEFGFGAEIGISTDKLHVRGPVGAKHLTTFKYIVNGSGQI

SEQ ID NO: 94865 - protein, 290 aa, Unknown
  Bacterial polypetide isolated from the Sargasso Sea
MNLIGIKARKASEYKVTTEVKNKVLNDYAKLIKNEKKFIINQNSKDINYARKKGLKENLIKRLHLNENKLDGIINSILKIAKLRDPIDSTLEKWKRPNGLNIKRVSIPIGVIGVIYESRPNVTSDVASLCFKSGNVVILKGGSEAINSNKALAKLFRKALKKNKVNENFIQFIDSKQRTLVDIMLSKMKKYIDVIIPRGGKNLVKKVLELSKVPIIGHLEGLCHTYIDKDAELKMAKEVVYNAKLRNTSICGATETILIHKNIVKKFSNPILQALENSGCKIIGDKILKS

SEQ ID NO: 94866 - protein, 412 aa, Unknown
  Bacterial polypetide isolated from the Sargasso Sea
MNLIGAKARKACEHKVNTIVKNKVLNKYAQLLEKEKKLILKQNLKDIDYAKKIGLKDNLVKRLLINETKLKDIQNSIIKISKLKDPINNTLEKWKRSNGLNISKVSIPIGVIGVIYESRPNVTSDVASLCFKSGNPVILKGGSEAINTNRILAKIFRKALKINKVDENFIQFIDTKQRRVVDIMLSDMKKYIDVIIPRGGKNLVKRVQELSKVPIIGHLEGLCHTYVDKDANLNMAKKVVYNAKLRNTSICGATETILIHKKVVKNFCNPILSKLENKNCKIYGDRFLKKYFKGKIFPAKEKNWSTEYLAPAVSVKTVNNLDEAIDHINKYGTMHTDSIITSNKKTAKSFLRNVKSSIAMHNTSTQFADGGEFGFGGEVGISTNTLPPRGPVGLNQLVSYKYEITSSGKIRK

SEQ ID NO: 94867 - protein, 220 aa, Unknown
  Bacterial polypetide isolated from the Sargasso Sea
MAAEELKTIDTDTKNKVLNDMASELINDADEIIEANKIDLENAKQLELTAALTDRLTLNKERIQGMSDGLKKIIPLEDPVGKVTESWTSDDGLNINKVRSPFGVIGIIYEARPNVTSDVSGLCLKSGNASILRGSSYCLDSNLKILNTLQKALEKNNLSKNCIQLIESKDREDTIEFMNMTKYIDLMVPRGGRGLIDTLVNNSKSSFILDGDGKRASLYT

SEQ ID NO: 94868 - protein, 328 aa, Unknown
  Bacterial polypetide isolated from the Sargasso Sea
MNIGKKSKRAFLKKLNSKKKNKVLNDYCHLIDKNRGLIINENKKDIKNAIKKKLKKNLIQRLLLDDKKISSITNSVKKIIKLRDPTGIILEKWKRPNGLNISKISIPIGVIGVIYESRPNVTSDVSSLCFKSGNTVILKGGSEAFYSNLILSKLFRKSLKKNGVDENFVQFINFKNKKVVDFLLTSMSKFIDVIIPRGGKNLVKKVQELSNVPTIGHLEGVCHSYIDKDANLKTANKIIYNAKLRNTAICGATETILLHEKIIKNIGNQVLKNLENNGCKIIGDKKIRKIYSNRIKKASIKDWSKEYLAPIVSVKSVKNIDEAIEHVN

SEQ ID NO: 94869 - protein, 157 aa, Unknown
  Bacterial polypetide isolated from the Sargasso Sea
MKNYLNNIGIKSKNAFKNLGYVDLKKRNNVLETYLKSLKSNKNKIIKENLKDIKLCKREELIDRLIIDNKKIENMRSSIYEIVKFKDPLGKVLEKWKRPNNLLIKKVTVPIGVIGIIYESRPDVTSDVSSLCLKSGNVAIFRGGSESFDSNRILANL

SEQ ID NO: 94870 - protein, 416 aa, Unknown
  Bacterial polypetide isolated from the Sargasso Sea
MNKFMNLIGVKARKASEIKIDTKIKNKVLNDYALLLDKEKKNILIENKKDVNFAKKSRIKENLINRLSIDLIKLKGIKDSIKKISKLKDPVNVTLEKWRRPNGLNIKRVSVPIGVIGVIYESRPNVTSDVASLCFKSGNPVILKGGSEAINTNRILANLFRKALKKNKVNENYIQFIDSKDRKMVDIMLSKMDKFIDVIIPRGGKNLVKRVQDFSKVPIIGHLEGLCHTYIDKEAELKMATNIVYNAKLRNTSICGATETILMHEKIVKKFCNPILKKLEDNNCKIYGDNFIKKNYSGTLYPAKEKDWSTEYLTAAVSVKVVKNLKQAINHINRYGTMHTDSIVTKNKKTAAQFMTNIKSSIAMHNTSTQFADGGEFGFGGEVGISTNTLPPRGPVGLEQLISYKYEISSQGKIRD

SEQ ID NO: 94871 - protein, 165 aa, Unknown
  Bacterial polypetide isolated from the Sargasso Sea
MKNILIIGKKSKKAFENLKKVNHNRINKTLDDYIKFILKNKKKIIKENAKDVKKLKRKNILDRLILDEKKIQDIVKSITEIKKFPNPIGKTLASWTGKNKLNIKRMTTPIGVIGVIYESRPNVTADVAALCLKSSNCSILRGGSEAFYSNKILSDLFRKSLRKNE

SEQ ID NO: 94872 - protein, 155 aa, Unknown
  Bacterial polypetide isolated from the Sargasso Sea
MISKYLKKIGERSKVAALNIVKVDIKKRNKVLDVFSKEISRNKKKIINENIKDIKTCKREELIDRLLLDEKKINNIRDTIGQIIKFKDPLGKIIEKWNRPNKLTIKKITVPIGVIGVIYESRPNVTCDVSSLCLKSGNVAILRGGSESFNSNKIF

SEQ ID NO: 94873 - protein, 193 aa, Unknown
  Bacterial polypetide isolated from the Sargasso Sea
MLKQTGIQAKEAAGEIAVLSTDKKNKILQSMADELLKNSKKIINANKVDLKNSKDLDLTPALIDRLTLNEERINGMANGLLKIIPLEDPVGNVTESWKTDEGLDIKKIRSPFGVIGVIYEARPNVTSDVSGLCLKSGNAVILRGSSYCLDSNIAILEVLQNSLILNNCNKNIFQIIESKDRQDTIEFMNLTEF

SEQ ID NO: 94874 - protein, 162 aa, Unknown
  Bacterial polypetide isolated from the Sargasso Sea
MKKYLQKLGQNSVKASLEKVDTNTKNKVLLKFSDLIKKNLNKILKQNKKDIKYAKIKNIDKNLVARLELDKLKLSSITKTIIEITKLRDPIGVILDKWKRPNGLKIKKISIPIGVIGVIYESRPNVTVDLSCLCFKSGNSVILKGGSEAFFTNKIFVKLFRK

SEQ ID NO: 94875 - protein, 247 aa, Unknown
  Bacterial polypetide isolated from the Sargasso Sea
SRKDSMAMLNLEKYINLIIPRGSNELVKFIQENTRIPVLGHADGICHLFIDIEANLEMALSVALDSKIQYPAACNAIETLLVHKDIAPAFLEKAIPLFNSNDVKLIGDKRSVELGLNYEASLEDWETEYLDLILSIKIVDDLEEAIKHVQKYSSKHTDGIITENSDTANKFMNEVDSAGVFHNCSTRFADGFRYGFGAEVGISTQTLPPRGPVGLEGLVTYKYFLKGDGNIVDDFSSGKAIYTHIDL

SEQ ID NO: 94876 - protein, 92 aa, Unknown
  Bacterial polypetide isolated from the Sargasso Sea
LDVAISHINKYGSMHTDAIISDDDKAIDKFKLEVNSSSVMVNTSTRFADGYEYGLGAEIGISTDKIHARGPVGLEGLTNLKYIVNSKGKIKH

SEQ ID NO: 94877 - protein, 416 aa, Unknown
  Bacterial polypetide isolated from the Sargasso Sea
MRKILITIGERSKKAFAQPINTYKKNKVLGDYLKMIRKNKHLILKENKKDVDWAIKIKLRDNLINRLILNEKKILGIINSIQKIIKLKDPVHNVIERWKRPNGLVFSKISIPIGVIGVIYESRPNVTSDVASLCFKSGNPVILKGGSEAFYSNKILSNLFRKALKINKVNQNFVQFIDIKNRKVVDFLLTKMTNFIDVIIPRGGRNLVKKVQNISKIPTIGHLEGVCHSYVDKDADPKIATKVIVNAKLRNTAICGATETILLNERIIKKFGAHILKILEEKGCQIIGDNKIRKIYKGKIKKASIKDWSKEYLSATVSVKSVKNLQEAISHINKYGTMHTDCIITKNKKTAKKFLMGVKSSIAMHNTSTQFADGGEFGFGGEVGISTNVLPPRGPVGLGQLISYKYQVTSNGKIRK

SEQ ID NO: 94878 - protein, 120 aa, Unknown
  Bacterial polypetide isolated from the Sargasso Sea
SSQALEASEEDWSTEYLDAVISMKIVKDHDEAISHISEYGSGHTDSIVTEDDEIADKFIKEVDSAIVMHNTSTQFADGGEFGMGAEIGIATGRIHARGPVGAMQLTSYKYAVRGNGQVRS

SEQ ID NO: 94879 - protein, 412 aa, Unknown
  Bacterial polypetide isolated from the Sargasso Sea
MNLVGRKARKAFKKKIDTKIKNKVLNKYAELLSNEKKLILKQNLKDVNYAKKIGIKNNLISRLLINETKLKDIQNSIIKIAKLKDPVGNTLEKWKRPNGLNISKISIPIGVIGVIYESRPNVTSDVASLCFKSGNPVILKGGSEAINTNKLLAKIFRKALKVNKVDENFIQFIDTKQRRVVDIMLSGMKKYIDVIIPRGGKNLVKRVQDLSSVPIIGHLEGLCHTYVDKDATLTMAKKVVYNAKLRNTSICGATETILIHKKVAKAFCNPILNELQNKNCKIYGDRFLKKYYRGKILPAKEKNWSTEYLAPAVSVKIVNNLEESIEHINKYGTMHTDCIITNNKKTAKNFLRNIKSSIAMHNTSTQFADGGEFGFGGEVGISTNTLPPRGPVGLNQLVSYKYEITSKGKIRK

SEQ ID NO: 94880 - protein, 221 aa, Unknown
  Bacterial polypetide isolated from the Sargasso Sea
MNILETINDLGKKAKDASIKIRVLEKEKKMAAYQFLEKNIEKNADLILSANKLDIENAITNNLSKPLINRLKVTEESISGIIKSITEIKNQPDPIGRVLEKWEQPNGLKFSKISVPLGVLGVIYESRPNVTVDASCLALKSNNALILRGGSDSYHTSKQLVHIITESFIEANLPENIIQMIPTTDREAVDHLLAMKDYVNVIIPRGGKSLIKKINEKSKIP

SEQ ID NO: 94881 - protein, 186 aa, Unknown
  Bacterial polypetide isolated from the Sargasso Sea
MQKLLTDIGKKSKKAINKRLSTKKKDKVLKDYRLLILKNKKLIINENKKDIKNAYKKGIKNNLIQRLILNDKKIIAITNSIKKIISLRDPINVILEKWKRPNGLVISKVSIPIGVIGVIYESRPNVTADVASLCFKSGNAVILKGGSEAYYSNLILTKFFRKSLKKNNVDENFVQFLKLKKRSVVD

SEQ ID NO: 94882 - protein, 244 aa, Unknown
  Bacterial polypetide isolated from the Sargasso Sea
MIKQKIKNYVLGVCRASHEASKLSRTLSNTQRNKILNSIINQLSDQKKHIFKRNSLDVELAIKNKMSDALIDRLLINDKRISSMVEGLKKIKSIPDTLFKKINKTIQPSGISVEQMRVPIGVIGMIYESRPNVTIDAAGLSIKSGNSIILRGGSESINSNIALSSIIKESLRKCKMPINMVQLINTPDRLAVSELLKLEQYVDVIIPRGGKSLIKKISTESKIPVIKHLDGNCHIYIDREADFK

SEQ ID NO: 94883 - protein, 306 aa, Unknown
  Bacterial polypetide isolated from the Sargasso Sea
MNLISICKSARECTKEIGSLSNFKRNQILKDISENLNSQESLILRANKKDLANNTRLPIEIKERLILNPKKLRNIITSINNIRKLKDPLLSNEEFTRNDGLVIKKQPVPIGVIAAIYESRPNVTIDIACLSIKSGNVAILRGGKESLNTNLSLTKIIKEALKKNNVSYNCIQYLKDPNRKYINEMLGMNEYIDLVIPRGGKELVNNVSRNAKMRAIFGGIGVSHLFIDEKIDEESLLPILENAKTQAPSVCNALDTILLHEKQQNKLLPKIINHFVGLGIEIRIQPKLFQKAKKINPSKLIRRHQK

SEQ ID NO: 94884 - protein, 419 aa, Unknown
  Bacterial polypetide isolated from the Sargasso Sea
MSNIKYLIKIGEKAKIASTQLSQLDNKEKNKVLSDFLKCIKSNKSKILKANKVDIDKSKKNKIKENLIDRTMLNEDRINSICTSIEEVISFKDPTNKMLSSWKRPNGLIIQRVTMPIGVIAVIYEARPNVTADVSVLCFKSGNAAILRGGKEAFHTNIVLSNLFRKCLEKNKINPNCVQLINSTNRILVDYILSKMANYVDVIIPRGGKSLVEKVLNLSTVPTIGHLEGLCHIYLDKSFNFNLANKILINSKLRRTSICGAAETLLVNNQINKKDIFQLLINLSEAGCKIIADKNIKKIFPDSILAKSKDWKTEYLEAKISVKGVKNLDEAINHIKIYGTNHTECIISNNKKNVAKFFREVPSSIVMHNASTQFADGYEFGLGSEVGISTSKLHPRGPVGLEQLVTYKFVVKGKGQVRS

SEQ ID NO: 94885 - protein, 47 aa, Unknown
  Bacterial polypetide isolated from the Sargasso Sea
RFADGFEYGLGAEIGISTDKIHARGPVGLEGLTNLKYVVTSRGVIRN

SEQ ID NO: 94886 - protein, 133 aa, Unknown
  Bacterial polypetide isolated from the Sargasso Sea
MQKLLTDIGKKSKKAINNRLSTKKKDEVLKDYRFLILKNKKLIINENKKDIKKAYKKGIKNNLIQRLILNDKKIIAITNSIRKIISLKDPTNVILEKWKRPNGLVISKISIPIGVIGVIYESRPNVTADVASL

SEQ ID NO: 94887 - protein, 154 aa, Unknown
  Bacterial polypetide isolated from the Sargasso Sea
MSYLETVGKNAKKAFEDLKGVKHKKIKKVLDNYNQSLLKNTNKIIKENLRDVKNVKRKHLVDRLILNKRRIEGIRHSINEISKFKDPVGRVLETWRRPNKLTIKKVTTPIGVIGVIYESRPNVTADVAALCLKSGNCSILRGGTEAFNSNRLLA

SEQ ID NO: 94888 - protein, 82 aa, Unknown
  Bacterial polypetide isolated from the Sargasso Sea
MDQVIQRVLFPEDKEKVEKFLNTVGSAIVMHNTSTQFADGGEFGLGAEIGIATGKLHARGPVGLEGLTTYKYIVRGNGQVRP

SEQ ID NO: 94889 - protein, 247 aa, Unknown
  Bacterial polypetide isolated from the Sargasso Sea
ISEHAIQIVSNTDREVVKLMLNGLDKSIDVIVPRGGKSLVSMVETEAKVPVFGHLEGICHIYVDEEANSEKALNVCLNAKMRRPGICGAVETILIHQSIASEFVPTLCNALSAQACEIRGCSNTQKISTIVVAANEEDWSTEYLLPIVSIKIVKDIEEAIQHIEDFSTGHTESIITENLNHASIFQKSLDSAIVMHNASTQFADGGEFGLGGEIGIATGKFHARGPVGVDQLTSFKYLVNGDGHIRP

SEQ ID NO: 94890 - protein, 291 aa, Unknown
  Bacterial polypetide isolated from the Sargasso Sea
PNVTSDVSGLCLKSGNASILRGSSYCLDSNLKILNTLQKALEKNNLSKNCIQLIESKDREDTIEFMNMTEYIDLIVPRGGRGLIDTLVNNSKVPFILDGDGNVHLYIHEDAKEEYMVPIVINSKVQRPGVCNALETLILHKDVYNKNGEVIINALKENSVEVFIDEKASNDFPDLEIANDEHYSTEFLDLKIAIKIVENEDEAIKHVNKFSSGHTEGVLTESEQIAEKFSSSIDSSVIFINASTRFTDGEMFGFGAEIGISTQKLHVRGPMGLEALTTERYVINGKGTVRG

SEQ ID NO: 94891 - protein, 297 aa, Unknown
  Bacterial polypetide isolated from the Sargasso Sea
MSEQLIEDTDLILKSNKKDLDNAKELDLSSALVDRLTLTKERIEGMSNGLKKIIPLKDPVGEVTKSWTTDDGLKINKVRSPFGVIGIIYEARPNVTSDVSALCIKSGNAAVLKGSSYCVDSNSEILNSLQKSLEKNKINKDAIQLIKSKEREDAIKFMKLTEYIDLIVPRGGKGLIDTLVENAKVPFILDGDGNVHLYVHKDANTEYVIDIIINSKVQRPGVCNALETLILNKSIYQKMGKEIINELLKNEVEIFVDEVIANDISDLEIAKDEHYMTEFHDLKLAIKIVDDIDQAIN

SEQ ID NO: 94892 - protein, 250 aa, Unknown
  Bacterial polypetide isolated from the Sargasso Sea
SINNCNKNIFQILESKDRQDTIEFMNLTEFVDLIVPRGGKGLIQTLVDNSKVPFILDGDGNVHLYIHQDAKKEHIIDIVINSKVQRPGVCNALETLLINSQIYQDMGSLIIEKLLENEVELFVDETIKEDFPNLNLANESHYETEFLDLKLAVKVVDSVDEAIEHIKIYSSGHTEAILTESKEVADTFAKSIDSSVIFINSSTRFTDGEMFGFGSEIGISTQKLHVRGPMGLEALTNERYVVTGEGTVRG

SEQ ID NO: 94893 - protein, 305 aa, Unknown
  Bacterial polypetide isolated from the Sargasso Sea
LIANEIENNEEYILSENKKDIQIAKSKNLSEAMIDRLSLNDLGIKNIASSIRDIAKLNDPVGNELESWDRPNGLHIKKVSIPIGVIGIIYESRPNVTADAASLCLKSGNASILRSGSDSYFSSYAIYESIKEGLNKTSLDSNSIQLVPTKDRDAVGLMLEGLNSNIDIIVPRGGKSLVSRVQTEAKIPVFGHLEGICHVYVNEKADITKAIDVTFNAKMRRTSICGAAETLLIDKSIYKEYLPRILSKLSSVGCEIRGSAQIKDIFPQTENVSDSDWATEYLDAIISVKVVKGIDEAISHIKEYG

SEQ ID NO: 94894 - protein, 268 aa, Unknown
  Bacterial polypetide isolated from the Sargasso Sea
IDIDRAKSNNISTPMINRLVLTSEKIDQLSRDVEKIAQMEDPLNQTLENWTNPSNGLQFTKVSVAIGVIGIIYESRPNVTIDGACLCLRSGNVSILRGGSECIETNKKLYECIQEALEDLQFDPYLVCFIQNTDRSFVEELLNAEADIDVIIPRGGKSLIETISQNSRVPTIKHLEGLCHTYWDIDYDKEKAAEIVANAKLRRPEICGATETLLIHSGNSAEDISHVLDNLRSQGCEIIGCTRLKEMYSIDRAATEDDWSTEYLDKKI

SEQ ID NO: 94895 - protein, 321 aa, Unknown
  Bacterial polypetide isolated from the Sargasso Sea
ESWTGKNKLNIKRVTTPIGVIGIIYESRPNVTADVAALCLKSSNCAILRGGSEAYYSNKILSHLFRQSLKKNKINQNCLQFIENKNRKVVDFLLSKMNRYIDVIVPRGGKGLVAKVQKYSNIHVIGHLEGLCHIYLDKESNLNNAIKVILNAKMRRTSICGALETLLINEKILKVKGVKVINSLIKNGCKVVVDKKINKFFNNNLKLAKELDWQTEYLDAKLSIKSVKDVKEAVSHVIKYGTMHTDCIISNNKKNTEFFLNNVNSAIAMHNVSTQFADGGEFGFGGEIGISTNKLPPRGPVGLNQLTSYKYIVKGNSVTRP

SEQ ID NO: 94896 - protein, 180 aa, Unknown
  Bacterial polypetide isolated from the Sargasso Sea
MKKYLDKIGKNSKKASIKSVTTIKKNKVLIDFANLIKKNRTKIIYQNKKDQKYAIKKGIKNNMIERLILNSTRLKQIEKSVVKIANLKDPVDKTLLMWKRPNGLKIKKVTIPIGVIGIIYESRPNVTSDVSSLCFKSGNPVILKGGSEAFNSNKILVYLFKEALKRNGVDPNYVQLIENK

SEQ ID NO: 94897 - protein, 199 aa, Unknown
  Bacterial polypetide isolated from the Sargasso Sea
IPVIGHLDGICHIYVDETSDPSTASKIVTNAKLRRTSICGAAETVLIDEKCLDSHLPTIINGLKSGGCEIRGDERCKEKFNEVILASDDDWKTEYLDAIISIRVVNGVKDAIDHIEKYGSGHTESIVSENKDNVEQFLNSVGSAIVMHNASTQFADGGEFGLGAEIGIATGKLHARGPVGLEGLTTYKYIVRGNGQIRP

SEQ ID NO: 94898 - protein, 226 aa, Unknown
  Bacterial polypetide isolated from the Sargasso Sea
LRMSDYVDVIVPRGGKGLIERVSAEAKMPVIKHLDGICHVYIDDDADMEKAINIAYNAKTQRYGTCNTMECLLVAKSLAKTVLEKLEPMYRKENVEIRGCKASKEILADINIATDEDYATEYLAPILSLKIVSNIDEAMSHIDKFGSKHTDTIVTENQSKADRFLREVDSSSVMHNASTRFADGYEYGLGAEIGISTDKFHARGPVGLEGLTSQKYVVLGDGNIRT

SEQ ID NO: 94899 - protein, 234 aa, Unknown
  Bacterial polypetide isolated from the Sargasso Sea
MRNLLTNIGKKSKKAFLKKLSSNKKDKVLKDYYLLITKNKKLIINENKKDIKNAYKKKIKDNLVQRLILNNKKILEITNSIKKIIRLKDPTNIVLEKWKRPNGLVISKVSIPLGVIGIIYESRPNVTADVASLCFKSGNAVILKGGSEAYYSNLILSKLFRKSLKKNGVDENFVQFLSIKKRSVVDFLLTKMSKFIDVIIPRGGKSLVKKVQKLSSIPTIGHLEGVCHSYIDKS

SEQ ID NO: 94900 - protein, 195 aa, Unknown
  Bacterial polypetide isolated from the Sargasso Sea
MNSSISPKKKNKVLKDFVKLIEINKNKIISENKKDIFYARGKKLKENLIQRLTLNNNKLKSIIDSVKTIASFKDPVNQVTSKWKRPNGLEIRRVTIPIGVIGVIFESRPNVTSDVSALCFKSGNAVILRGGSEAYNSNRILVNLFRKALKKNKLNENYVQFINNKSRKLVDYLLSKMENSIDVVIPRRWKKSSKK

SEQ ID NO: 94901 - protein, 318 aa, Unknown
  Bacterial polypetide isolated from the Sargasso Sea
KDQTGLIIKKVSIPIGVIGIIYESRPNVTSDVSALCFKSGNVVILRGGSEAFHSNKILAKLFRKALKKKKCNENCVQFVSSKDRRHVDYLLSGMKNYVDLIIPRGGKSLVKKVVKKSSVSIIGHYEGLCHVYVDREADLNTAIKVVKNSKMRNVSICGAAETLLIDKMCLKTHCKPILDQLSVLGCKIIGDKIIRKFTSKKIKIATEKDWKTEYLSPMISVKSVNGVKDAINHINKYGSSHTDSIVTKNKKTAKKFLASINSSIAVHNASTQFADGGEFGFGAEVGISTSKLHPRGPIGLDQLTTYKYILEGKGQIRK

SEQ ID NO: 94902 - protein, 307 aa, Unknown
  Bacterial polypetide isolated from the Sargasso Sea
SFEDPVGKVLATWDRPNGLNISRIATPLGVIGLIFESRPNVAADAGGLCLKSGNAVILRSGKDGLRSAEAIVASLQAALVSADLPKECIQIVPSESRDAATLMLEGLNGSIDVIVPRGGKSLVAEVERSAKVPVFGHLEGICHIYIDEHADEEKALAVCLNAKMRRTGICGAVETILVNDKIAESFVPKIVASLSELNCEIRCCEKTIDFDGRSVPATEEDWSTEYLAPIVSLKSVLNVDEAINHIAQYGTGHTESIISENKDNQTKFTHSIDSAIVMINASTQFADGGEFGLGGEIGIATGKFHAR

SEQ ID NO: 94903 - protein, 316 aa, Unknown
  Bacterial polypetide isolated from the Sargasso Sea
KKAAHELVNIDSKKKNDSFLALKNAILDSEKDLIEINKKDIDNAINSKLSSAMIDRLTLNHERIFAMANGLDEIIKLKDPVGEIVKEWQRPNKLNFKKITVPIGVIGMIYESRPNVTIDASTIAVKAGNAVILRGGKDSFHSSSKLYELIKLAFSSCGLPENTVQMIPVTDRAAVDCMLNLNTYIDIIIPRGGKGLIKNIKEKSSIPVIKHLDGICHVYVDRDADISIAKKVILNSKMRRPGICGAAETLLIDEKIKNLSLNFLEELKNANCEIRGDKFIESLHNEFKNAKEEDWGTEYLDKIISVKIVDGVEGAI

SEQ ID NO: 94904 - protein, 300 aa, Unknown
  Bacterial polypetide isolated from the Sargasso Sea
DKNRNKISEANKIDLENGEKKSLAKPLINRLTLTEKSIDGLITSIEDIIEIPDPIGITLEEWERPNGLQFRKISTPLGVLGVIYESRPNVTVDASCLSIKSGNCIILRGGSDSFYSSKELVNNITNAFMEAGLPEHCVQMINTPEREAVDHLLSMRDYVDVIIPRGGKGLIEKINSASKIPVIKHLDGICHVYVDKDADLSIAEKVVFNSKMRRPEICGAAETLLIDEKIKDEAMKILKPLKEVNCEIRGDEYIQSLDSDFKTASEEDWSLEYLDKILSVKIVSGVDEAVKHINDYSSGH

SEQ ID NO: 94905 - protein, 316 aa, Unknown
  Bacterial polypetide isolated from the Sargasso Sea
NLSEALIDRLHINSSRVKSMINGLEAINMIPDTLYKKMNKSKQPSGITVEQMRVPLGVIAMIYESRPNVTIDAAGLSLKSGNSIILRGGSEAINSNLILSNLIKKALRESNVSTDMVQIVKTTDRTAVSELLKMDSFVDVIIPRGGKGLIKKISQESKIPIIKHLDGNCHVYIDKDADFKTAMSCTINSKTQRYGVCNAAESLLIHKSFPKAYIKEILSSLEKCDVEIRGCSQTKKIYSKVKLAKESDWYEEYLKPIISVKIINNIDDAILHIEKYGSKHTEAIISMDKNAQNKFLRGVDSSSVMVIPSLDLQMVL

SEQ ID NO: 94906 - protein, 288 aa, Unknown
  Bacterial polypetide isolated from the Sargasso Sea
PADAAGLCLKSGNAAILRGGSEALHSNGAIGDCLAKGLTDAGLPQGVIQVLKTTDRSAVSAMLDSPHYLDVIVPRGGRGLIEKVSAESQVPVIRHLDGNCHVFVDDYADLDKAVEIAFNAKCRRYGVCGAMETLLLASSVASAVLERLVPRYREAGVELRGCGQTCEIVPECTGATESDWETEFLAPVLAVRIVDSLDEAIAHIGRYGSGHTDAIVTNDLSRSQRFVREVDSSSVMVNASTQFADGFEYGLGAEIGISTDKLHVRGPVGLEGLTIQKYIVYGDGTTRP

SEQ ID NO: 94907 - protein, 275 aa, Unknown
  Bacterial polypetide isolated from the Sargasso Sea
HRVLAEILRQTADDFEEMPINALSLVESRDEVSQLVQMSEELDLIIPRGSNELVQSIQARAQVPVLGHADGICHVFIDANADPEKARKVVLDSKTDYPAVCNALETLLVDRELSSELLKKIIEDLVWAGVEIRACPDTQKKLEGHSQLEMGNASEEDWKTEHLEMILSVKTVAGPEEAIQHINRYGSNHTDSIVTESLEAAERFMNEVDSAGVFWNASTRFADGFRYGLGAEVGVSTCKTHARGPVGLEGMVIYKYKLYGNGQGAGSYSKGEKKF

SEQ ID NO: 94908 - protein, 186 aa, Unknown
  Bacterial polypetide isolated from the Sargasso Sea
VDVAADLDKAIRVCDNAKTQRYSPCNAMETLLVHQAIAARVLPPLAAIYRDKGVELRGDAATRELLGSDVLEASEDDWFAEYNAPILAIRIVDSLDAAIEHINHYGSQHTDSIITENFSDARRFLTEVDSASVMVNASTRFADGFEYGLGAEIGISTDKLHARGPVGLEGLTSEKYVVFGDGHIRT

SEQ ID NO: 94909 - protein, 262 aa, Unknown
  Bacterial polypetide isolated from the Sargasso Sea
MGVIYESRPNVTVDASCLSIKSGNCIILRGGSDSFYSSKELVENITLSFNEAGLPNNCVQMIDTPEREAVDYLLSMQNYIDVIIPRGGKSLIEKINSVSKIPVIKHLDGICHIYVDKDANLEIAEKVVFNSKMRRPEICGAAETLLIDDSFKDKAMKILAPLKEVNCEIRGDEFIESLDKDFKKAKEEDWSLEYLDKILSVKIVSGVEEAINHINEYSSGHTESIITNNNDTFKKFYNKIDSAIILKNASTQFADGGEFGFG

SEQ ID NO: 94910 - protein, 236 aa, Unknown
  Bacterial polypetide isolated from the Sargasso Sea
ELLGVIYESRPNVTSDVAGLCFKSGNAVILRGGSEAINSNRVLSKLFRKALKKNKVDENFIQFIDSKNRKMVDVMLSKMKEYIDVIIPRGGKNLVRKVQELSKIPIIGHLEGICHTYVDKDAELKMANSVVVNAKLRNTSICGATETIILHKNIVKKFSNTILGNLEKNGCKIYGEKTLAKFYKGKLFKVTEKDWSKEYLSSIVSVKIVNNLNEAISHINKYGTMHTDSIITKNKK

SEQ ID NO: 94911 - protein, 271 aa, Unknown
  Bacterial polypetide isolated from the Sargasso Sea
ALQAMADALAERAEVIVAANRKDLERSAAEGLAPALMARLKLDAGKLRGAIDGVRKLASLPDPLGRRQLHRELDQGLVLERITVPLGVVGVIFEARPDAVVQIASLAIRSGNGAMLKGGSEARCTNEAVMEALKLGLGRSAVAPDALTLLTTRQESLALLRLDGLVDLIIPRGSNELVRFIQDNTRIPVLGHADGICHLYVDAAADVDQAVRIAIDSKTQYPAACNAIETLLVHASIAPAFLASAVPAFQAAGVTLRGDELSRQHGISDAA

SEQ ID NO: 94912 - protein, 231 aa, Unknown
  Bacterial polypetide isolated from the Sargasso Sea
MNKLLNKIGKNSKIAFRNKINSRKKNKVLNDFCSLIIKNEQKIISENKKDIKFAKSKKLKENLIKRLSLNSEKIKSIIKSINTVIKLKNPVDIELSKWKRPNGLKIKRVTIPIGIIGIIYESRPNVTADVSTLCFKSGNCVILRGGSEAYFSNKILANLFRQSLKKNNINMNYVQFVESKDRKLVDYMLSKMNKYIDIIIPRGGKNLVKKVQNLSSVPVIGHLEGICHTYI

SEQ ID NO: 94913 - protein, 202 aa, Unknown
  Bacterial polypetide isolated from the Sargasso Sea
MQNSFIDRLELNEKRVDSIIDGLNKVINLKDPIGELEGMNPSPSGFKVSKMRVPLGTIGIIYESRPNVTADASALCIKSGNASILRGGSEAVRSNNHIVTQVRKGLTKANLPEDSVQLIQNQDRDLVKEFIKFDDCIDLIIPRGGSSLVRLIAAESKVPILKHFEGLCHVFVDSEADVELAQRVVSNAKSYRYGICGAMETL

SEQ ID NO: 94914 - protein, 147 aa, Unknown
  Bacterial polypetide isolated from the Sargasso Sea
MTNDISKLMIELGESARLSAEYLARTPNQQRNEAISCIAQSIQKNTNKILKANAIDIEAAKEKGLPESMIDRLMLDKGRIDSMASSMNIITQIEDPINKITEEWSRPNGMIIQRVSVPLGVIGIIYESRPNVTADAAALCIKSGNSV

SEQ ID NO: 94915 - protein, 275 aa, Unknown
  Bacterial polypetide isolated from the Sargasso Sea
TAILRGGSDSIHTSKVLVKCLQEGLVSANLPADTVQMIQITDREAVTAMLKSSGEIDVIIPRGGKSLVETVQKEARVPVFAHLEGICHIYVDKDANIDKATKIIINSKMRRTGICGALETLLIDKKISKDVIPTFVQKLVENGCHVKGDQETVNIENTVELASDKDWSTEYLDAILSIKIVEGVTGAIDHIKKYSSNHTDSIITENKKTAETFLSQIDSAIVMHNASTQFADGGEFGMGAEIGISTGRIHARGPVGAAQLTSFKYLVRGKDQIRE

SEQ ID NO: 94916 - protein, 281 aa, Unknown
  Bacterial polypetide isolated from the Sargasso Sea
KITIPIGVIGIIYESRPNVTADVSSLCFKSGNCIILKGGSEARLSNKILANLFRKALQSQKIDKNFVQFVDIKDRKVVNLILSKMKKYIDVIIPRGGKNLVKKVQNLSTVPIIGHLEGICHTYVDKEADLNMSKKIIYNAKMRNTSICGATETILIHEKCLKKFINPILKKLTDKNCIIYADKKVKKYFFGKSNLVNSNNWSREYLSKKVSVKCVKNVQEAINHINKFGTMHTDAIISKNIKTAKYFLKNVKSSIAIHNSSTQFADGGEFGFGGEVGISTN

SEQ ID NO: 94917 - protein, 186 aa, Unknown
  Bacterial polypetide isolated from the Sargasso Sea
MDIKAYMAELGSKARTASRHIAKATTAQKNDALLNIADRISQSRDTLLDANQQDLAVGKQKGLEAALLDRLELTDARVDGMLKGIKQVAALDDPVGEISGLKYRPSGIQVGRMRVPLGVIGIIYESRPNVTCEAASLCLKSGNATILRGGSEAIHSNRAIANCINSGLDSAGMSENIVQVIERQIE

SEQ ID NO: 94918 - protein, 300 aa, Unknown
  Bacterial polypetide isolated from the Sargasso Sea
RRLAVASSLQKKDALIFGADSIRENTANILEQNKKDLDFGASKGLSNALMDRLLLNEERIGSMIDGLQAIANQDDPIGEIMQAWRRPNGLEIKRVRTPLGVIGVIYESRPNVTADAGALCLKAGNAVILRGGSESYNSSIAIHNCLQEGLSKANLPKNSIQLIPTKERAAVTSLLKLTEYIDVIVPRGGKSLVGLVQSEARVPVFAHLEGIVHIYLDKTADPRKAFDVILNSKTRRTGICGAAECLLINKDILNGLGSEIVKMLLGSGVEVRADKEVAKIPGTVAANKDDWGNEFLDSKI

SEQ ID NO: 94919 - protein, 289 aa, Unknown
  Bacterial polypetide isolated from the Sargasso Sea
RKNKVLKRYIYLIEKKRHSILKENKKDIKFAKRKKLKENFIERLSLNHKKLNSITKTIKNIIRLKDPVDNILDQWKRPNGLVIKRVSIPIGIIGVIYESRPNVTSDVSSLCFKSGNCVILRGGSEALNTNKILAKLFRKSLKDNKLDANYIQFIEKKDRKLVDYMLSKMKDKIDVIIPRGGKNLVKKVQKLSNVPVIGHLEGICHTYVDKNADLDMAIKIVYNAKLRNTSICGATETILLHKKIVKKFCNPILKKLEENNCKIYGDNFLKKFYKGKIYTAKKKDWSTEY

SEQ ID NO: 94920 - protein, 134 aa, Unknown
  Bacterial polypetide isolated from the Sargasso Sea
GGCEVRGDNVCMNISDKVLEASEEDWSTEYLDAIISIKTVKGVDEAIEHIAKYGSGHTESIISEDKDKVEKFLNTVGSAIVMHNTSTQFADGGEFGLGAEIGIATGKLHARGPVGLEGLTTYKYVVRGNGQVRP

SEQ ID NO: 94921 - protein, 228 aa, Unknown
  Bacterial polypetide isolated from the Sargasso Sea
MLDSKDINKYVEGLGSSSKKASEVLASISTKDKNSAIGFIADEINIRKKEILKANSQDLVEASKKGISDSLVDRLELNDERIDTILLGLSRIKELPDPVGEITTLPPTPSGIRVSQIRVPLGVIGIIYESRPNVTVDASALCLKAGNACILKGGAESIKSNIELMKCIKEGLSKADIPEDSINLIETVNRKAVNYLLSLEDHIDLIIPRGGKSLVEIINKTTNISVLK

SEQ ID NO: 94922 - protein, 278 aa, Unknown
  Bacterial polypetide isolated from the Sargasso Sea
MREYASLVKKNKLKILKENSKDIKKAKRKKLIDRLILNSVKINQIISSIKAIEKFKNPIGQVLSKWKRSNKLKIEKVSIPIGVICVIYESRPNVTADVAALCLKSGNSVILRGGSDAYYTNRFLANLFRKALRKNKIDENCVQFIEKNDRKIVDFILSKMSNYIDLVVPRGGKNLVKKVQKLSKVNVIGHLEGLCHIYLDKNSNLEMAKKIVINAKMRRTSICGALETLLINEKILSSHGTKIIHALIRMGCEVRVDDKINKLFNFRLKKAMKRTANG

SEQ ID NO: 94923 - protein, 191 aa, Unknown
  Bacterial polypetide isolated from the Sargasso Sea
MRQILEIGKKSKKAFENLKKVDSFKINKALDDYIKLLSKNKKKIIRENKKDVKSLKRKNVLDRLILDEKKIESIIKSIHEIKKFPNPIGKTLEKWTGNNNLQIKKITIPIGVIGIIYESRPNVTADVAALCLKSQNCAILRGGSEAFYSNKILSGLFRIALRKNKIDQNTLQFIEKKNRNVVDFLLSGMSK

SEQ ID NO: 94924 - protein, 254 aa, Unknown
  Bacterial polypetide isolated from the Sargasso Sea
EKKIDTKIKNKVLDKFAYLINKNKFKIINQNKKDVNFAKKKGIKENLLRRLILDIDKIEQIIKSIKIIIKLKDPIDITLSQSKRPNGLRIKKVTIPLGVIGIIYESRPNVTSDVSSLCFKSGNSIILRGGSEAYFSNKILANLFRKALKDNKVDPNYVQFIKSRNRRLVDILLSKMEKYIDLVIPRGGKNLVKKVLKLSSVPIIGHLEGICHTYIDKDASLSSAVKIIYNAKLRNTSICEATETILIHEKCLKK

SEQ ID NO: 94925 - protein, 150 aa, Unknown
  Bacterial polypetide isolated from the Sargasso Sea
MSHSKEIISYMNRLGSEAKEASSVLAQASIEQRNASLDFIAEAIELNRDKILSTNQKDLELAKQKSIGSALIDRLELNDNRIDSMISGLKIVSDLPDPVGEITDLDPTPSGIEVKKMRVPLGVVGIIYESRPNVTADAAALCLKSGNSCL

SEQ ID NO: 94926 - protein, 150 aa, Unknown
  Bacterial polypetide isolated from the Sargasso Sea
MKKIGEKAKLASLSLTNLNISKKNSVLKQFSKYLKTNEKLILKANKKDLINAKSKKIRESMIDRLKLNREKIKQIRKSIDKIVKFKDPIGKTLSSWKRPNGLVIKKISIPIGIIGVIYESRPNVTSDVSALCFKSGNVVILRGGSEAFNS

SEQ ID NO: 94927 - protein, 167 aa, Unknown
  Bacterial polypetide isolated from the Sargasso Sea
MLKKLINIGIKAKKATKIKVDRKNKNKVLKKYLQLINKNKKKILKENNKDIEFAIKNNLPENLISRLALNDKKITEIKNSISKIIKLNDPTNKVIDKWKRPNGLIIKKVSTPIGVIGIIYESRPNVTSDVASLCFKSGNVVILRGGSEAYNSNRILANLFRDALRIN

SEQ ID NO: 94928 - protein, 243 aa, Unknown
  Bacterial polypetide isolated from the Sargasso Sea
DAIQLIKSKKREDAIKFMKLTEYIDLIVPRGGKGLIDTLVENAKVPFILDGDGNVHLYVHKDANTEYVIDIIINSKVQRPGVCNALETLILNKSIYQKMGKEIINELLKNEVELFVDEVIANDISDLEIAKDEHYMTEFHDLKLAIKIVDDIDQAIHHIQQYSSGHTEAILTESEEAKNKFSKSLDSSVIFINASTRFTDGEMFGFGAEVGISTQKLHVRGPMGLESLTNERYVVEGSGTIRQ

SEQ ID NO: 94929 - protein, 284 aa, Unknown
  Bacterial polypetide isolated from the Sargasso Sea
MSENLYIKNIGKKSKIAALSLSNLSIDKKNSVLKKFSYYLEKNKQSILRENKKDLFKAKSKKINNNLIDRLKLDNEKIKKIINSIGKIIKFKDPTGKVLSSWKRPNGLKIKKISIPIGVIGVIYESRPNVTSDVSALCFKSGNVVILRGGSEAYYSNKILAKLFRKALKDKKCDENCVQFIESTNRTHVDYLLSNMKDYIDLIIPRGGKSLVKKVLKKSTVSIVGHYEGLCHVFVDKDSDLNTAIRIVKNSKMRNVSICGAAETLLIDKKCLKTHCKPILNSLI

SEQ ID NO: 94930 - protein, 299 aa, Unknown
  Bacterial polypetide isolated from the Sargasso Sea
VIYESRPNVTADVAALSLKSGNCSILRGGSEAFNSNKILANIFRGVLQKNKINKNCIQFIEKKDRKIVDNMLSKMSKYIDVIVPRGGKGLVSKVQKFSNVHVIGHLEGLCHIFVDKSANLEMAKKIIINAKMRRTSICGAVETLLIEEKALKSHAKEIVKSLMKSGCEVRVDDKINKIFNNKLKKAKDKDWKTEYLDAIISVKTVKNVYDGVSHILKYGTMHTDSIISNNSKNTKIFLERVNSSIAMHNASTQFADGGEFGFGGEIGISTNKLPPRGPVGINQLTSYKYLVSGKGNTRT

SEQ ID NO: 94931 - protein, 198 aa, Unknown
  Bacterial polypetide isolated from the Sargasso Sea
MLKKLINIGIKAKKASKIKVNKKNKNKVLKKYLQLINKNKKNILRENNKDIDFAIKSNLPENLISRLTLNDKKISEIKDSISKIIKLNDPTNNVIDKWKRPNGLIIKKVSTPIGVIGIIYESRPNVTSDVASLCFKSGNVVILRGGSEAYNSNRILANLFRDALRINNIDQNYVQIIKDKKRKSVDYMLSKMKNFIAC

SEQ ID NO: 94932 - protein, 315 aa, Unknown
  Bacterial polypetide isolated from the Sargasso Sea
MGLVIQKVTVPIGVIAVIYESRPNVTSDIASLCFKSGNAVILRGGSEALNTNKIISNLFRLSLKNCGVDKNFVQFIDSKNRKIVDNLLSKMKGYIDLVIPRGGKSLLKKVDKISTIPYIGHLEGICHTFIDKKAKFKMAIKVLENAKMRNTSICGATETVLFHRSFSKKSINLVLKNLQKQGCNIYADKFIRKLFDGKSNIAKTKNWSTEYLSSNISAKVVNGVSEAVKHINQFGTMHTDAIITEDKKTAKYFLKNVKSSIAIHNSSTQFADGGEFGFGAEVGISTNNLPPRGPVGLGQLVSYKYEIYGKGQIRK

SEQ ID NO: 94933 - protein, 329 aa, Unknown
  Bacterial polypetide isolated from the Sargasso Sea
LIDRLILNDRRIDGIRHSINEIAKFKNPIGRVLEKWQRPNKLKIKKISTPIGVIGVIYESRPNVTADVAALCLKSGNCSILRGGSESYNSNKLLANLFRDSLGRNNIDKNCVQFIEKKERKIVDSLLSKMSNYIDVIVPRGGKGLVEKVQKFSNIHVIGHLEGLCHIYLDKSANLTMAKKIIINAKMRRTSICGALETLLIDEKALNSHGKIIIESLISSGCEVRVDSKINKLFKNKLKLAKEIDWKTEYLDAKISIKTVKNVRDAVNHILKYGTMHTDSIITNNSKNSKIFLEGVNSSIAMHNVSTQFADGGEFGFGGEIGISLTNFL

SEQ ID NO: 94934 - protein, 151 aa, Unknown
  Bacterial polypetide isolated from the Sargasso Sea
MTRLGENAYEASRDLSSLSTDQKNKTLKLMAESLSDNKHDLLEANKEDLYIANNTGITDALLDRLELNEERIESMISGLISISRLPDPIGEITNLKPTPSGINVSKMRVPLGVVGIIYESRPNVTADAAGLCLKSGNACILRGGSEAINSN

SEQ ID NO: 94935 - protein, 229 aa, Unknown
  Bacterial polypetide isolated from the Sargasso Sea
MYSIGKKALNATKNKVNSKLKNKVLDKYISLIIKNKKLIIKKNFKDIKFAKKKKLRNNLIERLAIDEKKINDICYAIKNVRKLKDPIDVTLSKWRRPNKLLIKKVSVPIGIIGVIFESRPNVASDISCLCFKSGNAVILRGGSEALNSNKILVSLFREALKKFKIDPNYVQLIEKKERNYVNFLLSNMTKYIDVIIPRGGKGLVAKVKKFSKVPTIGHLEGICHTYIDK

SEQ ID NO: 94936 - protein, 250 aa, Unknown
  Bacterial polypetide isolated from the Sargasso Sea
LDRLILNEKKIDGIINSINEIKKFPNPIGKVLESWKGKNKLNIKRVTTPIGVIGIIYESRPNVTADVAALCLKSRNCAILRGGSEAFHSNKILSDLFRKSLKKNKINQNCLQFIESKNRKIVDFLLSKMSKYVDVIVPRGGKSLVAKVQKYSNIHVIGHLEGLCHIYLDKDSNLNNAIKVILNAKMRRTSICGALETLLIHEKIIRTKGVEVINSLINNDCEVIVDKKINKFFNNNLKLAKELDWKTEYL

SEQ ID NO: 94937 - protein, 316 aa, Unknown
  Bacterial polypetide isolated from the Sargasso Sea
SDSMIDRLQLNEERIDGIIQSIETVISLPDPIGNILFTNTRPNGMKVERVSVPLGVVGIIYESRPNVTVDASILCLKSGNSVILRGGSESFNSNLQLVKTMQRACGNIGLDKNIIQFIETIDRSAVDYMLSKMSDYIDVVVPRGGKGLVKKVQESAKIPVIGHLDGICHVYVDESSDPEAASKIVTNAKLRRTSICGAAETVLIDEKCIDSHLPKIIKDLKSGGCEIRGDERCKNKFDEVVLASDEDWKTEYLEAIISIKIVSGVEDAIDHIEKYGSGHTESIISENKDSVEKFLNSVGSAIVMHNTSTQFADGGE

SEQ ID NO: 94938 - protein, 297 aa, Unknown
  Bacterial polypetide isolated from the Sargasso Sea
ANNLDLENGKKKLLSKPLINRLTLSNKSIDSLVNSIEDIITIPDPIGLTLEEWERPNGLKFRKISTPLGVLGVIYESRPNVTVDASCLSIKSGNSIILRGGSDSFYSSKELVKNITQSFNDAGLPNFCVQMIDTPEREAVDYLLKLRNYVDVIIPRGGKGLIEKINATSKIPVIKHLDGICHVYVDKEADIKIAEKVVFNSKMRRPEICGAAETLLIDENIKSEAMKILNPLKDVKCEIRGDNFIQSLDKDFKVATEEDWALEYLDKILSVKIVSGVDDAIDHINKYSSGHTESIIT

SEQ ID NO: 94939 - protein, 274 aa, Unknown
  Bacterial polypetide isolated from the Sargasso Sea
RQTADDFEEMPINALSLVESRDEVSQLVQMSEELDLIIPRGSNELVQSIQARAQIPVLGHADGICHVFIDVDADPEKARKVVLDSKTDYPAVCNALETLLVDRDLDTELLKKIMEDLAQAGVEIRACPDTKKKIEGHSQLEMGNASEEDWKTEHLEMVLSVKTVAGLEEAIQHINRYGSNHTDSIVTESHKNAERFMNEVDSAGVFWNASTRFADGFRYGLGAEVGVSTCKTHARGPVGLEGMVIYKYKLYGSGQGAGSYSKGEREFMHQPLET

SEQ ID NO: 94940 - protein, 219 aa, Unknown
  Bacterial polypetide isolated from the Sargasso Sea
MIIKKITIPIGVIGVIYESRPNVTCDVSSLCLKSGNVAILRGGSESFNSNKILANLFRNSLSENRVDKNCVQFIENKKREMVNYLLSKMSDYIDVIVPRGGKSLVKKVQQLSKVNVIGHLEGNCHVYVDKDSDLKMAKNVIINSKMRRTSICGAAETLLIDKRCIKSHGPDIINSLVRSGCEIVVDKKINNFFGNSFKLAKDIDWSTEYLRPKLSIKSV

SEQ ID NO: 94941 - protein, 177 aa, Unknown
  Bacterial polypetide isolated from the Sargasso Sea
MDIEKVVLEIGQRARKASEELGKAASTTKNQGLIEAANAIRSQSKQIVSANHKDLEITSGKGLSKAMIDRLKLDDTGIEAMAVGLEEIANLKDPVGNILDSWERPNGLAISRITVPLGVIGVIYESRPNVTADAGGLCLKSGNAVILRGGSESYNSSTAILNALRDGLRKVDLPLEA

SEQ ID NO: 94942 - protein, 279 aa, Unknown
  Bacterial polypetide isolated from the Sargasso Sea
YKKKIIKENSKDLKNCKRQDLIDRLILDENKIEDIRNSLNEIKKFKNPLEKVITKWKRPSGLTIKKVTIPIGVIGIIYESRPDVTPYVSALCIKSGNVAILKGGSEAYFSNKIFSNIFRSSLKKNNINQNCVQFIDSRSRKVVDFMLSKMSDYIDVMVPRGGKGLVSKVKKLSKVNVIGHLEGNCHVYVDKDANLEMAKKIVLNSKMRRTSICGAAETLLVDKKCLKSHAMPIIEELIFSGCEVVADKKINKLFGNSLKTAREIDWKTEISKLKDICKS

SEQ ID NO: 94943 - protein, 314 aa, Unknown
  Bacterial polypetide isolated from the Sargasso Sea
YTNKRPNGMLVERVSVPLGVIGIIYESRPNVTVDATVLCLKAGNSVILRGGSECFNTNSEMVKSVQAALRNNSVSEHIVQYVSTTDRAAVDYMLAKMGKYIDVVVPRGGKGLVKKVQDTAKIPVIGHLDGICHLYVDETSDTEIASKIIENAKMRRTGICGAAETILIDEKCVDTHLPKIITDLINGGCEVRGDNACMNISDKVLEASEEDWGTEYLDAIISIKTVKGVDEAIEHIAKYGSGHTESIISEDKKKVEKFLNTVGSAIVMHNTSTQFADGGEFGLGAEIGIATGKLHARGPVGLEGLTTYKYVVRG

SEQ ID NO: 94944 - protein, 254 aa, Unknown
  Bacterial polypetide isolated from the Sargasso Sea
MLIKKISTPIGVIAIIYESRPNVTIDCAGLCLKSGNASILRGGKEAFHSNRALASVIEQGLEQSSLPKDSVQLVPTVEREALNHMLTLEELIHCIIPRGGEGLIRFVAENSRIPVIKHYKGVCNLFVDAEADLEMARRIAVSSKCGRPGVCNAIENLVVDAGIAEEFLPACAKELSENGCELLVDERSAAILGDLPTKPAGEEDYHEEFLDLRISIKIVDSMDEAIAFVNRFGSGHSESIITKNKDNANRFLRE

SEQ ID NO: 94945 - protein, 260 aa, Unknown
  Bacterial polypetide isolated from the Sargasso Sea
MVNDAIIQQYKDEALKLIGSTKLASLSLAKATTEDKDMLLKEISNQIEEDEQAILEANKIDIDNAKDKEYSSAFLDRLKLDKSRLQEIIKNIKEIIKLDDPVGKREFLHKRPNGLDVYKQTIPLGTIGIIYESRPNVTSDAAVLCLKSGNATILRGGSECFETNKSLVQSIQKALLKQGFDSNCVNMIPHTDREIMKYVLTLDEDIDLIIPRGGEGLIRFVSENSRIPVIKHYKGVCHVYVDEYADLDKAVNISLNSKVQ

SEQ ID NO: 94946 - protein, 159 aa, Unknown
  Bacterial polypetide isolated from the Sargasso Sea
MNYLKTVGKNAKKAFENLKNVKHKNIKKVLENYNQSLLKNTNKIIRENLKDVKNVKRKHLVDRLILNKKRIEGIRHSINEIAKFKDPIGRVLEIWRRPNNLTIKRVTTPIGVIGVIYESRPNVTADVAALCLKSGNCSILRGGSEAFNSNRLLANFVQR

SEQ ID NO: 94947 - protein, 257 aa, Unknown
  Bacterial polypetide isolated from the Sargasso Sea
RLALTPKVIDSMIEGLRQVATLPDPIGEIQGMRYLPSGIQVGKMRVPLGVIGIIYESRPNVTIDAASLCLKSGNATILRGGSEAIHSNQAIARCIQQGLAEADLPAAAVQVVETTDRAAVGELITMPEFVDVIVPRGGKGLIERISRDAKVPVIKHLDGVCHVYIDIAADLDKAIRVADNAKTQRYSPCNAMETLLVHQAIAARVLPPLAAIYRDKGVELRGDAATRELLGSDVLEASEDDWFAEYNAPILAIRIVD

SEQ ID NO: 94948 - protein, 279 aa, Unknown
  Bacterial polypetide isolated from the Sargasso Sea
SKATNQAIMDSLDKGLSKSSVGSGSLSLLNTRQESLGLLRLNRFVNLIIPRGSNELVQFIQENTRIPVLGHADGICHLFIDNSVDIDKAISIALDSKIQYPAACNAIETLLIHEDVAEMFLKKGLAIFSSAGVTLKGDAKSQSLGVKNKADEADWSTEYLDLILSIKIVRNIDEAIEHIRKYSSRHTEAIVTDDKEVAEKFLSSVDSAGVYHNCSTRFADGFRYGFGAEVGISTQTLPPRGPVGLEGLVTYRYYLRGDGDLVKDFASGDRSFSHIDLPL

SEQ ID NO: 94949 - protein, 177 aa, Unknown
  Bacterial polypetide isolated from the Sargasso Sea
MDYLKDIGESAKKAARALSTSSAQLRHQALTNISKHLLDSQGQILEKNILDIENAKNSGQSEAFIDRLLLTPERLEKIAKDTINVASLPDPIGEDIETYTRPNGITLTRKRVPLGVIGVIYESRPNITIDISALCLKSGNAAILRGGSESFHSNNILAEIVQAAITEVGLPKECVQI

SEQ ID NO: 94950 - protein, 277 aa, Unknown
  Bacterial polypetide isolated from the Sargasso Sea
LDPKNFSPAFYDRLKLNDERIDQMIQNINEVIDLDDPVRKNRFLYERPNGLKVFKQSIPLGVICIIYESRPNVTSDAASLCLKSGNSVLLRGGSECFNTNKILVDIIQKSLIKNNINKDCVNLVPYTDREVMKYILRKDDDVDLVIPRGGEGLIRFVSENSSIPVIKHYKGVCHVYLDSEADLKIAHDIAINSKIQRPGVCNAMETLIINKNLPKDFISNLMHEFINNKVLIYAEDELSNYITNDLFTKLRPKDYHNEYLDMKLNIKIVSDIKQAIN

SEQ ID NO: 94951 - protein, 234 aa, Unknown
  Bacterial polypetide isolated from the Sargasso Sea
MSKNLEKIGTNAKIAFQNKISNKKKNKVLNYYIQLIKKNQNKILVENTKDIKIAKSKKLKENLIKRLALNNDKISSIIKSIEAIAKFKDPVDVDIETWKRPNGLKIKKVSIPIGIIGVIYESRPNVTSDVSTLCFKSGNCVILRGGSEAYFSNKILANLFRKSLEKYKINKNFVQFIENKNRKLVDYMLSKMSKYIDVIIPRGGKSLVKKVQDFSSVPVIGHLEGMCHTYIDKD

SEQ ID NO: 94952 - protein, 180 aa, Unknown
  Bacterial polypetide isolated from the Sargasso Sea
MKNILIIGKKSKKAFENLKKVNHDRINKTLNYYVKLIIKNKKKIIRENIKDVKNLKRKNVLDRLILNEKKIDNIIKSINTIKKFPNPIGRKLDSWRGKNKLNIKRITTPIGVIGIIYESRPNVTADVAALCLKSSNCAILRGGSEAYHSNKILSDLFRVSLKKNKIDHNCLQFIENKNRK

SEQ ID NO: 94953 - protein, 283 aa, Unknown
  Bacterial polypetide isolated from the Sargasso Sea
IKSGNGLVMRGGKDCILTNLYLFKLVRESLSESGINEDSMYFIDFTDRKAVDLILSMDRYIDLLIPRGSASLVDLVNKNAKMPSITGGIGVCHTYVDKEADIAQAINILNNAKTQNPSVCNAMDTVIVHKEILKNLLDPLSKVYLEKNVKIKADQEAYKIIGSNKGVSHATEEDFGYEFLDLVVSIKTVKNIDLAISHITKYGSKHSEAIITNDEINAKYFLDKVDASAVFHNTSTRFNDGFELGLGAEVAVSTDKLHARGPMGINDLMTYKWVILGQGQVRT

SEQ ID NO: 94954 - protein, 301 aa, Unknown
  Bacterial polypetide isolated from the Sargasso Sea
KIKRELSKGLILERKTVPIGVLGVIFESRPDAVMQISSLAIRSGNGVILKGGSEANLTNTAIVKALQEGLNESGLDKNAICLLTSRKDSMAMLNLEKYINLIIPRGSNELVKFIQENTRIPVLGHADGICHLFIDIEANLEMALSVALDSKIQYPAACNAIETLLVHKDIAPAFLEKAIPLFNSNDVKLIGDKRSVELGLKYEASLEDWRTEYLDLILSIKIVDDLEEAITHIQKYSSKHTDGIITENSHTANKFMNVVDSAGVFHNCSTRFADGFRYGFGAEVGISTQTLPPRGPVGLEG

SEQ ID NO: 94955 - protein, 270 aa, Unknown
  Bacterial polypetide isolated from the Sargasso Sea
DSSMLERLRLDDSVIDRMIEGLGQIDLLPDPIGQIRELSFQSSGIQVGKMRVPLGVVAMIYESRPNVTIDAAGLAIKSGNAMILRGGSESFLSNQELGKSITRGLVAAGLPKKCVQLIKTTDRAAVGALLALDDYVDVIVPRGGKDLIQRVSSETKINVIKHLDGVCHVYVDDPVDMEMAVSVAFNSKSEKYGVCNAMETLLVHQEVAREFLSALEPLFVEKGVELRCCPQAHSICSSSLLAEDSDWTEEYLGPVLSIRIVEGLDAAIEH

SEQ ID NO: 94956 - protein, 316 aa, Unknown
  Bacterial polypetide isolated from the Sargasso Sea
IEGLIKSIEDIITIPDPIGLTLEEWERPNGLKFRKVSTPLGVLGVIYESRPNVTVDASCLSIKSGNSIILRGGSDSFYSSKELVKNITQSFNAAGLPNFCVQMIDTPEREAVEYLLRLKDYVDVIIPRGGKGLIEKINTSSKIPVIKHLDGICHVYVDKDANIEIAERVVFNSKMRRPEICGAAETLLIDESIKDQTMKILNPLKEVKCEIRGDNFIQSLDNDFKIAKEEDWSLEYLDKIISVKIVSGVEDAIDHINKYSSGHTESIITNNDKTFEKFYNKIDSAIILKNASTQFADGGEFGFGAEIGISTDKIHV

SEQ ID NO: 94957 - protein, 171 aa, Unknown
  Bacterial polypetide isolated from the Sargasso Sea
MNNHEEILSLGSKAKKASALLSLITNEQKNAALEELKTNLNLYSDEIIKENAKDIKNAKTNNLSSALIDRLTLNKERIDGIIYSLDEIIKLKDPIGKIISEWNRPNGLNIQKISIPIGVIGFIYESRPNVTVDASAIAIKSGNAIILRGGKDSFYSSQKLKQIIVLSISKA

SEQ ID NO: 94958 - protein, 297 aa, Unknown
  Bacterial polypetide isolated from the Sargasso Sea
MSSNESGKYCASLKNKVLKSISNYIIDDTKKIITANNVDIDNATKKGLKDSMIDRLILNEKRIISMKDGLAKIISIPDTLYKTSKGVKQKNGISVSQMRVPLGVIGMIYESRPNVTIDAAGLCIKSGNSVILRGGSESINSNKALMNCIKKALKDNNINPYMVQLIETTDRKAIDKLLTMNSYIDVIIPRGGKGLIEKVMSSSKIPMIKHLDGNCHVYIDQKADLDMAFRISINSKTQRYGVCNAMETLLVHKKFSKKCLNKILETYTESNVEIRGCKNIVKIYPKAKLAKQYDWSQ

SEQ ID NO: 94959 - protein, 259 aa, Unknown
  Bacterial polypetide isolated from the Sargasso Sea
NGLEIRRVTIPIGVIGVIFESRPNVTSDVSALCFKSGNAVILRGGSEAYNSNKILVNLFRKALKKNKVNENYVQFINNKSRKLVDYLLSKMESSIDVVIPRGGKNLVKKVKQLSKVPVIGHLEGICHTYIDKEAEDNMANKIVLNAKLRNTSICGATETLLIHKSKSKSVNLILNSLAKSGCKILADRKISKLFKGKTYPANNNTWSKEHLSPIISVKLVHDVKEAVAHINKYGTMHTDAIVTKNKNTAKFFIKNVKSS

SEQ ID NO: 94960 - protein, 252 aa, Unknown
  Bacterial polypetide isolated from the Sargasso Sea
MKVSLEKITKNSREAFKNKIDPIKKNKVLKKFIILLQKNKRKIINENQKDLRFAKKKKIKENLVKRLEIDEQKINNIIKSVNQIIKIKDPTNKILDIWKRPNGLIIKKVTVPIGIIAVIYESRPNVTSDVASLCFKSGNAVILRGGSEAFNTNKIISNLFRLSLKKCGVDENYIQFIDSTNRKMVDKLLSKMKGYIDLIIPRGGKSLVKKVDQLSTIPYIGHLEGICHTFIDKKANINMAIKVLENAKMRNT

SEQ ID NO: 94961 - protein, 157 aa, Unknown
  Bacterial polypetide isolated from the Sargasso Sea
RTLLIDRAAADTFATPLIEALEAKGCLVRVDHDMIDYARGRDEASEDDWTTEYLDAIIAVKLVDGISGAIEHIGKYSSHHTEAVIAEDPEVVARFFNEIDSAILLHNASTQFADGGEFGMGAEIGIATGKMHARGPVGVEQLTSFKYLVRGSGQTRA

SEQ ID NO: 94962 - protein, 243 aa, Unknown
  Bacterial polypetide isolated from the Sargasso Sea
MKYLEKIGKNARKAYESLKVVKHKKIKTVLDNYNKSLFKNKKRIIKENQKDVKNVKRKHLIDRLILNEKRIEGIRHSINEIAKFKNPVGKILESWERPNQLKIKKISTPIGVIGVIYESRPNVTADVAALSLKSGNCSILRGGSEAFNSNKLLANLFREVLQKNNINKNCIQFIDKKDRKIVDNLLSKMSKYIDVIVPRGGKGLVAKVQKFSNIHVIGHLEGLCHIFIDKSSNLRMAKKIVFN

SEQ ID NO: 94963 - protein, 289 aa, Unknown
  Bacterial polypetide isolated from the Sargasso Sea
ADVAALCLKSGNCSILRGGSEAFNSNRLLANLFRDNLRKNNINQNCVQFIEHKNRKIVDQLLSKMSAYIDVIVPRGGKGLVAKVQKFSNVHVIGHLEGLCHIFVDKTANIKMAKDLIINAKMRRTSICGAVETLLIEEKALNSHAKEIINALLNSGCEVRADKKINKIFKGKLKKTTEKDWKTEYLDAIISIKAVKNVKGAVEHILKYGTMHTDSIITNNKKNAKIFLNGVNSSIAMHNVSTQFADGGEFGFGGEIGISTNKLPPRGPVGINQLTSYKYLVSGKGIIRT

SEQ ID NO: 94964 - protein, 279 aa, Unknown
  Bacterial polypetide isolated from the Sargasso Sea
EALTQNIPAILTANAKDVAAAKAEGLNDAMIDRLLLNESRLAGIIGDIGDVVRLADPVGEEFGSRVLDNGLRLTRRRVPLGVIGVIYEARPNVTVDIAVLALKTGNAVILRGGKETLESNKLISEVIRGAIASQGLPVDAVQLIDSPDRALVTGLLKLDQYVDMIVPRGGQALQRLCAEQATIPVILGGIGICHLYVDKHADLERALEVIANAKVQRPTVCNALDTLLVDNAVAERFVPQIAEYLHRLGVRFSVCEQSYALLDGLGFDISSATEQSLRQ

SEQ ID NO: 94965 - protein, 241 aa, Unknown
  Bacterial polypetide isolated from the Sargasso Sea
MNKYVKLIGKKAKKVIEKKIDTKTKNKVLKSFLIFLTKNEKKILKQNKKDIKFARKKKLKLNIIERLTLNSKKLDSIKKSVNEIIKIKDPVNKVLENWKRPNGLNIKKVSTPIGVIGVIYESRPNVTSDISSLCFKSGNAVILRGGSEAINSNKILVALFRKALVVNNVNPDFVQFINNRDRKIVDFMLTKMTNEIDVIIPRGGKSLIKKVQAISKMPIIGHLEGICHTYIDKDADLKMAT

SEQ ID NO: 94966 - protein, 245 aa, Unknown
  Bacterial polypetide isolated from the Sargasso Sea
MKKIGERAKLASVNLSNLNVNKKNSVLKQFNYYLKINKQLILNANKKDLAIVKSKKIKNSVIARLELNNEKISQIRSSIKKIIKFKDPVGKILYSSRRPNGLIIKKLSIPIGVIGIIYESRPNVTSDVSALCFKSGNVVILRGGSEAFHSNKILAKLFKRALKNKKCDENCVQFIEDKNRTHVDYLLSHMQNYIDLIIPRGGKSLVKKVLKNTSVPFVGHYEGLCHVFVDKDADLNTAIKVVKNQ

SEQ ID NO: 94967 - protein, 269 aa, Unknown
  Bacterial polypetide isolated from the Sargasso Sea
INDIIKSIKEIKKFPNPVGRTLESWRGKNKLNIKKVTTSIGVIGIIYESRPNVTADVAALCIKSGNCAILKGGSEAIRSNKILADLFRKSLEKNNIDRNALQLIESKNRKVVDFLLSKMSNYIDVIVPRGGRGLVEKVQKYSNVHVIGHLEGLCHIYLDKDNNLNQAQKIILNAKMRRTSICGALETLLINENIIKSKIEKIIDSLIDKKCEVIVDRKINKLFKNKFKLAKEKDWKTEYLDAKVSIKSVKNVNEAVSHILKYGTMHTDC

SEQ ID NO: 94968 - protein, 160 aa, Unknown
  Bacterial polypetide isolated from the Sargasso Sea
MSDSKDINIYMDSLGVSSKKASTILAQASAEQKNDALLSIAKKLDIKRQDILKENVKDLEEAKKKQIGEALIDRLELTEERIDSMISGLKVVSELPDPVGEITKLKPTPSGIDVSQMRVPLGVVGIIYESRPNVTADAAALCLKSGNSCILRGGSEAILS

SEQ ID NO: 94969 - protein, 293 aa, Unknown
  Bacterial polypetide isolated from the Sargasso Sea
DRLMLNDERIESIAQDTRSVAALPDPVGEEFDSRTMENGLKISKRRVPLGVIATIYESRPNVTVDISTLAIKSGNSAVLRGGKEAINSNVAISNVIKGAIKDSSLPDGCVDLIGSTDRKIVSEMLSFQGGIDLLIPRGGADLIRFVAENASVPVVTGGVGVCHIYVDSEVDIDSAVSILDNAKVQRPTVCNALDTILIHSKTAPQILNGIQRKWGESGTVEVHADERAYSMLDEDTNLVVKPATSEDWGREFLSLTVAVKIVDSIDEALVHIGQHGDHSEAILTYNKENAERF

SEQ ID NO: 94970 - protein, 315 aa, Unknown
  Bacterial polypetide isolated from the Sargasso Sea
YKNKIKKNLIERLKLNLNKINNICLSINKISNLKDPVNLTIDKWKRPNGLTIKKVSTPIGVIGIIYESRPNVTSDVSSLCFKSGNAVILRGGSEAYNSNKFLAYLFREALKKYNIDPNFVQFINNRNRSSVNFMLSKMEKFIDVVIPRGGKSLVKKVHEISKVPVIGHLEGICHTYIDQNADLKMAIKVVHNAKLRNTSICGATETILFHKKIIKKFCNPILSKLEENKCEIFADKTIRKNFKGNSFLAKNKNWSTEYLSSKVSVKSVKNITEAIKHINKYGTMHTDSIITKNKKNAALFLNNIKSSIVMHNTST

SEQ ID NO: 94971 - protein, 232 aa, Unknown
  Bacterial polypetide isolated from the Sargasso Sea
RALLLELLQQKDSVDLVIPRGGEGLIHFVSDNSKIPVIQHYKGVCHLYVDKEADLEKAIALLINGKVQRPSACNSLETLLVHQAVAPEFLRLAAAALAPHQVEVFACEQSAAYFTNAVVAQPQQFDTEYLRLAISLKIVASYDDAIVHIQQHSSNHTEVICTQDISTAQRFLKQINSAVVMVNASSRFSDGGELGLGAEIGISTSKLHAYGPMGLESLTTEKYIVIGDGQTR

SEQ ID NO: 94972 - protein, 274 aa, Unknown
  Bacterial polypetide isolated from the Sargasso Sea
VLKDFVKLIEIIKNKIISENNKDIFYARRKKLKENLIQRLALNNNKLKSIIDSIKTITSFKDPVNQVTSKWKRPNGLEIRRVTIPIGVIGVIFESRPNVTSDVSALCFKSGNAVILRGGSEAYNSNKILVNLFRKALKKNKVNENYVQFINNKSRKLVDYLLSKMENSIDVVIPRGGKNLVKKVKQLSKVPVIGHLEGICHTYIDKEAEDNMANKIVLNAKLRNTSICGATETLLIHKNKSKSVNLILNSLAESGCKILADRKISKLFKGKTYP

SEQ ID NO: 94973 - protein, 57 aa, Unknown
  Bacterial polypetide isolated from the Sargasso Sea
SGSVMHNASTRFADGFEYGLGAEIGISTGKLHARGPVGLEGLTSQKYIVRGDGHIRQ

SEQ ID NO: 94974 - protein, 276 aa, Unknown
  Bacterial polypetide isolated from the Sargasso Sea
PNVTSDVSCLCLKSGNVAILRGGSEAYFSNKILADLFRNSLKKNGLDENCIQFINKKDRNVVDFLLSNMSNYIDVIVPRGGKNLVKKVQELSNVNVIGHLEGNCHVYIDKDAKLEMAKKIVINAKMRRTSICGSAETLLIHKKCIKTHGVKIIKELILSGCEVLVDKNINKLFNSKLKLAKEVDWKTEYLAPKISVKLVNNVEEAVSHINKYGTMHTDSIVTENKNTAKFFLTKTNSSIAIHNASTQFADGSEFGFGGEIGISTNKLPPRGPVGIN

SEQ ID NO: 94975 - protein, 310 aa, Unknown
  Bacterial polypetide isolated from the Sargasso Sea
IKSIEAIIKLPDPINKVLDEWTQPNGLIFKKISIPIGVIGVIYESRPNVTIDAACIALKSGNCLILRGGKDSFNTSNTLVKIIAKTFEENGLPKDFIQMVPFVDREGVDSLIQMKDYVDVIIPRGGKNLIEKINSKSSIPVIKHLDGICHVFIDKEADIQKAKKIILNSKMRRPEICGATETLLIDKKIKQSATSILELLLEAGCEIRGDEFIESLNSNFKKATEKDWATEYLDKILSVKLVDGVVDAVNHINKFSSGHTEAIVTENEKTFKQFYNNIDSAIILKNASTQFADGGEFGFGAEIGISTDKL

SEQ ID NO: 94976 - protein, 238 aa, Unknown
  Bacterial polypetide isolated from the Sargasso Sea
MTINLKKITTNSRVAFENKVDPIKKNRVLKKFSELIHENKRRIIKENYKDIKFARKKKIKENLINRLEINEKKINNIIKSINQIIKLKDPTNKILEKWKRPNGLIIKKVSVPIGVISVIYESRPNVTSDVASLCFKSGNAVILKGGSEAFYTNRIISNLFRISLKKNGIDQNYVQFIESKNRKIVDKLLSKMKGHIDLIIPRGGKSLVKKVDELSTIPYIGHLEGICHTFIDKKAKIK

SEQ ID NO: 94977 - protein, 141 aa, Unknown
  Bacterial polypetide isolated from the Sargasso Sea
MSKKIINIGIKAKKASKFKIDSKKKNKVLKKYLQLININKKNILKENNKDINFAIKNKLPENLINRLTLNNKKLIDIQASIRKIIKLNDPTNQVIDKWKRPNGLIIKKVSTPIGVIGIIYESRPNVTSDVASLCFKSGNVV

SEQ ID NO: 94978 - protein, 169 aa, Unknown
  Bacterial polypetide isolated from the Sargasso Sea
MSYLESIGKNAKKAFEDLKDVKHKKIKKVLENYNQSLFKNTNKIIKENLKDVKNVKRKHLVDRLILNKKRIEGIRHSINEIAKFKNPVGRVLETWRRPNNLTIKKVTTSIGVIGIIYESRPNVTADVAALCLKSGNCSILRGGSEAFNSNRLLANLFRDNLKKNNINQN

SEQ ID NO: 94979 - protein, 181 aa, Unknown
  Bacterial polypetide isolated from the Sargasso Sea
MIKNFYMQKMGEQAKIASSYLSSVDINKKNAVLKKFNQYLKANTRIILKENKKDLLYAKSKKIKESMIERLKLNNKKIEQMRSSIKKIIKFKDPIGKTLSSWKRPNGLIIKKISIPIGVIGVIYESRPNVTSDVSALCFKSGNVVILRGGSEAFYTNKILVKFFKRALKNKNCNKNCIQFI

SEQ ID NO: 94980 - protein, 195 aa, Unknown
  Bacterial polypetide isolated from the Sargasso Sea
FAHLEGIVHIYIDKAADPEKALRVVMNAKTRRTGICGAAECLLIHKDVVDTIGQGVIRALMDVGVEVRADETLQVIEGTQAASDSDWGCEYLDKIIAARVVGDIDAAIDHIRTHHSQHTDCIITEDDAAADQFFARLDSAILMRNASTQFADGGEFGMGAEIGIATGKMHARGPVGAAQLTSFKYLVEGDGAVRG

SEQ ID NO: 94981 - protein, 256 aa, Unknown
  Bacterial polypetide isolated from the Sargasso Sea
MEKKINDIRNSIISIIRFKDPINHVLEKWKRPNGLNISRVSIPIGVIGVIYESRPNVTSDVAGLCFKSGNAVILRGGSEAINSNRILSKLFRKALKKNKVDQNFIQFIDSKNRKMVDVMLSKMKEYIDVIIPRGGKNLVRKVQELSKVPIIGHLEGICHTYVDKDAELKMANRVVANAKLRNTSICGATETIILHKNIVKKFSNTILGNLEKNGCKIYGEKTLAKIYKGKIFKATEKDWSTEYLSSAVSVKIVNNL

SEQ ID NO: 94982 - protein, 272 aa, Unknown
  Bacterial polypetide isolated from the Sargasso Sea
NLISRLTLNDKKLLEIEASINKIIKLNDPTNKVIDKWKRPNGLIIKKVSTPIGVIGIIYESRPNVTSDVASLCFKSGNVVILRGGSEAYNSNKIFARLFRDALRKNNIDQNYVQIIKDKNRKSVDYMLSKMKNFIDVIIPRGGKNLVRKVQNLSSVPIIGHLEGICHTYIDKDADLNMAIEVVHNAKLRNTSICGATETILMHKKILKKFCNPILEKLSKNNCEIFADNTIRKNFIGKSKKATDSDWSKEYLSAKVSVKSVNNIVEAINHIN

SEQ ID NO: 94983 - protein, 217 aa, Unknown
  Bacterial polypetide isolated from the Sargasso Sea
MERQVDSDTKNKVLKSFLFFLEKNKKKILNQNKKDIKFAEQKNLKLNLIDRLLLTNKKLEAIKKSVRDIIKLEDPVNKVLEKWRRPNGLFIKKVSTPIGVIGVIYESRPNVTSDISSLCFKSGNAVILRGGSEAMNTNKILASLFRKALKLNKVNPDFVQFINTRNRKIVDYMLSKMTSHIDVIVPRGGKSLIKRVKAISKLPIIGHLEGICHTYMT

SEQ ID NO: 94984 - protein, 277 aa, Unknown
  Bacterial polypetide isolated from the Sargasso Sea
LTLDEGRIEAMAKGLDDIIALPDPVGVITDVWDRPNGLQIERRRTPLGVIGVIYESRPNVTVDAGALCLKAGNAAILRGGSESFHSSDAILECLAEGLQDAGLPAAAIQRVPTRDRAAVGEMLTMVNHIDVIVPRGGKSLIERVSTESQVPLFKHLEGICHTYVTADADPEMAESIVLNAKMRRTGICGATETLLIDRGALSLLTRIVDKLADAGCEVRGDADAQETDKRILPASDEDWNTEYLDSIISVRTVDGLTAAVDHIAEYGSNHTEAIITE

SEQ ID NO: 94985 - protein, 262 aa, Unknown
  Bacterial polypetide isolated from the Sargasso Sea
KLKIKKVSTPIGVIGVIYESRPNVTADVAALCLKSGNCSILRGGSESYNSNKLLANLFRESLDKNNIDKNCVQFIEKKERKIVDVLLSKMSNYIDVIVPRGGKGLVKKVQKFSNIHVIGHLEGLCHIYVDKSANLTMAKKIVINAKMRRTSICGALETLLIDEKALNSHGKIIIKSLISSGCEVRVDRKINKLFKNKLKNAKEIDWKTEYLDTKISIKTVKNVKDAVNHILKYGTMHTDSIITNNSKNAKIFLEGVNSSIAM

SEQ ID NO: 94986 - protein, 244 aa, Unknown
  Bacterial polypetide isolated from the Sargasso Sea
MSIESDIIELGKNAKKASSNMKLCNSDQKNQALKNLIKNLDDSREKILNANKIDLENGIKKSLSNPLINRLTLSNKSIDQLIKSIEDTIEIPDPIGITLEKWERPNGLSFRKISTPLGVLGVIYESRPNVTVDASCLSIKSGNCIILRGGSDSFHSSKELVNSITHSFKQAGLPNHCVQMINSSKREAVDHLLKMKDYIDVIIPRGGKGLIEKINSTSKIPVIKHLDGICHIYVDKEADLKMQK

SEQ ID NO: 94987 - protein, 289 aa, Unknown
  Bacterial polypetide isolated from the Sargasso Sea
LQSIGRNAKKAFEELKNVKHKKIKKVLENYNQSLLKNTNKIIRENLKDVKNIKRKNLVDRLILNKIRIEGIRHSINEIAKFKDPVGRVLETWRRPNNLTIKKVTTPIGVIGVIYESRPNVTADVAALCLKSGNCSILRGGSEAFNSNRLLANLFRDNLRKNNINQNCVQFIENKNRKIVDQLLSKMSSYIDVIVPRGGKGLVAKVQKFSNVHVIGHLEGLCHIYVDKTANIKMAKDLIINAKMRRTSICGAVETLLIEEKALNSHAKEIIDALLNSGCEVRADKKVNKI

SEQ ID NO: 94988 - protein, 264 aa, Unknown
  Bacterial polypetide isolated from the Sargasso Sea
MYKIGRNAVNASQTKISTKLKNKVLITYIDLIKKKKKSIIKQNNKDIKQAIKKNLKKNLIERLKINQKKINNICLAIKNVRKLKDPVDITINKWKRPNNLLIKKVSIPLGIIGVIFESRPNVSSDVSSLCFKSGNAVILRGGSEALNSNRILVSLFRKALKKNKVNQNYVQLIEKRERKYVDFMLSHMSNYIDVIIPRGGKGLVSKVQKFSKVPTIGHLEGICHTYIDKEADLKMAIKVTHNAKLRNTSICGATETILINKKVV

SEQ ID NO: 94989 - protein, 272 aa, Unknown
  Bacterial polypetide isolated from the Sargasso Sea
MKKYLESIGNNSCKAFTCKIRNKTKNKVLIKFADLIKKNKSKIIKQNKKDINFAKRKSLKKNLIDRLQLNDNKINEIIKSIKNIIKLKDPTNITLSKWKRPNGLIIKRVTIPIGVIGVIYESRPNVTSDISSLCFKSGNCVILRGGSEAYFSNKIISNLFRKALKDNKVNQNYVQFIESKNRKLVNLMLSNMKKYIDVIIPRGGKNLVKKVQNISSVPIIGHLEGICHTYIDKDANLNFAKKIVHNAKLRNTSICGATETILFHEKALKKYV

SEQ ID NO: 94990 - protein, 100 aa, Unknown
  Bacterial polypetide isolated from the Sargasso Sea
LAVRIVEDLVEAINHIEEYGSRHTDSIVTEDLSNARKFLSEVDSSSVMVNASTRFADGYEYGLGAEIGISTDKFHARGPVGLEGLTSQKWVVFGDGQIRL

SEQ ID NO: 94991 - protein, 284 aa, Unknown
  Bacterial polypetide isolated from the Sargasso Sea
IFFAYKKKLKENLIKRLILDDQKILEIQNSIKKIIKLKDPTNIILEKWKRPNGLNISKVSIPIGVIGIIYESRPNVTSDVASLCFKSGNTVILKGGSEAFHSNFILTNLFRKSLKKNKVDENFVQFINIKNKNLVDFLLTRMGKFIDVIIPRGGKSLVKKVQNLSNIPIIGHLEGICHTYVDKDANINIAEKVILNAKLRNTAICGATETILLHNKILKKIGIRVLKSLEKNGCKIIGDDKIKKFYYGKVKKASIKDWSKEYLSSTVSVKCVKNLDDAILHINK

SEQ ID NO: 94992 - protein, 276 aa, Unknown
  Bacterial polypetide isolated from the Sargasso Sea
KNLSGFNVNRRNKVLDQFIRDLKNNKKSILRENIKDIKLCKRKELVDRLVINEKKIENLRNSIDQIRKFNDPLGKILLKWKRPNGLFIKKITIPIGVIGIIYESRPDVTCDVSSLCLKSGNVAILRGGSEAFNTNKIFANLFRNSLKKNKIDKNCIQFVEKKERRLVDFMLSKMSKHIDVIVPRGGKNLVKKVQKLSAVNVIGHLEGNCHVYVDKNADLKMARKVVVNSKMRRTSICGAAETLLIHSQCIKSHAVPILRDLAISGCEIVVDKKLNK

SEQ ID NO: 94993 - protein, 146 aa, Unknown
  Bacterial polypetide isolated from the Sargasso Sea
TVLEKLGPMYQQEKVEIRGCEESKKILGDIKIASDEDYGTEYLAPIMSLKIVNDIDEAMQHIDKFGSKHTDTIVTENKSKAERFLREVDSSSVMLNASTRFADGYEYGLGAEIGISTDKFHARGPVGLEGLTSQKYIVLGDGNIRS

SEQ ID NO: 94994 - protein, 166 aa, Unknown
  Bacterial polypetide isolated from the Sargasso Sea
MSKNLFMKKIGEKAKFASIELSKLNIKKKNSVLKLFSKYLKIHEQAILNANKKDLSNAKLKKITDSMLDRLKLNKKKINQIRSSIDKIIKFKDPNDKILSTWRRPNGLLIKKISIPIGVIGIIYESRPNVTSDVSALCFKSGNAVILRGGSEAFNSNKILAKLFRK

SEQ ID NO: 94995 - protein, 215 aa, Unknown
  Bacterial polypetide isolated from the Sargasso Sea
HEVKIVSRKIQQEARVPVFAHLEGICHIYIDHEAKIEIALNILLNSKLRRTGICGAAETLLIDKRLDENHVSDLIYKLMSEGCEVRAEKAIQNKYNKVLLATEKDWRTEYLDSIISVKYVNDVEHAIEHINEYSSDHTETIVTENQSTAEKFLSHVDSAIVMHNASTQFADGGEFGMGAEIGISTGRLHARGPVGTEQLTSFKYIVRGTGQIRKI

SEQ ID NO: 94996 - protein, 274 aa, Unknown
  Bacterial polypetide isolated from the Sargasso Sea
LLGVIYESRPNVTSDVAGLCFKSGNAVILRGGSEAINSNRVLSKLFRKALKKNKVDENFIQFLDSKKRKMVDVMLSKMKEYIDVIIPRGGKNLVRKVQELSKIPIIGHLEGICHTYVDKDAELKMANRVVVNAKLRNTSICGATETIILHKNIVKKFSNTILGNLEKNGCKIYGEKTLAKFYKGKIFKATEKDWSTEYLSSAVSVKIVNNLNEAISHINKYGTMHTDSIITKNKKTANQFLKKVKSSIAMHNTSTQFADGGEFGFGGEVGISTH

SEQ ID NO: 94997 - protein, 224 aa, Unknown
  Bacterial polypetide isolated from the Sargasso Sea
MKYLKNIGKNAKRAFEDLKTVKHDKIKKVLDNYNKALLKNKDKIIRENVKDIKSAKRKNLIDRLILNEKRIEGIRYSINEIAKFKNPVGRVLDQWSRPNKLRIKKISTPIGVIGVIYESRPNVTADVSSLCLKSGNCSILKGGSEAINSNKLLANLFRDVLHKNGINKNCVQFIDRKDRKIVDNLLSKMSGYIDVIVPRGGKGLVAKVQKFSNVHVIGHLEGLC

SEQ ID NO: 94998 - protein, 84 aa, Unknown
  Bacterial polypetide isolated from the Sargasso Sea
EKHGSGHSEAIITNDVNNGHQFTKDVDAALVLVNASTRFNDGGQIGLGSEVAISTGKLHARGPMGLRELTSYKWVALGAGQIRD

SEQ ID NO: 94999 - protein, 173 aa, Unknown
  Bacterial polypetide isolated from the Sargasso Sea
MNKNLINIGIKAKKAFKIKINSKLKNKVLADFAELIKKNKKKIIKENYKDIKFAIRNDLPENLIKRLTLNNKKLQEMQNSINKIIKLNDPINKILDKWKRPNGLIIKRVSAPIGVIGIIYESRPNVTSDVSSLCFKSGNAIILRGGSEAYNSNMILVKLFRQSLKINKINENY

SEQ ID NO: 95000 - protein, 267 aa, Unknown
  Bacterial polypetide isolated from the Sargasso Sea
MSIKLNKITKSSRTAFESKVNTIKKDKVLKKFAILLSKNKSKIIRENYKDIIFAKKKRLKENLIKRLTINEKKINSIIKSIKQIIKLKDPTNKILDSWTRPNGLVIKKVTIPIGVIAVIYESRPNVTSDVASLCFKSGNAVILRGGSEAFNTNKIIAGLFRKSLKSYGIDQNYVQFIENKNRKVVDNLLSKMKGFIDLVIPRGGKSLVKKVDELSTIPYIGHLEGICHTFIDKKANLEMAIKVLENAKMRNTSICGATETVLFHKNI

SEQ ID NO: 95001 - protein, 270 aa, Unknown
  Bacterial polypetide isolated from the Sargasso Sea
KINSIINSIKTILNFKDPIDQNLDTWVRPNKLKIKRVTIPIGVIGIIYESRPNVTADVSTLCFKSGNCVILRGGSEAYFSNKILANLFRQSLKINKIDKNFVQFIDKKNRKFVDFMLSKMSKYIDVIIPRGGKNLVRKVQELSCIPVIGHLEGMCHTYIDKDANINMAKKILLNAKLRNTSICGATETLLIHKKNSKFIEDLLNVLTEKDCIIYADKKIKKIYKGKTRNALSSTWKKEFLSSKISVKLVNNINEAIEHINKYGTMHTDAI

SEQ ID NO: 95002 - protein, 196 aa, Unknown
  Bacterial polypetide isolated from the Sargasso Sea
MKNYLNNIGKKSKNAFKNLGNVSLKKRNKILETYTKSLKSNKNKIIKENLKDVKLCKREELIDRLILDSKKIESIRNSIYEIIKFKDPLGKVIEKWKRPNNLIIKKVSVPIGVIGIIYESRPNVTSDVSSLCLKSGNVAILRGGSESLNSNRILANLFRNSLSNNYVDKNCIQFIDKTNRKVVDFLLSQMSDYIDV

SEQ ID NO: 95003 - protein, 283 aa, Unknown
  Bacterial polypetide isolated from the Sargasso Sea
LNDIKRFKNPVGQILSKWRRSNKLRIEKVSIPIGVISVIYESRPNVTADVAALCLKSGNCVILKGGSEAFHTNKILADLFRKALRKNKIDENCVQFIEKRDRSVVDFILSKMKNYIDVVVPRGGKSLVKKVQKLSNVNVIGHLEGLCHIYVDKAANFEMAKKVVINAKMRRTSICGALETLLINEKILSSFGKKIINDLIDRGCEVRVDNRINKIFYYKLKKAKKKDWETEYLDSIISIKTVKNVEEAIAHILKYGTMHTDSIITENLSTAKQFLEGVNSSIA

SEQ ID NO: 95004 - protein, 304 aa, Unknown
  Bacterial polypetide isolated from the Sargasso Sea
MDNGIKIEKRRVPLGVFGCVYESRPNVTTDIVALCLKSGNTVILRGGKEAVNSNAALIKLIRQALEKSDISADVVQFINSTDRSVVDQMIRANDCIDLFIPRGGASLIQYVRDNATVPSITGGIGVVHIYADESADLQKVVEIVHNAKTQRPDVCNALDTLLVHSTIAADLLASLVPNITSAGVEIRCDKRALSVMGSAGSSELVKAAEESDFGQEFLSLIMSVKILDSIDDAIDHIEEFGSGHTEAIITENPQSANKFLDEVEASVVLVNASTRFNDGGQLGLGAEVAISTNKLHARGPMGLK

SEQ ID NO: 95005 - protein, 180 aa, Unknown
  Bacterial polypetide isolated from the Sargasso Sea
KAESITLNSKCQRPSVCNAAENLLIHQDALSSLPRLAQALHEHGVELRVDSAAKAALTGTGIPMIDAQDQDFGEEYNDLIISIAVVPNMKAAIEIINTRGSAHTDTIVTEDAQNAQDFLNEVDSSTVLHNASTRFSDGFEFGLGAEIGISTDRLHARGPMGLNELCTYKYIVHGKGEIKD

SEQ ID NO: 95006 - protein, 286 aa, Unknown
  Bacterial polypetide isolated from the Sargasso Sea
VLENYNQSLLKNTNKIIRENLKDIKYVKRKHLVDRLILNKKRIEGIRHSINEIAKFKDPIGRVLETWRRPNNLTIKKVTTPIGVIGVIYESRPNVTADVAALCLKSGNCSILRGGSEAFNSNRLLANLFRDNLKKNSINQNCVQFIENKNRKIVDQLLSKMGEYIDVIVPRGGRGLVEKVQKFSNVHVIGHLEGLCHIYVDKSANIKMAKDLIINAKMRRTSICGAVETVLFEENALKSHAKEIINSLLNSGCEVRADKKVNKLFQGKLKKAIEKDGKQNIWMRLF

SEQ ID NO: 95007 - protein, 307 aa, Unknown
  Bacterial polypetide isolated from the Sargasso Sea
GYKKNLIDRLMLDKSKIYQIIKSINNIAKLKDPTDITLSKWKRPNGLIIKKVTMPIGVIGIIYESRPNVTSDVSSLCFKSGNSVILRGGSEAYFSNLIISKLFRKALKENKVDENYVQFIKNKNRKVVDLLLSKMEKFIDVIIPRGGKNLVSKVQKLSRVPIIGHLEGNCHTYIDKDAKLNLAEKILYNAKLRNTSICGATETVLFHEKTLNKFINPVLKKLEKNNCIIIADKKIKKIFKGISKKAKEKDWSKEYLLPIISAKSVKNVQDAVDHINKYGTMHTDAIITQNKRTANFFLKNIKSSIAI

SEQ ID NO: 95008 - protein, 149 aa, Unknown
  Bacterial polypetide isolated from the Sargasso Sea
VLLGDKKRLESYPDLNLSSATDKEWESEYMDLILSIKTVKSASEAVEHISQFGSKHTEAIVTENSELAEWFMKIVDSAGVFWNASTRFADGFRYGLGAEVVVSTGKTHARGPVGLEGLVIYKYKLYGNGHVAGDYGRGKKDFIHKDIEF

SEQ ID NO: 95009 - protein, 49 aa, Unknown
  Bacterial polypetide isolated from the Sargasso Sea
STRFADGFEFGLGAEIGISNDKLHARGPVGLEGLTSLKYVVLGHGEGRQ

SEQ ID NO: 95010 - protein, 270 aa, Unknown
  Bacterial polypetide isolated from the Sargasso Sea
IKKISVPLGVIGIIYESRPNVTVDASAIAVKAGNTVILRGGKDSFHSSHKLNEIINNSFNRSGLPENSVQMIPTPEREAVDLMLKLDSYIDLIIPRGGKGLIKNVKEKSSIPTIKHLDGICHVYVDKDANLETAKKIVFNSKMRRPGICGAAETLLIHELQKKNAKKILQELVDSQCEIRGDAFINSLDDKFKLATDKDWGTEYLDKILSVKIINSVQDAVEHINTHGSGHTESIITENYETFEFFHKNINSAIILQNASTQYADGGEFG

SEQ ID NO: 95011 - protein, 164 aa, Unknown
  Bacterial polypetide isolated from the Sargasso Sea
MNYLKSIGINAKKAFEDLKGVKHKKIKKVLEGYNQSLLKNTNKIIRENMKDVKNVKRKHLVDRLILNKKRIDGIRHSINEIAKFKDPVGRVLETWQRPNNLSIKKVSTPIGVIGVIYESRPNVTADVAALCLKSGNCSILRGGSEAFHSNRLLANLFRDNLRKK

SEQ ID NO: 95012 - protein, 297 aa, Unknown
  Bacterial polypetide isolated from the Sargasso Sea
KRPNGLTIQKVTIPIGVIGVIYESRPNVTSDVSTLCFKSGNCVILRGGSEAYNSNKILANFFRLALRKNKINENYVQFVNSKNRRQVNYMLSKMSNYIDVIIPRGGKNLVKKVKDLSKIPVIGHLEGICHTYIDKDANNKMASKICLNAKLRNTSICGATETLLIHKKKKNYVNTILNILVKNNCEIISDVNIKKIFKGKSRLATKKTWITEHLAPKISVKLVKNIDEAIQHINKYGTMHTDAIITNNINSAKYFLKSIKSSIAIHNSSTQFADGGEFGFGGEVGISNNNLPARGPI

SEQ ID NO: 95013 - protein, 274 aa, Unknown
  Bacterial polypetide isolated from the Sargasso Sea
QDPLDQTLESWTNATNGLQFTKVSVPIGVIGIIYESRPNVTIDAACLCLRSGNISILRGGSECIETNKKLYECIQDALKDLNFDTHLVCFIQNTDRSFVEELLKAEGDVDVIIPRGGKSLIETISKNSKVPTIKHLEGLCHTFWDEGYDKDKATEVIANAKLRRPEICGATETLLIHSNNSAEDISSVLDNLKSQGCEIIGCSRIKDIYAIDRDATEEDWSTEYLDKKITVKLVDNVEECVEHINKYSSGHTESCLSNNQQSIEYFFQNCKSAI

SEQ ID NO: 95014 - protein, 298 aa, Unknown
  Bacterial polypetide isolated from the Sargasso Sea
EIYKFKNPIGRVIEKWKRPNGLLIKKVSTPIGIIGIIYESRPNVTCDVSSLCIKSGNVAILRGGSESFNSNKILANLFKESLKINGIDKNCIQFIEKKNRKIIDYLLSNMSDYIDVIVPRGGKNLVKKVQKLSRVNVIGHLEGNCHVYVDRDASINMAKKVVINSKMRRTSICGAAETLLIDSKSLISHGAPIIRELILKGCEIVVDKKINKIFKNQLKLAKEIDWNTEYLSPKISVKSVNGVKDAILHITKYGTLHTDSIITKNKKTAKIFLDGVNSSIAVHNASTQFADGGEFGFG

SEQ ID NO: 95015 - protein, 266 aa, Unknown
  Bacterial polypetide isolated from the Sargasso Sea
MSSDISSIMAAIGVKAKEAATQIAVASAGAKNKALRLIGENLGTSLGHILSENTKDMVAGEEKGLNSAMLDRLALDETRLNGMIKGLNDIAALNDPVGVVTSEWERPNGLQIQRKRVPLGVIGVIFESRPNVTADAGALCIKAGNAAILRCGSESYLSSSAIFNCMRNGLVAAGLPSHAIQLVPSRGREAVGEMLKMIDHIDVIIPRGGKSLVERVTKNSKVPLFKHLEGICHTYIEENANLDMAADIVMNAKMRRTGICGALRPF

SEQ ID NO: 95016 - protein, 265 aa, Unknown
  Bacterial polypetide isolated from the Sargasso Sea
ALDNERLQGICITLEAIKSFEDPVGKVLATWDRPNGLNISRVATPLGVIGLIFESRPNVAADAGGLCLKSGNAVILRSGKDGLGSAVAIVACLQAALISADLPKECIQIVPSESRDAATLMLEGLNGSIDVIVPRGGKSLVAEVERSAKVPVFGHLEGICHIYVDEYADEEKALAVCLNAKMRRTGICGAVETILVNDKIAASFVPKIIASLSELNCEVRCCEKTIDLDKRSVPAHEEDWSTEYLAPIVSLKSVLNVDEAINHIG

SEQ ID NO: 95017 - protein, 124 aa, Unknown
  Bacterial polypetide isolated from the Sargasso Sea
ELQGPANLVPLQAEELDNEYLSLHLNVVLVPDIDRAIAHIRQHGTQHSDAILTRTLSNANRFINEVDSSAVYVNASTRFTDGGQFGLGAEVAVSTQKLHARGPMGLEALTTYKWIGFGDDTIRA

SEQ ID NO: 95018 - protein, 298 aa, Unknown
  Bacterial polypetide isolated from the Sargasso Sea
MQISSLAIRSGNGVMLKGGSEANLTNTAIVNALQNGLCESGLDKNAICLLTSRKDSMSMLNLENYINLIIPRGSNELVKFIQENTKIPVLGHADGICHLFIDKEANLEMALSVALDSKIQYPAACNAIETLLVHKDVAPVFLEKAIPLFNSNDVKLIGDKRSVELGLKYEATLEDWQTEYLDLILSIKIVDDLDEAITHIHKFSSKHTDGIITENLSTANKFMNIINSAGVFHNCSTRFADGFRYGFGAEVGISTQTLPPRGPVGLEGLVTYKYFLRGDGNIVDDFSSGKAIYTHKDF

SEQ ID NO: 95019 - protein, 302 aa, Unknown
  Bacterial polypetide isolated from the Sargasso Sea
AWCNWYIYESRPNVTADAGGLCLKSGNAAILRGGSESFYSSATILHCLQQGLKKADLPITAIQQVPTRDRAGVGELLSMSEYIDIIVPRGGKSLIERVQKESRVPVIAHLDGNCHIYLEQTADPTMAKNVVFNAKMRRPGICGATESLIVDRSVASQLLPAIIDSLATAGCEIRGDDNTQDIDSRVQPATDEDWGTEYLDTIISVKQVDGLDEAINHINKYGSHHTDSIVTNDGTAAAKFLETVDSAIVLHNASTQFADGGEFGMGAEIGISTGRLHARGPVGVEQLTTFKYIVRGDGQIRS

SEQ ID NO: 95020 - protein, 147 aa, Unknown
  Bacterial polypetide isolated from the Sargasso Sea
MKKKNIDHYGINAKEAFRILSLSDNKQRNNALKETAKLLKANIDQILEANKIDIENSQKKSMSNSFIDRLSLDKKRIYSIIDGLIDISKLEDPLNKVLSTWDRPNGLNISKISVPLGVIGIIYESRPNVTIDAGALCIKSGNTCILR

SEQ ID NO: 95021 - protein, 167 aa, Unknown
  Bacterial polypetide isolated from the Sargasso Sea
MIKYLKIIGNKARQASKDKITTKKKNKILLKFSRLIKINQNKILKENKKDIKYAQTIGLKKNFVERLELDQNKINKIVKSIEDIIKLKDPVDISLKNWKRPNGLKIKRVTIPLGVIGVIYESRPNVTCDISSLCFKAGNSVILRGGSEAYFSNKILSDLFRLSLRSN

SEQ ID NO: 95022 - protein, 162 aa, Unknown
  Bacterial polypetide isolated from the Sargasso Sea
MKNILIIGQKSKLAFENLKKTNHKKINKVLDDYIKLISASKKKIIRENAKDVKNLKRSKVLDRLILNEKKIDSIINSIKEIKKFPNPVGKILDSWVGKNRLNIKRVTTPIGVIGVIYESRPNVTADVAALCLKSGNCVILRGGSEAFNSNKILSDLFRKSLK

SEQ ID NO: 95023 - protein, 246 aa, Unknown
  Bacterial polypetide isolated from the Sargasso Sea
PFNLTIKRVTTPIGVIGVIYESRPNVTADVAALCLKSGNCSILRGGSEAFNSNKLLANLFRDNLRKNNINQNCVQFIENKNRKIVDQLLSKMSAYIDVIVPRGGKGLVAKVQKFSNVHVIGHLEGLCHIYIEKTANIKMARDLIINAKMRRTSICGAVETLLIEEKALSSHAKEIINALLDSGCEVRADKKIYKIFKGKLKKTTEKDWKTEYLDAIISVKTVKNVKGAVEHILKYGTMHTDSIITN

SEQ ID NO: 95024 - protein, 127 aa, Unknown
  Bacterial polypetide isolated from the Sargasso Sea
DERCKKKFDKVVLASDDDWKTEYLDAIISIKIVSGVEDAIDHIEKYGSGHTESIISESRDNVEKFLNSVGSAIVMHNTSTQFADGGEFGLGAEIGIATGKLHARGPVGLEGLTTYKYIVRGNGQIRP

SEQ ID NO: 95025 - protein, 205 aa, Unknown
  Bacterial polypetide isolated from the Sargasso Sea
MKNVLIKIGKKSKKAFINKLSSKKKDKVLKDYYHLIDKNRKLIINENKKDIKNALKKKIKDNLIKRLIIDDNKISNIISSIKKIIKLKDPTNVTLEKWKRPNGLNISKISIPIGVIGVIYESRPNVTSDVASLCFKSGNTVILRGGSEAFYSNYILSKLFRKSLQKNGLDENFVQFINKKNRKVVDFILTKMVKYIDVIIPRGGK

SEQ ID NO: 95026 - protein, 204 aa, Unknown
  Bacterial polypetide isolated from the Sargasso Sea
MTQSKEINTYMNKLGSEAKEASLILAQASLEQKNEALSCISEQIESDRDKILSINKKDLDLAKEKSIGSALIDRLELNDSRINSMINGLQVVSALPDPIGEITDLDPTPSGIEVSRMRVPLGVVGIIYESRPNVTADAAALCLKSGNACLLRGGSEAILSNKIIWNCLQEGLKKASLPKECIQLVETTDREAVKTLLQLDDYWT

SEQ ID NO: 95027 - protein, 325 aa, Unknown
  Bacterial polypetide isolated from the Sargasso Sea
PILSANKLDIENAIANDLSKPLINRLKVTEESIASIIKSITEIKNQPDPIGSVLENWEQPNGLKFSKISVPLGVLGVIYESRPNVTVDASCLALKSNNALILRGGSDSYHTSKQLVNIIRESFMEANLPENIIQMIPTTDREAVDHLLAMKDYVNVIIPRGGKSLIKKINEKSKIPVIKHLEGLCHVYVDKEADIEIAKNIIFNSKLRRPEICGAAETLLIDSSLKEKALELIEPIYKAGCVIRGDDFITSLDKNFERANNEDWSTEYLDKIISVKIVDGVMGATDHINRYSSNHTESIITENDQTFMNFFIYIDSAIILKNASL

SEQ ID NO: 95028 - protein, 288 aa, Unknown
  Bacterial polypetide isolated from the Sargasso Sea
AFEKLNKVDHKKINRVLHDYNKALLSNKNKIIKENIRDIKNSKRKNLIDRLILNDKRIESIRHSINKIAKFKNPVGNILAEWKRPNGLKIKKISTPIGIIGVIYESRPNVTADVASLCLKSGNCAILRGGSEAFNSNRILANIFRDSLAKNNIDKNCIQFIEKKDRKIVEYLLSKMTNYIDVIVPRGGKSLVSKVQKFSKIHVIGHLEGICHIYIDTDSNVNTASKIVLNAKLRRTSVCGALETLLINSKSLKSHGIPIIKKLISSGCSVKVDKKINKLFNNKLKLAK

SEQ ID NO: 95029 - protein, 288 aa, Unknown
  Bacterial polypetide isolated from the Sargasso Sea
IARFKDPIGKVMETWRRPNNLTIKKVTTPIGVIGVIYESRPNVTADVAALCLKSGNCSILRGGSEAFNSNRLLASLFRDNLKKNNINQNCVQFIENKNRKIVDQLLSKMSAYIDVIVPRGGKGLVAKVQKFSNVHVIGHLEGLCHIYVDKTANIKMAKDLILNAKMRRTSICGAVETLLIEEKALNSHAKEIINALLNSGCEVRADKKVNKIFNGKLKKTKEKDWRTEYLDAIISIKAVKNVDYAVEHILKYGTMHTDSIITESKKNAEIFLNGVNSSIAMHNVSTQF

SEQ ID NO: 95030 - protein, 169 aa, Unknown
  Bacterial polypetide isolated from the Sargasso Sea
MEKIGINSQKASKKKINIKIKNKVLKKYANLILKNKLKIISQNKKDIKYAKKNSLRENLIKRLFLNDKKINEIVKSIKNIIALKDPVDITLNKWNRPNGLKIKRVTVPFGIIGVIYESRPNVTSDVSSLCFKSGNCVILRGGSEAYFSNKILVKLFRKALEINKIDKNF

SEQ ID NO: 95031 - protein, 262 aa, Unknown
  Bacterial polypetide isolated from the Sargasso Sea
NKALMNCIKKALKINQFNEYMVQLIETTDRKAIDKMLEMNDYIDVIIPRGGKGLIEKVMSISKIPMIKHLDGNCHVYIDHKADLDMAYNISINSKMQRYGVCNAMETLLVHKRFSKKCLRKILNTYQENNIEIRGCKNILKLLPNSKLAKQSDWTQEYLAPVLAIKIVDSIDDAVKHITEFGSLHTDAIVSNDKNSIDKFKRLVNSSSVMINTSTRFADGFEYGLGAEIGISTDKLHARGPVGLDGLTNLKYIVSSKGKIRS

SEQ ID NO: 95032 - protein, 262 aa, Unknown
  Bacterial polypetide isolated from the Sargasso Sea
MAARSLSSVQRVMIIKKIIRNLRKNNETIIKKNSIDIKLAKKNNLSDALIDRLLINSSRVKNMINGLEEINTIPDTLYKRINKSRQSSGITVEQMRVPLGVIAMIYESRPNVTIDAAGLSLKSGNSIILRGGSEAINSNLILSSLIKKALLESKVSTDMVQIVKTIDRAAVSELLKMESYIDVIIPRGGKSLIKKVSEESKIPVIKHLDGNCHVYIDKDADFKTAMSCTINSKTQRYGVCNSAESLLIHKSFPKSYIKEILY

SEQ ID NO: 95033 - protein, 244 aa, Unknown
  Bacterial polypetide isolated from the Sargasso Sea
NIIQFIETIDRSAVDYMLSQMSDYIDVVVPRGGKGLVKKVQDSAKIPVIGHLDGICHIYVDESSDPEAASKIVTNAKLRRTSICGAAETVLVDEKCIDSHLPKIINDLKSGGCEIRGDERCKKKFDEVVLASDDDWKTEYLDAIISIKIVSGVEDAIDHIEKYGSGHTESIISESKDNVEKFLNSVGSAIVMHNTSTQFADGGEFGLGAEIGIATGKLHARGPVGLEGLTTYKYIVRGNGQIRP

SEQ ID NO: 95034 - protein, 243 aa, Unknown
  Bacterial polypetide isolated from the Sargasso Sea
LNNTFVDRLLLDDKRIDNIVEGLKQISEMSDPIGVELSKWIQPNGLNISRISVPLGIIGIIYESRPNVTIDAGSLCIKSGNTAILRGGSDSINSSKILARCMQKGLESVNLPSYTVQLVENTDREAVSAMLTSTGEIDIIIPRGGKSLVKKIQDEARVPVFAHLEGICHVYVDKDADINKAVKLIVNSKMRRTGICGALETLLVDRDISEKAVPIIVKNLIESGCHIKGDIETKKIVDEIELA

SEQ ID NO: 95035 - protein, 301 aa, Unknown
  Bacterial polypetide isolated from the Sargasso Sea
EKIIQENKKDIKFASKKKIKSNLIERLVLNQKKIKSLKKSVKDIIKLEDPINKILEKWRRPNGLLIRKISTPIGIIGVIYESRPNVTSDISSLCFKSGNAVILRGGSEAINTNRIIASLFRKALKINKVDPNFVQFINDRNRKIVDFMLSKMVNKIDVIIPRGGKNLIKKVQSISKIPIIGHLEGICHTYVDKEANLKMANKIVLNAKLRNTSICGATETILFHKKIVKKFCNEILKNLHNNGCKIIGDNFLRKFYKGKIYVAKERDWSTEYLSATVSIKCVDSCEEAIKHINKYGTSHTE

SEQ ID NO: 95036 - protein, 251 aa, Unknown
  Bacterial polypetide isolated from the Sargasso Sea
WKTDEGLHIRKIRSPFGVIGVIYEARPNVTSDVSGLCLKSGNAVILRGSSYCLDSNIAILEVLQNSLVLNNCNKNIFQIIESKDRQDTIEFMNLTEFVDLIVPRGGKGLIQTLVDNSKVPFILDGDGNVHLYIHKDAKKEHIIDIVINSKVQRPGVCNALETLLINSEIYQDMGSLIIEKLLENEVELFVDEIIKEDFPNLNLANDSHYETEFLDLKLAVKVVDSVEQAIEHIKIFSSGHTEAILTESKED

SEQ ID NO: 95037 - protein, 303 aa, Unknown
  Bacterial polypetide isolated from the Sargasso Sea
WKQPNGLEISRVRTPLGTIGIIFESRPNVSADASALCIKSGNAVVLRSGSDSLRSSQALVECFTSALNDMNLPIGIVQIIPSKDRAMVTHMLKGLNNAIDVIVPRGGKSLVQAVQDSATIPVFGHLEGICHTYIDKSADLNTSISVVTNAKMRRPGICGALETLLIHKDSSEQLNSILDSLIEAGCEIRGCEKTVALDNRATPANDIDWDTEYLSPILSVKIVDDINEAIEHIQKHGTGHTDVIISEDKNSQDYFINQLDSAILMINASSQFADGGEFGMGGEIGIATGKFHARGPVSLEQLT

SEQ ID NO: 95038 - protein, 183 aa, Unknown
  Bacterial polypetide isolated from the Sargasso Sea
MEQTVSDIIYEIAKNAKNSLDSLRKTSPEQKNDALNFSAEAIVNNLEDILESNLTDIRFAKEKGIKKSLFQRLELDESKVKKISQSLTDVANLSNPLGKILDNNQRPNGLTVKKITVPIGVIGIIYESRPNVTADSASLCLKSGNASILKCGSESFNTSKTILKYMKMGLKKANITEDSIQMI

SEQ ID NO: 95039 - protein, 244 aa, Unknown
  Bacterial polypetide isolated from the Sargasso Sea
NIVQYVNTTDRAAVDYMLSKMDKYIDVIVPRGGKGLVKKVQDTAKIPVIGHLDGICHLYVDETSDPDVASKIVENAKLRRTGICGAAETVLIDKKSIDSHLGKIIETLIKGGCEVRGDSICMNYSDKVKEATEIDWETEYLEAIISIKIVKDVDEAIDHIAKYGSGHTESIISENKNNVEKFLNSVGSAIVMHNASTQFADGGEFGLGAEIGIATGKLHARGPVGLEGLTTYKYIVRGSGQVRP

SEQ ID NO: 95040 - protein, 263 aa, Unknown
  Bacterial polypetide isolated from the Sargasso Sea
MKKYIEKIGVNAKIAFEKKISNKRKNKVLIYYTQLILKNQKKILVENAKDIEIAKSRKLKDNLIKRLALNKVKIKSIVKSIKTIANFKDPVDVDIESWKRPNGLKIKKVSIPIGVIGVIYESRPNVTSDVSTLCFKSGNCVILRGGSEAYFSNKILANLFRKSLEKNKINKNFVQFIENKNRMLVDLMLSKMSKYIDVIIPRGGKNLVKKVQDLSSVPVIGHLEGMCHTYIDKDANLAMAKNILINAKLRNTSICGATETLLI

SEQ ID NO: 95041 - protein, 291 aa, Unknown
  Bacterial polypetide isolated from the Sargasso Sea
SKDRNLAILNISKIIKQEQEEILKANKIDINNAKRKQLNNAFIDRLLLNDKRIDDIVEGLKQISKMSDPIGVELSKWTQPNGLNISRISVPLGIIGIIYESRPNVTIDAGSLCIKSGNTAILRGGSDSINSSKILAKCMQRGLENANLPGNTVQLVENTDRKAVSAMLTSTGEIDIIIPRGGKSLVKKIQDEARVPVFAHLEGICHIYVDKDADINKAIKIIVNSKMRRTGICGALETLLVDRNISKKTVPIIVKKLIESGCHIRGDIETKEIVNEIELASEKDWYTEYLD

SEQ ID NO: 95042 - protein, 247 aa, Unknown
  Bacterial polypetide isolated from the Sargasso Sea
MTISQQMTLIGKNAKVSSQFLRRLAEKRKNEILAIISELIQNNKNLIIEQNKKDMEFGANKNLSESMLDRLYIDETRLNAIIMGLEEIITLPDPIGTVIEKFSRPNGLKIKKVRTPIGVIGIIFESRPNVFVDAAALCFKSGNASVLRCGSESYNTSLALESCFISGFKKAGIPEFCTQLIPTRDRLAVEEMLKMNEFFDVIVPRGGKGLVGLVQEKAQVPIFAHLEGIVHIYVHSDADPEKAREVI

SEQ ID NO: 95043 - protein, 265 aa, Unknown
  Bacterial polypetide isolated from the Sargasso Sea
MQQLKKIGLNARKAFEELKIVKHSKIKKVLSDYNKILLKNKKKIIAENQKDIKNAKRKQLIDRLILDESRIENIRNSINQIEKFKNPVGRILDSWQRPNKLKIQKVSTPIGVIGVIYESRPNVTADVAALCLKSGNCSILKGGSEAINSNKILANLFRDALQKNNINKNCVQFIDNKDRKIVDNLLSKMSKYIDVIVPRGGKGLVSKVQKFSNIHVIGHLEGLCHIYIDKSINLRMAKKVILNSKMRRTSICGAVETLLIDQKAI

SEQ ID NO: 95044 - protein, 204 aa, Unknown
  Bacterial polypetide isolated from the Sargasso Sea
SREARVPVIKHLDGICHVYVDDRADFDKAEAIVINAKTHRYGVCNAMETLLVNEAIAGPFLQRVAPLYAAKGVELRGCPATCALLPDAVAATEEDWSTEYLAPILSIRVVADMDAAIEHINTYSSQHTDAMVSEDYTRARRFIAEVDSSSVMINASTRFADGFEYGLGAEIGISTDKIHARGPVGLEGLTSEKYVVFGDGHIRQ

SEQ ID NO: 95045 - protein, 415 aa, Unknown
  Bacterial polypetide isolated from the Sargasso Sea
MKNYLNNIGKKSKNAFKNLGNVSLKKRNKVLETYIKSLKNNKNKIIKENLKDIKLCKRKELIDRLILDSKKIESIRSSIYEIIRFKDPLGKVIEKWKRPNNLIIKKVSVPIGVIGIIYESRPNVTSDVSSLCLKSGNVAILRGGSESLNSNKILANIFRNSLTNNYVDKNCIQFIDKKNRKIVDFLLSQMSDYIDVIVPRGGKSLVKKVQKISNVNVIGHLEGNCHVYVDKDADLNMAKKVVLNSKMRRTSICGAAETLLIHDKCLRSHSLPIIRELILKGCEVLVDKKINKYFNNKLKLANESDWRTEYLSPKISIKSVNGVNEAIKHILKYGTMHTDAIITRNTKTANIFLNGINSSIAVHNASTQFADGGEFGFGGEIGISTNKLPPRGPVGINQLTSYKYMVLGKGTIRPI

SEQ ID NO: 95046 - protein, 367 aa, Unknown
  Bacterial polypetide isolated from the Sargasso Sea
MKNYLKKIGFKSKEAFKNLNNINSDKRNKVLETYNKELGKKKIKIIKENERDIKRCKRKDMIDRLIIDKDKIEAIRFSLNEISKFKDPIGKIINKWKRPNGLTIKKVSIPIGVIGVIYESRPDVTPYVSSLCLKSGNVAILKGGSEAIFSNAIFSNLFRDSLKKNNVNQNCLQFINKKNRRIVDYLLSQMSDYIDVIVPRGGKGLVEKVKKFSNVNVIGHLEGNCHVYVDKDSKIEMAKKLVLNSKMRRTSICGAAETLLINEKCIKSHGIPIIEELISYGCEVIVDKKINRIFGNNLKIAKEIDWKTEYLSPKISIKSVKDTKEAINHILQYGTMHTDSIITNNKKTAKFFLNSNNSSIAVHNAST

SEQ ID NO: 95047 - protein, 414 aa, Unknown
  Bacterial polypetide isolated from the Sargasso Sea
SKYLITLGNRAKIAFKNKIDSKLKNKVLTDYYKLIIKNKKRIINENKKDIKFAEKKKLKENLIKRLSLNVEKINSIINSIKTILNFKDPINQELDTWVRPNKLKIKRVTIPIGIIGIIYESRPNVTADVSTLCFKSGNCVILRGGSEAYFSNKILANLFRKSLEKNKIDKNFVQFIDKKNRKLVDFMLSKMDKFIDVIIPRGGKNLVKKVQNLSSVPVIGHLEGMCHTYIDKDANISMAKKILVNAKLRNTSICGATETVLIHKKNSNVINDLLNVLSEKNCIIYADKKIKKIYRGKARDASNSTWKKEFLSSKISVKLVNNINEAIEHINKYGTMHTDAIITKNKISAKYFIKNVKSSIAMHNTSTQFADGGEFGFGGEVGISTNKLPPRGPVGLNQLVSYKYEVYGAGQIRK

SEQ ID NO: 95048 - protein, 294 aa, Unknown
  Bacterial polypetide isolated from the Sargasso Sea
MTQSKEINTYMNRLGSEAKEASLILAQASLEQKNEALSCISEQIESDRDEILSTNKKDLDLAKQKSIGSALIDRLELNDSRINSMISGLQVVSELPDPVGEITDLDPTPSGIEVSKMRVPLGVVGIIYESRPNVTADAAALCLKSGNACLLRGGSEAILSNKIIWNCLQEGLKKASLPKECIQLVETTDREAVKTLLHLDDYLDVVIPRGGKGLVQLISDESKVPVIKHLDGICHVYIDEEADIKKAENIAFNAKTYRYGICGAMETLLVHSSVASLLLPSLEDRFSSEGVEVR

SEQ ID NO: 95049 - protein, 416 aa, Unknown
  Bacterial polypetide isolated from the Sargasso Sea
MSLRLENIVKNSRIAFESNIDSIKKDRVLNKFTNLILRNKKKILKENHKDIKFAKNKKLKENLIKRLEINDRKINDIIKSINQIIKIKDPTNKVLEKWKRPNKLVIKKVTIPIGVIAVIYESRPNVTSDVASLCFKSGNAVILRGGSEAYNTNKIISNLFRKSLKVCGVDQNYVQFIETKNRKIVDNILSKMKGYIDLVIPRGGKSLVKKVDKLSTVPYIGHLEGICHTFIDKKAKLKMAINVLENAKLRNTSICGATETVLFHKNIAKKFINPVLKNLKKKGCNIYGDKSIKKIFKGNMNLASNKNWSTEYLSSNISAKVVKDVNDAVKHINQFGTMHTDAIITADKKTANYFLKNIKSSIGIHNSSTQFADGGEFGFGAEVGISTNNLPPRGPVGLGQLVSYKYEIYGNGQIRK

SEQ ID NO: 95050 - protein, 416 aa, Unknown
  Bacterial polypetide isolated from the Sargasso Sea
MDIYLKKIGVNAHIAFKKKIDTKIKNKVLNKYADLINKNKFKIINENKKDIKFARKKGLKENFIKRLNLDLKKINQIIKSIKIISKLKDPINVTLSKWSRPNGLKIKRVTIPLGVIGVIYESRPNVTADVSSLCFKSGNCVILRGGSEAYFSNKILANLFRTSLKNSKINPNYVQFVDSKNRKLVDVLLSKMEKYIDVIIPRGGKNLVKKVLKLCSVPIIGHLEGICHTYIDKEANLNSSIKIIHNAKLRNTSICGATETILIHEKILKKFINPVLNKLINEGCVIFGDKKIKRTFEGNILNAKEKSWSKEYLSAKVSVKSVKNVIDAVNHINKYGTMHTDAIITKNKKVAKYFLKNVKSSIAMHNTSTQFADGGEFGFGGEVGISTNTMPPRGPVGLNQLISYKYEVLGKGQIRN

SEQ ID NO: 95051 - protein, 424 aa, Unknown
  Bacterial polypetide isolated from the Sargasso Sea
MARASSLRRHAIDLAQCIDQQRQEALLAMAEALEQQRDLILKANQADREAAEQEQLAPALLSRLKLDGPKLDGAIAGIRQLAQLADPLAQRQLHRALDEGLVLERVSVPLGVVGVIFEARPDAVMQIAALAIRSGNGAILKGGREANRSCSAILGALQQGLSRSSVHPDVLALLTSREESLALLKLEGLVDLIIPRGSNALVQFIQDNTRIPVLGHADGICHLYIDRQVDLDQAVTVAVDSKSQYPAACNAIETLLLHQEVAPAFMAAALPAFAKVGVELRGDPVAMALGVSHAASDDDWSTEYLDLVLSIRVVDSMDQALDHIARYSSRHTEVICTTNSQTAERFLSRVDSAGVYQNCSSRFADGFRYGFGAEVGISTQTLPPRGPVGLEGLVTYQYRLRGDGHLAADYASGERQFTHKNLPL

SEQ ID NO: 95052 - protein, 416 aa, Unknown
  Bacterial polypetide isolated from the Sargasso Sea
MNNYMNLIGKRARKASQYKIDTKIKNNVLASYAKMLDENKGLIIKENTKDINYAKKIGLKENLINRLHLNEKKINDIKSSIISIIRFKDPIDHVLEKWKRPNGLNISRVSIPIGVIGVIYESRPNVTSDVASLCFKSGNAVILRGGSEAINSNRVLSKLFKKALKKNKVDENFIQFIDSKNRKMVDIMLSKMKEYIDVIIPRGGKNLVRKVQELSKVPIIGHLEGICHTYVDKDAELKMANKVVSNAKLRNTSICGATETIIMHKNIVKKFSNTILGNLEKNGCKIYGEKTLSKFYKGKIFKATEKDWSKEYLSSAVSVKIVNNLNEAISHINKYGTMHTDSIITKNKKTANQFLKEVKSSIAMHNTSTQFADGGEFGFGGEVGISTNVLPPRGPVGLNQLVSYKYQITSNGKIRN

SEQ ID NO: 95053 - protein, 370 aa, Unknown
  Bacterial polypetide isolated from the Sargasso Sea
LEANKIDLENGKNKSLANPLINRLTLTDKSIDGLITSIEDIIEIPDPIGITLEKWERPNGLQFRKISTPLGVLGVIYESRPNVTVDASCLSIKSGNCIILRGGSDSFYSSKELVNNITNSFMEAGLPEYCVQMINTPEREAVDHLLSMRDYIDVIIPRGGKSLIEKINSASKIPVIKHLDGICHVFVDRDADLKIAEKVVFNSKMRRPEICGAAETLLIDEKIKDEAMKILNPLKEVNCEIRGDSFIQSLDGSFKSAKEEDWSTEYLDKILSVKIVKGIDEAVMHINNYSSGHTESIITNNEVTFEKFYNKIDSAIILKNASTQFADGGEFGFGAEIGISTDKIHVRGPVGTKHLTTFKYVVNGNGQERP

SEQ ID NO: 95054 - protein, 405 aa, Unknown
  Bacterial polypetide isolated from the Sargasso Sea
MKQYLNLLGKKSKKAFLNKINTKTKNKVLNNFASLINKKRKLIILQNKKDIKNATKKKLKENLISRLILNKKKIDQIIISIKNISKFKDPTNISLSEWMRPNGLKIKKVTIPIGIIGVIYESRPNVTSDVSSLCFKSGNCVILRGGSEAYFTNKILVNLFRKSLKKNKVDENYVQFIDTKNRKAVDFMLSKMKNYIDIIIPRGGKNLVKKVQKLSNVPVIGHLEGICHTYVDKDANLNMAVKVLLNAKLRNTAICGATETILLHKKIVKKFAKPIIKSLEINNCQVFADREIRKTYKGKSKLASKKDWSTEYLSSKVSIKTVKNIQEAINHINKYGTMHTDAIITKNKNNAKIFLNYVKSSIAVHNASTQFADGGELGFGGEVGISTNKMPPRGPVGLNQLVSYK

SEQ ID NO: 95055 - protein, 415 aa, Unknown
  Bacterial polypetide isolated from the Sargasso Sea
MSKLLNKIGQNSKIAFRNRINLKKRNKVLKDFCNLIIKNEQKIILENKKDIKFAKSKKLKENLIKRLSLNSEKINSIIKSIHTVIKFKDPLDKELNKWKRPNGLKIKRVTIPIGVIGIIYESRPNVTADVSTLCFKSGNCVILRGGSEAYYSNKILANLFRQSLKKNSLNMNFVQFIENKDRKLVDFMLSKMNNYIDVIIPRGGKNLVKKVQDLSSVPVIGHLEGVCHTYIDKDANIRMAKKIIINAKMRNTSICGATETLLIHKKNSKFVNNILQELRENGCEIYADSKVKKLYLGKTKTANEKLWSREFLSAKISVKLVNDIYEAIHHINKYGTMHTDSIITKNKKSAKIFIKNVKSSIAMHNSSTQFADGGEFGFGGEVGISTNKLPPRGPVGLNQLVSYKYEVYGSGQIRK

SEQ ID NO: 95056 - protein, 232 aa, Unknown
  Bacterial polypetide isolated from the Sargasso Sea
MEENKKDIKFARKKKIKDNLIKRLEMNEGKFNSIIKSIKEIIKIKDPTNKILERWKRPNGLIIQKVTVPIGVIAVIYESRPNVTSDVASLCFKSGNAVILKGGSEAFNTNKIISDLFRMSLKKCGVNKNYVQFIESKDRKVVDKLLSGMKGYIDLIIPRGGKSLVKKVDTLSKIPYIGHLEGLCHTFIDKNAKLDMAIKVLENAKLRNTSICGATETVLFHRAIAKKFINPV

SEQ ID NO: 95057 - protein, 410 aa, Unknown
  Bacterial polypetide isolated from the Sargasso Sea
MIGKKARRAIENKVDSTTKNKVLKKFLVLLRKNEKKILRQNKKDIKFAKKKKLKTNLIDRLVLTSKKLESIKKSVKDIIKLRDPVDKILDNWKRPNGLNIKKVSTPIGVIAVIYESRPNVTSDISSLCFKSGNAVILRGGSEAINTNKILSSLFRKALTMNKVNPDFVQFINDRNRKIVDFLLAKMTKEIDVIIPRGGKSLVKKVQTISKLPIIGHLEGICHTYIDKDANLKMANKVLHNAKLRNTSICGATETVLFHKKIIKKFCNIVLKNLQDSNCKILGDNLIRKFFKGKIYSAKDKDWSTEYLAPTISAKSVNSCEEAIKHINKYGTSHTESIITKNKKTAQKFIKNINSSIVMHNTSTQFADGGEFGFGGEVGISTNNLPPRGPVGLNQLVSYKYEVHGKGHTRK

SEQ ID NO: 95058 - protein, 413 aa, Unknown
  Bacterial polypetide isolated from the Sargasso Sea
MKYLEKIGQNAKKAFKGLKAIKHYQIKSVLENFNKAILNNKKSIIKENLKDIKNVKRKHLVDRLILNEIRIDGIRHSINEIAKFKNPIGRVLEKWERPNKLKIKKVSTPIGVIGVIYESRPNVTADVAALCIKSGNCSILRGGSEAFNSNKILADLFRDTLSKKRIDKNCVQFIEKKDRKIVDMLLSKMSKYIDVIVPRGGRGLVEKVQKYSNVHVIGHLEGLCHIYIDKYSNLEMAKKIVINAKMRRTSICGALETLLINEKVLNSHGKAIIQSLIFSGCEVRVDKKINNMFHNKLKLANENDWRTEYLDSIISIKTVKNTQDAISHILKYGTMHTDSIITSNSRNAKIFLDGVNSSIAMHNVSTQFADGGEFGFGGEIGISTNKLPPRGPVGINQLTSYKYIVSGKGVVRP

SEQ ID NO: 95059 - protein, 316 aa, Unknown
  Bacterial polypetide isolated from the Sargasso Sea
MGKTNGLSFRKISTPLGVLGVIYESRPNVTVDASCLSIKSGNCIILRGGSDSFHSSKELVNNIKYSFKDAGLPEYCVQMIDTPEREAVDYLLKMNDYVDVIIPRGGKGLIEKINSTSKIPVIKHLDGICHVFVDKEADLKIAEKVVFNSKMRRPEICGAAETLLIDENIKDKAINILNPLKAVGCEIRGDEFIQSLDKDFKIANEEDWSLEYLDKIISAKIVSGVDGAIDHINNYSSGHTESIITNNEKTFEKFFNKVDSAIILKNASTQFADGGEFGFGAEIGISTDKIHVRGPVGTKHLTTFKYVVNGNGQERP

SEQ ID NO: 95060 - protein, 370 aa, Unknown
  Bacterial polypetide isolated from the Sargasso Sea
MSKLLIKIGKNSKLAFRNKVNSKTKNKVLEDFCKLIIKNKNRIILENKKDINSAKLKKLKENFIKRLSLNSEKINSIIKSIKTVIKFKDPVDLELKKWRRPNGLKIKRVTIPIGIIGIIYESRPNVTADVSTLCFKSGNCVILRGGSEAYFSNKILANLFRQSLKQNKVDKNFVQFVDQKNRKLVDFMLSKMNKFIDVVIPRGGKSLVKRVQDLSSVPVIGHLEGICHTYIDKEANLKMAKKVLINAKLRNTSICGATETLLIHKKNSKFVNSILEELTKNGCSIYADSKIKKLYKGKAKLANEKIWSKEFLSSKISVKLVDDIHEAIYHINKYGTMHTDAIITKNKKSANLFIKNIKSSIAIHNSSTQL

SEQ ID NO: 95061 - protein, 272 aa, Unknown
  Bacterial polypetide isolated from the Sargasso Sea
LRGGSESINSNIVLMNCIKKALKDHNINPYMVQLIETTDRRAIDKLLAMNSYIDVIIPRGGKGLIEKVMSSSKIPMIKHLDGNCHVYIDQKADLEMAYRISINSKTQRYGVCNAMETLLVHKKFSKKCLNKILKTYTESNVEIRGCKNIVKIYPKAKPAKQYDWSQEYLAPIISIKIVDSIDDAIEHITKYGSLHTDAIISNDKESINKFQKLVNSSSVMINTSTRFADGFEYGLGAEIGISTDKLHARGPVGLDGLTNLKYVVTSKGKIRN

SEQ ID NO: 95062 - protein, 422 aa, Unknown
  Bacterial polypetide isolated from the Sargasso Sea
MLDTKDINIYIDSLGASAKKASSILAQAPEKQKNDALLNIAKIIDLKRNDILDQNVKDLEDAKNKQIGDALVDRLELTEERINSMVSGLEVVSQLPDPVGEITNLDPTPSGINVSKMRVPLGVVGIIYESRPNVTADAAALCLKSGNSCILRGGSEAILSNKIIWECLQKGLEESGLPKECVQLVETIDREAVKNLLHMDKWIDVIIPRGGKGLVKLISEESRVPVIKHLDGICHVYIDEDADIEKAIDIAFNAKTYRYGICGAMETLLIHKQLAVGILPKLLEKYASENVELRGCRATQEVVEVKAALTEDWSTEYLAPVLSVKVVDDLEEAIEHINYYGSNHTDSIVTENDKKVKIFFDQVDSSSVMHNLPTCWADGFEYGLGAEVGISTDKIHARGPVGLEGLTSQKFIVKGNSQLRGS

SEQ ID NO: 95063 - protein, 314 aa, Unknown
  Bacterial polypetide isolated from the Sargasso Sea
MTKNIEKLVRELGKKGKKASLLMSNISIQKRNEALDNISALINSKQDLILEANKKDLNKAIKNNLDDAKIDRLSLNEKRIRDIRSSLQDIINFGDPINKILDSKERPSGIKIKKISTPIGVIGIIYESRPNVTIDAAALCIKSSNSAILRPGSESYQSCLALFRCINEALIQAGLPENLIQIIPTTDRSAVKNLIQMTDYVDVIIPRGGKNLVKLIQDNAKVPVFAHLDGIVHTYIHNDADPNMVEKLIINSKLRRPGICGALECLLINKSYYEMHGEKLIKKLINKGIEIRGDKIVSKINGVKLANYNDWGRG

SEQ ID NO: 95064 - protein, 334 aa, Unknown
  Bacterial polypetide isolated from the Sargasso Sea
MSIENNIIELGKRAKSASLNMKVCSSDQKNLALTKLTKNLDKNRNKILEANKIDLENGEKKSLAKPLINRLTLTEKSIDGLITSIEDIIEIPDPIGITLEKWERPNGLQFRKISTPLGVLGVIYESRPNVTVDASCLSIKSGNCIILRGGSDSFHSSKELVNNITNAFTEAGLPEHCVQMINTPEREAVDHLLSMRDYVDVIIPRGGKGLIEKINSASKIPVIKHLDGICHVYVDKDADLSIAEKVVFNSKMRRPEICGAAETLLIDEKIKDEAMKILKPLKEVNCEIRGDEYIQSLDSDFKTASEEDWSLEYLDKILSVKIVSGVEEAVKHIN

SEQ ID NO: 95065 - protein, 417 aa, Unknown
  Bacterial polypetide isolated from the Sargasso Sea
MSNNNYILELGTKAKKASELLSNISTKIKNEGLLELKKNIIKFSDEILKVNEKDIENANKKLLSSAIIDRLTLNKDRIDSMTKSIDEIIKLEDPVGKVISEWDRPNGLKIQKISVPLGVIGIIYESRPNVTVDASIICIKSGNAVILRGGTDSFFTSNKLKEIINDSFNTVGLPKNVVQMIDSTDRSNVDEMIKLDKFIDVIIPRGGKGLIKAINENSSIPVIKHLDGICHIFVEKDANLEKAKAIILNSKMRRPGICGAVESLLINESLYEQTLEILKPLINAGCEIRGDKLICKLSPEFKLADNNDWSTEYLEKIISVKLVKDVDEAINHINKYSSGHTESIITEDIEKFNNFYKRINSAIILQNASTQFADGGEFGFGGEIGISTDKLHVRGPVGVEHLTSFKYVVQGNGQVRS

SEQ ID NO: 95066 - protein, 419 aa, Unknown
  Bacterial polypetide isolated from the Sargasso Sea
MNSLKEIAKETKAASFELSISSTEDRNKVLDKVSQLLSERITDIVSANQIDYENGKTSGLNDQMLDRLLLTPERIEGMATDVQTIKSLSDPIGEIIEQKTLENGIELKKVRVPLGVLGSIYESRPNVTIDIASLAIKSGNAALLRGGKESVNSNIVLTQILKDALSNAGLPESAVGLITDPDRSIVDEMLGLDEYIDLLVPRGGAGLIKHVYETASMPVVAGGIGVCHAFIDENADPRKVIPIVINSKTQRPTVCNALDTVLVHKNADKLMIQNMISELLDHQVEVRADEQILQHITLDNSLIKAASEDDWGTEFLSLVISIKTVDSLQEALEHIKTHGSGHTEAILSEDKPSQDTFTRTIDAAAVFVNASTRFTDGSQFGLGAEVGISTQKFHARGPLGLKELTSYKWIGIGSGQVRP

SEQ ID NO: 95067 - protein, 283 aa, Unknown
  Bacterial polypetide isolated from the Sargasso Sea
MNNYMNLIGKRARKASQYKIDTKVKNSVLASYAKMLNENKGLIIKENTKDINYAKKIGLKENLINRLHLNEKKINDIRNSIISIIKFKDPINHVLEKWKRPNGLNISRVSIPIGVIGVIYESRPNVTSDVAGLCFKSGNAVILRGGSEAINSNRILSKLFRKALKKNKVDENFIQFIDSKNRKMVDVMLSKMKEYIDVIIPRGGKNLVRKVQELSKIPIIGHLEGICHTYVDKDAELKMANRVVVNAKLRNTSICGATETIILHKNIVKKFSNTILGNLEKNG

SEQ ID NO: 95068 - protein, 416 aa, Unknown
  Bacterial polypetide isolated from the Sargasso Sea
MKNYLNRIGINAVKAGLKIINKEKKNKILKDYVSLLTKYNDKILKENLKDLKIARQKKLDINLINRLELNDKKIEGIRKSVLEIIKLKDPVNRVVSKWSRPNKLKVKKVTIPIGVIGVIYESRPNVTSDVSSLCFKSGNSVILKGGSEAFNSNKIISNLFRKALKKNKVDVNFVQFIEKKNRKVVDFLLSKMESYIDVIIPRGGKNLVKKVKKYSNIPTIGHLEGLCHTFVDENVNHKMASKIILNAKLRNPGICGATETLLVHRKLSSEKISLIINDLLKNNCEIYADDTIRKISPKKIHKATSKDWSTEYLSLKISVKKVNNVEDAVKHINKYGTSHTEAIISNNKKNTKYFFENVKSSILIHNSSTQFADGAELGFGGEVGISTNKLPPRGPVGLNQLVSYKYEVIGNGQIRS

SEQ ID NO: 95069 - protein, 415 aa, Unknown
  Bacterial polypetide isolated from the Sargasso Sea
MNIILEKIGENAKIAFQNKINNKKKNQVLNDYINLILKNQNKILIENEKDIKIAKSKKLKENLIKRLALNNDKISSIVKSIKTIAKFKDPINVDLETWKRPNGLKMKKVSIPIGIIGVIYESRPNVTSDVSTLCFKSGNCVILRGGSEAYFSNKILANLFRKSLEKNKINKNFVQFVENKNRKLVDYMLSKMSKYIDVIIPRGGKNLVKKVQNLSSVPVIGHLEGMCHTYIDKDANLKMAKKILINAKMRNTSICGATETLLIHKNKSKNVNEILNELTKKGCSIYADKKIHKLFNGNSKLANNKTWSKEHLSAKISVKLVDSITDAVNHINKYGTMHTDAIITNNKISAKFFIKNIKSSIAIHNSSTQYADGGEFGFGGEVGISTNKLPPRGPVGLNQLVSYKYEIYGSGQTRK

SEQ ID NO: 95070 - protein, 342 aa, Unknown
  Bacterial polypetide isolated from the Sargasso Sea
IKSIIKSIKIIADFKDPVDVDLETWKRPNGLKIKKVSIPIGIIGIIYESRPNVTSDVSTLCFKSGNCVILRGGSEAYFSNKILVHLFRKSLEKNKINKNFVQFIENKNRKLVEYMLSKMTKYIDVIIPRGGKSLVKKVQELSSVPVIGHLEGICHTYVDKDANISMAKKILVNAKMRNTSICGATETLLIHKNKSKNVNEILNELSEKGCLIYADKKISKLFKGKSKLANNKTWAKEHLSAKISVKLVDDIHYAVSHINKFGTMHTDAIITNNNHSAKYFLKNVKSSIAIHNSSTQYADGGEFGYGGEVGISTNKLPPRGPVGLNQLVSYKYEIYGSGQTRK

SEQ ID NO: 95071 - protein, 417 aa, Unknown
  Bacterial polypetide isolated from the Sargasso Sea
MIKKILKKIGKNSIISQKEIASAAHEKRNAVLKLSSEIISKNTNKIIEANKEDLLLANKAGLKESYIDRLLLDSKRISAISESLISISTLPDPLSGKITKWERPNGLVISKQPTPLGVLGIIYESRPNVTVDAAALCIKSGNSVILRCGSDSYNSCYILSELIRDALQQCNLSKDIIQLIPSKDRDAVDYMLKMSNVIDVIIPRGGKSLVEKVQKNARVPVFSHLEGICHIYVDQFAELEKSCSVVINGKMRRTGICGATETLLVNEHIAKKFLPKICSELNEKGCEIVGDEVTKSIVPYIDLAIEEDWSTEYLAPKISIKVVGDVYDAIEHIQKFGTQHTDAIMTENEEIAKVFTNAVDSAIVLVNASTQFADGGEFGLGAEIGISTGKLHARGPVGAAQLTSFKYVVHGNGQIRP

SEQ ID NO: 95072 - protein, 355 aa, Unknown
  Bacterial polypetide isolated from the Sargasso Sea
MSNNIFEYVKIINQKSKNAFDKISKSSSKDRNLAILNTSLIIKQKQEEILQANKIDIGNAKKKNLTDAFVDRLFINDKRINDIINGLNKIAEMDDPIGIELSRWKQPNGLDISRISVPLGIIGIIYESRPNVTIDSGSLCIKSGNTVILRGGSDSINSSKILTSCLQEGLMSANLPADAVQMIDNTDREAVTAMLRSTGQIDVIIPRGGKSLVNKVQQEAKVPVFAHLEGICHLYIDKDADVEKAIKIVINSKMRRTGICGALETLLIDKEISNKVVPILVEKLMESGCHIKGDYETKAISDEIELASEIDWETEYLEAILSIKIVNGVSGAINHINNYSSNHTESIVTENKITA

SEQ ID NO: 95073 - protein, 296 aa, Unknown
  Bacterial polypetide isolated from the Sargasso Sea
MSKYVETICEKAKTSSYNSSKYDTRRKNNTLSTLIKEIRSSKLEIIKYNDKDIKLASKMGVKDSFLDRLVLNKSRIDNMIDGLDKIIQIPDITFSISKSKRQLSGIYTSQMRVPIGVIFMIYESRPNVTIDAAGLCLKSGNSVILRGGSEALNTNAILINLLENSLIKNKIDKNFIQLVKKPDRKYVSEFLRMNDYIDVIIPRGGKGLIKNIIQNSSIPIIKHLDGNCHVYIDKSANIGYAKEISINSKTQRYGVCNAMETLLIHKSFSKKHTKEIIEDFLLKGVTLKGCSKSRKL

SEQ ID NO: 95074 - protein, 415 aa, Unknown
  Bacterial polypetide isolated from the Sargasso Sea
MSLIKQISADAAHAARTLAQLDESLKNTVLLDMARSLREKTYEIQSANLIDVHRATQDNLSPAMVDRLTLNQHRIETMAQGIETIAALPDPVGRERFIGKRPNGLSISKMRVPLGVVCMIYEARPNVTADAGALCFKSGNAVILRGGKEALHTSQVIASILQAVLTAYGLPKALISVIPDPDRALMLELMQQREFIDVIIPRGGEGLINYVTENSSIPVIQHFKGVCHLYVDKDANQDIALDLLLNGKTQRTGVCNALEGLLVHKDIAPRFLPRVAKALTEHQVKINACPQSAAYFDACTYMAEEDFGQEYLDLEIAIRQVDSFEVATQHIAKFGSHHTEVICTDNELTAARFQRAVDASVVMVNASSRFSDGSELGLGAEIGIATTKLHAYGPMGLEALTTEKYLVSGTGQIRA

SEQ ID NO: 95075 - protein, 417 aa, Unknown
  Bacterial polypetide isolated from the Sargasso Sea
MNFKEIINEIGSKAKKASIKLRTLNADKKKIAYECLEKNIKDKTKDILNANKIDIENAVNNNLAEPLINRLKLNEDSISGILKSIAEIKNQPDPIGKILEEWSQPNGLRFSKISVPLGVLGVIYESRPNVTVDASCLALKSNNALILRGGSDSFQTSNELIKIITMSFKEAQLPSDIAQMIPSTDREAVDCLLAMDNYVNVIIPRGGKSLIKKINDKSRIPVIKHLEGLCHIYVDKEANLDVAKKIIFNSKLRRPEICGAAETLLIDNALEDNALELIKPLYDAGCIIKGDKFIKSLDPNFEMASDTDWSTEYLDKIISVKIVKGVMGAIEHINNYSSNHTESIITENEKTFSDFYNNIDSAIILKNASTQFADGGEFGFGAEIGISTDKLHVRGPVGAKHLTTFKYIVHGNGQSRN

SEQ ID NO: 95076 - protein, 276 aa, Unknown
  Bacterial polypetide isolated from the Sargasso Sea
MDYLKKIGINAKKAFEDLRGVKHKKIKKVLENYNQSLLKNTNKIIRENLKDVKNVKRKHLVDRLILNKKRIEGIRHSINEIAKFQNPVGRILETWRRPNNLTIKKVTIPIGVIGVIYESRPNVTADVAALCLKSGNCSILRGGSEAFNSNRLLANLFRDNLRKNNINPNCVQFIENKNRRIVNQLLSKMSAYIDVIVPRGGKGLVAKVQKFSNVHVIGHLEGLCHIYVDKSANIKMAKNLIVNAKMRRTSICGAVETLLIEEKALSSHGKEIINAL

SEQ ID NO: 95077 - protein, 417 aa, Unknown
  Bacterial polypetide isolated from the Sargasso Sea
MIKKILTNIGKRSKNALAHRVDTKKKNKVLIDYCSLYKKNQKLILSANKKDVNRSISKGVKKNLIERLILNEKKIDNIISSIKSVIKLKDPTNRVLEKWNRPNGLNISKISIPIGIIAIIYESRPNVTSDVVSLCFKSGNPVILRGGSEAFFSNKILSKLFRDSLKKNNINENFVQFIDSTNRKIVDYLLNKMDKYVDVVIPRGGKNLVKKVQKLSNLPVIGHLEGVCHTYVDKNANLNTAKKIIFNAKLRNTAICGATETILIHQKILKKSCNIILKHLEDHGCKIIGDNRIKKNYKGKIIRATNKDWSKEYLSATVSVKCVRDINDAINHINKYGTMHTDSIITMNKKSAKKFLNEVKSSIAMHNTSTQFADGGEFGFGGEVGISTNKLPPRGPVGLNQLVSYKYQISSNGRIRK

SEQ ID NO: 95078 - protein, 238 aa, Unknown
  Bacterial polypetide isolated from the Sargasso Sea
MSIELELEKMGENSVRASKDIRSLNERDKNNILKSIIISLKKNKKNILDANSLDISNSENSLSKAMIDRLMLDDERFDGILSSIENVISLEDPVGNKLYSNKRPNGMLVERVSVPLGVIGIIYESRPNVTVDATVLCLKAGNSVILRGGSECFNTNSEMVKSIQGALKENSVSEHIVQYVSTTDRAAVDYMLAKMGKYIDVVVPRGGKGLVKKVQDTAKIPVIGHLDGICHLYVDETS

SEQ ID NO: 95079 - protein, 363 aa, Unknown
  Bacterial polypetide isolated from the Sargasso Sea
MGENSVRASKDIRSLNERDKNNILKSIIVSLEKNKKNILDANSLDISNSENSLSKAMVDRLMLDDERFDGILSSIENVISLEDPVGNKLYSNKRPNGMLVERVSVPLGVIGIIYESRPNVTVDATVLCLKAGNSVILRGGSECFNTNSEMVKSIQGALKENSVSEHIVQYVSTTDRAAVDYMLAKMGKYIDVVVPRGGKGLVKKVQDTAKIPVIGHLDGICHLYVDETSDTEIASKIIENAKLRRTGICGAAETILIDENCVDTHLPKIITDLINGGCEVRGDNVCMKISDKVLKASEEDWGTEYLDAIISIKTVKGVDEAIEHIATYGSGHTESIISEDKEKVEKFLNTVGSAIVMHNTSTQ

SEQ ID NO: 95080 - protein, 163 aa, Unknown
  Bacterial polypetide isolated from the Sargasso Sea
MKKYLNIVGERANKAFAGKVNTKTKNKVLFKFATLIKNKQSEIINQNIKDIKFAKNKGLKENLINRLKIDSKKINQIIKSIISIAKLKDPIDVTLSKWKRPNGLIIKRVTVPIGVISVIYESRPNVTSDVSSLCFKSGNCVILRGGSEAYFTNKLIANLFRKA

SEQ ID NO: 95081 - protein, 357 aa, Unknown
  Bacterial polypetide isolated from the Sargasso Sea
DLSSALVDRLTLTKERIEGMSNGLKKIIPLKDPVGEVTKSWTTDDGLKINKVRSPFGVIGIIYEARPNVTSDVSALCIKSGNAAVLKGSSYCVDSNSEILNSLQKSLEKNKINKNAIQLIKSKEREDAIKFMKLTEYIDLIVPRGGKGLIDTLVENAKVPFILDGDGNVHLYVHEDANTEYVIDIIINSKVQRPGVCNALETLILNKSIYQKMGKEIINELLKNEVELFVDEVIAKDISDLEIAKDEHYMTEFHDLKLAIKIVDDLDQAIHHIQQYSSGHTEAILTESEEAKNKFSKSLDSSVIFINASTRFTDGEMFGFGAEVGISTQKLHVRGPMGLESLTNERYVVEGSGTIRQ

SEQ ID NO: 95082 - protein, 118 aa, Unknown
  Bacterial polypetide isolated from the Sargasso Sea
DLEIANDEHYSTEFLDLKIAIKIVENEDEAIKHVNKFSSGHTEGVLTESEQIAEKFSSSIDSSVIFINASTRFTDGEMFGFGAEIGISTQKLHVRGPMGLEALTTERYVINGKGTVRG

SEQ ID NO: 95083 - protein, 266 aa, Unknown
  Bacterial polypetide isolated from the Sargasso Sea
MSIENNIIELGKKAKSASLNMKVCSSDQKNLALTKLTKNLDKNRNKILEANKIDLENGEKKSLAKPLINRLTLTEKSIDGLITSIEDIIEIPDPIGITLEEWERPNGLQFRKISTPLGVLGVIYESRPNVTVDASCLSIKSGNCIILRGGSDSFYSSKELVNNITNAFTEAGLPEHCVQMINTPEREAVDHLLSMRDYVDVIIPRGGKGLIEKINSASKIPVIKHLDGICHVYVDKDADLSIAEKVVFNSKMRRPEICGAAKTLLI

SEQ ID NO: 95084 - protein, 115 aa, Unknown
  Bacterial polypetide isolated from the Sargasso Sea
QQMKLIGETEYLDAIISIKTVKGVDEAIDHIAKYGSGHTESIISENKNNVEKFLNSVGSAIVMHNASTQFADGGEFGLGAEIGIATGKLHARGPVGLEGLTTYKYIVRGSGQVRP

SEQ ID NO: 95085 - protein, 436 aa, Unknown
  Bacterial polypetide isolated from the Sargasso Sea
MANIFEVPQPGNDLLGKAEKVRLASIKISQTENQNRIKALNFMADYLEKNSKEILEANNEDYSSAEKKGISRALLSRLKLSKEKLNLGIEGVRKVGDLADPVNQVQIKRELSKGLILERKTVPIGVLGVIFESRPDAVMQISSLAIRSGNGVMLKGGSEANLTNTSIVKALQEGLNESGLDKNAICLLTSRKDSMAMLNLEKYINLIIPRGSNELVKFIQENTRIPVLGHADGICHLFIDIEANLEMALSVALDSKIQYPAACNAIETLLVHKDIAPAFLEKAIPLFNSNDVKLIGDKRSVELGLKYEASLEDWKTEYLDLILSIKIVDDLEEAITHIQKYSSKHTDGIITENSNTANKFMNVVDSAGVFHNCSTRFADGFRYGFGAEVGISTQTLPPRGPVGLEGLVTYKYFLKGDGNIVDDFSSGKAIYTHKDL

SEQ ID NO: 95086 - protein, 214 aa, Unknown
  Bacterial polypetide isolated from the Sargasso Sea
MNKLLNKIGQNSKIAFRNKINSKKKNKVLNDFCSLIIKNEQKIISENKKDIKFAKSKKLKENLIKRLSLNSEKIKSIIKSINTVIKLKNPVDIELSKWKRPNGLKIKRVTIPIGIIGIIYESRPNVTADVSTLCFKSGNCVILRGGSEAYFSNKILANLFRQSLKKNNINMNYVQFVESKDRKLVDYMLSKMNKYIDVIIPRGGKNLVKKVQDL

SEQ ID NO: 95087 - protein, 78 aa, Unknown
  Bacterial polypetide isolated from the Sargasso Sea
HSEAIISADNVATEEFAHRVDAAAVLVNTSTRFVDGEEFGFGAEIGISTQKLHARGPMGLQQLTTTKYIVNGQGQTRG

SEQ ID NO: 95088 - protein, 296 aa, Unknown
  Bacterial polypetide isolated from the Sargasso Sea
FLKQANVAADAGGLCLKSGNAVILRSGKDGLRSAEAIVASLQAALISADLPKECIQIVPSESRDAATLMLEGLNGSIDVIVPRGGKSLVAEVEKSAKVPVFGHLEGICHIYVDEYADEEKALAVCLNAKMRRTGICGAVETILINDKIAASFVPKIIASLSELNCEVRCCEKTIDLDRRSVPAHEEDWSTEYLAPIVSLKSVLNIDEAINHIERYGTGHTESIISENEDNQDKFTHSIDSAIVMINASTQFADGGEFGLGGEIGIATGKFHARGPVGVDQLTSFKYIVSGNGQTRD

SEQ ID NO: 95089 - protein, 196 aa, Unknown
  Bacterial polypetide isolated from the Sargasso Sea
MKKYLEKIGSNAKIAFEKKISNKKKNKVLNYYTQLIIKNQKKILSENAKDVKIAKSKKLKENLIKRLTLDQNKIKSIIKSIKTIANFKDPVDLNLDTWKRPNGLKIRKVSIPIGIIGVIYESRPNVTSDVSTLCFKSGNCVILRGGSEAYFSNKILAELFRKSLEKNKIDKNFVQFIENKNRKLVDYMLSKMSKFY

SEQ ID NO: 95090 - protein, 328 aa, Unknown
  Bacterial polypetide isolated from the Sargasso Sea
MKYLEKIGKNARKAYESLQEVKHKKIKIVLDNYNKSLFENKKRIIKENKKDVKNVKRKHLVDRLILNEKRIEGIRHSINEIAKFKNPVGKILESWKRPNQLKIKKVSTPIGVIGVIYESRPNVTADVAALSLKSGNCSILRGGSEAFNSNKLLANLFREVLQKNNINKNCIQFIDKKDRKIVDNLLSKMSKYIDVIVPRGGKGLVAKVQKFSNIHVIGHLEGLCHIFIDKSANLRMAKKIVINAKMRRTSICGAVETLLIEEKALKSHAIEIISSLKKSGCEVRVDGKINKLLKNKLRLAKEKDWKTEYLDAIISIKTVKNVQEGIKH

SEQ ID NO: 95091 - protein, 311 aa, Unknown
  Bacterial polypetide isolated from the Sargasso Sea
MCISNRFLLGVISIIYESRPNVTSDAAVLCLKSGNATVLRGGSECFHTNTVIIEIIKDSLTKCGFNPNCINMIPITDREALKYILTLDEYIDLVIPRGGENLIRFIANFSRIPVIKHYKGVCHVYIDEFADSNKAFEISINSKVQRPGVCNSMETLLIHRKKVSSVLKTIIDALKESKVVIHSTDEVKDMFRNEKIVKIDEQDWYTEYLDLEMNIKIVDNIDQAISHIEKYGSLHTESIVTENIKNAEYFINSVNSSAIMHNASTRFNDGNELGLGAEIGISTTKLHAFGPMGLNELTTQKFVILGEGQIK

SEQ ID NO: 95092 - protein, 421 aa, Unknown
  Bacterial polypetide isolated from the Sargasso Sea
MNEDLKSQLVKIGKDAQKASHILSMANEDTKNSALTNMADLIDSNSNEIIEANNVDMENAKQKGITDSFLDRLYLDEDRILSISNGLRSIVELSDPVGEEIGRWKRPNGLDISRVRTPLGVIGVIYESRPNVTADAGALCLKAGNAVILRGGSESFHSSNSIHKFLVQGLVNADLPKHSIQIIPTTDREAVGHLLEGLNGNIDVIVPRGGKSLVERVQNEAKIPVFGHLEGICHIYVDKDADISKAKDILINAKMRRPGICGAAETLLIDKNSDQSFLPLLLNALKDSGCEVRGCQETMESNQNIILANDEDWSTEYLEAIISVKVVNGVEGAISHISEYSTNHTDSIITENTNIAEKFMREVDSAIVMHNASTQFADGGEFGMGAEIGIATGRFHARGPVGVEQLTSFKYVVRGSGQTRP

SEQ ID NO: 95093 - protein, 428 aa, Unknown
  Bacterial polypetide isolated from the Sargasso Sea
MPDCSTASNHKIHELCRITAEKSREAAIQLATISGEQRAACLRVAADTIRKDEADILKANLQDLAAAPGFGLTEAATDRLRLDSERIEAIAAGIEAVAALPDPIGELIETSTQPNGLQVRKVRVPLGVIFFIYESRPNVTADAAAVAMASGNAVILRGGKEAAYSSRRIVESIRQAISVSGLPTDCVQLVNIADREAVGAFLQFDNLIDLAIPRGGEGLIRRVCAEARMPVLKHFSGNCHVYVDKSADLDMAERILIDAKCQRMGVCNAAESLLVHGSVAQEFLPRVAEQLRSRNVDMLGDKATREILPEVGLATESDFATEFLGPKLSIGVVRSIDEAIKHINQFGSRHTDAIVTSEESVAERFAAQVDTAVILVNASTRFNDGGELGLGAEIGISTDKLHARGPCGPRELTTYKYVVMGNGQTKGL

SEQ ID NO: 95094 - protein, 320 aa, Unknown
  Bacterial polypetide isolated from the Sargasso Sea
MSLEKMGQAAREAAYQLATVSTAQKNRALAAIADELEARSHQILAANEKDIAAGRAAGLSDAMLDRLLLNPARLAGIVADVRKVISLDDPVGAEIDSRVLENGLRLSRRRVPIGVIGVIYEARPNVTIDIASLCLKTGNASILRGGRETFHSNLELVRVIQSALAASGLPRDAVQYIDNPDRALVGELLRLDRYVDMIIPRGGAGLHKMCKENSSIPVIIGGFGISHIFVDESADLARSLAVIDNAKVQRPSACNALDSLLVHEKVAATLLPQLVGLMNERKVALVATPEAMPLLAGADSLRAAGPEDFDTEWLSLTLGV

SEQ ID NO: 95095 - protein, 256 aa, Unknown
  Bacterial polypetide isolated from the Sargasso Sea
MRLTLLTTRQESLALLRLDGLVDLIIPRGSNELVRFIQDNTRIPVLGHADGICHLYVDAAAEVEQAVRIAIDSKTQYPAACNAIETLLVHESIAPAFLASAVPAFQSAGVSLRGDERSRELGVSDAASDADWRTEYLDLILSVRVVSSMDAALEHIRRHGSRHTEAIATADERAAERFLAAVDSAGVYHNCSTRFADGFRYGFGAEVGISTQTLPPRGPVGLDGLVTYRYRLRGDGHIAADFADGTRRFTHTDLPL

SEQ ID NO: 95096 - protein, 436 aa, Unknown
  Bacterial polypetide isolated from the Sargasso Sea
MQQNVKQARDASLAMANIDTSQKNKILHDLAETLRENSDEILIENAKDMTIANKMLERGELTYSACKRVMLNRVKIDQMAQNCESVAALPDPAGKTVKAIRIDYGLDLHCVSCPIGVIMVIFESRPDVVIQISALALKSGNAVILKGGKEAQNSNRVLAGLIRKTLAKSDTVLGNAIILVGTRDEVTELIKIGSGIDLIIPRGSNELVRHIQENARAPVLGHGDGICHVYLHEDADKEKSLDVALDAKLDYPAVCNALETLLVHHKYPVSWLVNILLKMQDSGVELRVCSETKKRLESYQDLNLSAAADIDWETEYVDLILSIKTVKSAEEAVEHISQFGSKHTEAIVTENSDLSEWFMNTVDAAGVFWNASTRFADGFRYGLGAEVVVSTGKTHARGPVGLEGLVIYKYKLYGNGHVAGSYGKGKKDFIHQDIEL

SEQ ID NO: 95097 - protein, 425 aa, Unknown
  Bacterial polypetide isolated from the Sargasso Sea
MSQINQAQYLQQLGHNAKQASYALANLTASQKADLLDAIADALTENTQAILAANAKDVVAAKAEGLNDAMIDRLLLNESRLAGIIGDISDVVRLADPVGEEFGSRVLENGLRLTRRRVPLGVIGVIYEARPNVTVDIAVLALKTGNAVILRGGKETLESNKLISEVIRGAIASQGLPVDAVQLIDSPDRALVTGLLKLDQYVDMIVPRGGQALQRLCAEQATIPVILGGIGICHLYVDKHADLERALEVIANAKVQRPTVCNALDTLLVDNAVAERFVPQIAEYLHRLGVRFSVCEQSYALLDGLGFDISPATEQSFATEWLSLTLGIKVVSDIDAAIAHIRTYSSGHSEAILTDDIHAATYFMNEVNSAAVYVNASTRFTDGGQFGLGAEVAVSTQKLHARGPMGLEALTTYKWLAWGDYTSRS

SEQ ID NO: 95098 - protein, 145 aa, Unknown
  Bacterial polypetide isolated from the Sargasso Sea
MGEEIVNSLLQKDVELFVDPIIKKDFPALTIATDEHFETEFHDLKLAIKVVNNIEEAISHINEFSSGHTEAILTESTESADLFTSSIDSSVLFVNSSTRFTDGEMFGFGAEIGISTQKLHVRGPMGLEALTSEKYVVKGNGQIRK

SEQ ID NO: 95099 - protein, 447 aa, Unknown
  Bacterial polypetide isolated from the Sargasso Sea
MKINKSKIPAEIKKQLENARKSSFVLSNLNVTKKNQILYDLSFKLRASLSEILEENFKDIINAKKLYELGELSLSLFERVKLTESKIEQMAVYCESVAKLTNPNGKIIDATRLDIGLELYKVTCPIGVILMIFESRPDAVIQISSLGLKSGNAIILKGGKEASFSNRILVKLIRETINKISDSSVNSISLVETRVEVNELIKLSQDLDLIIPRGSNQMVQKIQSKSMVPVLGHADGICHVFLDNEGDENKSMSVVLDSKLNYPAVCNSLETLLVHKDFPDSWLASILLKMQESGVELRVCSETKNRLKSFKSLKLKKAVKQDWKTEYIDLIISVKSVDSATEAVMHINNFGSKHTDSIVTENKELAEWFLNAVDSAGVFWNASTRFADGFRYGLGAEVGVSNGKIHARGPVGLDGLVTYKYKLYGNGQGVGEYSKGNREFIHEKINL

SEQ ID NO: 95100 - protein, 291 aa, Unknown
  Bacterial polypetide isolated from the Sargasso Sea
MTRLGEGAYQASRDLSSLSTEQKNKALELMAESLSDNKEDLLEANKEDINKANESGISSALLDRLELNEDRIESMISGLISISKLPDPIGEITNLKPTPSGINVSQMRVPLGVVGIIYESRPNVTADAAGLCLKSGNACILRGGSESINSNLAIYKNLLKGLETSEAPNNSIQLVETVDREAVKKLLSMKEWIDVVIPRGGKGLVQLVSDEAKVPVIKHLDGICHVYIDGDCDEDKAVSIAVNAKTYRFGICGAMETLLVDRKVAKSILPKIYDEFTKEEVEMRGCSLTND

SEQ ID NO: 95101 - protein, 321 aa, Unknown
  Bacterial polypetide isolated from the Sargasso Sea
ILERKTVPIGVLGVIFESRPDAVMQISSLAIRSGNGVMLKGGSEAKLTNLAIVSALKEGLQDSNLDENAICLLTSRKDSMAMLNLEKYINLIIPRGSNELVKFIQENTEIPVLGHADGICHLYIDNEVNLDIALKVALDSKIQYPAACNAVETLLIHKDTASEFLNKAIPMFNSNDVKLIGDKKSFQLGVAFEANYEDWQTEYLDLILSIKIVNDLEEAIAHIQKFSSKHTDGIITENVINANKFMSEIDSSGVFHNCSTRFADGFRYGFGAEVGISTQTLPPRGPVGLEGLVTYKYFLRGAGHIVDDFSSGKLIYSHKDV

SEQ ID NO: 95102 - protein, 292 aa, Unknown
  Bacterial polypetide isolated from the Sargasso Sea
MKNYLNNIGIKSKEAFKNLGHVSLKKRNNVLETYIKYLKINKNKIIKENSKDIKLCKREELMDRLIIDNKKIDSMRSSINEIIKFKDPLGRVIEKWKRPNNLLIKKVTVSIGVIGIIYESRPNVTSDVSSLCLKSGNVAILRGGSESLNSNRILANLFRNSLTNNNVDKNCVQFIDKKNRKIVDFLLSKMSDYIDVIVPRGGKGLVKKVNKLSNVNVIGHLEGNCHVYVDKDADLSMAKKVVLNSKMRRTSICGAAETLLIDNKCLKSHALPIIRELILTGCDVVVDKKINK

SEQ ID NO: 95103 - protein, 381 aa, Unknown
  Bacterial polypetide isolated from the Sargasso Sea
NLRKAENEIIYANNTDLDSLNPKDYTSAFYDRLKLNSPRINQMISNILEVIALEDPVGKRRYLYDRPNGIKVFKQSIPLGVMSIIYESRPNVTSDAASLCLKSGNSVILRGGSESFNTNKIIVEIIKDSLSQNNINSDAINLVPYTQRDVMKYILRKDELIDLIIPRGGEGLIRFVSENSSIPVIKHYKGVCHVYIDLKANLDIAHSVAINSKIQRPGVCNAMETLIINQNLPKEFIENLLKDLKENKVKLRGEKNLSSFIDSDSFVELEEIDFQNEYLDLELNIKLVDSVDSAITHIERYGSLHTESIITEDENIKEKFINSLNSSAIFHNISTRFNDGNELGLGAEIGISTTKLHAFGPMGLNELTSEKFVVTGSGQIK

SEQ ID NO: 95104 - protein, 397 aa, Unknown
  Bacterial polypetide isolated from the Sargasso Sea
KISNKKKNKVLNYYIQLIKKNKNKILVENTRDIKIAKSKKLKENLIKRLALNNDKISSIIKSIETIAKFKDPVDVDIETWKRPNGLKLKKVSIPIGIIGVIYESRPNVTSDVSTLCFKSGNCVILRGGSEAFFSNKILANLFRKSLEKYRINKNFVQFIENKNRKLVDYMLSKMSKYIDVIIPRGGKSLVKKVQDLSSVPVIGHLEGICHTYIDKDANLSMAKKILINAKLRNTSICGATETLLIHKNKSKNVDEILNELTKRGCSICADRKISKLFKGNSRLANNKTWSKEHLSAKISVKLVNNINDAVNHINKYGTMHTDAIITNNKISAKFFIKNVKSSIAIHNSSTQYADGGEFGFGGEVGISTNKLPPRGPVGLNQLVSYKYEIYGSGQTRK

SEQ ID NO: 95105 - protein, 263 aa, Unknown
  Bacterial polypetide isolated from the Sargasso Sea
GLNASGFDKNAICLLTSRKDSMAMLNLEKYINLIIPRGSNELVKFIQENTRIPVLGHADGICHLYIDIEANLEMALSVALDSKIQYPAACNAIETLLIHKDIAPAFLEKAIPLFNSNDVKLIGDKRSVDLGLKYEASLEDWQTEYLDLILSIKIVDDLKEAIIHIQKYSSKHTDGIITENLITANKFMNEVDSAGVFHNCSTRFADGFRYGFGAEVGISTQTLPPRGPVGLEGLVTYKYFLKGDGNIVNDFSSGKAIYTHKDL

SEQ ID NO: 95106 - protein, 419 aa, Unknown
  Bacterial polypetide isolated from the Sargasso Sea
MFQDLEKNVSKVKQSSLDLSLVMPNQRKNCLSLLSEKLNSNKGEIIEINKKEITEALNNGLDNHVLDRMRLSNESIDRMIDSLITVRDMPDTVSEIIETNKRNNGLIVNKVRVPLGVLGVIFESRPNVVIEIASLAIKSGNGLVMRGGKDCIKTNLYLFNLVKQSLSESGIPDDSMYFLDFIDRKAVDVILSMDKYIDLLIPRGSSELVNLVNQNAKMPSITGGVGVCHTYVDRDVDIEQAISIIDNAKTQNPSVCNALDTVIIHKEILNSLLEPLVKNLSDRNVEIKVDEDAYKIIGSNKSVSLAEKEDFGQEFLDLVVSIKTVENLDMAISHITKYGSKHSEAIITKNQDSAKYFIDKVDASAVFHNTSTRFNDGFELGLGAEVAVSTDKLHARGPMGINDLMTYKWVVLGEGQIRT

SEQ ID NO: 95107 - protein, 387 aa, Unknown
  Bacterial polypetide isolated from the Sargasso Sea
AILNTTKIIKKEQKKILEANKIDIENAKRKQLSNAFIDRLLLSDNRIDNIVEGLKQISEMNDPIGVELSRWTQPNGLNISRISVPLGIIGIIYESRPNVTIDAGSLCIKSGNTAILRGGSDSINSSKVLAKCMQKGLESANLPVNTVQLVENTNREAVSAMLTSTGEIDIIIPRGGKSLVKKIQDEARVPVFAHLEGICHIYVDKDADISKAIKIIVNSKMRRTGICGALETLLVDRNISERAVPIIVKNLIKSGCHIRGDIETKQIVDEIELASEKDWHTEYLDAILSIKLVDGVSGAIDHISKYSSNHTESIITENTIVAETFLTSVDSAIVMHNTSTQFADGGEFGMGAEIGISTGRIHARGPVGAAQLTSFKYIVRGNDQIRE

SEQ ID NO: 95108 - protein, 414 aa, Unknown
  Bacterial polypetide isolated from the Sargasso Sea
MKNYLNNIGIKSKNAFKNLGYVDLKKRNNVLETYLKSLKSNKNKIIKENLKDIKLCKREELIDRLIIDNKKIENMRSSIYEIVKFKDPLGKVLEKWKRPNNLLIKKVTIPIGVIGIIYESRPDVTSDVSSLCLKSGNVAILRGGSESLNSNRILANLFRNSLSNNSVDKNCIQFIDKKNRKIVDFLLSKMSDYIDVIVPRGGKGLVKKVKQLSNVNVIGHLEGNCHVYVDKDADLNMAKKVVLNSKMRRTSICGAAETLLIHDKCLRSHSLPIIRELILKGCDVLVDKKINKYFKNKLKLANENDWRTEYLLPKISIKSVNGVNDAIAHILKYGTMHTDAIITRNIKTAKIFLNGINSSIAVHNASTQFADGGEFGFGGEIGISTNKLPPRGPVGINQLTSYKYMVTGKGTIRP

SEQ ID NO: 95109 - protein, 415 aa, Unknown
  Bacterial polypetide isolated from the Sargasso Sea
MSLIKQISADAAHAARTLAQLDESLKNTVLLDMARSLREKTYEIQSANLIDVHRATQDNLSPAMVDRLTLNQHRIEAMAQGIETIAALPDPVGRERFIGKRPNGLSISKMRVPLGVVCMIYEARPNVTADAGALCFKSGNAVILRGGKEALHTSQVIASILQAVLTAYGLPKALISVIPDPDRALMLELMQQREFIDVIIPRGGEGLINYVTENSSIPVIQHFKGVCHLYVDKDANQDIALDLLLNGKTQRTGVCNALEGLLVHKDIAPRFLPRVAEALAEHQVKINACPQAATYFDACTYMAEEDFGQEYLDLEIAIRQVDSFEVATQHIAKFGSHHTEVICTDNELTAARFQRAVDASVVMVNASSRFSDGSELGLGAEIGIATTKLHAYGPMGLEALTTEKYLVSGTGQIRA

SEQ ID NO: 95110 - protein, 425 aa, Unknown
  Bacterial polypetide isolated from the Sargasso Sea
MSQTNQAQYLQQLGSQAKQASYALANLSAAQKADLLEAIAEALTQNIPAILTANAKDVAAAKAEGLNDAMIDRLLLNESRLAGIIGDIGDVVRLADPVGEEFGSRVLDNGLRLTRRRVPLGVIGVIYEARPNVTVDIAVLALKTGNAVILRGGKETLESNKLISEVIRGAIASQGLPVDAVQLIDSPDRALVTGLLKLDQYVDMIVPRGGQALQRLCAEQATIPVILGGIGICHLYVDKHADLERALEVIANAKVQRPTVCNALDTLLVDNAVAERFVPQIAEYLHRLGVRFSVCEQSYALLDGLGFDISPATEQSFATEWLSLTLGIKVVSDIDTAITHIRTYSSGHSEAILTDDIHAATHFMNEVNSAAVYVNASTRFTDGGQFGLGAEVAVSTQKLHARGPMGLEALTTYKWLAWGDYTSRA

SEQ ID NO: 95111 - protein, 421 aa, Unknown
  Bacterial polypetide isolated from the Sargasso Sea
MNEDIRLQLTKIGNDAKKASNALSMASEDKKNQALMNMAELIENNQDEILKANNTDMKKAEEKGISDSFLDRLYLDKDRISSISNGLRSIVELNDPVGEEIGRWQRPNGLDISRVRTPLGVIGVIYESRPNVTADAGALCLKAGNAVILRGGSESFHSSNAIHKFLVQGLEASNLPKHSIQIIPTTDREAVGLLLGGLNGNIDVIVPRGGKSLVERVQNEAKIPVFGHLEGICHLYVDKSADLIKAKDIIINAKMRRPGICGAAETLLIDKNSDKSFLPLLVNSLKDSGCEVRGCEETLKLTDNIISANDEDWSTEYLEAIISVKIVDGVEEAISHIGEYSTNHTDSIITEDNDIAEKFMREVDSAIVMHNTSTQFADGGEFGMGAEIGIATGRFHARGPVGVEQLTSFKYIVRGSGQIRP

SEQ ID NO: 95112 - protein, 174 aa, Unknown
  Bacterial polypetide isolated from the Sargasso Sea
MSKYLNNIGIKSKIAFKNLAGIDLKKRNRVLESYSKSLSKNKKKIIKENLKDIKTCKRKDLIDRLIIDEKKIENIRSSINQIVKFQDPLGKIIQKWKRPNNLIIKKVTVPIGVIGIIYESRPNVTCDVSSLCLKSGNVAILRGGSESFNSNKILANLFRNSLEKNRIDKNLYNS

SEQ ID NO: 95113 - protein, 271 aa, Unknown
  Bacterial polypetide isolated from the Sargasso Sea
MSDIHSLVVDIGKKAREASRRLAVASSQQKKDALIFSADAIRKNTAIIIEQNKKDLDFGASKSLSNALMDRLLLNEERIGSIIDGLEAIADQDDPVGEIMEAWRRPNGLEIKRVRTPLGVIGVIYESRPNVTADAGALCLKAGNAVILRGGSESYNSSIAIHNFLQEGLSKAHLPKNSIQLIPTKDRAAVASLLKLTEYIDVIVPRGGKSLVGLVQSEARVPVFAHLEGIVHIYLDKTADPRKAFDVILNSKTRRTGICGAAECLLINKDI

SEQ ID NO: 95114 - protein, 323 aa, Unknown
  Bacterial polypetide isolated from the Sargasso Sea
MTNQKFKKELNSLGAKAKEAKEFLLNSSVDTRNDALKFACEEIHVNRSDLFKENEKDLVEAKKLDLQNSFIDRLELNDKRVDSMIDGLNKVINLNDPIGELEGMNPSPSGFKVSKMRVPLGTIGIIYESRPNVTADASALCIKSGNASILRGGSEAVHSNNHIVTQVRKGLTKANLPEDSVQLIQNQDRDLVKEFIKFDDCIDLIIPRGGSSLVRLIAAESKVPILKHFEGLCHVFVDSEADLELAQKVASNAKSYRYGICGAMETLLVSEDIAQKFLPKIVNEFNEQGVEVRACSQTLNIVSANKATEKDWSTEYLEPIIFN

SEQ ID NO: 95115 - protein, 420 aa, Unknown
  Bacterial polypetide isolated from the Sargasso Sea
MTSFKNKINQVGLQAKEASKILAKVSTKQKNEAILAMAGHILKDKELILEENKKDLKKAKTKGLSESFIDRLELGDERIISIATTLSEIESFRDPVGKVLDSWTRPNGLSISRVSTPLGTVGVIYESRPNVTADAGALCLKSGNASILRGGSDGINSCIAIHKSMIKGLSDAGITENAIQIIEDIDRDAVNMMLQGINKSIDVIVPRGGKNLVAQIEKEAKVPVFAHLEGICHIYVDKDTNLEKAINVCVNAKMRRPGICGAVETILVDSEIAIAFLPDLIKALSTRDCEIRGCKETQQYSNNVVAANDEDWKTEYLSPIVSIKIVKDYEEAIEHIDTFSSGHTESILTENLNTAAQFQKDLDSAIVMHNVSTQFADGGEFGLGGEIGIATGKFHARGPVGVDQLTSFKYLVNGNGHIRP

SEQ ID NO: 95116 - protein, 150 aa, Unknown
  Bacterial polypetide isolated from the Sargasso Sea
MDKNLVNIGKKANRALTVKIDQKLKNKILYKFGKLINENKSKIIKENKKDIKFAIKKGLKENLIDRLLLNNSKINQIIKSINNIAKLKDPTNITLSKWKRPNGLVIKRVTIPIGVIGVIYESRPNVTSDVSSLCFKSGNSVILRGGSEAY

SEQ ID NO: 95117 - protein, 174 aa, Unknown
  Bacterial polypetide isolated from the Sargasso Sea
MSKNLEKIGTNAKIAFQNKISNKKKNKVLNYYIQLIKKNQNKILVENTKDIKIAKSKKLKENLIKRLALNNDKISSIIKSIETIAKFKDPVDVDIETWKRPNGLKLKKVSIPIGIIGVIYESRPNVTSDVSTLCFKSGNCVILRGGSEAFFSNKILANLFRKSLEKYRINKNFV

SEQ ID NO: 95118 - protein, 299 aa, Unknown
  Bacterial polypetide isolated from the Sargasso Sea
MQKNLNKIGRNARKAFSKKLNNKLKNKVLKKFAKLIEINKKNILKENSKDINFARKKGLKENLIKRLELNNNKIDQIIKSVVAISKFKDPVNIIKEKWKRPNGLRIKKVTIPIGVVGVIYESRPNVTSDVSSLCFKSGNCVILRGGSEAYFSNKIISNLFRKSLQEYKIDKNYVQFIKLKDRKVVDLLLSKMEKYLDVIIPRGGKSLVKKVQDLSIVPTIGHLEGICHTYVDKHADINLAKKIIINAKLRNTSICGATETVLIHEKCLKKFTNPILQELEKNNCIIYADKKIRKIYKGK

SEQ ID NO: 95119 - protein, 361 aa, Unknown
  Bacterial polypetide isolated from the Sargasso Sea
MSINFNEICISAKTASREFSLLDAKQRNQILLRIASRVLESKNEILDANKIDYDNAKESGADDHILDRLYLNEERIDAIVDGVYQVVELEDPLDIEYDTTVRPNGLNVSKRSVPLGVIGAIYESRPNVTLDIVALCVKSGNVSILKGGSDTLSTNNAIVSSIHKAFGDLKLNPDIVQFINSSDRKYVDSMLNAIDYIDLIIPRGGAQLVNMVREKSRVPAITGGIGVCHIYVDETADKNKAIEIIYNSKVQRPSVCNALDTVIFNENINKDIIISAVKKLLESKVEVRVDTQCFDILSSLKEDYPNSICLASDDDWGQEFLSLILSIRITDSIENAINYINQYGGHSEAIISENPDNTTQF

SEQ ID NO: 95120 - protein, 286 aa, Unknown
  Bacterial polypetide isolated from the Sargasso Sea
MAAEELKTIDTDTKNKVLNDMASELINDADEIIEANKIDLENAKQLELTAALTDRLTLNKERIQGMSDGLKKIIPLEDPVGKITESWTSDDGLNINKVRSPFGVIGIIYEARPNVTSDVSGLCLKSGNASILRGSSYCLDSNLKILNTLQKALEKNNLSKNCIQLIESKDREDTIEFMNMTEYIDLIVPRGGRGLIDTLVNNSKVPFILDGDGNVHLYIHEDAKEEYMVPIVINSKVQRPGVCNALETLILHKHVYKKNGEEIINALKETRLKFLLMKKQAMIIQI

SEQ ID NO: 95121 - protein, 206 aa, Unknown
  Bacterial polypetide isolated from the Sargasso Sea
MHDDAEQRKSLDVSIDSKLDYPAVCNALETLLVHQNYPDSWLANILLKMQDSGVELRVCKETKKRLDVYSDLNCSVAEDIDWETEYVDLILSIKTVTSAEEAVEHISKFGSKHTEAIVTEDSGLAEWFMKTVDAAGVFWNASTRFADGFRYGLGAEVGVSTGKTHARGPVGLEGLVIYKYKLYGNGHVAGNYGEGKKDFMHTEIKL

SEQ ID NO: 95122 - protein, 303 aa, Unknown
  Bacterial polypetide isolated from the Sargasso Sea
GVICVIYESRPNVTADVAALCLKSGNSVILRGGSEAYYTNRFLANLFRKALRKNKIDENCVQFIEKKDRKIVDFILSKMSNYIDLIVPRGGKNLVRKVQKLSKVNVIGHLEGLCHIYVDKDSNLEMAKKIIINAKMRRTSICGALETLLINDKILSSHGTKIIHALIKTGCEVRVDDKINKLFNFRLKKAIEKDWQTEYLDSIISIKSVKGVDEAVSHILKYGTMHTDSIISNNNKTAKSFLKGVNSSIAMHNVSTQFADGGEFGFGGEIGISTNKMPPRGPVGINQLTSYKYIVKGNGSIRS

SEQ ID NO: 95123 - protein, 335 aa, Unknown
  Bacterial polypetide isolated from the Sargasso Sea
MVYKEMNKELSSLLDEMGLKAKIASSILNTTSSDQKNKFFDLAIESIQKDADTILEANQADIQQAKENNKDEAFIDRLALDNERLHGICDTLEAIKSFEDPVGKVLATWDRPNGLNISRVATPLGVIGLIFESRPNVAADAGGLCLKSGNAVILRSGKDGLRSAEAIVASLQAALVSADLPKECIQIVPSESRDAATLMLEGLNGSIDVIVPRGGKSLVAEVERSAKVPVFGHLEGICHIYIDEHADEEKALAVCLNAKMRRTGICGAVETILVNNKIAESFVPKIIASLSELNCEIRCCEKTIDFDGRSVPATEEDWSTEYLAPIGKFKVCLKC

SEQ ID NO: 95124 - protein, 305 aa, Unknown
  Bacterial polypetide isolated from the Sargasso Sea
MSMPLGVICMIYESRPNVTIDAAVLCLKSGNSVILRGGSESINTNMVLSKCLKNALVENKLPENCASLIEDANRDLVNELLTYDEFIDVVIPRGGKGLIDLVSKISKIPVLKHLDGICHVYIDEYADLDMAHDIAMNSKTQRYGVCNAMETLLVSQKIADNFIPKVISSLFEKNVEVRGCSKTVKYNQKILKANEEDWKTEYLSPILSIKIVQSIDEAINHIEAYGSGHTDSIVSSNKDQSEKFLRNVNSSSVMVNASTRFADGFEYGLGAEIGISTNKLHARGPVGLDGLTNQKYIVLGEGNTR

SEQ ID NO: 95125 - protein, 389 aa, Unknown
  Bacterial polypetide isolated from the Sargasso Sea
MSKNLEKIGTNAKIAFQNKISNKKKNKVLNYYIQLIKKNQNKILVENTKDIKIAKSKKLKENLIKRLALNNDKISSIIKSIETIAKFKDPVDVDIETWKRPNGLKIKKVSIPIGIIGVIYESRPNVTSDVSTLCFKSGNCVILRGGSEAYFSNKILANLFRKSLEKYKINKNFVQFIENKNRKLVDYMLSKMSKYIDVIIPRGGKSLVKKVQDLSSVPVIGHLEGMCHTYIDKDANLSMAKKILINAKLRNTSICGATETLLIHKNKSKNVNEILNELTKRGCSIYADRKISKLFNGNSKLANNKTWSKEHLSAKISVKLVNNINDAVNHINKYGTMHTDAIITNNKISAKFFIKNIKSSIAIHNSSTQYADGGEFGFGGEVGIFTNKL

SEQ ID NO: 95126 - protein, 419 aa, Unknown
  Bacterial polypetide isolated from the Sargasso Sea
ENNIKKHIEEICIKASNASKNLFHASSERKNLALESIAKHINKNKNEILKANSIDMDLAKQNNITGALLDRLFLDESRINNMIQGLHNIIRLDDPIGAEIKNWTPKNGINMSQKRVPIGVIGIIYESRPNVTADASALALKSGNSIILRGGSESFNSSSAIVASIKNGLKESAISEDCVQIVNTTSRDAVGELLKMNKYINLIIPRGGKSLIARVQLDSKIAVLSHLDGLCHTYIDKDADKEMSLDIVINAKMRRTGICGATETLLCHEKVINSILPDIIEKLIDQGCEIRADRNIKLLNKNINDASEKDWQTEYLDKIISIKSVNDVSDAIKHIEQYGSNHTDAIITENYKTAEIFLNEVNSAIVLHNASTQYADGGEFGMGAEMGIATGRLHARGPVGLEQLTTYKYQLRGNGQVRP

SEQ ID NO: 95127 - protein, 319 aa, Unknown
  Bacterial polypetide isolated from the Sargasso Sea
TWDRPNGLNISRVATPLGVIGLIFESRPNVAADAGGLCLKSGNAVILRSGKDGLRSAEAIVASLQAALVSADLPKECIQIVPSESRDAATLMLEGLNGSIDVIVPRGGKSLVAEVERSAKVPVFGHLEGICHIYIDEHADEEKALAVCLNAKMRRTGICGAVETILVNDKIAKSFVPKIVASLSELNCEIRCCEKTIDFDGRSVPATEEDWSTEYLAPIVSLKSVLNVDEAINHIAQYGTGHTESIISENKDNQTKFTHSIDSAIVMINASTQFADGGEFGLGGEIGIATGKFHARGPVGVDQLTSFKYIVSGNGQTRD

SEQ ID NO: 95128 - protein, 242 aa, Unknown
  Bacterial polypetide isolated from the Sargasso Sea
CIQLIETTDREAVKTLLHLDKYLDVIIPRGGKGLVKLITEESRVPVIKHLDGICHVYIDDSADLNKAEEIALNAKTYRYGICGAMETLLIHNKVASDVLPSLIGKLNAEGVEVRGCKKTTEFVEVSDATEEDWTTEYLAPILSIRVVESMNEAIDHIQKYGSHHTDSIVSEDLKKVDVFFKQVDSSSVMHNLPTCWADGFEYGLGAEVGISTDKIHARGPVGLEGLTSQKFIVKGNSELRGA

SEQ ID NO: 95129 - protein, 331 aa, Unknown
  Bacterial polypetide isolated from the Sargasso Sea
KLDDPTNKIIEKWKRPNGLVIKQVSTPIGVIGIIYESRPNVTSDISSLCFKSGNVVILRGGSEAINSNLIIANLFRQSLKLNRINENFVQIVKNKNRKSVDYMLSNMQNFIDVIIPRGGKNLVKKVQTLSKVPIIGHLEGICHTYIDKDADLKMAIKVVHNAKLRNTSICGATETILMHKNIVKKFCNPVLNKLTESNCEIIGDKIIRKTFKGPSKKSNKKSWSTEYLSPKVSVKTVNNIDEAIYHINKFGTMHTDSIISKNKKSADYFLKKIKSSIAMHNTSTQFADGGEFGFGGEVGISTNTLPPRGPVGLNQLTSFKYLVLGNGQIRK

SEQ ID NO: 95130 - protein, 253 aa, Unknown
  Bacterial polypetide isolated from the Sargasso Sea
MSKELQKIENIQNISKLSVGERINYLNKLKKEIIQNEDNIYSALHNDLNKPKFEVYTSEIGFLLNEIKLFIKHLNEWSKPKKVKSSIINFPSNDFVYSEPYGKVLIISPWNYPFQLAILPVLSAFSCGNTVVLKPSEHTPETSRLVNKIISKIFPSDLVCVVEGDYKVASKLLKLKWDYIFFTGSVRVGKIVAAEAAKQLTPHTLELGGKSPCIIDKKTNLKIACKRIVWGKFMNAGQTCVAPDYILVHKSIK

SEQ ID NO: 95131 - protein, 327 aa, Unknown
  Bacterial polypetide isolated from the Sargasso Sea
EQQHSISRMNDLFEAQRALFRKAPMPSADERIQHLQALKHGVLKHQQALIDAIGEDFGRRSADETRLAEIMPSLEGIHYASKRVKGWMKPSRRKVGLAFQPAKAQVIYQPLGVVGIIVPWNYPLFLAIGPLITALSAGNRAMIKMSESTPRTAEVLEQLLGEIFPEDHVAVVTGEAEVGVAFSKLAFDHLLFTGATSIGRHVMRAAADNLTPVTLELGGKSPAIISADVPLNDAAERIAFGKGVNAGQTCVAPDYILCPRSRIEDLTQALHQQFAQMYPCLRDNADFTQVINPRQYQRLQSYLTDAEEKGARILPVNPANEDLRARA

SEQ ID NO: 95132 - protein, 475 aa, Unknown
  Bacterial polypetide isolated from the Sargasso Sea
MARQRNAFVSEGPPSVQQRKARLARLRAVVLAYRSEVEEAVSADFGHRSRHETAIMELVGVIQAIDYLTRNLRRFTKPQRRHVGIFYRAGQAHVEYQPLGVIGVMAPWNYPFALTFIPLATALAAGNRAMLKPSELTPRTSELMRRMLAETFPSEEVAVVLGGPEVGAAFSGLPFDHLLFTGSTQVGRKVMKAASDNLVPVTLELGGKSPAIVARGHVDGRTMSSIVFGKLSNGGQTCVAPDYALVHEDDLDAFVAQYDAAVARFYPDGPTSPDYTSIVSDRHFDRLKYLVDEARSKGARVIEAGVNPQQAATRKRTLAPTLIVGAGDDTTVMQEEIFGPILPVRTYRTIDEVVDYVNARPRPLALYYFGAQDSDCESLLKRTTSGNVGINNTLLHVAQEDLPFGGVGPSGMGAYHGIEGFRAMCHAKGVFVLGRWNLPSLLRAPFGKLADLSLAALLGRSREPAGARAGLSAKR

SEQ ID NO: 95133 - protein, 472 aa, Unknown
  Bacterial polypetide isolated from the Sargasso Sea
MKNDLPEVAALEALLRDQRHAYLRAPYPSWETRAGHLKALRKVMLDNRDALADAMSADFGNRAKQEVLLAEFLLVKEEIDAALKHGKRWMKAQRRSTSKWLMPARAKVVPQPLGVIGIIVPWNYPVLLAAGPLISALTAGNRAIIKMSELTPRTSALFEQLIGQTFAREHVAVVNGDAAFAAAFSSQPFDHLLFTGSTKIGHEVMRAAAEHLTPVTLELGGKSPAIIGQHARFDNAVDNLIAGKTLNAGQTCVAPDYVLVPRGKEQAFIERARARMAKVYPDFAHNLDYTSIISERHFARLQRLADEAQAAGAQLHTLTDSTPDEASRRYPLIAVTNAPEESALMQEEIFGPLLPIVPYDTLDDAIAWINARPRPLALYLYADDSATIERVTRDTIAGGMAINETLMHLACESLPFGGVGASGMGAYHGYEGFVNFSKMKPVLTQARLNARDWISPPYGKRVNALLKLMLRF

SEQ ID NO: 95134 - protein, 394 aa, Unknown
  Bacterial polypetide isolated from the Sargasso Sea
MHGIHYANKRIKKWMKPSRRSVGMQFMPASAKVIYQPLGVVGIIVPWNYPLFLAIGPLTGALAAGNRVMIKMSESTPATSQLVKDLLARVFPEDLVSVALGEAEVGMAFSKLPFDHLLFTGATSIGKHVMRAAAENLTPVTLELGGKSPAIVSADVPLADAAERIAFGKTLNAGQTCVAPDYVLVPRDRVDGFVTAYRQVVQRFYPQLKDNPDYTAIINERQLTRLNGYVQDAEAKGARIVSLYPETQGRRLPQSLVLDVNDDMELMQDEIFGPLLPVVPYDRIEDAFAYVNARPRPLALYYFGYDKREQQRVLHETHSGGVCLNDTLLHVAQDDMPFGGIGPSGMGHYHGHEGFLTFSKAKGVFIKQRFNAARLIYPPYGKAIQKLVYKLFVR

SEQ ID NO: 95135 - protein, 202 aa, Unknown
  Bacterial polypetide isolated from the Sargasso Sea
MGLSRTLYSVLQEYGIDNVQAVMVRRSGDPKDSNRGPINSIEPVLGVPSHHGPDVQTVISNLNIQTMAVKVPTTIMHVHCIIAELEKEPNVEKIIQLWEETPRVDLIEGYLKNDDSKVSNLPGTAEIMELARDSLYTRGDLNQIAVWRDGVHAFGNKLYYYQAIHQESDVVPENIDAIRAMCGLEEDNMKSIVKTNASLGIN

SEQ ID NO: 95136 - protein, 189 aa, Unknown
  Bacterial polypetide isolated from the Sargasso Sea
YGIDNVQAVMVRRSGDPKDSDRGPLNSIEPVLSVPSHHGPDVQTVIEGINIQTMAVKVPTTIMHVHCIIAELDNEPDVDEILSMWESTPRVNLLEGFLNKDGSKIRNLPGTAEIMELARDALYTRGDLNQIAVWKDGVHAFGKKLYYYQAIHQESDVIPENIDAIRAMFSLESDNMKSILKTNKALGID

SEQ ID NO: 95137 - protein, 82 aa, Unknown
  Bacterial polypetide isolated from the Sargasso Sea
MSIKVAINGFGTIGKRVADAVDAQDDMEIVGVTKTGPSFGCDLAVKKGFPLYCTFDDADRIARFAEQGYECHGGLADLLAIA

SEQ ID NO: 95138 - protein, 127 aa, Unknown
  Bacterial polypetide isolated from the Sargasso Sea
MVTRVAINGFGTIGKRVADAVDAQEDMEIVGVTKTRPSFGCDLAVKKKFPLFCTFDTKEKIAAFADAGYDCKGGLSDLLSICDVIIDCSPGKVGAENLDKYQKAGVKSIFQGGEKHELTGKSYTSSA

SEQ ID NO: 95139 - protein, 264 aa, Unknown
  Bacterial polypetide isolated from the Sargasso Sea
ADVVVDCAPGKLGAENLEKYRSAGVKYIFQGGEKHNLTGLSYTSSANHKENLNAEGTRVVSCNTTGLSRTLVPLFEHCGSLKVECTMVRRAADPGDSGKGPINAIKPVLKVPSHHGPDVMTVKPEIEINSLAVAVPTTIMHVHCIIADLPKGHGLSTESIIEMWSNTPRVIIMNGADDRIPTTAEVMEMARDIGRKWGDLHEIFVWEDGVKLVGDRLYYFQAIHQESDVIPENVDCIRALMGVEEDWRKSSEKTDSAISTYYST

SEQ ID NO: 95140 - protein, 254 aa, Unknown
  Bacterial polypetide isolated from the Sargasso Sea
MSIKVAINGFGTIGKRVADAVDAQDDMVIVGVTKTGPSFGCDLAVKKGFPLYCTFDDADRIARFAEQGYECHGGLADLLAIADVVVDCSPGKLGAENLAKYEKAGIKYMFQGGEKHALTGLSYTSSANHAENLNAQGTRVVSCNTTGLSRTLVPLYEHCGSLKVECTMIRRAADPGDSKKGPINAIKPVLKVPSHHGPDVMTVKPEIEINSLAVAVPTTIMHLHSIIADFTEGHGLTTDSILSMWRQTPRVIIM

SEQ ID NO: 95141 - protein, 348 aa, Unknown
  Bacterial polypetide isolated from the Sargasso Sea
MVTRVAINGFGTIGKRVADAVDAQEDMEIVGVTKTRPSFGCDLAVKKKFPLFCTYDAQEKIAAFADAGYDCKGGLSDLLSICDVIIDCSPGKVGAENLDKYQKAGVKSIFQGGEKHELTGKSYTSSANHLENFDIDCTRVVSCNTTGLSRTLVPLFKSVKEKGTLSVNSVMIRRAADPGDSSKGPINAIKPVLKVPSHHGPDLMTVKPEIEITSLAVAVPTTIMHLHAITVELPSEHGLSTQSVIEMWKETPRVIIMNGSDTKITSTAEVMELARDIGRKWGDLHEIFVWEDGVSLQGNTLYYFQAIHQESDVIPENVDAIRAIMGLEKDWMVSVDKTDKAISAYYGI

SEQ ID NO: 95142 - protein, 317 aa, Unknown
  Bacterial polypetide isolated from the Sargasso Sea
MELQLFGINHKTSNVAEREKFIINESNQILLDSHLKKLFGNDFESFFGISTCNRTEIYLVGRPGISKHIFKEVLKLLNVKDISSDSFYFLSNHDALAHMCKVASGIDSQVLGEQEIFGQFKTALRNAKEYKIIGNKLSYFADKVIEIAKKARTDTEIGLNSLSVSGLAMKLIKNIFEAPENQNILVIGAGSLSKSVIENLYDKGIRNIKLVNRTVKKINLGKNFEILSSSLDSLHDQLELADIVISSSITEVPLIGKGAIENALKFRKNKPILLIDLGVPRNIEDEIRRIEQAYLYSIDDIEKITQENFGQRSIEAE

SEQ ID NO: 95143 - protein, 193 aa, Unknown
  Bacterial polypetide isolated from the Sargasso Sea
MCESSVSTCNRANVNEYHRYNLVTPVCIRTAGSPPPPAPSPSTSLPPGASTTTTTTTLPPGASTTTTTTTTTSTTTTTTTNPDNCARTLSKCTVACEKSDERTATITRNATKNGTCPTTLPDCAPGDGDCVASEASSSSGMAAGYVALIVVIGVMFAGVGVAYALWPQKFNELVGRFREQAKGAADYNKYFLL

SEQ ID NO: 95144 - protein, 116 aa, Unknown
  Bacterial polypetide isolated from the Sargasso Sea
MELQLFGINHKTSNVAEREKFIINESNQILLDSHLKNIFHNELESFFGISTCNRTEIYLVGKSGISEKVFHEILKKLSINDISSDSFYFLSNHDALVHMCKVASGIDSQVLGEQEI

SEQ ID NO: 95145 - protein, 95 aa, Unknown
  Bacterial polypetide isolated from the Sargasso Sea
MELQLFGINHKTSNVSEREKFIINHSNLVLLDNNLKKNYKNDLESFFGISTCNRTELYILGKAGISEKIFNEVSKILKLDDIPKDSFYFLDGHDA

SEQ ID NO: 95146 - protein, 282 aa, Unknown
  Bacterial polypetide isolated from the Sargasso Sea
KTSKVSDRERFIVDDSNLVYLNDFLISKLGKKISGFFGLSTCNRTEIYFYGDKGIEDDVLKLTKEALNISDIPDKNFYIFDGLKAFEHMCRVCCGIDSQVVGEQEIFGQFKNAYNSAKAFRLVGKELMIYVEKVFEITKKVRTETKIGINPLSVSGLSFNLVKEIFENPENKEVLVIGGGDLAKSIIKNLFDKGLRSISAINRTIKEIKISEDFSVIPMPLNLVHREIINADIIICSASSLTPIIGKGAVENAFKNRGNKPMMIIDLAVPRNVEPEIEDLEL

SEQ ID NO: 95147 - protein, 101 aa, Unknown
  Bacterial polypetide isolated from the Sargasso Sea
KKRIIFLEWWASLEAVPVINKLRSDLELIRKEELQKALSRMGPDFSARERKVVEALTKGIINKILHTPVTKLRSPQSREERQVSLKIVEKLFSLVEEDKNK

SEQ ID NO: 95148 - protein, 46 aa, Unknown
  Bacterial polypetide isolated from the Sargasso Sea
MTIFALGINHKTAPVSLREQVAFAPEQILDALRDLTTTTQVSDAVI

SEQ ID NO: 95149 - protein, 199 aa, Unknown
  Bacterial polypetide isolated from the Sargasso Sea
MEFHCWGISHKSTSLEVREKFAFNKDKIDEILAKLKTLTAFDNGIFLSTCNRTEFYSFCPRIEIKKFDAHLEHILGKGLEVRKNDQYLFSDSDAFAHLLRVMTGIDSMIVGEPDIFGQVKKAYENSRSFGYLNSNLDAIFSKSINITKEIRSATNLSKNPISIASLVENIILKEGDSPVLIIGAGDVGRPLLKRLLADN

SEQ ID NO: 95150 - protein, 212 aa, Unknown
  Bacterial polypetide isolated from the Sargasso Sea
MELQLFGINHKTSVISEREKFIINESNQIILDSHLKRIFKDDFESFFGISTCNRTEIYFVGKQGIINEVFNEVLKILDINNIPKKCFYFLTNHNALAHMCKVASGIDSQVLGEQEIFGQFKTAFKKSSEHNMVGKKLSFFTKKVIEITKIARTNTEIGLNPLSVSGLTIKLINNIFEKPDNQNVLVVGAGSLALSVMDNLYRSGINNINSVN

SEQ ID NO: 95151 - protein, 65 aa, Unknown
  Bacterial polypetide isolated from the Sargasso Sea
MTIIAYGINHSTAPVDIREKVSFGTEIMPNALNELKNQNGVYEAAILSTCNRTEIYCNIDQSENR

SEQ ID NO: 95152 - protein, 279 aa, Unknown
  Bacterial polypetide isolated from the Sargasso Sea
MQEIHLVGINHKTSKVSDRERFIVDDSNLVYLNDFLISKLDKKISGFFGLSTCNRTEIYFYGDRGIDDDVLRLIKEALNISDIPDKNFYIYDGLKALEHMCRVCCGIDSQVVGEQEIFGQFKNAYNSAKAFRIVGKELMIYVEKVFEITKKVRTETKIGINPLSVSGLSFNLVKEIFENPENKQVLVVGGGDLAKSIIKNLFDKGLRSISAINRTIKEIKISENFSIIPMPLNLVHREIINADIIICSASSLTPIIGKGAVENAFKNRGNKPNDDNRFG

SEQ ID NO: 95153 - protein, 286 aa, Unknown
  Bacterial polypetide isolated from the Sargasso Sea
FSDPAKLKRVIADLDQEDWSLLSSDVKGDAYEALLENSVGDVKSAAGQYFTPRPLIRALVEIMKPKPGEMICDPACGTGGFLMLAHKYIVDNYPNMTREEKKTLKSDSLKGGELVHDTARLCTMNMMLHGLGSDEKPTVSVEDALKADSGDRFDLVLANPPFGKKSSTVFYGEDGEKKTEKETIQRQDFWATTSNKQLNFVQHIKTILKINGRAAVVVPDNVLFEGGAGETIRRKLLSDFDVHTLLRLPTGLFYAQGVKANVLFFEKKPAHAEPWTKKLWIYDLRT

SEQ ID NO: 95154 - protein, 267 aa, Unknown
  Bacterial polypetide isolated from the Sargasso Sea
SFILSKNHINYISDLLKRKFTDQLSSLFFLSTCNRTECYMICETEQTCRDFFLEIYRMLDSDLDQESFFYFKAHDDAFVHLCKVGSGVDSRIIGEKEIFGQLKNAFKEYDEMGLISNQMRDICDRAFSISKFIRNETNIDSTPISISTLVLKLLKELFENPSEQNILLIGAGDVATNIIKNLHQNGYKQIEFHNRTKKTISISNSLRLESKPLNKINLALKKNDILISSISSDLPIIGKGLIDENLKLRKNKPLLLIDLGVPRNMKL

SEQ ID NO: 95155 - protein, 262 aa, Unknown
  Bacterial polypetide isolated from the Sargasso Sea
NHKTSNVSEREKFIINHFNLVLLDSHLKNNLKDDFESFFGISTCNRTELYILGKAGISQRIFNEVSKVLKLDDIPKDNFYFLDDHDALVHMCKVASGIDSQVLGEQEIFGQFKKAIKTAEGLEIINTKLLNLSNKVIEIAKKARTETNIGLNSLSVSGLALKLVRNIFEKPQNQNVLVVGAGSLATSLINNLYKNGINKINLVNRSMKKIKLLDNYEIISSSFDSLHDALEIADIVIASAETDMPLIGKGAIENALKKRQNK

SEQ ID NO: 95156 - protein, 262 aa, Unknown
  Bacterial polypetide isolated from the Sargasso Sea
MQEIHLVGINHKTSKVSDRERFIVDDSNLVYLNDFLISKLDKKISGFFGLSTCNRTEIYFYGDKGMEDDVLKLTKEALNISDIPDRNFYIYDGLKAFEHMCRVCCGIDSQVVGEQEIFGQFKNAYNSAKAFRIVGKELMIYVEKVFEITKKVRTETKIGINPLSVSGLSFNLVKEIFENPENKEVLVIGGGDLAKSIIKNLFDKGLRSISAINRTIKEIKISEDFSIIPMPLNLVHREIINADIIICSASSLTPIIGKGAVK

SEQ ID NO: 95157 - protein, 287 aa, Unknown
  Bacterial polypetide isolated from the Sargasso Sea
MKGSEISRDRPLVVGANHRSSSLTIRDRLFVEDADIPAFLNKLQAKGIENAVLLSTCDRVEVIASHSDPRNAAGSIIACFADLLGDPGIMLKGQCYTLVDDRAVEQIFAVASSLDSQIIGEPQVLGQVKAAHRIARENGMVGGGLEVLMQAAFGVAKRVRTETAIGERPVSIAAAAVDLARDVHGDLSRSNGLLIGVGDMGHTVTEHLMAAGLERLTVTHPLEARAAILARNLNCHRISYIDRAKSMADADVVVTALGRRNYALNADMVQSALKTRRMRPMLLVDVA

SEQ ID NO: 95158 - protein, 272 aa, Unknown
  Bacterial polypetide isolated from the Sargasso Sea
MELKLFGISHKTANLEMRESFVINDDHYSYMQNLLETKFAGEIDSIFVLSTCNRTEVYSYCRGEDSHQQFFQSIYKYLGCELEVTKHFYQFSGIEAFKHMCSVASGIESRILGEKEIFGQFKKANELFLNIGLNKRMLLMYTDAAIKIAKQVRSNTKIDHNPVSVSSLVLNVFAEIFENPLDQNIITIGAGEVASGVLNSLVNAGFQNLTFANRTPKKISLGNNINLSSRPLNKLDQLLLGQDIIISSISTDLPFIGKGLIEKICTYRKNKP

SEQ ID NO: 95159 - protein, 279 aa, Unknown
  Bacterial polypetide isolated from the Sargasso Sea
LVLLDSHLKKYYGKELISFFGISTCNRTELYLLGKAGISKDIFKDVSDLLNLVEIPKDGFYFLNNHDAMVHMCKVASGIDSQVLGEQEIFGQFKNAYKMAKDLSILDNKLSNLTNKVIEIAKKARTETNIGLNSLSVGGLALKLVRNIFEKPEIQNVLVVGAGSLANTLVNNLYKNGINKINIVNRSIKKIKLFDDYEIISASLDSLHNALEIADIVIASSDTDIPLIGKGAIENALRKRKNKPILLIDLGVPRNIEEEIRNIEQAYLFSIDDLEKITQ

SEQ ID NO: 95160 - protein, 153 aa, Unknown
  Bacterial polypetide isolated from the Sargasso Sea
MELHCWGISHKSTSLEVREKFAFNKKEIDEVLTNLKITNTFDNGILLSTCNRTEFYSVCSRSDIKNFEKVVSKILNKFENLRKNDQYLYAGTDAFKHSLKVMTGIDSMIIGEPDIFGQVKKSLNNSRSMGFLNTELENTFNNAIRFSKLIRTE

SEQ ID NO: 95161 - protein, 68 aa, Unknown
  Bacterial polypetide isolated from the Sargasso Sea
MNFTLLGWNFRSTPLEIRDRLSLTEQEQLELIQQINARCGIKESVLLSTCNRTELYLYNMERPAEELL

SEQ ID NO: 95162 - protein, 218 aa, Unknown
  Bacterial polypetide isolated from the Sargasso Sea
MEFHCWGISHKSTSLEVREKFAFNKDKIDEILIKLKTLTAFDNGIFLSTCNRTEFYSFCPRIEIKKFDEHLENILGKELEVRKNDQYLFSDSDAFSHLLRVMTGIDSMIVGEPDIFGQVKKAYENSRTFSYLNADLDAIFEKSINITKEIRSTTNLSKNPVSIASLVESIILKEGHSPVLIIGAGDVGKPLLKRLIASDYDVALFNRSQVEIEGVKSK

SEQ ID NO: 95163 - protein, 242 aa, Unknown
  Bacterial polypetide isolated from the Sargasso Sea
CDRVEVLASHSDPRNAAVSIQACFADLLGNTEVTLESQCYTLIDDRAVEQIFAVSASLDSHIVGEPQVLGQVKAAHRIARENGMVSGGLETLMQAAYGAAKRVRTETAIGERPVSIASAAVDLARGVHGDLSSARGLLIGVGDMGHMVAEHLVAAGLERLTITHPLEVRAAILARTLNCHCIGYDDRAEAMASADVVVTALGRHDYAVNTDMIKSALKTRRMRPMFLVDVAVPGDVDPAINR

SEQ ID NO: 95164 - protein, 49 aa, Unknown
  Bacterial polypetide isolated from the Sargasso Sea
VEALTKGIINKILHTPVTKLRSPQSREERQVSLKIVEKLFSLVEEDKNN

SEQ ID NO: 95165 - protein, 104 aa, Unknown
  Bacterial polypetide isolated from the Sargasso Sea
LVEEERIIFLEWWASLEAVPVINKLRSDLELIRKEELQKALSRMGPDFSARERKVVEALTKGIINKILHTPVTKLRSPQSREERQVSLKIVEKLFSLVEEEQNN

SEQ ID NO: 95166 - protein, 210 aa, Unknown
  Bacterial polypetide isolated from the Sargasso Sea
MELQLFGINHKTSDVSEREKFIINESNQIVLDNHLKKIFKNKLESFFGISTCNRTEFYLFGEPNISSEVFHEVMTILENEDMNKESFYFLNNHDALVHMCKVASGIDSQVLGEQEILGQFKSALKKAQELNIIKSKLLNLSNKVVEISKQARTETNIGLNSLSVSGLAYKLEKNIFEEPKHQNILIVGAGSLAHSVMENLFKNGIHKIKS

SEQ ID NO: 95167 - protein, 120 aa, Unknown
  Bacterial polypetide isolated from the Sargasso Sea
SRNQNFRQKIAKEAESLVEEERIIFLEWWASLEAVPVINKLRSDLELIRKEELQKALSRMGPDFSARERKVVEALTKGIINKILHTPVTKLRSPQSREERQVSLKIVEKLFSLVEEEQNN

SEQ ID NO: 95168 - protein, 159 aa, Unknown
  Bacterial polypetide isolated from the Sargasso Sea
MNSLYIIAFTHRNFTFDEIGLFHLEDEIRIAKLKKLKIDFQFDELMYLSTCNRVEFIIDSSQNINSGFLKKLAANFLTNSDPKYIDSIVNKIEVFSENKAVHHLFSVASSIDSLVVGEREIITQVRKAFEECNQNNLLGDSIKALIQITISTAKRVYTE

SEQ ID NO: 95169 - protein, 199 aa, Unknown
  Bacterial polypetide isolated from the Sargasso Sea
MEFHCWGISHKSTSLEVREKFAFNKDKIDEILAKLKTLTAFDNGIFLSTCNRTEFYSFCPRIEIKKFDAHLEHILGKGLEVRKNDQYLFSDSDAFAHLLRVMTGIDSMIVGEPDIFGQVKKAYENSRSFGYLNSNLDAIFSKSINITKEIRSATNLSKNPISIASLVENIILKEGDSPVLIIGAGDVGRPLLKRLLVNN

SEQ ID NO: 95170 - protein, 184 aa, Unknown
  Bacterial polypetide isolated from the Sargasso Sea
MQEIHLVGINHKTSKVSDRERFIVDDSNLVYLNDFLISKLDKKISGFFGLSTCNRTEIYFYGDKGIEDDVLKLTKEALNISDIPDKNFYIYEGLKAFEHMCRVCCGIDSQVVGEQEIFGQFKNAYNSAKAFRIVGKELMIYVEKVFEITKKVRTETKIGINPLSVSGLSFNLVKEIFENPENKE

SEQ ID NO: 95171 - protein, 204 aa, Unknown
  Bacterial polypetide isolated from the Sargasso Sea
IERAQALTEQLCSEAISLAEIPERLHQADIVVASTASTLPILGKGTVETALRQRRHRPMFLIDLAVPRDIEAQVDELEDVFLYTVDDLHKVVAENQASRQEAAVEAEKIIDFQVVRFMHWMRSLDSVPTIRSLRDQVETLREAEMADAKRRLANGEDPEQVLEHFSRNLSRKFSHAPSQALKQASQEGNASLISNTRRLFKLKP

SEQ ID NO: 95172 - protein, 175 aa, Unknown
  Bacterial polypetide isolated from the Sargasso Sea
MEFHCWGISHKSTSLEVREKFAFNKDKIDEILAKLKTLTAFDNGIFLSTCNRTEFYSFCPRIEIKKFDAHLEHILGKGLEVRKNDQYLFSDSDAFAHLLRVMTGIDSMIVGEPDIFGQVKKAYENSRSFGYLNSNLDAIFSKSINITKEIRSATNLSKNPISIASLVENIILKEG

SEQ ID NO: 95173 - protein, 406 aa, Unknown
  Bacterial polypetide isolated from the Sargasso Sea
MNLRLFGISHKTANLEQRESFILSKNHINYITDLLERKFSDQLSSLFFLSTCNRTECYMICETEQTCRDFFLEIYKMLDSDLDQESFFYFKARDDAFVHLCKVGSGVDSRIIGEKEIFGQLKNAFKEYDEMGLISNQMRDICDRAFSISKFIRNETKIDSTPISISTLVLKLLKELFENPTEQNILLIGAGDVATNIIKNLHKNGYKEIEFHNRTKKIISISNSLKLESKPLNKINLALKKNDILISSINSDFPIIGKGLIEENLKLRKNKPLLLIDLGVPRNIEAAVSSSEFVYLYTLEDIENFSFKNLKERKQSASHATTLIKAMVADSIREIDEDNAKEQIFITLSSILRGKNESYISQLLSNKKIADVIIEDFDIEDDLAHKFTTMDNKIVISMIKEISRAS

SEQ ID NO: 95174 - protein, 385 aa, Unknown
  Bacterial polypetide isolated from the Sargasso Sea
MEFHCWGISHKSTSLEVREKFAFNKDKIDEILAKLKTLTAFDNGIFLSTCNRTEFYSFCPRIEIKKFDAHLESILGKGLEVRKNDQYLFSDNDAFAHLLRVMTGIDSMIVGEPDIFGQVKKAYENSRSFGYLNSNLDSIFSKSINITKEIRSATNLSKNPVSIASLVENIILKEGHSPVLIIGAGDVGKPLLKRLIANGYEVALFNRSKVEVDGIKSNPLSKLTKNINEFKTIVVAAPSDKEFFGSKDFKTSEDRLIFDLAIPRNLDGSLNNLKNFKLLTLDEISMMVEENIKGRKDSVAQAEEIIEKNSETEFRKIKNKKNIDLKQKEFRESLTETRDEAVNKAKKRILKGDDIENIIDDLASEIASKNAFQVSKILDSSTKNK

SEQ ID NO: 95175 - protein, 409 aa, Unknown
  Bacterial polypetide isolated from the Sargasso Sea
MQEIHLVGINHKTSKVSDRERFIVDDSNLVYLNDFLISKLDKTISGFFGLSTCNRTEIYFYGDKGIEDDVLKLTKEALNISDIPDKNFYIFDGLKAFEHMCRVCCGIDSQVVGEQEIFGQFKNAYNSAKAFGIVGKELMTYVEKVFEITKKVRTETKIGINPLSVSGLSFNLVKEIFENPENKEVLVIGGGDLAKSIIKNLFDKGLRSISAINRTIKEIKISEDFSIIPMPLNLVHREIINADIIICSASSLTPIIGKGAVENAFKNRGNKPMMIIDLAVPRNVEPEIEDLELVYLFSIDDIEKISQDNLEERLVEAGRGKEIIKYQALKSYKTINSKIEDDKFAFEILKLLKSIDDKRVFELSNDNDINLEFLTLVENTNNIQLSEKLRKKIELIDGQKLISIISNYK

SEQ ID NO: 95176 - protein, 410 aa, Unknown
  Bacterial polypetide isolated from the Sargasso Sea
MELQLFGINHKTSNVAEREKFIINESNQILLDSHLKKLFGNDFESFFGISTCNRTEIYLVGRPGISKHIFKEVLKLLNVKDISSDSFYFLSNHDALAHMCKVASGIDSQVLGEQEIFGQFKTALRNAKEYKIIGNKLSYFADKVIEIAKKARTDTEIGLNSLSVSGLAMKLIKNIFEAPENQNILVIGAGSLSKSVIENLYDKGIRNIKLVNRTVKKINLGKNFEILSSSLDSLHDQLELADIVISSSITEVPLIGKGAIENALKFRKNKPILLIDLGVPRNIEDEIRGIEQAYLYSIDDIEKITQENFGQRSIEAEKAMNIIALESKSKLEAFSEKSSKDLASLQLDQFLNSLSSHEIQQFKTNGNYSNLVDSIKSMNLANKNLNDFKDLKNLDDHVIKSMIKRFFSNA

SEQ ID NO: 95177 - protein, 57 aa, Unknown
  Bacterial polypetide isolated from the Sargasso Sea
RELFIINDSNQDDFINFFREEFGHFVESFFSLSTCNRTEIYYFGEPGNSIFNSSKNS

SEQ ID NO: 95178 - protein, 153 aa, Unknown
  Bacterial polypetide isolated from the Sargasso Sea
MELQLFGINHKTSKVSERERFIINDTNQILLSSHLKKIFKDDIESFFGISTCNRTELYFVGKKDISKNVLNETLKALQVNNISDDSFYFLSGHDALVHMSKVASGIDSQVLGEQEIFGQFKTAYKKAKDIGIVGRELIYLSEKVIEISKKART

SEQ ID NO: 95179 - protein, 407 aa, Unknown
  Bacterial polypetide isolated from the Sargasso Sea
MELQLFGINHKTSNVFERENFIINESSQIILDDCFKKNFGDDINSFFGISTCNRTEIYLLGKANIAREALDLTIKELNIKNIQQDSYYFLDKEDAFIHMCKVASGIDSQVLGEQEIFGQFKKAIKVAKDLMILKPNLNYFCNKAFEIVKRVRTNTGIGLNSLSVSGLSLKLVKKIFEKPQSQNILIIGAGSLAHSIVENLYNNDVSNIRAINRSIRNIKVTDDYEIISSSLDNLHYELEKADIVISSASSEVPFIGKGAIESCLKTRKNKPLLIIDLAVPRNVEEEVKFLEHCYLFTIDDIEKITQENYGQRTIEAEKAINMIVIDSQDAINEINDKFIKDNLQNQLHIFINSLSNEDKDELMNTKNTKKYLLNILDEKKNKKFLIDLSVLNELESHIIKSMIKRQS

SEQ ID NO: 95180 - protein, 293 aa, Unknown
  Bacterial polypetide isolated from the Sargasso Sea
MELQLFGINHKTSKVSERERFIINDTNQILLSSHLKKIFKDDIESFFGISTCNRTELYFVGKKDISKNVLNETLKALQVNNISDDSFYFLSGHDALVHMSKVASGIDSQVLGEQEIFGQFKTAYKKAKDMGIVGRELIYLSEKVIEISKKARTQTKIGLNSLSVSGLALKLVNNIFENPQDQNVLVVGAGSLAQNVIKRLYEKGIDKIKSINRSIKKIKLNDSYEIFSGSLESLHHELEHTDIVIASSTTELPIIGKGAVENAFKTRKNKPMLLIDLGVPRNIEEEIKNIEQA

SEQ ID NO: 95181 - protein, 191 aa, Unknown
  Bacterial polypetide isolated from the Sargasso Sea
MQEIHLVGINHKTSRVSDRERFIVDDSNLIYLNDFLISKLDKKISGFFGLSTCNRTELYFYGDKGIEDDVLKLTKEALNISEIPNKNFYIYNGLKALEHMCRVCCGIDSQVVGEQEIFGQFKNAYNSAKAFKIIGKELTIYVEKVFEITKKVRTETKIGINPLSVSGLSFNLVKKIFENPKNKQVLVIGGG

SEQ ID NO: 95182 - protein, 127 aa, Unknown
  Bacterial polypetide isolated from the Sargasso Sea
MELQLFGINHKTSSVSERESFIINESNQILLDNHFKLIFGNKLKSFFCLSTCNRTEVYIYGASGILNKVFKEVFKILGQREIPRDKFYFLDNHDALVHMCKVASGIDSQVLGEQEIFGQFKQSLKNA

SEQ ID NO: 95183 - protein, 170 aa, Unknown
  Bacterial polypetide isolated from the Sargasso Sea
MELQLFGINHKTSVISEREKFIINESNQIILDNHLKRIFKNDFESFFGISTCNRTEIYFVGKRGIINEVFNEVLKVLDLNDIPKNCFYFLTNHNALAHMCKVASGIDSQVLGEQEIFGQFKKAFKNSSEHKIVGKKLSYLTKKVIEIAKMARTDTGIGFNPLSVSGFTMN

SEQ ID NO: 95184 - protein, 410 aa, Unknown
  Bacterial polypetide isolated from the Sargasso Sea
MELQLFGINHKTSNVAEREKFIINESNQILLDSHLKKVFHDDLESFFGISTCNRTEIYFVGKSGISKEVLREALKRLDVKDISMDSFYFLSNHDALVHMCKVASGIDSQVLGEQEIFGQFKTALKSAKEYKIVGKKLSYFADKVIEISKNARTNTKIGINSLSVSGLALTLIKNIFEAPENQNILIIGAGSLSQNVIKNLYDKGIRNIKLVNRTVKKIELNSNFEILSSSLDTLHDQLELADIVISSSITELPLIGKGAIENALKIRKNKPILLIDLGVPRNIEDEIRNIEQAYLYSIDDIEKITQDNYGQRSIEADKAMNIIVLESKSKLENFSLKSSKDLANLQLDKFLNGLSNHEIKQFKSSGDYSNLVESIKSMNIEDEYLNNFQDIKNLDDHIIKSMIKTFFDNA

SEQ ID NO: 95185 - protein, 117 aa, Unknown
  Bacterial polypetide isolated from the Sargasso Sea
MEFHCWGISHKSTSLEVREKFAFNKDKIDEILAKLKTLTAFDNGIFLSTCNRTEFYSFCPRIEIKKFDAHLEHILGKGLEVRKNDQYLFSDSDAFAHLLRVMTGIDSMIVGEPRYFW

SEQ ID NO: 95186 - protein, 410 aa, Unknown
  Bacterial polypetide isolated from the Sargasso Sea
MELQLFGINHKTSDVSEREKFIINHSNLVLLDNNLKKNYKNDFESFFGISTCNRTELYILGKAGISEKIFNEVSKILKLDDIPKDSFYFLDGHDALVHMCKVASGIDSQVLGEQEIFGQFKKAVKTAQGLEIINAKLLNLSNKVIEIAKKARTETNIGLNSLSVSGLALKLVRNIFEKPHNQNVLVVGAGSLATSLINNLYKNGINKINLVNRSIKKIKLLDNYEIISSSFDSLHDALGIADIVIASAETDMPLIGKGAIENALKKRQNKPILLIDLGVPRNIEEEIRNIEQAYLFTIDDIEKITQENYGQRSIEAEKAMNLIVLESQRVLDSLSLKTFKDKINIQLEEFLNGLSLKEIEQFKFSKDYAQLAKSIKEMNIENPEFNNFKEIKNIDNHIIESMIKRFFDNA

SEQ ID NO: 95187 - protein, 410 aa, Unknown
  Bacterial polypetide isolated from the Sargasso Sea
MELQLFGINHKTSDVSEREKFIINESNQILLDNHLKNIFNDKLESFFGISTCNRTEFYYFGELSISSNIFDEVMNILGKDDINKNNFYFLDRHDALVHMCKVASGIDSQVLGEQEILGQFKKALKIAQELKIVNGKLLTLSNKVLEISKKARTKTDIGLNSLSVSGLAYKLVKNIFEEPKDQNILIVGAGSLAHSVMENLFKNGINKIKSVNRSVKKIKLDNDYELISSSLESLHDELEFADIVIASSATELPLIGKGAVENALKKRKYKPMLLIDLGVPRNIEDETRKIEQVYLFSIDDIEKITQENYGQRSIEAEKAMNIIALEARNALDSFSLKHTKDRISIQLEEFLKGLSPQEIIQFKDSKDFSGLINSIKTINIENPKYNNFEDIKKLDDHIVESMIKRFIENA

SEQ ID NO: 95188 - protein, 188 aa, Unknown
  Bacterial polypetide isolated from the Sargasso Sea
MELQLFGINHKTSNVSEREKFIINHSNLVLLDNNLKKNYTNDFESFFGISTCNRTELYILGKAGISEKIFNEVSKILKLDDIPKDSFYFLDGHDALVHMCKVASGIDSQVLGEQEIFGQFKKAVKTAQGLEIINAKLLNLSNKVIEIAKKARTRTNIGLNSLSVSGLALKLTRNIFEKPHNQNVLVVG

SEQ ID NO: 95189 - protein, 68 aa, Unknown
  Bacterial polypetide isolated from the Sargasso Sea
MQKALSRMGPDFSARERKVVEALTKGIINKILHTPVTKWRSPQSREERQASLKIVEKLFSLVEEEKNS

SEQ ID NO: 95190 - protein, 230 aa, Unknown
  Bacterial polypetide isolated from the Sargasso Sea
KGARSITVVNRTVSKAEALAKDFPDLVITCCGLDQLDAQLACNSLLFTSTGADEPIINRARLDVIQRQKRLMLVDIGVPRNISSDAAEVSGTLSYDVDDLQEVVERNVAARQQLAQQAEVLLQEDRQAFLDWWDGLEAVPTINRMRQQFEEIRKQELLKALSRMGSDFSQREKQVVEALTKGLINKILHGPTTALRAPQHRQQRLDSMAAVQRLFDLPGDEAERDRSDAN

SEQ ID NO: 95191 - protein, 304 aa, Unknown
  Bacterial polypetide isolated from the Sargasso Sea
SSVQSIGKSLHKLIQVSLFAAKRVRSETSLGNRVDSIGSLVIKLGKNLFQDLDNRSALILGTGEISQILISNLKNVGVSEILIASRDIKNAITFADKNNCRPIPLEDINQHLLKADIVFSSTGSSDFIIKKEDIEIALEDRRDSIMFFIDIAVPRDIDPRVGDIDSCYLYNLDDLKSIIDDDVSENNRNLKEASLIIESSLNNYVHWENSDNVKDIITRMRKTVEDIVEKEFKNASTTNVDKSLIAKRISNKILHVPTQNIKNEANLENNLYISVLSEIFDLDKDGDDSNLLKIEDEKTFKNRN

SEQ ID NO: 95192 - protein, 217 aa, Unknown
  Bacterial polypetide isolated from the Sargasso Sea
MIIARIFPKKSQNFKNAKPFFQKIGDSMDSGGWIRLFSLWTLIVAGIVLNMDFENRYVYWSWSGWESGFIKLVVASVLYFYFLNPNNLWIIGSKRLQNKEISIHALIAFILLIFGYVGLDSMVPNFFGIFPYFTAFLSCLLIFQFPLILDGDKGVWNNFDWNNKVQYFSLSLILMIASVFLGVFLDDPIMSTAGAVSVAFPLVGLTWPNHVRHLQRG

SEQ ID NO: 95193 - protein, 120 aa, Unknown
  Bacterial polypetide isolated from the Sargasso Sea
MTKNIINARVTFKKSPIHVLERFSLGDSENAYKSFKDHTGLSECVILQTCNRVEIFGSGNNFDREEIKKTWASLSGLEENSFKDNLEWSQDSDVYEHLLKLTSGLDSMVVGEEQIMTQIK

SEQ ID NO: 95194 - protein, 84 aa, Unknown
  Bacterial polypetide isolated from the Sargasso Sea
MTIFALGINHKTAPVSLREQVAFAPEQILDALRDLTTTTQVSDAVILSTCNRTELYFSGSPEQSKQVIDWLSKFHQLDWPNCSI

SEQ ID NO: 95195 - protein, 272 aa, Unknown
  Bacterial polypetide isolated from the Sargasso Sea
MHIVVVGLSHRTAPVEVREKLSIPDQSITESLKALKAFSDVLEVSILSTCNRLEIYALVKDKNTGISSIKEFISDYSGIIFEDLNPHLFCFRQEDAVLHLMKVSAGLDSLVLGEGQILSQVKKMMRLGQENQSTGPILNRLLTQSVSTGKKVRSETSLGTGAVSISSAAVELAQLKIGQEKGFDTLVSLESEKVLVVGAGRMSRLLITHLKSKGCNKLILVNRNIDRALNLALDFPDLEIICKGLNELDENISLSSLVFTSTASEEPIIDFA

SEQ ID NO: 95196 - protein, 201 aa, Unknown
  Bacterial polypetide isolated from the Sargasso Sea
MVGLISINYKIAPLDIREKFYFDSPEKIVFNNLLKKKVGCEGLMIISTCNRTEIYFEFENHVGEEKKFLHAIVKELVEFKKFKDSLSPYLNNYTGSYDVANHLFRLVSGLESMIIGEFQIVEQLKEAYYFSKKHKMLGPILSRMIQKSLETGKYIRTNTEIGRGAVSVSYAAVEQITSKYNLSESNFLCVCLGEHQNYLFV

SEQ ID NO: 95197 - protein, 197 aa, Unknown
  Bacterial polypetide isolated from the Sargasso Sea
MHIVVVGLSHRTAPVEVREKLSIPEQSISESLKTLSINSDILEVSILSTCNRLEIYALVREINIGISTIKEFLTDYSSVNFEDLNPHLFDFRQEEAVLHLMKVSAGLDSLVLGEGQILSQVKKMMRLGQENQSTGPILNRLLSQSVSAGKKVRSETNLGTGAVSISSAAVELAQLKIGQDQGVDGLVSLKSEKSLVV

SEQ ID NO: 95198 - protein, 272 aa, Unknown
  Bacterial polypetide isolated from the Sargasso Sea
GHFVESFFALSTCNRTEIYYFGEPGTTILIAQKTLEFLGCDDYVRDSLYFFNDKAAIEHMCCVASGLDSQVLGEQEILGQFKKSVQNFTKLGLLNKQLLKATDEIISIAKAARTETKVGYNPLSVSGLSLKIVQEIFEDPTQQKLTIVGAGQMAMNVIENFYENGIKNIQAVNRSKKFLQINNSFSLVTNNLSKLGSLIQTTDILVTSVNSPLPIIGKGLIEDAMRLRANKPMLLIDLGVPRNVEDQVRDLEYAYLFTIEDIELVTQENLDE

SEQ ID NO: 95199 - protein, 293 aa, Unknown
  Bacterial polypetide isolated from the Sargasso Sea
MLQLILREKLVFDKDSIPRALTDIRKIQGVNEVVLISTCNRTEIYTESTSDNTEIINWLNSNQSIEKDCEPYMYSYCDEQAVKHLFNVTSGVDSMVIGENEILGQVKEAYKIADQNQCLASSLKRLFEFSFSVAKEVRTTTDIGSNPVSFMFTSMTLIKKIFEDISSKRALVVGSGYMVKLAIKYLQANNLHNITLTNRNYDKGSKIAKDNQCNYSRLQYLPNIISSHDIIISCTSSTIPIIGKGMMENCVNNTNAKPYVIIDLGVPRDVEPEINELDNIYLYSIDDLGKVIE

SEQ ID NO: 95200 - protein, 315 aa, Unknown
  Bacterial polypetide isolated from the Sargasso Sea
MTLAFVGGTHRTVPLPLRERLAFSTDQAAEALCCFRDRFPGREGVLLSTCNRVELYTAGESDVLPLPREQLVGFLAESRGIDAEVLSPVLFGETDEAVVRHLFSVASGLDSMVLGEPQIMSQVKQALAIAQDSQTTGPLTGEMFQAALRTAKRVATETAIGRERLSIPSIAVSDFVAGVFERLDDKKVLLLGAGKMARETLRYLRDAGAKDVTIINRTSERASTLASELQARPSTFDRLGEELVVADLIVSTTSATEPIITNDYYHSVEKSRHGRPLVILDLAIPRDIDPDIGKSPDVWLYSIDDLGRTCEANRK

SEQ ID NO: 95201 - protein, 189 aa, Unknown
  Bacterial polypetide isolated from the Sargasso Sea
MHIVVVGLSHRTAPVEVREKLSIPDQSITESLKALKAFSDVLEVSILSTCNRLEIYALVKDKNTGISSIKEFISEYSGIIFEDLNPHLFCFRQEEAVLHLMKVSAGLDSLVLGEGQILSQVKKMMRLGQENQSTGPILNRLLTQSVSTGKKVRSETNLGTGAVSISSAAVELAQLKIGQEKGFDTLVSL

SEQ ID NO: 95202 - protein, 148 aa, Unknown
  Bacterial polypetide isolated from the Sargasso Sea
MSLVTIGMNHKTASLDIREKISVDKDESHIILKKLQDMPLVDEAFILSTCNRTELYLEIDDLQYVENISDWLLRHKGLTPEDISENMYIYSDSFVVRHALNVACGLDSMVIGESQILRQFKDAFSEASNAGTIGKNLNRLFQYAFLPQ

SEQ ID NO: 95203 - protein, 157 aa, Unknown
  Bacterial polypetide isolated from the Sargasso Sea
MHLAVVGLSHRTAPVEVRERLSIPEHHLETSLQSLRSHEQVLETSILSTCNRLEIYSLLRHPEDGVAAIRDFLANHSGLADPDLKPHLFALHHEEAIQHLLRVSAGLDSLVLGEGQILSQVKKMYRLGQDHKSIGPILNRLLNQAVSTGKRVRRKRT

SEQ ID NO: 95204 - protein, 278 aa, Unknown
  Bacterial polypetide isolated from the Sargasso Sea
TILILLLFFHTVYQSERKSSIITLGLSIHSCPVEIREKMAVPADRFNEAVTSLVENPHIEEAAILSTCNRMEVTIVGLSYDRAVAELENWMSKWSGVELSELREHFFLLKDRDACTHLLAVSGGLDSVVLGEGQILAQVKSVFQMGEGVKGFGRHLNGLFKAAIVAGKRVRNETSIASGAVSVSSAAAELLQMKLPGESYEGTKVMIVGAGTMSKLLVKHLESKRCTEMTILNRTKPRAEALAEEFPNVNMKIHLMEDFIPLAAEHDIIFTASSSMEP

SEQ ID NO: 95205 - protein, 235 aa, Unknown
  Bacterial polypetide isolated from the Sargasso Sea
IHQLKVTNRTFANAAKLAEQFQASVFPFEKLYDELPDSDIVISSTGAREPILTPERVRQSLRKRRGRPMFFIDIAVPRDIDPTVNELSGVYCYDIDDLQGVVEQNREERREQSNLAEEIIRKELEKVMLWFETQSVIPTVKSLRESFQETVDVELEKTLAKLGSLTEKQQAEVEKMVRVLTNKLLHKPSTRLKHLSGREDLYLYLETLSELFDLNPSNNVEEASPQPALKLLKKQ

SEQ ID NO: 95206 - protein, 146 aa, Unknown
  Bacterial polypetide isolated from the Sargasso Sea
MQLQLFGINHKTSKLSERELFIINDSNQDDFINFFREEFGHFVESFFALSTCNRTEIYYFGEPETSILIAQKTLEFLGCDDYVRDSLYFFDDKAAIEHMCCVASGLDSQVLGEQEILGQFKKSVQNFTKLGLINKQLLKATDEIIS

SEQ ID NO: 95207 - protein, 183 aa, Unknown
  Bacterial polypetide isolated from the Sargasso Sea
MHIVVVGLSHRTAPVEVREKLSIPDQSIKESLTALRAFSDVLEVSILSTCNRLEIYALVKEKNTGISSIKEFISDYSGIIFEDLNPHLFCFRQEEAVLHLMKVSAGLDSLVLGEGQILSQVKKMMRLGQENQSTGPILNRLLTQSVSTGKKVRSETNLGTGAVSISSAAVELAQLKIGQERGI

SEQ ID NO: 95208 - protein, 242 aa, Unknown
  Bacterial polypetide isolated from the Sargasso Sea
LVVGAGRMSRLLITHLKSKGCNKLILVNRNMDRALNLAVDFPDLEIVCKGLSDLDENISISSLVFTSTASEEPIIDLAKIDKLNLNNKLKFIDIGVPRNISSDVKQHKFVQSFDVDDLQEVVSRNQEFRKKIAKEAESLVEEERIIFLEWWASLEAVPVINKLRSDLELIRKEELQKALSRMGPDFSARERKVVEALTKGIINKILHTPVTKLRSPQSREERQASLKIVEKLFSLVEEDRNS

SEQ ID NO: 95209 - protein, 262 aa, Unknown
  Bacterial polypetide isolated from the Sargasso Sea
MTLRIIGLNHHNASLDYREKLAFSDEEIQSCLKDLIANDQIKEAVILSTCNRTEFYLQTNEEGEEYTKTWLKKNKNINKNTEDLLFSLKGEKAIIHLSRVACGLDSMILGEPQILGQLKNAYKSSVELGAITKDFSKLFDHIFRLAKKIRTNTNISNSPVSVSYAAVILANQFFSRLDNHSALLIGAGEAIELVAKHLVNKKIDKLFIANRNINKAQELAKRYGGYALDLDSLDGVIEITDLILSSTASDHYILKKFQIQKA

SEQ ID NO: 95210 - protein, 311 aa, Unknown
  Bacterial polypetide isolated from the Sargasso Sea
RVTFRKSPIHVLERFTLGDIDNAYSSFQEHTDLKECVILQTCNRVEIFGSGNKLDIEKIKKVWASLSGLEEHAFQDNLEWSKDSDVYDHLLKLTSGLDSMVVGEEQILGQIRNSIASARSNKSSGEHLNTLFDKAIRVGTRVRNSTGISKGSISIGSMAVKLAEENVDDMKLKHILLIGTGDAAALVAKSLTKRGYQFSITSRTIERSTSFSKTIGGTPIDFNKILSGFGKYDIVFVATTAPYFLVTHERIEKALNEKNSGMMILDLSNPRTVDVKVAELSGIKLMNIDQIAEMVDKNMRSRMGQKTSAEQ

SEQ ID NO: 95211 - protein, 205 aa, Unknown
  Bacterial polypetide isolated from the Sargasso Sea
MTKNIINARVTFKKSPIHVLERFSLGDSENAYKSFKDHTGLSECVILQTCNRVEIFGSGNNFDREEIKKTWASLSGLEENSFKDNLEWSQDSDVYEHLLKLTSGLDSMVVGEEQIMTQIKDSIQSAKKLKVSGESLNTLFDKAIRVGTRVRTSTGISKGSISVGSMAVKLAEENVDEMKSKKILLIGTGEAATLVAKSLKKRGYP

SEQ ID NO: 95212 - protein, 160 aa, Unknown
  Bacterial polypetide isolated from the Sargasso Sea
MHIVVVGLSHRTAPVEVREKLSIPDQSITESLKALKAFADVLEVSILSTCNRLEIYALVKDKNTGISSIKEFISEYSGIIFEDLNPHLFCFRQEEAVLHLMKVSAGLDSLVLGEGQILSQVKKMMRLGQEKSSTGPILNRLLTQSVSTGKKVRSETNLGT

SEQ ID NO: 95213 - protein, 131 aa, Unknown
  Bacterial polypetide isolated from the Sargasso Sea
MHIVVVGLSHRTAPVEVREKLSIPDQSITESLKALKAFADVLEVSILSTCNRLEIYALVKDKNTGISSIKEFISEYSGIIFEDLNPHLFCFRQEEAVLHLMKVSAGLDSLVLGEGQILSQVKKMMRLGQEN

SEQ ID NO: 95214 - protein, 149 aa, Unknown
  Bacterial polypetide isolated from the Sargasso Sea
RRHKPMFFVDLAVPRDIEKQVAELEDAYLYTVDDLQSIVLQNLQNRQEAAAEAEQMILQGVSEFSQWLSLHGQLDVVRDYRDKGEAIRDELLAKAGKQIAAGQDPEKVLAELATKLSNRLMHAPTKALRQLLQDEQPQQQSLINTLLDL

SEQ ID NO: 95215 - protein, 200 aa, Unknown
  Bacterial polypetide isolated from the Sargasso Sea
PDSDIVISSTGARKPILTPERVRQSLRKRRGRPMFFIDIAVPRDIDPTVNELSGVYCYDIDDLQGVVEQNREERREQSNLAEEIIRKELEKVMLWFETQSVIPTVKNLRESFQETMDLELEKTLAKLGSLNEKQQAEIEKMVRVLTNKLLHKPSTRLKHLSGREDLHLYLETLSELFDLNPSNNVEEASPQPALKLLKKQ

SEQ ID NO: 95216 - protein, 146 aa, Unknown
  Bacterial polypetide isolated from the Sargasso Sea
MNFTLLGWNFRSTPLEIRDRLSLTEQEQLELIQQINARCGIQESVLLSTCNRTELYLYNMERPAEELLELLQKRWGMPELLETHYLLKDEEAVFHLFRVASSLDSMVVGEPQILGQLKDAFGRFHENGLIGRFLYAMFTPCFFDCQ

SEQ ID NO: 95217 - protein, 156 aa, Unknown
  Bacterial polypetide isolated from the Sargasso Sea
NKLKFIDIGVPRNISNDVKQHEFVKSFDVDDLQEVVSRNQEFRQKIAKEAESLVEEERIIFLEWWASLEAVPVINKLRSDLELIRKEELQKALSRMGPDFSARERKVVEALTKGIINKILHTPVTKLRSPQSREERQASLKIVEKLFSLVEDDKNN

SEQ ID NO: 95218 - protein, 220 aa, Unknown
  Bacterial polypetide isolated from the Sargasso Sea
AKHLLEQGAEKITVANRSYDKAAALASQFNGEAVSLAQVPQALANADVVISSTASTLPIVGKGMVEQALKKRRHKPMFFVDLAVPRDIEEQVAELEDAYLYTVDDLQSIVLQNLQNRQEAAAEAEQMILQGVNEFNSWLSLHGQLDVVRDYRDKGEAIRDELLAKAGKQIAAGQDAEKVLAELATKLSNRLMHAPTKALRQLLQDEQPQQQSLINTLLDL

SEQ ID NO: 95219 - protein, 236 aa, Unknown
  Bacterial polypetide isolated from the Sargasso Sea
MELQLFGINHKTTKLSERELFIINDSNQEDFKNFFQSAFGNSIDSFFALSTCNRTEVYIFGSSTSATKIAEKTLEFFGSSDSLNNDLYFFNDNEAIEHMCNVASGLDSQVLGEQEILGQFKKSIQTYTALGSLKGEFQRLTDDIISIAKAARTETQIGFNSLSVSGLSLKIVQEIFEDPTQQKLTIVGAGQMALSVIENFHNNGIKSINAVNRSKKTLTINNSLSIETTHLSQLGA

SEQ ID NO: 95220 - protein, 93 aa, Unknown
  Bacterial polypetide isolated from the Sargasso Sea
MAINVLGINHKTAPIEIREKLVFDKESLPHALTDIKNIDGVNGVILLSTCNRTEVYTENDYDNSRIIEWLKSQNMTNDISDFTYNYYEEKAIK

SEQ ID NO: 95221 - protein, 276 aa, Unknown
  Bacterial polypetide isolated from the Sargasso Sea
MIGLISINYKISPVEVREKFYFEDKEKIDFYEFVSKQFPIDGIVILSTCNRTEIYYEYENYLGQEKRIFHVIMKCLVEYKKYSEGLSPYAIKKTGSIDVSKHLFRLISGLESMVVGEFQIVDQLKEAFYFSKKKKILGPILSRIFQKSFETGKDVRSNTKISEGAVSVSYAAVEIISKKYDLKKSSILCVGTGETSKLSIKHLLKKKIKNIVLANRTDKKAENFANSYNLDFVSFKNYKKCFSKIDIAIFSTSSSSPLISFSEVSDLMKKKEKQKA

SEQ ID NO: 95222 - protein, 275 aa, Unknown
  Bacterial polypetide isolated from the Sargasso Sea
EAVFHLFRVASSLDSMVVGEPQILGQLKDAFGRFQENGLTGRFFYAMFTRAFSIAKKIRTETSIGDNAVSISYAAVELAKRIFDDIRQQKVLVIGTGEMAELAIRHLLRTGIHQLKVTNRTFANAAKLAEQFQASVFPFEKLYEELPDSDIVLSSTGARVPILTPERVRQSLRKRRGRPMFFIDIAVPRDIDPTVNELSGVYCYDIDDLQGVVEQNREERREQSNLAEEIIRKELQKVMLWFETQSVIPTVKSLRESFQETVDVELEKPLQSLGR

SEQ ID NO: 95223 - protein, 414 aa, Unknown
  Bacterial polypetide isolated from the Sargasso Sea
MAINVLGINHKTAPIEIREKLVFDKESLPHALTDIKNIDGVNGVILLSTCNRTEVYTENDYDNSKIIEWLKNQNMTRDISDFTYNYYEEKAIKHLLNVTSGIDSMVVGENEILGQVKHAFKIADSNNMINTPLKKLFEFSFSVAKQVRTDTDIGANPVTFMFTAMTLIKKIFEDFNSKRATIVGAGHMSKLAIKYLQSHGINDIRLTNYNYDKGQKVAKEHGCIYSKIQYIGNLIATSDIIITSTSSSTPVIGKGLMESCIKTSKNLPVVIIDLGVPRDVETEISSLDNVFLYSIDDLGEVISKNFKLREESVMEAKKIIDNKIDEFKQWLIQSDSEKLVKAYRGFVDDITHGAIIKTKKMIESGENIDQAIDYLASTLKNKLTHETTTKLREILPLLDESSFKKAEEIFKKNK

SEQ ID NO: 95224 - protein, 419 aa, Unknown
  Bacterial polypetide isolated from the Sargasso Sea
MTKNIINARVTFKKSPIHVLERFSLGDSENAYKSFKDHTGLSECVILQTCNRVEIFGSGNNFDREEIKKTWASLSGLEENSFKDNLEWSQDSDVYEHLLKLTSGLDSMVVGEEQIMTQIKDSIQSAKKLKVSGESLNTLFDKAIRVGTRVRTSTGISKGSISVGSMAVKLAEENVDEMKSKKILLIGTGEAATLVAKSLKKRGYPFFISSRTVERSTSFSKTVGGEPVDFNSILTGFENYDIVFVATTAPYFLVTFERIQKALETKHSGMMILDLSNPRTVDEKVAELRGIKLMNIDQIAEMVDKNMRSRIGQKNSAEEIIKEELPVLEATMKRLEAEPIVKDVFKSTDAIRVKELEKAFSMLGELDDSQKKIIEELTKSVAENIMSTPMNNLRKETEHGNSDVINAASKLFNFKKEEN

SEQ ID NO: 95225 - protein, 138 aa, Unknown
  Bacterial polypetide isolated from the Sargasso Sea
MAINVLGINHKTAPIEIREKLVFDKESLPHALTDIKNIDGVNGVILLSTCNRTEVYTENDYDNSKIIEWLKSQNMTNDISEFTYNYYEEKAIKHLLNVTSGIDSMVIGENEILGQVKHAFKIADSNNMINTPLKKLFE

SEQ ID NO: 95226 - protein, 419 aa, Unknown
  Bacterial polypetide isolated from the Sargasso Sea
MTKNIINARVTFRKSPIHVLERFSLGDSENAYRSFKEHTNLSECVILQTCNRVEIFGSGEKFDKEKIKKTWASLAGLEENTFHENLEWSEDSDVYEHLLKLTSGLDSMVVGEEQIMTQIKDSIQSAKKLKVSGESLNTLFDKAIRVGTRVRTSTGISKGSISVGSMAVKLAEENVDEMKLKKILLIGTGEAATLVAKSLTKRGYPFFISSRTLERSTSFSKTVGGEPVDFNSILTGFENYDIVFVATTAPYFLVTFERIQKALETKKSGMMILDLSNPRTVDEKVAELRGIKLMNIDQIAEMVDKNMRSRIGQKNSAEEIIKEELPVLEASMKRLEAEPIVKDVFKSTDAIRVKELEKALGMLGELTDSQKKIIEELSKSVAENIMSTPMNNLRKETEHGNSDVINAASKLFNFKKEDN

SEQ ID NO: 95227 - protein, 155 aa, Unknown
  Bacterial polypetide isolated from the Sargasso Sea
LVDIAVPRNVHANCSEDANTVVYNVDDLKELAELNKAKREAAAKEAEALLLEEQRNFEAWRDSLETVPTIKRLRQKAENIRSAELDKAMAKLGDGLTNKQKKAVEELSRGIVNKLLHGPMAALRSDGSDPTAVAMTLVNMHALERMFDLRNVEEK

SEQ ID NO: 95228 - protein, 238 aa, Unknown
  Bacterial polypetide isolated from the Sargasso Sea
MELQLFGINHKTTKLSDRELFIINDSNQEDFINFFLENFGESIDSFFTLSTCNRTEVYIYGASSCISSIAEKTLELFGSSDALKNDLYFFSGNEALEHMCLVASGLDSQVLGEQEILGQFKKSVQIYIELQCLKGEFKQLTDDIISIAKAARTETQIGFNPLSVSGLSLKIVQEIFEDPAKQNLTIVGAGQMAISVIENFYNHGITKINAVNRSKKILTINDSLSMETTPLSQLWARS

SEQ ID NO: 95229 - protein, 147 aa, Unknown
  Bacterial polypetide isolated from the Sargasso Sea
MTLRIIGLNHHNASLDYREKLAFSHEEIQSCLKDLVASDEIKEAVILSTCNRTEFYLQANEEGEEYTKTWLKKNKNINKNTEDLLFSLKGEKAIIHLSRVACGLDSMILGEPQILGQLKNAYKSSFESGAITKDFSKLFDHIFRLAK

SEQ ID NO: 95230 - protein, 340 aa, Unknown
  Bacterial polypetide isolated from the Sargasso Sea
MTISVIGLNHKSANIDIREKFSFTADNAALLLRRIKKVRDILEVIVVSTCNRTEIYCESANGSDDIKNWLLSEKEYKSFARHLYVHQEEDAIEHLFKVVAGLDSMVIGESEVLGQVKTAYKIALDNKSIDGKLKRLFEYSFSVAKNVRTNTDIGGNAISFMYTSILLIKKIFSTVEEKKCLLIGAGEMTELALKYLKSNNVNDITICNRKEEKGKKLALENSCRYSNLNNLSNIIHDYDVIITSTSSSLPLIGKGNVENALIKRNNDSIVIIDLGVPRDVESQIKTLDNVYLYTIDDLGQIIEKNYKIREKSIKDAEEIIKFKIVEYKNWLSENNSTEII

SEQ ID NO: 95231 - protein, 166 aa, Unknown
  Bacterial polypetide isolated from the Sargasso Sea
LVRVENISLNNKLKFIDIGVPRNISNDVKHHASIESFDVDDLEEVVSRNQEFRQKIAKEAESLVKDERIIFLEWWASLEAVPVINKLRSDLELIRKEELQKALSRMGPDFSARERKVVEALTKGIINKILHTPVTKLRSPQSRDERQASLKIVEKLFSLVDDEQNF

SEQ ID NO: 95232 - protein, 402 aa, Unknown
  Bacterial polypetide isolated from the Sargasso Sea
FSSEQATEALALFQKQFPGSEAVLLSTCNRIELYAADEERRGPPPPDELAMFLAECRGIDPTNAGRVLGGEQGTAAVKHLFCVAAGLDSMVLGEPQIVAQVKQAWQLAQQSGTTGPLTGELFQAALRAAKRVTTETAVGRERLSIPSIAVADFASGVFERFDDKRVLLIGAGKMAAETLRYLRDAGAQNIRIINRSLERAHSLAQRLEAQTGDYNNISRELVDADLVVSTTGASEPVVTLDLYQNVEDQRQGRPLVVLDLAVPRDFDSRIGTRPGVWLYSIDDLGQACDSNRRRRQNQLPAALTIVDEETRRFMGDLHHRSTVPVIEQLRAGWNETGEVELDRLFRKLPELDESSQKEIRQAFERYAAKMLHPPMASLRSESKAGPPHGLLEALRRLFDLKE

SEQ ID NO: 95233 - protein, 290 aa, Unknown
  Bacterial polypetide isolated from the Sargasso Sea
MRERVTFSPDTLDQALESLLAQPMVQGGVVLSTCNRTELYLSVEEQDNLQEVLIRWLCDYHGLNEDDLRKSLYWHQDNEAVSHLMRVASGLDSLVLGEPQILGQVKKAFADSSRGHLNVSELERMFQKSFSVAKRVRTETDIGASAVSVAFAACTLARQIFESLSSVTVLLVGAGETIELVARHLREHKVRKMVIANRTRERAQALADEVGAEVIALSDIDERLKEADIIISSTASPLPIIGKGMVERALKARRNQPMLLVDIAVPRDVEPEVGKLANAYLYSVDDLQNI

SEQ ID NO: 95234 - protein, 295 aa, Unknown
  Bacterial polypetide isolated from the Sargasso Sea
AFSTAKRVRTETSIAINAVSVSYAAVELAKHIFEDLSKQSVIVIGAGEMAELAVQHMIRSGIYQLFVTNRTFASAAKLAEKFQGVAVPFEHLNRHLHQADIVISSTGSRKYIITKELVKKCLVKRTGNPMFFIDIAVPRDIDPEINDQHGAFCYNIDDLQTIVWKNQEERKKQSIKAEEIVEEELSKLEIWFKSLSAVPTIRSLRKVFHFTAEEELQKVFKRIKKMPESERKEIENFAYRLVNKLLHDPSRNLKHLAQEEDSHLYMESIVKLFGLTPDSLGKNVQQKLRLKIIKS

SEQ ID NO: 95235 - protein, 241 aa, Unknown
  Bacterial polypetide isolated from the Sargasso Sea
HGVFQHAFGGAKQIRTETGIGSNPGSVAYTAVSLSRRLFSKLDTKTALLIGAGDTIELVARHLQEQGISKLIVANRSLGRARELAEKVSAKPLLLSDLSSHLHLADIVISSTGSQLPVLGKGAVESAITQRKHRPMFMVDIAVPRDIEPEVGLLPDVYLYTIDDLHEVVDVNQKERELEAQKAMGIVQTGVEQFKKQLNVRSSTQIIVGLRQSAEALRDQEVERALLQLEKGAAPEAIIQQ

SEQ ID NO: 95236 - protein, 312 aa, Unknown
  Bacterial polypetide isolated from the Sargasso Sea
NRLEIYALVKDKNTGISSIKEFIADYSGIVFEDLNPHLFCFRQEDAVLHLMKVSAGLDSLVLGEGQILSQVKKMMRLGQENQSTGPILNRLLTQSVSTGKKVRSETNLGTGAVSISSAAVELAQLKIGQEKGLDTLVSLESEKVLVVGAGRMSRLLITHLKSKGCHKLILVNRNIDRALNLAVDFPDLEIVCKGLNELEENISISSIVFTSTASEEPIIDLATIKKLNLSNRLKFIDIGVPRNISNDVKQHEFVKSFDVDDLQEVVSRNQEFRQKIAKEAESLVEEERIIFLEWWASLEAVPVINKLRSDWS

SEQ ID NO: 95237 - protein, 201 aa, Unknown
  Bacterial polypetide isolated from the Sargasso Sea
MNFTLLGWNFRSTPLEIRDRLSLTEQEQLELIQQINARCGIQESVLLSTCNRTELYLYNMERPAEELLELLQKRWGIPELLETHYLLEDEEAVFHLFRVASSLDSMVVGEPQILGQLKDAFGWFQENGLTGRFLYAIFTRAFSIAKRIRTETSIGDNAVSISYAAVELAKRIFDDIRQQKVLVIGAGEMAELAIRHLCEPG

SEQ ID NO: 95238 - protein, 317 aa, Unknown
  Bacterial polypetide isolated from the Sargasso Sea
FIRVASGLDSQVLGEPQILGQVKESFDKAEGMGCVGKELTSLFQVGIRYAKKIRSETKIGENPVSIAYAAVFLASKIFENLSSKKALLIGAGETISLVTEHLKKAGIKDLTIANRTLEHAQELAFQQGTDAIHLQDIEEKLSSIDIIVSSTGSEDTILKKRDFEEIMKLRKRNPIFIVDIAVPRDIEASVQEVPNVYLYTIDHLTEVINLNIGKRQQAAEAAEEYVSLGSKTYLQEKRVRSGNVLIKEYRNQVESIRQSELAKIKSLLSFKNNDIETIENFSQSLANKLTHEITTLIRSAIAEKHLDLLAELQHLYK

SEQ ID NO: 95239 - protein, 279 aa, Unknown
  Bacterial polypetide isolated from the Sargasso Sea
FSEAELTRKLLHPLFTRAFSTAKRVRTETTVASNAVSVSYAAVELAKHIFEDLSKQSVIVIGAGEMAELAVQNLMRNGITQLFVANRTFTSAAELAEKFQGIAVPFEHLDRHLHQADIVISSTGARKYIVTQELVKKCLLNRKGNPMFFIDIAVPRDIDPEINKLHGIFCYDIDDLQTIVSQNREERKKQSIEAEKIIEDELSKLEIWFRSLSAVPTIRSLRKSFHSTAEKELQKVFRRINKMPESERIEIEQFVHRLVQKLLHEPSRNIKKLAQEEDS

SEQ ID NO: 95240 - protein, 285 aa, Unknown
  Bacterial polypetide isolated from the Sargasso Sea
MNFTLLGWNFRSTPLEIRDRLSLTEQEQLELVQQINARCGIQESVLLSTCNRTELYLYNMERPAEELLELLQKRWGIPELLETHYLLKDEEAVFHLFRVASSLDSMVVGEPQILGQLKDAFGRFQENGLTGRFLYAMFTRAFSIAKRIRTETSIGDNAVSISYAAVELAKRIFDDIRQQKVLVIGAGEMAELAIRHLLRTGIHQLKVTNRTFANAAKLAEQFQASVFPFEKLYEELPDSDIVISSTGAREPILTPERVRQSLRKRRGRPMFFIDIAVPRDIDPTV

SEQ ID NO: 95241 - protein, 219 aa, Unknown
  Bacterial polypetide isolated from the Sargasso Sea
MRITVIGWNFKNTPIEVRERLALTQDQQIELANRLKENFKLGGILILCTCNRTELFLANAEQQLNQIIEILQKYWNIPELRESVYILQNLDASRHLFRVASSLDSMVLGEPQILGQLKDTFNYFSDAELTGKLLHQLFTRAFSTAKRVRTETNVASNAVSVSYAAVELAKHIFEDLSKQSVIVIGAGEMAELAVHHMMRSGISQLFVTNRTFASAAKLA

SEQ ID NO: 95242 - protein, 278 aa, Unknown
  Bacterial polypetide isolated from the Sargasso Sea
PPEVVSDALRDIRSLTDVSEVVLLSTCNRTELYIKRINDESLSNKLDHNTQNSLVQKTVKDVISWLASFHDFESSELERSIYSFSGMDVVRHLMKVSCGLDSLVLGEPQILGQIKSAFALAKDLKTVGPSLNGAFIAAFSIAKKVRTDTAIGENPVSVAYAATVLAERIFSDFQSLSILLIGAGRTIELVATHFHEKNVSRLTVANRTLDNALEIALKFGGKGVLLSEIPEQLETVDVVVSSTNSQLPLLGKGSVERALQRRKHQPMLLIDLAVPRDI

SEQ ID NO: 95243 - protein, 305 aa, Unknown
  Bacterial polypetide isolated from the Sargasso Sea
METHYLLKDEEAVFHLFRVASSLDSMVVGEPQILGQLKDTFGRFQENGLTGRFLYAMFTRAFSIAKRIRTETSIGDNAVSISYAAVELAKRIFDDIRQQKVLVIGAGEMAELAIRHLLRTGIHQLKVTNRTFANAAKLAEQFQASVFPFEKLYDELPDSDIVISSTGAREPILTPERVRQSLRKRRGRPMFFIDIAVPRDIDPTVNELSGVYCYDIDDLQGVVEQNREERREQSNLVEEIIRKELQKVMLWFETQSVIPTVKSLRESFQETVDVELEKTLAKLGSLTEKQQAEVEKMVRVMTNKL

SEQ ID NO: 95244 - protein, 321 aa, Unknown
  Bacterial polypetide isolated from the Sargasso Sea
SIPDQSITESLKALKAFSDVLEVSILSTCNRLEIYALVKDKNTGISSIKEFISEYSGIIFEDLNPHLFCFRQEEAVLHLMKVSAGLDSLVLGEGQILSQVKKMMRLGQENQSTGPILNRLLTQSVSTGKKVRSETNLGTGAVSISSAAVELAQLKIGQEKGFDTLVSLESENVLVVGAGRMSRLLITHLKSKGCHKLILVNRNIDRALKLALDFPDLEIVCKGLNELDENISISSLVFTSTASEEPIIDLAKIEKLKLSNKLKFIDIGVPRNISNDVKQHEFVKSFDVDDLQEVVSRNQEFRQKIAKEAESLVEEERIIFL

SEQ ID NO: 95245 - protein, 172 aa, Unknown
  Bacterial polypetide isolated from the Sargasso Sea
MHIAVVGLSHRTAPVEIRERLSIPEQTMETSLQSLKGNDQVIEASILSTCNRLEIYTLVRHPDLGVSAVSDFLSGHSGLGTGELSPHLFSYHHADAVDHLMRVAAGLDSLVLGEGQILSQVKKMMRLGQEHKSLGPILNRLLTQAVSTGKRVRSETNLGTGAVSISSAAVEL

SEQ ID NO: 95246 - protein, 229 aa, Unknown
  Bacterial polypetide isolated from the Sargasso Sea
MSVFIYGINFKTAPVEIREKTVLSGEKLESSLIEIRKKLANINEIFIVSTCNRTEFYYSTSSDASSNLETWLSETSGLSQSTLKDISYQHSADKVIKHFIRVASGLDSQVLGEPQILGQVKESFDKAEGAGCVGKELSSLFQVGIRYAKKIRSETKIGENPVSVAYAAVFLASKIFEDLSSKKALLIGAGETISLVTEHLKKAGIKDLTIANRTLENAQELAFQQGTDA

SEQ ID NO: 95247 - protein, 270 aa, Unknown
  Bacterial polypetide isolated from the Sargasso Sea
MKSLASRTRSGEAVIVSTCNRTELYCNNADKKDIIEWLEDYHQLNHDDLIPCIYAYEDQVAVKHLMRVASGLDSLVLGEPQILGQVKQAFVKAKEAGTTAVTIDRLFQNTFSVAKKVRTDTEIGAAAVSVAFAAVSMAKHIFSSLSTTKVLLIGAGETIELVAKHLKDNGVAAMVVANRTIERAQAMCEEFNATAITLQQIPDFLAKADIVISSTASPLPILGKGMVEKALKQRRHQPMLLVDIAVPRDIEAEVGELDDAFLYTVDDLHT

SEQ ID NO: 95248 - protein, 213 aa, Unknown
  Bacterial polypetide isolated from the Sargasso Sea
MSNLAAQFDAEAILLADVTERLPDADIVISSTGSQLPLLGKGAAEEAVKARRWRPMLMIDLAVPRDIEPQVAEIPDIYLYTVDDMREVIEENLRLRASEASKADEIVASGIEALKDGLLERQSADVVKTYRDSALALQQVELDKALKMLEKGADPEEVLGRLARDLTNKLIHAPTAGLRQLAKEGGKRDVSKMAAMLGLTDIDDERDEGATLQ

SEQ ID NO: 95249 - protein, 266 aa, Unknown
  Bacterial polypetide isolated from the Sargasso Sea
MQLLTIGINHHTAPVALRERVAFPLEQIKPALDTFKSVWLGRTARTAPEAAILSTCNRTELYCATDDLAAREAAIQWFSKYHNLPIDELAPHVYALPQSEAVRHAFRVASGLDSMVLGETQIVGQMKDAVRTASEAGALGTYLNQLFQRTFAVAKEVRSTTEIGAQSVSMAAAAVRLAQRIFDKVSNQRVLFIGAGEMIELCATHFAAQQPRELVVANRTAERGSRLAERFNGRAIPLSELPARMHEFDIIVSCTASTLPIIGLGA

SEQ ID NO: 95250 - protein, 143 aa, Unknown
  Bacterial polypetide isolated from the Sargasso Sea
MSVFVYGINFKTAPVEIREKTVLSGEKLESSLIEIRKKLANINEIFIVSTCNRTEFYYSTSSDASSNNLEAWLSETSGLSQSILKDISYQHSAEKVIKHFIRVASGLDSQVLGEPQILGQVKESFDKAEGAGCVGKELTSLFK

SEQ ID NO: 95251 - protein, 419 aa, Unknown
  Bacterial polypetide isolated from the Sargasso Sea
MSLLALGINHNTASVALRERVAFGPDCIDRALRELVAQPGVSEAVIVSTCNRTELYCSLAQGQGEQVLQWLQRFHGLDAAEVVSAIYQHQDEEAVRHLMRVACGLDSLVLGEPQILGQIKQSYAHAQQSEAVKGSLERLFQKSFSVAKRVRTDTEIGASAVSVAFAAVSLGRRIFSDLSQTKVLLVGAGETIELVARHLREQNVTQMMVANRTLQRAQLLAEEFGAQVMTLEEIPDYLHEADIVISSTASPLPIIGKGMVERALKARRFKPMFLVDIAVPRDIEAEVDELSDAYLYTVDDLQGIIEQNLETRKRAAAEAELIVQEERDDFMGWYRSQHSVDLIRDYRHQSQQVADEELQRALLALQQGENAEQALKALAHRLTNKLIHAPTQALRHAAAQGDHHQLAQLRQVLGLSQES

SEQ ID NO: 95252 - protein, 391 aa, Unknown
  Bacterial polypetide isolated from the Sargasso Sea
IGINHHTAPVALRERVAFPLEQIKPALDTFKSVWLGRTARTAPEAAILSTCNRTELYCATDDLAAREAAIQWFSKYHNLPIDELAPHVYALPQSEAVRHAFRVASGLDSMVLGETQIVGQMKDAVRTASEAGALGTYLNQLFQRTFAVAKEVRSTTEIGAQSVSMAAAAVRLAQRIFDKVSNQRVLFIGAGEMIELCATHFAAQQPRELVVANRTAERGSRLAERFNGRAIPLSELPARMHEFDIIVSCTASTLPIIGLGAVERAVKARRHRPIFMVDLAVPRDIEPEVGQLEDVFLYTVDDLGSIVREGNASRQAAVAQAEAIIETRVQNFMQWLDARSIVPVIRHMHTQADVLRRAEVERAQKMLARGEDPAAVLEALSQSLTNKLIHG

SEQ ID NO: 95253 - protein, 300 aa, Unknown
  Bacterial polypetide isolated from the Sargasso Sea
MTISVIGLNHKSASLDIREKYSFTGDACSLLLRRIKKMPEINEVLIVSTCNRTEIYTDSESGSDNIQNWLAGEKEYRPFISHMYVYREEDAIRHLFKVVSGLDSMVVGESEVLGQVKTSYKIALENKTIDSKLKRLFEYSFSVAKNVRTNTDIGGNAISFMYTSILLVKKIFSNIEEKKCLLIGAGEMTQLALKYLKSNNVNDITICNRKEEKGKKLAFENNCRYSHLNNLSNIIHEYDIIITSTSSSLPLIGKGNIESALDKRNNQSIALIDLGVPRDIESQIKNLDNVYLYTIDDLGE

SEQ ID NO: 95254 - protein, 304 aa, Unknown
  Bacterial polypetide isolated from the Sargasso Sea
MSLIIVGINHKTADVSLREKVAFPPEIISDALTEVQGLADISEVVLLSTCNRTELYVDGLSVKSSGADQSQNWERPLIQEKIDEIIDWLAGYHKLQPNQLRTSIYSFTGEEVVKHLMKVSCGLDSLILGEPQILGQIKSAFALSKELKLIGPSLSRTFNAAFSIAKEVRTDTAIGESPVSVAYAATLLAERIFSDLESLSILLIGAGRTIELVARHFAEKSVSRITVANRTLDNALEVADKFNGKGVLLSDIPEQIGGADIVVSSTNSQLPILGKGSVERALWRRKHRPMLLIDLAVPRDIETQ

SEQ ID NO: 95255 - protein, 417 aa, Unknown
  Bacterial polypetide isolated from the Sargasso Sea
MHLLTLGLNHRTAAVDLRERTAFSPEQLPDAVRSLTASSDVTEATILSTCNRTEIYCRQENPASAPVLDWLRDYGDLPSDFLNSSTYALPGEQAVQHAFRVASGLDSMVLGEPQILGQMKSAFSVAHQAGTTGKILNRLFQHTFSVAKQIRTDTAIGASAVSVAFAAVDLAKRIFSSLNEQTVLLIGAGETIELVARHLKQNEVRHIIVANRSIERAQALTEQLGSEAISLAEIPERLHQADIVVASTASTLPILGKGTVETALRQRRHRPMFLIDLAVPRDIEAQVDELEDVFLYTVDDLHKVVAENQASRQEAAVEAEKIIDFQVVRFMHWMRSLDSVPTIRSLRDQVETLREAELADAKRRLANGENPEQVLEHFSRNLSRKFSHAPSQALKQASQEGNASLISSTRRLFKLKP

SEQ ID NO: 95256 - protein, 322 aa, Unknown
  Bacterial polypetide isolated from the Sargasso Sea
MTLLALGINHKTAPVALREKVAFTPDSLVEALASLKKLEGVDESVIVSTCNRTELYVNTQDDTGQKLLQWLSDFHHLDVEEIANNSYVLAQDEAVKHIMRVASGLDSLILGEPQILGQVKQAFGDAKHSGMVSSEFDKLFQHTFSVAKRVRSETDIGANAVSVAYAAVQLAKHIFAELPKRSVLLVGAGETIELVAQHLKEQGVSCLAVANRTVARAEALAETLDASVFTLSQVPEHLKDFDIVISSTASQLPLIGKGMVEKALKQRKNMPMFLVDLAVPRDIESEVNELGDAYLYTVDDLQHIVQKNLENREQAAKEADKL

SEQ ID NO: 95257 - protein, 413 aa, Unknown
  Bacterial polypetide isolated from the Sargasso Sea
MNFTLLGWNFRSTPLEIRDRLSLTEQEQLELVQQINARCGIQESVLLSTCNRTELYLYNMERPAEELLELLQKRWGIPELLETHYLLKDEEAVFHLFRVASSLDSMVVGEPQILGQLKDAFGRFQENGLTGRFLYAMFTRAFSIAKRIRTETSIGDNAVSISYAAVELAKRIFDDIRQQKVLVIGAGEMAELAIRHLLRTGIHQLKVTNRTFANAAKLAEQFHASVFPFEKLYEELPDSDIVISSTGAREPILTPERVRQSLRKRRGRPMFFIDIAVPRDIDPTVNELSGVYCYDIDDLQGVVEQNREERREQSNLAEEIIRKELQKVMLWFETQSVIPTVKSLRESFRETVDVELEKTLTKLGSLNEKQQAEVEKMVRVLTNKLLHKPSTRLKHLSGREDLHLYLETLSELF

SEQ ID NO: 95258 - protein, 406 aa, Unknown
  Bacterial polypetide isolated from the Sargasso Sea
MHIAVVGLSHRTAPVEVREKLSIPEELVERSFNNLKKIDQILEVSILSTCNRLEIYSLVKDPQLGIEAIKSFLLEFSGLDDEILSPHLFNYVQEKAVSHVMRVSAGLDSLVLGEGQILSQVKKMVRLGQDHHSLGPILNRLLTQAVSTGKRVRSETNLGTGAVSISSAAVELAQLKLGQAHGRDQLMTLETEKVAVVGAGRMSRLLLQHLQSKGCCSLTLLNRTRKRAEDLSAAFPDIQIDCQLIDELDNCLSLSTLVFTSTAANEPIIDAEKLINIDRKPLLRLIDIGVPRNISSDAKSVSGIESHDVDDLQEVVSRNQEARQKLALEAEGLIEEECRVFLEWWDSLAAVPTINCLRSGLESIRKEELQKALSRMGPDFSARERKVVEALSKGIINKILHTPVTK

SEQ ID NO: 95259 - protein, 416 aa, Unknown
  Bacterial polypetide isolated from the Sargasso Sea
MSLVAIGINHKTATVDLREKVAFSPDKIHDAMKSLASRTRSGEAVIVSTCNRTELYCNNGDEADIIEWLEEYHGLDHQDVAPCLYNYHGQAAVRHLMRVASGLDSLILGEPQILGQVKQAFVKAKEAGTVALTIDRLFQNTFSVAKKVRTETEIGAAAVSVAFAAVSMAKHIFSSLSTTKVLLIGAGETIELVAKHLKDNGVASMVVANRTLERAQSMCEEFNATAITLAQIPDFLPKADIVISSTASPLPILGKGMVEKALKQRRHQPMLLVDIAVPRDIEPEVADLDDAFLYTVDDLHSIIEQNKASRKEAAEQAELITEEQSYLFMDWVRSLESVDSIREYRSQSMAIKDELVERALNKLAQGGDTEQVLIELANRLTNRLIHAPTQALTVASRQGDLNTLGQLRTALGLDKN

SEQ ID NO: 95260 - protein, 416 aa, Unknown
  Bacterial polypetide isolated from the Sargasso Sea
MSLVAIGINHKTATVDLREKVAFSPDTIHDAMKSLASRTRSGEAVIVSTCNRTELYCNNGDEADIIEWLEEFHGLEHKDVAPCLYNYHGQEAVRHLMRVASGLDSLILGEPQILGQVKQAFVKAKEAGTVALTIDRLFQNTFSVAKKVRTETEIGAAAVSVAFAAVSMAKHIFSSLSTTKVLLIGAGETIELVAKHLKDNGVASMVVANRTLERAQSMCEEFNATAITLAQIPDFLPKADIVISSTASPLPILGKGMVEKALKQRRHQPMLLVDIAVPRDIEPEVADLDDAFLYTVDDLHSIIEQNKASRKEAAEQAELITEEQSHLFMEWVRSLESVDSIREYRSQSMAIKDELVERALNKLAQGGDTEQVLIELANRLTNRLIHAPTQALTVASRQGDLNTLGQLRTALGLDKN

SEQ ID NO: 95261 - protein, 339 aa, Unknown
  Bacterial polypetide isolated from the Sargasso Sea
MHIVVVGLSHRTAPVEVREKLSIPDQSITESLKALKAFSDVLEVSILSTCNRLEIYALVKDKNTGISSIKEFISDYSGIIFEDLNPHLFCFRQEDAVLHLMKVSAGLDSLVLGEGQILSQVKKMMRLGQENQSTGPILNRLLTQSVSTGKKVRSETNLGTGAVSISSAAVELAQLKIGQENGFDTLVSLESEKVLVVGAGRMSRLLITHLKSKGCHKLILVNRNIDRALNLAEDFPDLEIVCKGLNELDENISISSLVFTSTASEDPIIDLAKIEKLNLSNEIKFIDIGVPRNISNDVKQHPSVKSFDVDDLQEVVSRNQEFRQKIAKEAESLVEEERI

SEQ ID NO: 95262 - protein, 435 aa, Unknown
  Bacterial polypetide isolated from the Sargasso Sea
MSVFVYGINFKTAPVEIREKTVLSGEKLESSLIEIRKKLANINEIFIVSTCNRTEFYYSTSSDASSNNLEAWLSETSGLSQSILKDISYQHSAEKVIKHFIRVASGLDSQVLGEPQILGQVKESFDKAEGAGCVGKELTSLFQVGIRYAKKIRSETKIGENPVSVAYAAVFLASKIFEDLSSKKALLIGAGETISLVTEHLKKAGIKDLTIANRTLEHAQELAFQQGTGAIHLQDIAGKLSSIDIIVSSTGSEDAILKKRDFEEIMKSRKRNPIFIVDIAVPRDIEASVQEIPNVYLYTIDHLTEVINLNIDKRQQAAEAAEEYVSHGSKTYLQEERVRSGNVLLKEYRGQVESIRQSELAKIKSLISFKNNDIEAIENFSKSLANKLTHEITTLIRSAIAENNLDLLAELKHLYKLESKSTESPKHKEKNDEPL

SEQ ID NO: 95263 - protein, 359 aa, Unknown
  Bacterial polypetide isolated from the Sargasso Sea
ISDLNKSAYVLQNLEASKHLFSVASSLDSMVIGEPQILGQIKDSFHYFSEEGLSGKLLHPLFTRAFSTAKRVRTETTVASNAVSVSYAAVELAKHIFEDLSKQSVIVIGAGEMAELAVQHLIRNGISQLFVTNRTFSSAAELAEKFQGLAVPFEHLNRHLHQADIVISSTGSRKYIITKELVKKCLHDRKGNPIFFIDIAVPRDIDPEINKLHGSFCYDIDDLQAVVSQNQEERKQQSFKAREIIEEELSKLDIWFRSLSAVPTIRSLRKSFHSTAEEEIQKILLSKKKMSASERKEIEHFVHKLVNKLLHGPSRNLKKLAQEEDSHLHMESIVKLFDLRPTSLEKIVNQKPKLKIIKS

SEQ ID NO: 95264 - protein, 414 aa, Unknown
  Bacterial polypetide isolated from the Sargasso Sea
MSLFALGLNHNTASLEKREKAYFSDNESKELLKEMLSLSFVEEAIILSTCNRTELYCELEDPEYMDELSKWVLDYKGLDKESYEELFYKLSDDKAVKHALNVASGLDSMVLGEPQILGQLKIAYKNAQEVGALGKNLNRLFQYAFSAAKEIRTDTKIGLNPLSIAGVAVSLTDEFYKDLSNKNALLVGSGETIFIAAKKLAQKKIGNITICNRSKQSANEIAKNISAQVAHISEISKFLTQADIIISATASNLPVIGKGAIETAMSKRKHKPIYIVDLAVPRDVEPEVKRIPNIYLYTIDNIQDLVSENYETRVKAANDASSIIDLKVQDYMNWRKAQTAFSVIRMYRNYADQIKNESLKKALQQLRNGKDPEEVIKQLSSNITSKLTHNPTQALNKAGQSSDRKVIELICDIF

SEQ ID NO: 95265 - protein, 418 aa, Unknown
  Bacterial polypetide isolated from the Sargasso Sea
MNLVAVGVNHTTADVELRERLAFSTQQAEVALASLREMPGVREAALLSTCNRTELYCLTDDVTPNFAQWLASSRNLSVERLSTVLYQHTGEQALEHMMRVAGGLDSLVLGEPQILGQMREAYARAHEAGLLNGELSRLFQEVFSVAKRIRTETGIGANPVSVAYAAVSFARHIFADLKKSRALLIGAGEMIELVARHLSEQQVQEITIANRTQERASELAAAVGGRGISLEELPVALERADILISCTAAPLPIMGKGMVERALKKRRHRPMFMVDIAVPRDIEPEVGELGDVYLYTVDHLQEAIQENVRSRQQAAQEASELIRDAIVRHRRQRREQDAVKVLRDYREQRKAMAESELEKALQQLRNGGDAEQVLRRFQHSLVNKWLHSPSVTLRKMAADGRAEALLLARELLLDDDQS

SEQ ID NO: 95266 - protein, 169 aa, Unknown
  Bacterial polypetide isolated from the Sargasso Sea
KKRLRKPIFMVDLAVPRDIEPEISELPDIYLYSVDDLREITAQNVQLREEEKVFAESIIDEAVKEYEAEARLSDDISFITAFRDKAEQIRLQELHRAMKQINNGKDPTEILGEMSRSLTNKLIHSPTSAIRQASRAGRREIISNLKEIYEISDLNTVKSNEVSRKTTEE

SEQ ID NO: 95267 - protein, 432 aa, Unknown
  Bacterial polypetide isolated from the Sargasso Sea
MQLLTIGINHHTAPVALRERVAFPLEQIKPALVTFKNVFLGPQAPNTPEAAILSTCNRTELYCATDDRAAREGAIRWLSEYHRIPVGELAPHVYALPQSEAVRHAFRVASGLDSMVLGETQILGQMKDAVRTATEAGALGTYLNQLFQRTFAVAKEVRGTTEIGTQSVSMAAAAVRLAQRIFEKVSDQRVLFIGAGEMIELCATHFAAQGPRELVVANRTAERGQRLAERFNGRAMPLADLPTRMHEFDIIVSCTASTLPIIGLGAVERAVKARRHRPIFMVDLAVPRDIEPEVGKLKDVFLYTVDDLGAIVREGNASRQAAVAQAETIIETRVQNFMQWLDTRSVVPVIRHMHTQADALRRAEVDKAQKLLARGDDPAAVLEALSQALTNKLIHGPTSALNRVNGADRDSLIDLMRGFYQHAPRSNDQSGH

SEQ ID NO: 95268 - protein, 108 aa, Unknown
  Bacterial polypetide isolated from the Sargasso Sea
MINIQNYINGDFKSSINNQTINDLNPATGELIATIPKSDFNDIQLAVEAAENAFPSWSKLTLNERAKWLMEIADELENRFDEIAKLESRDTGKPISLAKKVDANRSVN

SEQ ID NO: 95269 - protein, 164 aa, Unknown
  Bacterial polypetide isolated from the Sargasso Sea
IGPIANKEQYEFILSKIEAAEKRGLKLLIDGRKEQKSEGYYIGPTIFDNVPNEDDLAQNEVFGPVASIQTWEDEDEVIKIANDSIYGLAAGIWTKDTNKAIRLAERIEAGTVYINNYFNASTQSPVGGYKQSGYGRENGWEGMQSYMQTKSTWLATNPSQPDPF

SEQ ID NO: 95270 - protein, 280 aa, Unknown
  Bacterial polypetide isolated from the Sargasso Sea
MESRDTGKPITLAKTLDIPRSVLNMKFFSEFSKKFNFSIELTNKYSKNTIIRSPMGVVGCISPWNLPLYLFSWKIAPALITGNTVIAKPSEITPFTAFKFSELCQKIGLPPGVLNIVHGDGVQTGEAIVAHRRIKAISFTGGTNTGKKIAQKAIGSFKKLALEMGGKNPAIIFSDCNYDNMIHNVVKSSFMNQGQICLCTSRILVEMSIYEKFKSDFINRISNLKIGDPAKKTTEFGAISSLSQFKKVMSYIKRAKNEGGKVLTGGSSLKFSGLHKNGWY

SEQ ID NO: 95271 - protein, 283 aa, Unknown
  Bacterial polypetide isolated from the Sargasso Sea
PGVINVVTGYGDTVGEPLIDHPDVKMVSFTGGTNGGRAVASIAARKTKPIVMELGGKSPQIVFPDADIDLAVNGIISGIFPPGGQSCISGSRILIHKSIVEKFTKKFVSISKKAVVGDPLLQETQIGPIANKKHYESILKNIIKALNDGHNLILDGRIHCKKKGYFIGPTIFSNVPNSSYLAQNEIFGPVASTETWEDEEEVIRKANDTIFGLAAGIWTKDSTKGMMMANKIEAGTVYINNYFNAATQSPVGGYKQSGYGRENGWEGMRCFMQTKSVWLSTNP

SEQ ID NO: 95272 - protein, 286 aa, Unknown
  Bacterial polypetide isolated from the Sargasso Sea
ARTVFERGDWSQASPAERKAVLHKLADLMELHHEELALLETLDTGKPIRHSLRDDIPGAARAIRWYAEAIDKVYGEVATTSVNDLALIVREPVGVIAAIVPWNFPLLLACWKLGPALAAGNSVILKPSEKSPLTAIRLAALAKKAGLPDGVLSIVSGYGHEAGQALSLHPDVDVITFTGSTRTGKQLLKDAGDSNMKRVWLEAGGKSANIVFADCPDLPKAAANAAAGIFYNQGQVCIAGTRLLLEESIADEFIALLKEQAKNWQPGNPLDPETTMGTLIDNTHAD

SEQ ID NO: 95273 - protein, 154 aa, Unknown
  Bacterial polypetide isolated from the Sargasso Sea
EFILSKIDNAEKRGLKLLLDGRKLSKSEGYYIGPTIFDNVPNNDDLAQKEIFGPVVSIHTWEDEKEVIKIANDSVYGLAAGIWTKDVNKAIQIADKIEAGTVYINNYFNASTQSPVGGYKQSGYGRENGWEGMQCFMQTKSTWLATKPNQPDPF

SEQ ID NO: 95274 - protein, 91 aa, Unknown
  Bacterial polypetide isolated from the Sargasso Sea
DEQEVIQRANNTHLGLAAGVFTQDITRAHGVIHQLEAGICWINAYGASPAEMPVGGYKMSGIGRENGSETLKAYTQIKAVYVGMQPLESPF

SEQ ID NO: 95275 - protein, 135 aa, Unknown
  Bacterial polypetide isolated from the Sargasso Sea
MSLPTYQNFIHGKPMANKSKETFAVTNPATGEVIYHVEVADEFIQQEAIKSAKEGFSVWSAMMPIERTRILNKAVALLRERNDELAKLEVLDTGKPIQEADCVDIETGADVIEYYAGLAPTQLGTQQPVGGDFFY

SEQ ID NO: 95276 - protein, 303 aa, Unknown
  Bacterial polypetide isolated from the Sargasso Sea
IAWKAAPALAAGNSVIIKPSEYTPLSIFRLAELSIKAGIPDGIFNYLLGEGGKTGHLLVTHPDVEKIAFTGSNLTGAKIMSESALAGVKPIHLELGGKTPQVVFEDISDIDSTVDKIAAGIFVNSGQVCTSGTRLIAHHKILDGVLEKLIKIGKSKIPGPTWDSNTTLPPIVSKKQADRIDRLVSESVNLGAKIIEGGEWYETNYGGYFYKPTFIENINKEMPIFKEEVFGPVINVEKFEDEQEGIEKASHPNYGLAACIHTSNLNTAINMSKKIDSGMIWINHWGYPDEFSHPAGGLKIRHR

SEQ ID NO: 95277 - protein, 270 aa, Unknown
  Bacterial polypetide isolated from the Sargasso Sea
HDDIRMVSFTGGTAGGVAAATTAAKKVKPMVMELGGKSPQIIFSDADIDLAVNGVASGIFPATGQSCISGSRVLVHKSIEEEFVNKLVNISKKAKVGDPLNPATQVGPIANGPHYERVLQKIKEAELAGHKLLLDGRSFCSDKGYFIGPTIFNDVPNDSDLAQNEVFGPVLSIETWESEQEVIRLANDSVYGLAAGIWTKDIAVAMRIADSIQAGTVYINNYFNAATQSPVGGYKQSGYGRESGWEGMRSFMQAKSVWLSTKPHQLDPFL

SEQ ID NO: 95278 - protein, 491 aa, Unknown
  Bacterial polypetide isolated from the Sargasso Sea
MKQYKNFINGRFVESDRRFAGINPATGIRFADVHEATREMVDAAVEAGHEAVRGWGATSVIDRADMLYRIADEIDRRADDFLDAEVSDTGKPVSLASRLDIPRGAANFRIFADILKTAPLDTFRTELPGGAQAINYTVRKPLGVVGIISPWNLPLLLFSWKVAPALACGNAVVAKPSEETPGTATLLAEVTQTAGLPPGVFNLVHGFGPDSAGEFISTHPRINAITFTGESKTGTAIMHAAAEGVKPVSFELGGKNAAIIFADCDFEKTVEGMTRAAFLNSGQVCLCSERIFVERPIYDRFVKALAERAKAIKLGDPTDETTGMGPVISAAHRDKVLSYYALAREEGAEFIVGGGIPRFGNQLDDGFWVEPTLIAGLADDARCVTEEIFGPIGHISPFDSEAEVIRRANATPYGLAATIWTSNVNKAHRVAQSMNVGIAWVNTWFLRDLRTPFGGSGLSGIGREGGLHSLNFYSELTNVCVHVDAPDAAHE

SEQ ID NO: 95279 - protein, 480 aa, Unknown
  Bacterial polypetide isolated from the Sargasso Sea
MELVENFINGQYVSSDSSAFIDIYEPATGDIYGKFKDSNANDIDHAVRSAKNAFPDWSGLSIRERAVHLNNIANGIEQRLDEFAEFESRDTGKPIALARSLDIPRSVLNFKFFADHAMQFEFNFNLNSESSQNLINRSPLGVVACISPWNLPLYLFTWKIAPALITGNTVIAKPSELTPYTAYLLGGVCREKGLPPGVLNIVNGRGDTCGELLVKHEDVKAISFTGGTATGKLISKSASKTFKKLSLEMGGKNPAIIFDDCDYDSMLDNIVRSSFSNQGQICLCSSRLLIEQTIYEKFKKDLTLKVLELVIGDPSKIETQFGSVCSEGHLQKVLNYIALAKKEGGKVIAGGKIVELEGRCSNGWFIEPTLLEDLGPSSRVNQEEIFGPVVTLQPFDSEADAIEHANNTDYGLSATVWTEDIEKGKRVAKRIDAGVIWVNCWLLRDLRTPFGGMKNSGLGREGGDDALKFFTEAKNICVPA

SEQ ID NO: 95280 - protein, 397 aa, Unknown
  Bacterial polypetide isolated from the Sargasso Sea
MELIQNFIDGQHISSDSSESLDIYEPATGDIYGQLRDSNANDIDHAVRSAKTAFALWSNLTVRERAVHLNNIAKGIEKRLDEFAEIESRDTGKPIALSRSLDIPRSVLNFKFFAEHGENFEFNYDLNNETSQNHINRSPLGVVACISPWNLPLYLFTWKIAPALITGNTVIAKPSELAPYTAYMLGKVCQEVGLPPGVLNIVNGMGSTCGELLVKHKEIKAISFTGGTSTGKLISQSASKTFKKLSLEMGGKNPAIIFEDCNYELMLENILRSSFSNQGQICLCSSRLLIERSIYEKFKNDLSLKVSELLIGDPSKTETQFGSISSKGHFDKVVSYIDMVKEEGGKIIAGGKSVKLEGRCSNGWFIEPTLVEGLSPSSRLNQEEIFGPVVTLQSFEK

SEQ ID NO: 95281 - protein, 266 aa, Unknown
  Bacterial polypetide isolated from the Sargasso Sea
LANQSGETFDVTNPATGEVIYSVEVADEFVQNAAIESAKQGFAQWSKMTPIERSRILLNAVAILRERNDELALIEVLDTGKPMQEANCVDIETGADVIEYFAGLAPAQVGQQQMVGEDFYYTRKEPLGICAGIGAWNYPLQIACWKSGPALAAGNAFIFKPSEETPLGAIKLAEIFVEAGVPAGVFNVVQGAGDVGQWLTAHSEIDKVSFTGEVGTGKKVVASASGTLKDVTMELGGKSPLVVFDDANIEQAVSAAMLGNFYTQGE

SEQ ID NO: 95282 - protein, 256 aa, Unknown
  Bacterial polypetide isolated from the Sargasso Sea
GADVIEYYAGLAPTQLGTQQPVGGDFFYTRKEALGICAGIGAWNYPIQIACWKSGPALAAGNAFIFKPSEETPMGALKLAEIFTEAGVPDGVFNVVQGAAQVGQWLTNSPDIEKVSFTGEVGTGKKVMQSAAASNLKDVTMELGGKSPLVVFEDADISQAISAAMLGNFYTQGEICTNCTRVYVQRSVYQAFIDELKARTENNIVMGDPLDPNVNLGALISKKHQELVLSYIAKGKEEGATLLTGGNAASPASAPN

SEQ ID NO: 95283 - protein, 273 aa, Unknown
  Bacterial polypetide isolated from the Sargasso Sea
MSLPTYQNFIHGKPMANKSKETFAVTNPATGEVIYHVEVADEFIQQEAIKSAKEGFAAWSAMMPIERTRILNKAVALLRERNDELAKLEVLDTGKPIQEADCVDIETGADVIEYYAGLAPTQLGTQQPVGGDFFYTRKEALGICAGIGAWNYPIQIACWKSGPALAAGNAFIFKPSEETPVGALKLAEIFTEAGVPDGVFNVVQGAAQVGQWLTNSPDIEKVSFTGEVGTGKKVMQSAAASNLKDVTMELGGKSPLVVFEDADISQAISAAML

SEQ ID NO: 95284 - protein, 147 aa, Unknown
  Bacterial polypetide isolated from the Sargasso Sea
GIEEGATLLTGGSTLSPESAPNGYFVAPTVFIDCNDEMTIVKEEIFGPVMSVLVFEDEDDVIARANGTHLGLAAGVFTSDIKRAHRVIHQLEAGICWINAYGNSPAEMPVGGYKQSGIGRENGIETLDHYTQTKSIYVGMADIESPF

SEQ ID NO: 95285 - protein, 242 aa, Unknown
  Bacterial polypetide isolated from the Sargasso Sea
MSALVTYQNYVHGKYISNGSGETFEVINPATGSVSYLVEVATDAVKQAAIDSAKAGFAVWSKMTPMQRSRILLKAVALLREHNDELAAGEVLDTGKPWQEASVVDVVTGADSIEFFAGLAPSIEGNQQPVGNDFYYTRREPLGICAGIGAWNYPLQIACWKAAPALACGNVMIFKPSEETPRGAMRLAEIFTQAGVPDGVFNVVQGDGRVGAWLTTHDDIAKVSFTGEVGTGTKVMAAASSS

SEQ ID NO: 95286 - protein, 301 aa, Unknown
  Bacterial polypetide isolated from the Sargasso Sea
SINPATGEVLAKVQRASQADVERAVASATEGQKVWAAMTAMQRSRILRKAVDILRERNDELAELETLDTGKPLSETRYVDIVTGADVLEYYAGLIPAIEGEQIPLRETSFVYTRREPLGVVAGIGAWNYPIQIALWKSAPALAAGNAMIFKPSEVTSLTALKLAEIYTEAGLPAGVFNVLTGSGREVGQWLTEHPGIEKISFTGGTVTGKKVMASASSSSLKEVTMELGGKSPLIVFEDADLDRAADIAVMANFYSSGQVCTNGTRVFVPRMLQARFEAKVLERVKRIRLGDPLDDAHQFR

SEQ ID NO: 95287 - protein, 259 aa, Unknown
  Bacterial polypetide isolated from the Sargasso Sea
APPGLFNVVQGKGGVGAPLVTTPRIAKVSLTGSVPTGRKVYAAAAEGMKHVTMELGGKSPMVVFDDASLEDAISGAILGNFYSTGQVCSNGTRVFVHKSIKEVFLARMAERLKGAVIGDPLDEATSFGPMVSEAQLQIVLGFIEAGKAEGARLVTGGNRIDRPGFWIEPTVFADVSDDMTIAREEIFGPVLSVLDFEDEDEVIARANATPYGLSAGVYTRDLQRGHRVIGQLQAGSCFINSYNDAPVEVPFGGVKSSGV

SEQ ID NO: 95288 - protein, 203 aa, Unknown
  Bacterial polypetide isolated from the Sargasso Sea
LAPTQLGTQQQVGSDFFYTRKEALGICAGIGAWNYPLQIACWKSGPALAAGNACIFKPSEETPLGAIKLAEIFTEAGVPDGVFNVVQGAAEVGQWLTTNPDIEKVSFTGEVSTGKKVMQSAASNLKDVTMELGGKSPLIVFDDANVSQAVSAAMLGNFYTQGEVCTNCTRVFVHRSGVSYRLLMNLFHVPIATSLPVILSTQR

SEQ ID NO: 95289 - protein, 483 aa, Unknown
  Bacterial polypetide isolated from the Sargasso Sea
MIIDGKYTNSITEKTIEIECPANKRIFASVPRGNEADVDIAVKSSLKAFRSWSKVMPKERGKILLQIADAIEIEKEDIAKIIATETGNAIKTQARPEINLVVDIFRYFGGLSSELKGETIPLGEHVLSYTRREPLGVVGAIIPWNAPVMLGACKIAPALCAGNTIVMKAAEDAPLAILKVAEICQKFIPPGVLNLLTGTGPECGEPLAYHPEINKLSFTGSTGVGKLVMRAAAERILPVSLELGGKSPSIVYPDVNEDWTVDGIIGAMRFTRQSQSCTAGSRLFLHKKIFDSFIGKLSEKLDKLIIGNPLDDDTDIGTIINNKQFTKVCDYISDGLNNKNTEVICGGLPPEDGPLSEGYFTIPTIFRNKSNEWRLAKEEIFGPVLVAIPWDDEEEVIRMANQSHYGLAAYVWTRDITRGINAAHAIESGWVQVNQGLAQAPGHSYGGFKQSGIGREFSLEGMLDSFTQRKNISINLNTPSKEI

SEQ ID NO: 95290 - protein, 480 aa, Unknown
  Bacterial polypetide isolated from the Sargasso Sea
MSDNVRTRFFINGEWCAPKGSEEFELVSPITEEVIFRLPAASIEDAGAAVKVARDAFDTGSWACSPSVERAVVLRRIASEMRDRLALFGRLWTAQVGAPSWFASQFTGIAPAYFDFYADLISQSSFEDERTVPTGRVKVVREPVGVCALIVPWNAPLVLLTQKLAAALAAGCTVVAKPSPETPLDALVLAECVAAAGLPPGVFNVVPAGREVGDWLIRQPMIDKVSFTGSTVAGKHIAQVCADRLARVSLELGGKSASVICDDADIGAWIANVAPFTMPFSGQICFSQTRVLVPRKRHDEFMSAYIRAIDGMKVGSPWDPDTMIGPVATSNQYRRVLDFIDVAKREGANPVIGGGRAPGHEHGYFVAPTVFDNVHSDMTIAREEVFGPVVSIICHDGDEDAIRIANDSLYGLSGTIFSADIGRAERIARRIRTGNLTVNGLQLDPSIPFGGFKQSGIGREGGPEGLETFTETKAIYFPAV

SEQ ID NO: 95291 - protein, 492 aa, Unknown
  Bacterial polypetide isolated from the Sargasso Sea
MADIKKYKYFHSNEWHEPISNKWFNSENPANGKVWATVPDCSKKDIDMAVQAAKKAFYDGPWGKLMPAERGRILRKIGDVISKNADRIGAIETRDNGQLPSQITPSLREGAWLLDSWYYYAGMCDKFEGKLIPAELPDMHNYMKWEPFGVVAQILPWNSPIGTLIWKLAPCLAAGNTVVLKPSEQASCSILELMDILLDADIPPGVLNVVTGYGHTTGEPLIDHPDVRMVSFTGGTNGGKAAAKIASQQVKPIVMELGGKSPQIVLPDADIDLAVNGVASGIFPAGGQSCISGSRLLIHSSIIDKFTEQLVKVCKRATVGDPLQESTTIGPIANRVHYKRILDNIDKAQKEGHNLVLDGRNECRDYGFYIGPTIFKDVPNTTYLAQNEIFGPVVSTEKWDNEDEVIKTANDTIFGLAAGIWSKDITKAMKIADNIEAGTIYINNYFNAAAQSPVGGYKQSGYGRENGWEGMRCFMQTKSVWLSTNPNQPSPF

SEQ ID NO: 95292 - protein, 61 aa, Unknown
  Bacterial polypetide isolated from the Sargasso Sea
VIHQLKAGICWINSYGNSPAEMPVGGYKQSGVGRENGVETLNSYTQTKSVYVGMTDIESPF

SEQ ID NO: 95293 - protein, 496 aa, Unknown
  Bacterial polypetide isolated from the Sargasso Sea
MNQPTFEDWQARAAVLRVEGRAFIDGEARHAHTGATFACVSPIDGGVLAHVADCGTDDVDLAVTAARRAFDARSWAGMNPRARKAVLQRWAALMREHLDELALLETLDTGKPIADTTAIDVPAAAHCVDWYAEAIDKIGGEVAPVDHHLVGLVTREPIGVVAAVVPWNFPLLMAAWKFAPALAAGNSVVLKPSEKSPLTAIRVAQLACEAGIPPGVFSVVPGGAEPGRALALHRDVDCIAFTGSTRTGQQIMACAAQSNLKRVWLELGGKSPNIVLRDCPDLDRAAQAAADAIFFNMGEVCTAGSRLLVHRDIKDAFVAKLVGASRRFAPGHPLDPSVTMGAIVDRTQLDRVMGYIDAGRDEGRLVTGGARVREETGGFYVEPTVFEVKPDAKIAREEIFGPVLSVIVFDDVDEAVQIANDTKYGLAAAIWSADLSTAHAVARRLRAGTVWVNCYGDGSDDMNFPFGGYKLSGNGRDKSLHALDKYTELKSTVVRL

SEQ ID NO: 95294 - protein, 484 aa, Unknown
  Bacterial polypetide isolated from the Sargasso Sea
MDEQHLVYLSNYIGGSFVEHSGQDWMDVLEPATGRVYGKVPLSDSGAIDSAVEAAREAQPGWGSLSPDERADWLDKIADYLESSYEEIAALESRDTGKPISLARSLDASRSVTNFRFFAGMIREQEPEIFENDDSTNYVLYKPVGVGALITPWNLPLYLLSWKVAPAIGMGNTVVCKPSELTPMTADLLMRAVDSVGLPAGVVNLVHGDGIGAGAPLVEHPDVDLVSFTGGTSTGEKVASSAAPMFKKMSLELGGKNSSIVFADCDMEGTVAGVVRSGFLNQGQVCLCGSRVLVEDSIYDEFEEKFVEAVEALTIGDPSDESTQLGALISKEHLQKVRGYVDLALEEGGTVLTGGEPCLPSDLGGGNWMAPTVISGLSPDSRCSTEEIFGPVVTLHRFETDDEALEIANCTSYGLAGSIWTSDLERGRRFSESIETGMVWINAWLHRDLRVPFGGVKDSGVGREGGKWSLGFFSEAMNVCVKHD

SEQ ID NO: 95295 - protein, 488 aa, Unknown
  Bacterial polypetide isolated from the Sargasso Sea
MSLPTYQNFIHGKPMANKSKETFAVTNPATGEVIYHVEVADEFIQQEAIKSAKEGFSVWSAMMPIERTRILNKAVALLRERNDELAKLEVLDTGKPIQEADCVDIETGADVIEYYAGLAPTQLGTQQPVGGDFFYTRKEALGICAGIGAWNYPIQIACWKSGPALAAGNAFIFKPSEETPMGALKLAEIFTEAGVPDGVFNVVQGAAQVGQWLTNSPDIEKVSFTGEVGTGKKVMQSAAASNLKDVTMELGGKSPLVVFEDADISQAISAAMLGNFYTQGEICTNCTRVYVQRSVYQAFIDELKARTENNIVMGDPLDPNVNLGALISKKHQELVLGYIAKGKEEGATLLTGGNAASPASAPNGYFVEPTIFTDCTDDMTIVKEEIFGPVMSVLVFDDEDEVIARANDTELGLAAGVFSKDIQRAHRVIHQLQAGICWINAYGNSPAEMPVGGYKQSGIGRENGVETLNSYTQTKSVYVGMSQIESPF

SEQ ID NO: 95296 - protein, 311 aa, Unknown
  Bacterial polypetide isolated from the Sargasso Sea
GAKDAMTEVVRSADLIDYTAEEGVRLLGEGKLLMSDSFPGNSRNKLCLASKVPVGVVLCIPPFNYPVNLCVSKIAPALIAGNAVVVKPPTQGCTATLKMIQCFIKAGFPAGVVQAVTGRGGEIGDYLTTHPEVNGISFTGGETGVRVAQKAGMVALQTELGGKDACIVLPDADLDLAAKSIVKGGFSYSGQRCTAVKLVAVYEEVADELLQKVNDQIAKLSVGLPEDDATITAVVSKSSADFIQSLVVDAESKGAKLCQEWKREDNLIWPLVIDKITHDMKICWEEPFGPVLPVVRVKSDEEALTLVNNSR

SEQ ID NO: 95297 - protein, 253 aa, Unknown
  Bacterial polypetide isolated from the Sargasso Sea
MNFIEAINNGLDEAMEKDEDIFMMGEDIGIFEGAFKATKGLFEKYGESRVLDTPISEGGFMGAGVGAALAGKKPVIELQFFDFVYPALDQITTEAAKYYWKAGKAVPLVVRGPTGAGTRSGPFHSISPESLLAHHPGIKVVAPSNPYDAKGLLVASIFDPNPVMYLEHKKLYRKPDLKMDVPLGLYEVELGKGKVVKTGDDVTVVAWSGMVPTAIEAAEELKKDNISVEIVDLRTIFPLDEEIILKSIEKTSN

SEQ ID NO: 95298 - protein, 183 aa, Unknown
  Bacterial polypetide isolated from the Sargasso Sea
KVIVPSNPYDAKGLLKSAIRDDDPVIFMESEQMYGDKGEIPESEYTLPIGVADIKRKGKDVTIVSFGKIIKEAYIAADKLADEGVECEVIDLRTIRPLDYDAIFDSVKKTNRLVILEEAWPFGNISTDISHTVQSKLFDYLDAPIEKVNNADTPTPYSPVLLKEWLPDSKDVYKAVKKVLYLK

SEQ ID NO: 95299 - protein, 212 aa, Unknown
  Bacterial polypetide isolated from the Sargasso Sea
PVVFRGPNGSALQVAAQHSHDLSSLFTNIPGLKVIAPYDSADAKGLLKSAIRDPNPVIFLENELLYNEVFELPEIDYSVPIGAANIKRSGNDITITAFSRGVYAALKAAELLEKENISAEVIDLRTLRPLDIETIIKSVKKTNRLVSVEEGWMSSGIGAEIISLVTSKAFDYLDAPPERIAAMNVPLPYASNLEKLCLPDKDNIFKLCMNLF

SEQ ID NO: 95300 - protein, 270 aa, Unknown
  Bacterial polypetide isolated from the Sargasso Sea
ARNNEGPSLIELVTFRHHGHAGHDPAEYVEEEVREFWIKRDPITRFEDALVEEGLFTKNDFETLSEEIDNEIKSTIEWAKEQDDPNPDEEIEDMFATRTSQVFTNDESSTETMNFIEAINNGLDEAMEEDKDIFMMGEDIGGFEGAFKATKGLFEKYGESRVLDTPISEGGFMGAGVGAALAGKKPVIELQFFDFVYPALDQITTEAAKYYWKAGKAVPLVVRGPTGAGTRSGPFHSISPESLLAHHPGIKVVAPSNPYDAKGLLVASIF

SEQ ID NO: 95301 - protein, 266 aa, Unknown
  Bacterial polypetide isolated from the Sargasso Sea
MARKITFQQAINEALDQEMARDEDVVIMGEDVVGGAGTQGEMDAWGGVLGVTKGLWGKYGDRIMDTPISESGFVGAAVGAATAGLRPVCELMFIDFMGVCFDQIYNQAAKFRYMFGGKAETPVVIRTMVGAGFRAAAQHSQCLYPMFTAVPGLKVVIPSNPYDAKGLLIQAIRDNDPVIFCEHKVLYTVEGEVPEDSYTIAFGEADIAREGKDITVVALGRMVHQALEAANTLSSDGISCEVVDLRTTSPLDEETILESVENTGRL

SEQ ID NO: 95302 - protein, 575 aa, Unknown
  Bacterial polypetide isolated from the Sargasso Sea
MEIETIKRKGYSKSLNKEELWEIYKSMKTQRLLEERLLKLYKGGQLSGAVYPGIGQEASMAGIGAGMGKDDIFGGTHRDLGVQMMRGVSLEEIGLNFFGKKHGPSKGRDGNSHFGVVDKGTLMVVSPLPDSAPVAVGWALASQQSNSGVVAIANCGEGATATGTWHESINMAGVHNLPIVFTVQNNQFAYSSPNEVEFGTPNVADRGAGYGIESKIIDGNDIYQVIDTMHDACEKARNNDGPSLIELVTFRHHGHAGHDPAEYVEDEVREFWIKRDPITRFEDALLEEGLFTNSDFETLSEEIEKEIKTTIDWAKEQDDPNPDEEIDDMFATRTTPVFTNDESNTETMNFIEAINNGLDEAMEKDEDIFMMGEDIGIFEGAFKATKGLFEKYGESRVLDTPISEGGFMGAGVGAALAGKKPVIELQFFDFVYPALDQITTEAAKYYWKAGKAVPLVVRGPTGAGTRSGPFHSISPESLLAHHPGIKVVAPSNPYDAKGLLVASIFDPNPVMYLEHKKLYRKPDLKMDVPLGLYEVELGKGKVVKTGDDVTVVAWSGMVPTAIEAAEELKKDNILS

SEQ ID NO: 95303 - protein, 275 aa, Unknown
  Bacterial polypetide isolated from the Sargasso Sea
EKRILDTPISEEGIVGCAVGSAMTGLRPVVELMYVDFVMLAMDQLANQAAKIRYMFGGQISVPMVMRAQGGTGRSGAAQHSQSLEAWMMHTPGLNLAMPATVNDAYLLLKHALKLSDPVVFIEHKMLYTLKGDVNKSESISWGQAAILRSGSDFTLVTYSRMVHRALEAAGKLAELGIQAEVIDLRTLYPLDTETINSSVKKTGRALVVTEDCLTAGVSAELSSRIMEGAFEFLEEPVLRLAGEDIPIPVAPSMEKEAVPSVDRIISTAKLLLRK

SEQ ID NO: 95304 - protein, 300 aa, Unknown
  Bacterial polypetide isolated from the Sargasso Sea
MGLGPISAIYQAHVMKYLHARGLKDLGDRKIWGFWGDGEMDEPESLGAIGLAAREKLDNLIFVINCNLQRLDGPVRGNGKVIQELERQFRGSGWNVIKVVWGRLWDPIIAKDKGGHLQKIMDEVVDGEMQNFKAKGGAYTRENFFGKHPEALKLVKGLSDEEIYKLNRGGHDPYKVYAAYHEAVNHKGAPTVILALTTKGYGVGSREADNTTHQVKKLSLDNIKIFRDRFDIPVSDDEIEDLPYVRPKEDSPEIKYLKETREKLGGSIPKRREHSETLKLKNKDAFKVLHEGSGERKVSN

SEQ ID NO: 95305 - protein, 309 aa, Unknown
  Bacterial polypetide isolated from the Sargasso Sea
ARVSWRIGLAARESLDNLIFVVNCNLQRLDGPVRGNGKIIQELEGIFRGAGWNVSKVIWGSYWDSLLANDKTGHLVKIMNETVDGEYQAFKARNGLYVREKFFGKYPETLDLVSSMSDTDIWRLNRGGHDPHKVYAAYDKAVNHIGSPTVIIAKTIKGYGMGKSGESVNTTHQQKKLDVDDLLYYRDRFDVPLTDEQVKNIEYFKPDENSEEIKYLKKRRLELGGFIPERTSYSKPIKVPSKDIFDFMKTSTGTKEMSTTMALVRMLINLLRDKNVAPKLVPIIPDEARTFGMEGFFQKVGIYAHEGQK

SEQ ID NO: 95306 - protein, 317 aa, Unknown
  Bacterial polypetide isolated from the Sargasso Sea
AATSYSNQGFPLIPFYIFYSMFGFQRVGDLCWAAGDLQARGFLLGGTAGRTTLNGEGLQHQDGHSHVLASTVPNCVSYDPAYSYELAVIIHHGLNLMFVSQRACYFYITVMNENYIHPEMPRGVEKGIIKGMYLLEKNSNLKSKLVVQLLGSGAILREVLQAAKLLEEYNVIADIWSVTSFNELGREGESTARWNRLHPLEKPRESYVEKCLQTSKGPVIASTDYMKSYAEQIRSYVGRGYTVLGTDGFGRSDTREKLRQFFEVDRYHIAVAALEALSKENKIDVSVVEKAINKFGIDPEKSHPVESIRHGYRNICS

SEQ ID NO: 95307 - protein, 289 aa, Unknown
  Bacterial polypetide isolated from the Sargasso Sea
VDGEYQAAKARDGAYVREKFFGKYAETSELVSSLSDKDIWRLNRGGHDPHKVYAAYDRATKNQGSPTVIIAKTIKGYGMGKSGESVNTTHQTKKLDVDDLMYYRDRFDVPLTDEQVRNIEYFRPDEKSQEIKYLKERRIKLGGFLPERSTFAKPIKAPSKDIFDFMKVSTGEKEMSTTMALVRMLTSLMRDKNISPRLVPIIPDEARTFGMEGFFQKIGIYAHEGQKYEPEDSAQLSSYREEKSGQVLEEGINEAGAMSSWIAAATAYTNHDIEMIPIYTFYSMFGFQR

SEQ ID NO: 95308 - protein, 330 aa, Unknown
  Bacterial polypetide isolated from the Sargasso Sea
VIWGSYWDELLARDKSGKLIQLMGETVDGEYQNCKAKGGKYTRENFFNKYPETKALVANYSDEDIWRLNRGGHDPVKVFAAYQKAIDTKGRPTVILAKTVKGFGLGSSGEAQNVAHNVKKMEVESIKKFRDRFNIPIEDDKIADLPYYRFPEDSEELKYLKERREALGGYLPARREQAEEQLEVPELKAFDAILKGSGDRQVSSTMTFVRVLNALLKDKKIGKRIVPIIPDEARTFGMEGLFRQVGIYANEGQKYVPQDADQVAYYREDKKGQVLQEGINELGAMASWVAAGTSYSTCNATTIPFYIYYSMFGFQRVGDLAWAAGDSQAR

SEQ ID NO: 95309 - protein, 308 aa, Unknown
  Bacterial polypetide isolated from the Sargasso Sea
MDEPESMGAIGLAARENLDNLIFVINCNLQRLDGPVRGNGKIIQELEGSFRGSGWNVIKVIWGSYWDSLLANDKSGHLVKLMNETVDGEYQAAKARDGAYVREKFFGKYAETSELVSSLSDKDIWRLNRGGHDPHKVYAAYDQATKNQGSPTVIIAKTIKGYGMGKSGESVNTTHQTKKLDVDDLMYYRDRFDVPLTDEQVRNIEYFRPDEKSQEIKYLKERRIKLGGFLPERSTFAKPIKAPSKDIFDFMKVSTGEKEMSTTMALVRMLTSLMRDKNISPRLVPIIPDEARTFGMEGFFQKIGILRA

SEQ ID NO: 95310 - protein, 319 aa, Unknown
  Bacterial polypetide isolated from the Sargasso Sea
QNDDMGYLLRKMNTTVDGDYQTLAASSGDYIRQNFFGPEKELQKLVEHLDDKTLTKLRRGGHDSTKIFAAYKEAVEHKNQPSVILAKTVKGWALGKGFEARNMTHQKKSLEKSDWQYFRDLLEIPFTDSELEEMPYYKPGTDSEEIQYLKERREKLGGYLPTRKATYSGFHMPKKDAFTEFDKGTPKDQEVSTTMAFVRLLRNLMKDEKIGDLIVPIVPDEARTFGMEALFTEFKIYNAQGQIYTPVDSQLLLSYKESESGQILEEGISEAGAMSSFTAAGMAYSTVGKPTIPFYIYYSMFGFQRVGDQIWCAADSRAK

SEQ ID NO: 95311 - protein, 315 aa, Unknown
  Bacterial polypetide isolated from the Sargasso Sea
ADGSSRAGYLLKKVIDEAYTQGLTLPDTRTTPYINTIPASADIRSPGDQNLERKIRAYIRWNAAAMVVKANKKNPELGGHIGTFASAATLYDVGMNHFWRAKNNKFGGDLVYFQGHSAPGMYARAFLEGRITEKQLDKFRQEVEKGGLSSYPHPWLMPKFWQFPTVSMGLGPMMAIYQARFTKYLINRGLLKDQDRKIWCHLGDGEMDEPESFGAVGLAAREKLDNLIFVINCNLQRLDGPVRGNGKIIQELEGRFRGSGWNVIKVIWGSYWDQLLSKDKTGLLVKRMTEAVDGEYQAFKAKGGSYVREKFFGNI

SEQ ID NO: 95312 - protein, 298 aa, Unknown
  Bacterial polypetide isolated from the Sargasso Sea
GDGETDEPESLGAIGLAAREKLDNLIFVVNCNLQRLDGPVRGNGKIIQELEGIFRGSGWNVIKVIWGSYWDQLLAKDKTGHLVKLMNETVDGEYQAYKARNGLYVREKFFGKYPETKELVSALSDKDIWRLNRGGHDPHKVYAAYDQASKNVGSPTVIIAKTIKGYGMGKSGESVNTTHQQKKMDTDDLMYYRDRFDVPLTDKQVQEIQYFRPDENSPEIKYLKERRLNLGGFIPERTTYAKPIKAPPKDIFDSFKVSTGQKEMSTTMVFVRLLTNLLRDKNVAPRLVPIIPDEARTF

SEQ ID NO: 95313 - protein, 361 aa, Unknown
  Bacterial polypetide isolated from the Sargasso Sea
KIIQELEGRFRGSGWNVIKVIWGSYWDQLLSKDKTGLLVKRMTEAVDGEYQAFKAKGGAYVREKFFGKYPELKDLVANMTDADIWKLNRGGHDPHKVYSAYHAAVQCKGKPTVIIAKTIKGYGMGKSGESINTTHQQKKLDEEDLLFYRDRFNVPLTDKQVKNIEYYKPAENSPEIKYLKNCRVKLGGHIPERTTFAKPVKTPPQDIFESFMKSTGDKEMSTTMALVRMLANLLRDKNVAPRLVPIIADEARTFGMEGFFQKIGIYAHEGQKYEPVDSEQLSSYREDKSGQVLQEGITEAGAMSSWIAAGTSYTKHDLEMVPIYLFYSMFGFQRIGDLAWAAADSQTRGFLIGATSGKNTL

SEQ ID NO: 95314 - protein, 302 aa, Unknown
  Bacterial polypetide isolated from the Sargasso Sea
MKSGKDFDPIETREWIESLDDVIDDQGTDRASFLLNELAKHLMDKGAVPSYNLTTPFKNTIAPENEAMMPGDLFMERRIRSLIRWNALATVLRANKNDDELGGHIATFSSAAMLYDIGFNYFFRGQESENDDLVYFQGHSSPGIYARSYVEGRLNEEDLDNFRREVDKPGLSSYPHPWLMPDYWQFPVVSMGLGPISAIYQAHVMKYLHARGLKNLGDRKIWGFWGDGEMDEPESLGAIGLAAREKLDNLIFVINCNLQRLDGPVRGNGKVIQELERQFRGSGWNVIKVVWGRLWDPIMQKI

SEQ ID NO: 95315 - protein, 303 aa, Unknown
  Bacterial polypetide isolated from the Sargasso Sea
RTDEPESLGAIGLAAREKLDNLIFVINCNLQRLDGPVRGNGKIIQELEGIFRGAGWNVIKVIWGSYWDPLLAKDKSGLLIKRMGEAIDGEYQAFKAKGGAYVRNKFFGKYPELLDLVSQMTDKDIWKLNRGGHDPHKVYAAYYSAMQNEGTPTVILAKTIKGYGMGKSGESINITHQQKKLDENDLLYYRDRFDVPLTDKQVKNVEYYKPPENSPEIKYLKECRLKLGGNLPERSSFAKAIKTPHSDIFSNMKKSTGEKEMSTTMILVRMLTSLLRDKNVAPRLVPIIPDEARTFGMEGFFQK

SEQ ID NO: 95316 - protein, 245 aa, Unknown
  Bacterial polypetide isolated from the Sargasso Sea
MVSSNDDIDPVETKEWLDSLSAVLQNDGSERAHFLIKQLIDQSYKAGSKIPHTQTTPYVNTIPPEEEKRSPGDQNIERKLRSLIRWNAAAMVVRANKKYPELGGHIGTFASAATLYDVGMNHFWRAKNNKFGGDLVYFQGHSAPGMYARAFLEGRLNEKQLDRFRQEVQTGGLSSYPHPWLMPNFWQFPTVSMGIGPMLAIYQARFMKYLINRGLIKDEGRKVWAFLGDGEMDEPESLGAIGLEG

SEQ ID NO: 95317 - protein, 362 aa, Unknown
  Bacterial polypetide isolated from the Sargasso Sea
ATVTILTKDKEIGKNVVPIIPDEARTFGMDPLFRQLGIYAHNGQLYEPVDSDQFLYYKESKDGQILEEGINEAGAVSSFIAAGTSYSLNGVNMIPFYIYYSMFGFQRIWDFIWAASDMRARGFLIGGTAGRTTLNGEGLQHQDGHSHLAAAVTPNIKAYDLSYGYEIATVVHYGLKDMYEKNNDCIYYITVENENYKHPQIPKDVSADIVKGLYKIKSTKTPTIRLLGSGPLMNETLKAAELLKKDWGVEPGIWNVTSFSELRKDAEETERWNLIHPNKTQRKSHIEKSLSKHKVPTVAVSDYVKMLSEQIAPYVPGPFYSLGTDGFGRSDTRESLRHFFEIDRYYITLTALRALADEGVIK

SEQ ID NO: 95318 - protein, 294 aa, Unknown
  Bacterial polypetide isolated from the Sargasso Sea
AATSYTNHDIEMIPIYIFYSMFGFQRIGDLAWAAGDSQARGFLVGATAGRTTLAGEGLQHQDGHSHLIASTIPNCVTYDPTFHYELAVIFREGLRRMHEKNENVFYYITTMNENYSHPEMPKDKNCEEGILKGMYKIKEFNKYKKTKIQLLGSGTILREMMFAAEILQNDYQIDSEIWSVTSFNELRKDGMEVERFNLLNPDKEPKKSYVEQCLGQTEGPIMAASDYMRMNSDQIRPYTNKSFYSLGADGFGRSDTRKNLRKFFEVDKEHLVAYGLSILAKEQLISSKHAKDAM

SEQ ID NO: 95319 - protein, 309 aa, Unknown
  Bacterial polypetide isolated from the Sargasso Sea
EAFTEGLSSYPHPRLMPDYWEYPSVSMGLGAMTAIRQARFNRYLHNRGLVDTSESTTWYFMGDGESDEPESLSELTLASRENLDNIVMVVNCNLQRLDGPVRGNSKIVQELAARFTGAGWNVIKCLWGSKWDALFAKDRDGLLAARLEALADGDEQRIMTDEGSVIRAELFNSPELAELVSDLSDEDLEDLAGNVGGHDPIKVFAAYTAARAHKGRPTVILARTIKGWGLGPSFAGRNSTHGKKKADQSVLQYMRDELGLTFTDTQLEKLPYLQPANYPEEVEYLLERREKLGGFCPERRTPTVDLELP

SEQ ID NO: 95320 - protein, 305 aa, Unknown
  Bacterial polypetide isolated from the Sargasso Sea
MNDLDPQETLEWIEAMEAVIERDGFERAQFLLRKLADRAVTSGVDAPYTAYTPYLNTIPPELEVRSSGNQELESKIRSIIRWNAAMMVMRANRDSSELGGHIASFASSALLYDIGFNHFWNAPGPEHGGDLVYIQGHSAPGIYARAFLEGRITEEQMNHFRQESTGKGVSSYPHPWLMPEFWQFPTVSMGLGPIMAIYQARFLKYLHNRELLDTEPRKVWCFLGDGETDEPESMGAIHLAAREKLDNLIFVINCNLQRLDGPVRGNGKIIQELEGEFRGAGWNVIKVLWGSYWDPLLAKDDQGLF

SEQ ID NO: 95321 - protein, 309 aa, Unknown
  Bacterial polypetide isolated from the Sargasso Sea
DLLSAVVHSEGPERAHFLIKQLIDQAYKEGSNIPYTQNTPYINTIPADEEIKSPGDQNIERKIRALIRWNSAVMVVRANMRDPSLGGHIGTFASAATLYDIGMNHFWRAKSNKFGGDLIYFQGHSAPGIYARAFLEGRLDEKQLDRFRQEVYPGGLSSYPHPWLMPKFWQFPTVSMGLGPMMATYQARFMKYLINRKLIKDENRKVWSFLGDGEIDEPEALGSIGLAAREKLDNLIYVVNCNLQRLDGPVRGNGKIIQELEGIFRGAGWNVIKVIWGSYWDPLLANDKSGLLVKRMNEAVDGEYQALKQ

SEQ ID NO: 95322 - protein, 122 aa, Unknown
  Bacterial polypetide isolated from the Sargasso Sea
MSDLNQNYFEKITYRDALRLAMHDAMKEDKKIIVMGEDVANYGGAYGATKDLLKLFGKERVIDTPISEPAIVGAAVGAAMSGLRPIAELMYVDFFGMSMDQIANQLAKIRYMFGGTISAPMV

SEQ ID NO: 95323 - protein, 260 aa, Unknown
  Bacterial polypetide isolated from the Sargasso Sea
MEATEVEEWTESLDSVLRVNGPAATSQLLRHLSEHAQSARVPLPSAITTPFRNTISPQDERSMPGDLFMERRIRSLVRWNAMAMVMRANDNEDGLGGHISSFSSSATLYDVGMNHFFRGTANGHPGDLVYYQGHSAPGMYARSYLEGVLSEAQLENFRREVGGQGLSSYPHPWLMPDYWQFPTVSMGLGPIQAIYQAHVMKYQSKRGLIDHRDRKIWCFLGDGECDEPESLGAIALAGRERLGNLHFVVNCNLQRLDGPV

SEQ ID NO: 95324 - protein, 203 aa, Unknown
  Bacterial polypetide isolated from the Sargasso Sea
TFTTTITTLNENYHMPAMPAGAEEGIRKGIYKLETVEGSKGKVQLLGSGSILRHVREAAQILAKDYGVGSDVYSVTSFTELARDGQDCERWNMLHPLETPRVPYIAQVMNDAPAVASTDYMKLFAEQVRTYVPADDYRVLGTDGFGRSDSRENLRHHFEVDASYVVVAALGELAKRGEIDKKVVADAIIKFNIDAEKVNPRLA

SEQ ID NO: 95325 - protein, 118 aa, Unknown
  Bacterial polypetide isolated from the Sargasso Sea
MNYDLNLLEEMYKKMLLIRRFEEKAGQLYGMGQIGGFCHLYIGQEAVVVGIQSAQIDGDSIVTSYRDHGHMLACDMDPKGVMAELTGRKDGYSKGKGGSMHMFSREKGFFGGHGIVAA

SEQ ID NO: 95326 - protein, 267 aa, Unknown
  Bacterial polypetide isolated from the Sargasso Sea
PQPHAAPGIYARAYLEGRLDNHHLKHYRRELQGQGGLSSYPHPRSMPGFWEMPNASMGLSTPAAIYQARFTKYLENRGLKSKSKSKVWCFIGDGESDEPEVLGTINIAAREKLDNLIFVINCNLQRLDGPVRGNGKIIQELERVFRGADWNVIKVIWGSGWDGLLARDSQGVLRKRMDDCLDGDYQMYSVLPGDVQREHWVEGNPELEMMMSSLTDEEVKQIKRGGQDHKKIYAAFDQATKTEGKPTVLLIKTVKGDGMGAQGKNTA

SEQ ID NO: 95327 - protein, 266 aa, Unknown
  Bacterial polypetide isolated from the Sargasso Sea
MRPLAEIQFGGFAALALNPLLNNAAQLRWRWGAEVPLTVRIPLGAKTRSGPYHANMIESWMANDPGLILVAPSNPQDAYDLLIESHQLPDPVVFLEHIGLYGLRGGLTGWGDNINQMVDTNAVQNRVSKGQLSIGEARVLRGGRDITIVTWGAMVHVALRASEEAAKNGTEVEVIDLRTLLPFDADTCIQSVIRTGRVIVLQEAQWTGGFGHTVASRIVEESFWRLESAPVVVGALDTPVPFSPTLEDHTIPSMEIVLRHIRKSLD

SEQ ID NO: 95328 - protein, 288 aa, Unknown
  Bacterial polypetide isolated from the Sargasso Sea
KQGRKIWTFMGDGECDEPESLGAIGLAARENLDNLIFVINCNLQRLDGPVRGNGKIIQELEGTFRGAGWNVLKVIWGSYWDPLLQADKTGLLMKRMDECVDGEYQAFKAKGGKYVREKFFGKYPELKQLVSNLTDEDIWRLNRGGHDPHKVYAAYDAAMKHKGQPTVILTKTIKGYGMGKSGESINTTHQQKKLGLDDMYYFRDRFDIPLTDKQVENLEFYRPDEKSDEIQYLKEKRAALGGFIPSRSSNSKQIKISDPSIFDSSMKSSGQRELSTTMALVAILGKIL

SEQ ID NO: 95329 - protein, 159 aa, Unknown
  Bacterial polypetide isolated from the Sargasso Sea
RLLGGGTILREAVAAAERLSAEFGVSADVYSVTSFNELRRDCESVARYNRFHAKAKKSWVTKQLQGDVSPIVAATDYMKLYAEQIRQDIDAPYTVLGTDGFGRSDSRAALRRYFEVDADMIIYTALRALVNQGEWTQEQLTAAKKTLTVDTRRIDPDKG

SEQ ID NO: 95330 - protein, 295 aa, Unknown
  Bacterial polypetide isolated from the Sargasso Sea
GLGPLAAIYQAQFMRYLENRGLIEKSDRKVWCFIGDGESDEPETLGAIALAGREGLDNLIFVVNCNLQRLDGPVRGNGKIIQELEGVFRGGGWNVIKLLWGGYWDALLAKDTNGVLRKLMMETVDGEYQNCKAFGGAYTREHFFGKYPETAAMVAGLSDDDIWRLNRGGHDPHKVYAAYHQAVNTKGMPTVILAKTVKGYGMGSAGEALNPTHQTKKLDDEAVKHFRDRFNIPVTDAQLADGQVPFYHPGPDSPEVQYLQERRAALGGYLPQRRRKATKSFNAPKLETYERLLKS

SEQ ID NO: 95331 - protein, 281 aa, Unknown
  Bacterial polypetide isolated from the Sargasso Sea
RGLLKNQDRKIWCHLGDGEMDEPESFGAVGLAAREKLDNLIFVVNCNLQRLDGPVRGNGKIIQELEGRFRGAGWNVIKVIWGSYWDQLLSKDKTGLLIKRMNEAVDGEYQAFKAKGGAYVREKFFGKYPELKELVANMTDADIWKLNRGGHDPHKVYSAYNAAVRCKGKPTVIIAKTIKGYGMGKSGESINTTHQQKKLDEEDLLFYRDRFNVPLTDKQVKNIEYYKPAENSPEIKYLKNCRHKLGGNIPERTTFAKPVKTPPKDIFESIMKSTGDKEMST

SEQ ID NO: 95332 - protein, 308 aa, Unknown
  Bacterial polypetide isolated from the Sargasso Sea
KDGAYVREHFFGKYPETAALVEGMTDQEIFALRRGGHDPSKIYAAYKNAEKTTGQPTVILAKTVKGYSMGEAAEGKNVAHQVKKMDLTAVEHLRNRLRLNDLVSDQDISSLPYLTFKEDSKEHEYLHARRKALKGYLPSRRTRSSVDVKVPELADFKSLLTEQKRQISTTLGFVRLLNILLKNEDFGKNIVPIVADEARTFGMEGLFRQIGIYNPAGQNYTPQDREAVSYYKEDESGQVLQEGINEAGAMASWVAAATSYSTHDLPMIPFYIFYSMFGFQRIGDLTWLAGDQQARGFLLGATAGRTTL

SEQ ID NO: 95333 - protein, 305 aa, Unknown
  Bacterial polypetide isolated from the Sargasso Sea
GAIGLAARENLDNLIFVINCNLQRLDGPVRGNGKIIQELEGSFRGSGWNVIKVIWGSYWDSLIANDKSGHLIKAMNETVDGEYQAMKARNGAYVREKFFGKYPETLELVSSMSDTDIWRLNRGGHDPHKVFAAYDQASKHQGSPTVIIAKTIKGYGMGKSGESVNTTHQTKKLDVDDLMYYRDRFDVPLTDEQVRNIEYFRPDEKSPEIHYLKEKRIKLGGYLPERSTFAKPIKAPSKDIFDFMKVSTGEKEMSTTMALVRMLTNLLRDKNISPRLVPIIPDEARTFGMEGFFQKIGIYAHEGQK

SEQ ID NO: 95334 - protein, 272 aa, Unknown
  Bacterial polypetide isolated from the Sargasso Sea
HRGHGIFIARGGDPKKMMAEIAGKKDGYCKGKGGSMHIADMKLGHLGANAIVGGGIPTVVGAGLSSKYLEEEKVSVAFFGDGAMQQGILYESMNMASLWKLPVVFCCINNQYGMGTKIDNAAGLKEFSKRAASFGLNTLHIDDLDIENAYVKSKEIIDKARNFEPGFIEVECYRFFGHARMDKSPYRSEEEEIKMRKSDPISYASNQMIKNKIMNEDEIKKINEKISIEMDEAMDFAINSPLNNHKEIFTDVYDENQPLPISVEERINKILS

SEQ ID NO: 95335 - protein, 303 aa, Unknown
  Bacterial polypetide isolated from the Sargasso Sea
RTSGIGGHISTYASAATLYEVAFNHFFKGLEHPDGQDLIFFQGHASPGIYSRAFLEGRLSSKKLDNFRHELSDGGGLSSYPHPYLMPDFWQFATVSMGLGPIMGIYQARFMRYMIDRGFIKDTGRKVFVYTGDGEMDEPESLGALTLASRENLDNLIFVVNCNLQRLDGPVRGNSKVIQELEGAFRGAGWNVIKVIWGSDWDELFQKDANGTLVKRLSELVDGDLLKYTVEGGEYFRKEFFGKDPELLEMVKDLSNEDLEQMLAGGHDPIKMYSAYHEAMHCAGKPTAILARTIKGYGLGQAG

SEQ ID NO: 95336 - protein, 308 aa, Unknown
  Bacterial polypetide isolated from the Sargasso Sea
PETTELVSSMSDTDIWRLNRGGHDPHKVYAAYDKAVNHKGSPTVIIAKTIKGYGMGKSGESVNTTHQQKKLDVDDLMYYRDRFDVPLTDSQVKNIEYFKPDGNSEEIKYLKKRRLELGGFIPERTSYSKPIKAPVKDIFDFMKKSTGEKEMSTTMALVRMLTNLLRDKNVAPKLVPIIPDEARTFGMEGFFQKIGIYAHEGQKYEPEDSAQLSSYREEKSGQVLEEGITEAGSMSSWIAAGTAYTNHDIEMIPIYLFYSMFGFQRIGDFAWAAGDSQARGFLIGATAGRNTLAGEGLQTQDGHSHLLA

SEQ ID NO: 95337 - protein, 268 aa, Unknown
  Bacterial polypetide isolated from the Sargasso Sea
MPKFWQFPIVSMGLGPIMSIYQARFTKYLINRGLLKDEGRKIWTFLGDGETDEPESLGAIGLAAREKLDNLIFVINCNLQRLDGPVRGNGKIIQELEGIFRGAGWNVIKVIWGSYWDPLLAKDKSGLLVKRMNECVDGEYQAFKAKGGAYVREKFFGKYPELKDLVSTMTDRDVWKLNRGGHDPHKVYAAYDAAMKTKGQPTVILAKTIKGYGMGKSGESTNITHQQKKLGEEDLLYYRDRFDIPLTDKQVRNIEFYKTDEKSEEINI

SEQ ID NO: 95338 - protein, 269 aa, Unknown
  Bacterial polypetide isolated from the Sargasso Sea
VLEEGINEAGSMSSWIAAGTAYSNHDIEMIPIYLFYSMFGFQRTGDFNWAAGDSQARGFLIGATAGRTTLAGEGLQHQDGHSHMLASTIPNCKSYDPTFAYELAVIFREGLKRMHEKKENIFYYITTMNENYPHPAMPVDKNCEDGILKGMYKIKEFSKYKKTKIQLMGSGTILREVLAGAEILQNEYQIDSEVWSVTSFNELAREGMEAERYNLLNPDKNQKISYVEECLGKKEGPILAASDYMRSHSDQIRPYIKKKFLYFRYGWFR

SEQ ID NO: 95339 - protein, 108 aa, Unknown
  Bacterial polypetide isolated from the Sargasso Sea
MKKLSKSDHLKIFSYMLKIRRFEERSAQLYGMGHIGGFCHLYIGQEAVVVGVLMTIKKNDSVVTTYRDHGHMIARGLDPKKIMAELTGRAEGYSSGKGGSMHMFSKEN

SEQ ID NO: 95340 - protein, 297 aa, Unknown
  Bacterial polypetide isolated from the Sargasso Sea
IYQARFTKYLINRGLLKDEGRKIWCFLGDGETDEPESLGAIGLAAREKLDNLIFVVNCNLQRLDGPVRGNGKIIQELEGIFRGAGWNVIKVIWGSYWDSLLLKDKSGLLIKRMNEAVDGEYQAFKAKGGAFVREKFFGKYPELLNLVSQMTDKDIWKLNRGGHDPHKVYAAYHSATQNTGTPTVILAKTIKGYGMGKSGESINTTHQQKKLDEKDLLYYRDRFDVPLTDQQVKNIEYYKPPDNSPEIKYLKKCRFKLGGNLPERSSFAKPIKAPPPDIFKAMKESTGKKEMSTTMGV

SEQ ID NO: 95341 - protein, 270 aa, Unknown
  Bacterial polypetide isolated from the Sargasso Sea
MSIYQARFNKYLINRGLLKDEGRKIWCFLGDGETDEPESLGAIGLAAREKLDNLIFVVNCNLQRLDGPVRGNGKIIQELEGIFRGAGWNVIKVIWGSYWDQLLAKDKSGLLIKRMGEAVDGEYQAFKAKGGKYVREKFFGKYKELLDMVSQMTDRDIWKLNRGGHDPHKVYAAYHSAMQNKGTPTVILAKTIKGYGMGKSGESMNTTHQQKKLDEEDLLYYRDRFDVPLTDEQVRNIQYYRPDDNSPEIKYLKECRIKLGGNLPERSSFA

SEQ ID NO: 95342 - protein, 221 aa, Unknown
  Bacterial polypetide isolated from the Sargasso Sea
ATIFKEGLRRMHEKHENIFYYITTMNENYSHPEMPKDCEEGILKGMYKIKDFSKNKKNKIQLLGSGTILREMMEAAEILQNEYQVDSEVWSVTSFNELRRDGLETERYNLLNPGGEKKISYVEKCLGKTEGPILAASDYMRMNSDQIRPYINKSFYSLGTDGFGRSDTRKNLRKFFEVDKEHIVAYGLSILSNEQLIASKHAVDAIKKYKIDKDKPMPTKL

SEQ ID NO: 95343 - protein, 272 aa, Unknown
  Bacterial polypetide isolated from the Sargasso Sea
MIPIYIFYSMFGFQRIGDFAWAAGDNQTRGFLIGATAGRTTLAGEGLQHGDGHSHIMSSVIPNCKSYDPTFGYELATIFREGLYRMYEKQENIFYYITTMNENYTHPAMPKEKNIEEGIIKGMYLFKEFNNFKKTKIQFLGSGTILREMIKAAEILQKEYRIDSNVWSVTSFNELRKEALEVERYNLLNPDKNQKKSYIENCIANTEGPILAASDYIRLNTDQIRPFINKSFYSLGTDGYGRSDTRKNLRKFFEVDKEHIVTYALSVLSKEQ

SEQ ID NO: 95344 - protein, 320 aa, Unknown
  Bacterial polypetide isolated from the Sargasso Sea
GRGGHDPKKVYAAYHKAMTHKGQPTVILAKTIKGYGLGEAGEGKNISHQQKKMNEKELREFREHLNVPILDEEIVDTPFFRPKEGTKEYSYIMDRRSELKGPVPERKERIHAFGYKPSYEKHMKGSGDRALSTTMAFVRYLSELLKDKKFGDRIVPIVPDEARTFGMEALFRQYGIYAPFGQLYEPVDSESLLYYREEKNGQILQEGINEAGAMSSFIAAATSYSTHGEVMIPFYIYYSMFGFQRIGDLAWLAADMRSRGFLCGGTSGRTTLNGEGLQHQDGHSLLLASTIPSIQTYDTAFGYEIVTIYYDGLKRMYVDD

SEQ ID NO: 95345 - protein, 279 aa, Unknown
  Bacterial polypetide isolated from the Sargasso Sea
CRTSYTNHDIEMIPIYTFYSMFGFQRIGDLAWAAGDSQARGFLIGATAGRTTLAGEGLQHQDGHSHLIASTIPNCVSYDPTFHYELATIFREGLRRMHEKKENVFYYITTMNENYSHPEMPKDKKIEEGILRGMYKIKEFNKYKKTKIQLLGSGSILREMISAAEILQKDYQIDSDIWSVTSFNELRKDGMEVERFNLLNPDKEKKISYVEESLSKTEGPIMAASDYMRMNSDQIRPYTNKSFYSLGTDGFGRSDTRKNLRKFFEVDKEHLVAYGLSIL

SEQ ID NO: 95346 - protein, 293 aa, Unknown
  Bacterial polypetide isolated from the Sargasso Sea
FAFLGDGEMDEPESKGALTLASRENLDNLVFVVNCNLQRLDGPVRGNSKIIQELEAAFRGAGWNVIKNIWGSDWDDLFAKDTSGALLNRVEEVVDGDLLKYVVEGGAYMREHFFGENPDLKELVKDLSDEELEKMKAGGHDPVKMYSAYKEATAHKGSPTVILARTIKGYGLGEAGEGRNITHNQKKLSDNEMIYFRDRFNIPVSDDDATKGKFQKFDDSSDEYQYLMEQRKKLGGPIPVRVNQPKALKVPDVSIFKELLDGTGEREASTTMSFVRLLSILTKDKSIGKPCCA

SEQ ID NO: 95347 - protein, 247 aa, Unknown
  Bacterial polypetide isolated from the Sargasso Sea
MSKPYKDTDPQETQEWIESIDDALEEHGYERARFLLEELIEYAQSKGARLPFNTNTPFINTILPKDQPDYPGDREIERKIKSFVRWNAMAMVVRANTNTPGIGGHISTYASSATLYEVAFNHFFKGPEHPNGGDLIFYQGHGSPGQYSRAYLEGRLTKENLESFRRELTPGGLSSYPHPYLMPDFWQFATVSMGLGPIMAIYQARFLNYMVDREMIKETGRKVWAFLGDGEMDEPESKGALTLASKE

SEQ ID NO: 95348 - protein, 262 aa, Unknown
  Bacterial polypetide isolated from the Sargasso Sea
MERKIRSLIRWNAAAMVVRANKKNPELGGHIGTFASAATLYDIGMNHFWRAKNNKFGGDLIYFQGHSAPGMYARAFLEGRINEKELDRFRQEVKPGGLSSYPHPWLMPKFWQFPTVSMGLGPIMSIYQARFNKYLINRGLLKDEGRKIWCFLGDGETDEPESLGAIGLAAREKLDNLIFVVNCNLQRLDGPVRGNGKIIQELEGIFRGAGWNVIKVIWGSYWDQLLAKDKSGLLIKRMGEAVDGEYQAFKAKGGKYVREKFL

SEQ ID NO: 95349 - protein, 276 aa, Unknown
  Bacterial polypetide isolated from the Sargasso Sea
RMLTNLLRDKNISPRLVPIIPDEARTFGMEGFFKKIGIYAHEGQKYEPEDAAQLSSYREDKSGQVLEEGINEAGAMSSWIAAATAYTNHDIEMIPIYIFYSMFGFQRVGDLAWAAGDSQARGFLVGATAGRTTLAGEGLQHQDGHSHLIASTIPNCVTYDPTFHYELAVIFQEGLRRMHEKNENVFYYITTMNENYSHPEMPKDKNCEEGILKGMYKIKEFNKYKKTKIQLLGSGTILREMMSAAEILQNDYQIDSQIWSVTSFNELRKDGMEVER

SEQ ID NO: 95350 - protein, 288 aa, Unknown
  Bacterial polypetide isolated from the Sargasso Sea
GENMIPFYIYYSMFGFQRVWDFIWAAGDMRARGFLLGGTAGRTTLNGEGLQHQDGHSHLAAAATPNIKAYDLAYAYEIAVVIKHGIKEMFYEQKDVIYYLTLENENYVHPKMPEKIEKDIIKGMYKIRTTKNPTIRLLGSGPLLNEVIAAADLLKDEWGIDPGIWNVTSFTELRREAEEIERWNLINPEQKQKQSHIEKALNKNPVPTIAVSDYVKMSSEQISPYVSGAYYALGTDGFGRSDTRENLRHFFEVDRHYIVLTAVRALAIEGVLEMSIANKVIKKYNIDS

SEQ ID NO: 95351 - protein, 288 aa, Unknown
  Bacterial polypetide isolated from the Sargasso Sea
MKEEEWAFLGDGEMDDPESMGAIGLAARENLDNLIFVINCNLQRLDGPVRGNGKIIQELEGSFRGSGWNVIKVIWGSYWDSLLANDKTGHLIKIMNETVDGEYQAMKARDGAYVREKFFGKSPETLELVSSMSDKDIWRLNRGGHDPHKVFAAYDKATKHQGSPTVIIAKTIKGYGMGKSGESVNTTHQTKKLDVEDLMYYRDRFDVPLTDEQVRNIEYFRPDEKSPEIKYIKEKRIKLGGYLPERSTFAKPIKAPSKDIFDFMKVSTGKKEMSTTMALVRMLTNLLR

SEQ ID NO: 95352 - protein, 301 aa, Unknown
  Bacterial polypetide isolated from the Sargasso Sea
MILSINTQNGETKSTIPSVTEKIIQEAEKSLEPENQIKNNNNLQKLETKKEDERISINDSSDIDPLETKEWLESLNAVVDYAGNERAHFLLRQLIDQSYRKGSRIPFIQNTPYINTIPPDEEEKSSGDQNIERKIRSLIRWNAAAMVVRANKKFPELGGHIGTFASAATLYDVGMNHFWRAKSHQFGGDLIYFQGHSAPGVYSRAFLEGRLTKEQLDNFRQEVGPNGLSSYPHPWLMHKFWQFPTVSMGLGPMLAIYQARFMKYLINRGLIKDENRKVWTFLGDGEMDEPESLGAFALASR

SEQ ID NO: 95353 - protein, 250 aa, Unknown
  Bacterial polypetide isolated from the Sargasso Sea
HQDGHSHMLASTIPNCVSYDPTFGYELAVIFREGLKRMHEKKENIFYYITTMNENYPHPEMPKDKNCEEGILRGMYKIKEFNKFKKTKIQLLGSGTILREIIAGAEVLQNEYQIDSEVWSVTSFNELRRDGMETERYNLLNPDKKQKVSYVEKCLGKTEGPILSASDYMRSHSDQIRPYVKKSFYSLGTDGFGRSDTRENLRKFFEVDKKHIVTYALSILSKEQLIASKYAQEAIKKYNIETEKPFPSKL

SEQ ID NO: 95354 - protein, 293 aa, Unknown
  Bacterial polypetide isolated from the Sargasso Sea
LGAIGLAAREKLDNLIFVVNCNLQRLDGPVRGNGKIIQELEGIFRGAGWNVIKVIWGSYWDSLLTNDKTGHLVKTMNETVDGEYQAMKARDGAYVRENFFGKYLETKELVSNLSDKDIWRLNRGGHDPHKVFAAYDQASRNVGSPTVIIAKTIKGYGMGKSGESVNTTHQTKKLDIDDLMYYRDRFDVPLTDSQVRNIEYYKPDQKSPEIKYIKERRLKLGGFIPERTTYAKPIKAPPKDIFDNMKDSTGKKEMSTTMALVRMLTSLLRDKNVAPRLVPIIPDEARTFGMEGF

SEQ ID NO: 95355 - protein, 280 aa, Unknown
  Bacterial polypetide isolated from the Sargasso Sea
MKKNQKQYASTQIITKEKPKIIQTVNEGDIDPLETSEWLESLSDVIKKDGNHRAHYLIKELINKAYMEGANIPYTQNTPYINTIPVSEEKKSNGDQNIERRIRSLIRWNAAAMVVRANKKFPELGGHIGTFASAATLYDVGMNHFWRAKNNKFGGDLVYFQGHSAPGMYARAFLEGRLNEKQLDSFRQEVNPGGLSSYPHPWLMPNFWQFPTVSMGLGPMLAIYQARYMKYLINRGLIKDEGRKVWTFLGDGEMDEPESLGAIGLAAREKLDNLIFVVNC

SEQ ID NO: 95356 - protein, 188 aa, Unknown
  Bacterial polypetide isolated from the Sargasso Sea
MNTKILMPALSPTMTEGNLSKWLVKVGDEVKAGDVIAEIETDKATMEIESVEEGYVKELLFLNGEKDIPVNTPIAIISNSLKNKSQEEKIQIAEIHKVVNIDQKSENKSTKEKLDSEIKNKKEKTNYISMREAIRDTIAEEMRLDKKIFLLGEEVAQYQGAYKVTQGLLEEFTNKRIIDTPISEQGLQ

SEQ ID NO: 95357 - protein, 150 aa, Unknown
  Bacterial polypetide isolated from the Sargasso Sea
GSDKSLGDLIYFQGHSSPGIYARSFLEGRLTSEQLDNFRQEIKGQGLSSYPHPWLMPDYWQFPTVSMGLGPIFGIFQAHVMRYLEKRGLIESIDNRKVWVFCGDGEMDEPESMGSISLAGREKLNNLVFVVNCNLQRLDGPVRGNSKIIT

SEQ ID NO: 95358 - protein, 304 aa, Unknown
  Bacterial polypetide isolated from the Sargasso Sea
AEEMRRDSSVFLIGEDVAEAGTPFKITSGLVEEFGTQRVIDTPISEPGFMGLAVGAAMTGSRPIVDIMFGDFLFLIMDQLCNQAAKAHYMSGGKLNVPLVVRTNLGATRRSAAQHSQSLHALVSHIPGLKVAMPSSAYEAKGLLKTAIRDDNPVVIFEDKLMYQDKANVPEDEYLIPFGEAAVLQEGNQVTLIGTSSMRQVCEDAARILGNEEISVEIIDPRTLVPLDEKTILNSAKKTGRVIVVDEGHQNFGVTAEIASRISEKAFYYLDAPVIRMGAMDVPVPFSPVLEDLTVPTAEKVASN

SEQ ID NO: 95359 - protein, 276 aa, Unknown
  Bacterial polypetide isolated from the Sargasso Sea
ETLELVSSMSDIDIWRLNRGGHDPHKVFAAYDKATKSVGSPTVIIAKTIKGYGMGKSGESVNTTHQTKKLDVDDLMYYRDRFDVPLTDDQVRNIEYFRPDEKSPETKYIKERRIKLGGYLPERSTFAKPIKAPSKDIFDFMKVSTGEKEMSTTMALVRMLTNLLRDKNISPRLVPIIPDEARTFGMEGFFQKIGIYAHEGQKYEPEDSAQLSSYREDKSGQVLEEGINEAGAMSSWIAAATAYTNHDIEMIPIYIFYSMFGFQRTGDLAWAAGDSQ

SEQ ID NO: 95360 - protein, 209 aa, Unknown
  Bacterial polypetide isolated from the Sargasso Sea
MSDLNQNYFEKITYRDALRLAMHDAMMEDKTIIIMGEDVANYGGAYGATKDLLKLFGKERVIDTPISEPAIVGAAVGAAMSGLRPIAELMYVDFFGMSMDQIANQLAKIRYMFGGQISAPMVLRTQGGTGRSGGAQHSQSLESWIMHTPGLFLSMPAKPHDAYHLLRHALKIDNPTIFIEHKLLYNSTGTLDKSDKITPFGKANILKKG

SEQ ID NO: 95361 - protein, 312 aa, Unknown
  Bacterial polypetide isolated from the Sargasso Sea
THLLRDKNIAPRLVPIIPDEARTFGMEGFFRKIGIYAHEGQKYEPEDSEQLSSYREDKKGQVLEEGITETGAMSSFIAAGTSYTNHDLEMIPVYTFYSMFGFQRVMDLIWAAGDSQTRGFLIGATSGRTTLAGEGLQHQDGHSHLLASTIPNCVSYDPTFAYELAIIFREGLKRMHDNQENIFYYLTTMNENYAHPELPKNCEEGILKGMYLFKQFNNKGKIRVQLLGSGTILREMISAAEILSKDYDIDSDIWSVTSFNELRKDGMEIERKNLLNPSEKPEKSYVEKCLGNRDGPIIAASDYMRSFADQIR

SEQ ID NO: 95362 - protein, 307 aa, Unknown
  Bacterial polypetide isolated from the Sargasso Sea
LGAIGLAAREKLDNLIFVINCNLQRLDGPVRGNGKIIQELEGIFRGAGWNVIKVIWGSYWDSLLLNDKTGHLVKTMNETVDGEYQAMKARDGAYVREKFFGKYAETKELVSSLSDKDIWRLNRGGHDPHKVFAAYDKASKNIGSPTVVIAKTIKGYGMGKSGESVNTTHQTKKLDIDDLMYYRDRFDVPLTDQQVKNIEYYKPDQNSPEIKYIKERRLQLGGFIPERTTYAKSIKTPPKDIFDNMKVSTGKKEMSTTMALVRMLTNLLRDKNVAPRLVPIIPDEARTFGMEGFFQKVRVYMLMKGKN

SEQ ID NO: 95363 - protein, 181 aa, Unknown
  Bacterial polypetide isolated from the Sargasso Sea
AHRLPRAHGAAAGVAAHHSQCFAAWYSHCPGLKVVAPYSAEDARGLLKAAIRDDNPVCFLENEILYGMSFDVSEECKGADFTLPIGECKVMGMGTWAHGRMYTGMGTCARACVCILPRGRAPVHVRTQVERAGPSMHPMHVGVHTCASSHVHPLMCMACAGRARGHRRDARLVLARRAHVA

SEQ ID NO: 95364 - protein, 296 aa, Unknown
  Bacterial polypetide isolated from the Sargasso Sea
SVLEMVKDLSDEDIYRLNRGGHDPYKVYAAYHKAVNSKGAPTVILALTTKGYGTGSREADNTTHQVKKLSLENIKSFRDKFDIPIPDSEIEKLPYVRPAEDSPEIQYLKKTRKALGGFIPRRRTSSEILKMPNKKIFEKLYQSSGDRKISTTMAIVRIITDLLKDNNIGERVVPIVPDEARTFGMEALFRQVGIYSSQGQKYEPEDADKVMWYKESKDGVMLEEGITEAGAFSAWTALATAYSNYDLPMIPFYLFYSMFGFQRVHDLSWAAGDAQARGFLIGATSGRTTLNGEGLQ

SEQ ID NO: 95365 - protein, 325 aa, Unknown
  Bacterial polypetide isolated from the Sargasso Sea
LYEPVDSDQFLYYKEAKDGQILEEGINEAGAISSFIAAGMSYSNHSVHMIPFYIYYSMFGFQRVWDFIWAAGDMRVRGFLLGGTAGRTTLNGEGLQHQDGHSHLAAAATPNIKAYDLTYAYEIAVVVIKGVEEMVNEDKDVIYYITLENENYAHPSMPEGIEKDIIKGLYKMRSTKSPKIRLLGSGPLMNEVLFAADLLKEDWGIEPGVWNVTSFSELRRDSEMTSRWNLVHPGSMPKQSHLEKCLSVNRVPTIAVSDYVKMVSEQIAPYVPGSYYSLGTDGFGRSDTRENLRRFFEIDRYYIVLTAIRALVDSGEFEKKHDRKS

SEQ ID NO: 95366 - protein, 303 aa, Unknown
  Bacterial polypetide isolated from the Sargasso Sea
MSSWIAAGTAYTNHDLEMIPIYIFYSMFGFQRVGDLAWAAGDSQARGFLIGATAGRTTLAGEGLQHQDGHSHLLASNIPNCVSYDPTFAYEMATIFRDGIKRMHEKKENVFYYITAMNENYTHPEKPKGCEAGILKGMYLFKENNKKGKTKVQLLGSGTILREIISASKILSDDYGIDSDVWSVTSFNELRRNGMETERWNLLNPDEKMKKSYVQKCLEKRDGPIIAASDYTRSFSDQIRPYTEKSFYSLGTDGYGRSDTRKNLRKFFEVDKEHIVAYTLSALAKEQLIETKQAERAIKKYKI

SEQ ID NO: 95367 - protein, 84 aa, Unknown
  Bacterial polypetide isolated from the Sargasso Sea
TAKTLYMSGGQMKAPIVFRGPNGAASRVAAQHSQCFAGWYSHCPGLKVVAPYSGADAKGLLKSAIKDPNPIVFLENELLYGQSV

SEQ ID NO: 95368 - protein, 294 aa, Unknown
  Bacterial polypetide isolated from the Sargasso Sea
KRKLDNLIFVINCNLQRLDGPVRGNGKIIQELEGIFRGAGWNVIKVIWGSYWDPLIAKDKSGLLVKRMNECVDGEYQAFKAKGGAYVREKFFGKYPELKDLVSAMTDRDVWKLNRGGHDPHKVYAAYDAATKTKGQPTVILAKTIKGYGMGKSGESTNITHQQKKLGEEDLLYYRDRFDIPLTDKQVKNIEFYKPDEKSEEIKYIKERRMKLGGNLPERSSYAKPIKKPSKDIFENMLQSSGDREMSTTMALVRMLTNLLRDKNIAARLVPIIPDEARTFGMEGFFQKIGIYAH

SEQ ID NO: 95369 - protein, 262 aa, Unknown
  Bacterial polypetide isolated from the Sargasso Sea
MSSWIAAGTSYTNHDLEMIPIYLFYSMFGFQRIGDLAWAAADSQARGFLIGATSGKTTLAGEGLQHQDGHSLLMASAIPNCVSYDPTFSYEMAVIFRDGLKRMHEKKENIYYYITAMNENYSHPEKPAGSDQGILKGLYLFKNYKGKGKAKVQMLGSGSILREVIKAAETLSKDYGIDCNVWSATSFNELKKDGMEIERRNLLNPKDKPKKSYVQKCLDSQEGIVFAASDYIRSHTDQIRPYLNKPFYTLGTDGFGRSDTRK

SEQ ID NO: 95370 - protein, 278 aa, Unknown
  Bacterial polypetide isolated from the Sargasso Sea
FGMEGFFQKIGIYAHEGQKYEPEDSAQLSSYKEEKSGQVLEEGINEAGAMSSWIAAGTSYTNHDIEMIPIYLFYSMFGFQRIGDFAWAGADSQSRGFLIGATAGRTTLAGEGLQHQDGHSHLMASTIPNCISYDPTFHYELAVIFREGLRRMHEKKENIFYYITTMNENYPHPEMPKYKSCEEGILKGMYKIKEFNKYKKTKIQFLGSGTILREMIAGAEILQNEYQIDSEIWSVTSFNELRRDGLEVERYNLLNPDKEPKKSYVEKCLGNAEGPILA

SEQ ID NO: 95371 - protein, 281 aa, Unknown
  Bacterial polypetide isolated from the Sargasso Sea
NNLPMIPFYIFYSMFGFQRTHDLAWAAGDSRARGFLLGATSGRTTLNGEGLQHQDGHSHILASTIPNCRSYDPCYSYELSAIIQEGINDMYVNGNDRYYYITLMNENYSHPAKPKKLKNEEILKGAYKLKENKNTNLRILASGVTLNFALEAEKELKNYGINADIWSITSFNELYREGIEIERQNRLNSTSNKSYVEDCFSDEIPTIAVSEYQKAYPNQIREWINGEYKILGTDGFGRSDTREELRDFFEISKEHIVLNSLLLHGKKKEAEKFIKDSGMVL

SEQ ID NO: 95372 - protein, 304 aa, Unknown
  Bacterial polypetide isolated from the Sargasso Sea
PHPWLMPKFWQFPTVSMGLGPMMAIYQARFTKYLINRGLLKDQDRKIWCHLGDGEMDEPESFGAVGLAAREKLDNLIFVINCNLQRLDGPVRGNGKIIQELEGRFRGSGWNVIKVIWGSYWDQLLSKDKTGLLVKRMNEAVDGEYQAFKAKGGAYVREKFFGKYTELKELVANMTDADIWKLNRGGHDPHKVYSAYHAAVRCKGKPTVIIAKTIKGYGMGKSGESINTIHQQKKLDEEDLLFYRDRFNVPLTDKQVKNIEYYKPPENSPEIKYLKNCRHKLGGNIPERTTFAKPVKTPPQDILK

SEQ ID NO: 95373 - protein, 278 aa, Unknown
  Bacterial polypetide isolated from the Sargasso Sea
YLLKKVIDEAYTQGLILPDTRTTPYINTIPSAADVRSPGDQNIERKIRAYIRWNAAAMVVKANKKNPELGGHIGTFASAATLYDVGMNHFWRAKNNKFGGDLVYFQGHSAPGMYARAFLEGRITEKQLDKFRQEVEKGGLSSYPHPWLMPKFWQFPTVSMGLGPMMAIYQARFTKYLINRGLLKDQDRKIWCHLGDGEMDEPESFGAVGLAAREKLDNLIFVINCNLQRLDGPVRGNGKIIQELEGRFRGSGWNVIKVIWGSYWDQLLSKDKTGLLVK

SEQ ID NO: 95374 - protein, 290 aa, Unknown
  Bacterial polypetide isolated from the Sargasso Sea
IGLAARENLDNLIFVINCNLQRLDGPVRGNGKIIQELEGSFRGAGWNVIKVIWGSYWDALIANDKTGHLVKIMNETVDGEYQAMKARDGAYVREKFFGKYSETSELVSSLSDKDIWRLNRGGHDPHKVFAAYDKASKNQGSPTVIIAKTIKGYGMGKTGESVNTTHQTKKLDVDDLMYYRDRFDVPLTDEQVRNIEYFKPDDKSPEIKYLKERRLNLGGFLPERTTYAKPIKTPSKDIFDFMKVSTGEKEMSTTMALVRMLTNLLRDKNISPRLVPIIPDEARTFGMEGF

SEQ ID NO: 95375 - protein, 244 aa, Unknown
  Bacterial polypetide isolated from the Sargasso Sea
HLIASTIPNCISYDPTFHYELAVIFREGLKRMHEKNENIFYYITTMNENYTHPEIPKDKKCEDGILKGMYKIKEFNKYKKTKIQFLGSGTILREMMAGAEILQKEYKIDSEVWSVTSFNELRRNGLEVERYNLLNPDKEKKKSYVEKCLENTEGPVLAASDYMRMNSDQIRPYVNKSFYSLGTDGFGRSDTRKNLRKFFEVDKEHIVAYGLSVLAKEQLLTSKYATDAIKKYKIDTEKLMPTKL

SEQ ID NO: 95376 - protein, 284 aa, Unknown
  Bacterial polypetide isolated from the Sargasso Sea
STTMALVRMLTNLLRDKNVASRLVPIIPDEARTFGMEGFFQKIGIYAHEGQKYEPEDAAQLSSYREEKSGQVLEEGINEAGAMSSWIAAGTSYTNHDIEMIPIYLFYSMFGFQRIGDFAWAGADSQARGFLIGATAGRTTLAGEGLQHQDGHSHLMASTIPNCKSYDPTFHYELATIFRDGLKRMHEKKENIFYYITTMNENYPHPAMPTDKSCEEGILKGMYKIKEFNKYKKTKIQFLGSGTILREMLAGAEILQKEYQIDSEVWSVTSFNELRRDGLEVERY

SEQ ID NO: 95377 - protein, 281 aa, Unknown
  Bacterial polypetide isolated from the Sargasso Sea
HDIEMIPIYLFYSMFGFQRIGDFAWAAGDSQARGFLIGATAGRTTLAGEGLQHQDGHSHLLASTIPNCISYDPTFHYELAVIFREGLRRMHEKNENIFYYITTMNENYSHPAMPDDCENGILKGMYKIKETSSSKDAKIQLLGSGTILREMMAASEILKKEYQVDSEVWSVTSFNELRKNGMEVERFNLLNPAETSKKSYVEECLGKQQGPILTATDYMRINADQIRPFTKKSFYSLGTDGYGRSDTRKNLRNFFEVDKEHIVAYSLSVLANEQLVASKYG

SEQ ID NO: 95378 - protein, 265 aa, Unknown
  Bacterial polypetide isolated from the Sargasso Sea
MSKDNLSKKELLKLQEKMILIREFEEACGENYAKGFIRGFLHLYIGEEAIAVGAISSLEKEDYVVTHYRDHGHALARGLSTESVMAELFGKSTGVSKGKGGSMHLFDVEKNFMGGHAIVGAQLPLALGIALACKYKKENNVVLVFFGDGAVSQGTFHETLNLASLWELPVLFFLENNLYGMGSHVENTRAEGRDIYSSADAYGIQAEIVDGMNVLEVLDITKKSLESIRNNSKPILIEAKTFRFSGHSMADPAKYRSKDELNYWL

SEQ ID NO: 95379 - protein, 279 aa, Unknown
  Bacterial polypetide isolated from the Sargasso Sea
IGLRGDSQARGFLIGATAGRTTLAGEGLQHQDGHSHMLASTIPNCKSYDPTFAYELAVIFREGLKRMHEKKENIFYYITTMNENYPHPAMPVDKNCEEGILKGMYKIKEFTKYKKTKIQLMGSGTILREVLAGAEILQKDYQIDSEVWSVTSFNELAREGMEAERYNLLNPDKSQKISYVEECLAKKEGPILAASDYMRSHADQIRPYIKKSFYTLGTDGFGRSDTREKLRKFFEVDKEHIISYALSVLSKEQLIPTKYAKEAIKKYKIDPEKPFPSKI

SEQ ID NO: 95380 - protein, 259 aa, Unknown
  Bacterial polypetide isolated from the Sargasso Sea
SVGLAMKEKDTFTTHHRGHGIFIARGGNPKKMLAEIAGKKDGYCKGKGGSMHIADMKLGHLGANAIVGGGIPTVVGAGISYKFLKEKRVSVAFFGDGAMQQGILYESMNMASLWKLPVVFCCINNQYGMGTKIDDAVGFKDFSKRAESFGLNSLHINDLDVENAYHKSKEIIEDARKFKPGFIEIECYRFFGHARMDKSPYRNDCEEKEMRKLDPINYAKNKLIKDNIFNEEEILKIDNDILKEMDSAMEFAIKSPVND

SEQ ID NO: 95381 - protein, 267 aa, Unknown
  Bacterial polypetide isolated from the Sargasso Sea
RFFDWSTSGKTTLAGEGLQHQDGHSLLMASAIPNCVSYDPTFSYEMAVIFRDGLKRMHEKKENIYYYITAMNENYTHPEKPAGSDQGILKGMYLFKNYKGKGKAKVQMLGSGSILREVIKAAETLSKDYGIDCNVWSATSFNELKKDGMEVERRNLLNPREKPKKSYVQKCLDSQEGIIFAASDYIRSHADQIRPYTNKPFYTLGTDGFGRSDTRKELRKFFEVDKKHIVTYTLSALAKEQLLESKHAEKAIKKYDIDQEKVFPTKL

SEQ ID NO: 95382 - protein, 88 aa, Unknown
  Bacterial polypetide isolated from the Sargasso Sea
ILEVQTYRYKGHSMSDPAKYRTKEELESYKVNDPIILASKEILKKKILSKKDLEKINSEIVQEIRDAAQYAIDSPFPEEKELFTNVYL

SEQ ID NO: 95383 - protein, 209 aa, Unknown
  Bacterial polypetide isolated from the Sargasso Sea
TNHDIEMIPIYLFYSMFGFQRIGDFAWAAGDSQARGFLIGATAGRTTLAGEGLQHQDGHSHLLASTIPNCISYDPTFHYELAVIFREGLRRMHEKNENIFYYITTMNENYSHPEMPKDCEDGILKGMYKIKESSSSKEAKIQLLGSGTILREMMAASDILKKEYQVDSEVWSVTSFNELRKNGMEVERQNLLNPSETNKKIVYRGVLGK

SEQ ID NO: 95384 - protein, 81 aa, Unknown
  Bacterial polypetide isolated from the Sargasso Sea
VSKTEMSTKSSPHGVPAHVVDGQDVLATYAFFRELTAQVREGAGPQYVDLQTYRFHGHSMSDPVSGTYRSVEEVEQAKDER

SEQ ID NO: 95385 - protein, 137 aa, Unknown
  Bacterial polypetide isolated from the Sargasso Sea
GRSAAGGELYERATVFGIKGEKVDGMNFFNVSESAIRAREYIEKNSKPYIIEMDTYRYRGHSMSDPGLYRTKDEVNKMKEIDPVLMMKETLLNDYKIQEDTIKDIESDIKKQIKEVEKFSLESPLPDLKELYTEVYL

SEQ ID NO: 95386 - protein, 82 aa, Unknown
  Bacterial polypetide isolated from the Sargasso Sea
YRYRGHSMSDPAKYRTRSEVDAVRQQKDCIENLKEVLQEQKVTDQELKNIDGEIKSLVTKASDFALESKLPDDNELLTDIYL

SEQ ID NO: 95387 - protein, 213 aa, Unknown
  Bacterial polypetide isolated from the Sargasso Sea
TLYDVGMNHFWRAKNNKFGGDLIYFQGHSAPGMYARAFLEGRLNEKQLDKFRQEVKPGGLSSYPHPWLMPNFWQFPTVSMGIGPMLAIYQARFMKYLINRGLIKDQNRKVWAFIGDGETDEPESLGAIGLAAREKLDNLIFVVNCNLQRLDGPVRGNGKIIQELEGIFRGSGWNVIKVIWGSYWDQLLAKDKTGHLVKLMNETVDGEYQAYKA

SEQ ID NO: 95388 - protein, 265 aa, Unknown
  Bacterial polypetide isolated from the Sargasso Sea
NHNFPMMPFYIFYSMFGFQRIGDLIWAAADQMPRGFLIGATAGRTTLAGEGLQHQDGQSQVIASTFPNLKSYDPCFANELAVIFDEGMRRMMTECRDEFYYVTVNNEKYTHPKIDLSNKEGIIKGGYLFKDLSNKELNINLLGSGPIFRECIEAANILKEDYGIGSRLYSITSYSELEKDAKSILRQNTLSPSNKKQNYLQQLISNNDPIVATSDYVRAYSQLISSYTDNKFLALGTDGFGRSDTRKNLRDFFEVDSKHIVVSSL

SEQ ID NO: 95389 - protein, 156 aa, Unknown
  Bacterial polypetide isolated from the Sargasso Sea
LENEILYGKSFSVEDKKESLEPIGKAKILRTGTDVTIVSYGIGVMHSLEAESKLADMKIKAEVIDLRTIRPIDFDTIIESVKKTNRCITVEESFPVCSIGSYIASQIMVKAFDYLDAPVLSCSGKDVPMPYAENLEKAALITTDEIISAVKEVIYS

SEQ ID NO: 95390 - protein, 180 aa, Unknown
  Bacterial polypetide isolated from the Sargasso Sea
MRKLKFNEAIRESTSILMKKNKNVIVVGLGVSDPKGIFGTTSNLHKLYGSKRVFEIPISENAITGIIIGASINGMRPILSHQRVEFSLLSIEQIFNQAAKLFYMTGGAINVPIVIRIIIGRGWGNGAQHTQSLESIFSHVPGLKVVVPSNAYDAKGLLAASVKDNNPVVFLEHRWLHNTT

SEQ ID NO: 95391 - protein, 189 aa, Unknown
  Bacterial polypetide isolated from the Sargasso Sea
QTTPYVNTIPPEEEKRSSGDQNIERKLRSLIRWNAAAMVVRANKKHPELGGHIGTFASAATLYDVGMNHFWRAKNNKFGGDLVYFQGHSAPGMYARAFLEGRLNEKQLDRFRQEVQTGGLSSYPHPWLMPNFWQFPTVSMGIGPMLAIYQARFMKYLINRGLIKDEGRKVWAFLGDGEMDEPESLGAIG

SEQ ID NO: 95392 - protein, 308 aa, Unknown
  Bacterial polypetide isolated from the Sargasso Sea
CATSYANHDQPLIPFYIYYSMFGHQRVGDLVWAAGDIQAKGFLLGATSGRTTLNGEGLQHQDGHSHVLAGTVPNQRSYDPTYSYEVAVIVQHGLKQMYDENQSVFYYITLMNENYGHPDMPEGAEAGIIKGMYLLRPAVPKMRHTIRLLGSGTILREVEAACELLADFEVAAEVYSATSFNELRRDGQSAARYNLLHPEEKTARISHVEALLGGSDAPVVAATDHIQLYSEQIRPFLGRTTYITLGTDGFGRSDSRKKLREHFEVDRRFVTIAALRALSMDGKIDPKIVTKAIKEFGIDPDRLDPVIL

SEQ ID NO: 95393 - protein, 294 aa, Unknown
  Bacterial polypetide isolated from the Sargasso Sea
TIPSTSDVRSPGDQNLERKIRAYIRWNAAAMVVKANKKNPELGGHIGTFASAATLYDVGMNHFWRAKNNKFGGDLVYFQGHSAPGMYARAFLEGRISEKQLDKFRQEVEKGGLSSYPHPWLMPKFWQFPTVSMGLGPMMAIYQARFTKYLINRGLLKDQDRKIWCHLGDGEMDEPESFGAVGLAAREKLDNLIFVINCNLQRLDGPVRGNGKIIQELEGRFRGSGWNVIKVIWGSYWDQLLSKDKTGLLIKRMNEAVDGEYQAFKAKGGAYVREKFFGKYPELKELVANMTEQI

SEQ ID NO: 95394 - protein, 184 aa, Unknown
  Bacterial polypetide isolated from the Sargasso Sea
REIRSLIRWNAAAMVVRANKKFPELGGHIGTFASAATLYDVGMNHFWRAKNNKFGGDLIYFQGHSAPGMYARAFLEGRLNEKQLDSFRQEVNPGGLSSYPHPWLMPKFWQFPTVSMGLGPMLAIYQARYMKYLINRGLIRDEGRKVWAFLGDGEMDEPESLGAIGLAAREKLDNLIFVVNCNLQ

SEQ ID NO: 95395 - protein, 257 aa, Unknown
  Bacterial polypetide isolated from the Sargasso Sea
LAGEGLQHQDGHSHLMASTIPNCKSYDPTFHYELATIFREGLKRMHEKKENIFYYITTMNENYPHPAMPAEKSCEEGILKGMYKIKEFNKHKKTKIQFLGSGTILREMIAGAEILQKEYQIDSEVWSVTSFNELRRDGLEVERYNLLNPEKEPKKSYVESCLGKTEGPILAASDYMRMNSDQIRPYINKSFYSLGTDGFGRSDTRKNLRKFFEVDKEHVVAYGLSVLAKEQLIASKYAQEAINKYQIDKDKPMPTKL

SEQ ID NO: 95396 - protein, 314 aa, Unknown
  Bacterial polypetide isolated from the Sargasso Sea
SSWIAAATAYTNHDIEMIPIYIFYSMFGFQRVGDLAWAAGDSQARGFLVGATAGRTTLAGEGLQHQDGHSHLIASTIPNCVTYDPTFHYELAVIFREGLRRMHEKNENVFYYITTMNENYSHPEMPKDKNCEEGILKGMYKIKEFNKYKKTKIQLLGSGTILREMMSAAEILQNDYQIDSEIWSVTSFNELRKDGMEVERYNLLNPDKEPKKSYVEQCLGQTEGPIMAASDYMRMNSDQIRPYTNKSFYSLGADGFGRSDTRKNLRKFFEVDKEHLVAYGLSILAKEQLITSKHAKDAMKKYNIDTNKPMPTKL

SEQ ID NO: 95397 - protein, 305 aa, Unknown
  Bacterial polypetide isolated from the Sargasso Sea
LKGVMESDGPSRAGYLIKKIIDEAYSEGLTLPDTRTTPYINTIPALADVRSPGDQNIERKIRAYIRWNAAAMVVRANKKNPELGGHIGTFASAATLYDVGMNHFWRAKNNKFGGDLIYFQGHCSPGMYARAFLEGRINEKQLDRFRQEVEPGGLSSYPHPWLMPKFWQFTTVSMGLGPMMAIYQARFTKYLINRGLLKNQDRKIWCHIGDGEMDEPESLGAIGLAAREKLDNLIFVVNCNLQRLDGPVRGNGKIIQELEGRFRGAGWNVIKVIWGSYWDPLLSKDKTGLLVKRMTEAVDGEYQAF

SEQ ID NO: 95398 - protein, 279 aa, Unknown
  Bacterial polypetide isolated from the Sargasso Sea
AWAGADSQSRGFLIGATAGRTTLAGEGLQHQDGHSHLMASTIPNCVSYDPTFHYELAIIFREGLRRMHEKKENVFYYITTMNENYSHPEMPKDKKCEEGILKGMYKIKEFNKHKKTKIQFLGSGTILREMIAGAEILQKEYKIDSEVWSVTSFNELRRDGLEIERYNLLNPDKDQKKSYVEICLGGTEGPILAASDYMRINSDQIRPYVNKSFYSLGTDGFGRSDTRTKLRKFFEVDKEHIVAYGLSILAKEQLLASKYAKDAIKKYKIDTEKTIPTKL

SEQ ID NO: 95399 - protein, 197 aa, Unknown
  Bacterial polypetide isolated from the Sargasso Sea
MKTEILMPSLSPTMEEGSLAKWYVSPGDRVKPGDIIADIETDKALMEYESIEEGTIIELIVKEGTENIKVNSLIAILETEGAEEINIRKVDGIEKSEFVTIDNNEEVLSLEDKVDSEDTTFEESERLNRETTESQVVNELTVREAINSAIAEEMRLDEDVFLMGEEVGEYQGAYKVSQGLLDEFGSERVIDTPITEH

SEQ ID NO: 95400 - protein, 303 aa, Unknown
  Bacterial polypetide isolated from the Sargasso Sea
MLHLSIGEEAAAVGVGEVMKSGDGFTTHHRGHGIFLARGADPKRMMAEIGGKENGYCRGKGGSMHIADNDLGHLGANAIVGGGISHVVGAGLSYQYLGKDQAAVAFFGDGAMQQGGLYESMNLAALWKLPVMFVCINNEYGMGTRLDRASASLEFAKRAETFGLNGLEVDGLDVSQVLYNAQVLMDGVRNGRPAFLKVNCYRFHGHARKDKSHYREEAEEHKGREKDPIVHIENQLVKNKLVATDDIEEIKSQIDIEMDEAMEFALNSSEPETIQRFQDVYAPESPEPLPVDERILQALRSYN

SEQ ID NO: 95401 - protein, 300 aa, Unknown
  Bacterial polypetide isolated from the Sargasso Sea
ILLKKVIDEAYTQGLTLPDTRTTPYINTIPATADIRSPGDQNLERKIRAYIRWNAAAMVVKANKKNPELGGHIGTFASAATLYDVGMNHFWRAKNNKFGGDLVYFQGHSAPGMYARAFLEGRITEKQLDKFRQEVEKGGLSSYPHPWLMPKFWQFPTVSMGLGPMMAIYQARFTKYLINRGLLKDQDRKIWCHLGDGEMDEPESFGAVGLAAREKLDNLIFVINCNLQRLDGPVRGNGKIIQELEGRFRGSGWNVIKVIWGSYWDQLLSKDKTGLLVKRMTEAVDGEYQAFKAKGGAYVR

SEQ ID NO: 95402 - protein, 256 aa, Unknown
  Bacterial polypetide isolated from the Sargasso Sea
NLDNLIFVVNCNLQRLDGPVRGNGKIIQELEGIFRGAGWNVIKVIWGSYWDPLLANDKTGHLVKTMNETVDGEYQAMKARDGAYVREKFFGKYLETKELVSSLSDKDIWRLNRGGHDPHKVFAAYDKASKNIGSPTVVIAKTIKGYGMGKSGESVNTTHQTKKLDIDDLMYYRDRFDVPLTDNQVKNIEYYKPDQNSPEIKYLKEKRLQLGGFIPERTTYAKPIKAPPKDIFDNMKLSTGKKEMSTTMALVRMLTN

SEQ ID NO: 95403 - protein, 329 aa, Unknown
  Bacterial polypetide isolated from the Sargasso Sea
RSSFAKQIKAPPKEIFDNFMKSTGDKEMSTTMALVRMLTALLRDKNISPRLVPIIPDEARTFGMEGFFQKIGIYAHEGQKYEPVDSEQLSSYREDKSGQVLEEGINESGAMSSWIAAGTAYTNHDLEMIPIYIFYSMFGFQRVGDLAWAAGDSQARGFLIGATAGRTTLAGEGLQHQDGHSHLLASNIPNCISYDPTFAYEMAVILRDGLKRMHEKKENIFYYITAMNENYSHPEKPKGSNEGILKGMYLFKENNNKNKTKVQLLGSGTILREIIAAAEILSKDYGVDSDVWSVTSFNELRKDGMETERWNLLNPNEKKKKSYVQKCLE

SEQ ID NO: 95404 - protein, 334 aa, Unknown
  Bacterial polypetide isolated from the Sargasso Sea
IGLAARENLDNLIFVVNCNLQRLDGPVRGNGKIIQELEGSFRGAGWNVIKVIWGSYWDSLLANDKTGHLIKIMNETVDGEYQAMKARDGAYVREKFFGKSPEALELVSSMSDKDIWRLNRGGHDPHKVFAAYDKATKNQGSPTVIIAKTIKGYGMGKSGESVNTTHQTKKLDVDDLMYYRDRFDVPLTDEQVRNIEYFRPDEKSPEIKYIKERRIKLGGFLPERSTFAKPIKAPTKDIFDFMKVSTGEKEMSTTMALVRMLTNLLRDKNISPRLVPIIPDEARTFGMEGFFQKIGIYAHEGQKYEPEDAAQLSSYREDKSGQVLEEGINEAGAM

SEQ ID NO: 95405 - protein, 190 aa, Unknown
  Bacterial polypetide isolated from the Sargasso Sea
MKNNYLRFDEAINKTLHSEMFKNKKTIYFGLGADDSSRIFNTTNGLREKYGNLRVFDTPISENSMTGVAVGMCLNGFSTIMSHQRMDFFLLAMDQLVNSAAKWNFMFGNQNKINLTIRLIVGRGWGQGPTHSQNLQSWFAHIPNLKIVSPSFPSTAAALLSQSIRDPYPTLFIENRWCHQLKEGFQSYNK

SEQ ID NO: 95406 - protein, 322 aa, Unknown
  Bacterial polypetide isolated from the Sargasso Sea
KIIEEKLPPDTEKIINEAEKTLILKKEVVEKKDKKINNEISKIQITKDGDIDPIETKEWLESLSAVLQNDGKNRAQFLIKQLIEHSYKEGSDLVLSRNTPYINSIPPEEEQKSPGDQNLERRIRSLIRWNAAAMVVRANKKNPELGGHIGTFASAATLYDVGMNHFWRAKNNKFGGDLIYFQGHSAPGMYARAFLEGRITSKELDKFRQEVDPGGLSSYPHPWLMPKFWQFPTVSMGLGPIMSIYQARFNKYLINRGLLKDEGRKIWCFLGDGEADEPESLGAIGLAARENLDNLIFVVNCNLQRLDGPVRGNGKIIQELEG

SEQ ID NO: 95407 - protein, 242 aa, Unknown
  Bacterial polypetide isolated from the Sargasso Sea
MVSKANKNFAGLGGHISTYASAASLYEVGFHHFFKGKEQGIGDFIYYQGHASPGIYSRAYLEGRLNEKQLDHFRRESFADGLSSYPHPRLMPDFWEFPTVSMGLGPTNAIYHARFLRYLQERGIADTSNSRVWAFLGDGECDEPETLHALHLAHREKLDNLTFVVNCNLQRLDGPVRGNGKIIQELEAIFRGSGWNVMKVLWGRDWDPLLQKDEMGHLLKRMNETVDGDYQTLAASSGDYIR

SEQ ID NO: 95408 - protein, 308 aa, Unknown
  Bacterial polypetide isolated from the Sargasso Sea
SRAFLEGRLSKENVHNFRRELSEEGGLSSYPHPYLMPKFWQFATVSMGLGPIMAIYQARFMRYMVDRGFIEETGRKVFAYLGDGEMDEPESKGALTLASREELDNLIFVINCNLQRLDGPVRGNSKVIQELEGAFRGAGWNVIKVIWGSGWDDLLSKDSKGLLLSRMEEVVDGDLLKYTVEGGSYFREHFFGKSQGLLNLVNHLTDEQLEELKPGGHDPEKVYAAFNEAINHKGAPSVILARTIKGYGMGDAGEGKNITHNQKKLDEKSLVYFKNRFKMDMGDKKAQDAEIFELHKETEEFKYLIEKR

SEQ ID NO: 95409 - protein, 299 aa, Unknown
  Bacterial polypetide isolated from the Sargasso Sea
MGEYQAMKARDGAYVREKFFGKYPETSELVSNLSDKDIWRLNRGGHDPHKVYAAYDKAMRNKGSPTVIIAKTIKGYGMGKSGESVNTTHQTKKLDVDDLMYYRDRFDVPLTDEQVRNIEYFRPDENSPEIKYLKERRLKLGGFLPERSTFAKPIKAPSKNIFDFMKVSTGEKEMSTTMALVRMLTSLMRDKNISPRLVPIIPDEARTFGMEGFFQKIGIYAHEGQKYEPEDAAQLTSYREEKSGQVLEEGINEAGAMSSWIAAATAYTNHDIEMIPIYTFYSMFGFQRIGDLAWAAGDS

SEQ ID NO: 95410 - protein, 298 aa, Unknown
  Bacterial polypetide isolated from the Sargasso Sea
MRANLVLKKLIDHAHSLGLNAISGVNTPYLNTHSLGEPAATALPNDFSVCDRILSYTRWNALAMVMRSGRISSELGGHLATYCSSATLFEVGFNYFFRSSCSEHNADVVFFQGHASPGVYARAFLEGRFSEDQLINFRQEAFNDGLSSYPHPWLMPSFWQMPTVSMGLGPLTAIYVAQFFKYMAARRIGRTESQRVWAFCGDGELGEPESLGALNIAARDKLDNLIIVVSCNLQRLDGPVSGNGQIIQEYEGVFRGAGWNVIKLIWGSDWEELLQKDTSGILQKRMEELVDGEQQSYA

SEQ ID NO: 95411 - protein, 184 aa, Unknown
  Bacterial polypetide isolated from the Sargasso Sea
MRELSLSQAVNEAIAEEMRRDPKVILMGEDVAEAGTPFKVLSGLVEEFGTERVIDTPISEPGFSGIAVGAAMTGLRPIVDLMFGDFLFLVMDQICNQAAKTHYMSGGKLKVPMVLRTNLGATRRSAAQHSQSLHALVAHIPGLKVAMPSSAYEAKGLLKSAVRDNNPVVIFEDKLMYQDKANVP

SEQ ID NO: 95412 - protein, 319 aa, Unknown
  Bacterial polypetide isolated from the Sargasso Sea
KKEELQLGGFIPERTTYAKPIKAPPKNIFDNMKESTGKKEMSTTMALVRMLTNLLRDKNVASRLVPIIPDEARTFGMEGFFQKIGIYAHEGQKYEPEDSAQLSSYREEKSGQVLEEGINEAGAMSSWIAAGTSYTNHDIEMIPIYLFYSMFGFQRIGDFAWAGADSQSRGFLIGATAGRTTLAGEGLQHQDGHSHLMASTIPNCKSYDPTFHYELATIFREGLKRMHEKKENIFYYITTMNENYPHPAMPTEKSCEEGILKGMYKIKEFNKYKKTKIQFLGSGTILREMIAGAEILQKEYQIDSEVWSVTSFNDLGEMA

SEQ ID NO: 95413 - protein, 309 aa, Unknown
  Bacterial polypetide isolated from the Sargasso Sea
MKDKTGLLIKRMNECVDGEYQAFKAKGGAYVREKFFGKYEDLKDLVSTMTDQDIWKLNRGGHDPHKVYAAYHAAMQHKGSPTVILAKTIKGYGMGKSGESINTTHQQKKLDEQDLLYYRDRFDVPLTDKQVKNIEYYKPSENSEEIKYLKDRRAKLGGFIPERSSFAKPIKSPPKDIFDSFMKSTGDKEMSTTMALVRMLTALLRDKNVSPRLVPIIPDEARTFGMEGFFQKIGIYAHEGQKYEPVDSEQLSSYREDKSGQVLEEGITESGAMSSWIAAGTAYTNHDLEMIPIYIFYSMFGFQRVGDLA

SEQ ID NO: 95414 - protein, 279 aa, Unknown
  Bacterial polypetide isolated from the Sargasso Sea
LLSHPWLMPKFWQFPTVFMGLGPIMSIYQARFNKYLINRGLLKDEGRKIWCFLGDGETDEPESLGAIGLAAREKLDNLIFVVNCNLQRLDGPVRGNGKIIQELEGIFRGAGWNVIKVIWGSYWDQLLAKDKSGLLIKRMGEAVDGEYQAFKAKGGSYVREKFFGKYKELLDMVSQMTDRDIWKLNRGGHDPHKVYAAYYSAMKNKGTPTVILAKTIKGYGMGKSGESINTTHQQKKLDEEDLLYYRDRFDVPLTDNQVKNIEYYKPKENSPEIKIFERM

SEQ ID NO: 95415 - protein, 230 aa, Unknown
  Bacterial polypetide isolated from the Sargasso Sea
VLSRNTPYINTISPEEEVKSPGDQNLERKIRSLIRWNAAAMVVRANKKYPELGGHIGTFASAATLYDVGMNHFWRAKNNKFGGDLVYFQGHSAPGMYARAFLEGRINSKELDRFRQEVKPGGLSSYPHPWLMPNFWQFPTVSMGLGPIMSIYQARFTKYLINRGLIKDEGRKIWCFLGDGETDEPESLGAIGLAAREKLDNLIFVVNCNLQRLDGPVRGNGKIIQELEGI

SEQ ID NO: 95416 - protein, 261 aa, Unknown
  Bacterial polypetide isolated from the Sargasso Sea
ASSALLYDIGFNHFWHAPGPDHGGDLVYIQGHSAPGIYARAFLEGRITEEQMNHFRQESTGKGVSSYPHPWLMPEFWQFPTVSMGLGPIMAIYQARFLKYLHNRELLDTKPRKVWCFLGDGETDEPESMGAIHLAAREKLNNLIFVINCNLQRLDGPVRGNGKIIQELEGEFRGAGWNVIKVLWGSYWDPLLAKDDQGLLRKRMEEAIDGEYQAFKAKGGAYTRTHFFGKYPELLQMVSNMSDEDIWRLNRGSHDPHKVYA

SEQ ID NO: 95417 - protein, 272 aa, Unknown
  Bacterial polypetide isolated from the Sargasso Sea
GEMDEPESMGAIGLAAREKLDNLIFVINCNLQRLDGPVRGNGKIIQELEGSFRGTGWNVIKVIWGSYWDKLLMKDKSSLLVKRMNECVDGEYQAFKAKDGSYVREKFFGKYPELKEMVSTMTDKDIWRLNRGGHDPHKVYAAYHSAMQHTGSPTVILAKTIKGYGMGKSGESINTTHQQKKLDEEDLLYYRDRFGVPLTDKQVKNIEYYKPDENSEEIKYLKDQRIKLGGFIPERSSYAKQIKAPPKEIFDNFMKSTGDKEMSTTKTLVRML

SEQ ID NO: 95418 - protein, 97 aa, Unknown
  Bacterial polypetide isolated from the Sargasso Sea
MLDIQTYRFKGHSMSDPQKYRTKNEVASFVERDPIGHVRSVLLDNNWATEESLKALEKEIKAQVEEAIKFAEESPLPDPSELYEDVYVQTDYPFVKD

SEQ ID NO: 95419 - protein, 265 aa, Unknown
  Bacterial polypetide isolated from the Sargasso Sea
VEDLNRGGHDPTKIYNAYRLAYEEKDRPTVILAFTIKGYGIGSRQADNTTHQVKKLTKENLEDFIDKFNLPIKKESLDNPNFLTLNRDKKVKEYLLSRRQELGGLLPSRKVSKEKLIAKKESFLDFDKKLDREQSTTMVFVRLLTKLLRDEAIGSRVVPIVPDEARTFGMDALFRQFGIYSSEGQKYEPEDADKVMFYRESESGIMLEEGINEAGAFSAWLALATSYSNNNLPMIPFYIFYSMFGFQRTHDLAWAAGDSRAKGFL

SEQ ID NO: 95420 - protein, 332 aa, Unknown
  Bacterial polypetide isolated from the Sargasso Sea
AREKLDNLIFVINCNLQRLDGPVRGNGKIIQELEGRFRGAGWNVIKVIWGSYWDQLLSKDKTGLLIKRMNEAVDGEYQAFKAKGGAYVREKFFGKYPELKELVANMTDADIWKLNRGGHDPHKVYSAYHAAVQCKGKPTVIIAKTIKGYGMGKSGESINTTHQQKKLDEEDLLFYRDRFNVPLTDNQVKNIEYYKPAENSPEIKYLKNCRVKLGGHIPERTTFAKPVKTPPQDIFESFMKSTGDKEMSTTMALVRMLANLLRDKNVAPRLVPIIADEARTFGMEGFFQKIGIYAHEGQKYEPVDSEQLSSYREDKNGQVLQEGITEAGAMSS

SEQ ID NO: 95421 - protein, 262 aa, Unknown
  Bacterial polypetide isolated from the Sargasso Sea
AWAGADSQSRGFLIGATAGRSTLAGEGLQHQDGHSHLLASTIPNCKSYDPTFHYELATIFREGLKRMHEKKENIFYYITTMNENYPHPAMPTEKSCEEGILKGMYKIKEFNKYKKTKIQFLGSGTILREMIAGAEILQNEYQIDSEVWSVTSFNELRRDGLEVERYNLLNPEKEPKKSYVENCLSKTEGPILAASDYMRMNSDQIRPYVNKSFYSLGTDGFGRSDTRKNLRKFFEVDKEHIVTYGLSVLAKEQLTASKYAEE

SEQ ID NO: 95422 - protein, 256 aa, Unknown
  Bacterial polypetide isolated from the Sargasso Sea
VFNCNLQRLDGPVRGNGKIIQELEGIFRGAGWNVIKVIWGSYWDPLIAKDKSGLLVKRMNECVDGEYQAFKAKGGAYVREKFFGKYPELKDLVSSMTDRDVWKLNRGGHDPHKVYAAYDMAMKTRGQPTVILAKTIKGYGMGKSGESTNITHQQKKLGEEDLLYYRDRFDIPLTDKQVKNIEFYKPGEKSEEIKYIKERRMKLGGNLPERTSYAKPIKKPSKDIFENMLKSSGDREMSTTMALVRMLTSLLRDKNI

SEQ ID NO: 95423 - protein, 278 aa, Unknown
  Bacterial polypetide isolated from the Sargasso Sea
VINCNLQRLDGPVRGNGKIIQELEGSFRGTGWNVIKVIWGSYWDQLLAKDKTGLLVKRMNECVDGEYQAFKAKGGSYVRDKFFGKYPELKELVSAMTDKDIWRLNRGGHDPHKVYAAYHAAMQHKGSPTVILAKTIKGYGMGKSGESMNTTHQQKKLDEKDLLYYRDRFGVPLTDKQVKNIEYFKPDENSEEIKYLKDKRLKLGGFIPERSSFAKAIKTPPKDIFEPFMKSTGDKEMSTTMALVRMLTALLRDKNLSPRMVPIIPDEARTFGMEGSFK

SEQ ID NO: 95424 - protein, 187 aa, Unknown
  Bacterial polypetide isolated from the Sargasso Sea
MSIKSFRQSINEAIRLEMRKDENVVLMGEDVAGGAGSNGEQDAWGGPLGVTKGLLGEFGRERIIDTPITETALLGMASGAALTGLRPIAELMFIDFMGVCFDQILNQTAKFRYMFGGKAVTPITIRSMFGGGTRAASQHSQCLYPIFTHVPGLKVVIPSCPYDAKGLLIQSIRDNDPVIFLEHKKYV

SEQ ID NO: 95425 - protein, 245 aa, Unknown
  Bacterial polypetide isolated from the Sargasso Sea
IFDGNDLDPTETKEWLESLSAVLQNDGKERAQYLIKQLIEHSYKEGSDLVLSRNTPYINTIPHEEDKKSSGDQNIERKIRSLIRWNAAAMVVRANKKNPDLGGHIGTFASAATLYDVGMNHFWRAKNNKFGGDLIYFQGHSAPGIYARSFLEGRLTEKQLDSFRQEVLPGGLSSYPHPWLMPNYWQFPTVSMGLGPMLAIYQARFMKYLINRGLIKDENRKVWAFLGDGEMDEPESLGAIGLASR

SEQ ID NO: 95426 - protein, 298 aa, Unknown
  Bacterial polypetide isolated from the Sargasso Sea
TTELVSSMSDTDIWRLNRGGHDPHKVYAAYDKAVNHKGSPTVIIAKTIKGYGMGKSGESVNTTHQQKKLDVDDLMYYRDRFDVPLTDSQVKNIEYFKPDENSEEIKYLKKRRLELGGFIPERTSYSKPIKAPVKDIFDFMKKSTGEKEMSTTMALVRMLTNLLRDKNVAPKLVPIIPDEARTFGMEGFFQKIGIYAHEGQKYEPEDSAQLSSYREEKSGQVLEEGITEAGSMSSWIAAGTAYTNHDIEMIPIYLFYSMFGFQRIGDFAWAAGDSQARGFLIGATAGRTTLAGEGLQHQ

SEQ ID NO: 95427 - protein, 307 aa, Unknown
  Bacterial polypetide isolated from the Sargasso Sea
DNLIFVVNCNLQRLDGPVRGNGKIIQELEGIFRGAGWNVIKVIWGSYWDQLLAKDNSGLLIKRMGEAVDGEYQAFKAKGGEYVRDKFFGKYPELLDMVSQMTDRDIWKLNRGGHDPHKVYAAYHAAMQNKGTPTVILAKTIKGYGMGKSGESMNTTHQQKKLDEEDLLYYRDRFDVPLTDKQVRNVQYYKPDDNSPEIKYLKECRIKLGGNLPERSSFAKAIKAPPQDIFSKMKESTGDKEMSTTMILVRMLTNLMRDKNVSPRLVPIIPDEARTFGMEGFFQKIGIYAHEGQKYEPVDSEQLSSYR

SEQ ID NO: 95428 - protein, 295 aa, Unknown
  Bacterial polypetide isolated from the Sargasso Sea
EARMPGDLFMERRIRSLVRWNALAMVMRTNLDDPDLGGHISSFASSATLYDIGFNYFFQAPTDEHGGDLVFYQGHASPGVYARAFMEGRISEDQMKNFRREVDGKGLSSYPHPWLMPDFWQFPTVSMGLGPIQAIYQARFMKYLEARGFIPAGKQKVWCFMGDGECDEPESLGAISLAGREKLDNLIFVINCNLQRLDGPVRGNGKIIQELEGVFRGAQWNVNKVVWGRFWDPLFAKDKDGALQRRMDEVVDGEYQNYKAKDGAYVRENFFNTPELKEMVKDLSDDEIWKLNRGG

SEQ ID NO: 95429 - protein, 118 aa, Unknown
  Bacterial polypetide isolated from the Sargasso Sea
GEKVMGMNIFKVIDAADRAGKYVREGNGPYIIEVQTYRYRGHSMSDPAKYRTKEELDNYKETDPIEIVKKEMIEKKFATEKEIEKINKDTLEEIKNAADFALKSNYPNDSELYTDVYI

SEQ ID NO: 95430 - protein, 278 aa, Unknown
  Bacterial polypetide isolated from the Sargasso Sea
FPTVSMGLGPMMAFYQARFTKYLINRGLLKDQDRKIWCHLGDGEMDEPESFGAVGLAAREKLDNLIFVINCNLQRLDGPVRGNGKIIQELEGRFRGAGWNVIKVIWGSYWDQLLSKDKTGLLIKRMNEAVDGEYQAFKAKGGAYVREKFFGKYPELKELVANMTDADIWKLNRGGHDPHKVYSAYHAAVRCKGKPTVIIAKTIKGYGMGKSGESINTTHQQKKLDEEDLLFYRDRFNVPLTDKQVKNIEYYKPAENSPEIKYLKNCRHKLGGIFLREL

SEQ ID NO: 95431 - protein, 289 aa, Unknown
  Bacterial polypetide isolated from the Sargasso Sea
HGSWSIMSIYQARFNKYLINRGLLKDEGRKIWCFLGDGETDEPESLGAIGLAAREKLDNLIFVVNCNLQRLDGPVRGNGKIIQELEGIFRGAGWNVIKVIWGSYWDQLLAKDKSGLLIKRMGEAVDGEYQAFKAKGGKYVREKFFGKYKELLDMVSQMTDRDIWKLNRGGHDPHKVYAAYHAAMQNKGTPTVILAKTIKGYGMGKSGESMNTTHQQKKLDQEDLLYYRDRFDVPLTDDQVRNIQYYRPDDNSPEIKYLKECRIKLGGNLPERSSFAKAIKTPPKDIFAK

SEQ ID NO: 95432 - protein, 295 aa, Unknown
  Bacterial polypetide isolated from the Sargasso Sea
QAYGELGGHIASYASAADLFESGFNHFFRAREGLGEGQHRGDLVFFQPHSAPGVYARAFLEGRLSELDLQHYRQELTAPGAGAQGLSSYPHPWLMPDFWQFPTGSMGIGPISSIYHARFMRYLTHRNLLNCEGRKVWGVFGDGEMDEPESMSALTLAAREGLDNLVWVVNCNLQRLDGPVRGNGRIIDELERLFAGAGWNVVKLVWGSDWDGLFARDLTGALVRTLEGTVDGQMQTFAAKDGRFNRDNFFGQNPELAALAQGMTDEQIDRLKRGGHDLVKIHAAYAAAAAHKGQP

SEQ ID NO: 95433 - protein, 282 aa, Unknown
  Bacterial polypetide isolated from the Sargasso Sea
EREKSDTIEVIKDGDLDPIETSEWLDSLSAVIQKDGNQRAHYLIKELINKSYMEGANIPYTQNTPYINTIPVNEEKKSNGDQNIERRIRSLIRWNAAAMVVRANKKFPELGGHIGTFASAATLYDVGMNHFWRAKNNKFGGDLIYFQGHSAPGMYARAFLEGRLNEKQLDSFRQEVNPGGLSSYPHPWLMPKFWQFPTVSMGLGPMLAIYQARYMKYLINRGLIKDEGRKVWAFLGDGEMDEPESLGAIGLAAREKLDNLIFVINCNLKRLDGPVRGNGKII

SEQ ID NO: 95434 - protein, 298 aa, Unknown
  Bacterial polypetide isolated from the Sargasso Sea
LEEGINESGAMSSWIAAGTSYTNHDLEMIPIYIFYSMFGFQRVGDLAWAAGDSQARGFLIGATAGRTTLAGEGLQHQDGHSHLLASNIPNCISYDPTFAYEMAVILRDGLKRMHEKKENVFYYITAMNENYSHPEKPEGSDAGILKGMYLLKENNNKNKTKVQLLGSGTILREIIAASEILSKSYGVDSDIWSVTSFNELRKDGMETERWNLLNPNEKRKKSYVHKCLEKRDGPIIAASDYTRSFSDQIRPYTEKPFYSLGTDGYGRSDTRKNLRKFFEVDKEHIVAYTFSALAKEQL

SEQ ID NO: 95435 - protein, 253 aa, Unknown
  Bacterial polypetide isolated from the Sargasso Sea
GSDLILSRNTPYINTIKPEEEIKSPGDQNLERKIRSFIRWNAAAMVVRANKKNPELGGHIGTFASAATLYDVGMNHFWRAKNNKFGGDLIYFQGHSAPGMYARAFLEGRINEKELDRFRQEIKPGGLSSYPHPWLMPKFWQFPTVSMGLGPIMSIYQARFNKYLINRGLLKDEGRKIWCFLGDGETDEPESLGAIGLAAREKLDNLIFVVNCNLQRLDGPVRGNGKIIQELEGIFRGAGWNVIKVIWGSYWDQ

SEQ ID NO: 95436 - protein, 298 aa, Unknown
  Bacterial polypetide isolated from the Sargasso Sea
MGKIIQELEGLFKGAGWNVIKVVWGSGWDILLAKDTTGKLLQLMNETIDGDYQTYKAKDGAYVREHFFGRYPETAALVADMTDDEIFALKRGGHEPSKLYAAFKKAEQTNDRPTVILAKTVKGYGMGEAAEGKNIAHQVKKMDMSHVEHLRDRLGLQDLVSEEAIKDLPYLELDESSEEYKYLHARRKDLEGYTPTRIAKFSEKLQLPEVSAFKPLLEEQKRDISTTMGFVRALNILLKDKGIGKNIVPIIADEARTFGMEGLFRQIGIYNPHGQNYTPQDRDIVSYYKEATSGQVLQ

SEQ ID NO: 95437 - protein, 309 aa, Unknown
  Bacterial polypetide isolated from the Sargasso Sea
EMDEPESLGAIGLAARENLDNLIFVVNCNLQRLDGPVRGNGKIIQELEGIFRGAGWNVLKVIWGSYWDTLLANDKTGYLIKIMNETVDGEYQAFKARNGLYVREKFFGKYPETLKLVSTMSDKDIWRLNRGGHDPHKVYAAYDNAVNNIGSPTVIIAKTIKGYGMGKTGESVNTTHQQKKLDVDDLLYFRDRFDVPLNDEQVKNVEYFKPDENSEEIKYLKQRRIELGGFIPERTSYSKPIKTPNKDIFDFMKKSTGQKEMSTTMALVRILTNLLRDKNVASKLVPIIPDEARTFGIKGFFQKNWYLCA

SEQ ID NO: 95438 - protein, 198 aa, Unknown
  Bacterial polypetide isolated from the Sargasso Sea
NENYAHPEMPKDKFCEEGILKGMYKIKEFNKYKKTKIQFLGSGTILREMISAAEILQKEYQIDSEVWSVTSFNELRRDGLEVERYNLLNPDKEPKKSYVEKCLSKTEGPILAASDYMRMNSDQIRPYVNKSFYSLGTDGFGRSDTRKNLRNFFEVDKEHVVTYGLSVLSKEQLIASKHAKEAIKKYKIDKDKPMPTKL

SEQ ID NO: 95439 - protein, 109 aa, Unknown
  Bacterial polypetide isolated from the Sargasso Sea
MKFDRDSLVAFYRDMLLIRRFEERAGQLYGMGLIGGFCHLYIGQEAVVVGMQNTITDNDAVITSYRDHGHMLACGMDPKGVMAELTGREGGYSRGKGGSMHMFSADKNF

SEQ ID NO: 95440 - protein, 252 aa, Unknown
  Bacterial polypetide isolated from the Sargasso Sea
KYLINRKLIKDENRKVWSFLGDGEIDEPEALGSIGLAAREKLDNLIYVVNCNLQRLDGPVRGNGKIIQELEGIFRGAGWNVIKVIWGSYWDPLLANDKSGLLVKRMNEAVDGEYQAFKAKGGLYVRDNFFGKYPELKNLVASYTDSDIWKLNRGGHDPHKVYAAYHKAINTKDRPTVILAKTIKGYGMGKSGESINTTHQQKKLGVDDLLYYRDRFDVPLTDEQVKNIEYFRPDENSEEIKYLKKRRLALGG

SEQ ID NO: 95441 - protein, 299 aa, Unknown
  Bacterial polypetide isolated from the Sargasso Sea
PETKELVSSLSDKDIWRLNRGGHDPHKVFAAYDKASKNIGSPTVVIAKTIKGYGMGKSGESVNTTHQTKKLDINDLMYYRDRFDVPLTDDQVKNIEYYKPTESSVEIKYLKERRLQLGGYIPERTTYAKPIKTPPKNIFENMKESTGKKEMSTTMALVRMLTSLLRDKNVASRLVPIIPDEARTFGMEGFFQKVGIYAHEGQKYEPEDSAQLSSYREEKSGQVLEEGITEAGAMSSWIAAGTSYTNHDIEMIPIYLFYSMFGFQRIGDLAWAGADSQSRGFLIGATAGKNYIRLVRVCN

SEQ ID NO: 95442 - protein, 285 aa, Unknown
  Bacterial polypetide isolated from the Sargasso Sea
MVLSWGGETDEPESMGAIHLAAREKLDNLIFVINCNLQRLDGPVRGNGKIIQELEGEFRGAGWNVIKVLWGSYWDPLLAKDDQGLLRKRMEEAIDGEYQAFKAKGGAYTRTHFFGKYPELLEMVSNMSDEDIWRLNRGGHDPHKVYTAYQAAVKHTGQPTVILAKTVKGYGMGGSGEGANITHQQKKIRPEDLLVFRDRFHLPLSNQQVEQMEFFHPGDSSQEVEYLHQQREKLGGYLPSRRTRGDDLKTPELPFFERLLKSTEEREISTTQALVQAMTLLCRDE

SEQ ID NO: 95443 - protein, 314 aa, Unknown
  Bacterial polypetide isolated from the Sargasso Sea
KIASEKYNLSKNSEDIDITETKEWIDSLSAVLETDGSKRAQFLIKQLIEHSYKQGSDLVLSRNTPYINTISPDKEAKSPGDQNIERKIRSLIRWNAAAMVVRANKKFPELGGHIGTFASAATLYDVGMNHFWRAKNNKFGGDLIYFQGHSAPGMYARAFLEGRLNEKQLDKFRQEVKPGGLSSYPHPWLMPNFWQFPTVSMGIGPMLAIYQARFMKYLINRGLIKDQNRKVWAFIGDGETDEPESLGAIGLAAREKLDNLIFVVNCNLQRLDGPVRGNGKIIQELEGIFRGSGWNVIKVIWGSYWDQLLAKDKL

SEQ ID NO: 95444 - protein, 270 aa, Unknown
  Bacterial polypetide isolated from the Sargasso Sea
LNRGGHDPHKVFAAYDKATKHQGSPTVIIAKTIKGYGMGKSGESVNTTHQTKKLDVDDLMYYRDRFDVPLTDEQVRNIEYFRPDENSPEIKYIKDRRIKLGGYLPERSTFAKPIKAPSKDIFDFMKVSTGEKEMSTTMALVRMLTNLLRDKNISPRLVPIIPDEARTFGMEGFFQKIGIYAHEGQKYEPEDAAQLSSYREDKSGQVLEEGINEAGAMSSWIAAATAYTNHDIEMIPIYIFYSMFGFQRVGDLAWAAGDSQARGFLVGATA

SEQ ID NO: 95445 - protein, 261 aa, Unknown
  Bacterial polypetide isolated from the Sargasso Sea
MIFRRLNRGGHDPHKVYAAYDKAVNHKGSPTVIIAKTIKGYGMGKSGESVNTTHQQKKLDVDDLMYYRDRFDVPLTDAQVKNIEYFKPDENSEEIKYLKKRRIELGGFIPERTSYSKPIKAPSKDIFDFMKTSTGEKEMSTTMALVRMLTNLLRDKNVAPKLVPIIPDEARTFGMEGFFQKIGIYAHEGQKYEPEDSAQLSSYREEKSGQVLEEGITEAGSMSSWIAAGTAYTNHDIEMIPIYLFYSMFGFQRIGDFAWAA

SEQ ID NO: 95446 - protein, 291 aa, Unknown
  Bacterial polypetide isolated from the Sargasso Sea
MGLGPILGIYQAHIMRYLSARGLVPRNDRKVWVFCGDGEMDEPESKGAIGLAGREELENLIFVVNCNLQRLDGPVRGNGKIIQELEGSFRGEGWNVIKVVWGRFWDPIIAKDTEGKLQEIMDAVVDGELQNFKAKGGKYTRENFFAKDPSVLEMVKDLTDEDIYRLNRGGHDPYKVYAAYHKASNSKGAPTVILALTTKGYGTGSREADNTTHQVKKLSMENIKSFRDRFDIPVSDSEIEDLPYVRPPEDSPEIQYLKNTRKKLGGFIPRRRTSSEKLKMPNSKVFEKSYD

SEQ ID NO: 95447 - protein, 305 aa, Unknown
  Bacterial polypetide isolated from the Sargasso Sea
HPWLMPKFWQFPTVSMGLGPIMSIYQARFTKYLINRGLLKDEGRKIWCHLGDGETDEPESLGAIGLAARENLDNLIFVINCNLQRLDGPVRGNGKIIQELEGIFRGAGWNVIKVIWGSYWDPLIAKDKSGLLIKRMGEAVDGEYQAFKAKGGAFVREKFFGKYPELLNLVSQMDDKDIWKLNRGGHDPHKVYAAYNSAMLHKGSPTVILAKTIKGYGMGKSGESINTTHQQKKLDEKDLLYYRDRFDVPLTDKQVKNVEYYRPSENSLEIKYLKQCRLKLGGNLPERSSFAKSIKTPSEDIFKAR

SEQ ID NO: 95448 - protein, 302 aa, Unknown
  Bacterial polypetide isolated from the Sargasso Sea
LDNLIFVVNCNLQRLDGPVRGNGKIIQELESVFRGAGWNVIKVVWGRMWDQLFEKDELGLLQQRMDEAVDGDYQNYKSHDGGYTREHFFGKHPELLKMVEHLSDEDIYRLNRGGHDPYKVYAAYAAAVEHRDQPTVILAKTVKGYGLGLAGEAQNITHSVKKLDLEALREFRDRFDIPLPDTDLAEVPYYRPPEDSTEIRYLRGRRALLGGSMPARKSDFGKLTIPALSAFENITGGSGTREISTTMAFTRILMTLVKDEHLGKLVVPIVPDEARTFGMEGMFRQLGIYSSVGQLYEPVDTG

SEQ ID NO: 95449 - protein, 310 aa, Unknown
  Bacterial polypetide isolated from the Sargasso Sea
KNNEVQKKAIIPKDTENIIEEAEKTLSEEKEVQEKTLSVEKEKVDKPIKIAEEKNNLSNINSDIDPTETREWIDSLSSVLENDGSNRAQFLIKQLIEHSYRQGSDLVLSRNTPYINTIPPEKEFKSPGDQNLERKIRSLIRWNAAAMVVRANKKFPELGGHIGTFASAATLYDVGMNHFWRAKNNKFGGDLIYFQGHSAPGMYARAFLEGRLNEKQLDSFRQEVKADGLSSYPHPWLMPKFWQFPTVSMGLGPMLAIYQARFMKYLINRKLIEDQNRKVWAFLGDGEMDEPESLGAIGLAAREKLDNLIF

SEQ ID NO: 95450 - protein, 288 aa, Unknown
  Bacterial polypetide isolated from the Sargasso Sea
NLIFVVNCNLQRLDGPVRGNGKIIQELEGIFRGGGWNVLKVIWGSYWDSLLANDKTGHLVKIMNETVDGEYQAFKARNGLYVREKFFGKYPETTELVSSMSDTDIWRLNRGGHDPHKVYAAYDKAVNHKGSPTVIIAKTIKGYGMGKSGESVNTTHQQKKLDVDDLMYYRDRFDVPLTDSQVKNIEYFKPDENSEEIKYLKKRRLELGGFIPERTSYSKPIKAPVKDIFDFMKKSTGEKEMSTTMALVRMLTNLLRDKNVAPKLVPIIPDEARTFGMEGFFQKIGIYA

SEQ ID NO: 95451 - protein, 181 aa, Unknown
  Bacterial polypetide isolated from the Sargasso Sea
AMSSWIAAGTSYTNHDIEMIPIYLFYSMFGFQRIGDFAWAGADSQSRGFLIGATAGRTTLAGEGLQHQDGHSHLLSSTIPNCISYDPTFHYELAVIFREGLRRMHEKKENIFYYITTMNENYPHPEIPRDRNCEEGILKGMYKIREFNKYKKTKIQFLGSGTILREMIAGAEILQKEYQID

SEQ ID NO: 95452 - protein, 267 aa, Unknown
  Bacterial polypetide isolated from the Sargasso Sea
GGADPKKMMAEIAGKSTGYCRGKGGSMHIADRGLGHLGANAIVGGGISHVVGAGLTYQMKHHGNAAVAFFGDGAMQQGVLYESMNLSALWKLPVLFVCVNNEYGMGTRLDHASASLEFEKRAETFGLLAAEVDGIDVFEVYNQSKNLLEDVRKGKPAFLKVNSYRFHGHARMDKSPYRDQQEEEEGRKKDAIAFLRDRIVKSGWYQETECDEIVEEVKQEMDEALNHARNAADPGADEMYEDIFDPQTTKPFPVDSRIRESLHLPQA

SEQ ID NO: 95453 - protein, 258 aa, Unknown
  Bacterial polypetide isolated from the Sargasso Sea
DKNISPRLVPIIPDEARTFGMEGFFQKIGIYAHEGQKYEPVDSEQLSSYREDKSGQVLEEGINESGAMSSWIAAGTAYTNHDLEMIPIYIFYSMFGFQRVGDLAWAAGDSQARGFLIGATAGRTTLAGEGLQHQDGHSHLLASNIPNCISYDPTFAYEMAVILRDGLKRMHEKKENIFYYITAMNENYSHPEKPKGADEGILKGMYLFKENNNKNKTKVQLLGSGTILREIIAASEILSKDYGVDSDVWSVTSFNELR

SEQ ID NO: 95454 - protein, 272 aa, Unknown
  Bacterial polypetide isolated from the Sargasso Sea
VSMGLGPMMATYQARFMRYMEHRGLTEPSDRKIWCFLGDGEMDEPESLGSITMPVREGLDNLIFVVNCNLQRLDGPVRGNGKIIQELEAAFGGAGWNVIKLIWGSRWDPLLARDRQGLLQQIMEECVDGEYQNFKSKGGDYVREHFFGKYPETKEMVANMSDEDIWRLNRGGHDARKVFSAYQKAVNHRERPTIILAKTVKGFGLGSVAEGQNTAHQQKKLDLNALKEFRDRFNIPITDKKLKDVPYFMPKKNSQELEYLHERRKSLGGYIP

SEQ ID NO: 95455 - protein, 310 aa, Unknown
  Bacterial polypetide isolated from the Sargasso Sea
KYEPEDAAQLSSYREDKSGQVLEEGINEAGAMSSWIAAATAYTNHDIEMIPIYIFYSMFGFQRVGDLAWAAGDSQARGFLVGATAGRTTLAGEGLQHQDGHSHLIASTIPNCVTYDPTFHYELAVIFREGLRRMHEKNENVFYYITTMNENYSHPEMPKDKNCEEGILKGMYKIKEFNKYKKTKIQLLGSGTILREMISAAEILQNDYQIDSEIWSVTSFNELRKDGMEVERYNLLNPDKEPKKSYVEQCLGQAEGPIMAASDYMRMNSDQIRPYANKSFYSLGADGFGRSDTRKNLRKFFEVDKEHFSA

SEQ ID NO: 95456 - protein, 306 aa, Unknown
  Bacterial polypetide isolated from the Sargasso Sea
EEGINESREQCHSWIAAGTAYTNHDLEMIPIYIFYSMFGFQRVGDLAWAAGDSQARGFLIGATAGRTTLAGEGLQHQDGHSHLLASNIPNCISYDPTFAYEMAVILRDGLKRMHEKKENIFYYITAMNENYSHPEKPKGSDEGILKGMYLFKENNNKNKTKVQLLGSGTILREIIAAAEILSKDYGVDSDVWSVTSFNELRKDGMETERWNLLNPNEKKKKSYVQKCLEKTDGPVIAASDYTRSFSDQIRPYTEKPFYSLGTDGYGRSDTRKNLRKFFEVDKEHIVAYTLSALAKEQLIETKKAES

SEQ ID NO: 95457 - protein, 294 aa, Unknown
  Bacterial polypetide isolated from the Sargasso Sea
AREKLDNLIFVINCNLQRLDGPVRGNGKIIQELEGRFRGSGWNVIKVIWGSYWDQLLSKDKTGLLVKRMTEAVDGEYQAFKAKGGAYVREKFFGKYPELKDLVANMTDADIWKLNRGGHDPHKVYSAYHAAVRCKGKPTVIIAKTIKGYGMGKSGESINTTHQQKKLDEEDLLFYRDRFNVPLTDKQVKNIEYYKPPENSEEIKYLKNCRVKLGGNIPERNTFAKPVKTPPQDIFESFMKSTGDKEMSTTMALVRMLANLLRDKNVAPRLVPIIADEARTFGMKGFFQKIGIYA

SEQ ID NO: 95458 - protein, 249 aa, Unknown
  Bacterial polypetide isolated from the Sargasso Sea
INQVINEGDIDPLETSEWLESLSAVIEKDGNQRAHYLIKELINKSYMEGANIPYTQNTPYINTIPVSEEKKSNGDQNIERRIRSLIRWNAAAMVVRANKKFPELGGHIGTFASAATLYDVGMNHFWRAKNNKFGGDLVYFQGHSAPGMYARAFIEGRLSEKQLDSFRQEVNPGGLSSYPHPWLMPKFWQFPTVSMGLGPMLAIYQARYMKYLINRGLIKDEGRKVWAFLGDGEMDEPESLGAIGLAARE

SEQ ID NO: 95459 - protein, 322 aa, Unknown
  Bacterial polypetide isolated from the Sargasso Sea
HPWLMPKFWQFPTVSMGLGPIMSIYQARFNKYLINRGLLKDEGRKIWCFLGDGETDEPESLGAIGLAAREKLDNLIFVINCNLQRLDGPVRGNGKIIQELEGIFRGAGWNVIKVIWGSYWDSLLAKDKSGLLIKRMGEAVDGEYQAFKAKGGAYVREKFFGKYPELLDLVSQMTDRDIWKLNRGGHDPHKVYSAYDLAMRNKGTPTVILAKTIKGYGMGKSGESINITHQQKKLDEGDLLYYRDRFDVPLTDEQVKNIEYYKPPENSAEIKYLKECRIKLGGYLPERSSFAKAIKTPPEDVFSAMKESTGKKEMSTTMIMGK

SEQ ID NO: 95460 - protein, 221 aa, Unknown
  Bacterial polypetide isolated from the Sargasso Sea
GQFPCPIVFRGPTASAGQLAATHSQAFESWFANCPGLKVIVPSNPYDAKGLLKSAIRDDDPVIFMESEQMYGDKGEVPDEEYLLPIGVADIKRKGNDVTIVSFGKIIKEAFKAADELEKENISCEIIDLRTIRPLDYKVIFESVKKTNRLVILEESWPFGNISTEVTYQVQNEIFDYLDSPIEKINTADTPAPFSPVLLKEWLPNSLDVIKAVKKVIYHKQ

SEQ ID NO: 95461 - protein, 226 aa, Unknown
  Bacterial polypetide isolated from the Sargasso Sea
EVAVIVQDGLPRMYGNNENIFYYLTLMNENYQHPAMPEGDDVAEQIIKGIYKLERVENDKSKLNVQLMGSGTILNEVRKAAQILCDDYNVSSDVYSVTSFNELAREGQDVARWNMLNPEAEQKVPYIGQVITKDAGPAISATDYVKNYSDQVRAFIETEYRCLGTDGFGRSDSRENLRTHFEVNASYIVVASLYELAQRGDVEKKVVAEAIKRFEINAEKLNPLYA

SEQ ID NO: 95462 - protein, 308 aa, Unknown
  Bacterial polypetide isolated from the Sargasso Sea
SSMSDKDIWRLNRGGHDPHKVFAAYDKAVNHKGSPTVIIAKTIKGYGMGKSGESVNTTHQQKKLDVDDLMYYRDRFDVPLTDSQVKNIEYFKPDENSKEIKYLKKRRVELGGFIPERTSYSKPIKAPSKDIFDFMKKSTGEKEMSTTMALVRMLTNLLRDKNVAPKLVPIIPDEARTFGMEGFFQKIGIYAHEGQKYEPEDSAQLSSYREEKSGQVLEEGITESGSISSWIAAGTAYTNHDIEMIPIYLFYSMFGFQRIGDFAWAAGDSQARGFLIGATAGRTTLAGEGLQHQDGHSHLLASTIPNCI

SEQ ID NO: 95463 - protein, 275 aa, Unknown
  Bacterial polypetide isolated from the Sargasso Sea
INRGLLKDENRKIWCHIGDGEMDEPESLGAIGLAAREKLDNLIFVVNCNLQRLDGPVRGNGKIIQELEGRFRGAGWNVIKVIWGSYWDQLLAKDKTGLLVKRMTEAVDGEYQAFKAKGGAYVREKFFGKYPELKELVANMTDADIWKLNRGGHDPHKVYSAYHAAVRSKGKPTVIIAKTIKGYGMGKSGESMNTTHQQKKLDEKDLLYYRDRFNVPLTDKQVKNIEYYKPPDSSEEIKYLKNCRTKLGGNIPERTTFAKSIKTPPVDIFESFMKS

SEQ ID NO: 95464 - protein, 297 aa, Unknown
  Bacterial polypetide isolated from the Sargasso Sea
LMMVMRANMANVELGGHIATYASIADLFEVGFNHFFVAPFDDHPGDLVYFQPHAAPGIYARAYLEGRLSEENLIYFRREVSGGIGKGLSSYPHPTLMPDFWQFPTGSMGLGLLSAIYQARFQRYLENRELLEPSARNVWAFVGDGEMDEPESLAGISLAAREQLDNLTLVVNCNLQRLDGPVRGNGNIVQELETLFAGAGWNVIKCLWGSNWDVLFARDKDGWILKRMSEAIDGEFQKLSATDGMYNRENFFSKYEELAALVANMSDSEIDMLQRGGHDPIKIYAAYKSAMLHKGQP

SEQ ID NO: 95465 - protein, 285 aa, Unknown
  Bacterial polypetide isolated from the Sargasso Sea
MVANMTDADIWKLNRGGHDPHKVYSAYHAAVRSKGKPTVIIAKTIKGYGMGKSGESMNTTHQQKKLDEKDLLYYRDRFSVPLTDKQVKNVEYYRPPNSSQEIKYLKNCRTKLGGNIPERTTFAKSVKTPPVDIFESFMKSTGEKEMSTTMVLVRMLANLLRDKNVAPRLVPIIPDEARTFGMEGFFQKIGIYAHEGQKYEPVDSEQLSSYREDKSGQVLQEGITEAGAMSSWIAAGTAYTNHDIEMIPIYLFYSMFGFQRIGDLAWAAADTQTRGFLIGATSGKT

SEQ ID NO: 95466 - protein, 374 aa, Unknown
  Bacterial polypetide isolated from the Sargasso Sea
KVIWGSYWDSLLANDKTGHLVKIMNETVDGEYQAFKARNGLYVREKFFGKYPETTELVSSMSDTDIWRLNRGGHDPHKVYAAYDKAVNHKGSPTVIIAKTIKGYGMGKSGESVNTTHQQKKLDVDDLMYYRDRFDVPLTDSQVKNIEYFKPDENSEEIKYLKKRRLELGGFIPERTSYSKPIKAPVKDIFDFMKKSTGEKEMSTTMALVRMLTNLLRDKNVASKLVPIIPDEARTFGMEGFFQKIGIYAHEGQKYEPEDSAQLSSYREEKSGQVLEEGITEAGSISSWIAAGTAYTNHDIEMIPIYLFYSMFGFQRIGDFAWAAGDSQARGFLIGATAGRTTLAGEGLQHQDGHSHLLASTIPNCISYDPTFHY

SEQ ID NO: 95467 - protein, 384 aa, Unknown
  Bacterial polypetide isolated from the Sargasso Sea
MAIIDGGTEKKDINPKPIIETKEIIKEEKKSNGLKNGKQKIYAQPVSKDDIDPAETQEWIDSLKAVLKTDGSPRAGYLLKKIIDEAYSQGLVLPDTRTTPYINTIPAAADIRSPGDQNLERKIRAYIRWNAAAMVVKANKKNPELGGHIGTFASAATLYDVGMNHFWRAKNNKFGGDLIYFQGHSAPGMYARAFLEGRISEKQLDKFRQEVEKGGLSSYPHPWLMPKFWQFPTVSMGLGPMMAIYQARFTKYLINRGLLKDQDRKIWCHLGDGEMDEPESFGAVGLAAREKLDNLIFVINCNLQRLDGPVRGNGKIIQELEGRFRGAGWNVIKVIWGSYWDQLLSKDKTGLLIKRMNEAVDGEYQAFKAKGGAYVREKFFGKYP

SEQ ID NO: 95468 - protein, 461 aa, Unknown
  Bacterial polypetide isolated from the Sargasso Sea
MSAQPDPQAGFGIGSDTDQQETREWMDALSAVIDKEGPERAHFLLEQLLEHARQSSIDLPFSANTGYVNTIEPEKEAHCPGNIAIEKRLRAYMRWNAMAMVVRANRLNPADGGDLGGHIGSFASVASMFGAGFNHFWHAESEGHGGDLLYIQGHSAPGIYARAYLEGRLTEEQLDSFRQEVDGKGLSSYPHPKLMPEFWQFPTVSMGLGPLMAIYQARFLKYLHARGIANTENRKVWVFCGDGEMDEPESLGAIGLAARENLDNLVFVINCNLQRLDGPVRGNGKIVQELEGEFRGAGWNVIKLLWGNGWDELLRRDKSGKLKQLMMETLDGDYQAMKANDGAFVRKNFFGKYPETLKLVEHMTDEEVFELRRGGHEPAKVYAAFHAANEHKNQPTVLLVKTVKGYGMGKAGEGKNTVHQTKKLSDEDIKYIRDRFNIPIPDSQLAEIPYYKPADDTPEMQ

SEQ ID NO: 95469 - protein, 310 aa, Unknown
  Bacterial polypetide isolated from the Sargasso Sea
AAGTSYTNHDIEMIPISLFYSMFGFQRIGDFAWAGADSQTRGFLIGATSGRTTLAGEGLQHQDGHSHLIASTIPNCISYDPTFHYELAVIFRDGLRRMHEKNENVFYYITTMNENYSHPEMPKDRKCEEGILKGMYKIKEFNKYKKTKIQFLGSGSILREMIAGAEILQREYQIDSEVWSVTSFNELRKDGLEIERYNLLNPDKDQKKSFVEKCLGNTEGPILAASDYMRMNSDQIRPYINKSFYSLGTDGFGRSDTRTKLRKFFEVDKEHIVAYGLSILAKEQLLTSKYAKDAIKKYKIDTEKPMPTKL

SEQ ID NO: 95470 - protein, 513 aa, Unknown
  Bacterial polypetide isolated from the Sargasso Sea
AYKEATAHKGSPTVILARTIKGYGLGEAGEGRNITHNQKKLSDNEMIYFRDRFNIPVSDDDATKGKFQKFEDNSEEYEYLMEQRKKLGGSIPVRINQPEALKVPDVSIFKELLDGTGEREASTTMSFVRLLSILTKDKSIGKHVVPIVPDEARTFGMDPLFRQLGIYAHSGQLYDPVDSDQFLYYKEEKNGQILEEGINEAGAISSFIAAGMSYSNHGVHMVPFYIYYSMFGFQRVWDLIWAAGDMRVRGFLLGGTAGRTTLNGEGLQHQDGHSHLAAAATPNVKSYDCAYAYEIAIIVQRGMVEMVEENRDVIYYLTLENENYIQPSKPEGVSDGVVRGLYKMRGTDQPKIRLLGSGPLMREVLSAAELLKEDWGIEPAIWNVTSFSELRREAEAVERWNLTHPDETPRVSYVEELLSKNAVPTVAVSDYIKLVSDQIRPYVPGDYYCLGTDGFGRSDTREGLRRFFEVDRYYVVLTAIKALVYAGELEASMVDAALKKYGLDPEKPNPVTV

SEQ ID NO: 95471 - protein, 243 aa, Unknown
  Bacterial polypetide isolated from the Sargasso Sea
LIASTIPNCVAYDPTFHYELAVIFREGIRRMHEKKENIFYYITTMNENYSHPEMPKDKNCEEGILKGMYKVKEFNKYKKTKIQLLGSGTILREMISAAEILQNEYKIDSEIWSVTSFNELRKDGMEVERYNLLNPDKEQKVSFVEKSLGKSEGPIMAASDYMRMNSDQIRPYTTKSFYSLGTDGFGRSDTRKNLRNFFEVDKEHLVAYGLSILAKEQLIASKYAKDAMKKYNIDSNKTMPTKL

SEQ ID NO: 95472 - protein, 321 aa, Unknown
  Bacterial polypetide isolated from the Sargasso Sea
EGINESGAMSSLIAAGTAYTNHDLEMIPIYIFYSMFGFQRVGDLAWAAGDSQARGFLIGATAGRTTLAGEGLQHQDGHSHLLASNIPNCISYDPTFAYEMAVILRDGLKRMHEKKENIFYYITAMNENYSHPEKPKGSDEGILKGMYLFKENNNKNKTKVQLLGSGTILREIIAAAEILSKDYGIDSDVWSVTSFNELRRDGMETERWNLLNPDEKRKKSYVQKCLSKRDGPIVAASDYTRSFSDQIRPYVEKPFYSLGTDGYGRSDTRKNLRKFFEVDKEHIVAYTLSALAKEQLIETKKAEKAIKKFQIDKDRDFPSNL

SEQ ID NO: 95473 - protein, 480 aa, Unknown
  Bacterial polypetide isolated from the Sargasso Sea
MENKLLVPDIGDFEKVEIIEILVKKGDKIKKNDSIVTLESDKSSVEVPSTSEGVVANVNVKIGDKVSKGDLLITLKITGQPEEKLKETNEEKIPPVTEQIIKEAEKTLVLKEEVEKPKIINKKKESVEKVEIVRNGDIDPIETQEWMESLSAVLEKDGKHRAQFLIKQLIEHSYKEGSDLVLSRNTPYINTIPPEEEIKSPGDQNIERKIRALIRWNAAAMVVRANKKNSELGGHIGTFASAATLYDVGMNHFWRAKTNKFGGDLIYFQGHSAPGMYARAFLEGRISTKQLDSFRQEVNPGGLSSYPHPWLMPKFWQFPTVSMGLGPIMSIYQARFTKYLINRGLLKDEGRKIWCHLGDGETDEPESLGAIGLAAREKLDNLIFVVNCNLQRLDGPVRGNGKIIQELEGIFRGAGWNVIKVIWGSYWDSLLAKDKTGLLIKRMDEAVDGEYQAFKAKGGSFVREKFFGKYPELLNLVSQM

SEQ ID NO: 95474 - protein, 238 aa, Unknown
  Bacterial polypetide isolated from the Sargasso Sea
IPNCISYDPTFGYELAVIFRDGLKRMHEKKENIFYYITTMNENYSHPEMPKDKNCEEGILKGMYKIKEFNKFKKTKIQLIGSGTILREIIAGAEVLQNEYQIDSEVWSVTSFNELRRDGMETERYNLLNPDKKQKVSYVEKCLERTEGPILAASDYMRSHSDQIRPYVKKSFYSLGTDGFGRSDTRENLRKFFEVDKKHIVTYALSILSKEQLIASKYVQEAIKKYNIETEKPFPSKL

SEQ ID NO: 95475 - protein, 593 aa, Unknown
  Bacterial polypetide isolated from the Sargasso Sea
GSEWDDFLDKDKFGLLIKRLEEMVDGDSLKYVVEGGTYIRENFWGKYPELLKMVEKYTDDELWKLKVGGHDPAKVYAAFAEAINHKDAPTVILAQTIKGYGLGEAGEGRNITHQQKKLNEEELLHFRSRFNIPLSDEECVKAPFYKPGSNSEEIKYLQQKRKDLGGYLPSRNDKAPSLNIPSISILNELFKGSDKRQISTTMAFVRILTILTKDSDIGKNIVPIIPDEARTFGIDPLFRELGIYSHSGQVYDPVDSDQFLYYREATDGQILEEGINEAGAISSFIAAGTSYSNHNINMIPFFIYYSMFGFQRVGDFIWAAADMRTKGFLLGATAGRTTLAGEGLQHQDGHSHLMASVVPNIKAYDPAYAYEIAVIIHDGLKRMYVDQEDVFYYITLENENYIHPPILKNTEEGIIKGMYKFKEIKTEKNLNIQLLASGSMLNEVIEAAKILKEDWGIGSDIWSVTSFSELHREAEDKSRWNTLHPTSKPKQSYLESCIKDKNGPVVAVSDYVKLVAEQIAPYLKCPFIALGTDGFGRSETRDELRSFFEINRYYITMTAIESLSKEGKIDKVEIQKAIEKYNLDPEKSNPTTV

SEQ ID NO: 95476 - protein, 390 aa, Unknown
  Bacterial polypetide isolated from the Sargasso Sea
GIFQAHVMRYLEKRSLIESIENRKVWVFCGDGEMDEPESMGSISLAGREKLNNLVFVVNCNLQRLDGPVRGNSKIITELSKQFSGAGWNVVHLIWGRKWDELVNKDKDGLLQKIMNETVDGEYQNYKAKGGKYTRENFFGKDPEVLKMIDSLSDEEVEDLNRGGHDPTKIYNAYRLAYEEKDRPTVILAFTIKGYGIGSRQADNTAHQVKKLTKENLEDFIDKFDLPIKKESLDNPNFLNLNRNKKVKEYLLSRREELGGLLPSRKVSKKKLIAKKESFIDFDKKLDREQSTTMVFVRLLTKLLRDTEIGSRVVPIVPDEARTFGMDALFRQFGIYSSEGQKYEPEDADKVMFYRESESGIMLEEGINEAGAFSAWLALATSYFNNNLPM

SEQ ID NO: 95477 - protein, 175 aa, Unknown
  Bacterial polypetide isolated from the Sargasso Sea
CTFLKKSDKSKVQIQLLGSGTILREVIAAAELLEEDFGISSNIWSVTSFNELRREGLSIKRQNLLHPDKKQKLSYVESLFKDENTPVVAATDYMKIYADQIREFIPNKYIVLGTDGFGRSDTRNQLRKFFEVNRYYIVVSALKGLADEGKIEIGKINEAIKKYKIDPNKPEPTSI

SEQ ID NO: 95478 - protein, 251 aa, Unknown
  Bacterial polypetide isolated from the Sargasso Sea
QHQDGHSHLMASTIPNCISYDPTFHYELAIIFRDGLKRMHEKKENVFYYITTMNENYPHPAIPKDKSCEEGILRGLYKIKEFNKYKKTKIQFVGSGTILREMMAGAEILQNEYQIDCEIWSATSFNELRKNGLEVERYNLLNPEKKPKKSYVEECLGQTEGPILAASDYMRMNSDQIRPFLNKSFYSLGTDGFGRSDTRKNLRKFFEVDKEHIVTYGLSILAKEQLITSKHASEAIKKYKIDINKPMPTKL

SEQ ID NO: 95479 - protein, 253 aa, Unknown
  Bacterial polypetide isolated from the Sargasso Sea
MTVGYKDQDPQETQEWIESIEDALEEHGYERTRFLLETLISFAQSKGARLPFNTSTPFSNTILPGQEPKYPGDRELERKIKSIVRWNAMAMVTKANKETPGIGGHISTYASAATLYEVAYNHILKGAAHPSGQDMVFFQGHASPGIYARAFLEKRLSKENLHNFRRELSEGGGLSSYPHPYLMPDFWQFATVSMGLGPLMAIYQARFMRYMDDRGFVEDTGRKVFAFLGDGEMDEPESTGALTLASRESLDNL

SEQ ID NO: 95480 - protein, 561 aa, Unknown
  Bacterial polypetide isolated from the Sargasso Sea
MDSKNVIAAISLSAAVIILYGLFFAPEPQPINQALQEKNNIVENSEAPKLVDTQEINTISRDEAINNSDRITFENENIIGSISLSNGGAIDDFTFKNYNEKLNGKEKIILLNPINVKDGYIFNTGWVSSDENIDTPNLDTKWKISGNKKLSPNNPVSIFYENDQGLRFERIISLDEKYLFKINQKIINKTDKKYKFYPYAYLHRNNIPEDLTDFYILHEGFVTVSDEELKEIDYDDIDEKSYTKNSKKGFIAIGDKYWVTSIIPPKDRPFRMDIDYKNKYRASYIDSEGLLLESNSSIENNVKSIIGAKTVRDIDGYAESENIDKFDLVINWGILYWLVKPMFFILEYFFIFSGNYGYAIILLTILVRIVFFPLNQYAFKSMGKMKVLQPEMNRLKELHKNDKQELQKSLMKLYKSEGINPASGCLPILVQIPIFFSLYKLLLLDISMRHAPFIWIWEDLSAKDPVTIFNLFGLLPYNVPSFLEIGLLPLLMGITMFLQQRLNPSPMTDPIQKKIFAFFPFFITIILAPFAAGLILYWTMTNILTIIQQWIILRKTTVKTK

SEQ ID NO: 95481 - protein, 339 aa, Unknown
  Bacterial polypetide isolated from the Sargasso Sea
MDTETQSLVRMFRQMLRIRTFEERVGELFLKGGTAGSMLHLSIGEESAAVGVGEAMNTGDGFTTHHRGHGIFLARGADPKKMMAEIGGKEDGYCRGKGGSMHIADNDLGHLGANAIVGGGISHVVGAGLSYKYLGKDQSAVAFFGDGAMQQGGLYESMNLAALWKLPVMFVCINNEYGMGTRLDRASASLEFAKRSETFGLNGLEVDGLDVTQVHHKAQKLMEGVRNGDPAFLKVDCYRFHGHARKDKSHYREDVEEQKGREKDPILHLEDQLIKGSFVTTGDLEQIKSEVDNEMDEAMEYALNSTEPESIQRFQDVYAPDSPEPLPVDERIRKALNTS

SEQ ID NO: 95482 - protein, 368 aa, Unknown
  Bacterial polypetide isolated from the Sargasso Sea
PIIPDEARTFGMDPLFRQLGIYAHKGQLYDPVDSDQFLYYKEAINGQIFEEGINEAGAISSFIAAGMSYQTTGENMIPFYIYYSMFGFQRVWDFIWAAGDMRARGFLLGGTAGRTTLNGEGLQHQDGHSHLAAAATPNIKAYDLAYAYEIAVVIKHGIKEMFYEQKDVIYYLTLENENYVHPKMPEKIEKDIIKGMYKIRTTKNPTIRLLGSGPLLNEVIAAADLLKDEWGIDPGIWNVTSFTELRREAEEIERWNLINPEQKQKQSHIEKALNKNPVPTIAVSDYVKMSSEQISPYVSGAYYALGTDGFGRSDTRENLRHFFEVDRYYIVLTAVRALAIEGVLEMSIANKVIKKYNIDSNKPSPITV

SEQ ID NO: 95483 - protein, 258 aa, Unknown
  Bacterial polypetide isolated from the Sargasso Sea
MPRKKEKQTETINLANDFSKETFLYWYKSMVLMRKFEEMAGKLYGQQKIRGFCHLYIGQEACIAGCVTALKEGDKYITSYRDHAHPLALGTNPNFIMAELYGKETGISKGRGGSMHMFDKERNFFGGHGIVGNQIPMGAGIGFAELYKGTDNVCITFLGDGAVRIGAFHEALNMSMFLKIPVIFIIENNGYAMGTSVERTSNVTELYKIGKAYDIPSYPVDAMNVIKVHHAVSKAAKRAREGLGPTLLEFRTYRYKGH

SEQ ID NO: 95484 - protein, 337 aa, Unknown
  Bacterial polypetide isolated from the Sargasso Sea
MTQSNTLLPNLYTTMKRIRTFEERVGELFIKGETAGTMLHLSIGEELGPTCLGAAMQKQDTFTTHHRGHGIFIARGGDPKKMMAEIAGKKDGYCKGKGGSMHIADMKLGHLGANAIVGGGIPTVVGAGLSSKYLEEDKVSVAFFGDGAMQQGILYESMNMASLWKLPVVFCCINNQYGMGTKIDNAAGLKDFSKRAASFGLNTLHIDDLDIENAYVKSKEIIDKARKFEPGFIEVECYRFFGHARMDKSPYRSEEEEIKMRKSDPISYASNQMLKNKIMNEDEIKKINEKISIEMDEAMDFAINSPLNNQKEIFTDVYDESEPLPISVEERINKILS

SEQ ID NO: 95485 - protein, 351 aa, Unknown
  Bacterial polypetide isolated from the Sargasso Sea
MPPKDIDPVETLEWVDAINSVIDEEGLERASYLLTKVAERLNQEGAVPSYNLTTPFKNSISVKDEAKMPGDLLMERKIRSLIRWNALVMVLKANKNDEELGGHISTFSSAATLYDVGFNYFFRGSDNHLEDMVYFQGHCSPGIYARSYLEGYLNEEDLDNFRREVTKPGLSSYPHPWLMPDYWQFPVVSMGLGPILGIYQAHVMRYLSARGLVPRNDRKVWVFCGDGEMDEPESKGAIGLAGREQLENLIFVVNCNLQRLDGPVRGNGKIIQELEGAFRGEGWNVIKVIWGRFWDPIIEKDTEGKLQEIMDAVVDGELQNYKAKGGAYTRKNFFARDPSVLEMVKDLSDED

SEQ ID NO: 95486 - protein, 420 aa, Unknown
  Bacterial polypetide isolated from the Sargasso Sea
REHSEILKLKNKDAFKVLHEGSGERKVSTTTNCVRIMNNLIKDENLGERVVPIVPDEARTFGMEGMFKQIGIYSSEGQLYEPEDADQVMWYKESETGVMLEEGITEAGSFAAWTALATSYSNHNLTMIPFYVFYSMFGFQRIHDLAWAAGDAQAKGFLIGATSGRTTLNGEGLQHQDGHSHILSSTIPNCKSYDPAYGYELAVIIEHGLKEMYKDKKNYFYYLTVTNERYVQPPKPKGKDVDSNIIKGMHRISKTKKPQIRLLGSGAILNESIKASEMLSDFGIESEVWSVSSFNMLRKDGMEVENENIKNASNKAKESFVAKSFSEHDIPTVASTDYMRAYSEQIRPYVNSSYYTLGTDGFGRSDSRAKLREFFEVDAKSIVMTAAYALYKEDQLNKKELQKIYKEIKVNKNKISPWNK

SEQ ID NO: 95487 - protein, 410 aa, Unknown
  Bacterial polypetide isolated from the Sargasso Sea
MNKLENIEYFRPDEKSLEIKYIKERRLKLGGYLPERSTFAKPIKAPSKDIFDFMKVSTGEKEMSTTMALVRMLTNLLRDKNISPRLVPIIPDEARTFGMEGFFQKIGIYAHEGQKYEPEDAAQLSSYREDKSGQVLEEGINEAGAMSSWIAAATAYTNHDIEMIPIYIFYSMFGFQRIGDLAWAAGDSQARGFLVGATAGRTTLAGEGLQHQDGHSHLIASTIPNCVTYDPTFHYELATIFREGLRRMHEKKENVFYYITTMNENYSHPEMPKDKNCEEGILKGMYKIKEFNKYKKTKLQLLGSGTILREMMSAAEILQNDYQIDSEIWSVTSFNELRKDGMEVERYNLLNPDKTPKKSYVEQCLGSTEGPIMAASDYMRMNSDQIRPYTNNKSFYSLGADGLEEVILEK

SEQ ID NO: 95488 - protein, 327 aa, Unknown
  Bacterial polypetide isolated from the Sargasso Sea
MSDMMHQDVDPQETKEWIDALESVLEEEGVERAHYLLEKLIDKARRSGAHLPYDATTAYINTIPAAQEPKMPGDLTIEARIRAAIRWNALMIVLRASKKDLELGGHIGSFASSAMLYDVGFNHFFKAPNENQGGDFIFAQGHISPGIYARSYMEGNLTEEQLNNFRQECAGDGLSSYPHPHLMKDYWQFPTVSMGLGPLQAIYTARFLKYLTNRGIKDCSGQRVYCYMGDGECDEPESLGAIGLASREGLDNLTFVINCNLQRLDGPVRGNGKIIQELEGTFRGAGWEVVKVIWGSYWDELLARDKSGKLIQLMGETVDGEYQNCKA

SEQ ID NO: 95489 - protein, 401 aa, Unknown
  Bacterial polypetide isolated from the Sargasso Sea
KKESLENPNFLNLNRDKKVKEYLLSRRKELGGVLPSRKVSKKKLIAKKESFVDFDKKLDREQSTTMVFVRLLTKLLRDAAIGSRVVPIVPDEARTFGMDALFRQFGIYSSEGQKYEPEDADKVMFYRESESGIMLEEGINEAGAFSAWLALATSYSNNNLPMIPFYIFYSMFGFQRIHDLAWAAGDSRAKGFLLGATSGRTTLNGEGLQHQDGHSHILASTIPNCRSYDPCYSYELSAIIQEGINDMYVNGNDRYYYITLMNENYSHPAKLKKLKNEDILKGAYKLKENKNINLRILASGVTVNFALEAEKELKDHGINADIWSITSFNELYREGIEIERENRLNSTSKKSYVETCFSDEMPTLAVSEYQKAYPNQIREWVNGEYKVLGTDGFGRSDTREE

SEQ ID NO: 95490 - protein, 297 aa, Unknown
  Bacterial polypetide isolated from the Sargasso Sea
MREDKAEWTESLDAIYREFGPAGAKEILRHLQNYALAKNIGLDEATLNTPYVNTIPPGDQSPYPGDIELEERIEKINRWNAIAMVLQAQDKGIGVGGHIATYASCATMLEVGFNHFFQGAGPDNDRGSADMFLPQPHAAPGIYARAYLEGRLTREQLANYRQELGEGGGLSSYPHPRSMPDFWEVPNASMGLSTPAAIYQARFAKYLENHGLKPAATGKVWCFIGDGESDEPEVLGTISLASREQLDNLILVINCNLQRLDGPVRGNGKIIQELERSFRGADWNVLKVIWGSGWDEC

SEQ ID NO: 95491 - protein, 359 aa, Unknown
  Bacterial polypetide isolated from the Sargasso Sea
MTQNISVPDIGDFKDVEVIEVLVKPGDQISKNDPIVTIESDKSSLEIPSPLSGEIRDLKVKIGDKVSEGSVLAVIENGQESQIPKKEKIVKEPIKKEELKTNGNINPIKQVKKIFAEPASKDDIDPIETNEWIDSLNSVIENDGAPRASYLLNQVINQAYKSGLVLPDTRTTPYINTIPPEAEAKSPGDQNIERKLRAYIRWNAAAMVVKANKKSPELGGHIGTFASAATLYDVGMNHFWRAKNNKFGGDLIYFQGHSAPGMYARAYLEGRLNEKQLDGFRQEVSSGGLSSYPHPWLMPNFWQFPTVSMGLGPIMAIYQARFLKYLINRGLVKDEGRKIWVFLGDGEMDEPESLGAISL

SEQ ID NO: 95492 - protein, 91 aa, Unknown
  Bacterial polypetide isolated from the Sargasso Sea
NRGLIKDEGRKVWAFLGDGEMDEPESMGAIGLAARENLDNLIFVINCNLQRLDGPVRGNGKIIQELEGSFRGSGWNVIKVILGVILGFVAC

SEQ ID NO: 95493 - protein, 338 aa, Unknown
  Bacterial polypetide isolated from the Sargasso Sea
KEDIIPKKTFRTALNEHLIQEMERDDNIIIFGEDVCGGTGGSGEKDAWGGAFGVTKGILGKYGSERIFDTPITESAFIGAGVGSAMTGMRPIVEIMFVDFLGVCFDQIFNQAAKVRYMFGGKATTPLVIRTTFGAGSRSASQHSQALYPIFTHIPGLKVVVPSNPYDAKGLLIQSIRDNDPVIFLENKMLYDVEGEVPDQSYTIPFAEANVIREGKDALIVAIGRMVDFSIQAAEQLANEGIQCSILDPRTLSPIDEELLLDMVDECGRLVIVDESYPRCSIASDISSLVAEKAFDALKAPIIKVTSQHSPVPYAPNLEDTYLPSKEKIIDAVKKVVS

SEQ ID NO: 95494 - protein, 466 aa, Unknown
  Bacterial polypetide isolated from the Sargasso Sea
RDRFHLPLSNQQVEQMEFFHPGDSSQEVEYLHQQREKLGGYLPSRRTRGDDLKTPELPFFERLLKSTGEREISTTQALVQAMTLLCRDEKLGPRIVPIVPDEARTFGMEGMFRQIGIYAHEGQKYEPVDREQLMYYREDQKGQFLQEGINEDGAISSWIAAATSYSNSGIQMIPFYTFYSMFGFQRVGDLIWAAGDIQARGFLIGGTSGRTTLNGEGLQHEDGQSQIMAANVPNCISYDPTFAYELMVIIQNGLKRMFENQENVFYYITTLNENYPHPEMKKGQEENIIKGMYLFQQGGKGSKRVQLMGSGSILREVIAAANILAEDFGIQADVWSCPSFNELKRDGDDCVRWNLMHPDQKPRIPHVTACLEKHSGPVVAATDYVKLFADQIRAYVGRNYHVLGTDGFGRSDTRASLRRHFEVNRYYVTVAALKTLADEGTIPAKTVKSAIRKYKLDPEKPNPLNV

SEQ ID NO: 95495 - protein, 93 aa, Unknown
  Bacterial polypetide isolated from the Sargasso Sea
MSKFPVRAAIRDAIAEEMRLDPNVFLIGEEVGEYEGAYKVSQGLISEFGDQRVIDTPITEAGFTGLAVGASIGGLKPIVEFMTWNFAFQAIDQ

SEQ ID NO: 95496 - protein, 591 aa, Unknown
  Bacterial polypetide isolated from the Sargasso Sea
DQLLAKDKSGLLIKRMGEAVDGEYQAFKAKGGKYVRDKFFGKYPELLELVSQMTDRDIWKLNRGGHDPHKVYAAYHSAMQNKGTPTVILAKTIKGYGMGKSGESMNTTHQQKKLDEKDLLYYRDRFDVPLTDEQVKNIQYYRPDENSPEIKYLKECRIKLGGYLPERSSFAKAIKTPPKDIFDKMKESTGDKEMSTTMVLVRMLTNLMRDKNVSPRLVPIIPDEARTFGMEGFFQKIGIYAHEGQKYEPVDSEQLSSYREDIKGQVLEEGITEAGAMSSWIAAGTAYTNHDISMIPIYIFYSMFGFQRTGDFVWAAGDNQTRGFLIGATAGRTTLAGEGLQHGDGHSHVLSSVVPNCISYDPTFGYELATIFREGLKRMYEKQENIFYYITTMNENYPHPEMPKDKDVEKGILKGMYKFKSFNKNKKTKIQLLGSGAILREVIAAAEILERDYKIDSNVWSVTSYNELRKDAIEVERFNLLNPDKENKKSYLEECLSNEDGPILASSDYMRLYSDQIRPYLEKSFYSLGTDGYGRSDTRQNLRKFFEVDKEHIVTYSLSVLAKEQLIPSKYAKDAIKKYNIDSEKPIPTKL

SEQ ID NO: 95497 - protein, 446 aa, Unknown
  Bacterial polypetide isolated from the Sargasso Sea
MKTSEEIKYLKDQRIKLGGFIPERSSFAKQIKAPPKEIFDNFMKSTGDKEMSTTMALVRMLTALLRDKNISPRLVPIIPDEARTFGMEGFFQKIGIYAHEGQKYEPVDSEQLSSYREDKSGQVLEEGINESGAMSSWIAAGTAYTNHDLEMIPIYIFYSMFGFQRVGDLAWAAGDSQARGFLIGATAGRTTLAGEGLQHQDGHSHLLASNIPNCISYDPTFAYEMAVILRDGLKRMHEKKENIFYYITAMNENYSHPEKPKDADEGILKGMYLFKENNNKNKTKVQLLGSGTILREIIAAAEILSKDYGVDSDVWSVTSFNELRKDGMETERWNLLNPNEKKKKSYVQKCLKKTDGPIIAASDYTRSFSDQIRPYIEKPFYSLGTDGYGRSDTRKNLRKFFEVDKEHIVAYTLSALAKEQLIETKKAESAIKKFKINKDRDFPSNL

SEQ ID NO: 95498 - protein, 337 aa, Unknown
  Bacterial polypetide isolated from the Sargasso Sea
KYPELKKLVSTMTDKDIWRLNRGGHDPHKVYAAYHSAFKHKGSPTVIIAKTIKGYGMGKSGESINTTHQQKKLDEKDLLYYRDRFNVPLTDKQVKNIEYYRPAENSEETKYIKNCRLKLGGFIPERTSYSKAIKAPPKEIFENFMKSTGKKEMSTTMALVRMLTNLSRDKNISARLVPIIADEARTFGMEGFFQKMGIYAHEGQKYEPVDSEQLSSYREDKSGQVLQEGITEAGAMSSWVAAGTSYTNHDIEMIPIYIFYSMFGFQRIGDLAWAAGDSQTRGFLIGATAGRTTLAGEGLQHQDGHSHLMASNIPNCVSYDPTFAYEMAVILRDGIKR

SEQ ID NO: 95499 - protein, 366 aa, Unknown
  Bacterial polypetide isolated from the Sargasso Sea
EKTKKVVEEKIPVDTEKIIKEAEDTLVLKEEIKEKKEIIREEKKDRIEIPVKEDIDPIETKEWIESLSAVLQNDGKNRAQFLIKQLIEHSYKEGSDLVLSRNTPYINTISPEEEIKSPGDQNIERKIRSLIRWNAAAMVVRANKKNPELGGHIGTFASAATLYDVGMNHFWRAKNNKFGGDLIYFQGHSAPGMYARAFLEGRLSEKQLDSFRQEVNPGGLSSYPHPWLMPEFWQFPTVSMGLGPIMSIYQARFNKYLINRGLIKDEGRKIWCFLGDGETDEPESLGAIGLAAREKLDNLIFVINCNLQRLDGPVRGNGKIIQELEGIFRGAGWNVIKVIWGSYWDSLLAKDKTGLLIKRMNEAVDG

SEQ ID NO: 95500 - protein, 240 aa, Unknown
  Bacterial polypetide isolated from the Sargasso Sea
MTQYNDANPEETKEWLEALRSVIREEGAERAHFLLSRLSSDTKRINSNIPSTAFSTPYSNTISPSNEERMPGDMFMERQIRGIVRWNAMAMVMRANLRNSSIGGHISTFASSATLYDVGFNYFFRGPNDQHEGDLIYYQGHSSPGIYARSFLEGRLDEAQLDNFREEVNGNGLSSYPHPWLMPDYWQFPTVSMGLGPIQAIYQAHIMKYLSSRGLMDNSDRKVWAFLGDGEMDEPESLGA

SEQ ID NO: 95501 - protein, 331 aa, Unknown
  Bacterial polypetide isolated from the Sargasso Sea
MRSITLSQAVNEAIAEEMRLDSSVFLIGEDVAEAGTPFKITSGLVEEFGTERVIDTPISEPGFMGLAVGAAMTGSRPIVDIMFGDFLFLIMDQLCNQAAKAHYMSGGKLNVPLVVRTNLGATRRSAAQHSQSLHALVSHIPGLKIAMPSSAYEAKGLLKTAIRDDNPVIIFEDKLMYQDKADVPEDEYLIPFGEAAVLQEGNQVTLIGTSSMRQVCEEAALILSDEKISVEIIDPRTLVPLDEKTILNSAKKTGRVIVVDEGHQNFGVTAEIASRISEKAFYYLDAPVIRMGAMDVPVPFSPVLEDLTVPTAEKVASNARKIVAGELVHEL

SEQ ID NO: 95502 - protein, 267 aa, Unknown
  Bacterial polypetide isolated from the Sargasso Sea
MNNPEFNTELKEWIEALENTILSDGKEYSKELLKALFTEASLKGIVLDELNDPSFKNTVQSDEELPYPGNWDFEEKIRHFIRWNSLLMVLKANKDDDLGGHISTYSSAATLYEVGFNHFFRGSDKQLGDLIYFQGHSSPGIYARSFLEGRLKKDQIENFRKEIKGKGLSSYPHPWLMPDYWQFPTVSMGLGPIFGIYQAHIMRYLEKRGLIEEIEDRKVWVYCGDGEMDEPESMGAISLAGRENLNNLVFVINCNLQRLDGPVRGNS

SEQ ID NO: 95503 - protein, 352 aa, Unknown
  Bacterial polypetide isolated from the Sargasso Sea
FVVNCNLQRLDGPVRGNSKVIQELEGAFRGAGWNVIKVIWGSDWDELIENESNELLLNRLEEIVDGDLLKYIVEDGAYIREHFFGKSSELLKMVDHLSDKQLERLRLGGHDPEKMYAAYNEAINHKDRPTVILARTIKGYGLGEAGEGRNITHNQKKLNEKELLYFRDRFNLKFNDEEAMKAPFYRFNKNTKEYKYLIDQRKKLGGFLPSRSDKSKKLKVPNISIFKELIDGSGDRKISTTMAYVRLITLLAKDKDIGQNIVPIIPDEARTFGMDPLFRQLGIYSSAGQLYDPVDSDQFLYYKEATNGQILEEGINEAGAVSSFIAAGTSYSNHGIKMIPFYIYYSMFGFQR

SEQ ID NO: 95504 - protein, 341 aa, Unknown
  Bacterial polypetide isolated from the Sargasso Sea
FMGLGPIMSIYQARFTKYLINRGLLKDEGRKIWCFLGDGETDEPESLGAIGLAAREKLDNLIFVVNCNLQRLDGPVRGNGKIIQELEGIFRGAGWNVIKVIWGSYWDSLLAKDKSGLLIKRMNEAVDGEYQAFKAKGGAFVREKFFGKYPELLNLVSQMTDRDIWKLNRGGHDPHKVYAAYHSAMQNTGTPTVILAKTIKGYGMGKSGESINTTHQQKKLDEKDLLYYRDRFDVPLTDQQVKNIEYYKPADNSPEIKYLKKCRFKLGGNLPERSSFAKSIKTPSQDIFKAMKESTGKKEMSTTMVLVRMLTNLLRDKNVAPRLVPIIPDEAENFWNGRVFS

SEQ ID NO: 95505 - protein, 621 aa, Unknown
  Bacterial polypetide isolated from the Sargasso Sea
RGNGKIIQELEGIFRGAGWNVIKVIWGSYWDQLLAKDNSGLLIKRMGEAVDGEYQAFKAKGGKYVRDKFFGKYPELLDMVSQMTDRDIWKLNRGGHDPHKVYAAYHAAMQNKGTPTVILAKTIKGYGMGKSGESMNTTHQQKKLDEEDLLYYRDRFDVPLTDQQVRNIQYYRPDENSPEIKYLKECRIKLGGNLPERSSFAKAIKTPPQDIFAKMKESSGEKEMSTTMVLVRMLTNLMRDKNVAPRLVPIIPDEARTFGMEGLFQKIGIYAHEGQKYEPVDSEQLSSYREDIKGQVLEEGITEAGAISSWIAAGTSYANHDISMIPIYIFYSMFGFQRTGDFIWAAGDNQTRGFLIGATAGRTTLSGEGLQHGDGHSHVLSSVVPNCISYDPTFSYELAVIFREGLRRMYEKRENIFYYITTMNENYTHPEIPKEKNIEEDILKGMYKFKEFNKNKKTKIQLLGSGAILREIIAAAEILEKDYKIDSNVWSVTSYNELRKEAVEVERYNLLNPDKENKKSHLEKCLSSTEGPIVSASDYIRLNSDQIRPFTRKSFYSLGTDGYGRSDTRKNLRNFFEVDKQHIVAYSLSVLAKEQLIPSKYASEAIKKYNIDPNKTIPTKL

SEQ ID NO: 95506 - protein, 515 aa, Unknown
  Bacterial polypetide isolated from the Sargasso Sea
MGLGPIMGIYQARFMRYMIDRGFIKDTGRKVFVYTGDGEMDEPESLGALTLASRENLDNLIFVVNCNLQRLDGPVRGNSKVIQELEGAFRGAGWNVIKVIWGSEWDELFQKDINGKLLGRLNDLVDGDLLKYTVEGGAYFRKEFFGKDSELIEMVKDFSDEDLEGMLAGGHDPLKMYSAYNEAMNCKGKPTAILARTIKGYGLGDAGEGRNITHNQKKLNTDQLLYFRDRFDIPLNDSDAESAEFFQFSKNSKEYKYIKNQRDLLGGSVPTRADESKKLTIPDISIFDELLNGTGDREVSTTMAYVRLLTLLTKDKSIGNHIVPIIPDEARTFGMDPLFRQLGIYAHKGQLYDPVDSDQFLYYKEAKNGQILEEGINEAGAMSSFCAAATSYSNHGIKMVPFYIYYSMFGFQRVWDLIWASGDMRSRGFLLGGTAGRTTLNGEGLQHQDGHSHLAAAATPNIKAYDVAYGYEIATIVHQGLKEMCEQNKDVVYYLTLENENYRHPSIPMVHRKAY

SEQ ID NO: 95507 - protein, 336 aa, Unknown
  Bacterial polypetide isolated from the Sargasso Sea
MSNTLLPKLYKTMKRIRTFEERVSELFIKGESAGTMLHLSIGEELGPACVGTAMQENDTFTTHHRGHGIFVARGGDPNRMLAEIAGKKDGYCKGKGGSMHIADMTLGHLGANAIVGGGIPTVVGAAMSYKYLKQERVSVAFFGDGAMQQGILYESMNMASLWKLPVVFCCINNQYGMGTKIENAVGVKDFSKRAESFGLNTLHINDLDVESAYHKSKEIIDSARKFKPGFIEIECYRFYGHARMDKSPYRDESEESEKRKLDPISFASNQMIKNNILDEAEIKKIDNDIMIEMDKAMEFAINSPINDETEIFKDVYSENDPLPVSLDEKINKILNN

SEQ ID NO: 95508 - protein, 141 aa, Unknown
  Bacterial polypetide isolated from the Sargasso Sea
MSDLNQNYFEKITYRDALRLAMHDAMQEDKNIIIMGEDVANYGGAYGATKDLLKLFGKERVIDTPISEPAIVGAAVGAAMSGLRPVAELMYVDFFGMSMDQIANQLAKIRYMFGGQISAPMVLRTPGWYWEIWRCTTSQKS

SEQ ID NO: 95509 - protein, 492 aa, Unknown
  Bacterial polypetide isolated from the Sargasso Sea
KSGESVNTTHQTKKLDVDDLMYYRDRFDVPLTDEQVRNIEYFKPDEKSPEIKYINERRIKLGGFLPERSTFAKPIKAPTKDIFDFMKVSTGEKEMSTTMALVRMLTNLLRDKNISPRLVPIIPDEARTFGMEGFFQKIGIYAHEGQKYEPEDAAQLSSYREDKSGQVLEEGINEAGAMSSWIAAATAYTNHDIEMIPIYIFYSMFGFQRIGDLAWAAGDSQARGFLVGATAGRTTLAGEGLQHQDGHSHLIASTIPNCVTYDPTFHYELAVIFREGLRRMHEKNENVFYYITTMNENYTHPEMPKDKSCEEGILKGMYKIKEFNKYKKTKIQLLGSGTILREMMSAAEILQNDYQIDSEIWSVTSFNELRKDGMEVERYNLLNPDKEPKKSYVEQCLGQTEGPIMAASDYMRMNSDQIRSYTNKSFYSLGADGFGRSDTRKNLRKFFEVDKEHLVAYGLSILAKEQLITSKHAKDAMKKYNIDTNKPMPTKL

SEQ ID NO: 95510 - protein, 376 aa, Unknown
  Bacterial polypetide isolated from the Sargasso Sea
MAQNISVPDIGDFKDVEVIEILVKPGDQINKNDPIVTIESDKSSVEIPSPSAGQIKDLKVKIGDKVSEGSLLATIENGQAASSPKQEIKKEAVKEDVVKEQPKSNGNLNPVKQVKKVFAEPASKDDIDPVETNEWIESLNSVIESDGAPRASYLLNKVIDQAYKSGLVLPDTRTTPYINTIPPEAEAKSPGDQNIEKKLRAIIRWNAAAMVVKANKKSSELGGHIGTFASAATLYDVGMNHFWRAKNNKFGGDLVYFQGHSAPGMYARAFLEGRLSAKQLDGFRQEVGKDGLSSYPHPWLMPDFWQFPTVSMGLGPIMAIYQARFLKYLINRGLVKDEGRKIWVFLGDGEMDEPESMGAMGLAAREKLDNLIFVIN

SEQ ID NO: 95511 - protein, 436 aa, Unknown
  Bacterial polypetide isolated from the Sargasso Sea
MSLKLLIPDIGDFENVEIIEILVKKGDKIKKNDPVVTLESDKSSVEVPSNFAGTIENIKVKIGDKVSKGDLILTLDSSESNNEEKKEIKKTNEEIPPVTEKIIQEAESAKKEKAPVVETNIKETKHTRLVNEVKMSSINDDIDPAETKEWLESLSAVLENDGSERAHFLIKQLIDQSYKAGSKIPHTQTTPYINTIPPDEEKKSPGDQNIERKIRSLIRWNAAAMVVRANKKHPELGGHIGTFASAATLYDVGMNHFWRAKNNKFGGDLVYFQGHSAPGMYSRAYLEGRLNEKQLDKFRQEVKPGGLSSYPHPWLMPNFWQFPTVSMGLGPMLAIYQARFMKYLINRGLIKDEGRKVWAFIGDGEMDEPESLGAIGLAARENLDNLIFVVNCNLQRLDGPVRGNGKIIQELEGIFRGTGWNVLKVIWGSYWDSLLQ

SEQ ID NO: 95512 - protein, 97 aa, Unknown
  Bacterial polypetide isolated from the Sargasso Sea
LLEFRTYRYKGHSMSDPASYRSKDELASYKEKDPIEQIKKIITIKKILTEKEFDLIENEIKSQVNDSVKFAEDSPYPSKDDIYKHIYEQGDYPFLIE

SEQ ID NO: 95513 - protein, 339 aa, Unknown
  Bacterial polypetide isolated from the Sargasso Sea
MLVTLKDLVEKEVEVKKKSQEKIPSDTEKIIKEAEDVLAVEEKKDNSKSKINESKIELKSGEDIDPTETKEWIDSLSAVLENDGKHRAQFLIKQLIEHSYKEGSELVLSRNTPYINTILPEEEKKSPGDQNLERKIRSIIRWNAAAMVVRANKKNPELGGHIGTFASAATLYDVGMNHFWRAKNNKFGGDLIYFQGHSAPGMYARAFLEGRITEKEMDKFRQEVKPGGLSSYPHPWLMPNFWQFPTVSMGLGPIMSIYQARFNKYLINRGLLKDEGRKIWCFLGDGETDEPESLGAIGLAAREKLDNLIFVVNCNLQRLDGPVRGNGKIIQELEGIFRG

SEQ ID NO: 95514 - protein, 301 aa, Unknown
  Bacterial polypetide isolated from the Sargasso Sea
HPWLMPEYWQFPVVSMGLGPILGIYQAHVMRYLSSRGLVPRNDRKVWVFCGDGEMDEPESKGAIGLAGREKLENLIFVINCNLQRLDGPVRGNGKIIQELEGSFRGEGWNVIKVVWGRFWDPIMAKDSEGKLQDLMDVVVDGELQNFKAKGGAYTRENFFAKDPSVLEMVKDLSDDDIYKLNRGGHDPYKVYAAYHKAVNSEGAPTVILALTTKGYGTGSREADNTTHQVKKLSMDNIKSFRDKFNIPVPDSEIEKLPYVRPPEDSPEIQYLKKTREALGGFIPRRRTSSDPTLNSKRQTF

SEQ ID NO: 95515 - protein, 403 aa, Unknown
  Bacterial polypetide isolated from the Sargasso Sea
YDKATKHQGSPTVIIAKTIKGYGMGKSGESVNTTHQTKKLDVDDLMYYRDRFDVPLTDEQVRNIEYFRPDEKSPEIKYIKDRRIKLGGYLPERSTFAKPIKAPSKDIFDFMKVSTGEKEMSTTMALVRMLTNLLRDKNISPRLVPIIPDEARTFGMEGFFQKIGIYAHEGQKYEPEDAAQLSSYREDKSGQVLEEGINEAGAMSSWIAAATAYTNHDIEMIPIYIFYSMFGFQRIGDLAWAAGDSQARGFLVGATAGRTTLAGEGLQHQDGHSHLIASTIPNCVTYDPTFHYELAVIFREGLRRMHEKNENVFYYITTMNENYSHPEMPKDKNCEEGILKGMYKIKEFNKYKKTKIQLLGSGTILREMMSAAEILQNDYQIDSEIWSVTSFNELRKDGMGGRK

SEQ ID NO: 95516 - protein, 438 aa, Unknown
  Bacterial polypetide isolated from the Sargasso Sea
KERRIKLGGFLPERSTFAKPIKAPSKDIFDFMKVSTGEKKMSTTMALVRMLTSLMRDKNISPRLVPIIPDEARTFGMEGFFQKIGIYAHEGQKYEPEDSAQLSSYKEEKSGQVLEEGINEAGAMSSWIAAATAYTNHDIEMIPIYTFYSMFGFQRIGDLAWAAGDSQARGFLIGATAGRTTLAGEGLQHQDGHSHLIASTIPNCVTYDPTFHYELAVIFREGLRRMHEKRENVFYYITTMNENYSHPEIPKDKNIEEGILKGIYKIKDFNKHKKTKIQLLGSGTILREMISAAEILQKEYQVDSEVWSVTSFNELRKDGMEVERYNLLNPDKEAKISFVEQCLGKTEGPIMAASDYMRMNSDQIRPYTNKSFYSLGADGFGRSDTRKNLRKFFEVDKEHLVAYGLSILAKEQLIASKHAKEAMKKYNIDSDKPIPTKL

SEQ ID NO: 95517 - protein, 333 aa, Unknown
  Bacterial polypetide isolated from the Sargasso Sea
RIKLGGYIPERSTFAKPIKAPSKDIFDFMKVSTGEKEMSTTMALVRMLTNLLRDKNISPRLVPIIPDEARTFGMEGFFQKIGIYAHEGQKYEPEDAAQLSSYREDKSGQVLEEGINEAGAMSSWIAAATAYTNHDIEMIPIYIFYSMFGFQRVGDLAWAAGDSQARGFLVGATAGRTTLAGEGLQHQDGHSHLIASTIPNCVTYDPTFHYELGVIFREGLRRMHEKNENVFYYITTMNENYSHPEMPKDKNCEEGILKGMYKIKEFNKYKKTKIQLLGSGTILREMMSAAEILQNDYQIDSEIWSVNSFNELRKDGMEVERYNLLNPDKEPKK

SEQ ID NO: 95518 - protein, 390 aa, Unknown
  Bacterial polypetide isolated from the Sargasso Sea
MNLDLLVPDIGDFENVEIIEVLVKKGDKINKNDPVVTLESDKSSVEVPSEYEGTIENINVKIGDKVSKGDLILTISSENKDEHDKINKTLDEKIPPSTEKLIEEAETASKSDTKVETKVIEPKQIKQTRLINEVKMVSSNDDIDPVETKEWLDSLSAVLQNDGSERAHFLIKQLIDQSYKAGSKIPHTQTTPYVNTIPPEEEKRSPGDQNIERKLRSLIRWNAAAMVVRANKKHPELGGHIGTFASAATLYDVGMNHFWRAKNNKFGGDLVYFQGHSAPGMYARAFLEGRLNEKQLDRFRQEVQTGGLSSYPHPWLMPNFWQFPTVSMGIGPMLSIYQARFMKYLINRGLIKDEGRKVWAFLGDGEMDEPESLGAIGLAARENLDNLIFV

SEQ ID NO: 95519 - protein, 70 aa, Unknown
  Bacterial polypetide isolated from the Sargasso Sea
MAQLTYREAVAAGIAQEMERDETVAFIGEDVARAGGVFKATVGLFDKFGPKRVIDTPISEQAILGAAMGA

SEQ ID NO: 95520 - protein, 474 aa, Unknown
  Bacterial polypetide isolated from the Sargasso Sea
MSNKVIVPDIGDFENVEIIEILVKSGDKVKKNDSIVTLESDKSSVEVPSTAEGTVENINVKIGDKVSKGDVLILVSGEPANNKDEKIKYSEDKLPVDTEKIIKQAEETLEEKKEEFTKSKIDKKNETIIEVSKDGDIDPIETKEWLESLSAVLEKDGKNRAQFLIKQLIEHSYKEGSDLILSRNTPYINTIKPEEETKSPGDQNLERKIRSLIRWNAAAMVVRANKKNPELGGHIGTFASAATLYDIGMNHFWRAKNNNFGGDLIYFQGHSAPGMYARAFLEGRISEKELDNFRQEVKPGGLSSYPHPWLMPKFWQFPTVSMGLGPIMSIYQARFNKYLINRGLLKDEGRKIWCFLGDGETDEPESLGAIGLAAREKLDNLIFVVNCNLQRLDGPVRGNGKIIQELEGIFRGAGWNVIKVIWGSYWDQLLAKDKSGLLIKRMGEAVDGEYQAFKAKGGAYVREKFFGKYKELLD

SEQ ID NO: 95521 - protein, 456 aa, Unknown
  Bacterial polypetide isolated from the Sargasso Sea
DSEIEDLPYVRPKEDSPEIKYLKETREKLGGPVPKRREHSETLKLKNKDAFKVLHEGSGERKVSTTTNCVRIMNNLIKDENLGERVVPIVPDEARTFGMEGMFKQIGIYSSEGQLYEPEDADQVMWYKESETGVMLEEGITEAGSFAAWTALATSYSNHNLTMIPFYVFYSMFGFQRIHDLAWAAGDAQAKGFLIGATSGRTTLNGEGLQHQDGHSHILSSTIPNCKSYDPAYGYELAAIIEHGLKEMYKDKKNYFYYLTVTNERYVQPPKPKGKDIDSNIIKGMHRISETKKPQIRLLGSGAILNESSKAADILSRFNIESEVWSVTSFNMLRKDGMEVENENIKNPSNKAKESFVAQSFKEHDIPTVASTDYMRAYSEQIRPYINSSYYTLGTDGFGRSDSRQRLREFFEVDANSIVMTAAYALHKEGQLNKKELQKIYKEIKVNKNKISPWNT

SEQ ID NO: 95522 - protein, 400 aa, Unknown
  Bacterial polypetide isolated from the Sargasso Sea
LEGIFRGGGWNVLKVIWGSYWDSLLANDKTGHLVKIMNETVDGEYQAFKARNGLYVREKFFGKYPETKELVSSMSDTDIWRLNRGGHDPHKVYAAYDKAMNHKGSPTVIIAKTIKGYGMGKSGESVNTTHQQKKLDVDDLMYYRDRFDVPLTDSQVKNIEYFKPDENSEEIKYLKKRRLELGGFIPERTSYSKPIKAPVKDIFDFMKKSTGEKEMSTTMALVRMLTNLLRDKNVAPKLVPIIPDEARTFGMEGFFQKIGIYAHEGQKYEPEDSAQLSSYREEKSGQVLEEGITEAGSMSSWIAAGTAYTNHDIEMIPIYLFYSMFGFQRIGDFAWAAGDSQARGFLIGATAGRTTLAGEGLQHQDGHSHLLASTIPNCISYDPTFHYELAVIFREGLRRM

SEQ ID NO: 95523 - protein, 421 aa, Unknown
  Bacterial polypetide isolated from the Sargasso Sea
TFAKPVKTPPQDIFESFMKSTGDKEMSTTMALVRMLANLLRDKNVAPRLVPIIADEARTFGMEGFFQKIGIYAHEGQKYEPVDSEQLSSYREDKSGQVLQEGITEAGAMSSWIAAGTSYTNHDLEMIPIYLFYSMFGFQRIGDLAWAAADSQTRGFLIGATSGKTTLAGEGLQHQDGHSLLLASAIPNCISYDPTFSYEMAVIFRDGLKRMHEKKENIYYYITAMNENYTHPEKPAGSDQGILKGMYLFKNYKGKGKAKVQMLGSGSILREVIKAAETLSKDYGVDCNVWSATSFNELKKDGMEVERRNLLNPKEKPKKSYVQKCLDSQEGIIFAASDYIRSHTDQIRPYLNKPFYTLGTDGFGRSDTRKELRKFFEVDKKHIVTYTLSALAKEQLMASEHAEKAIKKYNIDQTKVFPTKL

SEQ ID NO: 95524 - protein, 320 aa, Unknown
  Bacterial polypetide isolated from the Sargasso Sea
GITEAGAMSSWIAAGTSYTNHDLEMIPIYLFYSMFGFQRIGDLAWAAADSQTRGFLIGATSGKTTLAGEGLQHQDGHSLLMASAIPNCVSYDPTFSYEMAVIFRDGLKRMHEKKENIYYYITAMNENYTHPEKPAGSDQGILKGMYLFKSYKGKGKAKVQMLGSGSILREIIKASKVLSDEYGIDCDVWSVTSFNELKKNGMEVERKNLLNPGEKAKKSYVETCLSSQDGIIFAASDYIRSYADQIRSYTNKPFYTLGTDGFGRSDTRKELRKFFEVDKKHIVTYTLSALAKEQLMASKHAEKAIKKYNIDQTKVFPTKL

SEQ ID NO: 95525 - protein, 341 aa, Unknown
  Bacterial polypetide isolated from the Sargasso Sea
ARSFLEGRISEQQLDSFRQEVDGEGLSSYPHPWLMPAYWQFPTVSMGLGPIQAIYQAHVMKYLDSRGLVPKKERKVWAFLGDGECDEPETLGALSLAGRERLDNLIFVVNCNLQRLDGPVRGNGKIIQELEGYFRGAGWNVLKVVWGRLWDPLFARDKDGLMQKQMDLTVDGEFQNFKAKGGAYVRESFFNKDPELAKLVEDMSDQDIYQLNRGGHDPFKLYAAYSSAVQHKGQPTVILAKTVKGYGMGDAGESENDTHSVKILNLDELKYFRDRFGIPLSDKEVEAVPYYRPPEDSPEIKYLKSKRDQLGGYVPMRLENKESLKIPPLSTFKAQLKAGRS

SEQ ID NO: 95526 - protein, 133 aa, Unknown
  Bacterial polypetide isolated from the Sargasso Sea
MKKLTKSDHLKIYSYMLKIRRFEERSSQLYGMGHIGGFCHLYIGQEAVVVGVLMTIKKNDSVVTTYRDHGHMIARGLEPKKIMSELTGRVDGYSSGKGGSMHMFSKKNNFYGGHGIVGAQVPIGTGIAFTHKI

SEQ ID NO: 95527 - protein, 281 aa, Unknown
  Bacterial polypetide isolated from the Sargasso Sea
YLINRGLLKNEDRKIWAFLGDGEMDEPESLGAISLASREKLDNLIFVINCNLQRLDGPVRGNGKIIQELEGIFRGAGWNVIKVIWGSYWDQLLTKDKSGLLVKRMNECVDGEYQAFKAKGGAYVREKFFGKYPELKDLVSTMTDRDVWKLNRGGHDPHKVYAAYDAAIKTKGQPTVILAKTIKGYGMGKSGESTNITHQQKKLGEEDLLYYRDRFDIPLTDKQVKNIEFYKPGENSTEIKYIKERRMKLGGNLPERSSFAKPIKKPNKDIFENMLKSSGDR

SEQ ID NO: 95528 - protein, 329 aa, Unknown
  Bacterial polypetide isolated from the Sargasso Sea
ISTFSSAATLYDVGFNYFFRGSDNHLEDMVYYQGHCSPGIYARSFLEGYLNEEDLDNFRREVNKPGLSSYPHPWLMPNYWQFPVVSMGLGPILGIYQAHVMRYLSARGLVPRNDRKVWVFCGDGEMDEPESKGAIGLAGREQLENLIFVVNCNLQRLDGPVRGNGKIIQELEGAFRGEGWNVIKVVWGRFWDPIIAKDTQGKLQEIMDAVVDGELQNYKAKGGAYTRENFFAKDPSVLEMVKDLSDDDIYRLNRGGHDPYKVYAAYHKAVNSKGAPTVILALTTKGYGTGSREADNTTHQVKKLSIENIKSFRDRFDIPVSDSEIEELP

SEQ ID NO: 95529 - protein, 272 aa, Unknown
  Bacterial polypetide isolated from the Sargasso Sea
MTDQYKDVDPQETQEWIESIEDALEEHGYERTRFLLESLIEFAQSKGARLPFNTSTPFLNTILPGQQPEYPGDRDIERKIKSIVRWNAMAMVTKANKETPGIGGHISTYASAATLYEVAFNHIFKGSDHSSGQDLVFFQGHASPGVYARAYLEGRLSKENLDNFRRELAEGGGLSSYPHPYLMPEFWQFATVSMGLGPMMAVYQARFMRYMIDRGFVENTGRKVFAFLGDGEMDEPESTGALTLASRENLDNLIFVVNCNLQRLDGPVRGNS

SEQ ID NO: 95530 - protein, 293 aa, Unknown
  Bacterial polypetide isolated from the Sargasso Sea
MVSSNDDIDPVETKEWLDSLSAVLQNDGSERAHFLIKQLIDQSYKAGSKIPHTQTTPYVNTIPPEEEKRSPGDQNIERKLRSLIRWNAAAMVVRANKKHPELGGHIGTFASAATLYDVGMNHFWRAKNNKFGGDLVYFQGHSAPGMYARAFLEGRLNEKQLDRFRQEVKTGGLSSYPHPWLMPNFWQFPTVSMGIGPMLAIYQARFMKYLINRGLIKDEGRKVWAFLGDGEMDEPESLGAIGLAARENLDNLIFVVNCNLQRLDGPVRGNGKIIQELEGIFRGGGWNVLKVIW

SEQ ID NO: 95531 - protein, 186 aa, Unknown
  Bacterial polypetide isolated from the Sargasso Sea
WRKNIFRTYIGDGAMNNGQVFEAFNLAALWKLPVLYIIENNKYGMGTSVDRAAAGLDLYKRGEAFGIPGEKVDGMNVFSVIEAADKAGKYVREGNGPYIIEVQTYRYRGHSMSDPAKYRTKEELDNYKQTDPIEIVKAEILKKKIATNDEIEKINKDTLKEIKNAAEFATNSPFPKDRELYTDVYL

SEQ ID NO: 95532 - protein, 335 aa, Unknown
  Bacterial polypetide isolated from the Sargasso Sea
SSYKEEKSGQVLEEGINEAGAMSSWIAAGTSYTNHDVEMIPIYLFYSMFGFQRIGDFAWAGADSQSRGFLIGATAGRTTLAGEGLQHQDGHSHLMASTIPNCRSYDPTFHYELAVIFREGLKRMHEKKENIFYYITTMNENYPHPEMPKDKSCEDGILKGMYKIKEFNKYKKTKIQFLGSGTILREMIAGAEILQNEYQIDSEIWSVTSFNELRRDGLEVERYNLLNPDKEPKKSYVEKCLGNTEGPILAASDYMRMNSDQIRPYVNKSFYSLGTDGFGRSDTRKNLRKFFEVDKEHITTYGLSILAKEQLIASKYAKEAIKKYKIDIDKPYANK

SEQ ID NO: 95533 - protein, 267 aa, Unknown
  Bacterial polypetide isolated from the Sargasso Sea
KDGSDRAHYILKKLIDETYKEGTNKPLTRNTPYINTITPENETKSPGDQNIERKIRSLIRWNAAAMVVKANKKNPELGGHIGTFASAATLYDVGMNHFWRAKNNKFGGDLIYFQGHSAPGMYARAFLEGRLTANQLSNFRQEVGVNGLSSYPHPWLMPKFWQFPTVSMGLGPILSIYQARFTKYLINRGLLKNEDRKIWAFLGDGEMDEPESLGAIGLAAREKLDNLIFVINCNLQRLDGPVRGNGKIIQELEGIFRGAGWNVIKVI

SEQ ID NO: 95534 - protein, 220 aa, Unknown
  Bacterial polypetide isolated from the Sargasso Sea
MLLIRRFEEKAGQLYGMGIIGGFCHLYIGQEAIVVGMKAASKEIDTVITSYRDHGHMLAYGMDPKRVMAELAGKGTGYSKGKGGSMHMFSREKNFFGGHGIVGAQVPIGTGLAFKHKYTQDGAVCHAYCGDGAINQGQVYEAFNMAALWKLPVVYVIENNKYGMGTSVERASAVTDLYKRGESFGIPGIKVNGMDVTEVRTVAEEANDWCRAGKGPFIWK

SEQ ID NO: 95535 - protein, 250 aa, Unknown
  Bacterial polypetide isolated from the Sargasso Sea
IGTFASAATLYDVGMNHFWRAKNNKFGGDLVYFQGHSAPGMYARAFLEGRLSTKQLDGFRQEVGKDGLSSYPHPWLMPNFWQFPTVSMGLGPIMGIYQARFLKYLINRGLIKDEGRKIWVFLGDGEMDEPESLGAIGLAAREKLDNLIFVINCNLQRLDGPVRGNGKIIQELEGSFRGSGWNVIKVIWGSYWDKLLAKDKSGLLIKRMNECVDGEYQAFKAKGGAYVKEHFFGKYPELKELVYTMTDKDI

SEQ ID NO: 95536 - protein, 200 aa, Unknown
  Bacterial polypetide isolated from the Sargasso Sea
MLKIRRFEERAAQLYGMGHIGGFCHLYIGQEAVVVGVLMTINKNDTVVTTYRDHGHMIARGLDPKKIMAELTGRSTGYSAGKGGSMHMFSKENNFFGGHGIVGAQVPIGTGIAFTHKYNKEKNICRTYIGDGAMNNGQVFEAFNLAALWKLPVLYIIENNKYGMGTSVDRAAAGSDLYKRGEAFGIPGEIVDGMNVFKVI

SEQ ID NO: 95537 - protein, 295 aa, Unknown
  Bacterial polypetide isolated from the Sargasso Sea
KEAESSIPSKVKKKPVRKIPARSNGADIDPTETQEWLDSLSAVISKDGSDRAHYILKKLIDETYKEGANKPLTRNTPYINTISPDSEVKSPGDQNIERKIRSLIRWNAAAMVVKANKKNPELGGHIGTFASAATLYDVGMNHFWRAKNNKFGGDLIYFQGHSAPGMYARAFLEGRLTANQLSNFRQEVGVNGLSSYPHPWLMPKFWQFPTVSMGLGPILSIYQARFTKYLINRGLLKNEDRKIWAFLGDGEMDEPESLGAIGLAAREKLDNLIFVINCNLQRLDGPVRGNGKIIQ

SEQ ID NO: 95538 - protein, 300 aa, Unknown
  Bacterial polypetide isolated from the Sargasso Sea
NLNKQKEETINITNDKIDIDPLETKEWIESLNAVVENVGNERAHFLLRQLIDQSYRKGSRIPFIQNTPYINTIPPNEEEKSSGDQNIERKIRSLIRWNAAAMVVRANKKFPELGGHIGTFASAATLYDVGMNHFWRAKNHQFGGDLIYFQGHSAPGVYSRAFLEGRLTKVQLDNFRQEVGPNGLSSYPHPWLMDKFWQFPTVSMGLGPMLAIYQARFMKYLINRGLIKDENRKVWAFLGDGEMDEPESLGAIALASRENLDNLIFVINCNLQRLDGPVRGNGKIIQELEGSFRGAGWNVL

SEQ ID NO: 95539 - protein, 261 aa, Unknown
  Bacterial polypetide isolated from the Sargasso Sea
NTNTPGIGGHISTYASSATLYEVAFNHFFKGPEHPSGGDLIFYQGHGSPGQYARAYLEGRLTKENLENFRRELTPGGLSSYPHPYLMPDFWQFATVSMGLGPIMAIYQARFLNYMVDREMIKETGRKVWAFLGDGEMDEPESKGALTLASKEDLDNLIFVVNCNLQRLDGPVRGNSKVIQELEGAFRGAGWNVIKVIWGSEWDDLIDKDTSGKLLQRMEEVVDGELLKYVVEGGAYFREHFFGKYPETLDLVSHISDEDLI

SEQ ID NO: 95540 - protein, 247 aa, Unknown
  Bacterial polypetide isolated from the Sargasso Sea
DQQPPYPGDLDTEREIQNSILWNSAVMVSDANRRIDGLGGHISTYASSSTLYEVGFNHVFRGKDSNGIGDALYIQGHGSPGIYARAFLEGRLTREQLANFRQEAFADGLSSYPHPRLMDDFWEYPTVSMGLGPLGAVMHARFWKYLHNRGLADTSESTVFAFLGDGEMDEPESIAAIAVAGREKLDNLITIVNCNLQRLDGPVRGNAKIVQELEGLYRGAGWEVFKVLWDSNWDRLFAQDRDGLLLA

SEQ ID NO: 95541 - protein, 303 aa, Unknown
  Bacterial polypetide isolated from the Sargasso Sea
MTDQYKDVDPQETQEWIESIEDALEEHGYERTRFLLESLIEFAQSKGARLPFNTSTPFLNTILPGQQPEYPGDRDIERKIKSIVRWNAMAMVTKANKETPGIGGHISTYASAATLYEVAFNHIFKGSDHPSGQDLVFFQGHASPGVYARAYLEGRLSKENLDNFRRELAEGGGLSSYPHPYLMPEFWQFATVSMGLGPMMAVYQARFMRYMIDRGFVENTGRKVFAFLGDGEMDEPESTGALTLASRENLDNLIFVVNCNLQRLDGPVRGNSKVIQELEGAFRGAGWNVIKVIWGSDWDELIE

SEQ ID NO: 95542 - protein, 211 aa, Unknown
  Bacterial polypetide isolated from the Sargasso Sea
YGGHGIVGAQVPLGAGLAFADKYLENDRVTFTYFGDGAANQGQVYETFNMASLWKLPVIFVIENNQYAMGTSQLRSTSTPDIYTRGAGFDIPGEAVDGMDVLSVKAAGDKAVKHCRAGKGPYILEIKTYRYRGHSMSDPAKYRTREEVQKMREERDAIENIRSILLTGKHATEDCLKSIDKEIKKIVNESAEFAKASPEPELNELYTDIYA

SEQ ID NO: 95543 - protein, 273 aa, Unknown
  Bacterial polypetide isolated from the Sargasso Sea
LIKQLIDQSYKAGSKIPHTQTTPYVNTIPPEEEKRSPGDQNIERKLRSLIRWNAAAMVVRANKKHPELGGHIGTFASAATLYDVGMNHFWRAKNNKFGGDLVYFQGHSAPGMYARAFLEGRLNEKQLDRFRQEVQTGGLSSYPHPWLMPNFWQFPTVSMGIGPMLAIYQARFMKYLINRGLIKDEGRKVWAFLGDGEMDEPESLGAIGLAARENLDNLIFVVNCNLQRLDGPVRGNGKIIQELEGIFRGGGWNVLKVIWGSYWDSLLANDKTG

SEQ ID NO: 95544 - protein, 296 aa, Unknown
  Bacterial polypetide isolated from the Sargasso Sea
VMRANRDSSELGGHIASFASSALLYDIGFNHFWQAPGTDHGGDLIYIQGHSAPGIYARAFLEGRITEEQMNHFRQESTGKGVSSYPHPWLMPEFWQFPTVSMGLGPIMAIYQARFLKYLHNRELLDTEPRKVWCFLGDGETDEPESMGAIHLAAREKLDNLIFVINCNLQRLDGPVRGNGKIIQELEGEFRGAGWNVIKVLWGSYWDPLLARDNQGLLRKRMEEAIDGEYQAFKAKGGAYTRTHFFGKYPELLEMVSNMSDEDIWRLNRGGHDPHKVYAAYEAAVKHNGQPHGDIS

SEQ ID NO: 95545 - protein, 184 aa, Unknown
  Bacterial polypetide isolated from the Sargasso Sea
RVTFTYFGDGAANQGQVYETFNMASLWKLPVIFVIENNQYAMGTSQLRSTSTPDIYTRGAGFDIPGEAVDGMDVLSVKAAGDKAVKHCRAGKGPYILEIKTYRYRGHSMSDPAKYRTREEVQKMREERDAIENIRSILLTGKHASEDDLKSIDKEIKKIVNESAEFAKASPEPELNELYTDIYA

SEQ ID NO: 95546 - protein, 319 aa, Unknown
  Bacterial polypetide isolated from the Sargasso Sea
REVDKPGISSYPHPWLMPDYWQFPTVSMGLGPIMGIYQAHVMRYLSARQLIERGNRKVWVFCGDGEMDEPESKGAIGLAGRESLENLIFVINCNLQRLDGPVRGNHKIIQELEREFRGSGWNVLKVVWGRHWDQILSRDGKGKLQRLMDAVVDGELQNFKAKGGAYTREKFFGQDPEVLKMVEDLTDEDIYKLNRGGHDPYKVYAAYHKAVNTKGAPTVILALTTKGYGTGSREADNTTHQVKKLTTDNLKAFRDRFDIPVSDKDLEKLPYIKFEKNSKEYKYLKESRKKLGRANFPLGFFDDNPLKRPAVELFKNILM

SEQ ID NO: 95547 - protein, 235 aa, Unknown
  Bacterial polypetide isolated from the Sargasso Sea
CFLGDGEMDEPESLGAIGLAARENLDNLIFVVNCNLQRLDGPVRGNGKIIQELEGIFRGAGWNVIKVIWGSYWDSLLANDKTGHLIKIMNETVDGEYQAFKARNGLYVREKFFGKYPETLELVSAMSDKDIWRLNRGGHDPHKVYAAYDKAVKNTGSPTIIVAKTIKGYGMGKSGESVNTTHQQKKLDVDDLLYYRDRFDVPLNDEQVKNVEYFKPDKNSEEIKYLKERRMELGG

SEQ ID NO: 95548 - protein, 303 aa, Unknown
  Bacterial polypetide isolated from the Sargasso Sea
FQGHSAPGMYARAFLEGRLTSKQLDGFRQEVNKGGLSSYPHPWLMPKFWQFPTVSMGLGPIMAIYQARFLKYLINRGLIKDEGRKIWVFLGDGEMDEPESLGAIGLAAREKLDNLVFVINCNLQRLDGPVRGNSKIIQELEGSFRGSGWNVIKVIWGSYWDQLLAKDKTGLLIKRMNECVDGEYQAFKAKGGSYVREKFFGKYPELTELVSSLTDKDIWRLNRGGHDPHKVYAAYSAAMQNTGSPTVILAKTIKGYGMGKTGESVNTTHQQKKLDEEDLLYYRDRFNVPLTDKQVKNIEYTSR

SEQ ID NO: 95549 - protein, 255 aa, Unknown
  Bacterial polypetide isolated from the Sargasso Sea
QEWVESIEDSLDEHGYERTRFLLETLIDYAQSRGARLPFNTSTPFINTILPKQQPKYPGDREIERKIKSIVRWNAMAMVTRANKETMGIGGHISTYASAATMYEVAFNHFLKGPSHPSGQDLVFYQGHASPGMYSRSFLEKRLSRENLVNFRRELSKGGGLSSYPHPYLMPDFWQFATVSMGLGPIMAIYQARFMRYMIDRGFMKDTGRKVYAFLGDGEMDEPESKGALTLASRENLDNLIFVVNCNLQRLDGPV

SEQ ID NO: 95550 - protein, 316 aa, Unknown
  Bacterial polypetide isolated from the Sargasso Sea
QFLAVSTVSMGIGPMLAIYQARFMKYLINRGLIKDEGRKVWTFLGDGEMDEPESLGAIGLAARENLDNLIFVVNCNLQRLDGPVRGNGKIIQELEGIFRGSGWNVLKVIWGSYWDSLLANDKTGHLVKIMNETVDGEYQAFKARNGLYVREKFFGKYPETTELVSSMSDTDIWRLNRGGHDPHKVYAAYDKAVNHKGSPTVIIAKTIKGYGMGKSGESVNTTHQQKKLDVDDLMYYRDRFDVPLTDSQVKNIEYFKPDENSEEIKYLKKRRLELGGYIPERTSYSKPIKAPVKDIFDFMKKSTGEKEMSTTMALVR

SEQ ID NO: 95551 - protein, 329 aa, Unknown
  Bacterial polypetide isolated from the Sargasso Sea
CPCFCRRPFTADQLDNFRQEVGGEGLSSYPHPKLMPEFWQFPTVSMGLGPITSIYQARFLKYLDGRGLKDTSAQRVYAFLGDGEMDEPESRGSLSFAAREKLDNLCFLVNCNLQRLDGPVMGNGKIIQELEGLFRGAGWNVIKVVWGSGWDKLLAKDTTGKLLQLMNETVDGDYQTYKAKDGAYVRQHFFGRYPETAALVADMTDEEIFALKRGGHEPSKLYAAFKAAQETKGRPTVILAKTIKGYGMGEAAEGKNIAHQVKKMDMTHVLQIRKRLGLEDYISEEDVQSLPYIQLPEGSPEHQYLHARRNALNGYTPVRLPNFTKALTL

SEQ ID NO: 95552 - protein, 300 aa, Unknown
  Bacterial polypetide isolated from the Sargasso Sea
MKKQWAEKKEEKKIISEPLVEKKQSTIQVVNGSDIDPLETQDWLESLSAVISKDGNHRAHFLIKELINKAYREGANIPYTQNTPYINTIPPEAEVKSSGDQNIERRIRSLIRWNAAAMVVRANKKHPELGGHIGTFASAATLYDVGMNHFWRAKNNKFGGDLIYFQGHSAPGMYARAFLEGRLNEKQLDSFRQEVKPGGLSSYPHPWLMPNFWQFPTVSMGLGPMLAIYQARYMKYLINRGLIKDEGRKVWAFLGDGEMDEPESMGAIGLAARENLDNLIFVINCNLQRLDGPVRGNGKI

SEQ ID NO: 95553 - protein, 266 aa, Unknown
  Bacterial polypetide isolated from the Sargasso Sea
FASAATLYDVGMNHFWRAKNNKFGGDLIYFQGHSAPGMYARAFLEGRINEKELDRFRQEVEPGGLSSYPHPWLMPKFWQFPTVSMGLGPIMSIYQARFNKYLINRGLLKDEGRKVWCFLGDGETDEPESLGAIGLAAREKLDNLIFVINCNLQRLDGPVRGNGKIIQELEGIFRGAGWNVIKVIWGSYWDPLLAKDKSGLLIKRMGEAVDGEYQAFKAKGGSYVRNKFFGKYPELLDLVSQMTDKDIWKLNRGGHDPHKVYAAYYA

SEQ ID NO: 95554 - protein, 278 aa, Unknown
  Bacterial polypetide isolated from the Sargasso Sea
SSGDQNIERKIRSLIRWNAAAMVVRANKKFPELGGHIGTFASAATLYDVGMNHFWRAKNHQFGGDLIYFQGHSAPGVYSRAFLEGRLSKDQLDNFRQEVGPNGLSSYPHPWLMHKFWQFPTVSMGLGPMLAIYQARFMKYLINRGLIKDENRKVWAFLGDGEMDEPESLGAIALASRENLDNLIFVINCNLQRLDGPVRGNGKIIQELEGSFRGAGWNVIKVIWGSYWDPLLANDKTGLLIKRMNEAVDGEYQAFKAKGGAYVREKFFGKYPELSKLV

SEQ ID NO: 95555 - protein, 237 aa, Unknown
  Bacterial polypetide isolated from the Sargasso Sea
SAPGMYARAFLEGRITEKQLDKFRQEVEKGGLSSYPHPWLMPKFWQFPTVSMGLGPMMAIYQARFTKYLINRGLLKDQDRKIWCHLGDGEMDEPESFGAVGLAAREKLDNLIFVINCNLQRLDGPVRGNGKIIQELEGRFRGSGWNVIKVIWGSYWDQLLSKDKTGLLVKRMTEAVDGEYQAFKAKGGSYVREKFFGKYPELKDLVANMTDADIWKLNRGGHDPHKVYSAYHAAVRC

SEQ ID NO: 95556 - protein, 160 aa, Unknown
  Bacterial polypetide isolated from the Sargasso Sea
AALWKLPVLYIIENNKYGMGTSVDRAAAGLDLYKRGEAFGIPGEKVDGMNVFSVIDAADKAGKYVREGNGPYIIEVQTYRYRGHSMSDPAKYRSKEELDNYKQTDPIEIVKAEILKKKIATNDEIEKINKDTLEEIKNAAEFATNSPFPKDSELYTDVYL

SEQ ID NO: 95557 - protein, 260 aa, Unknown
  Bacterial polypetide isolated from the Sargasso Sea
YPGDLEMEEKLENIIRWNAMAMVVKANREIEGIGGHISTFASSASLYEVGQNHFFKGTDGNQAGDMVFFQGHGSPGNYARAFLEGRLPAKKLHHFRQELSEEGGLSSYPHPYLMPDFWQFPTVSMGLGPILSIYLARFNQYLVARDFLKKSPNVWCFIGDGESDEPETLGALTLASREKLNNLIFIVSCNLQRLDGPVRGNGKIIQELESAFRGAGWYVIKVIWGSGWDKLLQSEHRELLLKRMKEVVDGEYQKYVVEPR

SEQ ID NO: 95558 - protein, 249 aa, Unknown
  Bacterial polypetide isolated from the Sargasso Sea
IGTFASAATLYDVGMNHFWRAKNNKFGGDLIYFQGHSAPGMYARAYLEGRLNEKQLDSFRQEVKPGGLSSYPHPWLMPKFWQFPTVSMGLGPMLAIYQARYMKYLINRGLIKDEGRKVWAFLGDGEMDEPESMGAIGLAARENLDNLIFVINCNLQRLDGPVRGNGKIIQELEGSFRGSGWNVIKVIWGSYWDSLLANDKSGHLVKLMNETVDGEYQAAKARDGAYVREKFFGKYAETSELVSSLSDKD

SEQ ID NO: 95559 - protein, 268 aa, Unknown
  Bacterial polypetide isolated from the Sargasso Sea
ERKLRSLIRWNAAAMVVRANKKHPELGGHIGTFASAATLYDVGMNHFWRAKNNKFGGDLVYFQGHSAPGMYARAFLEGRLNEKQLDKFRQEVRTGGLSSYPHPWLMPNFWQFPTVSMGIGPMLAIYQARFMKYLINRGLIKDEGRKVWAFLGDGEMDEPESLGAIGLAARENLDNLIFVVNCNLQRLDGPVRGNGKIIQELEGIFRGGGWNVLKVIWGSYWDSLLANDKTGHLVKIMNETVDGEYQAFKAKNGLYVREKVFWQIFPET

SEQ ID NO: 95560 - protein, 98 aa, Unknown
  Bacterial polypetide isolated from the Sargasso Sea
KYVRSGKGPYILEVQTYRYRGHSMSDPAKYRSKKELDSYKSNDPIEFVRKEILKKKIASKEQLEKINSKIISEIKEAADYALKNEYPDPSSLYSDVYI

SEQ ID NO: 95561 - protein, 284 aa, Unknown
  Bacterial polypetide isolated from the Sargasso Sea
KNHQFGGDLIYFQGHSAPGIYSRAFLEGRLSKEQLDNFRQEVEPNGLSSYPHPWLMHKFWQFPTVSMGLGPMLAIYQARFMKYLINRGLIKDENRKVWAFLGDGEMDEPESLGAIALASRENLDNLIFVINCNLQRLDGPVRGNGKIIQELEGSFRGSGWNVIKVIWGSYWDPLLAKDKTGLLIKRMNEAVDGEYQAFKAKGGAYVREKFFGKYPELSELVSSYSDKDIWRLNRGGHDPHKVYAAYHKAMENVGSPTVIITKTIKGYGMGKSGESINTTHQQKK

SEQ ID NO: 95562 - protein, 173 aa, Unknown
  Bacterial polypetide isolated from the Sargasso Sea
MTLKSVRESIRDTIAEEMRLDSNVFLLGEEVGEYQGAYKVSQGLLEEFSSKRIVDTPITEAGFTGLAVGAAMNGLRPIVEFMTWNFAMQAIDHIINSAAKTFYMSGGKINIPIVFRGPNGIASRVAAQHSQDYSAWYSHIPGVKVLSPYDANDASGLFRARIRDENPVIFLEH

SEQ ID NO: 95563 - protein, 299 aa, Unknown
  Bacterial polypetide isolated from the Sargasso Sea
GDLIYFQGHSAPGMYARAFLEGRLNEKQLDSFRQEVKKDGLSSYPHPWLMPNFWQFPTVSMGLGPMLAIYQARFMKYLINRGLIKDEGRKVWAFLGDGEMDEPESLGAIGLAARENLDNLIFVINCNLQRLDGPVRGNGKIIQELEGIFRGAGWNVIKVIWGSYWDTLLANDKTGHLIKIMNETVDGEYQAFKARNGLYVRENFFGKYPETLELVSAMSDKDIWRLNRGGHDPHKVYAAYDKATKNIGSPTVIIAKTIKGYGMGKSGESVNTTHQQKKLDIEDLLYYRDRFDLPLNDEQ

SEQ ID NO: 95564 - protein, 269 aa, Unknown
  Bacterial polypetide isolated from the Sargasso Sea
PELGGHIGTFASAATLYDVGMNHFWRAKNNKFGGDLIYFQGHSAPGMYARAFLEGRLNEKQLDKFRQEVKPGGLSSYPHPWLMPNFWQFPTVSMGIGPMLAIYQARFMKYLINRGLIEDQNRKVWAFIGDGETDEPESLGAIGLAAREKLDNLIFVVNCNLQRLDGPVRGNGKIIQELEGIFRGSGWNVIKVIWGSYWDQLLAKDKTGHLVKLMNETVDGEYQAYKARNGLYVREKFFGKYPETKELVSALSDKDIWRLNRGGHDPHKV

SEQ ID NO: 95565 - protein, 318 aa, Unknown
  Bacterial polypetide isolated from the Sargasso Sea
NDDIDPVETKEWLDSLSAVLQNDGSERAHFLIKQLIDQSYKAGSKIPHTQTTPYVNTIPPEEEKRSPGDQNIERKLRSLIRWNAAAMVVRANKKHPELGGHIGTFASAATLYDVGMNHFWRAKNNKFGGDLVYFQGHSAPGMYARAFLEGRLNEKQLDRFRQEVQTGGLSSYPHPWLMPNFWQFPTVSMGIGPMLAIYQARFMKYLINRGLIKDEGRKVWAFLGDGEMDEPESLGAIGLAARENLDNLIFVVNCNLQRLDGPVRGNGKIIQELEGIFRGGGWNVLKVIWGSYWDSLLANDKTGHLVKIMNETVDGEYQ

SEQ ID NO: 95566 - protein, 265 aa, Unknown
  Bacterial polypetide isolated from the Sargasso Sea
FTGLAVGSAFKGLRPIVEFMTFNFSMQAIDQIINSAAKTLYMSGGQINCPIVFRGPNGAASQVAAQHSQDFSSWYSHCPGLKVVAPSNAFNAKGLLKSSIEDDNPVIFLENEILYNQKMDVPEDTNFDIPLGVANIALEGRDATIVTYSIMVSKSLEAAEILKKDYNLNVEIIDLQTIRPLDVDTILNSVKKTNRAITVEESWPFASVGSEIVNIVQREIFDYLDSPIIKVNSADVPMPYSSVLEKKYLPQVQDIISAIKKVCYI

SEQ ID NO: 95567 - protein, 141 aa, Unknown
  Bacterial polypetide isolated from the Sargasso Sea
MKKKFKKEDYIKIYRKMLQIRRFEERAAQLYGMGHIGGFCHLYIGQEAVVVGVLMTIENNDSVVTTYRDHGHMIARGLEPKKIMAELTGKQTGYSNGKGGSMHMFSKKNNFYGGHGIVGAQVPIGTGIAFTHKYRKEKQIC

SEQ ID NO: 95568 - protein, 322 aa, Unknown
  Bacterial polypetide isolated from the Sargasso Sea
RSKIPQATKTFERKIRALIRWNAAAMVVRANKKNPELGGHIGTFASAATLYDVGMNHFWRAKNNKFGGDLIYFQGHSAPGMYARAFLEGRISAKQLDSFRQEVNPGGLSSYPHPWLMPKFWQFPTVSMGLGPIMSIYQARFTKYLINRGLLKDEGRKIWCHLGDGETDEPESLGAIGLAAREKLDNLIFVVNCNLQRLDGPVRGNGKIIQELEGIFRGAGWNVIKVIWGSYWDPLLSKDKTGLLIKRMNEAVDGEYQAFKAKGGAFVRENFFGKYPELLNLVSQMDDKDIWKLNRGGHDPHKVYAAYHSAMQNKGSPTVILA

SEQ ID NO: 95569 - protein, 258 aa, Unknown
  Bacterial polypetide isolated from the Sargasso Sea
KKDHLGDQNIERKLRSLIRWNAAAMVVRANKKYPELGGHIGTFASAATLYDVGMNHFWRAKNNKFGGDLVYFQGHSAPGMYARAFLEGRLNEKQLDRFRQEVQTGGLSSYPHPWLMPNFWQFPTVSMGIGPMLAIYQARFMKYLINRGLIKDEGRKVWAFLGDGEMDEPESLGAIGLAARENLDNLIFVVNCNLQRLDGPVRGNGKIIQELEGIFRGGGWNVLKVIWGSYWDSLLANDKTGHLVKIMNETVDGEYQAF

SEQ ID NO: 95570 - protein, 216 aa, Unknown
  Bacterial polypetide isolated from the Sargasso Sea
MTSRKVSKKTNVNSQELLSFYKDMLLIRRFEEKAGQLYGMGLIGGFCHLYIGQEAVVVGLEASAEEGDKRITSYRDHGHMLACGMDPKGVMAELTGRAGGYSKGKGGSMHMFSKEKNFYGGHGIVGAQVPLGAGLAFADKYLENDRVTFTYFGDGAANQGQVYETFNMASLWKLPVIFVIENNQYAMGTSQLRSTSTPDIYTRGAGFDIPGEAVDG

SEQ ID NO: 95571 - protein, 292 aa, Unknown
  Bacterial polypetide isolated from the Sargasso Sea
AYYREDKKGQVLQEGINDLGAMASWVASGTSYSTCNATTIPFYIYYSMFGFQRVGDLAWAAGDSQARGFLLGATAGRTTLNGEGLQHQDGHSHVQANLIPNCITYDPTYGYEVAVIVQDGLRRMYGNNENIFYYLTLMNENYQHPAMPEGDDVAEQIIKGIYKLERVENDKSKLNVQLMGSGTILNEVRKAAQILCEDYNVSSDVYSVTSFNELAREGQDVARYNMLNPEAEQKVPYIGQVITKDAGPAISATDYVKNYSDQVRAFIETEYRCLGTDGFGRSDSRENLRTHF

SEQ ID NO: 95572 - protein, 243 aa, Unknown
  Bacterial polypetide isolated from the Sargasso Sea
KKIMAELTGRLDGYSKGKGGSMHMFSKKNNFFGGHGIVGAQVPIGTGVAFALKYENKKNICRTYIGDGAMNNGQVFESFNLASLWNLPVLYIIENNMYGMGTSVDKASAGSDLYKRGEAFDIPGEIVDGMNVFKVREAAFKAAKHVRNLKRPYILEVQTYRYKGHSMSDPATYRSKKELDSYKTKDPIQIAKDEIIKKKIATEKELEKINEKIINKIKDAADFALNSPFPNHEELFTDVYIEH

SEQ ID NO: 95573 - protein, 209 aa, Unknown
  Bacterial polypetide isolated from the Sargasso Sea
GGHIGTFASAATLYDVGMNHFWRAKNNKFGGDLVYFQGHSAPGMYARAFLEGRLTEAQLNNFRQEVDGKGLSSYPHPWLMPKFWQFPIVSMGLGPIMSIYQARFTKYLINRGLLKDEGRKIWTFLGDGETDEPESLGAIGLAAREKLDNLVFVINCNLQRLDGPVRGNGKIIQELEGIFRGAGWNVIKVIWGSYWDSLLEKDKSGLLVK

SEQ ID NO: 95574 - protein, 292 aa, Unknown
  Bacterial polypetide isolated from the Sargasso Sea
RKVWVFLGDGEMDEPESLGAIGLAAREKLDNLIFVINCNLQRLDGPVRGNGKIIQELEGSFRGTGWNVIKVIWGSYWDQLLAKDKTGLLVKRMNECVDGEYQAFKAKGGSYVRDKFFGKYDELKELVSTMTDKDIWKLNRGGHDPHKVYAAYHSAMQHEGSPTVILAKTIKGYGMGKSGESINTTHQQKKLDEKDLLYYRDRFGVPLTDKQVKNIEYYKPSENSEEIKYLKDKRLKLGGFIPERSTFAKAIKTPPKDIFDSFMKSTGDKEMSTTMTLVRMLTALLRDKNLSP

SEQ ID NO: 95575 - protein, 183 aa, Unknown
  Bacterial polypetide isolated from the Sargasso Sea
MSLYLGDGAINQGQVYESFNMAALWSLPCVYIIENNQYGMGTAVSRAAAGETLASRGAAYGIPGLEVDGMDVLAVKEAGTEAVQHAESGKGPFILEMKTYRYRGHSMSDPAKYRTKEEVNRMRQERDPIDNVKERLIQADVAEEELKGMDKLIRDTVSEAVEFAQKSEEPDPSELYTDVLIQV

SEQ ID NO: 95576 - protein, 315 aa, Unknown
  Bacterial polypetide isolated from the Sargasso Sea
YPGGLSSYPHPWLMPKFWQFPTVSMGLGPMMATYQARFMKYLINRKLIKDENRKVWSFLGDGEIDEPEALGSIGLAAREKLDNLIYVVNCNLQRLDGPVRGNGKIIQELEGIFRGAGWNVIKVIWGSYWDPLLANDKSGLLVKRMNEAVDGEYQAFKAKGGLYVRDNFFGKYPELKNLVASYTDSDIWKLNRGGHDPHKVYAAYHKAINTKDRPTVILAKTIKGYGMGKSGESINTTHQQKKLGVDDLLYYRDRFDVPLTDEQVKNIEYFRPDENSEEIKYLKKRRLALGGYIPERSSFSKPNQTPSNDIFDFMK

SEQ ID NO: 95577 - protein, 292 aa, Unknown
  Bacterial polypetide isolated from the Sargasso Sea
SLIRWNAAAMVVRANKKFPELGGHIGTFASAATLYDVGMNHFWRAKNNKFGGDLIYFQGHSAPGMYARAYLEGRLNEKQLDSFRQEVKPGGLSSYPHPWLMPKFWQFPTVSMGLGPMLAIYQARYMKYLINRGLIKDEGRKVWAFLGDGEMDEPESMGAIGLAARENLDNLIFVINCNLQRLDGPVRGNGKIIQELEGSFRGSGWNVIKVIWGSYWDSLIANDKTGYLVKAMNETVDGEYQAMKARDGAYVREKFFGKYPETLDLVSSLSDIDIWRLNRGGHDPHKVFAAYD

SEQ ID NO: 95578 - protein, 322 aa, Unknown
  Bacterial polypetide isolated from the Sargasso Sea
MPGDLFMERKIRSLIRWNALVMVLRANMNDDELGGHIATFSSAATLYDVGFNYFFRGSNNQLEDMIYYQGHSSPGIYARSFLEGYLNEEDLDNFRREVTKPGLSSYPHPWLMPEYWQFPVVSMGLGPILGIYQAHVMRYLSSRGLVPRNDRKVWVFCGDGEMDEPESKGAIGLAGREKLENLIFVINCNLQRLDGPVRGNGKIIQELEGSFRGEGWNVIKVVWGRFWDPIMAKDSEGKLQDLMDVVVDGELQNFKAKGGAYTRENFFAKDPSVLEMVKDLSDDDIYKLNRGGHDPYKVYAAYHKAVNSEGAPTVILALTTKG

SEQ ID NO: 95579 - protein, 141 aa, Unknown
  Bacterial polypetide isolated from the Sargasso Sea
MNKKNKNNFTNDQLLKFYEKMFLIRKFEEKAAQLYGAGKIGGFCHLYIGQEAVVIGILSSINSEDTVITAYRDHGHILARGVDPKLVMSELTGRKDGISKGKGGSMHMFSKANRFYGGHGIVGAQVPLGVGIGFAHKYRNE

SEQ ID NO: 95580 - protein, 312 aa, Unknown
  Bacterial polypetide isolated from the Sargasso Sea
TKECLDSLSAVLQNDGSERAHFLIKQLIDQSYKAGSKIPHTQTTPYVNTIPPEEEKRSPGDQNIERKLRSLIRWNAAAMVVRANKKHPELGGHIGTFASAATLYDVGMNHFWRAKNNKFGGDLVYFQGHSAPGMYARAFLEGRLNEKQLDRFRQEVQTGGLSSYPHPWLMPNFWQFPTVSMGIGPMLAIYQARFMKYLINRGLIKDEGRKVWAFLGDGEMDEPESLGAIGLAARENLDNLIFVVNCNLQRLDGPVRGNGKIIQELEGIFRGGGWNVLKVIWGSYWDSLLANDKTGHLVKIMNETVDGEYQAI

SEQ ID NO: 95581 - protein, 327 aa, Unknown
  Bacterial polypetide isolated from the Sargasso Sea
WNAAAMVVRANKKYPELGGHIGTFASAATLYDVGMNHFWRAKNNKFGGDLIYFQGHSAPGMYARAFLEGRLNEKQLDSFRQEVKPGGLSSYPHPWLMPNFWQFPTVSMGLGPMLAIYQARYMKYLINRGLIKDEGRKVWAFLGDGEMDEPESMGAIGLAARENLDNLIFVINCNLQRLDGPVRGNGKIIQELEGSFRGSGWNVIKVIWGSYWDSLLANDKTGHLIKIMNETVDGEYQAMKARDGAYVREKFFGKSPEALELVSSMSDTDIWRLNRGGHDPHKVFAAYDKATKHQGSPTVIILQTIKGYGMGKSGESVNTTHQTEKIR

SEQ ID NO: 95582 - protein, 155 aa, Unknown
  Bacterial polypetide isolated from the Sargasso Sea
MLLIRRFEEKAGQLYGMGKIGGFCHLYIGQEAVVVGVDSVKKKGDQVITSYRDHGHMLSCGMDPKGVMAELTGKKTGYSKGKGGSMHMFSKSKDFYGGHGIVGAQVPIGAGLAFSNKYKKNKSVCFTYFGDGAANQGQIYETFNMASLWKLPVVF

SEQ ID NO: 95583 - protein, 246 aa, Unknown
  Bacterial polypetide isolated from the Sargasso Sea
MKTEILMPSLSPTMEEGNLAKWYVSPGDKVKPGDIIADIETDKALMEYECIEEGTVIDLIVKEGTENIKVNSLIAIIETDGSEEVMEIKDPAIEQNDPVADDKSEEILNIEEKENVIASAKDEEKTLGQEENISKVLNTFTVREAINGAIAEEMRRDEDVFLMGEEVGEYQGAYKVSQGLLDEFGVERVIDTPITEHGFTGLAVGAAFAGIRPIVEFMTFNFAMQALDQIINSAAKTNYMSGGQIN

SEQ ID NO: 95584 - protein, 295 aa, Unknown
  Bacterial polypetide isolated from the Sargasso Sea
IGFAQSKGARLPFNTSTPFTNTILPGQEPKYPGDRELERKIKSIVRWNAMAMVTKANKETPGIGGHISTYASAATLYEVAYNHILKGAAHPSGQDMVFFQGHASPGIYARAFLEKRLSKENLHNFRRELSEGGGLSSYPHPYLMPDFWQFATVSMGLGPLMAIYQARFMRYMDDRGFVEDTGRKVFAFLGDGEMDEPESTGALTLASRESLDNLIFVVNCNLQRLDGPVRGNSKVVQELEGAFRGAGWNVIKVLWGSEWDDLFEKDTTGMFLKRTEEVVDGDLLKYIVEGGALYA

SEQ ID NO: 95585 - protein, 247 aa, Unknown
  Bacterial polypetide isolated from the Sargasso Sea
KKYPELGGHIGTFASAATLYDVGMNHFWRAKNNKFGGDLVYFQGHSAPGMYARAFLEGRLNEKQLDRFRQEVKTGGLSSYPHPWLMPNFWQFPTVSMGIGPMLAIYQARFMKYLINRGLIKDEGRKVWAFLGDGEMDEPESLGAIGLAARENLDNLIFVVNCNLQRLDGPVRGNGKIIQELEGIFRGAGWNVLKVIWGSYWDTLLANDKTGHLVKIMNETVDGEYQAFKARNGLYVREKFFGKYPET

SEQ ID NO: 95586 - protein, 283 aa, Unknown
  Bacterial polypetide isolated from the Sargasso Sea
LEKKQSTIQIINGSDIDPLETQDWLESLSAVISKDGNHRAHFLIKELINKAYREGANIPYTQNTPYINTIPPEAEVKSSGDQNIERRIRSLIRWNAAAMVVRANKKYPELGGHIGTFASAATLYDVGMNHFWRAKNNKFGGDLIYFQGHSAPGMYARAFLEGRLNEKQLDSFRQEVKPGGLSSYPHPWLMPKFWQFPTVSMGLGPMLAIYQARYMKYLINRGLIKDEGRKVWAFLGDGEMDEPESMGAIGLAARENLDNLIFVINCNLQRLDGPVRGNGKIIK

SEQ ID NO: 95587 - protein, 294 aa, Unknown
  Bacterial polypetide isolated from the Sargasso Sea
KVWAFLGDGEMDEPESMGAIGLAAREKLDNLIFVVNCNLQRLDGPVRGNGKIIQELEGSFRGAGWNVIKVIWGSYWDSLIANDKTGHLVKIMNETVDGEYQAMKARDGAYVREKFFGKYPETQELVSSLSDKDIWRLNRGGHDPHKVYAAYDKATKNQGSPTVIIAKTIKGYGMGKTGESVNTTHQTKKLDVDDLLYYRDRFDVPLTDDQVRNIEYFKPDEKSPEIKYLKERRLNLGGFLPERTTYAKPIKAPSKDIFDFMKVSTGEKEMSTTMAMVRMFTNLLRDKNISPRLV

SEQ ID NO: 95588 - protein, 160 aa, Unknown
  Bacterial polypetide isolated from the Sargasso Sea
MSTSHTFEFPTPFKAHNCDGPESSCVATKDELMSYLDLMLRMRRMEIAFDNEYKARNIRGFCHLYDGQEACAVGVEAALTREDSWITSYRCHATMLARGGEVSAIAAELFGLEDGVAAGKGGSMHMYSKDQNFYGGAGIVGAQVPCGVGLAFANKYNAGF

SEQ ID NO: 95589 - protein, 308 aa, Unknown
  Bacterial polypetide isolated from the Sargasso Sea
INTIPADEEIKSPGDQNIERKIRALIRWNSAVMVVRANMRDPSLGGHIGTFASAATLYDIGMNHFWRAKSNKFGGDLIYFQGHSAPGIYARAFLEGRLNEKQLDRFRQEVYPGGLSSYPHPWLMPKFWQFPTVSMGLGPMMATYQARFMKYLINRKLIKDENRKVWSFLGDGEIDEPEALGSIGLAAREKLDNLIYVVNCNLQRLDGPVRGNGKIIQELEGIFRGAGWNVIKVIWGSYWDPLLANDKSGLLVKRMNEAVDGEYQAFKAKGGLYVRDNFFGKYPELKNLVASYTDSDIWKLNRGGHDPH

SEQ ID NO: 95590 - protein, 221 aa, Unknown
  Bacterial polypetide isolated from the Sargasso Sea
MTISILMPALSPTMEEGTLSKWLIKIGDKVNPGDLLAEIETDKATMEVECIEEGYVSDLLVKEGTEGVKINTPIAILSSSHKKIKNDQEIKKNKLEENIDDNVIHISPSKDISELDSLNNNQNQLNNTETHNITVRQALRDAMAEEMRIDKNVFVLGEEVAEYQGAYKVTQGLLQEFGEKRVVDTPITEHGFTGLGIGAAFANLKPVVEFMTFNFAMQAID

SEQ ID NO: 95591 - protein, 238 aa, Unknown
  Bacterial polypetide isolated from the Sargasso Sea
VLDTPISEAGFAGVGVGSTMVGSRPIIEFMTFNFALVGIDQIINNAAKIRQMSGGQFPIPIVFRGPTASAGQLGATHSQAFDNWFANCPGLKVIVPSNPYDAKGLLKSAIRDDDPVIFMESEQMYGDKGEIPESEYTLPIGVADIKRKGKDVTVVSFGKIIKEAYIAADKLADEGVECEIIDLRTIRPLDYDAIFDSVKKTNRLVILEEAWPFGNISTDISHTVQSKLFDYLDAPVEK

SEQ ID NO: 95592 - protein, 262 aa, Unknown
  Bacterial polypetide isolated from the Sargasso Sea
YQARFMKYLINRSLIKDEGRKVWAFLGDGEMDEPESMGAIGLAARENLDNLIFVVNCNLQRLDGPVRGNGKIIQELEGIFRGAGWDVIKVIWGSYWDPLLAKDKTGHLLKIMNETVDGEYQAFKARNGLYVREKFFGKYAETKELVSSLSDKDIWRLNRGGHDPHKVYAAYDQASKNKGKPTVIIAKTIKGYGMGKTGESVNTTHQQKKMGVDDLMYYRDRFDVPLTDKQVQDIQYFRPNENSEEIKYLKDRRIKLGGFIPE

SEQ ID NO: 95593 - protein, 330 aa, Unknown
  Bacterial polypetide isolated from the Sargasso Sea
PGDLFMERRIRSLIRWNALVTVLRANKNDDELAGHIATFSSAAMLYDIGFNYFFRGQESKNDDLVYFQGHSSPGIYARSFLEGRLSEEDLDNFRREVDKPGLSSYPHPWLMPDYWQFPVVSMGLGPISAIYQAHVMKYLHARGLKDLGDRKIWGFWGDGEMDEPESLGAIGLAAREKLDNLIFVINCNLQRLDGPVRGNGKVIQELERQFRGSGWNVIKVVWGRLWDPIMAKDKGGHLQKIMDEVVDGEMQNFKAKGGAYTRENFFGKHPEALKLVKGLSDEEIYKLNRGGHDPYKVYAAYHEAVNHKGAPTVILRSQQRVMVLGQEKQT

SEQ ID NO: 95594 - protein, 131 aa, Unknown
  Bacterial polypetide isolated from the Sargasso Sea
METSTTAANVKDTGTSVESFTKETYLKWYESMLLMRKFEEKAGQLYIQQKIRGFCHLYIGQEALVAGAISAIRPTDNLITAYRDHAHPIGMGMDPKYVMAELYGKETGCSKGKGGSMHMFDKELNFFGGHG

SEQ ID NO: 95595 - protein, 312 aa, Unknown
  Bacterial polypetide isolated from the Sargasso Sea
LEDVPKNTENLIQEAEDSLKRIKEPKKPINKIEKEKSEIKQIVKEGDIDPLETNEWLESLSDVIEKDGNQRAHYLIKELINKAYMEGANIPYTQNTPYINTIPVGDEKKSNGDQNIERRIRSLIRWNAAAMVVRANKKFPELGGHIGTFASAATLYDVGMNHFWRAKNNKFGGDLIYFQGHSAPGMYARAFLEGRLNEKQLDSFRQEVNPGGLSSYPHPWLMPNFWQFPTVSMGLGPMLAIYQARYMKYLINRGLIKDEGRKVWAFLGDGEMDEPESLGAIGLAAREKLDNLIFVVNCNLQRLDGPVRGNGK

SEQ ID NO: 95596 - protein, 275 aa, Unknown
  Bacterial polypetide isolated from the Sargasso Sea
KYPETAALVSDMTDAQIFALKRGGHEPSKLFAAYKNAQETKGRPTVILAKTVKGYGMGEAAEGKNIAHQVKKMDMTHVLQLRDRLGLQDLLTDDAVENLPYLTLEEGSKEHEYLHARRKALHGYTPQRLPNFTEALTLPALEEFTPLLEEQKREISSTMAFVRTLNILLKDKGIGKNIVPIIADEARTFGMEGLFRQIGIYNPSGQTYTPEDRGVVSYYKEATSGQVLQEGINELGAMSSWVAAATSYSTNNLPMIPFYIYYSMFGFQRVGDMAW

SEQ ID NO: 95597 - protein, 253 aa, Unknown
  Bacterial polypetide isolated from the Sargasso Sea
INCGGDLIYFQGHSAPGMYARAYLEGRLNEKQLDSFRQEVKPGGLSSYPHPWLMPKFWQFPTVSMGLGPMLAIYQARYMKYLINRGLIKDEGRKVWAFLGDGEMDEPESMGAIGLAARENLDNLIFVINCNLQRLDGPVRGNGKIIQELEGSFRGSGWNVIKVIWGSYWDPLLTNDKSGHLVKLMNETVDGEYQAAKARDGAYVREKFFGKYAETSELVSSLSDKDIWRLNRGGHDPHKVYAAYDQATKNQGS

SEQ ID NO: 95598 - protein, 206 aa, Unknown
  Bacterial polypetide isolated from the Sargasso Sea
GIVGAQVPIGVGLAFSHKYKNDGYVSMTYLGDGAVNQGQVYESFNMAALWKLPVVFIIENNKYGMGTSVTRASAGRSLAERGKAYGIPGIEVDGMNVFSVREAGKEALDYSRNGKGPFILEMKTYRYRGHSMSDPAKYRARSEVDAVRQQKDCIENLREILQENKVTDDELKSFDTEIKSTVSKAAEFALESDLPDKSELLTDIYL

SEQ ID NO: 95599 - protein, 274 aa, Unknown
  Bacterial polypetide isolated from the Sargasso Sea
GGHISTYASAATLYEVAFNHVFKGPDHKEGQDLIFFQGHASPGMYSRAFLEGRFNKDNLKNFRQELAKEGGLSSYPHPYLMPSFWQFATVSMGLGPLMAIYQARFMRYMVDRKFINETKRKVFAFLGDGEMDEPESKGALTLASREELDNLIFVINCNLQRLDGPVRGNSKVIQELESAFRGAGWNVIKVIWGSGWDRLLVKDTKGLLLKRMEEIVDGDLLKYTVEDGSYFREHFFGKDKELLSLVDHLSDKDLEDLKPGGHDPEKVLQHLMRQ

SEQ ID NO: 95600 - protein, 310 aa, Unknown
  Bacterial polypetide isolated from the Sargasso Sea
KELINKANMEGANIPYTQNTPYINTIPVNEEKKSNGDQNIERRIRSLIRWNSAAMVVRANKKFPELGGHIGTFASAATLYDVGMNHFWRAKNNKFGGDLIYFQGHSAPGMYARAFLEGRLNEKQLDSFRQEVNPGGLSSYPHPWLMPNFWQFPTVSMGLGPMLAIYQARYMKYLINRGLIKDEGRKVWAFLGDGEMDEPESLGAIGLAAREKLDNLIFVINCNLQRLDGPVRGNGKIIQELEGIFRGAGWNVIKVIWGSYWDPLLANDKTGHLIKVMNETVDGEYQAMKARDGAYVREKFFGKYPETKEL

SEQ ID NO: 95601 - protein, 271 aa, Unknown
  Bacterial polypetide isolated from the Sargasso Sea
AFLGDGEMDEPESMGAIGLAARENLDNLIFVINCNLQRLDGPVRGNGKIIQELEGSFRGSGWNVIKVIWGSYWDSLIANDKSGYLVKTMNETVDGEYQAMKARDGAYVREKFFGKYPETLELVSSMSDTDIWRLNRGGHDPHKVFAAYDRATKHQGSPTVIIAKTIKGYGMGKSGESVNTTHQTKKLDVDDLMYYRDRFDVPLTDEQVKNIEYFRPDEKSPEIKYIKERRIKLGGYLPERSTFAKPIKAPSKDIFDFMKVSTGEKEMSTTM

SEQ ID NO: 95602 - protein, 235 aa, Unknown
  Bacterial polypetide isolated from the Sargasso Sea
MATKPKSKPKRGARKRPAAKKSAPGATNDELLSYYNDMLLIRRFEEKAGQLYGMGLIGGFCHLYIGQEAVVVGMQATAGENDTVVTSYRDHGHMLACGMEAKGVMAELTGRRGGYSRGKGGSMHMFSREKNFYGGHGIVGAQMPIGTGLAFASRYKEDGGVCHAYCGDGAINQGQIYEAFNMASLWDLPVIYVIENNKYGMGTSIERASAVTELHKRGASFGIPGTQVNGMDVLE

SEQ ID NO: 95603 - protein, 285 aa, Unknown
  Bacterial polypetide isolated from the Sargasso Sea
APALDTFKAILEPTPEGREISTTQAYVRFLTQLLRDKDIGPRVVPILVDEARTFGMEGLFRQIGIYNPHGQQYTPVDKDQVMYYREDKAGQILQEGINEAGGMASWIAAATSYSTSNRIMIPFYVYYSMFGFQRIGDLAWAAGDMQARGFLLGGTSGRTTLNGEGLQHEDGHSHILANTIPNCISYDPTFAHEVAVIMQDGLRRMVQNQENVFYYLTLLNENYAMPGLTAGTEAQIIKGMYLCKPGQKVPQSGERVQLLGSGTILRESFFAQELLEKDWGIAADV

SEQ ID NO: 95604 - protein, 152 aa, Unknown
  Bacterial polypetide isolated from the Sargasso Sea
LYIIENNKYGMGTSVDRAAAGLDLYKRGEAFGIPGEKVDGMNVFSVIEAADKAGKYVREGNGPYIIEVQTYRYRGHSMSDPAKYRTKEELDNYKQTDPIEIVKGEILKKKIATNDEIEKINKDTLEEIKNAAEFATNSPFPKDSELYTDVYL

SEQ ID NO: 95605 - protein, 306 aa, Unknown
  Bacterial polypetide isolated from the Sargasso Sea
PKDTENIIKQAEVAIADEKKRETKINETKIENKQSSTQVVNGADTDPLETKDWLESLTAVISKDGNQRAHFLIKELINKAYREGANIPYTQNTPYVNTIPPEAEVKSNGDQNIERRIRSLIRWNSAAMVVRANKKFPELGGHIGTFASAATLYDVGMNHFWRAKNNKFGGDLIYFQGHSAPGMYARAYLEGRLNEKQLDSFRQEVKPGGLSSYPHPWLMPKFWQFPTVSMGLGPMLAIYQARYMKYLINRGLIKDEGRKVWAFLGDGEMDEPESMGAIGLAARENLDNFIFVINCNLQRLDGPVRG

SEQ ID NO: 95606 - protein, 137 aa, Unknown
  Bacterial polypetide isolated from the Sargasso Sea
MREIQFREAICEAMSEEMRRDETVYLMGEEVAEYNGAYKASKGMLDEFGDSRVIDTPISELGFAGIGVGSTMTGNRPIIEFMTFNFSLVGIDQIINNAAKIRQMSAGQFPCPIVFRGPTGSAGQLAATHSQAFDNWF

SEQ ID NO: 95607 - protein, 252 aa, Unknown
  Bacterial polypetide isolated from the Sargasso Sea
MYARAFLEGRINTKQLDYFRQEVNPGGLSSYPHPWLMPKFWQFPTVSMGLGPIMSIYQARFTKYLINRGLLNDEGRKIWCHLGDGETDEPESLGAIGLAAREKLDNLIFVINCNLQRLDGPVRGNGKIIQELEGIFRGAGWNVIKVIWGSYWDPLLSKDKSGLLIKRMNEAVDGEYQAFKAKGGAFVREKFFGKYPELLNLVSQMDDKDIWKLNRGGHDPHKVYAAYYSAMQNKGTPTVILAKTIKGYGMGK

SEQ ID NO: 95608 - protein, 182 aa, Unknown
  Bacterial polypetide isolated from the Sargasso Sea
ICRTYVGDGAMNNGQVFEAFNLAALWKLPVLYIIENNMYGMGTSVERASAGSDLYKRGESFGIPGEIVDGMNVFKVINSANKAGKYVRNGKGPYILEVQTYRYRGHSMSDPAKYRTKKELDTYKSHDPIEFVKKEILKKKIATNMELEKINHKIINEIKEAADYALNNEYPDPSSLYTDVYI

SEQ ID NO: 95609 - protein, 274 aa, Unknown
  Bacterial polypetide isolated from the Sargasso Sea
LEGRLNEKQLDSFRQEVKPGGLSSYPHPWLMPKFWQFPTVSMGLGPMLAIYQARYMKYLINRGLIKDEGRKVWAFLGDGEMDEPESLGAIGLAAREKLDNLIFVVNCNLQRLDGPVRGNGKIIQELEGIFRGAGWNVIKVIWGSYWDQLLANDKTGHLVKTMNETVDGEYQAMKARNGAYVREKFFGKYPETSELVSSLSDKDIWRLNRGGHDPHKVFAAYDKASKNIGSPTVVIAKTIKGYGMGKSGESVNTTHQTKKLDVNDLMYYRDRFDV

SEQ ID NO: 95610 - protein, 256 aa, Unknown
  Bacterial polypetide isolated from the Sargasso Sea
IYARSFLEGVLTKQQLDNFRQEIGGNGLSSYPHPWLMQDYWQFPTVSMGLGPIMSIYQAHVMKYLEQRGLLEENQNRKIWMFCGDGEMDEPESMGSISLAAREKLNNLIFVINCNLQRLDGPVRGNSRIITELGTIFKAAGWNVINLIWGRRWDELLAKDYSGALRWVMNNTVDGEYQNFKAKGGAYTRKHFFGKHPEALKLVEEMTDQEIEDLNRGGHDPLKVYNAYKKAYECTDKPSVILAFTVKGYGIGSRQA

SEQ ID NO: 95611 - protein, 241 aa, Unknown
  Bacterial polypetide isolated from the Sargasso Sea
MKTKSKKKIEQQKTSKVNYDIDLLKALHKKMLMIRRFEEKAGQLYGMGHIGGFCHLYIGQEAVVVGIQSVLEKNDTLVTSYRDHGHMLACDMDPKGVMAELTGRITGYSKGKGGSMHMFSREKGFFGGHGIVAAQVPIGTGLAFAHKYKANNAISVTFFGDGAANQGQVYETYNMASLWKLPVVFVIENNMYGMGTSVSRSSAGDNFAKRGDAFGIKNKVINGMDVLEVREAAKDAVEYCR

SEQ ID NO: 95612 - protein, 290 aa, Unknown
  Bacterial polypetide isolated from the Sargasso Sea
RANKKFPELGGHIGTFASAATLYDVGMNHFWRAKNNKFGGDLIYFQGHSAPGMYARAYLEGRLNEKQLDSFRQEVKPGGLSSYPHPWLMPKFWQFPTVSMGLGPMLAIYQARYMKYLINRGLIKDEGRKVWAFLGDGEMDEPESMGAIGLAAREKLDNLIFVINCNLQRLDGPVRGNGKIIQELEGSFRGSGWNVIKVIWGSYWDSLLANDKTGHLVKLMNETVDGEYQAAKARDGAYVREKFFGKYAETSELVSSLSDKDIWRLNRGGHDPHKVYAAYDRATKNQGSPT

SEQ ID NO: 95613 - protein, 226 aa, Unknown
  Bacterial polypetide isolated from the Sargasso Sea
MNHFWRAKNNKFGGDLIYFQGHSAPGMYARAFLEGRLNEKQLDSFRQEVKPGGLSSYPHPWLMPNFWQFPTVSMGLGPMLAIYQARYMKYLINRGLIKDEGRKVWAFLGDGEMDEPESMGAIGLAARENLDNLIFVINCNLQRLDGPVRGNGKIIQELEGSFRGSGWNVIKVIWGSYWDSLIANDKTGHLIKAMNETVDGEYQAMKARDGAYVREKFLENIQKQIN

SEQ ID NO: 95614 - protein, 304 aa, Unknown
  Bacterial polypetide isolated from the Sargasso Sea
PEKEKTKKVKQETKILANNKDIDPLETKDWLDSISAVLEKDGINRAQFLIKELIEHSYRQGSDLALSRNTPYINTISPEEETKSPGDQNIERKLRSLIRWNAAAMVVRANKKFPELGGHIGTFASAATLYDVGMNHFWRAKNNKFGGDLIYFQGHSAPGMYARAYLEGRLSEKQLDSFRQEVNKGGLSSYPHPWLMPNFWQFPTVSMGIGPMLAIYQARFMKYLINRGLMKDEGRKVWCFLGDGEMDEPESLGAIGLASRENLDNLIFVVNCNLQRLDGPVRGNGKIIQELEGIFRGAGWNVIK

SEQ ID NO: 95615 - protein, 267 aa, Unknown
  Bacterial polypetide isolated from the Sargasso Sea
AEELRRDPEIFMMGEEIGEYQGAYKVSQGLLEEFGDKRIIDTPITEHGMTGLGVGAAFGGLKPIVEFMTFNFAMQAMDQIVNSAAKTRYMSGGQMSLPIVFRGPNGAAAGVAAQHSQCFASWFSHIPGLKVVSPWSGADAKGLLKSAIRDPNPVIFLEHELLYGEKFIVPDDQEYTVPLGSANVEKIGGDVTVISYSRMVQVALEAADVLAGDGIEVEVINLRTLRPLDVDTIISSLKKTNRIISLEEGWPVAGLGAEISAIVMEKG

SEQ ID NO: 95616 - protein, 290 aa, Unknown
  Bacterial polypetide isolated from the Sargasso Sea
SRNTPYINTISPEEDKTSPGDQNIERKIRSLIRWNAAAMVVRANKKNPDLGGHIGTFASAATLYDVGMNHFWRAKNNKFGGDLIYFQGHSAPGIYARSFLEGRLTEKQLDSFRQEVLPGGLSSYPHPWLMPDYWQFPTVSMGLGPMLAIYQARFMKYLINRGLIKDENRKVWAFLGDGEMDEPESLGAIGLASREKLDNLIFVVNCNLQRLDGPVRGNGKIIQELEGIFRGAGWNVIKVIWGSYWDQLLAKDKTGLLVKRMNEAVDGEYQAFKAKGGAYVRDKFFENTKN

SEQ ID NO: 95617 - protein, 298 aa, Unknown
  Bacterial polypetide isolated from the Sargasso Sea
PEDSAQLSSYREEKSGQVLEEGINEAGAMSSWIAAGTSYTNHDIEMIPIYLFYSMFGFQRIGDFAWAGADSQSRGFLIGATAGRTTLAGEGLQHQDGHSHLMASTIPNCKSYDPTFHYELATIFREGLKRMHEKKENIFYYITTMNENYPHPAMPSEKSCEEGILKGMYKIKEFNKYKKTKIQFLGSGTILREMIAGAEILQKEYQIDSEIWSVTSFNELRRDGLEVERYNLLNPEKEPKKSYVESCLGKTEGPILAASDYMRMNSDQIRPYINKSFYSLGTDGFGRSDTRKNLRKFL

SEQ ID NO: 95618 - protein, 249 aa, Unknown
  Bacterial polypetide isolated from the Sargasso Sea
VFFQGHASPGIYSRSFLEGRLTEKHLNNFRKELSKEGGLSSYPHPYLMPHYWQFATVSMGLGPMMAIYQARFMRYMTDRGLIKETGRKVYAFLGDGEMDEPESTGALTLASRENLDNLVFVINCNLQRLDGPVRGNSKVIQELEGAFRGAGWNVVKVVWGSDWDELFKKDTKGILLKRMEEVVDGDLLKYVVEGGAYIREHFFGKYPELLTLVKDISDEKLEKMRIGGHDPVKMYAAYKEASEHKGSPT

SEQ ID NO: 95619 - protein, 301 aa, Unknown
  Bacterial polypetide isolated from the Sargasso Sea
MGEEVAEYEGAYKVSQGLLDEFGSERVIDTPITEHGFTGLAAGAAFGGLKPVVEFMTFNFSLQAMDQIINTCAKTLYMSGGQMNCPIVLRGPNGAASQVAAQHSQDFAPWFASVPGLKVIQPFSANDAKGLLKSAIRDPNPVIFLENEILYNDKSASSKINDQLIPIGKAKVLLEGSDVTLVSYGIGIKHSLSAVELAKDIDISVEIIDLRSIRPIDYDTVFKSIRKTNRCITVEECFPICSIGNHLSASIMENIFDYLDSPIINCTGKDVPMPYAKNLEKAALLNPEEIFKAIKKVTYRD

SEQ ID NO: 95620 - protein, 292 aa, Unknown
  Bacterial polypetide isolated from the Sargasso Sea
LLAVSTVSMGLGPMLAIYQARYMKYLINRGLIKDEGRKVWAFLGDGEMDEPESLGAIGLAAREKLDNLIFVINCNLQRLDGPVRGNGKIIQELEGIFRGAGWNVIKVIWGSYWDSLLTNDKTGHLVKTMNETVDGEYQAMKARDGAYVREKFFGKYPETRELVSRLSDKDIWRLNRGGHDPHKVFSAYDKASKNVGSPTVVIAKTIKGYGMGKGGESVNTTHQTKKLDIDDLMYYRDRFDVPLTDQQVKNIEYYKPEPNSPEIKYIKEKRIQLGGFIPERTTYAKPIKAPPK

SEQ ID NO: 95621 - protein, 266 aa, Unknown
  Bacterial polypetide isolated from the Sargasso Sea
MLESLIEFAQSKGARLPFNTSTPFLNTILPGQQPEYPGDRDIERKIKSIVRWNAMAMVTKANKETPGIGGHISTYASAATLYEVAFNHIFKGSDHSSGQDLVFFQGHASPGVYARAYLEGRLSKENLDNFRRELAEGGGLSSYPHPYLMPEFWQFATVSMGLGPMMAVYQARFMRYMIDRGFVENTGRKVFAFLGDGEMDEPESTGALTLASRENLDNLIFVVNCNLQRLDGPVRGNSKVIQELEGAFRGAGWNVIKVIWGSDWDE

SEQ ID NO: 95622 - protein, 295 aa, Unknown
  Bacterial polypetide isolated from the Sargasso Sea
AIYQARYMKYLINRGLIKDEGRKVGAFLGDGEMDEPESLGAIGLASREKLDNLIFVVNCNLQRLDGPVRGNGKIIQELEGIFRGAGWNVIKVIWGSYWDSLLANDKSGHLVKIMNETVDGEYQAIKARDGAFVREKFFGKYPETENLVSSLSDKDIWRLNRGGHDPHKVFAAYDKASKNIGSPTVVIAKTIKGYGMGKSGESVNTTHQTKKLDIDDLMYYRDRFDVPLTDDQVKNIEYYKPDTNSAEIKYIKERRLQLGGFIPERTSYAKSIKAPPKNIFDNMKESTGKKEMSTT

SEQ ID NO: 95623 - protein, 311 aa, Unknown
  Bacterial polypetide isolated from the Sargasso Sea
DRKIERKIKSFVRWNAMAMVVKANTNTPGIGGHISTYASSATLYEVAFNHFFKGPEHPSGGDLIFYQGHGSPGQYARAYLEGRLTKENLESFRRELTPGGLSSYPHPYLMPDFWQFATVSMGLGPIMAIYQARFLNYMVDREMIKATGRKVWAFLGDGEMDEPESKGALTLASKEDLDNLIFVVNCNLQRLDGPVRGNSKVIQELEGAFRGAGWNVIKVIWGSEWDDLIDKDTSGKLLQRMEEVVDGELLKYVVEGGAYFREHFFGKYPETLDLVSHISDEDLIKMKLGGHDPIKMYAAYKEATEHKGRPT

SEQ ID NO: 95624 - protein, 258 aa, Unknown
  Bacterial polypetide isolated from the Sargasso Sea
MLAIYQARFMKYLINRGLIKDEKRKVWVFLGDGEMDEPESLGAIGLAARENLDNLIFVINCNLQRLDGPVRGNGKIIQELEGIFRGAGWNVIKVIWGSYWDQLLANDKKGLLVKRMNEAVDGEYQAFKANGGSYVREHFFGKYPELKEMVSSFTDKDIWKLNRGGHDPHKVFAAYDAASKNVGSPTVIIAKTIKGYGMGKSGESINTTHQQKKLDVKDLLYYRDRFDVPLTDKQVEEIQYYKPDNNSEEIKYLKERRL

SEQ ID NO: 95625 - protein, 278 aa, Unknown
  Bacterial polypetide isolated from the Sargasso Sea
LPTKNLNKENDKKNKTKKITNPQNDVHDFDLEKNETQEILTVRESIRDALAEEMRADENVFLMGEEVAEYQGAYKVSQGLLDEFGSKRVIDTPITEHGFTGLAAGAAFGGLKPVVEFMTFNFSLQAMDQIINTCAKTLYMSGGQMNCPIVLRGPNGAASQVAAQHSQDFAPWFASIPGLKVIQPFSANDAKGLLKSAIRDPNPVIFLENEILYNDKSASSEIRDELIPIGKANILIEGTDVSIISYGIGIKHSLMAIELAKDINISVELIDLRSLRPN

SEQ ID NO: 95626 - protein, 284 aa, Unknown
  Bacterial polypetide isolated from the Sargasso Sea
AILYEVGFNHFFRGSDKSLGDLIYFQGHSSPGIYARSFLEGRLTSEQLDNFRQEIKGQGLSSYPHPWLMPDYWQFPTVSMGLGPIFGIFQAHVMRYLEKRGLIKSIENRKVWVFCGDGEMDEPESMGSISLAGREKLNNLVFVVNCNLQRLDGPVRGNSKIITELSKQFSGAGWNVIHLIWGRKWDELINNDKDGLLQKIMDETVDGEYQNYKAKGGKYTRDNFFGKDPEVLKMIDSLNDKEVEDLNRGGHDPTKIYNAYRLAYEEKDKPTVILAFYIKGYGIG

SEQ ID NO: 95627 - protein, 165 aa, Unknown
  Bacterial polypetide isolated from the Sargasso Sea
MYSFMLKIRRFEERAAQLYGMGKIGGFCHLYIGQEAVVVGILMTIDKNDSVVTTYRDHGHMIARGLNPKRIMAELTGREDGYSAGKGGSMHMFSKENNFYGGHGIVGAQVPIGTGIAFTHKYNGEKNICRTYIGDGAMNNGQVFEAFNLAALWKLPVLYIIENNK

SEQ ID NO: 95628 - protein, 320 aa, Unknown
  Bacterial polypetide isolated from the Sargasso Sea
LNEKQLDRFRQEVKTGGLSSYPHPWLMPNFWQFPTVSMGIGPMLAIYQARFMKYLINRGLIKDEGRKVWAFLGDGEMDEPESLGAIGLAARENLDNLIFVVNCNLQRLDGPVRGNGKIIQELEGIFRGGGWNVLKVIWGSYWDSLLANDKTGHLVKIMNETVDGEYQAFKARNGLYVREKFFGKYPETTELVSSMSDTDIWRLNRGGHDPHKVYAAYDKAVNHKGSPTVIIAKTIKGYGMGKSGESVNTTHQQKKLDVDDLMYYRDRFDVPLTDSQVKNIEYFKPDENSEEIKYLKKRRLELGGFIPERTSYSKPIKAPS

SEQ ID NO: 95629 - protein, 185 aa, Unknown
  Bacterial polypetide isolated from the Sargasso Sea
DKNICRTYIGDGAMNNGQVFEAFNLAALWKLPVLYIIENNKYGMGTSVERAAAGSDLYKRGEAFGIKGEIVDGMNVYSVIKAADKAGEYVRSGKGPYILEVQTYRYRGHSMSDPAKYRTKTELEEYKNSDPIEVVKNEIIKKNIASYNELEKIGKEIIEEVKLAADFALESNFPENKELFTDVYL

SEQ ID NO: 95630 - protein, 272 aa, Unknown
  Bacterial polypetide isolated from the Sargasso Sea
LSSYPHPKLMPEFWQFPTVSMGLGPITSIYQARFLKYLDGRGLKDTSQQRVYAFLGDGEMDEPESRGSLSFAAREKLDNLCFLVNCNLQRLDGPVMGNGKIIQELEGLFRGAGWNVIKVVWGSGWDKLLAKDTTGKLLQLMNETVDGDYQTYKAKDGAYVRQHFFGRYPETAALVADMTDEEIFALKRGGHEPSKLYAAFKSAQETKGRPTVILAKTIKGYGMGEAAEGKNIAHQVKKMDMTHVLQIRKRLSLEDYISEDDVQSLPYIQLPE

SEQ ID NO: 95631 - protein, 316 aa, Unknown
  Bacterial polypetide isolated from the Sargasso Sea
YANFWQFPTVSMGLGPMLAIYQARYMKYLINRGLIKDEGRKVWAFLGDGEMDEPESLGAIGLAAREKLDNLIFVINCNLQRLDGPVRGNGKIIQELEGIFRGAGWNVIKVIWGSYWDPLLTNDKTGHLVKTMNETVDGEYQAMKARDGAYVREKFFGKYPETKELVSSLSDKDIWRLNRGGHDPHKVFSAYDKASKNIGSPTVVIAKTIKGYGMGKSGESVNTTHQTKKLDIDDLMYYRDRFDVPLTDDQVRNIEYYKPDQNSAEIKYIKERRLQLGGFIPERTTYAKPIKTPPKNIFDNMKESTGKKEMSTTMAL

SEQ ID NO: 95632 - protein, 288 aa, Unknown
  Bacterial polypetide isolated from the Sargasso Sea
FLIKELINKAYREGANIPYTQNTPYINTIPPEAEVKSSGDQNIERRIRSLIRWNSAAMVVRANKKFPELGGHIGTFASAATLYDVGMNHFWRAKNNRFGGDLIYFQGHSAPGMYARAFLEGRLNEKQLDSFRQEVKPGGLSSYPHPWLMPKFWQFPTVSMGLGPMLAIYQARYMKYLINRGLIKDEGRKVWAFLGDGEMDEPESMGAIGLAARENLDNLIFVINCNLQRLDGPVRGNGKIIQELEGSFRGSGWNVIKVIWGSYWDSLIANDRTGHLVKIMNETVDGRY

SEQ ID NO: 95633 - protein, 188 aa, Unknown
  Bacterial polypetide isolated from the Sargasso Sea
YNGDKNICRTYIGDGAMNNGQVFEAFNLAALWELPVLYIIENNKYGMGTAVGRAAAGTHLYKRGEAFGIKGEIVDGMNVYSVIKAAAKAGEYVRSGKGPYILEVQTYRYRGHSMSDPAKYRTKDELEEYKNSDPIEIVREEILKKKLATKNDLDNLNKEIIEEIKSAVDFALESKFPPSEELYTDVYI

SEQ ID NO: 95634 - protein, 271 aa, Unknown
  Bacterial polypetide isolated from the Sargasso Sea
DGFRQEVGKDGLSSYPHPWLMPNFWQFPTVSMGLGPIMGIYQARFLKYLINRGLIKDEGRKIWVFLGDGEMDEPESLGAIGLAAREKLDNLIFVINCNLQRLDGPVRGNGKIIQELEGSFRGTGWNVIKVIWGSYWDQLLAKDKSGLLIKRMNECVDGEYQAFKAKGGNYVREKFFGKYPELKELVSTLTDKDIWKLNRGGHDPHKVYAAYDAAMKNKGSPTVIIAKTIKGYGMGKSGESINTTHQQKKMDEEDLLYYRDRFGVPLTDKTS

SEQ ID NO: 95635 - protein, 235 aa, Unknown
  Bacterial polypetide isolated from the Sargasso Sea
MPFNTSTPYINTILPSQESGYPGNREIERKIKSIVRWNAMAMVTKANKNTPGIGGHISTYASAATIYEVAFNHFLKGPNHPSGQDLVFYQGHASPGMYSRAFLEGRLSEKNLNNFRRELSKEGGLSSYPHPYLMPDFWQFATVSMGLGPLMAIYQARFMRYMIDRGFMKDTGRKVFAFLGDGEMDEPESKGALTLASRENLDNLVFVVNCNLQRLDGPVRGNSKIIQELEAAFRG

SEQ ID NO: 95636 - protein, 278 aa, Unknown
  Bacterial polypetide isolated from the Sargasso Sea
GLVLPDTRTTPYINTIPPEIEVKSPGDQNLEKKIRAYVRWNAAAMVVKANKKSSELGGHIGTFASAATLYDVGMNHFWRAKNNKFGGDLIYFQGHSAPGMYARAFLEGRMTTKQLDGFRQEVAKGGLSSYPHPWLMPNFWQFPTVSMGLGPIMAIYQARFLKYLINRGLVKDEGRKIWVFLGDGEMDEPESLGAIGLAAREKLDNLIFVINCNLQRLDGPVRGNSKIIQELEGSFRGTGWNVIKVIWGSYWDQLLAKDKTGILVKRMNECVDGEYQAL

SEQ ID NO: 95637 - protein, 305 aa, Unknown
  Bacterial polypetide isolated from the Sargasso Sea
PTVSMGLGPMLAIYQARYMKYLINRGLIKDEGRKVWAFLGDGEMDEPESLGAIGLAAREKLDNLIFVINCNLQRLDGPVRGNGKIIQELEGIFRGAGWNVIKVIWGSYWDPLLANDKTGHLIKVMNETVDGEYQAMKARDGAYVRDKFFGKYPETKEIISSLSDKDIWRLNRGGHDPHKVFAAYDKASKNIGSPTVVIAKTIKGYGMGKSGESVNTTHQTKKLDIDDLMYYRDRFDVPLTDKQVQNIEYYKPDQNSPEIKYIKERRLQLGGFIPERTTYAKPIKAPPKNIFDNMKESTGKKKCLL

SEQ ID NO: 95638 - protein, 315 aa, Unknown
  Bacterial polypetide isolated from the Sargasso Sea
PYSAETAYITPIPPQNEAYTPGDPALEVRIRSISRWNALAMVVQANRKNSELGGHIASYASAATLYDVGYNHFWRAPNESHEGDLVFFQGHSAPGVYARAYLLGLIDESELSNFRQEVGENGLSSYPHPWLMPNFWQFPTVSMGLGPIMAIYQARFMRYLANRKLSNGHDRKVWAFMGDGEMDEPEAFGAAALASREKLDNLIFVVNCNLQRLDGPVRGNGKIIQELESDFRGAGWNVIKVIWGSAWDPLLAKDKDQKLVSRMEMAVDGEYQAYKANDGAFVREHFFGKDPTLKAMVANMSDEDIWRLNRGGHDP

SEQ ID NO: 95639 - protein, 90 aa, Unknown
  Bacterial polypetide isolated from the Sargasso Sea
MREIQFREAICEAMSEEMRLDETIYLMGEEVAEYNGAYKASKGMLDEFGEKRVIDTPISELGFAGIGVGSTMTGNRPIVEFMTFNFAISW

SEQ ID NO: 95640 - protein, 304 aa, Unknown
  Bacterial polypetide isolated from the Sargasso Sea
SVRTKEWIESLNAVVENMGNERAHFLLRQLIDESYRKGSRIPFIQNTPYINTIPPNEEEKSSGDQNIERKIRSLIRWNAAAMVVRANKKFPELGGHIGTFASAATLYDVGMNHFWRAKNHQFGGDLIYFQGHSAPGVYSRAFLEGRLTKEQLDNFRQEVGPNGLSSYPHPWLMHKFWQFPTVSMGLGPMLAIYQARFMKYLINRGLIKDENRKVWAFLGDGEMDEPESLGAIALASRENLDNLIFVINCNLQRLDGPVRGNGKIIQELEGSFRGAGWNVIKVIWGSYWDTLLANDKSGLLIKRM

SEQ ID NO: 95641 - protein, 300 aa, Unknown
  Bacterial polypetide isolated from the Sargasso Sea
GDLIYFQGHSSPGTYARAYLEGRLDEKQLNNFRQEVDGKGLSSYPHPWLMPKFWQFPIVSMGLGSIMSIYQARFTKYLINRGLLKDQDRKIWTLLGDGEMDEPESLGAIGLAAREKLDNLVFVINCNLQRLDGPVRGNGKIIQELEGIFRGAGWNVIKVIWGSYWDTLLAKDKSGLLIKRMNECVDGEYQAFKAKGGSYVREKFFGKYPQLKDLVSSMTDGDIWKLNRGGHDPHKVYAAYDAAMKTKGQPTVILAKTIKGYGMGKSGESINTTHQQKKLGEEDLLYYRDRFDIPLTDKQV

SEQ ID NO: 95642 - protein, 313 aa, Unknown
  Bacterial polypetide isolated from the Sargasso Sea
EKALKKTEEQKLQIQKKEKPEIIQVVKDGDLDPLETSEWIESLSAVIEKDGNQRAHYLIKELINKAYMEGANIPYTQNTPYINTIPVSEEKKSNGDQNIERRIRSLIRWNAAAMVVRANKKFPELGGHIGTFASAATLYDVGMNHFWRAKNNKFGGDLIYFQGHSAPGMYSRAFLEGRLNEKQLDSFRQEVSPGGLSSYPHPWLMPNFWQFPTVSMGLGPMLAIYQARYMKYLINRGLIKDEGRKVWAFLGDGEMDEPESLGAIGLAAREKLDNLIFVVNCNLQRLDGPVRGNGKIIQELEGIFRGAGWNVIK

SEQ ID NO: 95643 - protein, 126 aa, Unknown
  Bacterial polypetide isolated from the Sargasso Sea
MYSFMLKIRRFEERASQLYGMGKIGGFCHLYIGQEAVVVGVLMTIDKNDSVVTTYRDHGHMIARGLDPKRIMAELTGREDGYSAGKGGSMHMFSKENNFYGGHGIVGAQVPIGTGIAFTHKYNGEK

SEQ ID NO: 95644 - protein, 315 aa, Unknown
  Bacterial polypetide isolated from the Sargasso Sea
HFIRWNSLLMVLKANKDDDLGGHISTYSSAATLYEVGFNHFFRGSDKKLGDLIYFQGHSSPGIYARSFLEGRLKKGQIENFRKEIKGMGLSSYPHPWLMPDYWQFPTVSMGLGPIFGIYQAHIMRYLEKRGLIEEIEDRKVWVYCGDGEMDEPESMGAISLAGRENLNNLVFVINCNLQRLDGPVRGNSKIVTELAKQFKGAGWNVVNLIWGRHWDDLINNDQNGLLQKIMDETVDGEYQNFKAKGGKYTRENFFGKNPEVLKMIEKFSDDEVENLNRGGHDPIKVYNAYRLAYENKTKPTVILAFTIKGYGIGS

SEQ ID NO: 95645 - protein, 314 aa, Unknown
  Bacterial polypetide isolated from the Sargasso Sea
LVRMKGEKIWVFLGDGEMDEPESLGAIGLAAREKLDNLIFVINCNLQRLDGPVRGNGKIIQELEGSFRGTGWNVIKVIWGSYWDQLLAKDKTGLLVKRMNECVDGEYQAFKAKGGKYVREKFFGKYNELKELVSTMTDKDIWKLNRGGHDPHKVYAAYHSAMQHKGSPTVILAKTIKGYGMGKSGESINTTHQQKKLDEEDLLYYRDRFGVPLTDKQVKNIEYYKPSENSEEIKYLKDKRIKLGGFIPERSSFAKAIKTPPKDIFEPFMKSTGSKEMSTTMALVRMLTALLRDKNLAPRLVPIIPDEARTLEWR

SEQ ID NO: 95646 - protein, 289 aa, Unknown
  Bacterial polypetide isolated from the Sargasso Sea
SVKELDRFRQEVKPGGLSSYPHPWLMPKFWQFPTVSMGLGPIMSIYQARFNKYLINRGLLKDEGRKIWCFLGDGETDEPESLGAIGLAAREKLDNLIFVINCNLQRLDGPVRGNGKIIQELEGIFRGAGWNVLKVIWGSYWDQLLAKDKTGLLIKRMGEAVDGEYQAFKARGGNYVREKFFGKYPELLDLVSQMTDRDIWKLNRGGHDPHKVFAAYNVAMKHKGSPTVILAKTIKGYGMGKSGESINTTHQQKKLGEEDLLYYRDRFDVPLTDEQVKNIEYYKPPENSP

SEQ ID NO: 95647 - protein, 289 aa, Unknown
  Bacterial polypetide isolated from the Sargasso Sea
ANKKFPELGGHIGTFASAATLYDVGMNHFWRAKNNKFGGDLVYFQGHSAPGMYARAFLEGRLSEKQLDSFRQEVKPGGLSSYPHPWLMPNFWQFPTVSMGLGPMLAIYQARYMKYLINRGLIKDEGRKVWAFLGDGEMDEPESMGAIGLAAREKLDNLIFVINCNLQRLDGPVRGNGKIIQELEGSFRGAGWNVIKVIWGSYWDSLLANDKTGQLVKIMNETVDGEYQAMKARDGAYVREKFFGKNPDTLEMVSSMSDKDIWRLNRGGHDPHKVYAAYDKAIKNQGIPN

SEQ ID NO: 95648 - protein, 154 aa, Unknown
  Bacterial polypetide isolated from the Sargasso Sea
MAKAKTATKKDSFSKETYMNWFESMLLMRRFEEKAGQLYGQQKIRGFCHLYIGQEACMAGAVSALKKGDKYITAYRDHAHPLALGSDPKKVMAELYGKETGISRGKGGSMHMFDKENHFFGGHGIVGGQIPMGAGIAFAEKYNETGFLCMCSMG

SEQ ID NO: 95649 - protein, 146 aa, Unknown
  Bacterial polypetide isolated from the Sargasso Sea
MLLIRRFEEKAGQLYGMGSIGGFCHLYIGQEAVVVGMQSVSKEGDSVITSYRDHGHMLACGMDPKGVMAELTGREDGYSKGKGGSMHMFSKEKNFYGGHGIVGAQVPIGVGLAFSHKYKNDGFICMTYLGDGAVNQGQVYESFNMS

SEQ ID NO: 95650 - protein, 289 aa, Unknown
  Bacterial polypetide isolated from the Sargasso Sea
GIKIRSIIRWNAAMMVMRANRDSSELGGHIASFASSALLYDIGFNHFWQAPGPDHGGDLVYIQGHSAPGIYARAFLEGRITEEQMNHFRQESTGKGVSSYPHPWLMPEFWQFPTVSMGLGPIMAIYQARFLKYLHNRELLDTEPRKVWCFLGDGETDEPESMGAIHLAAREKLDNLIFVINCNLQRLDGPVRGNGKIIQELEGEFRGAGWNVIKVLWGSYWDPLLAKDDQGLLRKRMEEAIDGEYQAFKAKGGAYTRTHFFGKYPELLEMVSNMSDEDIWRLNRGGHDP

SEQ ID NO: 95651 - protein, 286 aa, Unknown
  Bacterial polypetide isolated from the Sargasso Sea
EKKQSTIQVINGSDIDPLETQDWLESLSAVISKDGNHRAHFLIKELINKAYREGANIPYTQNTPYINTIPPEAEVKSSGDQNIERRIRSLIRWNAAAMVVRANKKYPELGGHIGTFASAATLYDVGMNHFWRAKNNKFGGDLIYFQGHSAPGMYARAFLEGRLSEKQLDSFRQEVKPGGLSSYPHPWLMPKFWQFPTVSMGLGPMLAIYQARYMKYLINRGLIKDEGRKVWAFLGDGEMDEPESMGAIGLAARENLDNLIFVINCNLQRLDGPVRGNGKIIQELEG

SEQ ID NO: 95652 - protein, 316 aa, Unknown
  Bacterial polypetide isolated from the Sargasso Sea
APGMYARAFLEGRLSAKQLDGFRQEVGKDGLSSYPHPWLMPDFWQFPTVSMGLGPIMAIYQARFLKYLINRGLVKDEGRKIWVFLGDGEMDEPESMGAIGLAAREKLDNLIFVINCNLQRLDGPVRGNGKIIQELEGSFRGTGWNVIKVIWGSYWDKLLMKDKSGLLVKRMNECVDGEYQAFKAKDGLYVREKFFGKYPELKEMVSTMTDKDIWRLNRGGHDPHKVYAAYHSAMQHTGSPTVILAKTIKGYGMGKSGESINTTHQQKKLDEEDLLYYRDRFGVPLTDKQVKNIEYYKPDENSEEIKYLKNQRIKAW

SEQ ID NO: 95653 - protein, 210 aa, Unknown
  Bacterial polypetide isolated from the Sargasso Sea
MLLIRRFEEKAGQLYGMGKIGGFCHLYIGQEAVVVGVDSVKKKGDQVITSYRDHGHMLSCGMDPKGVMAELTGKKTGYSKGKGGSMHMFSKSKDFYGGHGIVGAQVPIGAGLAFSNKYKKNKSVCFTYFGDGAANQGQIYETFNMASLWKLPVVFIIENNQYAMGTSIDRASSTLKLFSRGQAFNIPGQLVDGMDVLKVSKATELAAKNV

SEQ ID NO: 95654 - protein, 297 aa, Unknown
  Bacterial polypetide isolated from the Sargasso Sea
MANANFWQFPTVSMGLGPMLAIYQARYMKYLINRGLIKDEGRKVWAFLGDGEMDEPESLGAIGLASREKLDNLIFVVNCNLQRLDGPVRGNGKIIQELEGIFRGAGWNVIKVIWGSYWDPLLANDKTGHLIKAMNETVDGEYQAMKARDGAYVREKFFGKYPETKELVSSLSDKDIWRLNRGGHDPHKVFAAYDKASKNIGSPTVVIAKTIKGYGMGKSGESVNTTHQTKKLDIDDLMYYRDRFDVPLTDKQVQNIEYYKPDQNSPELKYIKERRLQLGGFIPERTTFCKPIKTPPK

SEQ ID NO: 95655 - protein, 311 aa, Unknown
  Bacterial polypetide isolated from the Sargasso Sea
SERAHFLIKQLIDQSYKAGSKIPHTQTTPYVNTIPPDEEKRSPGDQNIERKLRSLIRWNAAAMVVRANKKYPELGGHIGTFASAATLYDVGMNHFWRAKNNKFGGDLVYFQGHSAPGMYARAFLEGRLNEKQLDRFRQEVKTGGLSSYPHPWLMPNFWQFPTVSMGIGPMLAIYQARFMKYLINRGLIKDEGRKVWAFLGDGEMDEPESLGAIGLAARENLDNLIFVVNCNLQRLDGPVRGNGKIIQELEGIFRGAGWNVLKVIWGSYWDTLLANDKTGHLVKIMNETVDGEYQAFKARNGLYVREKFFGK

SEQ ID NO: 95656 - protein, 303 aa, Unknown
  Bacterial polypetide isolated from the Sargasso Sea
VQYSLPQNTPYINTIPVNEEKKSNGDQNIERRIRSLIRWNSAAMVVRANKKFPELGGHIGTFASAATLYDVGMNHFWRAKNNKFGGDLIYFQGHSAPGMYARAFLEGRLNEKQLDSFRQEVNPGGLSSYPHPWLMPNFWQFPTVSMGLGPMLAIYQARYMKYLINRGLIKDEGRKVWAFLGDGEMDEPESLGAIGLAAREKLDNLIFVINCNLQRLDGPVRGNGKIIQELEGIFRGAGWNVIKVIWGSYWDPLLANDKTGHLIKVMNETVDGEYQAMKARDGAYVREKFFGKYSETKELISSP

SEQ ID NO: 95657 - protein, 270 aa, Unknown
  Bacterial polypetide isolated from the Sargasso Sea
MVSSNDDIDPVETKEWLDSLSAVLQNDGSERAHFLIKQLIDQSYKAGSKIPHTQTTPYVNTIPPEEEKRSPGDQNIERKLRSLIRWNAAAMVVRANKKYPELGGHIGTFASAATLYDVGMNHFWRAKNNKFGGDLVYFQGHSAPGMYARAFLEGRLNEKQLDRFRQEVQTGGLSSYPHPWLMPNFWQFPTVSMGIGPMLAIYQARFMKYLINRGLIKDEGRKVWAFLGDGEMDEPESLGAIGLAARENLDNLIFVVNCNLQRLDGPVRGN

SEQ ID NO: 95658 - protein, 244 aa, Unknown
  Bacterial polypetide isolated from the Sargasso Sea
MTFNFAMQAMDQIVNSAAKTLYMSGGQISCPIVFRGPNGAASRVAAQHSQDFSAFYSSIPGLKVIQPFTASDAKGLLKSAIRDNNPVIFLENEILYGRKFEREPSEEVIPIGKAKIFQEGTDVTLISFGIGMTYAIEAADILSKEGISTEIIDLRTIRPLDKNTIISSVKKTNRCITIEEGFPICSVGNHITALIMQEAFDYLDAPVINCTGKDVPMPYAENLEKLALVNTQEVVDRAKEIIYR

SEQ ID NO: 95659 - protein, 267 aa, Unknown
  Bacterial polypetide isolated from the Sargasso Sea
MFNKKDSERANFLIKQLIDHAYRQGSKIPYTQSTPYINTIPPEEEKKSPGDQNIERRLRSLIRWNAAAMVVRANKKFPELGGHIGTFASAATLYDVGMNHFWKAKSDNFGGDLIYFQGHSAPGMYARAFLEGRLNEKQLDSFRQEVNKGGLSSYPHPWLMPNFWQFPTVSMGLGPMLAIYQARFMKYLINRGLIKDEGRKVWAFLGDGEMDEPESLGAIGLAAREKLDNLIFVVNCNLQRLDGPVRGNGKIIQELEGIFRGAGWKCY

SEQ ID NO: 95660 - protein, 283 aa, Unknown
  Bacterial polypetide isolated from the Sargasso Sea
QFLAISYSFMGIGPMLAIYQARFMKYLINRGLIKDEGRKVWAFLGDGEMDEPESLGAIGLAARENLDNLIFVVNCNLQRLDGPVRGNGKIIQELEGIFRGGGWNVLKVIWGSYWDSLLANDKTGHLVKIMNETVDGEYQAFKARNGLYVREKFFGKYPETTELVSSMSDTDIWRLNRGGHDPHKVYAAYDKAVNHKGSPTVIIAKTIKGYGMGKSGESVNTTHQQKKLDVDDLMYYRDRFDVPLTDSQVKNIEYFKPDENSEEIKYLKKRRLELGGFIPERTS

SEQ ID NO: 95661 - protein, 180 aa, Unknown
  Bacterial polypetide isolated from the Sargasso Sea
MKKKFKKEDYIKIYRKMLQIRRFEERAAQLYGMGHIGGFCHLYIGQEAVVVGVLMTIENNDSVVTTYRDHGHMIARGLEPKKIMAELTGKQTGYSNGKGGSMHMFSKKNNFYGGHGIVGAQVPIGTGIAFTHKYRKEKQICRTYIGDGAMNNGQVFEAFNLASLWKLPVLYIIENNMYGM

SEQ ID NO: 95662 - protein, 171 aa, Unknown
  Bacterial polypetide isolated from the Sargasso Sea
MKKKFKKEDYIKIYRKMLQIRRFEERAAQLYGMGHIGGFCHLYIGQEAVVVGVLMTIENNDSVVTTYRDHGHMIARGLEPKKIMAELTGKQTGYSNGKGGSMHMFSKKNNFYGGHGIVGAQVPIGTGIAFTHKYKKEKQICRTYIGDGAMNNGQVFEAFNLASLWKLPVLY

SEQ ID NO: 95663 - protein, 319 aa, Unknown
  Bacterial polypetide isolated from the Sargasso Sea
WAFLGDGEMDEPESLGAIGLAAREKLDNLIFVVNCNLQRLDGPVRGNGKIIQELEGIFRGAGWNVIKVIWGSYWDPLLANDKTGHLVKTMNETVDGEYQAMKARDGAYVREKFFGKYQETKELVSNLSDKDIWRLNRGGHDPHKVFAAYDKASKNVGSPTVVIAKTIKGYGMGKSGESVNTTHQTKKLDIDDLMYYRDRFDVPLTDNQVRNIEYYKPDQKSVEIKYIKERRLQLGGFIPERTTYAKPIKAPPKDIFDTMKESTGKKEMSTTMALVRMLTSLLRDKNVAPRLVPIIPDEARTFGMEGFFQKIGIYAHEGQ

SEQ ID NO: 95664 - protein, 278 aa, Unknown
  Bacterial polypetide isolated from the Sargasso Sea
IEGRLNEKQLDNFRQEVNPGGLSSYPHPWLMPNFWQFPTVSMGLGPMLAIYQARYMKYLINRGLIKDEGRKVWAFLGDGEMDEPESLGAIGLAAREKLDNLIFVVNCNLQRLDGPVRGNGKIIQELEGIFRGAGWNVIKVIWGSYWDPLLANDKTGHLIKTMNETVDGEYQAMKARDGAYVREKFFGKYEETKELVSSLSDKDIWRLNRGGHDPHKVFAAYDKASKNIGSPTVVIAKTIKGYGMGKSGESVNTTHQTKKLDIDDLMYYRDRFDVPLTD

SEQ ID NO: 95665 - protein, 287 aa, Unknown
  Bacterial polypetide isolated from the Sargasso Sea
MDNFRREVDGQGLSSYPHPWLMPDYWQFPTVSMGLGPLQAIHQAHLMKYLQNRDQANVARRKVWAFLGDGECDEPEALGALALAGREKLDNLIFVVNCNLQRLDGPVRGNGKIIQELEGYFRGAGWNVIKVVWGRLWDPLLARDEDGLLQQAMDETVDGEFQNFKAKGGAYVREHFFGQHPQLSAMVSDMTDEDIYRLNRGGHDPYKIYAAYRAAVLHEGQPTVILAKTVKGYGMGDAGESENTTHQVKKLNLEELKQFRDRFDVPLSDKQLRDIPYFRPAADSAEM

SEQ ID NO: 95666 - protein, 261 aa, Unknown
  Bacterial polypetide isolated from the Sargasso Sea
MVVRANKKFPELGGHIGTFASAATLYDVGMNHFWRAKNNKFGGDLIYFQGHSAPGMYARAFLEGRLTTKQLDSFRQEVKSGGLSSYPHPWLMPNFWQFPTVSMGLGPMLAIYQARFMKYLINRGLIKDEGRKVWAFLGDGEMDEPESLGAIGLAARENLDNLIFVVNCNLQRLDGPVRGNGKIIQELEGIFRGSGWNVIKVIWGSYWDSLLANDKTGHLIKIMNETVDGEYQAFKARNGLYVRENFFGKYPETLKLVSAMS

SEQ ID NO: 95667 - protein, 322 aa, Unknown
  Bacterial polypetide isolated from the Sargasso Sea
INRGLIKDEGRKVWAFLGDGEMDEPESLGAIGLASREKLDNLIFVVNCNLQRLDGPVRGNGKIIQELEGIFRGSGWNVIKVIWGSYWDSLITNDKSGQLIKIMNETVDGEYQAMKARDGAFVREKFFGKYPETLELVSSLSDKDIWRLNRGGHDPHKVYAAYDKASKNKGSPTVIIAKTIKGYGMGKSGESVNTTHQTKKLDVDDLMYYRDRFDVPLTDDQVRNIEYFKPDESSPEIKYIKEKRINLGGFLPERTTYAKPIKTPSKDIFDFMKVSTGKKEMSTTMALVRMLTNLLRDKDISPRLVPIIPDEARTFGMEGFFQ

SEQ ID NO: 95668 - protein, 273 aa, Unknown
  Bacterial polypetide isolated from the Sargasso Sea
ERRIRSLIRWNAAAMVVRANKKHPELGGHIGTFASAATLYDVGMNHFWRAKNNKFGGDLIYFQGHSAPGMYARAFLEGRLNEKQLDSFRQEVKPGGLSSYPHPWLMPKFWQFPTVSMGLGPMLAIYQARYMKYLINRGLIKDEGRKVWAFLGDGEMDEPESMGAIGLAARENLDNLIFVINCNLQRLDGPVRGNGKIIQELEGSFRGSGWNVIKVIWGSYWDSLITNDKSGYLIKAMNETVDGEYQAMKARNGAYVREKFFGKYPETLELVSS

SEQ ID NO: 95669 - protein, 429 aa, Unknown
  Bacterial polypetide isolated from the Sargasso Sea
GELRIINFGGDLIYFQGHSAPGMYARAFLEGRLNEKQLDSFRQEVNPGGLSSYPHPWLMPKFWQFPTVSMGLGPMLAIYQARYMKYLINRGLIKDEGRKVWAFLGDGEMDEPESLGAIGLAAREKLDNLIFVINCNLQRLDGPVRGNGKIIQELEGIFRGAGWNVIKVIWGSYWDPLLLNDKTGHLVKTMNETVDGEYQAMKARDGAYVREKFFGKYKETKDLVSSLSDKDIWRLNRGGHDPHKVFAAYDKASKNIGSPTVVIAKTIKGYGMGKSGESVNTTHQTKKLDVNDLMYYRDRFDVPLTDKQVENIEYYKPDQNSPEIKYIKERRLQLGGFIPERTSYAKPIKAPPKNIFDNMKESTGKKEMSTTMALVRMLTNLLRDKNVAPRLVPIIPDEARTFGMEGFFQKVGIYAHEGQKYEPEDSAQL

SEQ ID NO: 95670 - protein, 565 aa, Unknown
  Bacterial polypetide isolated from the Sargasso Sea
MKARDGAYVREKFFGKYPETKELISSLSDKDIWRLNRGGHDPHKVFAAYDKASKNIGSPTVVIAKTIKGYGMGKSGESVNTTHQTKKLDIDDLMYYRDRFDVPLTDKQVQNIEYYKPDQNSPEIKYIKERRLQLGGFIPERTTYAKPIKAPPKNIFDNMKVSTGKKEMSTTMALVRMLTNLLRDKNVAPRLVPIIPDEARTFGMEGFFQKIGIYAHEGQKYEPEDSAQLSSYREEKSGQVLEEGINEAGAMSSWIAAGTSYTNHDIEMIPIYLFYSMFGFQRIGDFAWAGADSQSRGFLIGATAGRTTLAGEGLQHQDGHSHLMASTIPNCKSYDPTFHYELATIFREGLKRMHEKKENIFYYITTMNENYPHPAMPTDKSCEEGILKGMYKIKEFNKYKKTKIQFLGSGTILREMIAGAEILQKEYQIDSEVWSVTSFNELRRDGLEIERYNLLNPEKDPKKSYVESCLGKTEGPILAASDYMRMNSDQIRPYINKSFYSLGTDGFGRSDTRKNLRKFFEVDKEHVVAYGLSVLAKEQLIASKYAQEAIKKYQIDKDKPMPTKL

SEQ ID NO: 95671 - protein, 1021 aa, Unknown
  Bacterial polypetide isolated from the Sargasso Sea
MSNKITVPDIGDFESVEIIEILVKKGDQIKKNDSIVTLESDKSSVEVPSTDEGTVESVSVNIGDKVSKGDVLISLSGNSNQKEEIKKLPVDTENIIKEAESNLVNDKKEITETKTDKKIETVDLPVKKDPVIKVVKKDGDIDPVETNEWLESLSSVLENDGKERAQYLIKQLIEYSYKKGSDLILSRNTPYINTIKPEEQAQSPGDQNLERKIRSLIRWNAAAMVVRANKKNPELGGHIGTFASAATLYDVGMNHFWRAKNNKFGGDLIYFQGHSAPGMYARAFLEGRINEKEMDRFRQEVKPGGLSSYPHPWLMPKFWQFPTVSMGLGPIMSIYQARFNKYLINRGLLKDEGRKIWCFLGDGETDEPESLGAIGLAAREKLDNLIFVINCNLQRLDGPVRGNGKIIQELEGIFRGAGWNVLKVIWGSYWDQLLAKDNSGLLIKRMGEAVDGEYQAFKAKGGSYVREKFFGKYPELLELVSQMTDRDIWKLNRGGHDPHKVYAAYQSAMENKGTPTVILAKTIKGYGMGKSGESMNTTHQQKKLDEEDLLYYRDRFDVPLTDDQVKNIQYYRPDENSPEIKYLKECRIKLGGYLPERSSFAKAIKTPPKDIFDKMKESTGEKEMSTTMVLVRMLTSLMRDKNVSPRLVPIIPDEARTFGMEGFFQKIGIYAHEGQKYEPVDSEQLSSYREDIKGQVLEEGINEAGAMSSWIAAGTAYTNHDISMIPIYIFYSMFGFQRTGDFVWAAGDNQTRGFLVGATAGRTTLAGEGLQHGDGHSHVLSSVVPNCISYDPTFGYELATIFREGLKRMYENQENIFYYITTMNENYPHPEMPKGKDIEEGILKGMYKFKSYNKNKKTKIQLLGSGAILREVIAAAEILERDYKIDSNVWSVTSFSELRRDAIEIERFNLLNPDEKPKKSYLEQCLSSEDGPILASSDYMRLNSDQIRPYLEKSFYSLGTDGYGRSDTRKNLRKFFEVDKEHIVAYSLSVLAKEQLVPSKYAKEAIKKYNIDPEKPIPTKL

SEQ ID NO: 95672 - protein, 536 aa, Unknown
  Bacterial polypetide isolated from the Sargasso Sea
IWRLNRGGHDPVKVFAAYQKAIDTKGRPTVILAKTVKGFGLGASGEAQNVAHNVKKMDVDSIKAFRDRFNIPVADEKIADLPYFKFDEDSEEMKYLRERREALGGYLPSRREQAEEQLEVPELSAFDAILKGSGDRQVSSTMTFVRVLNALLKDKKIGKRIVPIIPDEARTFGMEGLFRQVGIYANEGQKYVPQDADQVAYYREDKKGQVLQEGINELGAMASWVASGTSYSTCNATTIPFYIYYSMFGFQRVGDLAWAAGDSQARGFLLGATAGRTTLNGEGLQHQDGHSHVQANLIPNCITYDPTYGYEVAVIVQDGLRRMYGNNENIFYYLTLMNENYQHPAMPEGDDVAEQIIKGIYKLERVENDKSKLNVQLMGSGTILNEVRKAAQILCEDYNVSSDVYSVTSFNELAREGQDVARWNMLNPEAEQKVPYIGQVITKDAGPAISATDYVKNYSDQVRAFIETEYRCLGTDGFGRSDSRENLRTHFEVNASYIVVASLYELAQRGDVEKKVVAEAIKRFEINAEKLNPLYA

SEQ ID NO: 95673 - protein, 520 aa, Unknown
  Bacterial polypetide isolated from the Sargasso Sea
MLAYHEAVNHTGQPTVILAKTVKGYATGAGEAVNKAHQMKKLDLESLKDFRDRFDMPFTDEQLEDVPYYRPADDSPELRYMKEQRDKLGGYMPVRRRKASQQLTIPGLDVFANFLEGSGDREISTTMAFVRMMSTLIKDKQIGDRVVPIVPDEARTFGMEGLFRQLGIYSSGGQKYEPEDAGQIMYYREEKKGRILEEGINEAGAMSGWLAAATSYSVHNFTLIPFYIYYSMFGFQRVGDLAWAAGDSQARGFLLGATAGRTTLNGEGLQHQDGHSHILSSTVANCVSYDPTYSYELAVILQDGLRRMYEDNERVFYYLTLMNENYIHGAMPEGAEEGIRKGMYLLREGKAKTKKSPKVQLLGSGTILREVEAAAELLREDFDVAADVWSVTSFNELRREGLKMDRDEMLNPEEERPANWVEKCLDGRSGPVIASTDYMRAYADQIRPWVNAPYTVLGTDGFGRSDSRQKLRHFFEVDRYFVVLAALNALRKEGKVEVGLVKQAIEKYGIDTDKPYPVMH

SEQ ID NO: 95674 - protein, 522 aa, Unknown
  Bacterial polypetide isolated from the Sargasso Sea
MKDGSDRAHYILKKLIDETYKEGINKPLTRNTPYINTITPENEAKSPGDQNIERKIRSLIRWNAAAMVVKANKKNPELGGHIGTFASAATLYDVGMNHFWRAKNNKFGGDLIYFQGHSAPGMYARAFLEGRLTAGQLSNFRQEVGVNGLSSYPHPWLMPKFWQFPTVSMGLGPILSIYQARFTKYLINRGLLKNEDRKIWAFLGDGEMDEPESLGAIGLAAREKLDNLIFVINCNLQRLDGPVRGNGKIIQELEGIFRGAGWNVIKVIWGSYWDSLIAKDKSGLLVKRMNECVDGEYQAFKAKGGAYVREKFFGKYPELKDLVSAMTDRDIWKLNRGGHDPHKVYAAYDMAMKTKGQPTVILAKTIKGYGMGKSGESTNTTHQQKKLGEEDLLYYRDRFDIPLTDKQVKNIEFYKPGEKSEEIKYIKERRMKLGGNLPERTSYAKPIKKPSKDIFENMLKSSGDREMSTTMALVRMLTSLLRDKNIASRLVPIIPDEARTFGMEGFFQKIGIYAHEGQKYEP

SEQ ID NO: 95675 - protein, 392 aa, Unknown
  Bacterial polypetide isolated from the Sargasso Sea
TFASAATLYDVGMNHFWRAKNNKFGGDLVYFQGHSAPGMYARAFLEGRLTAKQLSNFRQEVGVDGLSSYPHPWLMPKFWQFPTVSMGLGPILSIYQARFTKYLINRGLLKNEDRKVWAFLGDGEMDEPESLGAIGLAAREKLDNLIFVINCNLQRLDGPVRGNGKIIQELEGIFRGAGWNVIKVIWGTYWDTLLAKDKSGLLVKRMNECVDGEYQAFKAKGGAYVREKFFGKYPELKDLVSTMTDRDVWRLNRGGHDPHKVYAAYDAAMKTKGQPTVILAKTIKGYGMGKSGESTNITHQQKKLGEEDLLYYRDRFDIPLTDKQVKNIEFYKPDEKSEEIKYIKERRMKLGGNIPERTSYAKPIKKPSKDIFENMLKSSGEKEMSTTMVLVR

SEQ ID NO: 95676 - protein, 314 aa, Unknown
  Bacterial polypetide isolated from the Sargasso Sea
RMALQESMREDSKIIVMGEDVGLYGGAYGVTKGMIEEFGAKRILDTPISEEGILGTAVGSAMTGLRPVVELMYIDFVMLAMDQLVNQAAKIRYMFGGQISVPMVMRAQGGTGRSGAAQHSQSLEAWIMHTPGLNLAMPATVTDAYYLLKHALKLSDPVVFLEHKMLYTLKGEIDESNSLSWGQASILRSGSDFTLVTYSRMVHRALEAAEKLAELGIQTEVIDLRTLYPLDTETINSSVKKTGRALVVTEDCLTAGVSAELSARITEGAFEFLEEPVIRLAGEDIPIPVSPSMEKEAVPSVDRIFSTAKLLLRK

SEQ ID NO: 95677 - protein, 440 aa, Unknown
  Bacterial polypetide isolated from the Sargasso Sea
INKAYMQGANIPFTQNTPYINTIPTNEEKKSNGDQNIERRIRSLIRWNSAAMVVRANKKFPELGGHIGTFASAATLYDVGMNHFWRAKNNKFGGDLIYFQGHSAPGMYARAFLEGRLNEKQLDSFRQEVNPGGLSSYPHPWLMPKFWQFPTVSMGLGPMLAIYQARYMKYLINRGLIKDEGRKVWAFLGDGEMDEPESLGAIGLAAREKLDNLIFVINCNLQRLDGPVRGNGKIIQELEGIFRGAGWNVIKVIWGSYWDPLLANDKSGHLIKAMNETVDGEYQAMKARDGAYVREKFFGKYPETKDLVSSLSDKDIWRLNRGGHDPHKVFAAYDKASKNIGSPTVVIAKTIKGYGMGKSGESVNTTHQTKKLGVDDLMYYRDRFDVPLTDKQVQNIEYYKPEQNSPEIKYLKERRLQLGGFIPERTTYAKSIKAPPKRYF

SEQ ID NO: 95678 - protein, 407 aa, Unknown
  Bacterial polypetide isolated from the Sargasso Sea
VIENDGASRASYLLNKVIDQAYKAGLVLPDTRTTPYINTIPPEAEVKSTGDQNIEKKIRAYIRWNAAAMVVKANKKSSELGGHIGTFASAATLYDVGMNHFWRAKNNKFGGDLVYFQGHSAPGMYARAFLEGRLTTKQLDGFRQEVGKDGLSSYPHPWLMPNFWQFPTVSMGLGPIMGIYQARFLKYLINRGLIKDEGRKVWVFLGDGEMDEPESLGAIGLAAREKLDNLIFVINCNLQRLDGPVRGNGKIIQELEGSFRGTGWNVIKVIWGSYWDQLLAKDKSGLLIKRMNECVDGEYQAFKAKGGNYVREKFFGKYPELKELVSTLTDKDIWKLNRGGHDPHKVYAAYYAAMKNKGSPTVIIAKTIKGYGMGKSGESINTTHQQKKMDEGDLLYYRDRLGVPLTD

SEQ ID NO: 95679 - protein, 490 aa, Unknown
  Bacterial polypetide isolated from the Sargasso Sea
MAQNISVPDIGDFKDVEVIEVLVKPGDQISKNDPIVTIESDKSSVEIPSPAAGEIKDLKVKIGDKVSEGSVLATIENGQAASAPKEEKIEKPKKEIHVQEKPKTNGEVNPVKQVKKVFAEPASKDDIDPIETNEWIDSLNSVIENDGSSRASYLLNKVIDQAYKSGLVLPDTRTTPYINTIPPEAEAKSTGDQNIEKKLRAYIRWNAAAMVVKANKKSPELGGHIGTFASAATLYDVGMNHFWRAKNNKFGGDLIYFQGHSAPGMYARAFLEGRLNAHQLDGFRQEVNKGGLSSYPHPWLMPNFWQFPTVSMGLGPIMAIYQARFLKYLINRGLIKDEERKIWVFLGDGEMDEPESLGAIGLAAREKLDNLIFVINCNLQRLDGPVRGNGKIIQELEGSFRGSGWNVIKVIWGTYWDQLLAKDKTGLLIKRMNECVDGEYQAFKAKGGSYVRENFFGKYPELQELVSSMTDKDIWRLNRGGHDPHKVYAA

SEQ ID NO: 95680 - protein, 530 aa, Unknown
  Bacterial polypetide isolated from the Sargasso Sea
SELNDPPFKNTVHSDEEHPYPGNLEYEEKIRHFIRWNSLLTVLKANKESDLGGHISTYSSAATLYEVGFNHFFRGSDKSLGDLIYFQGHSSPGIYARSFLEGRLTSEQLDNFRQEIKGQGLSSYPHPWLMPDYWQFPTVSMGLGPIFGIFQAHVMRYLEKRGLIESIDNRKVWVFCGDGEMDEPESMGSISLAGREKLNNLVFVVNCNLQRLDGPVRGNSKIITELSKQFSGAGWNVVHLIWGRKWDELINNDKDGLLQKIMDETVDGEYQNYKAKGGKYTRENFFGKDPEVLKMIDSLSDKEVEDLNRGGHDPTKIYNAYRLAYEEKDRPTVILAFTIKGYGIGSRQADNTAHQVKKLTKENLEDFIDKFDLPIKKESLDNPNFLNLNRNKKVKEYLLSRREELGGLLPSRKASKKKLIAEKKSFIDFDKKLDREQSTTMVFVRLLTKLLRDAAIGSRVVPIVPDEARTFGMDALFRQFGIYSSEGQKYEPEDADKVMFYRESESGIMLEEGINEAGAFSAWLALATSY

SEQ ID NO: 95681 - protein, 414 aa, Unknown
  Bacterial polypetide isolated from the Sargasso Sea
MVKKGQKINKNDPVVTLESDKSSVEVPSNYEGEVESISVKIGDKVSKGDLILTLSSSNEKNNEKVPPVTEKIIQEAESSISEKNYKINNQTEKQIAKKPKQETKILVNNKDIDPLETKDWLDSISAVLEKDGKLRAQFLIKELIEHSYKQGSDLVLSRNTPYINTISPDEETKSPGDQNIERKLRSLIRWNAAAMVVRANKKFPELGGHIGTFASAATLYDVGMNHFWRAKNNKFGGDLIYFQGHSAPGMYARAFLEGRLNEKQLDKFRQEVKKGGLSSYPHPWLMPNFWQFPTVSMGLGPMLAIYQARFMKYLINRGLMKEEGRKVWCFLGDGEMDEPESLGAIGLAARENLDNLIFVVNCNLQRLDGPVRGNGKIIQELEGIFRGAGWNVIKVIWGSYWDPLFGNDKTGHLI

SEQ ID NO: 95682 - protein, 437 aa, Unknown
  Bacterial polypetide isolated from the Sargasso Sea
KEFDLGGHISTYSSAATLYEVGFNHFFRGSDKLLGDLIYFQGHSSPGIYARSFLEERISAKQLDNFRQEIKGEGLSSYPHPWLMPDYWQFPTVSMGLGPIFGIFQAHVMRYLEKRDLIESIDNRKVWVFCGDGEMDEPESMGSISLAGREKLNNLVFVINCNLQRLDGPVRGNSKIITELAKQFSGAGWNVVHLIWGRKWDELINNDKDGLLQKIMNETVDGEYQNYKAKGGKYTRENFFGKDPEVLKMIDSLSDKEVEDLNRGGHDPTKIYNAYRLAYEEKDRPTVILAFTIKGYGIGSRQADNTAHQVKKLTKENLEDFIDKFNLPIKKESLDNPNFLTLNRDKKVKEYLLARREELGGLLPSRKISKKKLIAKKESFIDFDKKLDREQSTTMVFVRLLTKLLRDDAIGSRVVPIVPDEARTFGMDALFRQFGIY

SEQ ID NO: 95683 - protein, 655 aa, Unknown
  Bacterial polypetide isolated from the Sargasso Sea
MNSTNKNDLDPQETQEWVEAMEAVIERDGHERAQYILRQLADQSVLSGGGSPYSANTPYLNTIPPELEVRSDGNQELESKIRSIIRWNAVVMVMRANKDDSDLGGHIASYASSATLYDVGFNHFWHAPKKDHDGDLVFFQGHSAPGIYARAFLEGRLTKEQLDNFRSESEGKGVSSYPHPWLMSEFWQFPTVSMGLGPIMAIYQARFLKYLQNRGLADTAGRKVWAFLGDGEVDEPQSLGAIGLASRENLDNLIFVINCNLQRLDGPVRGNGKIIQELEGEFRGAGWNVIKVIWGSYWDPLLARDTEGFLRKRMDEAIDGEYQAFKAKGGAYTRAHFFGKYPELLDMVSNMSDEDIWRLNRGGHDPHKIYAAFHSAVNHKEQPTVILVKTVKGYGMGGSGEAINITHSQKKMKIEDLKSFRDRFRVPINDEQVEDLSYYKPPADSPEIKYLKKCRKKLGGPLPSRRVNGDKLTIPALSVFDRLLNETGDREISTTQALVQAMTLLCKDKNIGQRVVPIVPDEARTFGMEGMFRQIGIYAHEGQKYEPVDREQLMYYKENQSGQMLQEGITEDGAMSSWIAAATSYSNSGMQMIPFYMFYSMFGFQRIGDLIWAAGDMQARGFLIGATSGRTTLNGEGLQHEDGHSQIMAGNVPNC

SEQ ID NO: 95684 - protein, 881 aa, Unknown
  Bacterial polypetide isolated from the Sargasso Sea
MYKDTDPQETREWLESIEDALEEHGNERTQFLLQTLIAYAQTKGARLPFNTNTPYLNTILPSDQLEYPGDLDLEQAITAIIRWNAMAMVTRANKETSGIGGHISTYASAATLYEVAFNHFFKGLEHPDGQDLIFFQGHASPGIYSRAFLEGRLSSKKLDSFRHELSDGGGLSSYPHPYLMPDFWQFATVSMGLGPIMGIYQARFMRYMIDRGFIKDTGRKVFVYTGDGEMDEPESLGALTLASRENLDNLIFVVNCNLQRLDGPVRGNSKVIQELEGAFRGAGWNVIKVIWGSDWDELFQKDVNGKLVKRLSDLVDGDLLKYTVEGGEYFRKEFFGKDPELLEMVKDLSNEELEQMLAGGHDPIKMYSAYHEAMNFAGKPTAILARTIKGYGLGQAGEGRNITHNQKKLNENELLYFRDRFSIPLSDKDAANASFKSFNKNSKEFKYIKNKRDLLGGPVPIRSDKSKKLTIPNIKIFDELLKGTGGREISTTMAYVRLLTLLTKDKTIGKHIVPIVPDEARTFGMDPLFRQLGIYSHKGQLYDPVDSDQFLYYKEAKNGQILEEGINEAGAMSSFCAAATSYSNHGIKMIPFYIYYSMFGFQRVWDLIWASGDMRARGFLLGGTAGRTTLNGEGLQHQDGHSHLAAAATPNIKAYDVAYGYEIATIIHRGLIEMCQDEKDVVYYLTLENENYQHPEIPKGSESGIIKGLYKIKEPNNPDIRLLGSGPLMGETFAAAELLKKDWKIDCGIWNVTSFSELRRDAQAAERWNLMHPTSKNKKTYLDECLGDKPIPVVAVSDYVKMVSEQIGPYIPAPYYTLGTDGFGRSDTRENLRHFFEVDRYYITLCAIRSLIIDKKLDSSIAEKAILKYKIDPKKPNPLNL

SEQ ID NO: 95685 - protein, 424 aa, Unknown
  Bacterial polypetide isolated from the Sargasso Sea
MQNPDFEREFQEWLEALENVLISDGKEYTEELLKALYTEARLKGIEVSELNDPPFKNTVHSDEEHPYPGNLEYEEKIRHFIRWNSLLTVLKANKESDLGGHISTYSSAATLYEVGFNHFFRGSDKSLGDLIYFQGHSSPGIYARSFLEGRLTSEQLDNFRQEIKGQGLSSYPHPWLMPDYWQFPTVSMGLGPIFGIFQAHVMRYLEKRGLIKSIENRKVWVFCGDGEMDEPESMGSISLAGREKLNNLVFVVNCNLQRLDGPVRGNSKIITELSKQFSGAGWNVVHLIWGRKWDELINNDKDGLLQKIMDETVDGEYQNYKAKGGKYTRDNFFGKDPEVLKMIDSLNDKEVEDLNRGGHDPTKIYNAYRLAYEEKDKPTVILAFTIKGYGIGSRQADNTAHQVKKLTKENLEDFVDKFDLPNKK

SEQ ID NO: 95686 - protein, 363 aa, Unknown
  Bacterial polypetide isolated from the Sargasso Sea
MKSGKDFDPIETREWIESLDDVIDDQGTDRASFLLNELAKHLMDKGAVPSYNLTTPFKNTISPENEAMMPGDLFMERRIRSLIRWNALATVLRANKNDDELGGHIATFSSAAMLYDIGFNYFFRGQESENDDLVYFQGHSSPGIYARSYLEGRINEEDLDNFRREVDKPGLSSYPHPWLMPDYWQFPVVSMGLGPISAIYQAHVMKYLHARGLKELGDRKIWGFWGDGEMDEPESLGAIGLAAREKLDNLIFVINCNLQRLDGPVRGNGKVIQELERQFRGSGWNVIKVVWGRLWDPIIAKDKGGHLQKIMDEVVDGEMQNFKAKGGAYTRENFFGKHPEALKLVKGLSDEEIYKLNRGGHDP

SEQ ID NO: 95687 - protein, 323 aa, Unknown
  Bacterial polypetide isolated from the Sargasso Sea
MLAIYQARFMKYLINRGLIKDEGRKVWAFLGDGEMDEPESLGAIGLAARENLDNLIFVVNCNLQRLDGPVRGNGKIIQELEGIFRGAGWNVLKVIWGSYWDSLLANDKTGHLVKIMNETVDGEYQAFKARNGLYVREKFFGKYPETKELVSSMSDTDIWRLNRGGHDPHKVYAAYDKAMNHKGSPTVIIAKTIKGYGMGKSGESVNTTHQQKKLDVDDLMYYRDRFDVPLTDAQVKNIEYFKPDENSEEIKYLKKRRIELGGFIPERTSYSKPIKAPSKDIFDFMKTSTGEKEMSTTMALVRMLTNLLRDKNVAPKLVPIIQT

SEQ ID NO: 95688 - protein, 768 aa, Unknown
  Bacterial polypetide isolated from the Sargasso Sea
MPKTYKDTDPQETQEWIESIDDALEEHGYERTRFLLEELIEYAQSKGARLPFNTNTPFINTILPQDQPDYPGNREIERKIKSFVRWNAMAMVVRANTNTPGIGGHISTYASSATLYEVAFNHFFKGPKHPSGGDLIFYQGHGSPGQYARAYLEGRLTKENLECFRRELTPGGLSSYPHPYLMPDFWQFATVSMGLGPIMAIYQARFLNYMVDREMIKETGRKVWAFLGDGEMDEPESKGALTLASKEDLDNLIFVVNCNLQRLDGPVRGNSKVIQELEGAFRGAGWNVIKVIWGSEWDDLIDKDTSGKLLQRMEEVVDGELLKYVVEGGAYFREHFFGKYPETLDLVSHISDEDLIKMKLGGHDPIKMYAAYKEATEHRGRPTVILARTIKGYGLGEAGEGRNITHNQKKLNQNELLYFRDRFDVPLSDEEAISATFFKPKSNSKEIKYIKNCREKLGGFIPNRVVFNKRMNPPKVDIFQELLDGTGEREISTTMAFVRLLTILCRDKNIGKNIVPIIPDEARTFGMDPLFRQLGIYAHKGQLYDPVDSDQFLYYKEAINGQIFEEGINEAGAISSFIAAGMSYQTTGENMIPFYIYYSMFGFQRVWDFIWAAGDMRARGFLLGGTAGRTTLNGEGLQHQDGHSHLAAAATPNIKAYDLAYAYEIAVVIKHGIKEMFYEQKDVIYYLTLENENYVHPKMPEKIEKDIIKGMYKIRTTKNPTIRLLGSGPLLNEVIAAADLLKDEWGIDPGIWNVTSFTELRREAEENR

SEQ ID NO: 95689 - protein, 581 aa, Unknown
  Bacterial polypetide isolated from the Sargasso Sea
MSTEIKVPDIGDFKNVEIIEVLVKEGQTISKNDPLITLESDKSSVEVPSPFEGKISKLKVKIGDKVSKGSLIGLIDSEANEQLSSKKLDDKVTEKIISQAEENKISPNGNITKPRIEVIKNQKVLFNNKFNDIDPEETNEWIDSLNSVVKRDGAERAHFLLSQLIDQAYVAGSNLPFTQNTPYINTIPADLEVSSPGDQNIERKIRSLVRWNAAAMVVRANKISSELGGHIATFASAATLYDVGCNHFWRAKNKDFLGDMIYFQGHAAPGMYARSFLEGRIKKKQLKNFRQEVDGKGLSSYPHPWLMPDYWQFPSVSMGLGPIMSIYQARFTKYLINRGLIKNQDRKIWTFIGDGETDEPETLGAIGLAAREKLDNLIFVINCNLQRLDGPVRGNGKIIQELEGTFRGAGWNVIKVIWGSYWDPLLKADKTGLLMKRMDECVDGEYQAFKAKGGAYVREKFFGKYPELVKLVSNMTDADIWRLNRGGHDPHKVYAAYDAAIKHKGQPTVILTKTIKGYGMGQSGESINTTHQAKKLDLKDMYYFRDRFDLPLKDKQVEDLEFYKPNEKSEEISYLKERREN

SEQ ID NO: 95690 - protein, 378 aa, Unknown
  Bacterial polypetide isolated from the Sargasso Sea
MVSSNDDIDPVETKEWLDSLSAVLQNDGSERAHFLIKQLIDQSYKAGSKIPHTQTTPYVNTIPPEEEKRSPGDQNIERKLRSLIRWNAAAMVVRANKKYPELGGHIGTFASAATLYDVGMNHFWRAKNNKFGGDLVYFQGHSAPGMYARAFLEGRLNEKQLDRFRQEVKTGGLSSYPHPWLMPNFWQFPTVSMGIGPMLAIYQARFMKYLINRGLIKDEGRKVWAFLGDGEMDEPESLGAIGLAARENLDNLIFVVNCNLQRLDGPVRGNGKIIQELEGIFRGAGWNVLKVIWGSYWDTLLANDKTGHLVKIMNETVDGEYQAFKARNGLYVREKFFGKYPETTELVSSMSDTDIWRLNRGGHDPHKVYAAYDKASQP

SEQ ID NO: 95691 - protein, 445 aa, Unknown
  Bacterial polypetide isolated from the Sargasso Sea
MSEKLLVPDIGEFENVEVIEILVKSGEQIKKNDPLITIESDKSSVEIPSTVDGKIESIELKVGDKVSKGDLILNYLSSSKTANLEKIPKDTESIIKQAEEAITSQKEEEVKNIIPEKKQSTIQVSNGADLDPLETKDWLESLSAVISKDGNQRAHFLIKELINKAYREGANIPYTQNTPYINTIPPEAEVKSNGDQNIERRIRSLIRWNSAAMVVRANKKFPELGGHIGTFASAATLYDVGMNHFWRAKNNKFGGDLIYFQGHSAPGMYARAYLEGRLNEKQLDSFRQEVKPGGLSSYPHPWLMPKFWQFPTVSMGLGPMLAIYQARYMKYLINRGLIKDEGRKVWAFLGDGEMDEPESMGAIGLAARENLDNLIFVINCNLQRLDGPVRGNGKIIQELEGSFRGSGWNVIKVIWGSYWDSLLANDKTGHLVKLMNETVDGEYQA

SEQ ID NO: 95692 - protein, 339 aa, Unknown
  Bacterial polypetide isolated from the Sargasso Sea
MYARAFLEGRLNEKQLDSFRQEVKPGGLSSYPHPWLMPTFWQFPTVSMGLGPMLAIYQARYMKYLINRGLIKDEGRKVWAFLGDGEMDEPESMGAIGLAARENLDNLIFVINCNLQRLDGPVRGNGKIIQELEGSFRGSGWNVIKVIWGSYWDSLIMNDKTGHLVKIMNETVDGEYQAMKARDGAYVREKFFGKYPETSELVSSLSDKDIWRLNRGGHDPHKVYAAYDKATKNIGSPTVIIAKTIKGYGMGKSGESVNTTHQTKKLDVDDLMYYRDRFDVPLTDDQVRNIEYFRPGEKSLEIKYLREMRLKLGGFLPERSTFAKSVKAPSKDIFDFMKV

SEQ ID NO: 95693 - protein, 464 aa, Unknown
  Bacterial polypetide isolated from the Sargasso Sea
PELGGHIGTFASAATLYDVGMNHFWRAKNNKFGGDLIYFQGHSAPGMYARAFLEGRLHEKQLDSFRQEVKKGGLSSYPHPWLMPNFWQFPTVSMGLGPMLAIYQARFMKYLINRGLIKDQNRKVWAFLGDGEMDEPESLGAIGLAAREKLDNLIFVVNCNLQRLDGPVRGNGKIIQELEGIFRGAGWNVIKVIWGSYWDPLLAKDKTGHLVKIMSETVDGEYQAYKARNGLYVRENFFGKYPETKRLVSSLSDKDIWKLNRGGHDPHKVYSAYHEASKNIGSPTVIIAKTIKGYGMGKTGESVNTTHQQKKMGIDDLMYYRDRFDVPLTNKQVEEVQYFKPDENSAEIKYLKEKRIKLGGFIPERTSYAKPIKTPPKDIFDFLKESTGKKEMSTTMALVRLLTNLLRDKNVSPRLVPIIPDEARTFGMEGFFQKIGIYAHEGQKYEPEDSEQLSSYREDKKGQV

SEQ ID NO: 95694 - protein, 480 aa, Unknown
  Bacterial polypetide isolated from the Sargasso Sea
MAQKISVPDIGDFKDVEVIEILVKPGDNIKKNDPIVTIESDKSSVEIPSPSEGQIKDLSVKIGDKVSQGSVIATIENDQVVSEKKEIQKKDEKKEKSKTNGNIQTNQSIKKVKKVFAEAASKDDIDPLETNEWIESLNSVIENDGSSRASFLLNKVIDQAYKAGLVLPDTRTTPYINTIPPETEAKSTGDQNIEKKIRAYIRWNAAAMVVKANKKSSELGGHIGTFASAATLYDVGMNHFWRAKNNKFGGDLIYFQGHSAPGMYARAYLEGRLTADQLDGFRQEVDKGGLSSYPHPWLMPNFWQFPTVSMGLGPIMGIYQARFLKYLINRGLVKDQGRKVWVFLGDGEMDEPESLGAIGLAAREKLDNLIFVINCNLQRLDGPVRGNGKIIQELEGSFRGSGWNVIKVIWGSYWDQLLAKDKTGLLIKRMNECVDGEYQAFKAKGGEYVRNKFFGKYPELKELVSSMTDKDIWEIKQRWS

SEQ ID NO: 95695 - protein, 451 aa, Unknown
  Bacterial polypetide isolated from the Sargasso Sea
MPPKDIDPVETLEWIDAINSVIDEEGLERASYLLTKVAERLNQEGAVPSYNLTTPFKNSISVKDEAKMPGDLLMERKIRSLIRWNALVMVLKANKNDEELGGHISTFSSAATLYDVGFNYFFRGSDNHLEDMVYFQGHCSPGIYARSYLEGYLNEEDLDNFRREVTKPGLSSYPHPWLMPDYWQFPVVSMGLGPILGIYQAHVMRYLSARGLVPRNDRKVWVFCGDGEMDEPESKGAIGLAGREQLENLIFVVNCNLQRLDGPVRGNGKIIQELEGAFRGEGWNVIKVVWGRFWDPIIEKDTEGKLQEIMDAVVDGELQNYKAKGGAYTRKNFFARDPSVLEMVKDLSDEDIYRLNRGGHDPYKVYAAYHKAVNSKGAPTVILALTTKGYGTGSREADNTTHQVKKLSLENIKSFRDKFDIPIPDSEIEKLPYVRPAEDSPEIQYLKKTRK

SEQ ID NO: 95696 - protein, 394 aa, Unknown
  Bacterial polypetide isolated from the Sargasso Sea
MAQNISVPDIGDFKDVEVIEILVKPGDQINKNDPIVTIESDKSSVEIPSPSAGLIKDLKVKIGDKVSEGSLLAIIENGQAASSPKQEIEKEAVKEEVVKEQPKSNGNLNPVKQVKKVFAEPASKDDIDPVETNEWIESLNSVIESDGAPRASYLLNKVIDQAYKSGLVLPDTRTTPYINTIPPEAEAKSPGDQNIEKKLRAIIRWNAAAMVVKANKKSSELGGHIGTFASAATLYDVGMNHFWRAKNNKFGGDLVYFQGHSAPGMYARAFLEGRLSAKQLDGFRQEVGKDGLSSYPHPWLMPDFWQFPTVSMGLGPIMAIYQARFLKYLINRGLVKDEGRKIWVFLGDGEMDEPESMGAIGLAAREKLDNLIFVIKCNLQRLDGPVRGNGKIIQ

SEQ ID NO: 95697 - protein, 642 aa, Unknown
  Bacterial polypetide isolated from the Sargasso Sea
MNLDLLVPDIGDFENVEIIEILVKKGDKVSKNDPVVTLESDKSSVEVPSNYEGLVESIKVKIGDKVSKGDLILTLSSSKDKINKTSGDKNVNEEVPPVTEKIIQEAEKVINKSEEKIQNKNTIVKSKKLKNEVRMVISNNDIDPSETKDWLDSLSAVLQNDGAERAHFLIKQLIDQSYKAGSRIPYTQTTPYINTIPPDEEKKSPGDQNIERKIRSFIRWNAAAMVVRANKKFPELGGHIGTFASAATLYDVGMNHFWRAKNNKFGGDLVYFQGHSAPGMYARAFLEGRLSEKQLDSFRQEVKPGGLSSYPHPWLMPNFWQFPTVSMGLGPMLAIYQARYMKYLINRGLIKDEGRKVWAFLGDGEMDEPESMGAIGLAAREKLDNLIFVINCNLQRLDGPVRGNGKIIQELEGSFRGAGWNVIKVIWGSYWDSLLANDKTGQLVKIMNETVDGEYQAMKARDGAYVREKFFGKNPDTLEMVSSMSDKDIWRLNRGGHDPHKVYAAYDKAIKNQGSPTVIIAKTIKGYGMGKTGESVNTTHQTKKLDVDDLMYYRDRFDVPLTDEQVRNIEYFRPDEKSPEIKYIKERRLKLGGYLPERSTFAKPIKAPSKDIFDFMKVSTGEKEMSTTMALVRMLTNLLRDK

SEQ ID NO: 95698 - protein, 935 aa, Unknown
  Bacterial polypetide isolated from the Sargasso Sea
ISQKKVEEKIPPSTEKIIQEAEKTLVLKEEVKNSNTTNLNNKRNEKIEIVKNGDIDPIETNEWMESLSAVLERDGKHRAQFLIKKLIDHSYKEGSDLVLSRNTPYINTISPEEETKSPGDQNIERKIRSLIRWNAAAMVVRANKKNPELGGHIGTFASAATLYDVGMNHFWRAKNNKFGGDLIYFQGHSAPGMYARAFLEGRITEKELDKFRQEVNPGGLSSYPHPWLMPKFWQFPTVSMGLGPIMSIYQARFNKYLINRGLLKDEGRKIWCFLGDGETDEPESLGAIGLAAREKLDNLIFVINCNLQRLDGPVRGNGKIIQELEGIFRGAGWNVIKVIWGSYWDSLLAKDKSGLLIKRMGEAVDGEYQAFKAKGGAYVREKFFGKYPELLDLVSQMTDRDIWKLNRGGHDPHKVYAAYDLAMRNKGTPTVILAKTIKGYGMGKSGESINITHQQKKLDEGDLLYYRDRFDVPLTDEQVKNIEYYKPPENSAEIKYLKECRIKLGGNLPERSSFAKAIKTPPEDVFSAMKESTGKKEMSTTMILVRMLTSLLRDKNVAPRLVPIIPDEARTFGMEGFFQKIGIYAHEGQKYEPVDSEQLSSYREDVKGQVLEEGITEAGAMSSWIAAGTAYANHDISMIPIYLFYSMFGFQRTGDFAWAAGDNQTRGFLIGATSGRTTLAGEGLQHGDGHSHIMSSVIPNCKSYDPTFGYELAVIFRDGLKRMYEKQENIFYYITTMNENYPHPAIPKDKSVEEGILKGMYLFKEFKNHKKIKIQLLGSGAILREMIKAAEILQNDYKIDSNVWSVTSFSELRKDAIEIERYNLLNPDEKNKKNFVEKCLLHTEGPVLAASDYIRLNADQIRPFTSKSFYSFGTDGYGRSDTRKNLRKFFEVDKEHIVTYSLSVLAKEQLISSKYAKDAIKKYNINPDKPIPTKL

SEQ ID NO: 95699 - protein, 733 aa, Unknown
  Bacterial polypetide isolated from the Sargasso Sea
MVNKVIVPDIGDFENVEIIEILVKSGDKIKKNDSIVTLESDKSSVEVPSTAEGMVEKINVKIGDKVSKGDVLISVSGEQADVNDKEIKSSKDKLPTDTEKIIQQAEDSLEKKEEKVVSSKIDKKNETIIQVSKDGDIDPIETKEWLESLSAVLEKDGKNRAQFLIKKLIDHSYKEGSDLILSRNTPYINTIKPEEEIKSPGDQNLERKIRSFIRWNAAAMVVRANKKNPELGGHIGTFASAATLYDVGMNHFWRAKNNKFGGDLIYFQGHSAPGMYARAFLEGRINEKELDHFRQEVKPGGLSSYPHPWLMPKFWQFPTVSMGLGPIMSIYQARFNKYLINRGLLKDEGRKIWCFLGDGETDEPESLGAIGLAAREKLDNLIFVVNCNLQRLDGPVRGNGKIIQELEGIFRGAGWNVIKVIWGSYWDSLLAKDKSGLLIKRMGEAVDGEYQAFKAKGGSYVREKFFGKYKELLDLVSQMTDRDIWKLNRGGHDPHKVYAAYHSAMKNKGTPTVILAKTIKGYGMGKSGESINTTHQQKKLDEQDLLYYRDRFDVPLTDEQVKNIEYYKPKENSPEMKYLKECRIKLGGFLPERSSFAKAIKAPPPDIFAKMKESTGEKQMSTTMVLVRMLTNLMRDKNVAPRLVPIIPDEARTFGMEGLFQKIGIYAHEGQKYEPVDSEQLSSYREDINGQVLEEGITEAGAISSWIAAGTSYTNHDISMIPIYIFYSMFGFQ

SEQ ID NO: 95700 - protein, 386 aa, Unknown
  Bacterial polypetide isolated from the Sargasso Sea
MAQNISVPDIGDFKDVEVIEVLVKPGDKINKNDPVVTIESDKSSLEIPSPSSGEIKDLKVKIGDKVSEGSILATIENGQVTPTPKKKEITKEPVEEEPKKNGDLHPVKQVKKIFAEPASKDDIDPIETNEWIESLNSVIENDGSPRASYLLNQVIDQAYKSGLVLPDTRTTPYINTIPPEIEVKSPGDQNIEKKIRAYIRWNAAAMVVKANKRSSELGGHIGTFASAATLYDVGMNHFWRAKNNKFGGDLIYFQGHSAPGMYARAFLEGRLTSKQLDGFRQEVDEGGLSSYPHPWLMPKFWQFPTVSMGLGPIMAIYQARFLKYLINRGLVRDEGRKIWVFLGDGEMDEPESLGAIGLAAREKLDNLIFVINCNLQRLDGPVRGNG

SEQ ID NO: 95701 - protein, 378 aa, Unknown
  Bacterial polypetide isolated from the Sargasso Sea
AHYLIKELINKAYMEGANIPYTQNTPYINTIPVNEEKKSNGDQNIERRIRSLIRWNAAAMVVRANKKFPELGGHIGTFASAATLYDVGMNHFWRAKNNKFGGDLIYFQGHSAPGMYARAFLEGRLNEKQLDSFRQEVNPGGLSSYPHPWLMPKFWQFPTVSMGLGPMLAIYQARYMKYLINRGLIKDEGRKVWAFLGDGEMDEPESLGAIGLAAREKLDNLIFVVNCNLQRLDGPVRGNGKIIQELEGIFRGAGWNVLKVIWGSYWDPLLANDKTGHLVKTMNETVDGEYQAMKARDGAYVREKFFGKYPETKDLVSSLSDKDIWRLNRGGHDPHKVFAAYDKASKNIGSPTVVIAKTIKGYGMGKSGESVNTTHQTK

SEQ ID NO: 95702 - protein, 283 aa, Unknown
  Bacterial polypetide isolated from the Sargasso Sea
MTSRKGSKKTNINTQELLSFYKDMLLIRRFEEKAGQLYGMGLIGGFCHLYIGQEAVVVGLEAAAEDGDKRITSYRDHGHMLACGMDPNGVMAELTGRAGGYSKGKGGSMHMFSKEKNFYGGHGIVGAQVPLGAGLAFADKYLENDRVTFTYFGDGAANQGQVYETFNMASLWKLPVIFVIENNQYAMGTSQLRSTSTPDIYTRGAGFDIPGEAVDGMDVLSVKPPEIRRLNTAAPVKAPIFSKSKLIDTEGTQCLIQQNTELEKKFKKCGKKGTPSKILDPFC

SEQ ID NO: 95703 - protein, 168 aa, Unknown
  Bacterial polypetide isolated from the Sargasso Sea
MAVNIPKNLLAEFYRKMLLIRRFEEKAGQLYGMGKIGGFCHLYIGQEAVVVGITSVRQAGDQTITSYRDHGHMLASGMDPKGVMAELTGRITGYSKGKGGSMHMFSKAENFFGGHGIVGAQVPIGAGLAFSNRYQKNKNVSFTYFGDGAANQGQVYETFNMASLWKLP

SEQ ID NO: 95704 - protein, 332 aa, Unknown
  Bacterial polypetide isolated from the Sargasso Sea
SLKTYREAINEALLQEMKKDENVVVIGEDVAGGAGTNGEQDAWGGVLGVTKGLLKHFGRERVIDTPITETAIMGMASGAALTGLRPVAELMFVDFMGVCFDQILNQTAKFRYMFGGKAVTPLTIRTMYGGGLRAASQHSQCLYPMFTHVPGIKVVVPSNPYDAKGLLTQSIRDNDPVIFMEHKNLYDLSGDVPDESYSIPFGEANFTREGKDITFIGMGQTVDICNKVADTLKKEGTTSTVLDLRTLSPLDEDSILEASEETGKVVIVDESYPRCNIATDISALICQNSFDSLKAGIKMVTPPHTPVPFSPPLEDLYLPSEEKVLSAAKEIL

SEQ ID NO: 95705 - protein, 554 aa, Unknown
  Bacterial polypetide isolated from the Sargasso Sea
MAQKISVPDIGDFKDVEVIEILVKPGDQIKKDDPIVTIESDKSSVEIPSPTNGEIKDLKVKVGDKVSEGSVLAIIENGQASPKIQVQPAKQKTEKKTKNKTSKTNGNLSPINQVKKVFAEPASKDDIDPIETNEWIDSLNSVIENDGAPRASFLLNKVITQAYKSGLVLPDTRTTPYINTIPPEAEAKSPGDQKIEKKIRAYIRWNAAAMVVKANKKSPELGGHIGTFASAATLYDVGMNHFWRAKNDNFGGDLIYFQGHSAPGMYARAFLEGRLSSKQLDGFRQEVSKGGLSSYPHPWLMPDFWQFPTVSMGLGPIMAIYQARFLKYLINRGLLKDEGRKIWVFLGDGEMDEPESLGAIGLAAREKLDNLIFVINCNLQRLDGPVRGNSKIIQELEGSFRGTGWNVIKVIWGSYWDQLLAKDKTGLLVKRMNECVDGEYQAFKAKGGSYVRENFFGKYKELKDLVSSMTDKDIWRLNRGGHDPHKVYAAYHSAMQHKGSPTVILAKTIKGYGMGKSGESINTTHQQKKLDEKDLLYYRDRFGVPLTDKQVKNM

SEQ ID NO: 95706 - protein, 564 aa, Unknown
  Bacterial polypetide isolated from the Sargasso Sea
MSEKLLVPDIGDFENVEVIEILVKPGDQIKENDPIVTIESDKSSVEIPSTIAGKIDSVAVKVGDKVSKGDLLLNLKSSSKISSESTLPKDTENIIKQAEEAMAEKKEEKKIIKEPVVEKRQSTIQVVNGSDIDPLETQDWLESLSAVISKDGNHRAHFLIKELINKAYREGANIPYTQNTPYINTIPPEAEVKSNGDQNIERRIRSLIRWNAAAMVVRANKKYPELGGHIGTFASAATLYDVGMNHFWRAKNNKFGGDLIYFQGHSAPGMYARAFLEGRLNEKQLDSFRQEVKPGGLSSYPHPWLMPKFWQFPTVSMGLGPMLAIYQARYMKYLINRGLIKDEGRKVWAFLGDGEMDEPESMGAIGLAARENLDNLIFVVNCNLQRLDGPVRGNGKIIQELEGSFRGAGWNVIKVIWGSYWDSLIANDKTGHLVKVMNETVDGEYQAMKARDGAYVREKFFGKSPETFELVSSMSDKDIWRLNRGGHDPHKVFAAYDKATKHQGSPTVIIAKTIKGYGMGKSGESVNTTHQTKKLDVDDLMYYRDRFDVPLTDKQVRNIEYLSP

SEQ ID NO: 95707 - protein, 488 aa, Unknown
  Bacterial polypetide isolated from the Sargasso Sea
PGLGGHISTYASVATLYEVGFNHFFRGPDRKEGSDLVFFQGHSSPGVYSRAFLEGRLTKEELKNFRRELSEEGGLSSYPHPWLMPNFWQFATVSMGLAPVMAIYQARFLNYLIDRNLVKDEQRKVWAFLGDGEMDEPESKGALTLASREELDNLIFVINCNLQRLDGPVRGNGNVIQELEGAFRGAGWNVIKLIWGSEWDELFEKDTSGKLLERLGEIVDGDLLKYVVEDGGYFRKHFFGKYPELLELVAHLSDDELTKLKLGGHDPIKVYNAYLSAVNHKGSPTVVLARTIKGYGMGEAGEGRNITHNQKKLNKNELLYFRDRFNIKLSDDKAVHAPFYELDQDSEELEYLKTKREKLGGYLPARIVPNIKMEIPDISIFKELLNGTGERAISTTMAFVRLLTIISKDKNIGKQIVPIIPDEARTFGMDPLFRQLGIYAHRGQLYDPVDSDQFLYYKESKDGQILEEGINEAGAISSFIAARHELHY

SEQ ID NO: 95708 - protein, 254 aa, Unknown
  Bacterial polypetide isolated from the Sargasso Sea
SFSGLKPVVEFMTFNFSLQAMDHIINSAAKTLYMGGGQLNCPIVFRGPNGAAARVAAQHSQDLTAWFSHIPGLKVISPFSARDHKGLLKAAIRDPNPVIFLENEILYSDQESIIEHNDDITPIGKAKILREGSDITLISHSISLKMCLEASKKLAKKNIDCEVLDLRTIKPLDTEAIISSIQKTNKCVVVEQGWSQSGVSSEIISVIMENAFDWLDAPVLRLTGKDVPMPYAENLENLALPSEDELIKIVESLV

SEQ ID NO: 95709 - protein, 654 aa, Unknown
  Bacterial polypetide isolated from the Sargasso Sea
MTEKLLVPDIGDFENVEVIELLVKEGQEIKKNDPVITIESDKSSVEIPSIFSGRVETISVKVGDKVSKGDLLLNISSSNQTSKSSSEVPKNTENLIQEAENSLKKKQEQKTINENIMKEKREIIQVINEGDIDPLETSEWLESLSAVMQKDGNQRAHYLIKELINKAYMEGANIPYTQNTPYINTIPVSEEKKSNGDQNIERRIRSLIRWNAAAMVVRANKKFPELGGHIGTFASAATLYDVGMNHFWRAKNNKFGGDLIYFQGHSAPGMYARAFLEGRLNEKQLDSFRQEVNPGGLSSYPHPWLMPNFWQFPTVSMGLGPMLAIYQARYMKYLINRGLIKDESRKVWAFLGDGEMDEPESLGAIGLAARENLDNLIFVVNCNLQRLDGPVRGNGKIIQELEGIFRGAGWNVIKVIWGSYWDPLLANDKTGHLIKTMNETVDGEYQAMKARDGAYVREKFFGKYLETKELVSSLSDKDIWRLNRGGHDPHKVFAAYDKASKNVGSPTVVIAKTIKGYGMGKSGESVNTTHQTKKLDIDDLMYYRDRFDVPLTDQQVKNIEYYKPDQNSPEIKYLKERRIQLGGFIPERTTYAKPIKAPPKDIFDNMKESTGQKEMSTTMALVRMLTNLLRDKNVAQRLVPIIPDEARTFGMEGF

SEQ ID NO: 95710 - protein, 412 aa, Unknown
  Bacterial polypetide isolated from the Sargasso Sea
MSLNQWGAIHLAAREKLDNLIFVINCNLQRLDGPVRGNGKIIQELEGEFRGAGWNVIKVLWGSYWDPLLAKDDQGLLRKRMEEAIDGEYQAFKAKGGAYTRTHFFGKYPELLEMVSNMSDEDIWRLNRGGHDPHKVYAAYQAAVKHNGQPTVILAKTVKGYGMGGSGEGANITHQQKKIRPEDLLVFRDRFHLPLSNQQVEQMEFFHPGDSSQEVEYLHQQREKLGGYLPSRRTRGDDLKTPELPFFERLLKSTGEREISTTQALVQAMTLLCRDEKLGPRIVPIVPDEARTFGMEGMFRQIGIYAHEGQKYEPVDREQLMYYREDQKGQFLQEGINEDGAISSWIAAATSYSNSGIQMIPFYTFYSMFGFQRVGDLIWAAGDIQARGFLIGGTSGRTTLNGEGLQHEDDKA

SEQ ID NO: 95711 - protein, 884 aa, Unknown
  Bacterial polypetide isolated from the Sargasso Sea
MPPPEPRQTLPDTDPEETDEWLESLRTLASSQGSSRARLLLQEVMSEASSLGIDISPSRTPYLNSISIEQQSPYPGNLTLEKKIQNHVLWNAAAMVSDANRRIDGIGGHISTYASSSTLYEVGFQHVFRGKDLNGIGDALFIQGHASPGIYARAFLEGRISTDQVSNFRQEAFVEGLSSYPHPRLMPEFWEYPTVSMGLGPLGAVMQARFWKYLDQRGIADTSESRVFAFLGDGEMDEPEAIASIAVAGREQLDNLIVVVNCNLQRLDGPVRGNSSIIQELEGLYRGAGWTVIKLIWGSGWDRVFQRDTKGELLEKMEGITDGDWQRLSTLSIDDFREEMFSGSESLKALGTSISDNEIEGLTRGGHDPVKVYSAYKSAISAKGPAVILAHTVKGWGIDSFEGRNSTHQKKKMTIDDLKAYRDALEIDIEDSRLEENPFIALEEDSDEIKYLTERRTALGGYLPSRKPSKINFDLPGQDTYSAFDQGTPEGQEVSTTMAFVRLLRNLMKSEIGSRVVPIIPDEGRTFGMDPLFSEFEIFASRGQKYTPVDHKMLLNYKESESGQVLQEGISEAGAIASWISSATSYSSANSATMPFYTFYSMFGFQRVGDQIWSAADARARGFLMGATAGRTTLNGEGLQHQDGHSLLMASAVPHCRAWDPAYAYELAAIIRHGIDEMWGQNLDVFHYVMLYNENQQQMPKPPDVDDGIVRGAYKIEEVGEGRKKIRLLGSGPILRNVREAASELLSEHGISSEVWSITSYGELRREGLEHERSRRLNPEISEEPYVSRCFGDDTPTVATSDYICSVPEMIQRWIGGRYIVLGTDGFGRSDTREALRSFFEIDTNSIVVAAISALEQEGTLPSGTVEKELEKRNLNKERIDKTE

SEQ ID NO: 95712 - protein, 408 aa, Unknown
  Bacterial polypetide isolated from the Sargasso Sea
MTEKLLVPDIGDFENVEVIELLVKEGQEIKKNDPVVTIESDKSSVEIPSISSGKIESIVVKVGDKVSKGDLILNISSVDNKFSSSQDVPKNTENLIKEAESSLKKIQEQKKLIQKTEKEKSEIIQVANEGDIDPLETNEWLESLSDVIEKDGNQRAHYLIKELINKAYMEGANIPYTQNTPYINTIPVSEEKKSNGDQNIERRIRSLIRWNAAAMVVRANKKFPELGGHIGTFASAATLYDVGMNHFWRAKNNKFGGDLVYFQGHSAPGMYARAFLEGRLNEKQLDRFRQEVNPGGLSSYPHPWLMPNFWQFPTVSMGLGPMLAIYQARYMKYLINRGLIKDEGRKVWAFLGDGEMDEPESLGAIGLAARENLDNLIFVINCNLQRLDGPVRGNGKIIQELEGIFRGA

SEQ ID NO: 95713 - protein, 626 aa, Unknown
  Bacterial polypetide isolated from the Sargasso Sea
EKAYNLVFVINCNLQRLDGPVRGNSKIITELAKQFSGAGWNVVHLIWGRKWDELINNDEDGLLQKIMNETVDGEYQNYKAKGGKYTRENFFGKDPEVLKMIDSLSDKEVEDLNRGGHDPTKIYNAYRLAYEEKDKPTVILAFTIKGYGIGSRQADNTAHQVKKLTKENLEDFIDKFNLPIKKESLDNPNFLTLNRDKKVKEYLLSRRQELGGLLPSRKVSKEKLIAKKESFLDFDKKLDREQSTTMVFVRLLTKLLRDAAIGSRVVPIVPDEARTFGMDALFRQFGIYSSEGQKYEPEDADKVMFYRESESGIMLEEGINEAGAFSAWLALATSYSNNDLPMIPFYIFYSMFGFQRTHDLAWAAGDSRARGFLLGATSGRTTLNGEGLQHQDGHSHILASTIPNCRAYDPCYSYELSAIIQEGISDMYVNGNDRYYYITLMNENYSHPAKPKKLKNEEILKGAYKLKENKNINLRILASGVTLNFALEAEKELKNYNINADIWSITSFNELYREGIEIERQNRLNSTSKKSYVENCFSDEMPTIAVSEYQKAYPNQIREWVNGEYKILGTDGFGRSDTREELRDFFEISKEHIILNSLLLHGKKKEAEKFIKDSGMVLSKEAPWKS

SEQ ID NO: 95714 - protein, 439 aa, Unknown
  Bacterial polypetide isolated from the Sargasso Sea
MSEKLLVPDIGDFENVEVIEILVKPGDQIKENDPIVTIESDKSSVEIPSTIAGKVDSLAVKVGDKVSKGDLLLNLTSSPKTSSESTLPKDTENIIKQAEEAMAEKKEEEKIISEPIIEKKQSTIQVVNGTDIDPLETQDWLESLSAVISKDGNQRAHFLIKELINKAYREGANIPYTQNTPYINTIPPEAEVKSSGDQNIERRIRSLIRWNAAAMVVRANKKHPELGGHIGTFASAATLYDVGMNHFWRAKNNKFGGDLIYFQGHSAPGMYARAFLEGRLNEKQLDSFRQEVKPGGLSSYPHPWLMPKFWQFPTVSMGLGPMLAIYQARYMKYLINRGLIKDEGRKVWAFLGDGEMDEPESMGAIGLAARENLDNLIFVVNCNLQRLDGPVRGNGKIIQELEGSFRGSGWNVIKVIWGSYWDSLIANDKTGQLVKIMNE

SEQ ID NO: 95715 - protein, 413 aa, Unknown
  Bacterial polypetide isolated from the Sargasso Sea
RLSEKQLDSFRQEVNKGGLSSYPHPWLMPKFWQFPTVSMGIGPMLAIYQARFMKYLINRGLMKDEHRKVWCFLGDGEMDEPESLGAIGLAARENLDNLIFVVNCNLQRLDGPVRGNGKIIQELEGIFRGAGWNVIKVIWGSYWDSLLANDKSGHLIKIMNETVDGEYQAFKARNGLYVREKFFGKYPQTLELVSSMSDKDIWRLNRGGHDPHKVYAAYDKAVKNTGSPTVIVAKTIKGYGMGKSGESVNTTHQQKKLDVDDLLYYRDRFDVPLNDDQVKNIEYFKPDENSEEIKYLKERRMKLGGFIPERTSYSKPIKAPTKDIFDFMKVSTGNKEMSTTMALVRILTNLLRDKNVAPKLVPIIPDEARTFGMEGFFQKIGIYAHEGQKYEPEDSAQLSSYREEKSGQVLEEG

SEQ ID NO: 95716 - protein, 307 aa, Unknown
  Bacterial polypetide isolated from the Sargasso Sea
TAYTNHDIEMIPIYIFYSMFGFQRVGDLAWAAGDSQARGFLIGATAGRTTLAGEGLQHQDGHSHLIASTIPNCVTYDPTFHYELAVIFREGMRRMHEKKENVFYYITTMNENYSHPEMPKEKNCEEGILKGMYKIREFDKFKKTKIQLLGSGTILREMISAAEILQNDYQIDSEIWSVTSFNELRKDGMEVERYNLLNPDKDQKISYVEQCLGKTEGPIMAASDYMRMHSDQIRPYTNKSFYSLGTDGFGRSDTRKKLRKFFEVDKEHLVAYSLSVLAKEQLITSKYAKEAIKKYNIDGERPMPTKL

SEQ ID NO: 95717 - protein, 408 aa, Unknown
  Bacterial polypetide isolated from the Sargasso Sea
MYRDDDPIETSEWLDALESLIENEGVDRAKYILERLSERASRDGTELPYSITTPFRNSIPVTQESRMPGDLFMERRIRSLIRWNAMAMVVRANKRPGDLGGHISTFSSAATLYDVGFNYFFHGGGDERASDLVYFQGHASPGIYARSFLEGRFSEAQLDKYREEVDGDGLSSYPHPWLMPDYWQFPTVSMGLGPIQSIYQAHVMKYLHSRELIDMDGRKVWAFVGDGECDEPETLGSISKAGREKLDNLIWVVNCNLQRLDGPVRGNGKIVQELEGVFRGAGWNVIKVVWGRMWDPLFEKDEDGVMQRAMDEICDGELQNLTFKGPAYTRKEFFGKHPELAKLAENLSDEDIQKLNRGGHDPYKVYAAYHKAVNHANGKPTVILAHTIKGYGFGAAGEAQNTAHSLKK

SEQ ID NO: 95718 - protein, 404 aa, Unknown
  Bacterial polypetide isolated from the Sargasso Sea
SGDRQVSSTMTFVRVLNALLKDKKIGKRIVPIIPDEARTFGMEGLFRQVGIYANEGQKYVPQDADQVAYYREDKKGQVLQEGINELGAMASWVASGTSYSTCNATTIPFYIYYSMFGFQRVGDLAWAAGDSQARGFLLGATAGRTTLNGEGLQHQDGHSHVQANLIPNCITYDPTYGYEVAVIVQDGLRRMYGNNENIFYYLTLMNENYQHPAMPEGDDVAEQIIKGIYKLERVENDKSKLNVQLMGSGTILNEVRKAAQILCDDYNVSSDVYSVTSFNELAREGQDVARWNMLNPEAEQKVPYIGQVITKDAGPAISATDYVKNYSDQVRAFIDTEYRCLGTDGFGRSDSRENLRTHFEVNASYIVVASLYELAQRGDVEKKVVAEAIKRFDINAEKLNPLYA

SEQ ID NO: 95719 - protein, 448 aa, Unknown
  Bacterial polypetide isolated from the Sargasso Sea
MSEKILVPDIGDFENVEVIEILVKPGDQIKENDPIVTIESDKSSVEIPSTVSGKVDNVTVKVGDKVSKGDLLLNLTSKTSPESILPKDTENIIKQAEEAIAEKKEEKKIIRETVVEKKQPTIQVVNGSDIDPLETQDWLESLSAVISKDGNQRAHFLIKELINKAYREGANIPYTQNTPYINTIPPEAEVKSSGDQNIERRIRSLIRWNAAAMVVRANKKYPELGGHIGTFASAATLYDVGMNHFWRAKNNKFGGDLIYFQGHSAPGMYARAFLEGRLSEKQLDSFRQEVKPGGLSSYPHPWLMPKFWQFPTVSMGLGPMLAIYQARYMKYLINRGLIKDEGRKVWAFLGDGEMDEPESMGAIGLAARENLDNLIFVINCNLQRLDGPVRGNGKIIQELEGSFRGSGWNVIKVIWGSYWDSLLANDKTGDLIKIMNETVDGEYQARKQ

SEQ ID NO: 95720 - protein, 384 aa, Unknown
  Bacterial polypetide isolated from the Sargasso Sea
LGAIGLAAREKLDNLIFVVNCNLQRLDGPVRGNGKIIQELEGIFRGSGWNVIKVIWGSYWDQLLAKDKTGHLVKLMNETVDGEYQAYKARNGLYVREKFFGKYPETKELVSALSDKDIWRLNRGGHDPHKVYAAYDQASKNVGSPTVIIAKTIKGYGMGKSGESVNTTHQQKKMDTDDLMYYRDRFDVPLTDKQVREIQYFRPDENSPEIKYLKERRINLGGFIPERTTYAKPIKAPPKDIFDSLKASTGTKEMSTTMIFVRLLTNLLRDKNVAPRLVPIIPDEARTFGMEGFFKKIGIYAHEGQKYEPEDSEQLSSYREDKKGQVLEEGINEAGSMSSWIAAGTAYSNHDIEMIPIYLFYSMFGFQRTGDFNWAAGDSQSRGF

SEQ ID NO: 95721 - protein, 425 aa, Unknown
  Bacterial polypetide isolated from the Sargasso Sea
MTWGEERRKGGVVSQLEATEVEEWTESLDSVLRVNGPAATSQLLRHLSEHAQSARVPLPSAITTPFRNTISPQDERSMPGDLFMERRIRSLVRWNAMAMVMRANDNEDGLGGHISSFSSSATLYDVGMNHFFRGTVNGHPGDLVYYQGHSAPGMYARSYLEGVISEAQLENFRREVGGQGLSSYPHPWLMPDYWQFPTVSMGLGPIQAIYQAHVMKYQSKRGLVDHRDRKIWCFLGDGECDEPESLGAIALAGRERLGNLHFVINCNLQRLDGPVRGNGKIIQELEGVFRGAGWHVIKVVWGRKWDPLIERDQSGLLQKIMDDVCDGELQNCKFNGGAYTREHFFGRYPETLELVKDLSDEDIMYLNRGGHDPYKVYAAYAAACEEVERPTVILAMTVKGYGTSEAGEASNETHSLKKLDLKSCR

SEQ ID NO: 95722 - protein, 619 aa, Unknown
  Bacterial polypetide isolated from the Sargasso Sea
FLEGRITEKQLDKFRQAVEKGGLSSYPHPWLMPKFWQFPTVSMGLGPMMAIYQARFTKYLINRGLLKDQDRKIWCHLGDGEMDEPESFGAVGLAAREKLDNLIFVINCNLQRLDGPVRGNGKIIQELEGRFRGSGWNVIKVIWGSYWDQLLSKDKTGLLVKRMTEAVDGEYQAFKAKGGSYVREKFFGKYPELKDLVANMTDADIWKLNRGGHDPHKVYSAYHAAVQCKGKPTVIIAKTIKGYGMGKSGESINTTHQQKKLDEEDLLFYRDRFNVPLTDKQVKNIEYYKPAENSPEIKYLKNCRVKLGGHIPERTTFAKPVKTPPQDIFESFMKSTGDKEMSTTMALVRMLANLLRDKNVAPRLVPIIADEARTFGMEGFFQKIGIYAHEGQKYEPVDSEQLSSYREDKSGQVLQEGITEAGAMSSWIAAGTSYTNHDLEMVPIYLFYSMFGFQRIGDLAWAAADSQTRGFLIGATSGKTTLAGEGLQHQDGHSLLLASAIPNCVSYDPTFSYEMAVIFRDGLKRMHEKKENIYYYITAMNENYTHPAKPIGADQGILKGMYLFKSFKGKGKAKVQMLGSGSILREIIKAAEVLSDDYGIDCDVWSVTSFNELKKDGME

SEQ ID NO: 95723 - protein, 447 aa, Unknown
  Bacterial polypetide isolated from the Sargasso Sea
MNDLDPQETLEWIEAMEAVIERDGFERAQFLLRRLADRAVTSGVDAPYTAYTPYLNTIPPELEVRSSGNQELESKIRSIIRWNAAMMVMRANRDSSELGGHIASFASSALLYDIGFNHFWNAPEPEHGGDLVYIQGHSAPGIYARAFLEGRITEEQMNHFRQESTGKGVSSYPHPWLMPEFWQFPTVSMGLGPIMAIYQARFLKYLHNRELLDTEPRKVWCFLGDGETDEPESMGAIHLAAREKLDNLIFVINCNLQRLDGPVRGNGKIIQELEGEFRGAGWNVIKVLWGSYWDPLLAKDDQGLLRKRMEEAIDGEYQAFKAKGGAYTRTHFFGKYPELLEMVSNMSDEDIWRLNRGGHDPHKVYAAYQAAVSHTGQPTVILAKTVKGYGMGGSGEGANITHQQKKIRPEDLLVFRDRFHLPLSNQQVEQMEFFHPGDSSQEVEYLH

SEQ ID NO: 95724 - protein, 742 aa, Unknown
  Bacterial polypetide isolated from the Sargasso Sea
EKEFQEWLEALENVFISDGKEYTEELLKALYTEARLKGIEVSELNDPPFKNTVHSDEEHPYPGNLEYEEKIRHFIRWNSLLTVLKANKESDLGGHISTYSSAATLYEVGFNHFFRGSDKSLGDLIYFQGHSSPGIYARSFLEGRLTSEQLDNFRQEIKGQGLSSYPHPWLMPDYWQFPTVSMGLGPIFGIFQAHVMRYLEKRGLIESIDNRKVWVFCGDGEMDEPESMGSISLAGREKLNNLVFVVNCNLQRLDGPVRGNSKIITELSKQFSGAGWNVVHLIWGRKWDELINNDKDGLLQKIMDETVDGEYQNYKAKGGKYTRENFFGKDPEVLKMVDSLSDEEVEELNRGGHDPTKIYNAYRLAYEEKDKPTVILAFTIKGYGIGSRQADNTAHQVKKLTKENLEDFINKFDLPIKKENLDNPNFLNLNRNKKIKEYLLSRREELGGLLPSRKVSKKKLITKKESFIDFDKKLDREQSTTMVFVRLLTKLLRDAAIGSRVVPIVPDEARTFGMDALFRQFGIYSSEGQKYEPEDADKVMFYRESESGIMLEEGINEAGAFSAWLALATSYSNNNLPMIPFYIFYSMFGFQRTHDLAWAAGDSRARGFLLGATSGRTTLNGEGLQHQDGHSHILASTIPNCRSYDPCYSYELSAIIQEGINDMYVNGNDRYYYITLMNENYSHPAKPKKLKNEEILKGAYKLKENKNTNLRILASGVTLNFVLEAEKELKNYGINADIWSIT

SEQ ID NO: 95725 - protein, 458 aa, Unknown
  Bacterial polypetide isolated from the Sargasso Sea
NKFGGDLIYFQGHSAPGMYARAYLEGRLNEKQLDSFRQEVNPGGLSSYPHPWLMPNFWQFPTVSMGLGPMLAIYQARFMKYLINRGLIKDEGRKVWAFLGDGEMDEPESLGAIGLAAREKLDNLIFVVNCNLQRLDGPVRGNGKIIQELEGIFRGAGWNVIKVIWGSYWDPLLANDKTGHLVKTMNETVDGEYQAMKARDGAYVREKFFGKFLETKELVSSLSDKDIWRLNRGGHDPHKVFAAYDKASKNVGSPTVVIAKTIKGYGMGKSGESVNTTHQTKKLDIDDLMYYRDRFDVPLTDQQVKNIEYYKPDQNSPEIKYINERRIQLGGFIPERTTYAKSVKAPPKDIFDNMKVSTGKKEMSTTMALVRMLTNLLRDKNVAPRLVPIIPDEARTFGMEGFFQKIGIYAHEGQKYEPEDFAQLSSYKEEKSGQVLEEGINEAGAMSSWIAAGTSYTN

SEQ ID NO: 95726 - protein, 325 aa, Unknown
  Bacterial polypetide isolated from the Sargasso Sea
MREIQFREAICEAMTEEMRLDETIYLMGEEVAEYNGAYKASKGMLDEFGDKRVIDTPISELGFAGIGVGSTMTGNRPIIEFMTFNFALVGIDQIINNAAKIRQMSGGQFPCPIVFRGPTGSAGQLAATHSQAFESWYANCPGLKVIVPSNPHDAKGLLKSAIRDDDPVIFMESEQMYGDKGQVPEDEYLIPIGEAEVKKEGSDVTVVSFGKILKEVFKASEKLAEENINIEIIDLRTIRPLDIETIINSVKKTNRLVILEEAWPFGNVSTEITYQVQNKALDYLDAPIIKINTADTPTPYSPVLLKEWLPNYDDVIKAVKKVLYK

SEQ ID NO: 95727 - protein, 427 aa, Unknown
  Bacterial polypetide isolated from the Sargasso Sea
MKKDLLVPDIGDFENVEIIELLVKQGQKISINDPIVTLESDKSSVEVPSTEEGIIESISVKIGDKVSKGDKLVSISVEGESEKIEEVKEVKKDTEIPKDTEKIISDAEKIQKIDEPKIIRQEVSETKKTSKLENSKIEIVSDTNDIDPSETKEWLESLSAVLNSDGKERAQYIIRQLIEHSYREGSGLVMSRNTPYINTIPPEEEKKLPGDQNIERKIRSLIRWNAAAMVVRANKKNPELGGHIGTFASAATLYDVGMNHFWRAKNNKFGGDLIYFQGHSAPGIYARSYLEGRLTEKQLDNFRQEVKPGGLSSYPHPWLMPEYWQFPTVSMGLGPMLAIYQARFMKYLINRGLIKDEGRKVWAFLGDGEMDEPESLGAIGLAAREKLDNLIFVVNCNLQRLDGPVRGNGKIIQELEGIFRGAGWNVL

SEQ ID NO: 95728 - protein, 495 aa, Unknown
  Bacterial polypetide isolated from the Sargasso Sea
INQEGAIPSYNLTTPFRNTISVKDEAQMPGDLFMERRIRSLIRWNALVMVLKANKNDDELGGHISTFSSAATLYDVGFNYFFRGSDNQLEDMVYYQGHCSPGIYARSFLEGYLNEEDLDNFRREVNKPGLSSYPHPWLMPNYWQFPVVSMGLGPILGIYQAHVMRYLSARGLVPRNDRKVWVFCGDGEMDEPESKGAIGLAGREQLENLIFVVNCNLQRLDGPVRGNGKIIQELEGAFRGEGWNVIKVVWGRFWDPIIAKDSQGKLQEIMDAVVDGELQNFKAKGGAYTRENFFAKDPSVLEMVKDLSDDDIYRLNRGGHDPYKVYAAYHKAVNSKGAPTVILALTTKGYGTGSREADNTTHQVKKLSIENIKSFRDRFDIPVSDSEIEELPYVRPPEDSPEIQYLKKTRKALGGFIPRRRTTSEALKLPDNSIFEKLYESSGDRKISTTMAIVRIITELLKDKELGERIVPIVPDEARTFGMEALFRQVGIYSS

SEQ ID NO: 95729 - protein, 562 aa, Unknown
  Bacterial polypetide isolated from the Sargasso Sea
KPEIIQAVNKGDIDPLETNEWLESLSAVIEKDGNQRAHYLIKELINKAYIEGANIPYTQNTPYINTIPVMDEKKSNGDQNIERRIRSLIRWNAAAMVVRANKKFPELGGHIGTFASAATLYDVGMNHFWRAKNNKFGGDLIYFQGHSAPGMYARAFLEGRLNEKQLDSFRQEVNPGGLSSYPHPWLMPNFWQFPTVSMGLGPMLAIYQARYMKYLINRGLIKDEGRKVWAFLGDGEMDEPESLGAIGLAAREKLDNLIFVINCNLQRLDGPVRGNGKIIQELEGIFRGGGWNVIKVIWGSYWDPLLANDKTGHLIKTMNETVDGEYQAMKARNGTYVRENFFGKYPETKKLVSSLSDKDIWRLNRGGHDPHKVFAAYDKASKNIGSPTVVIAKTIKGYGMGKSGESVNTTHQTKKLDIDDLMYYRDRFDVPLTDNQVRNIEYYKPDQNSPEIKYIKERRIQLGGFIPERTTYAKPIKAPPKNIFENMKESTGKKEMSTTMALVRMLTSLLRDKNVAPRLVPIIPDEARTFGMEGFFQKVGIYAHEGQKYEPEDSAQLSSYRE

SEQ ID NO: 95730 - protein, 545 aa, Unknown
  Bacterial polypetide isolated from the Sargasso Sea
SELVSSLSDKDIWRLNRGGHDPHKVYAAYDRATKNQGSPTVIIAKTIKGYGMGKSGESVNTTHQTKKLDVDDLMYYRDRFDVPLTDEQVRNIEYFRPDEKSQEIKYLKERRIKLGGFLPERSTFAKPIKAPSKDIFDFMKVSTGEKEMSTTMALVRMLTSLMRDKNISPRLVPIIPDEARTFGMEGFFQKIGIYAHEGQKYEPEDSAQLSSYREEKSGQVLEEGINEAGAMSSWIAAATAYTNHDIEMIPIYTFYSMFGFQRIGDLAWAAGDSQARGFLIGATAGRTTLAGEGLQHQDGHSHLIASTIPNCVTYDPTFHYELAVIFREGLRRMHEKKENVFYYITTMNENYSHPEIPKDKNIEEGILKGMYKIKDFNKHKKTKIQLLGSGTILREMISAAEILQKEYQVDSEVWSVTSFNELRKDGMEVERYNLLNPDKEAKISFVEQCLGKTEGPIMAASDYMRMNSDQIRPYTNKSFYSLGADGFGRSDTRKNLRKFFEVDKEHLVAYGLSILAKEQLIASKHAKEAMKKYNIDSNKPIPTKL

SEQ ID NO: 95731 - protein, 480 aa, Unknown
  Bacterial polypetide isolated from the Sargasso Sea
IGGHISTYASAATLYEVAYNHILKGAAHPSGQDMVFFQGHASPGIYARAFLEKRLSIENLHNFRRELSEGGGLSSYPHPYLMPDFWQFATVSMGLGPLMAIYQARFMRYMDDRGFVEDTGRKVFAFLGDGEMDEPESTGALTLASRESLDNLIFVVNCNLQRLDGPVRGNSKVVQELEGAFRGAGWNVIKVLWGSEWDDLFEKDTTGMFLKRTEEVVDGDLLKYIVEGGAYMREHFFGKYPELLELVSHITDEDLERMKLGGHDPVKMYAAYQEAINHKGAPTVILARTIKGYGLGEAGEGRNITHNQKKLNEDELLYFRDRFKVPLTDEEASKAPFYRFSEDSKEYNYLVERRKNLGGFLPERINTPAPIDVPDLSIFEEMLAGTGDRAISTTMSFVRLLTILTKDKTIGKNIVPIVPDEARTFGMDPLFRQLGIYAHGGQLYDPVDSDQFLYYKEAKNGQILEEGINEAGAISSFIAA

SEQ ID NO: 95732 - protein, 865 aa, Unknown
  Bacterial polypetide isolated from the Sargasso Sea
RKKKKINSEPKEIIKKEIIKEERPSNGLKNGKQKIFAQPISKDDIDPAETQEWLDSLRAVVRTDGSSRAGYLLKKVIDEAYTQGLILPDTRTTPYINTIPSAADVRSPGDQNIERKIRAYIRWNAAAMVVKANKKNPELGGHIGTFASAATLYDVGMNHFWRAKNNKFGGDLVYFQGHSAPGMYARAFLEGRISEKQLDKFRQEVEKGGLSSYPHPWLMPKFWQFPTVSMGLGPMMAIYQARFTKYLINRGLLKDQDRKIWCHLGDGEMDEPESFGAVGLAAREKLDNLIFVINCNLQRLDGPVRGNGKIIQELEGRFRGAGWNVIKVIWGSYWDQLLSKDKTGLLIKRMNEAVDGEYQAFKAKGGAYVREKFFGKYPELKELVANMTDADIWKLNRGGHDPHKVYSAYHAAVQCKGKPTVIIAKTIKGYGMGKSGESINTTHQQKKLDEEDLLFYRDRFNVPLTDNQVKNIEYYKPAENSPEIKYLKNCRVKLGGHIPERTTFAKPVKTPPQDIFESFMKSTGDKEMSTTMALVRMLANLLRDKNVAPRLVPIIADEARTFGMEGFFQKIGIYAHEGQKYEPVDSEQLSSYREDKSGQVLQEGITEAGAMSSWIAAGTSYTNHDLEMVPIYLFYSMFGFQRIGDLAWAAADSQTRGFLIGATSGKTTLAGEGLQHQDGHSLLLASAIPNCVSYDPTFSYEMAVIFRDGLKRMHEKKENIYYYITAMNENYAHPEKPVGSDQGILKGMYLFKNYKGKGKAKVQMLGSGSILREVIKAAETLSKDYGVDCNVWSATSFNELKKDGMEVERKNLLNPNEKPKKSYVQKCLDSQEGIIFAASDYIRSHTDQIRPYLNKPFYTLGTDGF

SEQ ID NO: 95733 - protein, 428 aa, Unknown
  Bacterial polypetide isolated from the Sargasso Sea
QVEHETISKILDEKIPPSTEKLIEEAETATKPETKVIEPTQIKQTRLVNEVKMVSSNDDIDPIETKEWLDSLSAVLQNDGSERAHFLIKQLIDQSYKAGSKIPHTQTTPYVNTIPPEEEKRSPGDQNIERKLRSLIRWNAAAMVVRANKKYPELGGHIGTFASAATLYDVGMNHFWRAKNNKFGGDLVYFQGHSAPGMYARAFLEGRLNEKQLDRFRQEVQTGGLSSYPHPWLMPNFWQFPTVSMGIGPMLAIYQARFMKYLINRGLIKDEGRKVWVFLGDGEMDEPESLGAIGLAARENLDNLIFVVNCNLQRLDGPVRGNGKIIQELEGIFRGGGWNVLKVIWGSYWDSLLANDKTGHLVKIMNETVDGEYQAFKARNGLYVREKFFGKYPETKELVSSMSDTDIWRLNRGGHDPHKVYAAYDKAV

SEQ ID NO: 95734 - protein, 203 aa, Unknown
  Bacterial polypetide isolated from the Sargasso Sea
MKTVQFREAICEAMSEEMRRDESVYLMGEEVAEYNGAYKASKGMLDEFGELRVIDTPISEAGFSGVGVGSTMVGARPIIEFMTFNFSLVGIDQIINNAAKIRQMSGGQFPCPIVFRGPTASAGQLGATHSQAFESWFANCPGLKVIVPSNPYDAKGLLKSAIRDDDPVIFMESEQMYGDKGEIPEGEYTLPIGVADKREKEKM

SEQ ID NO: 95735 - protein, 311 aa, Unknown
  Bacterial polypetide isolated from the Sargasso Sea
WFVSEGQKVKPGDVIAEIETDKATMEVEAVDEGFIKKLFYKEGDNNIPVNKPIALISDQIGEKIKEKNKTIIEIKSKDKKELEQTEASEKENSKLGQDQITMRQAIRDTIAEEMRKDRKVFILGEEVAEYQGAYKVTQGLLEEFGEKRVIDTPISEQGFTGLAVGAAFKGLIPIVEFMTFNFSMQAIDQIINSAAKTLYMSGGQINCPIVFRGPNGAAAQVAAQHSQDFSSWYSHVPGLKVVAPSTSLNAKGLLRSAIRDPNPVIFLENEILYGLKGENSSEDFTIPFGKANIAKEGSDTTIVTYSIMYTN

SEQ ID NO: 95736 - protein, 364 aa, Unknown
  Bacterial polypetide isolated from the Sargasso Sea
VDDGKIGQLLVAEGTEGVKVNTPIALLVDTNESPHATIKDIADKPYLEKEKIPSKPTNDKPISIEANSSLITVREALRNAMAEEMRADKSVFVMGEEVAEYQGAYKVTQGLLEEFGDKRVYDTPITEHGFAGIGIGAAFGNLKPIVEFMTFNFAMQAMDQIINSAAKTLYMSGGQMGCPIVFRGPNGAASRVAAQHSQCYASWYAHCPGLKVVSPWSSKDAKGLLKSAIRDPDPVIFLENEVMYGQSFSCPDDENFTLPIGKANIEKEGNDVTIIAFSIMVGKSLEAAEILEDKNINAEVINLRTLRPLDIDTIIESVKKTNRVVTCEEGFPFSGIGSEISALITEKAFDWLDAPVVRVTGKRC

SEQ ID NO: 95737 - protein, 279 aa, Unknown
  Bacterial polypetide isolated from the Sargasso Sea
MNKKINNSFSDDQLLKFYEKMFLIRKFEEKAAQLYGAGKIGGFCHLYIGQEAVVIGILSSINSEDTVITAYRDHGHILARGVDPKSVMSELTGRSDGISKGKGGSMHMFSKANRFYGGHGIVGAQVPLGVGIGFAHKYRNEKKISRVYLGDGAMSNGQVFEAFNLASLWELPVLFIIENNKYGMGTSIGRSAAGNELFERATVFGIKGEKVDGMNFFTVSDAAIRAREYINNNFKPYIIEMDTYRFRGHSMSDPGLYRTKDEVNKMKEIDPVLVMKETL

SEQ ID NO: 95738 - protein, 283 aa, Unknown
  Bacterial polypetide isolated from the Sargasso Sea
MEVETVEDGIVTKLVIDEGTLAIPVGTVIATISVDNGDEPKEIGKDGSDAEETADMLRDEEQEIQSAVIKKQEAKSLSPNTNWDGAVINMTVREALRDAMAEEMRGDDKIFIMGEEVAEYQGAYKVTQGLLEEFGERRIIDTPITEHGFTGLAVGAAFGDLRPIVEFMTFNFSMQAIDQIINSAAKTLYMSGGQMGCPIVFRGPNGAASRVAAQHSQCFASWYAHCPGLKVISPWSSADAKGLLKSAIRDPNPVIFLENEVMYGQSFDVPDTDDWIVPIGKRN

SEQ ID NO: 95739 - protein, 240 aa, Unknown
  Bacterial polypetide isolated from the Sargasso Sea
MYSYMLKIRRFEERAAQLYGMGKIGGFCHLYIGQEAVVVGILMTIDKNDSVVTTYRDHGHMIARGLDPKRIMAELTGREDGYSAGKGGSMHMFSKQNNFYGGHGIVGAQVPIGTGIAFTHKYNGEKNICRTYIGDGAMNNGQVFEAFNLAALWKLPVLYIIENNKYGMGTSVDRAAAGLDLYKRGEAFGIPGEKVDGMNVFSVIEAADKAGKYVREGNGPYIIEVQTYRYRGHSMSDPAK

SEQ ID NO: 95740 - protein, 295 aa, Unknown
  Bacterial polypetide isolated from the Sargasso Sea
SSTKEIQWAEEMRKDNKVFILGEEVAEYQGAYKVTQGLLEEFGKERVLDTPISEHGFTGLAVGAAFKGLRPILEFMTFNFSMQAIDQIINSAAKTLYMSGGQINCPIVFRGPNGAAAQVAAQHSQDFSSWYSQVPGLKVIAPSTPYNSKGLLRSAISDPNPVIFLENEILYGLKGPVNNDINFSIPIGKANIEKEGKDLTIVTYSIMLQKSKEAALRLKDEYNLDAEIIDLQTLRPLDSETVINSVKKTNRLITVEESWPFGSVGSEIANIVQRDAFDYLDSPVIKVNSANVPMP

SEQ ID NO: 95741 - protein, 213 aa, Unknown
  Bacterial polypetide isolated from the Sargasso Sea
FRWNGIVGAQVSIGTGLAFGQQYKGDNGITLAYFGDGAANQGQVHESFNMAALWKLPVVYVIENNRYGMGTSVQRASATEDLSQLGAGRGIHGMQVDGMDVVAVAEAGEMAAKKCRKGKGPVILEMVTYRYRGHSMSDPATYRTKEEVSKVRDEQDPIGNLKTRILKGKILSENDLKGIDKEIRELVAEAAEFAQNSPEPKPSELYTDVLVDG

SEQ ID NO: 95742 - protein, 282 aa, Unknown
  Bacterial polypetide isolated from the Sargasso Sea
EFGKERVLDTPISEHGFTGLAVGAAFKGLRPILEFMTFNFSMQAIDQIINSAAKTLYMSGGQINCPIVFRGPNGAAAQVAAQHSQDFSSWYSQVPGLKVISPSTPYNAKGLLRSAISDPNPVIFLENEILYGLKGPVNNDTNFSIPIGKANIEKEGKDLTLVTYSIMLQKSKEAALRLKEEYNLDAEIIDLQTLRPLDTETIINSVKKTNRLITVEESWPFGSVGSEISNIVQRDAFDYLDSPIIKVNSADVPMPYSLSLEKLYLPQVDDIINAAKKVSYIK

SEQ ID NO: 95743 - protein, 222 aa, Unknown
  Bacterial polypetide isolated from the Sargasso Sea
LIQEFGKERVLDTPISEHGFIGLAVGAAFKGLRPILEFMTFNFYMQAIDQIINSAAKTLYMSGGQINCPIVFRGPNGVAVQVAAQHSQDFSSWYFQVPGLKVIAPSTPYNAKGLLRSAISDPNPIIFLENEILYGLKGPVNNDVNFSIPIGKANIEKEGKDLTIVTYSIMLQKSKEAALRLKEEYNLDAEIIDLQTLRPLDTETILNSVKKTNRLITVEESW

SEQ ID NO: 95744 - protein, 274 aa, Unknown
  Bacterial polypetide isolated from the Sargasso Sea
MSSEASHLESAEVSTKTITVREAINNAIAEEMRRDENVFIMGEEVGEYQGAYKVSQGLLEEFGPDRVIDTPITEHGFTGLAIGAAFTGLRPIVEFMTFNFALQAIDQIVNSAAKTHYMSGGQITCPIVFRGPNGAAARVGAQHSQDFSSLYASIPGLKVIQPFDSGDAKGLLKSAIRDNNPVIFLENEILYGKSFISEDKEEALVPIGKAKILKTGTDVTIISYGIGLMHSLEAEPILADMGVAAEIINLRTLRPIDFDTIIESVKKTNRCITV

SEQ ID NO: 95745 - protein, 272 aa, Unknown
  Bacterial polypetide isolated from the Sargasso Sea
ILMPALSPTMEEGTLSKWLVNEGDAISSGDLIAEIETDKATMEVEAVDDGKIGQLLVAEGTEGVKVNTPIALLIDTKEIPHATIKNIADKPYLEKEKIPSIPINENPVSIEANSSLITVREALRNAMAEEMRVDKSVFVMGEEVAEYQGAYKVTQGLLDEFGDKRVYDTPITEHGFAGIGIGAAFGNLKPIVEFMTFNFAMQAMDQIINSAAKTLYMSGGQMGCPIVFRGPNGAASRVAAQHSQCYASWYAHCPGLKVVSPWSSKDAKGLLK

SEQ ID NO: 95746 - protein, 289 aa, Unknown
  Bacterial polypetide isolated from the Sargasso Sea
DLIAEIETDKATMEVEAVDEGVVLDLLFKEGEVNIPVNKAIAIIGDPNEKIEVKKEAPVEKVIEEKKIEKNIETKIENKKDDLIDIPSPKTEEDTNLSSSEITMRQALRDTMAEEMRKDNKVFIIGEEVAEYQGAYKVTQDLLQEFGKERVLDTPISEHGFTGLAIGAAFKGLKPILEFMTFNFSMQAIDQIINSAAKTLYMSGGQINCPIVFRGPNGAAAQVAAQHSQDFSSWYSQVPGLKVIAPSTPYNAKGLLRSAISDPNPVIFLENEILYGLKGPVNNDVNFSI

SEQ ID NO: 95747 - protein, 275 aa, Unknown
  Bacterial polypetide isolated from the Sargasso Sea
MYSFMLKIRRFEERAAQLYGMGKIGGFCHLYIGQEAVVVGILMTIDKNDSVVTTYRDHGHMIARGLDPKRIMAELTGREDGYSAGKGGSMHMFSKENNFYGGHGIVGAQVPIGTGIAFSHKYNGEKNICRTYIGDGAMNNGQVFEAFNLAALWKLPVLYIIENNKYGMGTSVDRAAAGLDLYKRGEAFGIPGEKVDGMNIFSVIEAADKAGKFVREGNGPYIIEVQTYRYRGHSMSDPAKYRTKEELDNYKQTDPIEIVKGEILKKKIATNDEIE

SEQ ID NO: 95748 - protein, 302 aa, Unknown
  Bacterial polypetide isolated from the Sargasso Sea
SVPVNSPIAVLDGEDNDQSSDRKDDSSIMNNDDNKEENLKIDSLNNKKKDDTVKETDSNLIQKKQKSKKFEFSNYKSITMRQSIRDAIAEEMRKNESVFVIGEEVGEYEGAYKVTQGLLDEFGSSRILDTPISEHGFTGLAVGSAFKGLRPIVEFMTFNFSMQAIDQIINSAAKTLYMSGGQINCPIVFRGPNGAASQVAAQHSQDFSSWYSHCPGLKVVAPSNAFNAKGLLKSSIEDDNPVIFLENEILYNQKMDVPEDTNFDIPLGVANVALEGKDATIVTYSIMVSKSLEAAEILKKDL

SEQ ID NO: 95749 - protein, 270 aa, Unknown
  Bacterial polypetide isolated from the Sargasso Sea
PITEYGFAGIGTGAAMGGLRPVIEFMTFNFAMQAIDHIINSAAKTNYMSGGQMRCPIVFRGPNGAASRVGAQHSQNYGPWYANVPGLVVIAPYDASDAKGLLKAAIRSEDPVVFLENELVYGRSFELPELDDHVLPIGKARIMREGKDVTIVSYSIGVGLALEAAERLAEEGIDAEVIDLRTLRPLDKETVLASLAKTNRMVVAEEGFPVCSIASEIIAICMEDGFDNLDAPVVRVCNEDVPLPYAAKLEKLAIIDADRIVAAVKEGHYR

SEQ ID NO: 95750 - protein, 272 aa, Unknown
  Bacterial polypetide isolated from the Sargasso Sea
KGDTVKAGDLIAEIETDKATMEVEAVDEGVVLDLLFKEGEANIPVNKAIAIIGDPNEKIELKKEHPVEKVIEEKKIEKNIETKIENKKDDIIDSPSPKIEEDTNLSSEEITMRQAIRDTMAEEMRKDNKVFILGEEVAEYQGAYKVTQGLLEEFGKERVLDTPISEHGFTGLAVGAAFKGLRPILEFMTFNFSMQAIDQIINSAAKTLYMSGGQINCPIVFRGPNGAAAQVAAQHSQDFSSWYSQVPGLKVIAPSTPYNAKGLLRSAISDPN

SEQ ID NO: 95751 - protein, 321 aa, Unknown
  Bacterial polypetide isolated from the Sargasso Sea
LQMKKKFIKEDYIKIYRKMLQIRRFEERAAQLYGMGHIGGFCHLYIGQEAVVVGVLMTIENNDSVVTTYRDHGHMIARGLEPKKIMAELTGKQTGYSNGKGGSMHMFSKKNNFYGGHGIVGAQVPIGTGIAFTHKYKKEKQICRTYIGDGAMNNGQVFEAFNLASLWKLPVLYIIENNMYGMGTSVDRASAGTDLFKRGEAFGIKGKKIDGMDVFKVIEAAQLAGDHVRSGKGPYILEVQTYRYKGHSMSDPAKYRTKEELESYKVNDPIILASKEILKKKILSKKDLEKINTEIVQEIKDAAQYAIDSPFPEEKELLLTS

SEQ ID NO: 95752 - protein, 267 aa, Unknown
  Bacterial polypetide isolated from the Sargasso Sea
GSTDSPAPDIPTSMAALTADTQSSPSLVHMKPQPAQPTRVRPPDVDVPCGTEMVSTTVREALRDAMTEEMRRDPSVFLMGEEVAEYEGAYKVSQGLLDEFGAERVIDTPITEQGFAGVGVGAAFNGLRPIVEFMTFNFAMQAIDQIVNSAAKTLYMSGGQMTCAIVFRGPNGAASRVAAQHSQDYASWYANIPGLKVVAPCFAADAKGLLKSAIRDPNPVVFLENELLYGRHGNVPLLDDFTVPIGRASIVRTGSDITIVSYSMGVE

SEQ ID NO: 95753 - protein, 294 aa, Unknown
  Bacterial polypetide isolated from the Sargasso Sea
RGAYKVTQGLLEEFGKKRVLDTPISEHGFTGLAVGAAFKGLRPILEFMTFNFSMQAIDQIINSAAKTLYMSGGQINCPIVFRGPNGAAAQVAAQHSQDFSSWYSQVPGLKVIAPSTPYNAKGLLRSAILDPNPVIFLENEILYGLKGPVNNDANFSIPIGKANIEKEGKDLTIVTYSIMLQKSKEAALRLKEEFNLDAEIIDLQTLRPLDTETVINSVKKTNRLITVEESWPFGSVGSEIVNIVQRDAFDYLDSPVVKINSADVPMPYSLSLEKLYLPQVDDIINAAKKVSYIK

SEQ ID NO: 95754 - protein, 208 aa, Unknown
  Bacterial polypetide isolated from the Sargasso Sea
MKTVQFREAIAEAMSEEMRRDESIFLMGEEVAEYNGAYKASKGMLDEFGPKRVIDTPISEAGFSGIGVGSTMTGNRPIIEFMTFNFALVGIDQIINNAAKIRQMSGGQFPCPIVFRGPTGSAGQLGATHSQAFDSWYANCPGLKVIVPSNPYDAKGLLKSAIRDNDPVIFMESEQMYGDKGEIPENEYTLPIGVAEIIKAGNHVTIVS

SEQ ID NO: 95755 - protein, 205 aa, Unknown
  Bacterial polypetide isolated from the Sargasso Sea
MTNIKMPALSPTMTSGTLAKWLVKEGDNVKSGDIIAEIETDKATMELESIDDGIVNKILFKEGEQNIEVGTVIAKIGDDDQNDEETISILPNINKDENLNLTKNTITVREALRDAMAEEMRLDQNIFVMGEEVAEYQGAYKVTQGLLEEFGEKRVIDTPITEQGFAGLGVGAAFGGLKPIIEFMTFNFSMQAIDQIINSAAKTLY

SEQ ID NO: 95756 - protein, 271 aa, Unknown
  Bacterial polypetide isolated from the Sargasso Sea
MPVEVLMPALSPTMTEGKLARWLKAEGDDVIAGDVIAEIETDKATMEVEAVDEGKLGKILVAEGAEGVAVNTPIAVILGEGENANDVVAATAPAPVETPPAAATQVPSPAPAIAAEPQSSGPQAEPDWDGETVSLTVREALRDAMAEEMRREDSVFLMGEEVAQYQGAYKVSQGLLEEFGKRRVIDTPITEHGFAGLGVGAAFMGLKPIVEFMTFNFAMQAMDHLINSAAKTLYMSGGQMGCPIVFRGPNGAAARVGAQHSQCYASWYAHC

SEQ ID NO: 95757 - protein, 307 aa, Unknown
  Bacterial polypetide isolated from the Sargasso Sea
TKLLGQYDVFDEKEVSNEQLKSFYEKMLYLRRFEERVGQLYGLGLIGGFCHLYIGQEAVAVGMEAAIDKEDNVITGYRCHAHLLSRGASPYKILCELMGKGEGISKGKGGSMHMFDPANNFWGGHGIVGAQVPIGTGLAFASKYLNKQTLSVTYFGDGAANQGQVYESYNMASLWKLPIIFCIENNQYGMGTSTKRASAGTDLSKHGESFGIPGFAVNGMNPVSVYLSALKAVKWVRDGNGPIILEMKTYRYRGHSMSDPAKYRTREEVQKMREEQDPIEYIKKKLLDLDIFDKDRLQEIDDNIRWK

SEQ ID NO: 95758 - protein, 279 aa, Unknown
  Bacterial polypetide isolated from the Sargasso Sea
MINKTKKINRKLSKSDAIEAYKKMLLIRRFEEKAGQSYGLGQIGGFCHLYIGQEAVVVGLQMCIREGDQVITTYRDHGHMLACGMSPNGVMAELYGRADGYSKGKGGSMHMFSKVANFFGGHGIVGASVPLGTGLAFSNKYKKNKAITLTYFGDGAANQGQVYESFNMAKLWELPCIYIIENNRYAMGTSVQRSSAQKDLSQRGISFGIEGEQVNGMDIESVIDAGKRAVTKVRNNGGPYILEMLTYRYRGHSMSDPAQYRTRDEVKEVRDHSDPIESL

SEQ ID NO: 95759 - protein, 282 aa, Unknown
  Bacterial polypetide isolated from the Sargasso Sea
MLDEFGEKRVIDTPISELGFAGIGVGSTMTGNRPIIEFMTFNFALVGIDQIVNNAAKIRQMSGGQFPCPIVFRGPTASAGQLAATHSQAFESWYANCPGLKVIVPSNPYDAKGLLKSAIRDNDPVIFMESEQMYGDKGEVPEEEYLIPIGKADVKKTGKDVTVVSFGKIIKEVYAADQKLKENGIDIEIIDIMTVRPLDFQTIIESVKKTNRLVIVEEAWPFGNVSTEITYQVQNQAFDYLDAPVVKVNTADTPAPYSPVLLKEWLPNHEDVINAVNKVLYK

SEQ ID NO: 95760 - protein, 227 aa, Unknown
  Bacterial polypetide isolated from the Sargasso Sea
MRRLEIAADVLYKGKFIRGFCHLYDGQEAVVVGMETVLTKDDAVVTSYRDHCVHLGRGGTPLEVMAELMGRVDGAAKGIGGSMHMYRREANFFGGNGIVGAQTAIGAGLGFAFKYNKQPNVAVTMYGDGAANQGQLFEALNMAALWDLPVIFMCENNHYGMGTAQERSAKSPVYYKRGDYVPGLKVDGMDALAVKQAMKFAKEYCVSGKGPIVMEMDTYRYHGHSMS

SEQ ID NO: 95761 - protein, 285 aa, Unknown
  Bacterial polypetide isolated from the Sargasso Sea
EVFVTYTSGQEAVVVGMQSVSNEGDSVITSYRDHGHMLACGMDPKGVMAELTGREDGYSKGKGGSMHMFSKEKNFYGGHGIVGAQVPIGVGLAFSHKYKNDGFVCMTYLGDGAINQGQVYESFNMSALWNLPVIFIIENNKYGMGTSVDRASAGSSLADRGKAYGIPGMEVDGMNIFSVREAGKEALDFVRSGKGPFILEMKTYRYRGHSMSDPAKYRTRSEVDAVRQQKDCIENLKEVLQEQKVTDQELKNIDGEIKSLVTNASDFALESKLPDDNELLTDIYL

SEQ ID NO: 95762 - protein, 193 aa, Unknown
  Bacterial polypetide isolated from the Sargasso Sea
MRELQFRQAICEAMSEEMRLDDSIYLMGEEVAEYNGAYKASKGMLDEFGDKRVIDTPISELGFAGIGVGSTMTGNRPIIEFMTFNFALVGIDQIINNAAKIRQMSGGQFPCPIVFRGPTGSAGQLAATHSQAFESWYANCPGLKVIVPANPYDAKGLLKSAIRDDDPVIFMESEQMYGDKGQVPEEEYLIPIG

SEQ ID NO: 95763 - protein, 293 aa, Unknown
  Bacterial polypetide isolated from the Sargasso Sea
NQKNKKLEFSNYKSITMRQSIRDAIAEEMRKNESVFVIGEEVGEYEGAYKVTQGLLDEFGPSRILDTPISEHGFTGLAVGSAFKGLRPIVEFMTFNFSMQAIDQIINSAAKTLYMSGGQINCPIVFRGPNGAASQVAAQHSQDFSSWYSHCPGLKVVAPSNAFNAKGLLKSSIEDDNPVIFLENEILYNQKMDVPEDTNFDIPLGVANIALEGRDATIVTYSIMVSKSLEAAEILKKDYNLNVEIIDLQTIRPLDVDTILNSVKKTNRAITVEESWPFASVGSEIVNIYKEKF

SEQ ID NO: 95764 - protein, 247 aa, Unknown
  Bacterial polypetide isolated from the Sargasso Sea
LEYFKTMYTMRRMEITCDNEYKARTIRGFCHLYDGQEAIGTGVQAALAPEDSWITSYRCHCIALARGGTVEGVLAELMGNSHGQTGGKGGSMHFYNKEHNFFGGQGIVGAQVPVGTGLAFANKYKTPMGEPMPVAIGCYGDGAANQGQIWESMNMAALWKLPMIFCIENNQYGMGTSISRSSCNNDYYTMGNVIPGLKMDGMNVLSVREGMKHVRDYVSQGNGPMVVEMSTYRYHGHSMSDPGTTYR

SEQ ID NO: 95765 - protein, 311 aa, Unknown
  Bacterial polypetide isolated from the Sargasso Sea
LVKEGDSVVSGDILAEIETDKATMELESPDDGKVERILVKEGTENISVNTEIALLKVDGEEIEEIPEKPIEKSPQVSSNQSDPLSSEVNISMNSLLNQTKENSGGKNWSEKEISMREALNQAIEEEMKLDKDVFLLGEEVAEYDGAYKVTQGLLDKFGSKRVLDTPISEHGFTGLAIGAAMAGLKPICEFMTFNFSMQAIDQIVNSAAKSLYMSGGEINVPIVFRGPNGAAARVGAQHSQCFISWFSHIPGLIVIAPSNARDAKGLLKSSIRNPNPVVFLEHELLYKEKTNVPEQNDFLIPIGKGNLIKEG

SEQ ID NO: 95766 - protein, 292 aa, Unknown
  Bacterial polypetide isolated from the Sargasso Sea
MKILLPALSPTMETGNLVKWLVKEGDSVVSGDILAEIETDKATMELESPDDGKVEKILVKEGTENISVNTEIALLKVDGEEIEEIPEKPIEQSPKAPSNGFEPSTAEVKISMNSLLNQTNENLDSKNWSEKEITMREALNQAIEEEMKLDKDVFLLGEEVAEYDGAYKVTQGLLDKFGSKRVLDTPISEHGFTGLAIGAAMAGLKPICEFMTFNFSMQAIDQIVNSAAKSLYMSGGEINVPIVFRGPNGAAARVGAQHSQCFISWFSHIPGLIVIAPSNARDAKGLLKSSIR

SEQ ID NO: 95767 - protein, 293 aa, Unknown
  Bacterial polypetide isolated from the Sargasso Sea
TVKAGDLIAEIETDKATMEVEAVDEGVVLDLLFREGEVNIPVNKAIAIIGDPNEKVEVKKEAPIEKVIEKKKIEKNTETKIENKKADIIDTSSPKIEEDRNLSSEEITMRQALRDTMAEEMRKDNKVFILGEEVAEYQGAYKVTQGLLEEFGKERVLDTPISEHGFTGLAVGAAFKGLRPILEFMTFNFSMQAIDQIINSAAKTLYMSGGQINCPIVFRGPNGAAAQVAAQHSQDFSSWYSQVPGLKVIAPSTPYNAKGLLRSAISDPNPVIFLENEILYGLKGPVNNDVNFS

SEQ ID NO: 95768 - protein, 225 aa, Unknown
  Bacterial polypetide isolated from the Sargasso Sea
MTVRNALRDAMAEEMRRDVNVFVMGEEVAEYQGAYKVTQGLLEEFGKKRVVDTPITEHGFAGVGIGAAFANLKPVVEFMTFNFAMQAIDQIVNSAAKTLYMSGGQMGCPIVFRGPNGAASRVAAQHSQCYASWYSHIPGLKVIAPWSSEDAKGLLKSAIRDPDPVIFLENEVLYGQSFLCPTNEDFLIPIGKSKIEQVGTDVTIIAFSIMVGKALEAAKTLNRKV

SEQ ID NO: 95769 - protein, 284 aa, Unknown
  Bacterial polypetide isolated from the Sargasso Sea
LEEFGKERVLDTPISEHGFTGLAVEAAFKGLRPILEFMTFNFSMQAIDQIINSAAKTLYMSGGQINCPIVFRGPNGAAAQVAAQHSQDFSSWYSQVPGLKVIAPSTPYNAKGLLRSAISDPNPVIFLENEILYGLKGPVNNNVNFSIPIGKANIEKEGKDLTIVTYSIMLQKSKEAALRLKEEYNLDAEIIDLQTLRPLDTETILNSVKKTNRLITVEESWPFGSVGSEIANIVQRDAFDYLDSPVIKVNSADVPMPYSLSLEKLYLPQVDEIINAAKKVSYIK

SEQ ID NO: 95770 - protein, 287 aa, Unknown
  Bacterial polypetide isolated from the Sargasso Sea
EGWMAKIIVPEGTEDIPVGKPVAVLCEEQADIAAFKDYVPEASADAPPAAAAEPARAVLERPDYRPIGERSVPLTTGLASKPLEDGAAALAPVLDADSPVMTVRDALNSALAEEMERDEKVFIMGEEVGDYQGAYKITKGLLQRFGADRVRDTPITEAGFTGLACGAAMMGLKPVVEFMTFNFSMQAIDHIVNTAAKTLYMSAGTISVPIVFRGPNGAAAGVGAQHSQCFAAWYMSIPGLKVLAPYDAEDARGLLKAAIRDPDPVVFLENELMYGESFPVSKEALPP

SEQ ID NO: 95771 - protein, 316 aa, Unknown
  Bacterial polypetide isolated from the Sargasso Sea
VDQGTVEKLLYKEGDNNIPVNKPIALISEEQVNRSDTSENKKNTTLKKENQKTTEPSITIKKDEQEEVNLSKDQTTMRQAIRDTIAEEMRKDKKVFILGEEVAEYQGAYKVTQGLLEEFGKKRVIDTPISEQGFTGLAVGAAFKGLTPIVEFMTFNFSMQAIDQIINSAAKTLYMSGGQINCPIVFRGPNGAAAQVAAQHSQDFSSWYSHVPGLKVVAPSTPLNAKGLLREAIRDPNPVIFLENEILYGLKGEVSADDNFTIPFGKANVAKEGKDTTVVTYSIMLHKSLEAAKILKNEFDLDVEVIDLQSLRPIDK

SEQ ID NO: 95772 - protein, 252 aa, Unknown
  Bacterial polypetide isolated from the Sargasso Sea
IDKNDSVVTTYLDHGHMIARGLDPKRIMAELTGREDGYSAGKGGSMHMFSKENNFYGGHGIVGAQVPIGTGIAFTHKYNGEKNICRTYIGDGAMNNGQVFEAFNLAALWKLPVLYIIENNKYGMGTSVDRAAAGLDLYKRGEAFGIPGEKVDGMNVFSVIEAADKAGKYVREGNGPYIIEVQTYRYRGHSMSDPAKYRTKEELDNYKQTDPIEIVKAEILKKKIATNDEIEKINKNILEEIKNAAEFATNSP

SEQ ID NO: 95773 - protein, 250 aa, Unknown
  Bacterial polypetide isolated from the Sargasso Sea
DPNEKAEVKKEAPIEKVIEEKKIEKNIETKIDTKKDNIFNAPSPKIEEDRNLSSEEITMRQALRDTMAEEMRKDNKVFILGEEVAEYQGAYKVTQNLLQEFGKERVLDTPISEHGFTGLAVGAAFKGLRPILEFMTFNFSMQAIDQIINSAAKTLYMSGGQINCPIVFRGPNGAAAQVAAQHSQDFSSWYSQVPGLKVIAPSTPYNAKGLLRSAISDPNPVIFLENEILYGLKGPVNNDVNFSIPMEKQI

SEQ ID NO: 95774 - protein, 282 aa, Unknown
  Bacterial polypetide isolated from the Sargasso Sea
IRRFEEKAGQLYGMGHIGGFCHLYIGQEAVVTGIQSVLSKNDTLVTSYRDHGHMLACDMDPKGVMAELTGRSTGYSKGKGGSMHMFSREKGFFGGHGIVAAQVPIGAGLAFAHKYNSNNAISVTFFGDGAANQGQVYETYNMASLWKLPVIFVIENNMYGMGTSVSRSSAGNNFAKRGNAFDIKNKVINGMDVLEVREAAIEAVEYCRRGNGPFILEVKTYRYRGHSMSDPAKYRTREEVEKARKTGPIKTIENLIVSAGINEEELKVVDEEVRKIVNEAAD

SEQ ID NO: 95775 - protein, 282 aa, Unknown
  Bacterial polypetide isolated from the Sargasso Sea
MATEIKMPALSPTMETGTLAKWLVAEGDQVRSGDVIAEIETDKTTMEVETIDDGVVGKLLVPAGAENVPVNTVIAILIDDAGESIASASIADVAVAENVAPENAAPENAASEKAVPESAAPATVSAPVITADAAAISGASTMLTVRESLRDAMAEEMRRDERVFVMGEEVAEYQGAYKVTQGLLDEFGSKRVIDTPITEQGFAGLGVGAAFGELRPVIEFMTFNFAMQAIDQIINSAAKTLYMSGGQMGCPIVFRGPNGAASRVGAQHSQCYASWYAHCPGL

SEQ ID NO: 95776 - protein, 262 aa, Unknown
  Bacterial polypetide isolated from the Sargasso Sea
EGVLVNSPIAIMADEATENTVDVQPIEKNVQTDASPTRAEIKSQEIPLSGMEAEWGADIQTKTQTVREAIRDAMAEEMRRDETVYLMGEEVAEYQGAYKVSQGLLDEFGSKRVIDTPITEHGFTGIAVGSAFAGLRPIVEFMTFNFSMQAIDQIINSAAKTLYMSGGQMGAPMVFRGPNGAAARVGAQHSQDYTAWYAHIPGLKVVQPYSASDAKGLMKTAIRDDNPVIFLENEILYGKSFEVPLLDDYTVPFGKARVWREG

SEQ ID NO: 95777 - protein, 281 aa, Unknown
  Bacterial polypetide isolated from the Sargasso Sea
HLYIGQEAVVVGMQSVSNEGDSVITSYRDHGHMLACGMDPKGVMAELTGRENGYSKGKGGSMHMFSKEKNFYGGHGIVGAQVPIGIGLAFSHKYKNDGFVCMTYLGDGAVNQGQVYESFNMSALWNLPVIFIIENNKYGMGTSVDRASAGSSLADRGKAYGIPGMEVDGMNIFSVKKAGKEALEFTRSGKGPFILEMKTYRYRGHSMSDPAKYRTRSEVDTVRQQKDCIENLKEILQEQKVTDQELKNIDSEIKSLVTSASDFALESKLPDDNELLTGIYL

SEQ ID NO: 95778 - protein, 215 aa, Unknown
  Bacterial polypetide isolated from the Sargasso Sea
LEDGESASDVKLPTPDAPAETASLETVAKTVSEMVAIPASETDWSGSSTPLTVRESLRDAMAEEMRRDENVFVMGEEVAEYQGAYKVTQGLLDEFGSKRVIDTPITEQGFAGLGVGAAFGELRPIIEFMTFNFAMQAIDQVINSAAKTLYMSGGQMGCPIVFRGPNGAASRVAAQHSQCFASWYAHCPGLKVVAPYSAADAKGMLKAAIRDPNPV

SEQ ID NO: 95779 - protein, 212 aa, Unknown
  Bacterial polypetide isolated from the Sargasso Sea
MREAIRDTIAEEMRKDKKVFILGEEVAEYQGAYKVTQGLLEEFGDKRVIDTPISEQGFTGLAVGAAFKGLTPIVEFMTFNFSMQAIDQIINSAAKTLYMSGGQINCPIVFRGPNGAAAQVAAQHSQDFSSWYAQVPGLKVLAPSTPLNAKGLLRSAIRDQIPVYFFGNEFCMGLKGKVHLMITLHTIWKSNIAKEGTDTTIVTLSIMLQKSL

SEQ ID NO: 95780 - protein, 290 aa, Unknown
  Bacterial polypetide isolated from the Sargasso Sea
LETILCQDGTENVPVNTEIALISDSNQVSKKSNIIDASENITPKEQENISQKTKIEIAPDTIKSADQEILEKENYTSLTVREALRDAISEEMALDETVFLMGEEVAQYQGAYKVSQGLLQQFGETRVIDTPITEHGFTGLGVGAAFAGLKPIVEFMTFNFALQAMDQIINSAAKTLYMSGGQMNVPIVFRGANGAASRVAAQHSQCYASWYASIPGLKVVAPWSSEDAKGLLKTAIRDPNPVIFLENEILYGQSFNTPISPDFTLPIGKAKIERTGSDVTICAYSISVQH

SEQ ID NO: 95781 - protein, 246 aa, Unknown
  Bacterial polypetide isolated from the Sargasso Sea
FYGGAGIVGAQVPLGVGLAFANKYTAGGEPPYNVAIAAYGDGAANQGQIWEVANMAALWKLPHIFVIENNQYGMGTSVERHSSNPDYYTWGGRIPGVRANGMDVLAVREAARYCRQHCSEGNGPIFLELNTYRYHGHSMSDPGITYRDRDEVSTTRKTRDPIEHVKELILEAGFRTEEEIKAVEKRVRKEVADAIKTAKASTLPAEEELYTEIYSDGKGGSEYPPYTRAVEYVDSLGPDGKPGMLL

SEQ ID NO: 95782 - protein, 315 aa, Unknown
  Bacterial polypetide isolated from the Sargasso Sea
TWAAGRPPKTVAYGVNDIPATEDLVAIYKDMLLIRRFEEKAGQLYGMGQIGGFCHLYIGQEAVVVGLQSASQPGDTVVTSYRDHGHMLACGMDSNGVMAELTGRAGGYSRGKGGSMHMFSREKNFFGGHGIVGAQVPIGVGLAFSHKYKEEPNVCMTYLGDGAVNQGQVYESFNMAALWNLPVVFVIENNQYGMGTKVTRAAAGRALADRGMAYGIPGKQVDGMNVLAVRTAALEALAYSRDGNGPYILEMKTYRYRGHSMSDPAKYRTREEVDAMRKQHDPIDQIRDFLKDQNVDDVRLKEIDSDVKAMVTAAT

SEQ ID NO: 95783 - protein, 222 aa, Unknown
  Bacterial polypetide isolated from the Sargasso Sea
AYKVSQGLVGEFGKKRVIDTPITEHGFTGLAIGAAFSGLRPIVEFMTFNFSLQAMDQIVNSAAKTLYMSGGQMGCPIVFRGPNGAAARVAAQHSQDFSAWFSSIPGLKVVSPYSASDAKGLLKSAIRDPNPVIFLENELLYGEVFKVPTSEHLVPIGKANIIQEGSDITIISFGIGVKYAVKTASELKKNGVSVEIIDLRSLRPLDEEKIVESVKKTNRCVT

SEQ ID NO: 95784 - protein, 886 aa, Unknown
  Bacterial polypetide isolated from the Sargasso Sea
MSDILKNDVDPIETLEWLASLESLLREEGPQRAQFILEQLAEKARASGVDVAAKANRDYINTIPSSEEPDYPGDLEMERRIRAIIRWNAMMIVLRASKKDLDLGGHMSSFASSATIYEVCYNHFFRARSEKDGGDLVYFQGHISPGIYARAFAEGRLTEEQLDNFRQEVDGKGIPSYPHPKLMPDFWQFPTVSMGLGPIAAIYQARFLKYLTDRGIKDCSEQTVYAFLGDGEMDEPEAKGALTVAVREKLDNLVFVVNCNLQRLDGPVVGNGKVINELEGLFSGAGWDVTKVIWGRKWDELLKKDTSGKLIQLMNETVDGDYQTMKSRDGGYVREHFFNRYPETAALVKDMTDEEIFALNRGGHDPRKLFAAFSKAAATKGKPTVILAKTIKGYGMGEAAEGKNIAHQVKKMDLGSVRHLRDRFNLPVTDEQLETLPYLKIEEGTEEHKYLHARRAALKGYVPTRLRESTTKLEIPALDAFGPLLGEQAREISTTMAFVRSLNVMLKDKSIGKRIVPILADEARTFGMEGLFRQIGIYSPHGQQYTPQDRDIVSYYKEDKQGQVLQDGINELGAMSSWLAAATSYSTNDCPMIPFYIYYSMFGFQRIGDMAWAAGDQQARGFLLGATSGRTTLNGEGLQHEDGHSHILANTIPNCVSYDPSYAYEVAVIVQDGLRRMYGEKPENVFYYITTLNENYAMPAMPEGAEEGIRKGIYKLETVAGTKAKVQLLGCGSILGHVRTAAQILASEYGIGSDVFSVTSFNELARDGQDADRWNMLHPNADARVPYIAQVLGSEATIAATDYMKSFADQVRAFVPTENYRVLGTDGYGRSDSRANLRRHFEVNEFYVVVAALTELAKRGEVDKQVVADAIAKYGIDADKVNPLYA

SEQ ID NO: 95785 - protein, 295 aa, Unknown
  Bacterial polypetide isolated from the Sargasso Sea
AEYQGAYKVSQGLLEEFGSKRVIDTPITEHGFAGIATGASFAGLRPIVEFMTFNFAMQAIDQIVNSAGKTLYMSGGQMGAAMVFRGPNGAAARVGAQHSQDYTSWYAHIPGLKVAAPYSASDAKGLLKSAIRDNNPVIFLENEILYGRTFDVPDIEDYIVPFGKARIWRKGTDLTIISFGIGMQYALEAAEKLAAEGIEVEVVDLRTIRPIDYETIIHSVSKTNRCITVEEGFPVASIGNHLSAYVMEHAFDYLDAPIINCTGKDVPMPYAANLEKLALVTTEEVVNAAKKVCYR

SEQ ID NO: 95786 - protein, 322 aa, Unknown
  Bacterial polypetide isolated from the Sargasso Sea
MREALNQAIEEEMKLDKDVFLLGEEVAEYDGAYKVTQGLLDKFGSKRVLDTPISEHGFTGLAIGAAMAGLKPICEFMTFNFSMQAIDQIVNSAAKSLYMSGGEINVPIVFRGPNGAAARVGAQHSQCFISWFSHIPGLIVIAPSNARDAKGLLKSSIRNPNPVVFLEHELLYKEKTNVPEESDFLIPIGKGNLIKEGKDVTIIGFSMTVQRILNALPSIEKLGISPDIIDLRSIKPLDEELIYKSVKKTNRVVIVEDGFGSTSFGSHLSYLIQSNCFDFLDSEIIKVSGKDVPMPYAENLEKLALPNTDEIVSAVKKVSYIN

SEQ ID NO: 95787 - protein, 412 aa, Unknown
  Bacterial polypetide isolated from the Sargasso Sea
EIESADEGTVTKLLIKEGTESVPVNSPIAILNGNNDQLTEKSKDKITEKLDVDLLNNEKKDIEIENSNPNIISKNQKNKKLEFSNYKSITMRQSIRDAIAEEMRKNESVFVIGEEVGEYEGAYKVTQGLLDEFGPSRILDTPISEHGFTGLAVGSAFKGLRPIVEFMTFNFSMQAIDQIINSAAKTLYMSGGQINCPIVFRGPNGAASQVAAQHSQDFSSWYSHCPGLKVVAPSNAFNAKGLLKSSIEDDNPVIFLENEILYNQKMEVPEDTNFDIPLGEANIALEGKDATIVTYSIMVSKSLEAAEILKKDYNLNVEIIDLQTIRPLDSDTILNSVKKTNRLITVEESWPFASVGSEIVNIVQREIFDYLDSPIIKVNSADVPMPYSSVLEKKYLPQVQDIISAIKKVCYI

SEQ ID NO: 95788 - protein, 419 aa, Unknown
  Bacterial polypetide isolated from the Sargasso Sea
GDIIAEIETDKATMEIEAVEEGILSKILVPEGSTNVPVNSVIAHISQEDEKEGGLFEDKEKLTLENKKLISQSKVNNQKLTSSINELNDDKAYEELTVREALRDAMAEEMRVDTNVFLMGEEVGEYEGAYKVSQGLLKEFGPKRVIDTPITEHGFAGIGVGAAFRGLKPIIEFMTFNFAMQAIDHIINSSAKTLYMSGGGVSVPIVFRGPNGAASRVGAQHSQNFASWYAHIPGLKVVSPYSANDAKGLLKSSIRDPNPVIFLENEILYGEKFKVTSDENYTVPIGKANIVTQGEDLTIVSYSIGVKFSLEAAEVLNKDFGISCEIIDLRSLRPLDIDTIVNSVIKTNRIIVVEEGWPICSISSEISAILMENAFDHLDAPMIRVTGEDIPMPYAANLELLTLPSRDKIVKAAKEVCYI

SEQ ID NO: 95789 - protein, 409 aa, Unknown
  Bacterial polypetide isolated from the Sargasso Sea
WLVKEGDKVSSGDVIAEIETDKATMEIESADEGTVTKILIKEGTESVPVNSPIAVLDGEDQDQSSDKKDISKINNNDDAKKENLKVDSLNNEKKDETAKDPNSNIIQKNKKFELSNYKSITMRQSIRDAIAEEMRKNDSVFVIGEEVGEYEGAYKVTQGLLDEFGPSRILDTPISEHGFTGLAVGSAFKGLRPIVEFMTFNFSMQAIDQIINSAAKTLYMSGGQINCPIVFRGPNGAASQVAAQHSQDFSSWYSHCPGLKVVVPSNAFNAKGLLKSSIEDDNPVIFLENEILYNQKMDVPEDTNFDIPLGVANIPLEGTDATIVTYSIMVSKSLEAAEILKKEYNINVEIIDLQTIRPLDSDTILNSVKKTNRLITVEESWPFASVGSEIVNIVQREIFDYLDSPIIKS

SEQ ID NO: 95790 - protein, 1007 aa, Unknown
  Bacterial polypetide isolated from the Sargasso Sea
MLVPDIGDFENVEVIELLVKEGQDIKKNDPVVTIESDKSSVEIPSIFSGKVESVNVKVGDKVSKGDLLINISSNQSLSQKESVPKETENLIQEAESTLRKHQDQNIPQKIIETKKPKIIQVVKEGDIDPLETSEWLESLSAVIEKDGNQRAHYLIKELINKAYMEGANIPYTQNTPYINTIPVNEEKKSNGDQNLERRIRSLIRWNAAAMVVRANKKFPELGGHIGTFASAATLYDVGMNHFWRAKNNKFGGDLIYFQGHSAPGMYARAYLEGRLNEKQLDSFRQEVNPGGLSSYPHPWLMPNFWQFPTVSMGLGPMLAIYQARFMKYLINRGLIKDEGRKVWAFLGDGEMDEPESLGAIGLAAREKLDNLIFVVNCNLQRLDGPVRGNGKIIQELEGIFRGAGWNVIKVIWGSYWDPLLANDKTGHLVKTMNETVDGEYQAMKARDGAYVREKFFGKYLETKELVSSLSDKDIWRLNRGGHDPHKVFAAYDKASKNVGSPTVVIAKTIKGYGMGKSGESVNTTHQTKKLDIDDLMYYRDRFDVPLTDQQVKNIEYYKPDQNSPEIKYINERRIQLGGFIPERTTYAKPVKAPPKDIFDNMKVSTGEKEMSTTMALVRMLTNLLRDKNVAPRLVPIIPDEARTFGMEGFFQKIGIYAHEGQKYEPEDSAQLSSYKEEKSGQVLEEGINEAGAMSSWIAAGTSYTNHDIEMIPIYLFYSMFGFQRIGDFAWAGADSQSRGFLIGATAGRTTLAGEGLQHQDGHSHLMASTIPNCRSYDPTFHYELAVIFREGLRRMHEKKENIFYYITTMNENYPHPEMPKDKSCEDGILKGMYKIKEFNKYKKTKIQFLGSGTILREMIAGAEILQNEYQIDSEIWSVTSFNELRRDGLEVERYNLLNPDKEPKKSYVEKCLGNTEGPILAASDYMRMNSDQIRPYVNKSFYSLGTDGFGRSDTRKKLRKFFEVDKEHITTYGLSILAKEQLIASKYAKEAIKKYKIDIDKPMPTKL

SEQ ID NO: 95791 - protein, 884 aa, Unknown
  Bacterial polypetide isolated from the Sargasso Sea
MLQDLDPLETQEWVDALQAVLEQEGPERAHFLLEKLIDKARRNGTHLPYTATTAYLNTIPAGQEPHMPGNQEMERRIRAIIRWNALAMVLRGSKKDLELGGHISSFASSATIYDVCFNHFFRAPNEKDGGDLVYFQGHIAPGIYARSFLEGRLTEDQLANFRQEVDGKGLSSYPHPKLMPDYWQFPTVSMGLGPIQAIYQARFLKYLTDRGLKDCSDQTVYCFLGDGECDEPEALGAIGLAAREELDNLVFIINCNLQRLDGPVRGNGKIIQELEGEFRGAGWEVVKVIWGRYWDPLLARDTSGKLLQLMEETVDGEYQNCKAKGGAYTREHFFGKYPETAEMVANMSDDDIWRLNRGGHDPVKVYAALDHARKTKGRPTVILAKTVKGYGLGDAGEGKNIAHNVKKMGIESIRYFRDRFNIPIPDDQLEDLPFYHPGPDSEEVKYMMSRRAELHGSVPQRREKFSEELEVPSLKIFDSILQGSNGREISSTMAFVRVLTALLKDKKIGKNIVPIIPDEARTFGMEGLFRQVGIYAHEGQKYVPQDSDQVAYYREDKSGQVLQEGINELGAMSSWVSAATSYSVNDVPMIPFYIYYSMFGFQRIGDMAWAAGDMRARGFLVGGTSGRTTLNGEGLQHQDGHSHVLANTIPNCITYDPTYGYEIAVVVQDGIRRMYGENQEDIFYYLTTMNENYEQPAMPEGAEVGIVKGIYKLETVAGSGKGKVQLMSCGTILEQTRKAAQALAKDFGITADVFSVTSFNELTRDGQAVERWNMLHPTETPKQAYISQVISSDAPAIAATDYMKIYGEQLRAYMPTDYKVLGTDGFGRSDSRDNLRHHFEVDAKFIVIAALKSLVDRKELPVDVLANAIKEYGIDADKINPQYA

SEQ ID NO: 95792 - protein, 459 aa, Unknown
  Bacterial polypetide isolated from the Sargasso Sea
MSTEILMPALSPTMTEGNLSKWLIKKGDTVKAGDLIAEIETDKATMEVEAVDEGVVLDLLFKEGEANIPVNKAIAIIGDPNEKVEVKKEAPVEKVIEEKKIEKNIETKIETKKDNIIDTPSPKIEEDTNLSSEEITMRQALRDTMAEEMRKDNKVFILGEEVAEYQGAYKVTQGLLQEFGKERVLDTPISEHGFTGLAVGAAFKGLRPILEFMTFNFSMQAIDQIINSAAKTLYMSGGQINCPIVFRGPNGAAAQVAAQHSQDFSSWYSQVPGLKVIAPSTPYNAKGLLRSAISDPNPVIFLENEILYGLKGPVNNDINFSIPIGKANIEKEGKDLTIVTYSIMLQKSKEAALRLKEEYNLDIEIIDLQTLRPLDTETILNSVKKTNRLITVEESWPFGSVGSEIANIVQRDAFDYLDSPVIKVNSADVPMPYALSLEKLYLPQVDDIINAAKKVSYIK

SEQ ID NO: 95793 - protein, 320 aa, Unknown
  Bacterial polypetide isolated from the Sargasso Sea
MKKLQKADYIKMYSFMLKIRRFEERAAQLYGMGKIGGFCHLYIGQEAVVVGILMTIDKNDSVVTTYRDHGHMIARGLDPKRIMAELTGREDGYSAGKGGSMHMFSKENNFYGGHGIVGAQVPIGTGIAFTHKYNGEKNICRTYIGDGAMNNGQVFEAFNLAALWKLPVLYIIENNKYGMGTSVDRAAAGLDLYKRGEAFGIPGEKVDGMNVFSVIEAADKAGKYVREGNGPYIIEVQTYRYRGHSMSDPAKYRTKEELDNYKQTDPIEIVKAEILKKKIATNDEIEKINKDTLEEIKNAAEFATNSPFPKDSELYTDVYL

SEQ ID NO: 95794 - protein, 350 aa, Unknown
  Bacterial polypetide isolated from the Sargasso Sea
MSIDNFQDNTSVNTKLFGQYDVFDEKEVSNEQLKSFYEKMLYLRRFEERVGQLYGLGLIGGFCHLYIGQEAVSVGMEAAIDKEDNVITGYRCHAHLLSRGASPYKILCELMGKGEGISKGKGGSMHMFDPKNNFWGGHGIVGAQVPIGTGLAFASKYLNKENLSVTYFGDGAANQGQVYESYNMASLWKLPIIFCIENNQYGMGTSTKRASAGTDLSKHGESFGIPGIAVNGMNPVSVYLSALKAVKWVRDGNGPIILEMKTYRYRGHSMSDPAKYRTREEVQKMREEQDPIEYIKKKLLDLTIFDKDRLQEIDDNIRLEISNLAEKATSSKPVSEDELYTDVLCEEKYE

SEQ ID NO: 95795 - protein, 796 aa, Unknown
  Bacterial polypetide isolated from the Sargasso Sea
MAMVVSANTNNPGIGGHISTYASAATLYEIGFNHFFKGPKHPDGADLIFFQGHASPGIYARAFLEGRLDKNALQNFRRELTPGGGLSSYPHPWLMPKFWQFATVSMGLGPLMAVYQARFMNYLIDRGLMKNTNRKVWAFLGDGEMDEPESTAGLTLAAREQLDNLIFVINCNLQRLDGPVRGNSKVIQELEGAFRGAGWNVIKVIWGTDFDEYINHENGHFFLKRAEEIVDGDLLKYVVEGGAYIRKHFWGKYPELLEMVATKTDKELEKMRVGGHDPVKVYAAFKEAVETKGKPTVILTRTIKGYGLGEAGEGRNITHQQKKLNQEELLYFRDRFDIPLSDKQSQSTLFYKPRANSKEAQYLLNQRKKLGGFVPERKTKGPRIKIPKITIFEELLNGSGDREISTTMAYVRLLTILTKDKEIGKNVVPIIPDEARTFGMDPLFRQLGIYAHNGQLYEPVDSDQFLYYKESKDGQILEEGINEAGAVSSFIAAGTSYSLNGVNMIPFYIYYSMFGFQRIWDFIWAASDMRARGFLIGGTAGRTTLNGEGLQHQDGHSHLAAAVTPNIKAYDLSYGYEIATVVHYGLKDMYEKNNDCIYYITVENENYKHPQIPKDVSADIVKGLYKIKSTKTPTIRLLGSGPLMNETLKAAELLKKDWGVEPGIWNVTSFSELRKDAEETERWNLIHPNKTQKKSHIEKSLSKHKVPTVAVSDYVKMLSEQIAPYVPGPFYSLGTDGFGRSDTRENLRHFFEIDRYYITLTALRALADEGVIKMNIAEQAIKKYNIDPEKPNPTTA

SEQ ID NO: 95796 - protein, 1010 aa, Unknown
  Bacterial polypetide isolated from the Sargasso Sea
MRLRRRARRSRRACEKPIGQHGRIVAQRNTWKTYTGYVERKRICSAATRRRAPKYGCSAAIFRIARKDLTIRKFCCAGPRTLITIRRSLPAAGRVASSARERSSHSRTQETRMSAVPNEVMKYVAAEHDDDPQETVEWLESLDGVISSVGTGRAHYLIEKQIEFARMHGEHLPFSANTPYINTIPVAAQAKIPGDQDIEHRIRSYTRWNALAMVLRAGKDTNVGGHIASFASAATLYDVGYNHFWHAASEQHGGDLVFVQGHSSPGVYSRAFLLGRLKEEQLDNFRQEVDGNGISSYPHPWLMPDFWQFPTVSMGLGPIMAIYQARFMKYLEARGITKTEGRKVWAFLGDGETDEPESLGAIGMASREKLDNLVFVINCNLQRLDGPVRGNGKIIQELESEFRGAGWNVIKVIWGSRWDALFARDKSGALMRRMMEVVDGEYQTYKSESGAFVREHFFNTPELKALVADWSDDDIWALNRGGHDPHKIYAAFHEATNTKGAPTVILAKTIKGYGMGESGQAMNITHQQKKLPVEQLKKFRDQFRLPITDEQIADVPYLKFEEGSKELEYMRKQRMDLGGYLPHRREKATSLPVPALDAFEPLLKGTGEGREISTTMAFVRILNILLKDKALGKRVVPIVPDESRTFGMEGLFRQIGIWNQQGQKYVPEDSDQLMFYKESETGQILQEGINEAGGMCDWIAAATSYSTHGEIMVPFYIFYSMFGFQRIGDLAWAAGDMRSRGFLLGGTAGRTTLNGEGLQHEDGHSLLWAASVPNCVSYDPTFGYELAVIVQDGLRRMVQDQEDVYYYITVMNENYEHPAIPQGEHVAADIIKGMYAFKKADADKKAPRVQLLGAGTIFNEVIAAAELLKNDWGVAADLWSVPSFTELAREGHQVERWNLLHPTEERRLSHVQKCLKDTQGPVIASTDYVRALVDQIRGQIDRRFVVLGTDGFGRSDTREKLRHFFEVDRHWVTVAALNALADEGTIERKVVAEAIAKYNLDPSKPNPMTV

SEQ ID NO: 95797 - protein, 772 aa, Unknown
  Bacterial polypetide isolated from the Sargasso Sea
MSLELLVPDIGDFENVEIIEILVKKGDKINKNDSVVTLESDKSSVEVPSTFEGIIENIKVKIGDKVSKGDLILTLSSSENQINKSSEKQKIDEKIPPVTEKIIQEAEGSIKKIEEKIEDKKIENEVKMITSKDDIDPVETKEWLDSLSAVLQNDGSERAHFLIKQLIDQSYKAGSKIPYTQTTPYINTIPPEEEKKSPGDQNIERKIRSFIRWNAAAMVVRANKKFPELGGHIGTFASAATLYDVGMNHFWRAKNNKFGGDLIYFQGHSAPGMYARAFLEGRLTERQLNSFRQEVKNDGLSSYPHPWLMPKFWQFPTVSMGLGPMLAIYQARFMKYLINRGLIKDEGRKVWAFLGDGEMDEPESLGAIGLAAREKLDNLIFVINCNLQRLDGPVRGNGKIIQELEGIFRGGGWNVIKVIWGSYWDSLLANDKTGHLVKIMNETVDGEYQAFKARNGLYVREKFFGKYPETTELVSSMSDKDIWRLNRGGHDPHKVYAAYDKAIKNIGSPTVIIAKTIKGYGMGKTGESVNTTHQQKKLDVDDLLYYRDRFDVPLTNEQVKNIEYYKPDENSEEIKYLKKRRMELGGFIPERTSYSKPIKTPNKDIFDFMKISTGEKEMSTTMALVRLLTNLLRDKNVAPKLVPIIPDEARTFGMEGFFQKIGIYAHEGQKYEPEDSAQLSSYKEEKSGQVLEEGITEAGSMSSWIAAGTSYSNHDIEMIPIYLFYSMFGFQRIGDFAWAAGDSQARGFLIGATAGRTTLAGEGLQHQDGHSH

SEQ ID NO: 95798 - protein, 639 aa, Unknown
  Bacterial polypetide isolated from the Sargasso Sea
DNLIFVVNCNLQRLDGPVRGNGKIIQELEGIFRGSGWNVIKVIWGSYWDQLLAKDKTGHLVKLMNETVDGEYQAYKARNGLYVREKFFGKYPETKELVSALSDKDIWRLNRGGHDPHKVYAAYDQASKNVGSPTVIIAKTIKGYGMGKSGESVNTTHQQKKMDTDDLMYYRDRFDVPLTDKQVQEIQYFRPNENSPEIKYLKERRLDLGGFIPERTTYAKPIKAPPKDIFDSLKASTGTKEMSTTMIFVRLLTNLLRDKNVAPRLVPIIPDEARTFGMEGFFKKIGIYAHEGQKYEPEDSEQLSSYREDKRGQVLEEGINEAGSMSSWIAAGTAYSNHDIEMIPIYLFYSMFGFQRTGDFNWAAGDSQSRGFLIGATSGRTTLAGEGLQHQDGHSHMLASTIPNCISYDPTFGYELAVIFRDGLKRMHEKKENIFYYITTMNENYPHPEMPKDKNCEEGILKGMYKIKEFNKFKKTKIQLIGSGTILREIIAGAEVLQNEYQIDSEVWSVTSFNELRRDGMETERYNLLNPDKKQKVSYVEKCLGIKEGPILAASDYMRSHSDQIRPYVKKSFYSLGTDGFGRSDTRENLRKFFEVDKKHIVTYALSILSKEQLIASKYAQEAIKKYNIETEKPFPSKL

SEQ ID NO: 95799 - protein, 716 aa, Unknown
  Bacterial polypetide isolated from the Sargasso Sea
GGLSSYPHPWLMPKFWQFPTVSMGLGPIMAIYQARFLKYLINRGLIKDEGRKIWVFLGDGEMDEPESLGAIGLAAREKLDNLIFVVNCNLQRLDGPVRGNSKIIQELEGSFRGSGWNVIKVIWGSYWDQLLAKDKTGLLIKRMNECVDGEYQAFKAKGGSYVREKFFGKYPELTELVSSLTDKDIWRLNRGGHDPHKVYAAYAAAMQHSGSPTVILAKTIKGYGMGKTGESVNTTHQQKKLDEEDLLYYRDRFNVPLTDKQVKDIEYYKPSESSEEIKYLKDKRIKLGGFIPERSTFAKQIKAPPKDIFDQFMKSTGEKEMSTTMALVRMMTALLRDKNVAPRLVPIIPDEARTFGMEGFFQKIGIYAHEGQKYEPVDSEQLSSYREDKSGQVLEEGINESGAMSSWIAAGTAYTNHDIEMIPVYIFYSMFGFQRVGDLAWAAGDSQARGFLIGATAGRTTLAGEGLQHQDGHSQLLASNIPNCVSYDPTFAYEMATIFREGLKRMHEKKENVFYYITAMNENYSHPEKPKDCDEGILKGMYLFKEGKNKGKTKVQLLGSGTILREIIAASKILSKEYNIDADIWSVTSFNELRRDGMETERLNLLNPDKKAKKSYVQKCLSKRDGPVIAASDYTRAFTDQIRPYTDKKFYSFGTDGYGRSDTRKNLRKFFEVDKEHIVAFTLSALAKEQLVGSKEAEKAIKKYKIDKEKDFPANL

SEQ ID NO: 95800 - protein, 320 aa, Unknown
  Bacterial polypetide isolated from the Sargasso Sea
MKKLSKSDHLKIYSYMLKIRRFEERSAQLYGMGHIGGFCHLYIGQEAVVVGVLMTIHKNDSVVTTYRDHGHMIARGLDPKKIMAELTGRADGYSAGKGGSMHMFSKENNFYGGHGIVGAQVPIGTGIAFTHKYNGEKNICRTYIGDGAMNNGQVFEAFNLAALWELPVLYIIENNKYGMGTSVDRAAAGSDLYKRGEAFGIKGEIVDGMNVYSVIKAADKAGEYVRSGKGPYILEVQTYRYRGHSMSDPAKYRTKDELEEYKNSDPIEIVRLEILKKKLATESALEKISKEIIEEIKAAADFALESKFPSSEELYTDVYI

SEQ ID NO: 95801 - protein, 602 aa, Unknown
  Bacterial polypetide isolated from the Sargasso Sea
MVVRANKKHPELGGHIGTFASAATLYDVGMNHFWRAKNNKFGGDLIYFQGHSAPGMYARAFLEGRLNEKQLDRFRQEVQTDGLSSYPHPWLMPNFWQFPTVSMGIGPMLAIYQARFMKYLINRGLIKDEGRKVWAFLGDGEMDEPESLGAIGLAARENLDNLIFVVNCNLQRLDGPVRGNGKIIQELEGIFRGGGWNVLKVIWGSYWDSLLANDKTGHLVKIMNETVDGEYQAFKARNGLYVREKFFGKYPETSELVSSMSDTDIWRLNRGGHDPHKVYAAYDKAVNHKGSPTVIIAKTIKGYGMGKSGESVNTTHQQKKLDVDDLMYYRDRFDVPLTDSQVKNIEYFKPDENSEEIKYLKKRRLELGGFIPERTSYSKPIKAPVKDIFDFMKKSTGEKEMSTTMALVRMLTNLLRDKNVAPKLVPIIPDEARTFGMEGFFQKIGIYAHEGQKYEPEDSAQLSSYREEKSGQVLEEGITEAGSMSSWIAAGTAYTNHDIEMIPIYLFYSMFGFQRIGDFAWAAGDSQARGFLIGATAGRTTLAGEGLQHQDGHSHLLASTIPNCISYDPTFHYELAVIFREGLRRMHEKNENIFYYITTMNE

SEQ ID NO: 95802 - protein, 532 aa, Unknown
  Bacterial polypetide isolated from the Sargasso Sea
KDSDLGGHISSFASSATLYDIGFNYFFQAPTDEHGGDLIYFQGHTSPGVYARAFMEGRISEEQMNNFRQEVDGQGLSSYPHPWLMPDFWQFPTVSMGLGPIQAIYQARFMKYLEARGFIPEGKQKVWCFLGDGECDEPESLGAISLAGREKLDNLIFVINCNLQRLDGPVRGNGKIIQELEGVFRGAQWNVTKVIWGRFWDPLLAKDVDGILQRRMDEVIDGEYQNYKAKDGAFVREHFFNTPELKAMVADLSDDEIWKLNRGGHDPYKVYAAYHEAVNHKEQPTVILAKTIKGYGTGAGEAKNTAHNTKKVDVDSLKLFRDRFDIPVKDEELENLPFFKPEPNSAEARYLSERRSALGGFVPQRRANSFSVPTPDLSTLKAILDGSGDREISTTMAFVRILAQLVKDKDIGPRIVPIIPDEARTFGMEGMFRQLGIYSSVGQLYEPVDKDQVMFYKEDKKGQILEEGINEAGAMSSFIAAGTSYSSHNQPMLPFYIFYSMFGFQRIGDLAWAAGDSRTRGFLIGGTAGRTT

SEQ ID NO: 95803 - protein, 526 aa, Unknown
  Bacterial polypetide isolated from the Sargasso Sea
MSERFPNDVDPIETRDWLQAIESVIREEGVERAQYLIDQLLSEARKGGVKVAAGAGASNYVNTIAVEDEPEYPGNLELERRIRSAIRWNAIMTVLRASKKDLELGGHMASFQSSATVYDVCFNHFFRARNEQDGGDLVYFQGHISPGIYARAFLEGRLTEEQMNNFRQEVHGKGLSSYPHPKLMPEFWQFPTVSMGLGPIGAIYQAKFLKYLEHRGLKDTSKQTVYAFLGDGEMDEPESKGAITIATREKLDNLVFVINCNLQRLDGPVTGNGKIVNELEGIFAGAGWNVIKVMWGGRWDELLRKDTSGKLIQLMNETVDGDYQTFKSKDGAYVREHFFGKYPETAALVADWTDEQIWSLNRGGHDPKKVYAALKKAQETKGRATVILAHTIKGYGMGDTAEGKNIAHQVKKMNMDGVRYIRDRFNVPVTDEQVENLSYITFPEGSEEHTYLHAQRQKLHGYLPARQPNFTEKLELPALEDFGALLEEQNKEISTTIAFVRALNVMLKNKSIKDRLVPIIADEART

SEQ ID NO: 95804 - protein, 1021 aa, Unknown
  Bacterial polypetide isolated from the Sargasso Sea
MSEKLLVPDIGDFEEVEIIEILVKEGDKISKNDPVITLESDKSSVEVPSAFEGVVDSINIKIGDKVSKGDLILTLSSENGTQQKQETIEKIPPATEKIIAEAENSNGYNNSELDTSAHKEIKVESTQVEHNERLEIVENNNDIDPQETKEWLESLSAVVQSEGPERAHFLIKQLIDQAYKEGSNIPYTQNTPYINTIPADEEIKSPGDQNIERKIRALIRWNSAVMVVRANMRDPSLGGHIGTFASAATLYDIGMNHFWRAKSNKFGGDLIYFQGHSAPGIYARAFLEGRLDEKQLDRFRQEVYPGGLSSYPHPWLMPKFWQFPTVSMGLGPMMATYQARFMKYLINRKLIKDENRKVWSFLGDGEIDEPEALGSIGLAAREKLDNLIYVVNCNLQRLDGPVRGNGKIIQELEGIFRGAGWNVIKVIWGSYWDPLLANDKSGLLVKRMNEAVDGEYQAFKAKGGLYVRDNFFGKYPELKNLVASYTDSDIWKLNRGGHDPHKVYAAYHKAINTKDRPTVILAKTIKGYGMGKSGESINTTHQQKKLGVDDLLYYRDRFDVPLTDEQVKNIEYFRPDENSEEIKYLKKRRLALGGYIPERSSFSKPIKTPSNDIFDFMKKSTGEKEMSTTMALVRMLTNLLRDKNVAPRLVPIIPDEARTFGMEGFFQKIGIYAHEGQKYEPEDSAQLSSYKEEKSGQVLEEGINEAGSMASWIAAGTSYSNHDIEMIPIYLFYSMFGFQRTGDFAWAAGDSQTRGFLIGATAGRTTLAGEGLQHQDGHSHLLASTIPNCVSYDPTFHYELATIFKEGLRRMHEKHENIFYYITTMNENYSHPEMPKDCEEGILKGMYKIKDFSKNKKNKIQLLGSGTILREMIEAAEILQNEYQVDSEVWSVTSFNELRRDGLETERYNLLNPGGEKKISYVEKCLGKTEGPILAASDYMRMNSDQIRPYINKSFYSLGTDGFGRSDTRKNLRKFFEVDKEHIVAYGLSILSNEQLIASKHAVDAIKKYKIDKDKPMPTKL

SEQ ID NO: 95805 - protein, 318 aa, Unknown
  Bacterial polypetide isolated from the Sargasso Sea
MSTEILMPALSPTMTEGNLSKWLIKKGDTVKAGDLIAEIETDKATMEVEAVDEGVVLDLLFKEGEANIPVNKAIAIIGDPNEKVEVKKEPPIEKVIEEKKIEKNIETKIENKKDDVIDTLSPKIEEDRNLSSEEITMRQALRDTMAEEMRKDNKVFILGEEVAEYQGAYKVTQGLLQEFGKERVLDTPISEHGFTGLAVGAAFKGLRPILEFMTFNFSMQAIDQIINSAAKTLYMSGGQINCPIVFRGPNGAAAQVAAQHSQDFSSWYSQVPGLKVIAPSTPYNAKGLLRSAISDPNPVIFLENEILYGLKGPVNNDI

SEQ ID NO: 95806 - protein, 251 aa, Unknown
  Bacterial polypetide isolated from the Sargasso Sea
MAAKKVTKKSTDENHDLIKFYRDMLLIRRFEEKAGQLYGMGLIGGFCHLYIGQEAVVVGLEAAARDGDKRITSYRDHGHMLACGMDPNGVMAELTGRSGGYSKGKGGSMHMFSKEKNFYGGHGIVGAQVPLGAGLAFADRYRENNCVTFTYFGDGAANQGQVYETFNMAALWKLPVIFVIENNQYAMGTAQERSTSSPEIYTRGEAFGIKGEAVDGMDVIAVKTAGDKAADYCRAGKGPYILEIKTYRYRG

SEQ ID NO: 95807 - protein, 868 aa, Unknown
  Bacterial polypetide isolated from the Sargasso Sea
MQNPDFEKEFQEWLEALENLLISDGKEYTEELLRALYTEARLKGIQIPELDNPPFKNTVHSDEEHPYPGNLEYEEKIRHFIRWNSLLTVLKANKEADLGGHISTYSSAATLYEVGFNHFFRGSDKSLGDLIYFQGHSSPGIYARSFLEDRISAKQLNNFRQEIKGEGLSSYPHPWLMPDYWQFPTVSMGLGPIFGIFQAHIMRYLEKRGLIKPIDNRKVWVFCGDGEMDEPESMGSISLAGRENLNNLVFVINCNLQRLDGPVRGNSKIITELAKQFSGAGWNVVHLIWGRKWDELINNDEDGLLQKIMNETVDGEYQNYKAKGGKYTRENFFGKNPEVLKMIESLSDKEVEDLNRGGHDPTKIYNAYRLAYEEKDRPTVILAFTIKGYGIGSRQADNTAHQVKKLTKENLEDFIDKFDLPIKKENLDNPNFLNLNKNKKVKEYLLSRREELGGLLPSRKVSKKKLIAKKESFIDFDKKLDREQSTTMVFVRLLTKLLRDAAIGSRVVPIVPDEARTFGMDALFRQFGIYSSEGQKYEPEDADKVMFYRESESGIMLEEGINEAGAFSAWLALATSYSNNNLPMIPFYIFYSMFGFQRIHDLAWAAGDSRARGFLLGATSGRTTLNGEGLQHQDGHSHILASTIPNCRSYDPCYSYELSAIIQEGINDMYVNGNDKYYYITLMNENYFHPAKPKKLKNEDILKGAYKLKENKNINLRILASGVTLNFALEAEKELKDYGINADIWSITSFNELYREGIEIERENRLNSTSKKSYVEICFSDEIPTIAVSEYQKAYPNQIREWINGEYKVLGTDGFGRSDTREELRNFFEISKEHIVLNSLLLHGKKKEAEKFIKDSGMVLNKEAPWKS

SEQ ID NO: 95808 - protein, 805 aa, Unknown
  Bacterial polypetide isolated from the Sargasso Sea
IKSIVRWNAMAMVTKANKETPGIGGHISTYASAATLYEVAFNHIFKGSDHSSGQDLVFFQGHASPGIYARAYLEGRLSKENLDNFRRELAEGGGLSSYPHPYLMPEFWQFATVSMGLGPMMAVYQARFMRYMIDRGFVENTGRKVFAFLGDGEMDEPESTGALTLASRENLDNLIFVVNCNLQRLDGPVRGNSKVIQELEGAFRGAGWNVIKVIWGSDWDELIEKDVSGTFLKRIDEIVDGDLLKYVVEGGAYFREHFFGKYPELLKLVEHLTDEELGKMRPGGHDPVKVYAAYQEAINHKGGPTVILARTIKGYGLGEAGEGRNITHNQKKLNENELLYFRDRFSVPLSDGDASKAPFYRFSKDSKEHKYLIEKRKSLGGFLPERKNNPKKLTVPEVSIFEEMLSGTGDREVSTTMSFIRLLTILTKDKTIGKHVVPIVPDEARTFGMDPLFRQLGIYAHRGQLYDPVDSDQFLYYKEAKNGQILEEGINEAGAVSSFIASGMSYSNHGIHMIPFYIYYSMFGFQRVWDFIWAAGDMRAKGFLLGGTAGRTTLNGEGLQHQDGHSHLAAASTPNVKAYDLAYAYEIAVVVHRGMQEMVEENKDVIYYLTLENENYVHPPIPDDVSDDIIKGLYKIHSTQKPTVRLLGSGPLMGEALAAAELLKKDWGVDPGIWNVTSFSELRRDAEEVERWNLLNPDKPSKRSHLEKSLSKHRVPTVAVSDYVKMVSEQIGPYVPGPYYSLGTDGFGRSETREALREFFEVDRHYIVLTAVRALAIEGVLNMDTVEKVMKKYNLDPEKPSPINV

SEQ ID NO: 95809 - protein, 302 aa, Unknown
  Bacterial polypetide isolated from the Sargasso Sea
MPVEILMPALSPTMTEGKLFKWLKEEGDSIEPGDAVAEIETDKATMEVEAVDSGILQKILVAEETEGVPVNTPIALLLLDGEEDGRQSNNQGDIAPLVVDRPTFDSFVSQSDEGSPPKGQERLDVNTQTVREALRDAMAEEMRADDSVFVMGEEVAEYEGAYKVTQGLLKEFGDKRVIDTPITEHGFAGLGVGAAFGNLKPIIEFMTFNFAMQAMDQIINSAAKTLYMSGGQMGCPIVFRGPNGAASRVAAQHSQDLTSWFAHCPGLKVVAPWSAADAKGLLKAAIRDPNPVVFLENEVLYG

SEQ ID NO: 95810 - protein, 348 aa, Unknown
  Bacterial polypetide isolated from the Sargasso Sea
MARSSKSATKQRSSKSKKVKSAANNSFNDKLKDELLSYYRDMVLIRRFEEKAGQLYGMGLIGGFCHLYIGQEAVVVGMQAAIDSKSSVVTSYRDHGHMLACGMDPNGVMAELTGRVGGYSKGKGGSMHMFSREKNFFGGHGIVAAQVPIGTGLAFGHKYRDEKAVCLTYLGDGAINQGQVYESFNMAALWQLPCIYVIENNQYGMGTAVSRAAAGRELADRGAAYGIPGDKIDGMDVLEVKKAGERAVEHAISGKGPYILEMTTYRYRGHSMSDPAKYRTKDEVNKMRQERDPIDNVKEKLLLTGLEEKSLKDIDTSIRQIVSEAVEFAQTSPEPDPQELYTDVLVNN

SEQ ID NO: 95811 - protein, 344 aa, Unknown
  Bacterial polypetide isolated from the Sargasso Sea
MSTEILMPALSPTMTEGNLSKWLIKKGDTVKAGDLIAEIETDKATMEVEAVDEGVVLDLLFKEGEANIPVNKAIAIIGDPNEKVEVKKEVPTEKAIEEKKIEKIIETKIETKKDNVIDTKLPKIEENRNLSSEEITMRQALRDTMAEEMRKDNKVFILGEEVAEYQGAYKVTQGLLKEFGKERVLDTPISEHGFTGLAVGAAFKGLRPILEFMTFNFSMQAIDQIINSAAKTLYMSGGQINCPIVFRGPNGAAAQVAAQHSQDFSSWYSQVPGLKVIAPSTPYNAKGLLRSAISDPNPVIFLENEILYGLKGPVNNDINFSIPIGKANIEKEGNDLTIVTYSIM

SEQ ID NO: 95812 - protein, 749 aa, Unknown
  Bacterial polypetide isolated from the Sargasso Sea
MNLDLLVPDIGDFENVEIIEVLVKKGDKINKNDPVVTLESDKSSVEVPSNYEGTIENINVKVGDKVSKGDLILSLSSDKKDEEEEITKTVNEKIPPSTEKLIEEAETATKPDIKAETKVVEPKQIKQTRLINEVKMVSSNDDIDPVETKEWLDSLSAVLQNDGSERAHFLIKQLIDQSYKAGSKIPHTQTTPYVNTIPPEEEKRSPGDQNIERKLRSLIRWNAAAMVVRANKKYPELGGHIGTFASAATLYDVGMNHFWRAKNNKFGGDLVYFQGHSAPGMYARAFLEGRLNEKQLDRFRQEVKTGGLSSYPHPWLMPNFWQFPTVSMGIGPMLAIYQARFMKYLINRGLIKDEGRKVWAFLGDGEMDEPESLGAIGLAARENLDNLIFVVNCNLQRLDGPVRGNGKIIQELEGIFRGAGWNVLKVIWGSYWDTLLANDKTGHLVKIMNETVDGEYQAFKARNGLYVREKFFGKYPETTELVSSMSDTDIWRLNRGGHDPHKVYAAYDKAVNHKGSPTVIIAKTIKGYGMGKSGESVNTTHQQKKLDVDDLMYYRDRFDVPLTDAQVKNIEYFKPDENSEEIKYLKKRRIELGGFIPERTSYSKPIKAPSKDIFDFMKTSTGEKEMSTTMALVRMLTNLLRDKNVAPKLVPIIPDEARTFGMEGFFQKIGIYAHEGQKYEPEDSAQLSSYREEKSGQVLEEGITEAGSMSSWIAAGTAYTNHDVEMIPIYLFYSMFGFQRIGDFAWAAG

SEQ ID NO: 95813 - protein, 643 aa, Unknown
  Bacterial polypetide isolated from the Sargasso Sea
VLQNDGSERAHFLIKQLIDQSYKAGSKIPHTQTTPYVNTIPPEEEKRSPGDQNIERKLRSLIRWNAAAMVVRANKKYPELGGHIGTFASAATLYDVGMNHFWRAKNNKFGGDLVYFQGHSAPGMYARAFLEGRLNEKQLDRFRQEVKTGGLSSYPHPWLMPNFWQFPTVSMGIGPMLAIYQARFMKYLINRGLIKDEGRKVWAFLGDGEMDEPESLGAIGLAARENLDNLIFVVNCNLQRLDGPVRGNGKIIQELEGIFRGAGWNVLKVIWGSYWDTLLANDRTGHLVKIMNETVDGEYQAFKARNGLYVREKFFGKYPETKELVSSMSDTDIWRLNRGGHDPHKVYAAYDKAVNHKGSPTVIIAKTIKGYGMGKSGESVNTTHQQKKLDVDDLMYYRDRFDVPLTDAQVKNIEYFKPDENSEEIKYLKKRRIELGGFIPERTSYSKPIKAPSKDIFDFMKTSTGEKEMSTTMALVRMLTNLLRDKNVAPKLVPIIPDEARTFGMEGFFQKIGIYAHEGQKYEPEDSAQLSSYREEKSGQVLEEGITEAGSMSSWIAAGTAYTNHDVEMIPIYLFYSMFGFQRIGDFAWAAGDSQARGFLIGATAGRTTLAGEGLQHQDGHSHLLASTIPNCISYDPTFHYEL

SEQ ID NO: 95814 - protein, 1012 aa, Unknown
  Bacterial polypetide isolated from the Sargasso Sea
MSEKLLVPDIGDFENVEVIELLVKEGQKIAKNDPVVTIESDKSSVEIPSTLSGIIETIKVKVGDKVSKGDLILNILGSNEEQSTTKTIPKDTENLIKEAEKSLEKKQEQIIHTNNIERKKPEIIQVVNDSDIDPLETSEWLESLTAVIEKDGNQRAHYLIKELINKAYMEGANIPYTQNTPYINTIPVNEEKKSNGDQNIERRIRSLIRWNSAAMVVRANKKFPELGGHIGTFASAATLYDVGMNHFWRAKNNKFGGDLIYFQGHSAPGMYARAFLEGRLNEKQLDSFRQEVNPGGLSSYPHPWLMPNFWQFPTVSMGLGPMLAIYQARYMKYLINRGLIKDEGRKVWAFLGDGEMDEPESLGAIGLAAREKLDNLIFVINCNLQRLDGPVRGNGKIIQELEGIFRGAGWNVIKVIWGSYWDPLLANDKTGHLIKVMNETVDGEYQAMKARDGAYVREKFFGKYPETKELISSLSDKDIWRLNRGGHDPHKVFAAYDKASKNIGSPTVVIAKTIKGYGMGKSGESVNTTHQTKKLDIDDLMYYRDRFDVPLTDKQVQNIEYYKPDQNSPEIKYIKERRLQLGGFIPERTTYAKPIKAPPKNIFDNMKESTGKKEMSTTMALVRMLTNLLRDKNVASRLVPIIPDEARTFGMEGFFQKIGIYAHEGQKYEPEDSAQLSSYREEKSGQVLEEGINEAGAMSSWIAAGTSYTNHDIEMIPIYLFYSMFGFQRIGDFAWAGADSQSRGFLIGATAGRTTLAGEGLQHQDGHSHLMASTIPNCKSYDPTFHYELATIFREGLKRMHEKKENIFYYITTMNENYPHPAMPTEKSCEEGILKGMYKIKEFNKYKKTKIQFLGSGTILREMIAGAEILQKEYQIDSEVWSVTSFNELRRDGLEVERYNLLNPEKEPKKSYVESCLGKTEGPILAASDYMRMNSDQIRPYINKSFYSLGTDGFGRSDTRKNLRKFFEVDKEHVVAYGLSVLAKEQLIASKYAQEAIKKYQIDKDKPMPTKL

SEQ ID NO: 95815 - protein, 305 aa, Unknown
  Bacterial polypetide isolated from the Sargasso Sea
LIRRVEEKAGQLYGMGLIQGFCHLYIGQEAVVTGMRAASNKEKDSIITSYRDHGHMIAAGMDPGGVMAELLGRYDGYSKGKGGSMHMFSIKNKFYGGHGIVGAQVPIGTGLAFAHKYKSDGGVCITYYGDGAANQGQVYESFNMAALWKLPVVYVIENNRYGMGTSVSRASATQELFSRGSSFGIPGEKVDGMDVLAVKEAGEKALNYAREGNGPIILGMQTYRYRGHSMSDPAQYRTREEVSKVRAERDPIDKLRDYISESNSLTSDEIKVIDTEVKEVISAAANFAQESPRPPLTELYTDVII

SEQ ID NO: 95816 - protein, 888 aa, Unknown
  Bacterial polypetide isolated from the Sargasso Sea
MSEDMLQDLDPLETQEWVDALQAVLEQEGPERAHFLLEKLIDKARRNGTHLPYTATTAYLNTIPAGQEPHMPGNQEMERRIRAIIRWNALAMVLRGSKKDLELGGHISSFASSATIYDVCFNHFFRAPNEKDGGDLVYFQGHIAPGIYARSFLEGRLTEDQLANFRQEVDGKGLSSYPHPKLMPDYWQFPTVSMGLGPIQAIYQARFLKYLTDRGLKDCSEQTVYCFLGDGECDEPEALGAIGLAAREELDNLVFIINCNLQRLDGPVRGNGKIIQELEGEFRGAGWEVVKVIWGRYWDPLLARDTSGKLLQLMEETVDGEYQNCKAKGGAYTREHFFGKYPETAEMVANMSDDDIWRLNRGGHDPVKVYAALDHARKTKGRPTVILAKTVKGYGLGDAGEGKNIAHNVKKMGIESIRYFRDRFNIPIPDDQLEDLPFYHPGPDSEEVKYMMSRRAALHGSVPQRREKFSEELEVPSLKIFDSILAGSNGREISSTMAFVRVLTALLKDKKIGKNIVPIIPDEARTFGMEGLFRQVGIYAHEGQKYVPQDSDQVAYYREDKTGQVLQEGINELGAMSSWVAAATSYSVNDTPMIPFYIYYSMFGFQRIGDMAWAAGDMRARGFLVGGTSGRTTLNGEGLQHQDGHSHVLANTIPNCITYDPTYGYEIAVIVQDGIRRMYGEKQEDIFYYLTTMNENYIQPEMPEGAEEGIVKGIYKLETVSGSGKGKVQLLSCGTILEQTRKAAQALAKDFGITADVFSVTSFNELTRDGQAAERWNMLHPTQTPKQAYISQVISSDAPAIAATDYMKIYGEQLRAFMPTDYKVLGTDGFGRSDSRDNLRHHFEVDAKFIVIAALKSLVDRKELPVDVLANAIKEYGIDADKINPQYA

SEQ ID NO: 95817 - protein, 673 aa, Unknown
  Bacterial polypetide isolated from the Sargasso Sea
MPFSANTPYINTIPVSRQAPIPGDQDLEHRIRSYTRWNAIAMVLRAGKDTNVGGHIASFASAATLYDVGYNHFWHAPSAEHGGDLVFVQGHSSPGVYSRAFLLGRLSENQLDNFRQEVGGEGISSYPHPWLMPDFWQFPTVSMGLGPIMAIYQARFMKYMQARGIAKTEGRKVWAFLGDGETDEPESLGAIGMAGRERLDNLVFVINCNLQRLDGPVRGNGKIIQELESEFRGAGWNVIKVVWGSRWDALFQRDKSGALMRRMMEVVDGEYQTYKSESGAFVREHFFNTPELKALVADWSDEDVWNLNRGGHDPHKIYAAFSEASNTKGQPTVILAKTIKGYGMGEAGQAMNITHQQKKLHVDQLKKFRDQFRLPISDEDIVNVPYLKFEEGSKELEYMRARRQELGGYLPARRQKAESLPVPALDAFEPLLKGTGEGREISTTMAFVRILNILLKDKALGKRIVPIVPDESRTFGMEGLFRQIGIWNQDGQKYIPEDSDQLMFYRESESGQILQEGINEAGGMCDWIAAATSYSTHGEIMIPFYIFYSMFGFQRIGDLAWAAGDMRSRGFLLGGTAGRTTLNGEGLQHEDGHSLLWAASVPNCISYDPTFGYELAVIMQDGLRRMVADQEDVYYYITVMNENYEHPAIPQGDAVAADIIKGMYSFRKADANQ

SEQ ID NO: 95818 - protein, 448 aa, Unknown
  Bacterial polypetide isolated from the Sargasso Sea
MSKWLVKEGDKVNSGDVIAEIETDKATMEIESADEGTVTTLLIKEGTESVPVNSPIAVLDGNNDQLTKKDDDIKTKKNSDNINKILDVDTLDNEKKYKEIENLNPNIIPKNQKNKNLELSNYKSITMRQSIRDAIAEEMRKNESVFVIGEEVGEYEGAYKVTQGLLDEFGPSRIFDTPISEHGFTGLAVGSAFKGLRPIVEFMTFNFSMQAIDQIINSAAKTLYMSGGQINCPIVFRGPNGAASQVAAQHSQDFSSWYSHCPGLKVVAPSNAFNAKGLLKSSIEDDNPVIFLENEILYNQKMDVPEDTNFDIPLGVANIALEGKDATIVTYSIMVSKSLEAAEILKKDYDLNIEIIDLQTIRPLDSDTILNSVKKTNRLITVEESWPFASVGSEIVNIVQREIFDYLDSPIIKVNSADVPMPYSSVLEKKYLPQVQDIISAIKKVCYI

SEQ ID NO: 95819 - protein, 453 aa, Unknown
  Bacterial polypetide isolated from the Sargasso Sea
MTTEILMPALSPTMEEGTLAKWLVKEGDTVSAGDILAEIETDKATMEFEAVDEGTISKILVSEGSEGIKVNSPIAILSDDGENISNLEVSDVSKEKLASADTKNSESKVKTSITEAISEPEWTDATEVSQQTVREALRDAMAEEMRRDEKVFLMGEEVGEYQGAYKVSQGLLEEFGSKRVIDTPITEHGFAGIATGASFAGLRPIVEFMTFNFAMQAIDQIVNSAAKTLYMSGGQMGAPMVFRGPNGAAARVGAQHSQDFTSWYAHIPGLKVAAPYSASDAKGLLKSAIRDDNPVIFLENEILYGRSFDMPDIEDYIVPFGKARIWRKGTDITIVSFGIGMQYALKAAEELAAQGIEAEVLDLRTIRPIDYETIIQSVSKTNRCVTVEEGFPVASIGNHLSAYVMEHAFDYLDAPIINCTGKDVPMPYAANLEKLALVTTEEVVSAAKKVCYR

SEQ ID NO: 95820 - protein, 1013 aa, Unknown
  Bacterial polypetide isolated from the Sargasso Sea
MSLKLLIPDIGDFDNVEIIEILVKKGQKINKNDPVVTLESDKSSVEVPSNYEGEVESISVKIGDKVSKGDLILTLASSNEKNNEKVPPVTEKIIQEAESSISEKNYKINNQTEKQIAKKPKQETKILVNNKDIDPLETKDWLDSISAVLKKDGKLRAQFLIKELIEHSYKQGSDLVLSRNTPYINTISPDEETKSPGDQNIERKLRSLIRWNAAAMVVRANKKFPELGGHIGTFASAATLYDVGMNHFWRAKNNKFGGDLIYFQGHSAPGMYARAFLEGRLNEKQLDKFRQEVKKGGLSSYPHPWLMPNFWQFPTVSMGLGPMLAIYQARFMKYLINRGLMKDEGRKVWCFLGDGEMDEPESLGAIGLAARENLDNLIFVVNCNLQRLDGPVRGNGKIIQELEGIFRGAGWNVIKVIWGSYWDPLLANDKTGHLIKIMNETVDGEYQAFKARNGLYVREKFFGKYPETIELVSSMSDKDIWRLNRGGHDPHKVYAAYEKAVKNTGSPTVIIAKTIKGYGMGKSGESVNTTHQQKKLDIDDLLYYRDRFDVPLNDEQVKNIEYFKPEENSEEIKYLKERRMELGGFIPERNSYSKPIKTPNKDIFDFMKVSTGDKQMSTTMALVRILTNLLRDKNVAQKLVPIIPDEARTFGMEGFFQKIGIYAHEGQKYEPEDSAQLSSYREEKGGQVLEEGITEAGSMSSWIAAGTSYTNHDIEMIPIYLFYSMFGFQRIGDLAWAAGDSQTRGFLIGATAGRTTLAGEGLQHQDGHSHLISSTIPNCVSYDPTFHYELAVIFREGLRRMHEKNENIFYYITTMNENYPHPEMPKDKNCEEGILKGIYKIKEYSKYKKTKIQLLGSGAILREMMAAAEILQNEYQIDSEIWSVTSFNELRRDGLEVERYNLLNPTGEKKVAYLEKCLGKTEGPILAASDYMRMNADQIRPYISKSFYSLGTDGYGRSDTRKNLRSFFELDKEHIVAYGLSVLANEQLVASKYAEEAIKKYNIDKNKPMPTKL

SEQ ID NO: 95821 - protein, 325 aa, Unknown
  Bacterial polypetide isolated from the Sargasso Sea
MREIQFREAICEAMSEEMRLDETIYLMGEEVAEYNGAYKASKGMLDEFGEKRVIDTPISELGFAGIGVGSTMTGNRPIIEFMTFNFALVGIDQIINNAAKIRQMSGGQFPCPIVFRGPTASAGQLAATHSQAFESWYANCPGLKVIVPSNPYDAKGLLKSAIRDDDPVIFMESEQMYGDKGQVPEEEYLIPIGEAEVKKEGSDVTVVSFGKILKEVFKASEKLAEDNINIEIIDLRTVRPLDIDTIINSVKKTNRLVILEEAWPFGNVSTEITYQVQNKALDYLDAPIIKINTADTPTPYSPVLLKEWLPNYNDVIKAVNKVLYK

SEQ ID NO: 95822 - protein, 888 aa, Unknown
  Bacterial polypetide isolated from the Sargasso Sea
YRVCFNKDDIDPVETKEWVESLTAVVQQEGSERANFLIKQLIDHAYRQGSKIPYTQSTPYINTIPPEEEKKSPGDQNIERRLRSLIRWNAAAMVVRANKKFPELGGHIGTFASAATLYDVGMNHFWRAKSDNFGGDLIYFQGHSAPGMYARAFLEGRLNEKQLDSFRQEVNKGGLSSYPHPWLMPNFWQFPTVSMGLGPMLAIYQARFMKYLINRGLIKDEGRKVWAFLGDGEMDEPESLGAIGLAAREKLDNLIFVVNCNLQRLDGPVRGNGKIIQELEGIFRGAGWNVIKVIWGSYWDSLLANDKSGHLVKLMNETVDGEYQAFKARDGLYVREKFFGKFPETFQMVSAMSDKDIWRLNRGGHDPHKVYAAYDKAVKNIGSPTVIIAKTIKGYGMGKSGESVNTTHQQKKLDVDDLMYYRDRFDVPLSDQQVKNIEYFKPDENSPEIKYLKQRRYDLGGFIPERTTFSKPIKTPEKNIFDTMTKSTGEKEMSTTMALVRMLTSLLRDKHVAKKLVPIIPDEARTFGMEGFFQKIGIYAHEGQKYEPEDAAQLSSYREEKSGQVLEEGINEAGAMSSWIAAGTSYTNHDIEMIPIYLFYSMFGFQRTGDFAWAAGDSQARGFLIGATAGRTTLAGEGLQHQDGHSHLLASTIPNCVSYDPTFHYELAVIFREGLKRMHENNENIFYYITTMNENYSHPEMPKGCEDGILKGMYRIKDFSKHKKNKIQLLGSGAILREMISAAEILQNDYEIDSEIWSVTSFNELRRDGLEVERYNLLNPDKEKKITYLEKCLGKTEGPILAASDYMRMNSDQIRPYVSKSFYSLGTDGFGRSDTRKNLRKFFEVDKGHIVTYGLSILANEQLIASKYVKDAIKKYKIDQTKPMPTKL

SEQ ID NO: 95823 - protein, 439 aa, Unknown
  Bacterial polypetide isolated from the Sargasso Sea
EGNLTKWLVKEGDQVKAGDVIAEIETDKATMEVEAVDEGTIEKLLFKEGDQSILVNSPIAILSNADSETKKNKLENKKINNDNLKSKNKNLIYEDKAKTQVINKEKENNKENKNIITMRQAIRDAMAEEMRKNEAVFVIGEEVAEYQGAYKVTEGLLDEFGSKRVIDTPISEHGFTGLAVGSAFKGLRPIVEFMTFNFSMQAIDQIINSAAKTLYMSGGQINCPIVFRGPNGAASQVAAQHSQDFTSWYAHCPGLKVVAPSNAYNAKGLLKSAIDDDNPVIFLENEILYGYKDFVPNDTNFEIPLGVAKIALEGSDATIVTYSIMVSKSLEAAKILKEKYDVNVEIIDLQTIKPMDKKTILESVKKTNRLVTVEESWPFASVGSEIVNFVQNEIFDYLDSPIKKVNSADVPMPYSSVLEKKYLPQVNDIILAIKEVCYI

SEQ ID NO: 95824 - protein, 892 aa, Unknown
  Bacterial polypetide isolated from the Sargasso Sea
EKNNLANSAGDIDPVETKEWIESLSSVLENDGSKRAQFLIKQLIEHSYKQGSDLVLSRNTPYINTIPPEKEVKSTGDQNIERKIRSLIRWNAAAMVVRANKKFPELGGHIGTFASAATLYDVGMNHFWRGKNNKFGGDLIYFQGHSAPGMYARAFLEGRLSEKQLDSFRQEVEIGGLSSYPHPWLMPKFWQFPTVSMGLGPMLAIYQARFMKYLINRGLIKDQNRKVWAFLGDGEMDEPESLGAIGLAAREQLDNLIFVINCNLQRLDGPVRGNGKIIQELEGIFRGAGWNVIKVIWGSYWDSLLAKDKTGHLVKIMNETVDGEYQAYKARNGLYVRKNFFGKYPETEKLVSSLSDKDIWRLNRGGHDPHKVYSAYSEAIKNTGSPTVIIAKTIKGYGMGKTGESVNTSHQQKKLDIDDLMYYRDRFDVPLTDKQVQEIQYFRPNENSDEIKYIKDRRIKLGGFIPERTSYSKPIKAPPKDIFDFLKESTGKKEMSTTMALVRLLTNLLRDKNVSPRLVPIIPDEARTFGMEGFFKKIGIYAHEGQKYEPEDAENLFSYREDKKGQVLEEGINEAGSMSSWIAAGTAYSNHDIEMIPIYLFYSMFGFQRTGDFNWAAGDSQARGFLIGATAGRTTLAGEGLQHQDGHSHMLASTIPNCKSYDPTFAYELAVIFREGLKRMHEKNENVFYYITTMNENYPHPAMPKDKNCKEGILKGMYKIKEFDKYKKTKIQLMGSGTILREVMSAAEILQKDYQIDSEIWSVTSFNELSRDGMEVERYNLLNPDKPQRVSYVEQCFKKKEGPILAASDYMRSHSDQIRQYTKKNFYSLGTDGFGRSDTRKKLRKFFEVDKEHIVAYALSVLSKEQLIPTKHAKEAMIKYKIDAEKPFPTKI

SEQ ID NO: 95825 - protein, 229 aa, Unknown
  Bacterial polypetide isolated from the Sargasso Sea
LPHGFEGQGPEHSSARLERFLQLCSNDNMQVMNCTTPANYFHALRRQMHRDFRKPLIIMTPKSLLRNKYCVSQIDDFSKKNSFHRVLWDHSMDPKTKGFIKLKKNNEIKKVILCSGKIYFDLLTAREKLKKDDVILFRIEQLYPFPAKSLVKEIKPFAQNAKFYWCQEEPKNMGAWLLVRDYIQWTLDYIKAKNREISYIGRNPDATPATGYAKRHLAEQKEIIDIVFK

SEQ ID NO: 95826 - protein, 358 aa, Unknown
  Bacterial polypetide isolated from the Sargasso Sea
LWKIGYEYMHISNPTERKWFRDRVEKDENALQFTKNGKEAILNKIIQAEGFEKFLHTKYVGTKRFGLDGAESLIPALEQIIKIGGQNKVKEVKIGMSHRGRLNVLANVLQKSYKRIFNEFAGEIDSTSDDDSAGDVKYHLGASSDRAFDGNSVHVSLTDNPSHLEAVNPVVLGQTRAKQFFHNDKERKKVIPILIHGDASFAGQGIVSECFAMSGLPGHNTGGTIHFIINNQIGFTTSPRFARSSPHPSDVAKMVDSPIIHANGDDPESVVYAARIAAEFRLKFNRDVVVDLVCYRRFGHNEGDEPSFTQPLMYKKIKSHLSTVKIYGNKLVNEKTISSEDLNNQIKKFKDLLDDQYK

SEQ ID NO: 95827 - protein, 295 aa, Unknown
  Bacterial polypetide isolated from the Sargasso Sea
TIHGKVNYYINAYRNFGHTAADLDPLQLAQKDIHIDLIYAEKLLEGISPEERVGNDYPKGSKNKIFLKELKESITKKYSSNIGLEFSHISDERERNWIIDRFENNDYKKINLNEKIFVLKRLISARGLAKYLSAKYPGMKRFGIDGCESLIPLIDTLIEQTSKNSAEQICFGMAHRGRLNLLINVLGKKPKDLFAEFEENYDLKGSSTGDVKYHLGFSSNIHTTSGDVHVSLINNPSHLEIVDPVVVGSVRARQDRLNDRERNKVVPILIHGDASFSGQGVVMETLQMSQTRGYG

SEQ ID NO: 95828 - protein, 298 aa, Unknown
  Bacterial polypetide isolated from the Sargasso Sea
KKDIVIDLIGYRRSGHNEADDPSSTQPVMYKKIKQHPSVLKSYKDKLMQNNDITSEEFDEFKKFYRSSIEKDESVALNLSKIKNDDLWFEWDQFIDARWDENTDTTVKQDQLIDDARTIADIPSGFVLQKKVKNIIKQRIDMAEGKCEFNWGFAEIAAYSSLLREGYPIRFSGQDIRRGTFDHRHAVMFDQEDGRTYYPLNKFAEKGNTNIGIYDSILSEEAVLGFEYGYSATWPTGLVIWEAQFGDFSNGAQVVIDQFIASAQHKWERLSGLVLLLPHGYEGMGPEHSSARIERFFN

SEQ ID NO: 95829 - protein, 255 aa, Unknown
  Bacterial polypetide isolated from the Sargasso Sea
GAQVIIDQFISSGERKWLRASGLVLLLPHGFEGQGPEHSSARLERFLQLCANDNMQVMNCTTPANYFHALRRQMHRDFRKPLVIMTPKSLLRNKYCVSQIDDFSKKNSFHRVLWDHSMDPKTKGFIKLKKNNEIKKVILCSGKIYFDLLLAREKLKKDDVILYRIEQLYPFPAKSLVKEIKPFAQNAKFYWCQEEPKNMGAWLLVRDYIQWTLDYIKAKNREISYIGRNPDATPATGYANRHFSQQKEIINKVFK

SEQ ID NO: 95830 - protein, 294 aa, Unknown
  Bacterial polypetide isolated from the Sargasso Sea
NGKDAILNKLIQAEGFEKFLHTKYVGTKRFGLDGGESLIPALEQIIKIGGQFKIKEVKIGMSHRGRLNVLANVLQKSYKRIFNEFAGEISGNTKDSAGDVKYHLGASSNREFDGNSVHVSLTDNPSHLEAVNPVVLGQTRAKQFFHGDKERNKVIPILIHGDAAFAGQGVVSECFAMSGLPGHNTGGTIHIIVNNQIGFTTSPRFARSSPYPSDVGKMVDAPIIHVNGDNPEAVVYATRVATEFRLKFNRDVVIDLICYRRFGHNEGDEPSFTQPLMYKKIRSHPSTVNIYGEK

SEQ ID NO: 95831 - protein, 208 aa, Unknown
  Bacterial polypetide isolated from the Sargasso Sea
MSIAAQEIERFLQLCASENIQVCVPSSPKQIFHLLRRQAIRKMRTPLVVISPKSLLRNPMAVSNLGELTNGSFDCVIDDDIKKREAVKRLILCSGKVFYDLIEKKKEENREDIAVVRIEQLYPFPYDDLEEILTKYQNVQEFIWCQEEPLNQGAWFSHRHRIQRVLDRLSDGFEVSLVSRPAAAAPAVGLMKLHLQQQKDLVNEAIDK

SEQ ID NO: 95832 - protein, 163 aa, Unknown
  Bacterial polypetide isolated from the Sargasso Sea
PLVVISPKSLLRNPMAVSNLDELTNGSFDCVIDDDIKKREAVKRLILCSGKVFYDLIEKKKEENREDIAVVRIEQLYPFPYDDLEEILTKYQNVQEFIWCQEEPLNQGAWFSHRHRIQRVLDRLSDGFEVSLVSRPAAAAPAVGLMKLHLQQQKDLVNEAIDK

SEQ ID NO: 95833 - protein, 326 aa, Unknown
  Bacterial polypetide isolated from the Sargasso Sea
VLQKSYKRIFNEFTGEISSKSKDDTGDVKYHLGASSNREFDGNSVHVSLTDNPSHLEAVNPVVLGQTRAKQFFHKDRERKKVIPILIHGDAAFAGQGVVAECFAMSGLPGHNTGGTIHIIINNQIGFTTSPRFARSSPYPSDVAKMVEAPIIHVNGDDPEAVVYAARIATDFRLKFNRDVVIDLICYRRFGHNEGDEPSFTQPLMYKKIRSHPSPVKVYGEKLIHEKSISKEYLDNSIYNFKNLLDEQFKNAKDYKPKIEWFEGTWSRYRPERGKDKRGVTGSDINDLENISNKINTIPKEINVHKTIKKIIDNRKLSVSNGKKEI

SEQ ID NO: 95834 - protein, 200 aa, Unknown
  Bacterial polypetide isolated from the Sargasso Sea
QVMNCTSPANYFHALRRQMHRSFRKPLIIMTPKSLLRNKYCVSNLEDFNKKNTFHRVLWDHAIDPKSKGFIKLKESSKIRKVILCSGKVYFDLLDAREKLKRDDVVMYRIEQLYPFPAKALVKELKPYSKNAEFFWCQEEPKNMGAWFSVRDYIQWTLDTLKANNNKISYIGRSPDATPATGYAKRHNSQQQEIINKVFD

SEQ ID NO: 95835 - protein, 340 aa, Unknown
  Bacterial polypetide isolated from the Sargasso Sea
FTKNGKEAILNKLVQAEGFEKFLATKYVGTKRFGLDGGESLIPALEQIIKIGGQNQIKEVKIGMSHRGRLNVLANVLQKSYKRIFNEFAGEVSSDSEESAGDVKYHLGASSDRQFDGNSVHVSLTDNPSHLEAVNPVVLGQTRAKQFFHKDKERNKVIPILIHGDAAFAGQGVVAECFAMSGLPGHNTGGTIHIIVNNQIGFTTSPRFARSSPYPSDVAKMVEAPILHVNGDDPEAVVYATRIATEFRLKFNRDVVVDLICYRRFGHNEGDEPSFTQPLMYKKIRAHPSVYKIYGNKLVNENSITQNLLDQNVKGFKDLLDEQYKSAKDYKPKIEWFEGS

SEQ ID NO: 95836 - protein, 303 aa, Unknown
  Bacterial polypetide isolated from the Sargasso Sea
ANGDDPEAVVYAARIATEFRLKFNRDVVVDLICYRRFGHNEGDEPSFTQPLMYEKIRSHPSTTKVYGKKLVEENVISSESLDNSIKTFKNLLDDQFKNAKDYKPKIAWFEGTWSAYKPEKGKDKRGVTGADTKKLLEISEKINSSFDELNLHKTIVKILNNRKEAVKSGSNIDWSTAEALAFGSLLEEGYPVRLVGQDSGRGTFSQRHSVLRNQKDNTRYVPLNNISNNQKQFEVVDSFLSELAVLGFEYGYSLVEPNTLTLWEAQFGDFANGAQVVIDQFIASGERKWRRASGLVMLLPPWI

SEQ ID NO: 95837 - protein, 210 aa, Unknown
  Bacterial polypetide isolated from the Sargasso Sea
MCGQDNWIVANCSTPANYFHILRRQVHRDFRKPLVLMTPKSLLRHKLCTSKVDDFTNGSSFHRVLWDDAEKGNSTTNLAKDIEIKRVVMCSGKVYFDLLEERDARGINDIYLLRFEQFYPFPAMSAVKELERFQNAEMIWCQEEPKNQGAWSFMEPNIEWVLSRMNAKSKRPIFVGRPASASPATGLASQHKEQQKMLIDEALNLKETKK

SEQ ID NO: 95838 - protein, 284 aa, Unknown
  Bacterial polypetide isolated from the Sargasso Sea
AKKKSNRNESTSQPDSVKQVSVLQLINAYRFRGHRNANLDPLNQYKRPQVPELDPSFHDLFESDLDTVFNTGSLQGVENATLREILKIVRETYCENVGAEYMHIVETAEKRWIQQQLEPSKENVLANERRKQLLRCIVAAGSLERYLHKKYVGQKRFSLEGGESTIALLDTVVEECGKHGIKECVVGMAHRGRLNVLVNIIGKHPSDLFDEFEGKGRPENLSGDVKYHLGYSSDIQTPSGPVHLTLAFNPSHLEIIDPVVEGSVRARQDRRRDSGRNEVLPLIL

SEQ ID NO: 95839 - protein, 251 aa, Unknown
  Bacterial polypetide isolated from the Sargasso Sea
SINEIMSKLRKVYCSTIGAEFMHISDPTEKVWFRERMEKEENQINFTNNGKKAILKTIIKAEGFEKFLAKKFIGTKRFGLDGGESLVPALEQIIKRGGQLGVKEIKIGMPHRGRLNVLANVLQKSYKRIFNEFAGELDSKSEDSAGDVKYHLGASSNREFDGNSVHVSLTDNPSHLEAVNPVVLGQVRAKQFYHNDKQRRQVIPILIHGDAAFAGQGVVAECFAMSGLKGHNTGGTIHIIVNNQIGFTTSP

SEQ ID NO: 95840 - protein, 308 aa, Unknown
  Bacterial polypetide isolated from the Sargasso Sea
VSNLIGAYRQRGHMFSKTNPVRPRREHEGPIVLENFGLSDSDMDTEFHAGERIGLGSATLREIHEFLEQTYCGSIGVEYKFMRTIEIIEWLEQKMESCRNTPNFSREEKIDLLRKTNEAVAFENFLHTKFVGQKRFSLEGGESIIPALDTVVEFGAELGIQEFVIGMAHRGRLNVLANILGKTYNDIFAEFEGKGFGEDIFAGDVKYHMGYSSDKKVRNGKIVHLSLTPNPSHLEAVNPVVEGISRAKIDHYHEGNAKKLVPILIHGDHSMAGQGIVYEVLQMSKLPGYGTGGTVHLVINNQVGFTAD

SEQ ID NO: 95841 - protein, 175 aa, Unknown
  Bacterial polypetide isolated from the Sargasso Sea
DQGSGDVKYHIGASSDRSFGGNIIHVSMAANPSHLEAVNPVVAGKIRAKQTIIQDKNNSKVSGLLIHGDAAIAGQGIVAETFTMSQLNGYRIGGIIHFIINNQIGFTTSPQYSRSAPYSSEIGKVVQSPIFHVNGDDPEAVVLASRAATEFRNTFKKDTLVDMFCYRKHGHNIHL

SEQ ID NO: 95842 - protein, 310 aa, Unknown
  Bacterial polypetide isolated from the Sargasso Sea
KHKNPKDIYANQLFKEGIINLNFVKEIENSYRNSLESDLEESRKYIKTFVAPFMNKYWEKFNISGEIDLDKIIETKVSIEELTKVAKSITSLPKNKNFLRKIQRIINERKLMFFEKGELDWAMGEMLAYGTLLNEGYNVRLSGQDVQRGTFSHRHAITKSEDSEEEINLLNNLDNDKQGFLSIFNSLLSEYAVLGFDYGYSMASPNTLTIWEAQFGDFSNGAQIIIDQYISSAEDKWKLQNGIVMLLPHGYEGQGPEHSSARIERFLQLCGDDNMILANCTLPSNFFHLLRRQIHAEYRKPLIVFTPKSL

SEQ ID NO: 95843 - protein, 39 aa, Unknown
  Bacterial polypetide isolated from the Sargasso Sea
VLGFEYGYSQADPKTLLIWEAQFGDFANGAQVMIDQFIS

SEQ ID NO: 95844 - protein, 152 aa, Unknown
  Bacterial polypetide isolated from the Sargasso Sea
DGSSFHRILGDDAERGLSDTQLVDDQKIRRVVLCSGKVYYDLLEERDKRKIDDVYILRIEQFYPFPAVTLSKELSRFKNADVIWCQEEPKNQGAWTYLEPNIERLLQKVNTKIKRPKYAGRPAAASPATGLAAQHKAQQLELIENALLKKGN

SEQ ID NO: 95845 - protein, 308 aa, Unknown
  Bacterial polypetide isolated from the Sargasso Sea
LNVLNNILQKPFRAIISEFMGNPSNPEETGGSGDVKYHMGSSSDREFDGANVHFTLNANPSHLEVVNPVVIGRVRAKQNQRNDKLRNKVLGLLIHGDAAFAGQGILAETFDFAELRSYKTGGTLHLIINNQIGFTTSPAYSRSSPYCTDVAKIVMAPIFHVNADDPESVVHVSRIATEFRQKFAADAVIDIIGYRRYGHNEGDEPSFTQPIMYRKIADHPFVTKIYADKLIKEKKITEEQAKRVYDNRNQFLEEEFQAGSNYLPNKADWLEGKWTGLKKAPGLEERRGITGVTIDKIKKIGEILTSVP

SEQ ID NO: 95846 - protein, 314 aa, Unknown
  Bacterial polypetide isolated from the Sargasso Sea
PNPRDIYASKLKDQGIINDDHVSKIELEYFSKLEAELTDSKKKQKTNITPFMQEVWEGFTRVDEKKMLEDYKTSSVKKDILNVARSIVSLPNKPFLRKIIKLFDSREKLIFENGKVDWAMAELLAYGTLLNEGFNVRISGQDVERGTFSHRHAVLKSEDSEEEYLPLNNVDSINKGLFRIYNSPLSEYGVLGFDYGYALASPNCLTIWEAQFGDFSNGAQIIIDQYISSAEDKWKLQNGIVLYLPHGYEGQGAEHSSARMERYLQLCAKDNMYAANCTTPSNLFHLLRRAMLTKFRKPLFYLLQKVFFVILSYL

SEQ ID NO: 95847 - protein, 282 aa, Unknown
  Bacterial polypetide isolated from the Sargasso Sea
YAARIATDFRLKFNRDVVIDLICYRRFGHNEGDEPSFTQPLMYKKIRSHPSPVNVYGEKLINQDSITKEFLDNSIKKFKELLNEQFKNAKNYKPKIEWFEGSWSRYKPERGKDKRGITGSDTKKLKEISERINVIPEQLNVHKTIQKILDNRKISVLNGKGIDWSTAEALAFGSLLEEGYPVRLVGQDSGRGTFSQRHSVLRNQLDNSRYIPLNNISKKQKNFEVVDSFLSELAVLGFEYGYSLVEPNTLTVWEAQFGDFANGAQVVIDQFVASGERKWSRA

SEQ ID NO: 95848 - protein, 135 aa, Unknown
  Bacterial polypetide isolated from the Sargasso Sea
EVVLDDSSQSESSIIKKIILCSGKVYYDLSAEKEKRKLLDAAIIRIEQLYPFPHEVLEATLAKYQNVTSITWCQEEPMNQGAWYSTQHNIRRAMQDNFPTLELRYAGRDASAAAAAGYPALHQSQLEKFINEALS

SEQ ID NO: 95849 - protein, 338 aa, Unknown
  Bacterial polypetide isolated from the Sargasso Sea
RSSPYPTDIALMVEAPIFLVNGDDPEAVVHAAKVATEYRQKFQKDVVLDIICYRRFGHNEGDEPMFTNPLMYKHIKKQKTSLSIYTERLVNDGLIPEGEIEDMKASFQAKMNDEFEAGRDYKPNKADWLDGRWSHLDRNKEDYQRGKTAISEETFFDIGKALSQPPKDYELHKTVARLLATKEKMFDSGKGFDWATAEALAFGSLLTEGFPVRLSGQDSTRGTFSQRHSGLINQSTEERYYPLNNIRKGQAKYEVIDSMLSEYAVLGFEYGYSLAEPNALVLWEAQFGDFANGAQIMFDQFISSGESKWLRMSGFDNVLPHGFEGQGPEHSSARLERF

SEQ ID NO: 95850 - protein, 264 aa, Unknown
  Bacterial polypetide isolated from the Sargasso Sea
HPNPRDIYAGKLIEQGIINKAYISKIESDYFESLEEELDDSKKKDKTKITPFMQEVWEGFKRVDENKMLKEYETNSNEEAILNVGRSITKLPNKQFLRKVIKLFNAREKMLFESKKVDWALAEQLAYGTLMLEGFNVRISGQDVERGTFSHRHAVLKSEDFEEEYLPLNSIDSNKKGVLKIYNSLLSEYGVLGFDYGYALASPNSLTIWEAQFGDFSNGAQIIIDQYISSAEDKWKLQNGIVLYLPHGYEGQGAEHSSARMERY

SEQ ID NO: 95851 - protein, 287 aa, Unknown
  Bacterial polypetide isolated from the Sargasso Sea
ATLLDEGYGVRISGQDVGRGTFSHRHGVLYDQENENRFVPLRHFQNKQGYFEIIDSFLSEFGVLGFEYGYSQVDPKTLVIWEAQFGDFANGAQIMIDQFISSGERKWLRMSGLTMLLPHGHEGQGPEHTSGRLERFLQMCAEDNMQIVNCTSPANYFHVLRRQLHRNFRKPLIIFTPKSTLRHKSNVSNIEDYINGSTFHRILNDKLSVKEKRKNKRLIICSGKIYFELADHIAKNKIKNLSIIRLEQIYPFPYENFRDELKHYTNAEIIWAQEEPKNMGAWGFVKG

SEQ ID NO: 95852 - protein, 233 aa, Unknown
  Bacterial polypetide isolated from the Sargasso Sea
LVMLYPHGYEGQGPEHSSARLERFLQLCSNDNMQVMNCTTPANYFHALRRQMHRDFRKPLIIMTPKSLLRHKQCVSDINDFSKENSFHRVLWDHAIDPKAKGFIKLKKPKKIKKVVLCSGKIYFDLIEAREKLKKDDIIFFRIEQLYPFPAKALAKELRPYSKNSKFYWCQEEPKNMGAWFSVRDYIQWTLDNIKANNNKISYIGRSPDASPATGYAKWHISQQKEIIKKVFE

SEQ ID NO: 95853 - protein, 194 aa, Unknown
  Bacterial polypetide isolated from the Sargasso Sea
TTPANYFHALRRQMHRDFRKPLIIMTPKSLLRHKNCVSKLDEFISKKTFHRILNDDAYEERSGLIKLKDYTEIKKVVMCSGKIYYDLIQARETAKNDEVVFIRLEQLYPFPAKTLANLLKNYENAEFIWCQEEPKNMGAWNTVRNYIDRTLEIIYFTKDKVKFIGRKASSSTATGNLNKHLAQQKEILEKVLGN

SEQ ID NO: 95854 - protein, 271 aa, Unknown
  Bacterial polypetide isolated from the Sargasso Sea
ILKRTYCGNFALHYMHISDPEQASWLKERIEGLGKEIQFTPQGKRAILNKLIEAEGFEKFLHVKYMGTKRFGLDGGEALIPAMEQIIKRGGNLGVKEIIIGMPHRGRLSVLANVMGKPFRAIFNEFQGGSYKPEDVDGSGDVKYHLGASSDREFDNNSVHLSLTANPSHLEAVNPVVLGKVRAKQQQFKDDERIQVLPILLHGDAAFAGQGIIAECFGLSGLKGHKTGGTIHIVINNQIGFTTSPLNSRSSPYPTDIALMVEAPIFHVNGD

SEQ ID NO: 95855 - protein, 292 aa, Unknown
  Bacterial polypetide isolated from the Sargasso Sea
EGFEKFLHTKYVGSKRFGLDGGESLIPALEQIIKIGGQSNIKEVKIGMSHRGRLNVLANVLQKSYKRIFNEFAGELNNTDEDSAGDVKYHLGASSDREFDGNSVHVSLTDNPSHLEAVNPVVLGQTRAKQFFHKDTERNKVIPILIHGDAAFAGQGVVAECFAMSGLPGHNTGGTIHIIVNNQIGFTTSPRFARSSPHPSDIAKMVDAPIIHVNGDDPEAVVYGSRIATEFRLKFNRDVVIDLVCYRRFGHNEGDEPSFTQPLMYKKIRSHQSTANIYGYKLINENLISKEG

SEQ ID NO: 95856 - protein, 283 aa, Unknown
  Bacterial polypetide isolated from the Sargasso Sea
GERIGLGKATLKEIHEFLEQTYCGSIGVEYKFMRTIEIIQWLEQKMESCRNTPKFSRKEKIDLLRKTNEAVAFENFLHTKFVGQKRFSLEGGESIIPALDTVVEFGAELGVEEFVIGMAHRGRLNVLANILGKTYNDIFAEFEGKGFGEDVFAGDVKYHMGYSSDKKARNGKIVHLSLTPNPSHLEAVNPVVEGISRAKIDQYHEGNAKKLVPILIHGDHSMAGQGIVYEVLQMSKLPGYETGGTVHLVINNQVGFTADFIEGRSSTYCTDVGKTTLSPVFHV

SEQ ID NO: 95857 - protein, 193 aa, Unknown
  Bacterial polypetide isolated from the Sargasso Sea
PANYFHALRRQMHRDFRKPLIMMTPKSLLRNKYCVSQIDDFSKKNSFHRVLWDHAIDPKTKGFIKLKKNNGIKKVILCSGKIYFDLLSAREKLKKDDVILFRIEQLYPFPAKSLVKEIKPFAQNAKFYWCQEEPKNMGAWLLVRDYIQWTLDYIKAKNREISYIGRNPDATPATGYAKRHLAQQKEIIDIVFN

SEQ ID NO: 95858 - protein, 285 aa, Unknown
  Bacterial polypetide isolated from the Sargasso Sea
AEYRNLFKEDVVVDMFCYRRSGHNEADEPSFTQPLMYQAIKNQPTTLKIYEKKLIAEKIINKDESNKIQSDFKKFLDEEFESAKSYKPNKADWLDGTWKGFKTASLDSRKGNTSVSEKNIIEIGKKIHNIPNDFNVHKKIRKIYKDREQSIISGTKIDWATAESLAFATLLKEGYGVRLSGQDSGRGTFSQRHGVLYDQENENRFVPLRHFSKDQGLFEIVDSFLSEFGVLGFEYGFSQADPKTLVLWEAQFGDFANGAQIIIDQFITTGERKWLRMSGLTILLP

SEQ ID NO: 95859 - protein, 317 aa, Unknown
  Bacterial polypetide isolated from the Sargasso Sea
VGQKRFSLEGGESIIPVLDTVVEFGAELGVEEFVIGMAHRGRLNVLANILGKTYNDIFAEFEGKGFGEDVFAGDVKYHMGYSSDKKTRNGKIVHLSLTPNPSHLEAVNPVVEGISRAKIDQYHEGNAKKLVPILIHGDHSMAGQGIVYEVLQMSKLPGYGTGGTVHLVINNQVGFTADFIEGRSSTYCTDVGKTTLSPVFHVNADDIEAVVYVTKLALEFRQEFHRDVFVDILGYRRQGHNESDEPRFTQPDLYRRIAKHPNVREVYSSKLVESGSLKEEEILQIESEFQQFLNDRLEEAKQQETASVTSFLEGVWS

SEQ ID NO: 95860 - protein, 309 aa, Unknown
  Bacterial polypetide isolated from the Sargasso Sea
EVKIGMSHRGRLNVLANVLQKSYKRIFNEFTGDMQDNSEDGAGDVKYHLGASSDREFDGNSVHVSLTDNPSHLEAVNPVVLGQTRAKQFFHKDTQRNKVIPILIHGDAAFAGQGIVAECFAMSGLPGHNTGGTIHIIINNQIGFTTSPRFARSSPYPSDVGKMVDAPIIHVNGDDPEAVVYASRIATEFRLKFNRDVVIDLICYRRFGHNEGDEPSFTQPLMYKKIKSHPSSINIYGEKLVKEGLFSDESLKQKLKNFKDLLDDQFKNAKNYKPKIEWFEGTWSRYKPEKGKDKRGATGSDLNVLKKNI

SEQ ID NO: 95861 - protein, 312 aa, Unknown
  Bacterial polypetide isolated from the Sargasso Sea
YGFKKEEYNNKIFLDGVINRQYSSISEILKFLRDKYCGPLGFEYMHISNPTERKWFRDRVEKADDFKFTQNGKEAILKKLIQAEGFEKFLHTKYVGTKRFGLDGGESLIPALEQIIKIGGQSKIKEVKIGMSHRGRLNVLANVLQKSYKRIFNEFAGEISSKSEDDTGDVKYHLGASSNREFDGNQVHVSLTDNPSHLEAVNPVVLGQTRAKQYFHKDKERNKVIPILIHGDAAFAGQGVVAECFAMSGLPGHNTGGTIHIIVNNQIGFTTSPRFARSSPYPSDIAKMVEAPIIHVNGDDPGSSCLCRKNSN

SEQ ID NO: 95862 - protein, 301 aa, Unknown
  Bacterial polypetide isolated from the Sargasso Sea
QKWIKNPKSVPQIWSDWLDDIGNQIIDEVPSWTTNKTKVIGAVDVEESVRAVAKGIAGKGDISANDLRSATTDSLRAIMLIRAYRIRGHLLANLDPLGLHEEEVHPELDPSNYGFKENDWDRPIFIDNVLGMESGTLRQIMEILKETYCGSIGVEFMHVQDPAQKAWIQERIESIRNTTQFTNMGKKAIYERLVGAETFEQFLHKKYTGTKRFGLDGAESVVPALEQILKRGSQLGLREVVIGMAHRGRLNVLYNVLNKPFRAIISEFSGNQSNPEEAGGSGDVKYHMGASADREFEIRKY

SEQ ID NO: 95863 - protein, 315 aa, Unknown
  Bacterial polypetide isolated from the Sargasso Sea
RLETLNMSSTRGFSTGGSIHVIVNNQIGFTTSNPLDARSTLYCTEVAKMVQAPILHVNGDDPDAVLFAVRLAYDFRTTFDKDVVIDLIGYRRLGHNEADEPSVTQPTMYARIDKLATVRKQYADRLMADGIIDGTKSEQMMTDYRAALDAGKIVATHVRAGNNALDGVDWSPYLDSHWSDASDTRVSSARISHLNAQLQKTPPGFSIHPRIAKLFHDRDSMATGTQPIDWGFAETIAYASLIEDGYSVRLSGQDSGRGTFSHRHAVIKNVNARESLVPLRSIGADPNQFLVINSLLSEEAVLAFEYGYATTEPRA

SEQ ID NO: 95864 - protein, 286 aa, Unknown
  Bacterial polypetide isolated from the Sargasso Sea
KLTVTCYRHVCYRRFGHTREDEPSFTQPIMYKKINSHPTTLSIYGKKLSSEGLTSDEKLQNEKIEFKKYLEKEFDISKSYKSELKWFDGAWSRFKPGLGKDKRGVSGVDRVKLKSIGEKIFNIPANFHAHKTLKKVFELRNQMLSKGKLDWSSAESLAIGTLLTEGFSVRLSGQDSGRGTFSQRHAILRNQDNHDRFIPVNNIEKGQMKFEVIDSLLSELAVLGFEFGYSLSEPETLVLWEAQFGDFANGGQVIIDQFITSSESKWGRASGLVMLLPHGYEGQGPE

SEQ ID NO: 95865 - protein, 340 aa, Unknown
  Bacterial polypetide isolated from the Sargasso Sea
TKIDTEESVKAIALIRAYRIRGHLIAKLDPLEMMERKYLEDLHPSDHGFKKEDYNKKIYVGAYMKGGFSTINEILTFFRKIYCSTIGVEYMHISDPAEKTWFRERMEKKENHLKFTENGKKAILNKLIQAEGFEKFLAVKFVGTKRFGLDGGEALIPALEQIIKRGGHLGFKEVKIGQPHRGRLNILANVLQKSYKRMFNEFTGEYASFSSDSTGDVKYHLGASSNREFDGNLVHVSLTDNPSHLEAVNPVVLGQVRAKQFFHKDQKRKQVVPVLIHGDASFAGQGVVAECFAMSGLPGHNTGGTIHIIVNNQIGFTTSPKFARSLTYPSDLAKMVDAPI

SEQ ID NO: 95866 - protein, 268 aa, Unknown
  Bacterial polypetide isolated from the Sargasso Sea
AKELVLGMSHRGRLNVLINVMGKKPSILFTEFDENFEEDDAHTGDVKYHLGFSSNILTSGGQVHVTLGSNPSHLEAVNPVVLGSVRARQDRREDKESNEVVPILMHGDASFSAQGVVMEILQLSQTRAYGVGGSIHIVVNNQIGFTTSVKEDARSTEYCTDVAKMINAPIIHVNGDDPEACVMAAKLAVEFRNTFKKDIIVDFVCYRRRGHNETDEPFATQPVMYKQIRSKETVTEIYSNKLIEKSSLDKSKYEKFKKDYRKNMKKER

SEQ ID NO: 95867 - protein, 232 aa, Unknown
  Bacterial polypetide isolated from the Sargasso Sea
KEIVIGMAHRGRLNVLVNTFGKNPRELFDEFEGKKKVELGSGDVKYHQGFSSNVMTTGGEVHLAMAFNPSHLEIVSPVVEGSVRARQDRRNDATGEKVLPISIHGDAAFAGQGVVLETFQMSQTRGFKTGGTVHIVINNQVGFTISNPLDARSTEYATDVAKMIQAPILHVNGDDPEAVLFVTQLAVDYRMQFKRDVVIDLVCYRRRGHNEADEPSGTQPLMYQQITKQRTT

SEQ ID NO: 95868 - protein, 284 aa, Unknown
  Bacterial polypetide isolated from the Sargasso Sea
LDPLQLAQKDIHIDLIYAEKLLEGISLEERVGNDYPKGSKNKIFLKELKESITKKYSGNVGLEFSHISNESERNWIIDRFENNDYKKINLNEKIFILKRLISARGLAKYLSAKYPGMKRFGIDGCESLIPLIDTLIEQTSKNSAEQICFGMAHRGRLNLLINVLGKKPKDLFAEFEENYDLKGSSTGDVKYHLGFSSNIHTTNGDVHVSLINNPSHLEIIDPVVIGSVRARQDRLNDRERNKVVPILIHGDASFSGQGVVMETLQMSQTRGYGVGGTIHVIINN

SEQ ID NO: 95869 - protein, 296 aa, Unknown
  Bacterial polypetide isolated from the Sargasso Sea
TADLAMVNGQGTLREILQALQETYCRTIGAEYMHIVDSEQRSWFVQRLESVRGRPDFSPEIKSHLLERLTAAEGLEKYLGTKYPGTKRFGLEGGESLIPLLDEIIQRSGSYGTKEIVIGMAHRGRLNVLVNTFGKNPRDLFDEFEGKKVEGLSSGDVKYHQGFSSNVMTPGGEIHLAMAFNPSHLEIVSPVVEGSVRARQDRRCDPVGDKVLPVTIHGDAAVAGQGVVMETFQMSQTRAYRTGGTIRIVVNNQVGFTTNKQEDARSTEYTTDVAKMIQAPIFKGTQTIPRRCCSSP

SEQ ID NO: 95870 - protein, 308 aa, Unknown
  Bacterial polypetide isolated from the Sargasso Sea
RSSPHPSDVAKMVDSPIIHANGDDPESVVYAARIAAEFRLKFNRDVVVDLVCYRRFGHNEGDEPSFTQPLMYKKIKSHLSTVKIYGNKLVNEKTISSEDLNNQIKKFKDLLDDQYKNAKNYNPKIEWFEGTWSRYKPRRGQDKRGDTGYSTTKLLEISDKIHSLSAELNIHKTIVKIFEARKNSMNKGNGIDWSTAEALAFGSLLEEGYPVRLVGQDSGRGTFSQRHSVLRNQIDNSRYIPLNNISGKQKNFEIVDSFLSELAVLGFEYGYSLVEPNTLTIWEAQFGDFANGAQVIIDQFISSGERKW

SEQ ID NO: 95871 - protein, 280 aa, Unknown
  Bacterial polypetide isolated from the Sargasso Sea
MNGVINKKYANIREILKFLKKTYCGNIGYEFMHVSNPVERKWFRDRIEQDQNALNFTKNGKEAILNKLVQAEGFEKFLATKYVGTKRFGLDGGESLIPALEQIIKIGGQNQIKEVKIGMSHRGRLNVLANVLQKSYKRIFNEFAGEVSSDSEESAGDVKYHLGASSDRQFDGNSVHVSLTDNPSHLEAVNPVVLGQTRAKQFFHKDKERNKVIPILIHGDAAFAGQGVVAECFAMSGLPGHNTGGTIHIIVNNQIGFTTSPRFARSSPYPSDVAKMVEAP

SEQ ID NO: 95872 - protein, 298 aa, Unknown
  Bacterial polypetide isolated from the Sargasso Sea
LKEFKVVKLINAYRTRGHLFTKTNPVRERRKYIPNLDLENFELSNNDLELKFNAGEIIGIGNASLADILIHLERIYCDSIGIEYMYIRTPERIKWIQSKLNQNDNRPNFSKDQKKHILKKLVQATNFEQFLQKKYVGQKRFSLEGGESLIPALDSIFENAAIMGVKEFVVGMAHRGRLNTLSNIFGKPAKEIFNEFDGKDYEEQIFDGDVKYHLGWTSKRKSDSGIGIYMNLAPNPSHLESVGPVVQGISRAKQDKYHKKNPKNVLPVIIHGDAAIAAQGVVYEVVQMERLKGYKTSG

SEQ ID NO: 95873 - protein, 160 aa, Unknown
  Bacterial polypetide isolated from the Sargasso Sea
DNISPKSLLRNPQCVSSIENLTDGSFEYVIDDVNSNSKLVEKIILCSGKVFYDLAAKKEELKIKNTAILRIEQLYPFPYDTLEKIIQSYENAKQFIWCQEEPSNQGAWFSHRHRLQIVLDRINNTEIQLISRKASSAPAVGLNKLHNQQQEALVNEALTS

SEQ ID NO: 95874 - protein, 312 aa, Unknown
  Bacterial polypetide isolated from the Sargasso Sea
IGVDICTSPIRVEKVWFRERMEKEKNQLKFTDNGKKSILNKLIQAEGFEKFLAVKFVGTKRFGLDGGEALIPALEQLVKRGGQLGVKEIKIGQPHRGRLNILANVLQKSYKRMFNEFAGEYASYSADSTGDVKYHLGASSNREFDGNLVHISLTDNPSHLEAVNPVVLGQTRAKQFFHKDKKRKNVVPILIHGDASFAGQGVVAECFAMSGLPGHNTGGTIHIIINNQIGFTTSPKFARSSPYPSDLAKMVDAPILHVNGDDPEAVVHCARIAMEFRQKFNKDVVIDMICYRRFGHNEGDEPAFTQPVMYKK

SEQ ID NO: 95875 - protein, 340 aa, Unknown
  Bacterial polypetide isolated from the Sargasso Sea
EYRQKFNRDVVIDMVCYRRFGHNEGDEPSFTQPIMYKKIKSHPSTLTLYGKKLSSEGLTSIENLQNEKLKFKNFLEKEFDISKNYKSELKWFDGAWSRFKPGLGKDKRGVSGVDKVKLNKVGKKIFNIPSNFYAHKTLKRVFELRKKMLTTGLLDWSSAESLAIGTLLTEGFSVRLSGQDSGRGTFSQRHAVLRNQENHDRYIPANNIKKGQMKFEVIDSLLSELAVLGFEFGYSLSEPETLVLWEAQFGDFANGGQVIIDQFITSSESKWGRASGLVMLLPHGYEGQGPEHSSARLERFLQLCAGENIQVVNCTTPSNYFHVLRRQMHREFRKPLIIRL

SEQ ID NO: 95876 - protein, 170 aa, Unknown
  Bacterial polypetide isolated from the Sargasso Sea
MTPKSLLRHKKCISNLEDFSKKNSFHRVLWDHALEKNSGLIKLKKNNKIRKVILCSGKIYFDLIEARENLKIDDVIIFRIEQLYPFPVKSLVKEIKPYAKNAKFYWCQEEPKNMGAWFSVRDYIQWTLDYIGANNNKISFIGRSPAASPATGYAKRHIKQQREIINKVYK

SEQ ID NO: 95877 - protein, 298 aa, Unknown
  Bacterial polypetide isolated from the Sargasso Sea
ENGKKAILNKIIQAEGFEKFLAKKYVGTKRFGLDGAESLIPAMEQIIKRGGQLGVKEIKIGMPHRGRLNVLANVLQKSYKRIFNEFAGEFSSTAEESAGDVKYHLGASSNREFDGNSVHVSLTDNPSHLEAVDPVVLGQTRAKQFFHNDLKRSKVIPILIHGDAAFAGQGVVAECFAMSGLPGHNTGGTIHIIVNNQIGFTTSPRFARSSPYPSDLGKVVDAPILHCNGDDPESAIHCAKIAIEFRQKFKKDVVIDMICYRRFGHNEGDEPSFTQPLMYKKIRQHPTTLNVYGNKLVK

SEQ ID NO: 95878 - protein, 308 aa, Unknown
  Bacterial polypetide isolated from the Sargasso Sea
RLNLLVNVLGKLPSDLFSSFNEEGVLEGANTGDVKYHLGFSSNFITPGGEVHVSLSNNPSHLEIVDPVVLGSVRARQDRLHDKKRESVIPVLLHGDASFSGQGVVMESLQMSQTRGFFVGGTIHVIVNNQIGFTTSNKSDARSTDYSTDVAKMIQAPVIHVNGDHPEMVINAVKVATKYRKKFKKDIVIDLFCYRRRGHNEADDPSATQPLMYEKIKQHPSVLKQYQTKLIKENILTIKDAENIKNNYRKSLDSGKTVAKNLAKNPNNDMWFDWKPYLDVLWWPKVDTTFNKNKLEELGIDVSSTPDN

SEQ ID NO: 95879 - protein, 294 aa, Unknown
  Bacterial polypetide isolated from the Sargasso Sea
EGFEKFLHTKYVGTKRFGLDGGESLIPALEQIIKIGGQSKVKEVKIGMSHRGRLNVLANVLQKSYKRIFNEFAGEINSSKEDSAGDVKYHLGASSNREFDGNSVHVSLTDNPSHLEAVNPVVLGQTRAKQYFHKDKERKKVIPILIHGDAAFAGQGVVAECFAMSGLPGHNTGGTIHIIVNNQIGFTTSPRFARSSPYPSDIAKMVEAPIIHVNGDDPEAVVYAARVATDFRLKFNRDVVIDLICYRRFGHNEGDEPSFTQPLMYKKIRSHPSPVKVYGEKLISEESISNDFLN

SEQ ID NO: 95880 - protein, 303 aa, Unknown
  Bacterial polypetide isolated from the Sargasso Sea
MNFAGEIDSTSDDDSAGDVKYHLGASSDRVFDGNPVHVSLTDNPSHLEAVNPVVLGQTRAKQFFHNDKERKKVIPILIHGDASFAGQGIVAECFAMSGLPGHNTGGTIHFIINNQIGFTTSPRFARSSPHPSDVAKMVDSPIIHANGDDPESVVYAARIAAEFRLKFNRDVVVDLVCYRRFGHNEGDEPSFTQPLMYKKIKSHLSTVKIYGNKLVKEKTISSEDLNNQIKKFKDLLDDQYKNAKNYKPKIEWFEGTWSRYKPRRGQDKRGDTGYPTSKLLEISDKIHSLSAELNIHKTIVKNF

SEQ ID NO: 95881 - protein, 201 aa, Unknown
  Bacterial polypetide isolated from the Sargasso Sea
QVVKCTTPANYFHVLRRQMRRDFRKPLIVMTPKSLLRHKRCISYLEDFTKKTRFHRILEDHAYLENSKLIKLKTNKKIKKVVMCSGKIYFDLLEAREKSKNDEIVFIRVEQLYPFPVKHLGRELQKYKNAEFIWCQEEPMNMGAWNTVKYYIERTLEIVKIKGETVKYVGRNAAASPATGNLNKHLAEQKEILEKVVGKLN

SEQ ID NO: 95882 - protein, 272 aa, Unknown
  Bacterial polypetide isolated from the Sargasso Sea
CRNKRFGLDGGESLIPALEQIIKRGGQLGVKEVKIGMSHRGRLNVLANVLQKSYKRIFNEFSGEHLNLPEESAGDVKYHLGASSNREFDGNLVHVSLTDNPSHLEAVDPVVLGQTRAKQFFHKDLKRNKVIPILIHGDAAFAGQGIVAECFAMSGLPGHNTGGTIHIILNNQIGFTTSPRFARSSPYPSDLGKVIDSPILHCNADDPEAVVHCAKIAIEFRQKFNKDVVIDVICYRRFGHNEGDEPSFTQPLMYKKIREHPTTLTVYGNKLS

SEQ ID NO: 95883 - protein, 307 aa, Unknown
  Bacterial polypetide isolated from the Sargasso Sea
IIKRGGQLGVKEVKIGMSHRGRVNVLANLLQKSYKRIFNEFVGEFANTPEESAGDVKYHLGASSNREFDGNSVHISLTDNPSHLEAVNPVVLGQTRAKQFFHQDKKRNKVIPILIHGDAAFAGQGIVAECFAMSGLKGHNTGGTIHIIVNNQIGFTTSPRFARSSPYPSDLGKVIESPILHCNGDDPEAVVHCAKIAIEFRQKFNKDVVIDMICYRRFGHNEGDEPSFTQPLMYKKIKQHPTTLNVYGKKLIKENVITEEEFDKMKKEFKSLLDEQFKTAKDYKPKIEWYEGTWSRYKPEKGKDRRG

SEQ ID NO: 95884 - protein, 309 aa, Unknown
  Bacterial polypetide isolated from the Sargasso Sea
AGDIIGIGPSTLSKIVGVLEQIYCDSIGVEYMYIRNPERVDWIQRKLRVNQNHGDFSKNQKRHILKKLSQAVTFENFLHTKYVGQKRFSLEGGEALIPALDEMVELAAESGVKEFVMGMAHRGRLNTLINIFGKSARDVFSEFEGKDYSDEMIFDGDVKYHLGWTVNRKTRSGNSINMNLAPNPSHLETVSAIVQGITRAKIDNNFDGDSSKALPIIIHGDAAIAGQGLPYEIVQMARLDGYTNGGTIHIVVNNQIGFTTNYLDARSSTYCTDVAKVTLCPVFHVNSDDVEAVVHASKIALEYRTRLKE

SEQ ID NO: 95885 - protein, 293 aa, Unknown
  Bacterial polypetide isolated from the Sargasso Sea
TKYVGTKRFGLDGGESLIPALEQIIKIGGQSKIKEVKIGMSHRGRLNVLANVLQKSYKRIFNEFAGEINSTSEDGAGDVKYHLGASSNREFDGNSVHVSLTDNPSHLEAVNPVVLGQTRAKQFFHQDKERKKVIPILIHGDAAFAGQGVVAECFAMSGLPGHNTGGTIHIIVNNQIGFTTSPRFARSSPYPSDIAKMVDAPIIHVNGDDPEAVVYAARIATDFRLKFNRDVVIDLICYRRFGHNEGDEPSFTQPLMYKKIRSHPSPVKVYGEKLVHEGSISKDHLNNSIKKFK

SEQ ID NO: 95886 - protein, 332 aa, Unknown
  Bacterial polypetide isolated from the Sargasso Sea
NLFRWCINRSYSNIKEILTFLKKIYCGKIGYEYMHISNPTERKWFRDRVEKDENGIQFTKNGKEAILNKLIQAEGFEKFLHTKYVGTKRFGLDGGESLIPALEQIIKIGGKNKVKEVKIGMSHRGRLNVLANVLQKSYKRIFNEFAGEIDSSSKDDSAGDVKYHLGASSDRIFDDNSVHVSLTDNPSHLEAVNPVVLGQTRAKQYFHNDKERKKVIPILIHGDASFAGQGIVAECFAMSGLPGHNTGGTIHFIINNQIGFTTSPRFARSSPHPSDVAKMVDSPIIHANGDDPESVVYAARIATEFRLKFNRDVVVDLVCYRRFGHNEGDETS

SEQ ID NO: 95887 - protein, 293 aa, Unknown
  Bacterial polypetide isolated from the Sargasso Sea
MYEKYLQEPDSVEASLRAFFQGFDFGIENNQNGHSKSSEKEVPKHLEREFKVVQLIDAYRKRGHLFTKTNPVRERRTYSPNLDIENFGLSIDDLNEVVGAGETMGIGPSTLSQIIKHLQDIYCDSIGIEYMYIRNPQRVNWIQNRLHKNNNHPNFTTEEKKHILKKLTQAVSFENFLHKKYVGQKRFSLEGGESLIPALDALIMKADNKGVEEFVMGMAHRGRLNTLTNIFGKSSRDIFSEFDGKDYDEIVFDGDVKYHLGWTSKIDPNGDGKKININLAPNPSHLETVGAVV

SEQ ID NO: 95888 - protein, 249 aa, Unknown
  Bacterial polypetide isolated from the Sargasso Sea
TKRFGLDGGESLVPALEQIIKRGGQLGVKEIKIGMPHRGRLNVLANVLQKSYKRIFNEFAGELDAKSEDSAGDVKYHLGASSNREFDGNSVHVSLTDNPSHLEAVNPVVLGQVRAKQFYHNDKQRRQVIPILIHGDAAFAGQGVVAECFAMSGLKGHNTGGTIHIIVNNQIGFTTSPRFARSSPYPSDLGKVVESPILHCNGDDPEAVVHCAKIAIEFRQKFNKDVVIDLICYRKFGHNEGDEPSFTHH

SEQ ID NO: 95889 - protein, 192 aa, Unknown
  Bacterial polypetide isolated from the Sargasso Sea
PSNYFHVLRRQMHREFRKPLVIMTPKSLLRHKRCISNISEFTSKSTFHRVLEDDAYKKENNLIKLKKDKNVKKVIMCSGKIYYDLIEAREKSKNDKLVFIRIEQLYPFPAKTLATILKRYTKAKFIWCQEEPKNMGAWNTMRNYIERTLEMINFKDIHLKYVGRKASSSTATGNANKHLAEQKEILEKIVKN

SEQ ID NO: 95890 - protein, 285 aa, Unknown
  Bacterial polypetide isolated from the Sargasso Sea
KIVDSPILHCNGDDPESVVHCAKIAIEFRQKFSKDVVIDMICYRRFGHNEGDEPSFTQPSMYKKIRSHPTTLKIYGEKLIKEKTISKNDFENQITTFRSLLDEQFKTAKDIKPKLDWFEGTWSRYQPKKGKDRRGVTGVNLDEILKISEKINKVDEKLNIHKTIQKILNNRHKCILDKKNIDWANAESLAFATLLDEGYPVRLVGQDSGRGTFSQRHSVLRNQEDNSRFIPLNNISKKQKNFEVVDSLLSELAVLGFEYGYSLVEPETLTMWEAQFGDFANGAQV

SEQ ID NO: 95891 - protein, 300 aa, Unknown
  Bacterial polypetide isolated from the Sargasso Sea
MVDAPILHVNGDDPEAVTHCAKIATDYRQKFNRDVVIDMICYRRFGHNEGDEPSFTQPTMYRKIKKHPTTLNIYAEKLIDEGVITNEEFNNMKTKFKSLLEEQFKTAKEYKPKLEWYEGVWSRFKPEKGKDKRGVTGVSLEKIIKIGKKITLIPEDLNLHPTLRKIFENKKKMFLSGKGFDWATAEHLAFATLLEEGYPVRLSGQDSARGTFSQRHSVLKDQLNGKKYIPLNNISKNQKNFEVIDSLLSEMAVLGFEYGYALSEPSTLVIWEAQFGDFANGAQVIIDQFVASAERKWREL

SEQ ID NO: 95892 - protein, 169 aa, Unknown
  Bacterial polypetide isolated from the Sargasso Sea
MRRQMTFPFRKPLVIFTPKSLLRHPKCVSPLDSFLEGTRFIEVIKDEYSDTQFVQKVLLCSGKVYYDLLEHQQTNQIKDIAIIRLEQLYPFPEKQLLSVLNLYSNAKNICWVQEEPENMGAWSFILRTFTETNNRLILVAREADSSPAVGSSQVHLSQQEKLVQKAFEV

SEQ ID NO: 95893 - protein, 287 aa, Unknown
  Bacterial polypetide isolated from the Sargasso Sea
DLIKKIMIKKIYLDGIANKNYSTIKEILSFLRKTYCGKIGYEYMHISNPTERKWLRDRIEKDENALQFTKNGKEAILNKIVQSEGFEKFLHTKYVGTKRFGLDGAESLIPALEQVIKIGAQNNVKEVKIGMSHRGRLNVLANVLQKSYKRIFNEFAGEIDSSSKEDSAGDVKYHLGASSDRVFDGKSVHVSLTDNPSHLEAVNPVVLGQTRAKQFFHDDKERKKVIPILIHGDASFAGQGIVAECFAMSGLPGHNTGGTIHFIINNQIGFTTSPRFARSSPHPSDVA

SEQ ID NO: 95894 - protein, 299 aa, Unknown
  Bacterial polypetide isolated from the Sargasso Sea
NIDWATAEALAFATLLKDGYGVRLSGQDVGRGTFSHRHAVLYDQENEKRFVPLRHFRKEQALFEIVDSFLSEFGVLGFEYGYSQADPKTLVIWEAQFGDFSNGAQTIIDQFITTGERKWLRMSGLTLLLPHGHEGQGPEHTSARLERFLQMCAEDNIQVANCTSPANYFHILRRQMMRDFRKPLVLMTPKSTLRHKANRSALKDFVNGSTFHRVLSNPLSDDEYKHINRIVFCSGKIYFELQDHLNELQLNNVYIIRLEQLYPFPYEALKQGIKKFIHCELIWCQEEPKNMGAWEFMKR

SEQ ID NO: 95895 - protein, 269 aa, Unknown
  Bacterial polypetide isolated from the Sargasso Sea
QKFNRDVVIDMVCYRRFGHNEGDEPSFTQPIMYKKIRSHPTTLSIYGKKLSEEGLTSEIDLQKDKINFKKFLEKEFESSKNYKSELKWYDGVWSRFKPGLGKDKRGVSGVDKVKLRNIGRKISEIPKEFNVHKTLKKIFDLRMAAIENGKSIDWSTAESLAFGTLLTEGFSVRLSGQDSGRGTFSQRHAVLRNQENHERYIPLNNISGNQKNFEIIDSLLSELAVLGFEFGYSLSEPETLVLWEAQFGDFANGAQIIIDQFISSAESKW

SEQ ID NO: 95896 - protein, 250 aa, Unknown
  Bacterial polypetide isolated from the Sargasso Sea
QIIKIGGQSKIKEVKIGMSHRGRLNVLANVLQKSYKRIFNEFAGEINSTSEDGAGDVKYHLGASSNREFDGNLVHVSLTDNPSHLEAVNPVVLGQTRAKQYFHQDKERKKVIPILIHGDAAFAGQGVVAECFAMSGLPGHNTGGTIHIIVNNQIGFTTSPRFARSSPYPSDIAKMVDAPIIHVNGDDPEAVVYAARIATDFRLKFNRDVVIDLICYRRFGHNEGDEPSFTQPLMYKKIRSHPSPVKVYGE

SEQ ID NO: 95897 - protein, 296 aa, Unknown
  Bacterial polypetide isolated from the Sargasso Sea
IDFVCYRERGHNESDEPFATQLLMYSKIHSKNTVIELYSKKLIESKAISEEVFEAYKKDYRDHMEKGEMVAESLSSDPDKSIYFDWTPYLQPDLKKSYPTLVSRANLEIAVKHCLSFPENLQMQKQVQKMYSDREKMLKGELKLNWGFAEMAAYATLLQEGYPVRITGQDTRRGTFSHRHLVVKDQKSGEGTVPLATLNKGNKKFEIFDSLLSEEAVLGFEYGYSSTWPEGLVIWEAQFGDFANVAQVVIDQFIVSAETKWGRLSGLTMFLPHGYEGQGPEHSSSRLERFLQQCAY

SEQ ID NO: 95898 - protein, 307 aa, Unknown
  Bacterial polypetide isolated from the Sargasso Sea
FARSSPYPSDLAKMVDALILHVNGDDPEAVVHCARIAMEFRQKFNRDVVLDMICYRRFGHNEGDEPSFTQPVMYKNIKKHETTLNIYANKLIKEGTISKEEFNSMKMQFKNLLEEQFKTAKEYKPKLEWYAGVWSRYKPERGKDRRGVTGVSIEKIKKIGEKITTIPKEFNTHPTIKKIFENKKKMFLTGKGFDWATAEQLAFATLLDEGYPVRLSGQDSGRGTFSQRHSVLRDQRDSTYYTPLNNISKNQKRYEVIDSLLSEMAVVGFEYGYALSEPTTLVVWEAQFGDFANGAQVIIDQFITSAE

SEQ ID NO: 95899 - protein, 292 aa, Unknown
  Bacterial polypetide isolated from the Sargasso Sea
HCAKIATEYRQKFNRDVVIDMVCYRRFGHNEGDEPSFTQPIMYKKIKSHPSTLTIYGKKLSNEGLTSIEKLQQDKVKFKELLEKEFSFSKNYKSDLKWFDGVWSRFKPGLGKDKRGKSGVEKKILDKVGKKIFHIPSDFDAHKTLKRVFDLKSQMFNSGKVDWSSAESLAFGTLLSEGFSVRLSGQDSGRGTFSQRHAVLRNQNNHDRYLPLNNIQNNQKKFEVIDSLLSELAVLGFEYGYSLSEPETLVLWEAQFGDFANGAQVIIDQFITSSESKWGRASGLVMLLPHGI

SEQ ID NO: 95900 - protein, 325 aa, Unknown
  Bacterial polypetide isolated from the Sargasso Sea
KDTLVDMFCYRKHGHNEGDEPSFTQPLMYQTIKKKKSVAEIYANKLIENEILNKQQIDFIKDTVWSDLEKKFEKAKNYKLKTKSWMGGQWSGLSKAPKDTLRRGRTAEPSKSLKDIGKKIAQTPEGFNLHPKLEKFNAARLKAIKNGKGIDWSFAETLAFGSLLKEGFKVRLAGQDSGRGTFSQRHSVFYDQKTEERYIPLNHLAKNQKQFEIIDSFLSEMGVLGFEYGYSLADPNALVIWEAQFGDFANGAQIIIDQFIAASERKWMQMSGLVMLLPHGHEGMGPEHSSARIERFLQMAAEDNIQILNCTTPASYFMLSKTNSS

SEQ ID NO: 95901 - protein, 311 aa, Unknown
  Bacterial polypetide isolated from the Sargasso Sea
YGDRLTSVINGKGIDWATSESLALATLLDEGYGVRISGQDVGRGTFSHRHGVLYDQENENRFVPLRHFQNKQGYFEIIDSFLSEFGVLGFEYGYSQVDPKTLVIWEAQFGDFANGAQIMIDQFISSGERKWLRMSGLTMLLPHGHEGQGPEHTSGRLERFLQMCAEDNMQIVNCTSPANYFHVLRRQLHRNFRKPLIIFTPKSTLRHKSNVSNIEDYINGSTFHRILTDKLSVKEKRKNKRLIICSGKIYFELADHIAKNKIKNLSIIRLEQIYPFPYENFRDELKHYTDAEIIWAQEEPKNMGAWGFCER

SEQ ID NO: 95902 - protein, 290 aa, Unknown
  Bacterial polypetide isolated from the Sargasso Sea
MVCYRRFGHNEGDEPSFTQPLMYKKIKNHPSTLEIYGQKLIKEGLVTKEEIEISKKKFKDFLNNEFVGAKGYKVKMKWFDGVWSRFKPEIGKDRRGITGVKKEDLMEIGKKITQLPKNLNIHKTLIKIFENKQKMFTQNHPIDWSTAELLAFATLLNDGFSVRLSGQDSGRGTFSQRHSVLRDQDSHERYIPLHHVSKKQKKFEVIDSLLSELGVLGFEFGYSLSEPETLVLWEAQFGDFVNGAQIVIDQFIASGESKWSRASGLVMLLPHGYEGQGPEHSSGRLERFLQ

SEQ ID NO: 95903 - protein, 269 aa, Unknown
  Bacterial polypetide isolated from the Sargasso Sea
IKEILSFLKKTYCEKIGFEYMHISNPTERKWLRDRIEKKENSIQFTRNGKEAILNKIIQAEGFEKFLHTKYVGTKRFGLDGGESLIPALEQIIKIGGQFNIKEVKIGMSHRGRLNVLANVLQKSYKRIFNEFAGEINYSSSEDSSGDVKYHLGASSNREFDGNSVHVSLTDNPSHLEAVNPVVLGQTRAKQFFHEDKDRKKVIPILIHGDAAFAGQGIVAECFAMSGLPGHNTGGTIHFIINNQIGFTTSPRFARSSPHPSDVAKMVDA

SEQ ID NO: 95904 - protein, 309 aa, Unknown
  Bacterial polypetide isolated from the Sargasso Sea
MAHRGRLNLLVNVLGKSPKELFAEFEENFELEGASSGDVKYHLGFSSNILTPNGEVHVSLANNPSHLEIVDPVVLGSVRGRQDRLNDIKKELVIPILIHGDASFCGQGVVMETLQMSQTRGYGVGGTIHVIVNNQIGFTTSNEEDSRSTQYATDVAKMVEAPILHVNGDDPEMVVFAAKLACEYRHNFKKDIVLDLFCYRRRGHNEADEPSSTQPIMYQQISNHPSVKSLYQDKLINAGVTTQSECDEIEKKYRSTIEKGDSVAHNLATQPNESMWFDWTPYINQSGDEEIESAFNKDRFTELAQIAFT

SEQ ID NO: 95905 - protein, 283 aa, Unknown
  Bacterial polypetide isolated from the Sargasso Sea
MLGVEEFIIGMAHRGRLNVLANILGKPYEDIFMEFEGKMVGSDGFDGDVKYHMGHSSDRLVRNGNTVHLSLTPNPSHLEAVNPVVAGISRGKIDRRYHGDVDKLVPILIHGDASIAGQGIVYEVLQMSQLPGYHIGGTVHVVLNNQVGFTADYFEGRSSTYCTDVAKTTLSPVFHVNGDDLDAVAYVTELALEFRQKFHRDVFVDIVAYRRHGHNESDEPRFTQPALYKKIAEHPNPLQVYSQRLIQEGRVSKSDVQKLVEDFKKQLSEKLESTRKQEVSAST

SEQ ID NO: 95906 - protein, 251 aa, Unknown
  Bacterial polypetide isolated from the Sargasso Sea
IKEGILTRDDFNSQNNKFKILLDEQYKTSKNYKPKLEWFEGTWSRYKPERGKDKRGKSAVSEEKLLQISEKINLIPESAKIHKTIKRIFDNRYQTTRKKKNIDWSTAESLAFGSLLEEGFPVRLVGQDSGRGTFSQRHSVLRNQLDNSRYIPLNNISKKQKRFEIVDSLLSEMAVLGFEYGYSLVEPNTLTLWEAQFGDFANGGQIIIDQFISSGERKWSRASGLVMLLPHGYEGQGPEHSSARLERFLQL

SEQ ID NO: 95907 - protein, 294 aa, Unknown
  Bacterial polypetide isolated from the Sargasso Sea
GLKTSEYIDELHPEYHGFRKDDYDHKIFLDGILNRDYGTIREILKFLRKTYCGTIGYEFMHISNPKERKWFRDRIEKDENALKFTKKGKQAILSRLIYAEGFEKFLHTKYIGTKRFGLDGGESLIPALEQIIKVVGQNKVKEVKIGMSHRGRLNVLANLLQKSYKRIFNEFTGEVDASSEESAGDVKYHLGASSNREFNGNSVHISLTDNPSHLEAVSPVVLGQTRAKQYFHQDYERNKVIPILIHGDAAFSAQGVVAECFAMSGLPGHNTGGTIHIIINNQIGFTTSPRFARS

SEQ ID NO: 95908 - protein, 217 aa, Unknown
  Bacterial polypetide isolated from the Sargasso Sea
SARLERFLQLCSNDNMQVMNCTTPANYFHALRRQMHRDFRKPLIIMTPKSLLRHKYCVSNLKDFSKKNSFHRVLWDHAIDPQSEGFIKLKKPEKIRKVILCSGKVYFDLLEAREKLKVEDIILYRIEQLYPFPAKALVKELKPYAKNATFHWCQEEPKNMGAWFSVRDYMQWTLDNIKAKNNQISYIGRSPDATPATGFAKRHIFQQKEIINKVFKK

SEQ ID NO: 95909 - protein, 181 aa, Unknown
  Bacterial polypetide isolated from the Sargasso Sea
MHREFRKPLIIMTPKSLLRNKRCVSNIEDFTKKNFFHRVLPDHAEIESYNLIKLRKDKKIQKVIMCSGKIYFDLLESREKIKNDKVFIIRIEQLYPFPVKPLATELKRFKKNAKFFWCQEEPQNMGAWNSARNYIEWTLNYIDAENKEIRYIGRKPAASPATGYITRHIDQQKKIVEKVLS

SEQ ID NO: 95910 - protein, 305 aa, Unknown
  Bacterial polypetide isolated from the Sargasso Sea
FILNIVGTKRFGLDGGESLIPALEQIIKIGGRSQVKEVKIGMSHRGRLNVLANVLQKSYKRIFNEFAGEINSSKEDSTGDVKYHLGASSNREFDGNSVHVSLTDNPSHLEAVNPVVLGQTRAKQFFHKDKERKMVIPILIHGDAAFAGQGVVAECFAMSGLPGHNTGGTIHIIINNQIGFTTSPRFARSSPYPSDVAKMVEAPIIHVNGDDPEAVVYAARIATDFRLKFNRDVVIDLICYRRFGHNEGDEPSFTQPLMYKKIRSHPSPVKVYGEKLVNEGSISNDYLNSSIKKFKDLLNEQFENA

SEQ ID NO: 95911 - protein, 202 aa, Unknown
  Bacterial polypetide isolated from the Sargasso Sea
MQVVNCTTPANYFHVLRRQMRRDFRKPLIVMTPKSLLRHKRCVSYLEDFTKKTRFHRILEDHAYLKNSKLIKLKTNNKIKKVIMCSGKIYFDLLEAREKSKNDEIVFIRVEQLYPFPVKHLGRELQKYKNAEFIWCQEEPMNMGAWNTVKYYIDRTLEIVKIKGEKVKYVGRNAAASPATGNLNKHLAEQKEILEKVVGRFN

SEQ ID NO: 95912 - protein, 272 aa, Unknown
  Bacterial polypetide isolated from the Sargasso Sea
MKYSLFFKKIYCSTIGVEYMHISDPIEKRWFRDRMEKEENQLRFTNNGKIAILNKLIQAEGFEKFLAVKFVGTKRFGLDGGEALIPALEQIIKRGGHLGFKEVKIGQPHRGRLNILANVLQKSYKRMFNEFAGEYASFSSDSTGDVKYHLGASSNREFDGNLVHVSLTDNPSHLEAVNPVVLGQTRAKQFFHKDEKRRQVIPVLIHGDASFAGQGVVAECFAMSGVPGHNTGGTIHIIVNNQIGFTTSPKFARSSPYPSDLAKMVDAPILHV

SEQ ID NO: 95913 - protein, 197 aa, Unknown
  Bacterial polypetide isolated from the Sargasso Sea
FFSLCASENIQVCVPSSPKQIFHLLRRQAIRKMRTPLIVISPKSLLRNPQAVSTLDDLSNGSFECVIDDELDNKNDVKKIIMCSGKVFYELIEKRNKEKRHDIAIIRIEQLYPFPYDDLEEILLRYQNVHEYIWCQEEPLNQGAWFSHRHRIQRVLDRLGNNNEVKLVSRPPAAAPAVGLMKLHLKQQETLINEAIV

SEQ ID NO: 95914 - protein, 205 aa, Unknown
  Bacterial polypetide isolated from the Sargasso Sea
EDNMQVVNCTTPANYFHVLRRQLRRDFRKPLIVMTPKSLLRHKACVSELADMGPGTSFHRILDERDTKVNHGNAKRVVMCSGKVYFDLSAKRDERGAWDTEIVRLEQLYPFPSKALEEVITMTPEATFVWCQEEPKNMGAWTLVRDFVEDMMADVGIKQQRLVYAGRVAAASPATGSLSRHNAEQQGLVAAALGLNAADKAAAAE

SEQ ID NO: 95915 - protein, 280 aa, Unknown
  Bacterial polypetide isolated from the Sargasso Sea
SNIKEILSVLRKIYCGNIGYEYMHISNPTERKWFRDRVEKDENALKFTVNGKGAILNKLIQAEGFEKFLHTKYVGSKRFGLDGGESLIPALEQIIKIGGQSNIKEVKIGMSHRGRLNVLANVLQKSYKRIFNEFAGEINNTDEDSAGDVKYHLGASSDREFDGNSVHVSLTDNPSHLEAVNPVVLGQTRAKQFFHKDTDRNKVIPILIHGDAAFAGQGIVAECFAMSGLPGHNTGGTIHIIVNNQIGFTTSPRFARSSPHPSDIAKMVDAPIIHVNGDDP

SEQ ID NO: 95916 - protein, 202 aa, Unknown
  Bacterial polypetide isolated from the Sargasso Sea
NLQVMNCTTPANYFHALRRQVLRDFRKPLIMMTPKSLLRNKYCKSNLRDFSKDNSFHRVMWDHSMDPVNKGFIKLKKNSEIKKVILCSGKVYFDLLDAREKVKKNDVILFRIEQLYPFPAKSLIKELKPFAKNANFFWCQEEPKNMGAWLLVRDYIQWTLETIKAKNTEISYIGRNPDASPATGYAKRHLSEQQEIINKVFE

SEQ ID NO: 95917 - protein, 205 aa, Unknown
  Bacterial polypetide isolated from the Sargasso Sea
CAGENIQVVNCTTPSNYFHVLRRQMHREFRKPLIIMTPKSLLRHKRCISKISEFVSKSSFHRVLEDDAYDKEKNLISLKKDSKIRKVVMCSGKIYYDLIEQREITKTDDVIFVRLEQLYPFPAKTLAGVLKRYKKAQFIWCQEEPKNMGAWNTVRNYIERTLDMINFKDINIKFVGRSASSTTATGNANKHLAQQKEILEKILKH

SEQ ID NO: 95918 - protein, 315 aa, Unknown
  Bacterial polypetide isolated from the Sargasso Sea
IVTWTYVFKTNPVRPRREHEGPIILENFGLSDADMDTKFQVGERIGIGNATLREIHEFLEQTYCGSIGVEYKFMRTIEIIQWLEQKMESCRNTPNFSRKEKIDLLRKTNEAVAFENFLHTKFVGQKRFSLEGGESIIPALDTVVEFGAELGVEEFVIGMAHRGRLNVLANILGKTYNDIFAEFEGKGFGDDVFAGDVKYHMGYSSDKKARNGKIVHLSLTPNPSHLEAVNPVVQGISRAKIDQYHEGNAKKLVPILIHGDHSMAGQGIVYEVLQMSKLPGYGTGGTVHLVINNQVGFTADFIEGRSSTYCTDVRK

SEQ ID NO: 95919 - protein, 247 aa, Unknown
  Bacterial polypetide isolated from the Sargasso Sea
QFGDFSNGAQIMIDQYLSSAEDKWKLQNGLVLMLPHGYEGQGAEHSSARLERYLQLCAKNNMYVANCTTPSNLFHILRRQQITSFRKPLVLLTPKSLLRHPKVISKASDLINGEFLSIIDDKDDEKNLKSLVFCSGKFYYDLLHYKRVNKITNVAIVRIEQLFPLPKKEINDIIKSYSYDEIVWAQEEPRNMGAWGYLLMHLDIAKNFRVASRRFYGAPASGSKARFDKRHSEVIEYVFDKSKNNMR

SEQ ID NO: 95920 - protein, 269 aa, Unknown
  Bacterial polypetide isolated from the Sargasso Sea
FRDRMEKDENHLKFTTNGKKNILNKLIQAEGFEKFLALKFVGTKRFGLDGAESLIPALEQIIKRGGQLGVKEIKIGMPHRGRLNVLANVLQKSYKRIFNEFAGEFSNTPEDSAGDVKYHLGASSNREFDGNSVHVSLTDNPSHLEAVNPVVLGQTRAKQFFHKDSKRNKVIPILIHGDAAFAGQGVVAECFAMSGLPGHNTGGTIHIIVNNQIGFTTSPRFARSSPYPSDLGKVVDAPIIHCNGDDPEAVVHCAKIAIEFRQKFNKDVV

SEQ ID NO: 95921 - protein, 303 aa, Unknown
  Bacterial polypetide isolated from the Sargasso Sea
FMHISNPKERKCFRDRIEKDENAIKFTIKGKQAILSRLIYAEGFEKFLHTKYIGTKRFGLDGGESLIPALEQIIKVVGQNKVKEVKIGMSHRGRLNVLANLLQKSYKRIFNEFTGEIEATSEESAGDVKYHLGASSNREFDGNSVHISLTDNPSHLEAVSPVVLGQTRAKQYFHQDYERNKVIPILIHGDAAFSAQGVVAECFAMSGLPGHNTGGTIHIIINNQIGFTTSPRFARSSPYPSDIAKMVEAPILHVNGDDPEATVYAARIATEFRLKFNRDVVIDMFCYRRFGHNEGDEPSLHNH

SEQ ID NO: 95922 - protein, 267 aa, Unknown
  Bacterial polypetide isolated from the Sargasso Sea
MAHRGRLNVLVNTLGKMPADLFAEFEGKHVDDLPAGDVKYHKGFSSDVSTEGGPVHLSLAFNPSHLEIVNPVVEGSAKARMDRRGDEDGLQVLPVQIHGDAAFAGQGVVMETLNLAQTRGYGTHGTLHIVINNQIGFTTSDPRDARSTLYCTDVVKMIEAPVLHVNGDDPEAVVLAIQIAIDYRMQFHKDVVIDIVCFRKLGHNEQDTPAVTQPLMYKKIAQHPGTRALYAEKLVQQGVITAEDADNYVKAYRKAMDDGHHTVDPVL

SEQ ID NO: 95923 - protein, 300 aa, Unknown
  Bacterial polypetide isolated from the Sargasso Sea
EIYEKRLINEKILKKDESIKIKKEFIKFLDKEFELAKSYKPNKADWLDGTWKGYKTASFDARKGITSISKKDFLEIGNQIHKIPNSFNIHKKIQKIFDNRKQSTQEGKNIDWATAEALAFASLLKEGNGVRLSGQDVGRGTFSQRHAVLYDQENENRFVPLRHFIKEQGLFEIVDSFLSEFGVLGFEYGYSQTDPKTLVLWEAQFGDFANGAQIVIDQFITTGERKWLRMSGLTILLPHGHEGQGPEHTSSRIERFLLMCAEDNIQVANCTSPANYFHILRRQLLRDFRKPLVLMTPKST

SEQ ID NO: 95924 - protein, 279 aa, Unknown
  Bacterial polypetide isolated from the Sargasso Sea
QDSGRGTFSQRHAIITAEDNTKYVPLNHISEDQARFEVYNSFLSEYGVLGFEYGYAYASPNSLTIWEAQFGDFVNGAQIVIDQFVSSSETKWQRMNGVVLMLPHGHEGQGPEHTSARIERFLTLCADNNMQIINCTTPANFFHVLRRQMTFPFRKPLVIFTPKSLLRHPKCVSPLDSFLEGTRFIEVIKDEYSHTQSVRKLLLCCGKVYYDLLEHQQKNQIKDIAIIRLEQLYPFPEKQLRSVLNLYSNAKNIFWVQEEPENMGAWSFMLRTFPQENRL

SEQ ID NO: 95925 - protein, 277 aa, Unknown
  Bacterial polypetide isolated from the Sargasso Sea
KIKEVKIGMSHRGRLNVLANVLQKSYKRIFNEFAGEVNNANDDGAGDVKYHLGASSDREFDGNSVHVSLTDNPSHLEAVNPVVLGQTRAKQFFHKDVERNKVIPILIHGDAAFAGQGIVAECFAMSGLPGHNTGGTIHIIVNNQIGFTTSPRFARSSPHPSDVAKMVEAPIIHINGDDPEAVVYGARIAAEFRLKFNRDVVIDLVCYRRFGHNEGDEPSFTQPLMYKKIRSHPSTVNIYGKKLVNESLISEESLNSQINKFKELLDKQFKTAKDYNP

SEQ ID NO: 95926 - protein, 323 aa, Unknown
  Bacterial polypetide isolated from the Sargasso Sea
GEALIPAMEQIIKRGGNLGVKEIVIGMPHRGRLSVLANVMGKPFKAIFNEFQGGSYKPDEVEGSGDVKYHLGASSDREFDGNKVHLSLTANPSHLEAVNPVVLGKVRAKQEQLNDDSRKQVLPILLHGDAAFAGQGVVAECFGLSGLKGHKTGGTIHIIVNNQIGFTTSPSNSRSSPYPTDIALMVEAPIFHVNGDDPEAVVHAAKVATEFRQKFRKDVVIDIFCYRRFGHNEGDEPMFTQPNMYAKIKSQPTALQKYTKRLIEDGLLPEGEIDQIKTKFQSFLSQEFEASKSYKPNKADWLDGKWSGVKSREQFTREARRLL

SEQ ID NO: 95927 - protein, 264 aa, Unknown
  Bacterial polypetide isolated from the Sargasso Sea
MKKTYCGKIGYEFMHISNPDERKWFRDRIEQDKNALQFTKNGKEAILNKLVQAEGFEKFLATKYVGTKRFGLDGGESLIPALEQIIKIGGQNNIKEVKIGMSHRGRLNVLANVLQKSYKKIFNEFAGEFSSDTEDSAGDVKYHLGASSDREFDGNSVHVSLTDNPSHLEAVNPVVLGQTRAKQFFHKDRERNKVIPILIHGDAAFAGQGVVAECFAMSGLPGHNTGGTIHIIVNNQIGFTTSPRFARSSPYPSDVAKMVEAPIL

SEQ ID NO: 95928 - protein, 287 aa, Unknown
  Bacterial polypetide isolated from the Sargasso Sea
DSAGDVKYHLGASSNREFDGNSVHVSLTDNPSHLEAVNPVVLGQVRAKQFFHNDKERKQVIPILIHGDAAFAGQGVVAECFAMSGLKGHNTGGTIHIIVNNQIGFTTSPRFARSSPYPSDLGKVVEAPILHCNGDDPEAVVHCAKIAIEFRQRFNRDVVIDLICYRRFGHNEGDEPSFTQPLMYKKIRSHPSTLKIYAKKLIDEGSITVSDFESEKKAFNSLLDNQFKSAKDHKPKLDWFEGTWSRYRPQKGKDKRGNTGVNLDTLAKISEKSNILNEDLNVHKTIK

SEQ ID NO: 95929 - protein, 283 aa, Unknown
  Bacterial polypetide isolated from the Sargasso Sea
NEFAGELFSTHDESAGDVKYHLGASSDREFDGNSVHISLTDNPSHLEAVDPVVLGQTRAKQFFHKDLKRNKVIPILIHGDAAFAGQGIVAECFAMSGLPGHNTGGTIHIIVNNQIGFTTSPRFARSSPYPSDLGKVVDAPILHCNGDNPESVVHCAKIAIEFRQQFNKDVVIDMICYRRFGHNEGDEPSFTQPLMYKKIREHPTTLNVYGGTLVKHGTLNQEEFDKMKIEFRNLLDEQYKTAKDYKPKIEWYEGTWSRYKPEKGKDKRGKSGVNLDKIIKISE

SEQ ID NO: 95930 - protein, 243 aa, Unknown
  Bacterial polypetide isolated from the Sargasso Sea
SGQDVGRGTFSQRHAFLYDQENENRFVPLRHFTKEQGLYEIVDSFLSEFGVLGFEYGYSQADPKTLVLWEAQFGDFANGAQIIIDQFITTGERKWLRMSGLTILLPHGHEGQGPEHSSSRIERFLTMCAEDNIQVANCTSPANYFHILRRQLLRDFRKPLILMTPKSTLRHKKNTSSIDEFINGSTFHRVLSDPIQEGEQKNIKRLILCSGKIYFELQDYIEKLKKTGIHIVRIEQLYPFPYE

SEQ ID NO: 95931 - protein, 277 aa, Unknown
  Bacterial polypetide isolated from the Sargasso Sea
AVTHCAKIATDYRQKFNRDVVIDMICYRRFGHNEGDEPSFTQPTMYRKIKKHPTTLNIYAKKLIDEGVVTSEEFNNMKTKFKDLLQEQFTTAKEYKPKLEWYEGVWSRFKPERGKDKRGVTGVPLEKIKKIGEKITLIPESFNAHPTLKKIFENKKKMFQTGEGFDWSTAEHLAFATLLDEGYPVRLSGQDSARGTFSQRHSVLKDQLNGTKYIPLNNISRNQKRFEVIDSLLSEMAVLGFEYGYALSEPSTLVIWEAQFGDFANGAQVIIDQFITS

SEQ ID NO: 95932 - protein, 246 aa, Unknown
  Bacterial polypetide isolated from the Sargasso Sea
MDNLSYIGNADPSAIEYLYKEYLKNPENVDTGWQKFFEGFDFARTNYDQDGEIPENYIKEFQVINLIQGYRTRGHLFTKTNPVRERRKYNPTLELSNFGLQESDLDLIFQAGEQVGIGPAPLKEIIAHLNSTYCQSIGIEYTYMRDPKRLEWFTKKIDFHQEVKFSKERKLDIYSKLNKASQFESFLGKKFVGQKRFSIEGGESLIPALSALIEKGSELGVAYFVMGMAHRGRLNTLTNILKKDLE

SEQ ID NO: 95933 - protein, 225 aa, Unknown
  Bacterial polypetide isolated from the Sargasso Sea
DLGVEEFVMGMAHRGRLNTLANIFGKSTKDIFSEFDGKDYDDDVFDGDVKYHMGWTSKIDPNKDGKKINISLAPNPSHLETVGAVVQGIARAKLENSYSNDTSKVLPIIVHGDAAIAGQGLAYEIVQMASLKGYSTGGTVHIIVNNQIGFTTNYLDARSSTYCTDVGKVTLSPVMHVNADDVEAVVHAVLFALNYRMKFNSDVFIDLLGYRKYGHNEGDEPRFTQ

SEQ ID NO: 95934 - protein, 314 aa, Unknown
  Bacterial polypetide isolated from the Sargasso Sea
MEMIQKMVVFAAKLACEYRYNFKKDIVIDMFCYRRRGHNEADEPSSTQPIMYQKIAKQISVKRAYQEKLISSGVTSQSECDEIEKNYRSAIEKGDSVVHNLATKPNESMWFDWTPYMDQKGDVKIKSSFSKKRFKDLADKAFMPPKDFTLQKQVDKIFSDRRQMAEGNIPVNWGFAENMAYATLLDQGYPIRFSGQDIRRGTFSHRHAIVLNQQDGRGCIPLVDIAKNADTTFDVYDSLLSEEAVLGFEYGYSATSPKGLVMWEAQFGDFVNGAQVVIDQFIVSAEHKWERLSGLVMLLPHGYEGQGPEHSSAR

SEQ ID NO: 95935 - protein, 239 aa, Unknown
  Bacterial polypetide isolated from the Sargasso Sea
KIYGEKLINEEIISSEDFNNNIKKFKDLLDDQYKNAKNYKPKIEWFEGTWSRYKPRRGQDKRGDTGYQTTKLLEISDKIHSLPSKLNIHKTIMKIFEARKNSVLEGNQIDWSTAEALAFGSLLEEGYPVRLVGQDSGRGTFSQRHSVLRNQVDNSRYIPLNNISSKQKKFEIVDSFLSELAVLGFEYGYSLVEPNTLTIWEAQFGDFANGAQVIIDQFISSGERKWSRASGLVLLLPHG

SEQ ID NO: 95936 - protein, 279 aa, Unknown
  Bacterial polypetide isolated from the Sargasso Sea
LRDRVEKDENALQFTKNGKEAILNKIIQAEGFEKFLHLKYVGTKRFGLDGAESLIPALEQIIKIGGQNKVKEVKIGMSHRGRLNVLANVLQKSYKRIFNEFAGEIHSSSDDDGAGDVKYHLGASSDRVFDGNPVHVSLTDNPSHLEAVNPVVLGQTRAKQFFHNDKERKKVIPILIHGDASFAGQGIVAECFAMSGLPGHNTGGTIHFIINNQIGFTTSPRFARSSPHPSDVAKMVDSPIIHANGDDPESVVYAARIAAEFRLKFNRDVVVDLVCYRRF

SEQ ID NO: 95937 - protein, 330 aa, Unknown
  Bacterial polypetide isolated from the Sargasso Sea
ILHISNPTERKWFRDRVEKTDDFNFTQNGKEAILNKLIQAEGFEKFLHTKYVGTKRFGLDGGESLIPALEQIIKIGGQSNVKEVKIGMSHRGRLNVLANVLQKSYKRIFNEFAGEISSKSKDDTGDVKYHLGASSNREFDGNSVHVSLTDNPSHLEAVNPVVLGQTRAKQFFHKDKERKKVIPILIHGDAAFAGQGVVAECFAMSGLPGHNTGGTIHIIVNNQIGFTTSPRFARSSPYPSDIAKMVEAPIIHVNGDDPEAVVYAARIATDFRLKFNRDVVIDLICYRRFGHNEGDEPSFTQPLMYKKIRSHPSTIKVYGEKLVSEGSLQM

SEQ ID NO: 95938 - protein, 267 aa, Unknown
  Bacterial polypetide isolated from the Sargasso Sea
RRFGHNEGDEPSFTQPIMYKKIKQQPSTLKLYSSQLINENILTVEQYKTQIENYNKYLDQEFQSSKNYISNEQDWFTGVWSKFTTEVGSDRRGVTGVDENIIRSLGHKLSEIPKDFNPHHTIKRIFDNKKQMIKTGENIDWATAESLAFATLLNEGYPVRLVGQDSVRGTFSQRHAGITDQLNGEKYFPLKNLTDSQAQAEIIDSLLSEMGVLGFEYGYSLSEPDSLVLWEAQFGDFANGAQVIFDQFISSGEKKWSRASGLVVLLP

SEQ ID NO: 95939 - protein, 177 aa, Unknown
  Bacterial polypetide isolated from the Sargasso Sea
KPLIVMTPKSLLRHKRCISYLEDFTKKTRFHRILEDHAYLENSKLIKLKTNNKIKKVIMCSGKIYFDLLEAREKSKNDEIVFIRVEQLYPFPVKHLGRELQKYKNAEFIWCQEEPMNMGAWNTVKYYIERTLEIVKIKGEKVKYAGRNAAASPATGNLNKHLAEQKEILEKVVGRFN

SEQ ID NO: 95940 - protein, 261 aa, Unknown
  Bacterial polypetide isolated from the Sargasso Sea
TLGKMPADLFAEFEGKHVDDLPAGDVKYHKGFSSDVSTEGGPVHLSLAFNPSHLEIVNPVVEGSAKARMDRRGDEDGLQVLPVQIHGDAAFAGQGVVMETLNLAQTRGYGTHGTLHIVINNQIGFTTSDPRDARSTLYCTDVVKMIEAPVLHVNGDDPEAVVLAIQIAIDYRMQFHKDVVIDIVCFRKLGHNEQDTPAVTQPLMYKKIAQHPGTRALYAEKLVQQGVITAEDADNYVKAYRKAMDDGHHTVDPVLSNYKSK

SEQ ID NO: 95941 - protein, 266 aa, Unknown
  Bacterial polypetide isolated from the Sargasso Sea
QAEGFEKFLATKYVGTKRFGLDGGESLIPALEQIIKIGGQNNIKEVKIGMSHRGRLNVLANVLQKSYKRIFNEFAGEYSSDTEDGAGDVKYHLGASSDREFDGNSVHVSLTDNPSHLEAVNPVVLGQTRAKQFFHKDRERNKVIPILIHGDAAFAGQGVVAECFAMSGLPGHNTGGTIHIIVNNQIGFTTSPRFARSSPYPSDVAKMVEAPILHVNGDDPEAVVYATRIATEFRLKFNRDVVVDLICYRRFGHNEGDEPSFTQPLM

SEQ ID NO: 95942 - protein, 201 aa, Unknown
  Bacterial polypetide isolated from the Sargasso Sea
MQVMNCTTPANYFHALRRQMHRDFRKPLILMTPKSLLRHKHCVSDLEDFNKKNSFHRVLWDHAIDPKTKGFIKLKKSNKIKKVILCSGKIYFDLLEAREKLKRDDVVFYRIEQLYPFPAKSLVKELRPYAKKAKFYWCQEEPKNMGAWFSVRDYIQWTLDNIKANNNKISYIGRSPDASPATGYAKTHISQQQEIVKKVFE

SEQ ID NO: 95943 - protein, 262 aa, Unknown
  Bacterial polypetide isolated from the Sargasso Sea
ICYRRFGHNEGDEPSFTQPLMYKKIRSHPSPVKVYGEKLVNDRSISNEYLNNSIKKFKDLLDEQFKNAKNYKPKIEWFEGTWSRYKPERGKDKRGVTGSDTKKLKEISDKINSIPQEINIHKTIKKILDNRKLSVSNEKGIDWSTAEALAFGSLLEEGYPVRLVGQDSGRGTFSQRHSVLRNQQDNSRYVPLNNISKKQKNFEVVDSFLSELAVLGFEYGYSLVEPNTLTIWEAQFGDFANGAQVDIDQFVASGERKCQGPL

SEQ ID NO: 95944 - protein, 211 aa, Unknown
  Bacterial polypetide isolated from the Sargasso Sea
RFLQLCSNDNMQVMNCTTPANYFHALRRQMHRSFRKPLIIMTPKSLLRNKYCVSNLEDFNKNNTFHRVLWDHAIDPKSKGFIKLKENSKIKKVILCSGKVYFDLLDAREKLKRDDVVMYRIEQLYPFPAKALVKELKPYAKNAQFFWCQEEPKNMGAWFSVRDYIQWTLDTLKANNNKISYMGRSPDATPATGYAKRHNSQQQEIINKVFD

SEQ ID NO: 95945 - protein, 327 aa, Unknown
  Bacterial polypetide isolated from the Sargasso Sea
EDVVIDIFCYRRFGHNEGDEPMFTQPIMYKKIKTHPTALELYSRKLKAEGVLEDGEFNKLKSNFQSYLNDEFEAGKTYKPNKADWLDGKWSGLTKRPDNYERGKTSIKKDVFKKISKVLTTVPNNFNIHKTVSRMIENKKDTLNKGEGIDWATAEALAFGSLLNEGFSVRLSGQDSKRGTFSQRHSAIIDQETEERFYPLYNITQNSIEFGVSKIGGKLDISQKTQFEVIDSMLSEYAVLGYEYGYSLAEPNCLTLWEAQFGDFVNGAQIMIDQFISSGEKKWLRMSGLVMLLPHGYEGQGPEHSSARLERFLQACAEENWIVANVS

SEQ ID NO: 95946 - protein, 296 aa, Unknown
  Bacterial polypetide isolated from the Sargasso Sea
RFGNVLQKSYKKIFNEFAGEFSTDTEDGAGDVKYHLGASSDREFDGNSVHVSLTDNPSHLEAVNPVVLGQTRAKQFFHKDRERNKVIPILIHGDAAFAGQGVVAECFAMSGLPGHNTGGTIHIIVNNQIGFTTSPRFARSSPYPSDVAKMVEAPILHVNGDDPEAVVYATRIATEFRLKFNRDVVVDLICYRRFGHNEGDEPSFTQPLMYKKIRSHPSVYKIYGNKLVNEKSITQELLNQNVKSFKDLLDEQYKSAKDYKPKIEWFEGTWSRYKPEKGKDKRGITGFDENKLKIIS

SEQ ID NO: 95947 - protein, 290 aa, Unknown
  Bacterial polypetide isolated from the Sargasso Sea
IIKIGGQSKVKEVKIGMSHRGRLNVLANVLQKSYKRIFNEFAGEISSKSKDDTGDVKYHLGASSDRDFDGNLVHVGLTDNPSHLEAVNPVVLGQTRAKQFFHGDKQRNKVIPILIHGDAAFAGQGVVAECFAMSGLPGHNTGGTIHIIINNQIGFTTSPRFARSSPYPSDIAKMVEAPIIHVNGDDPEAVVYAARIATDFRLKFNRDVLIDLICYRRFGHNEGDEPSFTQPLMYKKIRSHPSPIKVYGQNLINEGSISNDYLNNSIKKFKGLLDEQFKNAKNYKPKIEWL

SEQ ID NO: 95948 - protein, 198 aa, Unknown
  Bacterial polypetide isolated from the Sargasso Sea
FLQLCASENIQVCVPSSPKQIFHLLRRQAIRKMRTPLVVISPKSLLRNPMAVSNLDELTNGSFDCVIDDDIKKPEAVKRLILCSGKVFYDLIEKKKEENREDIAVVRIEQLYPFPYDDLEEILTKYQNVQEFIWCQEEPLNQGAWFSHRHRIQRVLDRLGDGLEVSLVSRPAAAAPAVGFMKLHLQQQKDLVNEAICK

SEQ ID NO: 95949 - protein, 289 aa, Unknown
  Bacterial polypetide isolated from the Sargasso Sea
FDSLPQVDGSNEEISHQEVINRFKEDEVNPSIQNISGETKLNANQTKVFQVIEAYRNRGHQKANLDPLGLNPIRHTEDLEIEFYGLDSSNLSEVFNLDSLNIGKRSASLSEILKALESIYCQTLGIEYNHISSLSERLWFQKRLEPNLGKLNFNTEEQKYILKRLSSAEGLAKFLASRYPGMKRFGIDGAESLIPLVDSLIQNCGVFGAEQICFGMAHRGRLNLLVNVLGKSPKELFTEFEEDYELEGASTGDVKYHLGSSTNILTPNGEVHVSLANNPSHLEIVDPVV

SEQ ID NO: 95950 - protein, 260 aa, Unknown
  Bacterial polypetide isolated from the Sargasso Sea
LVCYRRFGHNEGDEPSFTQPVMYTKIRSHPSSVKIYGEKLINDGLITSEDLDNKVGKFKILLNDQLKNAKNYKPKIEWFEGTWSRYKPEKGKDKRGVTGADKKILSNISEKINTIPKELNIHKTITRIFENRKQVIQQGYNIDWSTAESLAFATLLEEGYPVRLVGQDSGRGTFSQRHSILRNQKDNSRYIPLNNISNNQKSFEIVDSFLSELAVLGFEYGYSLVEPNTLTIWEAQFGDFANGAQIIIDQFISSGERKWK

SEQ ID NO: 95951 - protein, 245 aa, Unknown
  Bacterial polypetide isolated from the Sargasso Sea
SNGAQIIIDQYISSAEDKWKLQNGIVLFLPHGYEGQGAEHSSARMERYLQLCAKDNMYAANCTTPSNLFHLLRRQMLTKFRKPLILFTPKSLLRHPKVMSNVDDLTKSKFIPVITDSEIDPSKAVSLVFCSGKFYFDLIDYREKNNIKNVAIVRIEQLFPLPVKLIISEIKKFSNAKDIVWAQEEPRNMGAWNHIQTYHPIAKNMRPATRRFYGSTASGSYTRFERRHNQVIEYVFDKTKNNFRK

SEQ ID NO: 95952 - protein, 294 aa, Unknown
  Bacterial polypetide isolated from the Sargasso Sea
YRRYGHNEGDEPRFTQPMLYKSIAKHENVFKIFKDQLLKNAVITETESDEMVAKFKQSLQEKLDSTRNKKTKAELDMFKRKWEGFRTSEEKDFEKSTKTGATKTSLEQVAKALSTAPKGFNVFKKTAKLLKQREEMFFKQKKVDWGLAEQLAFGTLILDGNNVRLSGQDCQRGTFSHRHSVIKDEINETHYTPLNQLSKTAGYEVLNSHLSEYCVMGFEYGYSLASPNDLTIWEAQFGDFSNGAQIMIDQYLTSSEKKWQRMSGLTLLLPHGYEGQGPEHSSARLERYLQLCAE

SEQ ID NO: 95953 - protein, 330 aa, Unknown
  Bacterial polypetide isolated from the Sargasso Sea
SKDKNALQFTKNEKEAILNKLVQAEGFEKFLATKYVGTKRFGLDGGESLIPALEQIIKIGGQNQIKEVKIGMSHRGRLNVLANVLQKSYKRIFNEFAGEISSDKEDGAGDVKYHLGASSDRKFDGNSVHVSLTDNPSHLEAVNPVVLGQTRAKQFFHKDKERNKVIPILIHGDAAFAGQGVVAECFAMSGLPGHNTGGTIHIIVNNQIGFTTSPRFARSSPYPSDVAKMVEAPILHVNGDDPEAVVYATRIASEFRLKFNRDVVVDLICYRRFGHNEGDEPSFTQPLMYKKIRSHPSVYKIYGNKLVNEQSITEELLIQNVKSFKQLLDE

SEQ ID NO: 95954 - protein, 315 aa, Unknown
  Bacterial polypetide isolated from the Sargasso Sea
PYPSDIAKMVKAPIIHVNGDDPEAVVYAARIATDFRLKFNRDVVIDLICYRRFGHNEGDEPSFTQPLMYKKIRSHPSPVKVYGDRLVDNHLITKDFLNSSIKKFKDLLDDQFKNAKDYKPKIEWFEGTWSRYRPERGKDKRGVTGADTDKLIKISNKINSIPNEINIHKTISKILENRRLSVNNGTSIDWSTAESLAFGSLLEEGYPVRLVGQDSGRGTFSQRHSVLRNQIDNSRYIPLNNISKNQKNFEIVDSFLSELAVLGFEYGYSLVEPNTLTIWEAQFGDFANGAQVVIDQFIASGERKWSRASGLVMLL

SEQ ID NO: 95955 - protein, 299 aa, Unknown
  Bacterial polypetide isolated from the Sargasso Sea
MERKYLEELHPADHGFKKEDYNKKIYLGKYMNKKYATINDILTFFRKVYCSTIGVEYMHISDPIEKIWFRERMEREENQLKFTENGKKAILNKLIQAEGFEKFLAVKFVGTKRFGIDGGEALIPALEQIIKRGGHLGFKEVKIGQPHRGRLNILANVLQKSYKRMFNEFAGEYTSFSADSTGDVKYHLGASSNREFDGNLVHVSLTDNPSHLEAVNPVVLGQTRAKQFFHKDRERKQVIPILIHGDAAFAGQGVVAECFAMSGLPGHNTGGTIHIIVNNQIGFTTSPKFARSSPYPSDL

SEQ ID NO: 95956 - protein, 277 aa, Unknown
  Bacterial polypetide isolated from the Sargasso Sea
FEKFLAVKFVGTKRFGLDGGESLIPALEQIIKRGGHLGFKEVKIGQPHRGRLNILANVLQKSYKRMFNEFAGEYASFNSDSTGDVKYHLGASSNREFDGNLVHVSLTDNPSHLEAVNPVVLGQTRAKQFFHKDEKRRQVIPVLIHGDASFAGQGVVAECFAMSGVPGHNTGGTIHIIVNNQIGFTTSPKFARSSPYPSDLAKMVDAPILHVNSDDPEAVVHCTKIATDYRQKFNKDVVIDMICYRRFGHNEGDEPSFTQPTMYRKIKKHPTTLSIYS

SEQ ID NO: 95957 - protein, 269 aa, Unknown
  Bacterial polypetide isolated from the Sargasso Sea
LANVLQKSYKRIFNEFAGEISSSEDGAGDVKYHLGASSDREFDGNSVHVSLTDNPSHLEAVNPVVLGQTRAKQFFHKDKERKKVIPILIHGDAAFAGQGVVAECFAMSGLPGHNTGGTIHIIINNQIGFTTSPRFARSSPYPSDIAKMVEAPIIHVNGDDPEAVVYAGRIATDFRLKFNRDVVIDLICYRRFGHNEGDEPSFTQPLMYKKIRTHPSPVNVYGERLVRDGTISKSFLDESIKKFKVLLNDQFKTAKDYKPKIEWFEGTWS

SEQ ID NO: 95958 - protein, 305 aa, Unknown
  Bacterial polypetide isolated from the Sargasso Sea
KPFRAIISEFMGNPSNPEETGGSGDVKYHMGSSSDREFDGVNVHFTLNANPSHLEVVNPVVIGRVRAKQNQRNDKLRNKVLGLLIHGDAAFAGQGILAETFDFAELRSYKTGGTLHLIINNQIGFTTSPAYSRSSPYCTDVAKIVMAPIFHVNADDPESVVHVSRIATEFRQKFAADAVIDIIGYRRYGHNEGDEPSFTQPIMYRKIANHPFVTKIYAEKLIKEKKITEEQAKRVYDNRNQFLEEEFQAGSNYLPNKADWLEGKWTGLKKAPGLEERRGITGVTIDKIKKIGEILTSVPRDLKFI

SEQ ID NO: 95959 - protein, 211 aa, Unknown
  Bacterial polypetide isolated from the Sargasso Sea
RFLQLCSNDNMQVMNCTTPANYFHALRRQMHRDFRKPLIIMTPKSLLRHKHCVSSLSDFSKKNTFHRVLWDHAIDPKVKGFIKLKKKEKIKKVILCSGKIYFDLLEAREKFKRDDLIFYRIEQLYPFPAKALAKELKPYAKKAKFYWCQEEPKNMGAWFSARDYIQWTLDNIKANNRKISYIGRSPDASPATGYAKRHISQQQEIIKKVFE

SEQ ID NO: 95960 - protein, 292 aa, Unknown
  Bacterial polypetide isolated from the Sargasso Sea
KFLGQKRFSLEGGETLIAILDSIFQRCGKNKVDEIVMGMAHRGRLNVLGNFLGKSFEYILREFSENYIPDTIYGDGDVKYHLGFETKRKTLDDHLVELRLAANPSHLEAVDPVVQGKARARQRIRQDLERKKVLPILIHGDAAIAGQGIVSEVFNFSQLNGYRTGGTIHIVVNNQIGFTTGPADARSSRYCTDVAKIVEAPIFHVNCNDPLAVVAAVETAFDYRQTFGSDVVIDMYCYRKHGHNESDEPAFTQPVLYQKISSMPKISQILAEQLKSQGDISDDEVQSIKDDY

SEQ ID NO: 95961 - protein, 305 aa, Unknown
  Bacterial polypetide isolated from the Sargasso Sea
SSPYPSDVQKIAQAPIFHVNGDDPEAVVHCAKIATEYRQKFNRDVVIDMVCYRRFGHNEGDEPSFTQPIMYKKIKSHPTTLSIYGKKLSKEGLTSDDNLQKEKIKFKNYLEKEFESSKNYKSELKWFDGAWSRFKPGLGKDKRGVSGVDKTKLIDIGKKITNIPQNFEVHKTLKKIFDLRAQAIKKGEAIDWSTAESLAFATLLTEGFSVRLSGQDSGRGTFSQRHAVLRNQQNHERYIPLNNISKGQKNFEIIDSLLSELAVLGFEFGYSISEPETLVLWEAQFGDFANGAQIIIDQFISSGES

SEQ ID NO: 95962 - protein, 274 aa, Unknown
  Bacterial polypetide isolated from the Sargasso Sea
GAGDVKYHLGASSDREFDGNSVHVSLTDNPSHLEAVNPVVLGQTRAKQFFHKDKERKKVIPILIHGDAAFAGQGVVAECFAMSGLPGHNTGGTIHIIVNNQIGFTTSPRFARSSPYPSDISKMVEAPIIHVNGDDPEAVVYAARIATDFRLKFNRDVVIDLICYRRFGHNEGDEPSFTQPLMYKKIRSHPSPIKVYGEKLINEGSITKNFLDNSIRQFKDLLDEQFKTAKDYKPKIEWFEGTWSRYKPERGKDKRGVTGADIKILMNISNQINL

SEQ ID NO: 95963 - protein, 245 aa, Unknown
  Bacterial polypetide isolated from the Sargasso Sea
FLEQTYCGSIGVEYKFMRTIEIIQWLEEKMESCRNTPNFTREEKIDLLRKTNEAVAFENFLHTKFVGQKRFSLEGGESIIPALDTVVEFGADLGVEEFVIGMAHRGRLNVLANILGKTYNDIFAEFEGKGFGDDVFAGDVKYHMGYSSDKKAKNDKIVHLSLTPNPSHLEAVNPVVEGISRAKIDQYYEGNSKKLVPILIHGDHSMSGQGIVYEVLQMSKLPGYGTGGTVHLVINNQVGFTADFI

SEQ ID NO: 95964 - protein, 271 aa, Unknown
  Bacterial polypetide isolated from the Sargasso Sea
GISFTKNGKLAILNKLIQAEGFEKYLAKKYVGTKRFGLDGGESLIPALEQVIKVGGQYSVKELKIGMPHRGRLNVLANLLQKSYKRIFNEFAGEYGEIDKDSTGDVKYHLGASSDREFDGNSVHISLTDNPSHLEAVNPVVLGQTRAKQFFHKDQKRKKVIPILLHGDAAFAGQGIVAECFAMSGLPGHNTGGTIHIIVNNQIGFTTSPRFARSSPYPSDVAKMVEAPILHVNADDPEAVVYCARIATEFRLQFNRDVVIDLICYRRFGHN

SEQ ID NO: 95965 - protein, 302 aa, Unknown
  Bacterial polypetide isolated from the Sargasso Sea
MRESEYLDELHPDFYGFKKENYDKKIFLNGVINRKYANIREILKFMKKTYCGKIGYEFMHISNPDERMWFRDRIEQDKNALQFTKNGKEAILNKLVQAEGFEKFLATKYVGTKRFGLDGGESLIPALEQIIKIGGQNNIKEVKIGMSHRGRLNVLANVLQKSYKKIFNEFAGEFSSDTEDSAGDVKYHLGASSDREFDGNSVHVSLTDNPSHLEAVNPVVLGQTRAKQFFHKDRERNKVIPILIHGDAAFAGQGVVAECFAMSGLPGHNTGGTIHIIVNNQIGFTTSPRFARSSPYPSDVAK

SEQ ID NO: 95966 - protein, 351 aa, Unknown
  Bacterial polypetide isolated from the Sargasso Sea
GVINKQYSNVSEILKFLRDKYCGPLGYEYMHISNPTERKWFRDRVEKADDFKFTQNGKEAILKKLIQAEGFEKFLHTKYVGSKRFGLDGGESLIPALEQIIKIGGQSKIKEVKIGMSHRGRLNVLANVLQKSYKRIFNEFAGEINSNSEDDTGDVKYHLGASSNREFDGNSVHVSLTDNPSHLEAVNPVVLGQTRAKQYFHKDKERKKVIPILIHGDAAFAGQGVVAECFAMSGLPGHNTGGTIHIVVNNQIGFTTSPRFARSSPYPSDIAKMVEAPIIHVNGDDPEAVVYAARIAIDFRLKFNRDVVVDLICYRRFGHNEGDEPSFTQPLIYKKIRSHPTTIKVYGEKLI

SEQ ID NO: 95967 - protein, 451 aa, Unknown
  Bacterial polypetide isolated from the Sargasso Sea
IRAYRQRGHLLSKVDPLEMRESEYLDELHPENYGFKKDDYSKKIYLDGVLNKEYSNIKEILSILRKIYCGNIGYEYMHISNPTERKWFRDRVEKDENALKFTVNGKNAILNKLIQAEGFEKFLHTKYVGSKRFGLDGGESLIPALEQIIKIGGQSNIKEVKIGMSHRGRLNVLANVLQKSYKRIFNEFAGEINNTEENSAGDVKYHLGASSDRDFDGNVVHVSLTDNPSHLEAVNPVVLGQTRAKQFFHKDSKRNKVIPILIHGDAAFAGQGVVAECFAMSGLPGHNTGGTIHIIVNNQIGFTTSPRFARSSPHPSDIAKMVEAPIIHVNGDDPEAVVYGSRIATEFRLKFNRDVVLDLVCYRRFGHNEGDEPSFTQPLMYKKIRSLPSTAKIYGSKLIDEDLLSENDLNNQINKFKTLLDNQFKTAKDYKPKIEWFEGAWSSYKPKKGKD

SEQ ID NO: 95968 - protein, 313 aa, Unknown
  Bacterial polypetide isolated from the Sargasso Sea
DEPSFTQPLMYKKIKDHPTTLTIYGQKLSQEGLTSDEKLKKNKFDFRNFLEKEFDASKNYKSELKWFEGAWSRFKPGLGKDKRGASGVEKNKLVQIGKKIFKIPVNFQVHKTLEKIFKLKHRIFEDSGKIDWSTAEILAFGTLLTEGFSVRLSGQDSGRGTFSQRHAVLRNQVNHDRYIPLNNIQSQQKNIEVIDSLLSEFAVLGFEFGYSLSEPETLVLWEAQFGDFANGGQVIIDQFITSGESKWGRASGLVMLLPHGYEGQGPEHSSARLERFLQLCAGENIQVVNCTTPSNYFHVLRRQMHREFRKPLI

SEQ ID NO: 95969 - protein, 444 aa, Unknown
  Bacterial polypetide isolated from the Sargasso Sea
AVAMIRSYRQRGHLIAKLDPLGMMKSEYLDELHPESYGFKKEDYNKKIFLDGVTNKQYSNVKEILEFLRNKYCGPLGYEYMHIANPTERKWFRDRVEKSNDFSFTKNGKKAILNKLIQAEGYEKFLHTKYVGTKRFGLDGAESLIPALEQIIKIGGQSQVKEVKIGMSHRGRLNVLANVLQKSYKRIFNEFAEEITSAEDGAGDVKYHLGASSDREFDGNSVHVSLTDNPSHLEAVNPVVLGQTRAKQYFHKDKERKKVIPILIHGDAAFAGQGVVAECFAMSGLPGHNTGGTIHIIINNQIGFTTSPRFARSSPYPSDIAKMVEAPIIHVNGDEPEAVVYAARIATDFRLKFNRDVVIDLICYRRFGHNEGDEPSFTQPLMYKKIRSHPSPVKVYGERLIKEKVIFKNFLNDSIKIFKNLLDEQFKTAKDYKPKIEWFEGTWS

SEQ ID NO: 95970 - protein, 382 aa, Unknown
  Bacterial polypetide isolated from the Sargasso Sea
FTQNGKEAILNKLIQAEGFEKFLHTKYVGTKRFGLDGGESLIPALEQIIKIGGQSKVKEVKIGMSHRGRLNVLANVLQKSYKRIFNEFAGEISSKSEDDTGDVKYHLGASSNREFDGNQVHVSLTDNPSHLEAVNPVVLGQTRAKQYFHKDKERNKVIPILIHGDAAFAGQGVVAECFAMSGLPGHNTGGTIHIIVNNQIGFTTSPRFARSSPYPSDIAKMVEAPIIHVNGDDPEAVVYAARIATDFRLKFNRDVVIDLICYRRFGHNEGDEPSFTQPLMYKKIRSHPSPIKVYGEKLINEGSITDEYFRRSINEFKELLDDQYKNAKNYKPKIEWFEGTWSRYKPEKGKDKRGVTGYDVKKLKDISEKINTIPKAINIHKT

SEQ ID NO: 95971 - protein, 493 aa, Unknown
  Bacterial polypetide isolated from the Sargasso Sea
MVNKDADLPESWVNYFEGIGEELNVIAKEINGPSWGPTKKKIDIDELQKKIEEQDKNDFNNVKLDTSEKFNFQLLADSNKDSISAVALIRAYRLRGHLLADLDPLEMRESEYLDELHPDFYGFKKENYDKKIFLNGVINRKYANIREILKFMKKTYCGKIGYEFMHISNPDERKWFRDRIEQDKNALQFTKNGKEAILNKLVQAEGFEKFLATKYVGTKRFGLDGGESLIPALEQIIKIGGQNNIKEVKIGMSHRGRLNVLANVLQKSYKKIFNEFAGEFSTDSEDSAGDVKYHLGASSDREFDGNSVHVSLTDNPSHLEAVNPVVLGQTRAKQFFHKDRERNKVIPILIHGDAAFAGQGVVAECFAMSGLPGHNTGGTIHIIVNNQIGFTTSPRFARSSPYPSDVAKMVEAPILHVNGDDPEAVVYATRIATEFRLKFNRDVVVDLICYRRFGHNEGDEPSFTQPLMYKKIRSHPSVYKIYGNKLVNEKIYN

SEQ ID NO: 95972 - protein, 393 aa, Unknown
  Bacterial polypetide isolated from the Sargasso Sea
IALIRAYRIRGHLIANIDPLGMMEREYLHELHPADHGFKKEDYDKKIFLHSYMDRGYASINEIISFLKKIYCSSIGVEYMHISDPVEKVWFRERMEKEENQLKFTGNGKKAILNKLIQAEGFEKFLALKFVGTKRFGLDGAESLIPALEQIIKRGGQLGVKEIKIGMPHRGRLNVLANILQKSYKRMFNEFAGEFTNNPSDSTGDVKYHLGASSNRDFDGNSVHISLTDNPSHLEAVDPVVLGQTRAKQFFHRDIKRNKVIPILIHGDAAFAGQGVVAECFAMSGLPGHNTGGTIHIIVNNQIGFTTSPRFARSSPYPSDLGKVVEAPILHCNGDDPEAVVHCAKIAIEFRQKFNKDVVIDIICYRRFGHNEGDEPSFTQPMMYKKIRQHPTA

SEQ ID NO: 95973 - protein, 572 aa, Unknown
  Bacterial polypetide isolated from the Sargasso Sea
MSISSNRKFEETSFLSKSNSAFIEQMYLKYLNKDKDLSTEWKTYFEKLNEETSVAMKELEGPSWGKKTQFKTVQLENIVSENKDTDFSKNENYNSADFKEASNESIKAIALIRAYRIRGHLIAKLDPLGLSTTEYLDELHPDFYGFKKESYDKPIFLNGTINKNYSSIKEILSFLRKTYCGSVGYEFMHLSDPLERKWFRDRIELDEKGISFTKNGKMAILNKLIQAEGFEKYLAKKYVGTKRFGLDGGESLIPALEQIIKIGGQNSVKELKIGMPHRGRLNVLANLLQKSYKRIFNEFAGEYGNMSKDSTGDVKYHLGASSDREFDGNSVHISLTDNPSHLEAVNPVVLGQTRAKQYFHKDLKRKKVIPILLHGDAAFAGQGIVAECFAMSGLPGHNTGGTIHIIVNNQIGFTTSPRFARSSPYPSDVAKMVEAPILHVNADDPEAVVYCARIATEFRLQFNRDVVIDLICYRRFGHNEGDEPSFTQPLMYKKIKSHKTSLSIYGEKLVKENTITADEFEKQKSDFKNLLDQQFQTAKNYKPKIEWFEGTWSRYKPQKGKDIRGVSGFDTK

SEQ ID NO: 95974 - protein, 450 aa, Unknown
  Bacterial polypetide isolated from the Sargasso Sea
LKKIRKVYCSNIGVEYMHISDPVEKVWFRERMEKQENQIKFTTNGKKAILNKIVQAEGFEKFLAKKFVGTKRFGLDGAESLIPALEQIIKRGGQLGAKEIKIGMPHRGRLNVLANVLQKSYKRIFNEFAGEISNFRKEDSTGDVKYHLGASSDREFDGNSVHVSLTDNPSHLEAVNPIVLGQTRAKQFFHKDTKRKKVIPILIHGDAAFAGQGIVAECFAMSGLKGHNTGGTIHIIVNNQIGFTTSPRFARSSPYPSDLGKIVDAPILHCNGDDPESVVHCAKIAIEFRQKFSKDVVIDIICYRRFGHNEGDEPSFTQPSMYKKIRSHPTTLKIYGEKLISDGTINKSEFDNQIVMFRSLLDEQFKTANDIKPKLDWFEGTWSRYQPKKGKDRRGQTGVELDKIFKISEKINKVDEKLNLHKTIQKILNNRQKCISDKKNIDWSNAESLA

SEQ ID NO: 95975 - protein, 328 aa, Unknown
  Bacterial polypetide isolated from the Sargasso Sea
TAPRFARSSPYPSDVAKMHQAPIFHVNGDDPEAVVHCAKIATEYRQKFNRDVVIDMVCYRRFGHNEGDEPSFTQPIMYKKIKTHPTTLKIYGNRLCEEGLTSSNKIEDQKTKFKEFLESQLELSKTYKSELTWFEGAWSRFKPGLGKDKRGKSGVDKDKLIDIGKKISTIPNNLSAHKTIKKIFDLKYQMFEKNDPIDWSTAENLAIGSLLTEGFSVRLSGQDSGRGTFSQRHAVLRNQNNHDRYIPLNNIKTNQKKFEIIDSLLSELAVLGFEFGYSLSEPETLVIWEAQFGDFANGAQVIIDQFIASGESKMGKSQWACNVITSWL

SEQ ID NO: 95976 - protein, 340 aa, Unknown
  Bacterial polypetide isolated from the Sargasso Sea
PLNMMDRKYIHELHPEDHGFSRNDYDKKIFIGSYMDSGHASINEILTNLRKVYCGSIGVEYMHISDPKEKVWFRNRMEKTENRINFTDQGKKSILNKIIQAEGFEKFLAKKFVGTKRFGLDGAESLIPALEQIIKRGGQLGVKEIKIGMPHRGRLNVLANVLQKSYKRIFNEFAGEFTATHDESAGDVKYHLGASSNREFDGNSVHVSLTDNPSHLEAVDPVVLGQTRAKQYFHKDLKRNKVIPILIHGDAAFAGQGIVAECFSMSGLPGHNTGGTIHIIVNNQIGFTTSPRFARSSPYPSDLGKVVDAPILHCNGDDPEAVVHCAKIAIEFRQQFNKDV

SEQ ID NO: 95977 - protein, 363 aa, Unknown
  Bacterial polypetide isolated from the Sargasso Sea
MELQKFNTQSIRAVSLIRSYRQRGHLIANLDPLEIRKNEYLDELHPESYGFKKEDYDTKIYLDGIINRQYSDIREILGFLKKTYCGKIGYEYMHISNPIERKWFRDRVEKNEDISKFTKNGKEAILKKLIQAEGFEKFLHTKYVGTKRFGLDGGESLIPALEQIIKIGGQSKVKEVKIGMSHRGRLNVLANVLQKSYKRIFNEFAGEADFTTDEDTSGDVKYHLGASSDRIFDADPVHVSLTDNPSHLEAVNPVVLGQTRAKQYFHKDKERKKVIPILIHGDAAFAGQGIVAECFAMSGLPGHNTGGTIHFIINNQIGFTTSPRFARSSPHPSDVAKMVDAPIIHVNGDDPESVVYAARIAAE

SEQ ID NO: 95978 - protein, 612 aa, Unknown
  Bacterial polypetide isolated from the Sargasso Sea
MSSSKNLEYKKTSFLNKSNSAFIEQMYLKFINKDADLPESWRNYFLDIGEEIDLVVSEINGPTWSPQKKKINLEEIQKNLNYKDQSISKLKQSKYIDDVDIKKTNRNSIRAVSLIRSYRQRGHLISKIDPLELRKIEYLDELHPESYGFNKDDYKKKIYLDGITNKDYSNIKEILSFLKKTYCGSIGYEYMHISNPSERKWIRDRVEKDENALHFTKNGKNAILNKLIQAEGFEKFLNTKFVGTKRFGLDGAESLIPALEQIIKIGGQYKIKEVKIGMSHRGRLNVLANVLQKSYKRIFNEFAGETSNDGEDTAGDVKYHLGASSDREFDGNSVHVSLTDNPSHLEAVNPVVLGQARAKQFFHKDKDRNKVIPILIHGDAAFAGQGIVAECFAMSGLPGHNTGGTIHIIINNQIGFTTSPRFARSSPHPSDVAKMVDAPIIHANGDDPEAVVYATRIATEFRLNFNRDVVIDLVCYRRFGHNEGDEPSFTQPLMYKKIRSHPSTIHIYGEKLIKENIILKEDLNSQIKKFKELLNQQFKTAKDYKPKIEWFEGTWSRYKPEKGKDKRGATGIDLNILKNISNRINTIPSEINIHKTINKILENRKKSIDEGL

SEQ ID NO: 95979 - protein, 447 aa, Unknown
  Bacterial polypetide isolated from the Sargasso Sea
TEAIKSNANSIKAVALIRSYRQRGHLIAKLDPLGLMKSEYLEELHPESYGFKKDDYEKKIFLDGVINKQNSNIREILNFLRDKYCGSLGYEYMHISNPTERKWFRDRVEKTDDFKFTQNGKEAILNKLIQAEGFEKFLHTKYVGTKRFGLDGAESLIPALEQIIKIGGQSKVKEVKIGMSHRGRLNVLANVLQKSYKKIFNEFAGEISSKSKDDTGDVKYHLGASSNRDFDGNLVHVGLTDNPSHLEAVNPVVLGQTRAKQFFHKDKERNKVIPILIHGDAAFAGQGVVAECFAMSGLPGHNTGGTIHIIINNQIGFTTSPRFARSSPYPSDIAKMVEAPIIHVNGDDPEAVVYAARIATDFRLKFNRDVLIDLICYRRFGHNEGDEPSFTQPLMYKKIRSHPSPIKVYGQNLVNEGSISNDYLNSSIKKFKDLLDEQFKNAKDYKP

SEQ ID NO: 95980 - protein, 333 aa, Unknown
  Bacterial polypetide isolated from the Sargasso Sea
MKREYLHELHPSDHGFKKEDYDKKIFLSSYLDTDYASINEILNRLRKIYCSTIGAEYMHISDPVEKVWFRERMEKKENQINFTLNGKKAILNKIIQAEGFEKFLAKKYVGTKRFGLDGAESLIPALEQIIKRGGQLGVKEVKIGMPHRGRLNVLANVLQKSYKRIFNEFAGEQILSKEDSAGDVKYHLGASSDREFDGNSVHVSLTDNPSHLEAVNPVVLGQTRAKQFFHKDKERKKVIPILIHGDASFAGQGVVAECFAMSGLKGHNTGGTIHIIVNNQIGFTTSPEFARSSPYPSDLGKIVDAPILHCNGDDPEAVVHCAKIAIEFRQKFN

SEQ ID NO: 95981 - protein, 354 aa, Unknown
  Bacterial polypetide isolated from the Sargasso Sea
MKELWGSSHVSAGHAAYLESLYETFINDPENLSKEWLDFFTNLPKNSNSNGEISHQEIIKEFRNFSRSKVKVSGNSKKTIDERQGKVIRLIQSYRNRGHLKATLDPLGMMERRVIEDLSIEFHGLSHDDLDEEFYTDTFTDSNKLTLREILLRLEEVYCGNIGIECNHILDSEERRWFQKKFESKLTEYSFNPDEKLNIYERLNSAEGLAKYLSAKYPGMKRFGIDGAEALVPLVESVIQNCGSMGATQLCFGMAHRGRLNLLVNVLGKLPSELFSAFDEDTELEGASTGDVKYHLGFSSNFETPGGEVHVSLFNNPSHLEIVDPVVIGSVRARQDRIGDKDRSQVVPILLHGD

SEQ ID NO: 95982 - protein, 319 aa, Unknown
  Bacterial polypetide isolated from the Sargasso Sea
MTPEAVVYCARIATEFRLEFNRDVVIDLICYRRFGHNEGDEPSFTQPLMYKKIKTHKTSLNIYAEKLINENTISSVEFEKQKLDFNNLLDQQFQTAKDYKPKIEWFEGTWSRYKPQKGKDIRGVSGFDTKELVKISEKIHKVDEKLNIHKTIKKIFNNRHKSVLEGKNIDWSTSEALAFGSLLVKGNPIRLVGQDTGRGTFSQRHSVLRNQIDNSRYIPLNNISKTQKQFEIVDSLLSEFAVLGFEYGYSLVEPETLVLWEAQFGDFANGAQVIIDQFIASGERKWARASGLVLLLPHGYRRTRTRTFIRKIRKIFAIV

SEQ ID NO: 95983 - protein, 177 aa, Unknown
  Bacterial polypetide isolated from the Sargasso Sea
NVLANLLQKSYKRIFNEFAGEYGEVSKDSTGDVKYHLGASSDREFDGNSVHISLTDNPSHLEAVNPVVLGQTRAKQFFHKDIERKKVIPILLHGDAAFAGQGIVAECFAMSGLPGHNTGGTIHIIVNNQIGFTTSPRFARSSPYPSDVAKMVEAPILHVNADDPRGSGILCKNSYRI

SEQ ID NO: 95984 - protein, 179 aa, Unknown
  Bacterial polypetide isolated from the Sargasso Sea
SFRKPLVIMTPKSLLRNKYCVSNLEDFNKKNSFHRVLWDHAIDPKSKGFIKLKESSKIKKVILCSGKVYFDLLDAREKLKRDDVVMYRIEQLYPFPAKALVNELKPYVKNADFFWCQEEPKNMGAWFSVRDYIQWTLDTLKANNNSISYIGRSPDATPATGYAKRHNSQQQEIIKEVFD

SEQ ID NO: 95985 - protein, 421 aa, Unknown
  Bacterial polypetide isolated from the Sargasso Sea
MDDLSFIGNADPNAIEYLYKEYLKNPDNVDAGWQKFFQGFDFAKTNYEENGEIPENYIKEFQVINLIQGYRTRGHLFTKTNPVRDRRKYSPSLDLENFGLSESDLDLIFQAGEEVGLGAASLRSIITHLNSTYCQSIGIEYMYLRNPERLNWFKEKIDSHQRAAFDKERKLDIYEKLNKASQFESFLGKKFVGQKRFSVEGGESLIPGLDALIEKGSSLGVEYFVMGMAHRGRLNTLTNIFEKNPRDIFSEFDGKEFDFDQTFDGDVKYHQGFSSTVKLKNNKELGITLAPNPSHLEAVDPVVQGIARAKIDHEYKDETKVCPVIIHGDAAIAGQGVVYEVIQMAQLNGYKTGGSVHIVVNNQVGFTTNYLDGRSSTYCTDVAKTTLSPVFHVNGDDVEAVISAIEFAMEYRQTFKSDVFV

SEQ ID NO: 95986 - protein, 265 aa, Unknown
  Bacterial polypetide isolated from the Sargasso Sea
KIATEYRQKFNRDIVIDMVCYRRFGHNEGDEPSFTQPIMYKKIKNHPTTLDIYGKKLSEEGLISNDDLQKDKVRFKNYLENEFSSSKNYKSELKWFDGVWSRFKPGLGKDKRGKSGVEKNILFKVGKKVFNIPSDFNAHKTLKRVFELRNKMFQDGKIDWSAAETLAIGTLLIEGFSVRLSGQDSGRGTFSQRHAVLRNQDNHDRYIPLNNIQVGQKNFEVIDSLLSELAVLGFEYGYSLSEPETLVLWEAQFGDFANGAQVIID

SEQ ID NO: 95987 - protein, 191 aa, Unknown
  Bacterial polypetide isolated from the Sargasso Sea
NYFHALRRQMHRDFRKPLIIMTPKSLLRNKYCVSNLEDFNKENSFHRILWDHALDTKCKDFIKLKKNSEIKKVILCSGKIYFDLLNEREKLKKDDVVFLRIEQLYPFPAKTLVKELKQYAKNAKFFWCQEEPKNMGAWFSVRDYIQWTLDTIKANNNKISYIGRNPDASPATGYVERHISQQKEIINKVFE

SEQ ID NO: 95988 - protein, 556 aa, Unknown
  Bacterial polypetide isolated from the Sargasso Sea
SNSAFIEQMYIKYINKDPELPDSWKNYFLDIGEDIGLIVKEINGPSWSPEQKKIDINKLQKEIGTEQNTNNQINQKDFVQANSNSIRAVSLIRSYRQRGHLLAKVDPLEIRQSEYLDELHPENYGFNKDDYKKKIYLDGIINKEYSNISDILSFLRKIYCGSIGYEYMHISNPTERKWFRDRVEKDENNLKFTENGKNAILNKLIQAEGFEKFLATKYVGTKRFGLDGGESLIPALEQIIKIGGQSKIKEVKIGMSHRGRLNVLANVLQKSYKKIFNEFAGEINNVGDEGAGDVKYHLGASSDREFDGNSVHVSLTDNPSHLEAVNPVVLGQTRAKQFFHKDKERNKVIPILIHGDAAFAGQGVVAECFAMSGLRGHNTGGTIHIIVNNQIGFTTSPRFARSSPHPSDIAKMVEAPIIHVNGDDPEAVVYGSRIAAEFRLKFNRDVVLDLVCYRRFGHNEGDEPSFTQPLMYKKIRSHPSTINIYGQKLVKEDLISEEDLSFQIKKFKELLDEQFKTAKDYNPKIEWFEGTWSRYKPEKGKDKRGITGADLKYLKD

SEQ ID NO: 95989 - protein, 192 aa, Unknown
  Bacterial polypetide isolated from the Sargasso Sea
ANYFHALRRQIHRDFRKPLVIMTPKSLLRNKFCVSTIDDFSKQTSFHRIMWDHALSDQSKNFIKLKKSSEIKKVIICSGKVYFDLLNAREKLKRDDVVIFRIEQLYPFPAKSLVKELKPYAKNANFYWCQEEPKNMGAWFSVRDYIQWTLDTIKAKNNEVSYIGRSPDASPATGYAKRHQLEQQEIINEVFN

SEQ ID NO: 95990 - protein, 396 aa, Unknown
  Bacterial polypetide isolated from the Sargasso Sea
MFYRNHIKRIFNEFAGEIDSSSDDDSAGDVKYHLGASSDRVFDGNSVHVSLTDNPSHLEAVNPVVLGQTRAKQFFHNDKERKKVIPILIHGDASFAGQGIVAECFAMSGLPGHNTGGTIHFIINNQIGFTTSPRFARSSPHPSDVAKMVDSPIIHANGDDPESVVYAARIAGEFRLKFNRDVVVDLVCYRRFGHNEGDEPSFTQPLMYKKIKSHLSTVKIYGNKLVNEKTILSEDLNNQIKKFKDLLDDQYKNAKNYKPKIEWFEGTWSRYKPKRGQDKRGDSGYSTTKLLEISDKIHSLSPELNIHKTIVKIFEARKNSMNKGNGIDWSTAEALAFGSLLEEGYPVRLVGQDSGRGTFSQRHSVLRNQIDNSRYIPLNNISEKQKNFEIVDSFLS

SEQ ID NO: 95991 - protein, 382 aa, Unknown
  Bacterial polypetide isolated from the Sargasso Sea
MKELWGSSHVSAGHAAYLETLYDTFLKNPEHLSEEWLDFFTNLPKQPNSNGEISHIEIIKEFKNFSRSKATPKNETMLDDKQGKVIRLIQSYRNRGHLKAKLDPLGMMERREIEDLNIEFHGLSHSDLDRDFFTDTFTESNKLSLRNIIKTLEEVYCGKIGIECNHILDSEERRWFQKKFESKLTEYVFDDDEKVNIFERLNSADGLAKYLSAKYPGMKRFGIDGAEALVPLVESVIQNCGSIGASQICLGMAHRGRLNLLVNVLGKLPSELFSAFDEDFELEGASTGDVKYHLGFSSNFETPGGEVHVSLFNNPSHLEIVDPVVLGSVRARQDRIGDTDRTEVVPILLHGDASFSGQGVVMESLQMSQTRGFNVGGTIHIM

SEQ ID NO: 95992 - protein, 316 aa, Unknown
  Bacterial polypetide isolated from the Sargasso Sea
MEFSHISDESERNWIIDRFENNDYKKINLNEKIFILKRLISARGLAKYLSAKYPGMKRFGIDGCESLIPLIDTLIEQTSKNSAEQICFGMAHRGRLNLLINILGKKPKDLFAEFEENYDLKGSSTGDVKYHLGFSSNIHTTNGDVHVSLINNPSHLEIVDPVVIGSVRARQDRLNDRERNKVVPILIHGDASFSGQGVVMETLQMSQTRGYGVGGTIHVIINNQIGFTTDNPKDSRSTRYSTDIAKFIEAPIFHVNADDPEAVIYISKLASDYREEFKKDIVIDLIGYRRSGHNEADDPSSTQPVMYKKIKQHPSV

SEQ ID NO: 95993 - protein, 211 aa, Unknown
  Bacterial polypetide isolated from the Sargasso Sea
MGPEHSSARIERFLQLCAEQNIQICMPSNAAQMFHLLRRQAIRNNRTPLIVITPKSLLRNKYASSNIDELTLGKFENIFDDESNLTKKLRKVILCSGKIYHDLKKQKDENNQSDIAIIRLEQLYPFPYEETEKILSKYKNASEFIWCQEEPRNQGAWYGQRHRLNRVLKNIGLKKEFRLMSRPPSSAPAVGQMKIHIKQQKKLIDLTLGKD

SEQ ID NO: 95994 - protein, 523 aa, Unknown
  Bacterial polypetide isolated from the Sargasso Sea
SFLNTAHTAYFAELYDQYLINPESVEPTWRAFFQGFEFGIDKASKKEDIPENILKEFKVVKLINAYRTRGHLFTKTNPVRDRRKYSPNLDLENFELSKGDLELSFSAGEIIGIGNSTLADILIHLERIYCDSIGIEYMYIRTPERIKWIQSKLNENDNRPNFNKKQKKHILKKLVQATNFEQFLQKKYVGQKRFSLEGGESLIPALDSIFENAASMGVKEFVVGMAHRGRLNTLSNIFGKPAKEIFNEFDGKDYEEQIFDGDVKYHLGWTSKRKSDGGVNVYMNLAPNPSHLESVGPVVQGISRAKQDKYHKNNVRNVLPVIIHGDAAIAAQGVVYEVVQMERLKGYRTAGTIHIVVNNQIGFTTNYIDGRSSTYCTDVGKANLCPILHVNADDVEAVVHAANFALEYRMRYERDVFIDLLGYRKYGHNEGDEPRFTQPKLYKSISTHPSVKEIYSNQLVNEKVIDREEIKNIENDYSEDLNEDLSDSKKEKNVVITPFMQHEWKGLSRVKRKENAKNFLYRC

SEQ ID NO: 95995 - protein, 533 aa, Unknown
  Bacterial polypetide isolated from the Sargasso Sea
MSSSTNLEYKKTSFLNKSNSAFIEQMYVKYVNNDPNLPESWKKYFIDIGDDINSIVKEVNGPSWSPRKNKIDESKILENEIETLESQNKEIDQNDVVASNSNSIKAVSLIRAYRQRGHLLSKVDPLEMRESEYLDELHPENYGFKKDDYSKKIYLDGVLNKEYSNIKEILSVLRKIYCGNIGYEYMHISNPTERKWFRDRVEKDENALKFTVNGKNAILNKLIQAEGFEKFLHTKYVGSKRFGLDGGESLIPALEQIIKIGGQSNIKEVKIGMSHRGRLNVLANVLQKSYKRIFNEFAGEINNTDEDSAGDVKYHLGASSDREFDGNVVHVSLTDNPSHLEAVNPVVLGQTRAKQFFHKDAKRNKVIPILIHGDAAFAGQGVVAECFAMSGLPGHNTGGTIHIIVNNQIGFTTSPRFARSSPHPSDIAKMVEAPIIHVNGDDPEAVVYGSRIATEFRLKFNRDVVLDLVCYRRFGHNEGDEPSFTQPLMYKKIRSHPSAAKIYGSKLVDEDLLSENDLNNQIKKFKTLLDDQL

SEQ ID NO: 95996 - protein, 536 aa, Unknown
  Bacterial polypetide isolated from the Sargasso Sea
MDKYSFLNSANTAYFAELYDQYLKSPDTIEPSWRAFFQGFDFGQENGTSQIEVDNLVPENIKKEFQVVKLIDAYRNRGHLFTKTNPVRARRSYSPNLDFQNFGLEEKDLKTVFSAGEIMGIGSSTLTEIINHLQQIYCDSIGIEYMYIRNPVKVNWIQKKLNVNTNHPKFTSDQKKHILSKLNEAVSFENFLHTKFVGQKRFSLEGGESLIPAIDSIIELAAEKGVEEFVMGMAHRGRLNTLINIFGKSAKDIFNEFQGKDYDEEMLFDGDVKYHMGWTCKRDTDSGKKVNLNIAPNPSHLETVGAIVQGITRAKQEDDFSGDLSKVLPIIIHGDAAIAGQGLPYEIVQMAGLKGYGTGGTIHIVVNNQIGFTTNYLDARTSTYCTDVGKVTLCPIFHVNADDVEAVIHAALFALEYRMEFNQDVFIDLLGYRKYGHNEGDEPRFTQPKLYKAIAKHKNPKQIYSEILLSQGVIDQKHLSQIEKEYRQMLDKAFDDSSKVKETIITDFMGDEWKEFQRADEKIMSKEVETKISISN

SEQ ID NO: 95997 - protein, 209 aa, Unknown
  Bacterial polypetide isolated from the Sargasso Sea
MCANDNLQVMNCTTPANYFHALRRQIHRDFRKPLVLMTPKSLLRNKYCVSDIKDFNKQTSFHRILWDHALNNDNENFIKLKNPDEIKKVILCSGKVYFDLLVAREKIKRDDVILFRIEQLYPFPVKSLVKELKPYANNAKFYWCQEEPKNMGAWFSVRDYIQWTLETIKAKNNNISYIGRNPDASPATGYAKRHMVEQEEIIKKVFDNE

SEQ ID NO: 95998 - protein, 382 aa, Unknown
  Bacterial polypetide isolated from the Sargasso Sea
KDSRSTRYSTDIAKFIEAPIFHVNADDPEAVIYISKLASDYREEFKKDIVIDLIGYRRSGHNEADDPSSTQPVMYKKIKQHPSVLKSYKDKLIQNNDITSEEFDEFKKSYRSSIEKDESVALNLSKIKNDDLWFEWDQFIDARWDENTDTTVKQDQLIDDARTIADIPSGFVLQKKVKNIIKQRIDMAEGKCEFNWGFAEIAAYSSLLREGYPIRFSGQDIRRGTFDHRHAVMFDQEDGRTYYPLNKFAEKGNTNIGIYDSILSEEAVLGFEYGYSATWPTGLVIWEAQFGDFSNGAQVVIDQFIASAQHKWERLSGLVLLLPHGYEGMGPEHSSARIERFLQLCAEQNIQICMPSTAAQMFHLLRRQAIRNNRTPLIVITP

SEQ ID NO: 95999 - protein, 133 aa, Unknown
  Bacterial polypetide isolated from the Sargasso Sea
MLQVSQKWGRASGLVMLLPHGYEGQGPDHSSARLERFLQLCAGENMQVVNCTTPSNYFHALRRQMHRDFRKPLIVMTPKSLLRHKKCISNLNEFTKKNTFHRVLEDDAYSKNSGLIKLRRNDEVKKVVMCSGK

SEQ ID NO: 96000 - protein, 452 aa, Unknown
  Bacterial polypetide isolated from the Sargasso Sea
NLIYLDGVINKQYSTIKEILGFLRKTYCEKIGYEYMHISNPIERKWFRDRVEKDENSLQFTNNGKQAILNKLIQADGFERFLHTKYVGTKRFGLDGGESLIPALEQIIKIGGQNFVKEVKIGMSHRGRLNVLANVLQKSYKRIFNEFAGEINSSSEADTAGDVKYHLGASSNREFDGNSVHVSLTDNPSHLEAVNPVVLGQTRAKQFFHGDKERKKVIPILIHGDAAFAGQGIVAECFAMSGLPGHNTGGTIHFIINNQIGFTTSPRFARSSPHPSDVSKMVDAPIIHVNGDDPEAVVYAARIATEFRLKFNRDVVIDLVCYRRFGHNEGDEPSFTQPLMYKKIKNHPSTVKVYGNRLVKENTISQENLNIQIKDFKELLEDQFKNAKNYKPKIEWFEGTWSRYRPKKGKDKRGVTGYSTKDLSDISNKVHSIPEKINAHKTILKIFKMRKD

SEQ ID NO: 96001 - protein, 404 aa, Unknown
  Bacterial polypetide isolated from the Sargasso Sea
WRNYFLDIGEEIDLVVKEINGPTWSPQKKKINLKDIQINSNDEDQDISKLKQSKHVDSIDIQKTNRDSIRAVSLIRSYRQRGHLISKIDPLELREIEYLDELHPESYGFNKEDYKKKIYLDGIANKDYSNIREILSFLKKTYCDSIGYEYMHISNPSERKWIRDRIEKDENALQFTKNGKNAILNKLIQAEGFEKFLNTKFVGTKRFGLDGAESLIPALEQIIKIGGQFKIKEVKIGMSHRGRLNVLANVLQKSYKKIFNEFAGEMSSHVEDTAGDVKYHLGASSDREFDGNSVHVSLTDNPSHLEAVNPVVLGQARAKQFFHNDKERKKVIPILIHGDAAFAGQGIVAECFAMSGLPGHNTGGTIHIIVNNQIGFTTSPRFARSSPHPSDVAKMVDAPIIHAN

SEQ ID NO: 96002 - protein, 336 aa, Unknown
  Bacterial polypetide isolated from the Sargasso Sea
MMKQFQSNSYLFGGNAPYVEEMYEAYLDNPASVPENWRSYFDALQNVPASDGSNANDVAHGPIVESFAQRAKANAFIPRTATGGEDLATSRKQVYVQSLIGAYRFLGSQWANLDPLKRRERPAIPELEPAFYDFTEADMDQEFSATNLYFGFERASLREIVKALRDTYCGTIGAEYMYISDPEQKRWWKEKLESIRSTPNFSNEKKKHILNRLTAAEGLERFLHTKYVGQKRFSLEGGESFIASMDEVVRHGGANGVQEIVIGMAHRGRLNVLVNTLGKMPADLFAEFEGKHVDDLPAGDVKYHKGFSSDVSTEGGPVHLSLAFNPSHLEIVNPVV

SEQ ID NO: 96003 - protein, 201 aa, Unknown
  Bacterial polypetide isolated from the Sargasso Sea
NLQIVNCTTPANYFHVLRRQMHRGFRKPLVIMTPKSLLRNKKCISFLEDFTKKNRFHRILEDHAYLNGSKLIKLKNDKEIKKVVMCSGKIYFDLIEAREKINNDKTVFIRIEQLYPFPVKHLGKQLKRYPKAKFFWCQEEPMNMGAWNTTRYYIDRTLEIIQAKGEKVKYIGRNAAASPATGNLNKHLAEQKEILEKVLGN

SEQ ID NO: 96004 - protein, 165 aa, Unknown
  Bacterial polypetide isolated from the Sargasso Sea
PLIVITPKSLLRLPEAASDLSELTNGSFNCIIGDDLPTEKIKRVVLCSGKVYYDLKKARDEKGISDVALLRLEQLYPFPYFEVEEMLKGYSHVEEFIWAQEEPRNQGAWFSHRHRLERVLNKLNIENSFKPISRPPAAAPAVGLMKLHLQQQQELVDNVLKRDNK

SEQ ID NO: 96005 - protein, 528 aa, Unknown
  Bacterial polypetide isolated from the Sargasso Sea
DSIKAIALIRAYRIRGHLIANLDPLGLMKREYLYELHPNDYGFKTEDFDRKIYLNSYMDVGYASINEIITKLRKVYCSSIGAEYMHITNPTEKVWFRERMEKEENQLNFTEKGKDAILNKIIQAEGFEKFLAKKYVGTKRFGLDGAESLIPALEQIIKRGGQLGVKEIKIGMSHRGRLNVLANVLQKSYKRIFNEFAGEFASSSEDSTGDVKYHLGASSDRTFDGNSVHVSLTDNPSHLEAVNPVVLGQTRAKQYFHKDTERKKVIPLLIHGDAAFAGQGVVAECFAMSGLKGHNTGGTIHIIVNNQIGFTTSPRFARSSPYPSDLGKIVEAPILHCNGDDPEAVVHCAKIAIEFRQKFNKDVVIDMICYRRFGHNEGDEPSFTQPLMYKKIRSHPSTLNIYGKKLIDNNSITEDQFKKKVNDFKNLLDEQFKNANDYKPKLNWFEGTWSRYQPKKGKDKRGQTGVDTTKLKKLSAKINFLKPELNIHKTIQKVFENRNKCIQDEKNIDWANAEILAFATLLEEGFSV

SEQ ID NO: 96006 - protein, 440 aa, Unknown
  Bacterial polypetide isolated from the Sargasso Sea
MDDRNSDQSFLSGTNVTFINDLYKEWKINPNAVPKEWDLWFKSNEDEPIIDEGPSWAKKNSQVIGAIDTVESVRAVARGIVGKGDLSATDLRAATTDSIRAIMLIRAFRINGHLLAKLDPLNLQQGDIHPELNPKTYGFSDDDWDRPIFIDNVLGMESATLRQIMEIVKETYCGSIGIEFMHVQDPAQKAWIQERIESIRNATEFTKRGKKAIYERLVGAETFEQFLHKKYAGTKRFGLDGSESVVPAIEQILKRGSQLGMKEVVIAMAHRGRLNLLYNILNKPFRAIISEFLGNQANPEEAGGSGDVKYHMGASADREFDGNNVHLSLQANPSHLEVVAPVVIGRVRAKQNQHNDTNDRLSVLGIVLHGDAAFAGQGIVAETFDFSGLRGYRTGGTIHIVVNNQIGFTTSPNYSRSSPYCTDVAKMVMAPIMHINGDDP

SEQ ID NO: 96007 - protein, 135 aa, Unknown
  Bacterial polypetide isolated from the Sargasso Sea
MWDDAERGLSKTKLLTDKKIKRVVMCSGKVYYDLLEERDRRGISDIYILRFEQFYPFPAISAVKELERFKNAEMVWCQEEPKNQGGWSFMEPNLEWVLSRINAAASRPRYIGRASSASPATGLASTHKNQQEALS

SEQ ID NO: 96008 - protein, 494 aa, Unknown
  Bacterial polypetide isolated from the Sargasso Sea
MSSSNNLENKNATFLNKSNSGFIEEMYVKFIEGDPNLPESWRSYFESLNEDLEVISKEIQGPNWSPKKIKINRNNLNYKNNVPTENVNADKKVSDSIRAITLIRAYRTRGHLIANLDPLGLMKREYLHDLHPKDHGFTADDLNRKIFLDNYMDIGHATIKEITNNLKKIYCSTIGAEFMHITDPAEKVWFRERMEKKENQLNFTRNGKIAIMNKIIQAEGFEKFLAKKYVGTKRFGLDGGESLIPSLEQIIKRGGQLGAKEIKIGMPHRGRLNVLANVLQKSYKRIFNEFAGEFSATHDDSTGDVKYHLGASSDREFDGNSVHVSLTDNPSHLEAVNPIVLGQTRAKQFFHKDEERKKVIPVLIHGDAAFAGQGVVAECFAMSGLKGHNTGGTIHIIVNNQIGFTTSPRFARSSPYPSDLGKVVESPILHCNGDDPESVVHCAKIAIEFRQKFNKDVVIDMICYRRFGHNEGDEPSFTQPLMYKKIRAHPTTLN

SEQ ID NO: 96009 - protein, 206 aa, Unknown
  Bacterial polypetide isolated from the Sargasso Sea
CPNDNLQVMNCTTPANYFHALRRQMHRDFRKPLIIMTPKSLLRHKYCVSSLKDFSKKNSFHRVLWDHAVDPQVSGFIKLKKSKKIRKVILCSGKIYFDLLEARENKKVDDVIFFRIEQLYPFPAKSLVQELKPYAKNAKFYWCQEEPKNMGAWFSVRDYIQWTLDSIKANNNKISYIGRSPDASPATGYVKRHISQQKEIIEKVFE

SEQ ID NO: 96010 - protein, 285 aa, Unknown
  Bacterial polypetide isolated from the Sargasso Sea
ILKRLVIWEAQFGDFANNAQTIIDQFITTGERKWLRMSGLTLLLPHGHEGQGPEHTSSRIERFLQMCAEDNIQVANCTSPANYFHILRRQLLRNFRKPLILLTPKSTLRHKKNVSKIEDFVNGSSFHRVLRDEISKDQEKKINRLIICSGKIFFELQDSIEKLKKDNIFILRLEQLYPFPYDVFSNELKRFKNCEIIWCQEEPKNMGAYGFVKRRIESVMKQIQMKQQKLLYVGRRAAASPATGVFDRHVANQKNILRLAIEADLSEISDIWMGVSLVKYQLPIE

SEQ ID NO: 96011 - protein, 598 aa, Unknown
  Bacterial polypetide isolated from the Sargasso Sea
KKTSFLNKSNSTFIEQMYLKFINKDSDLPESWKNYFLDIREEIDLVVKEINGPTWSPKKKKINLEEIQKNINNEDQNISKLKQTKYFDSIDIEKTNRNSIRAVSLIRSYRQRGHLISKIDPLELREIEYLDELHPESYGFNKEDYKKKIYLDGITNKDYSNIREILSFLKKTYCGSIGYEYMHISNPSERKWIRDRVEKDENALQFTKNGKNAILNKLIQAEGFEKFLNTKFVGTKRFGLDGAESLIPALEQIIKIGGQYKIKEVKIGMSHRGRLNVLANVLQKSYKRIFNEFAGETSNDGEDTAGDVKYHLGASSDREFDGNSVHVSLTDNPSHLEAVNPVVLGQARAKQFFHKDKARNRVIPILIHGDAAFAGQGIVAECFAMSGLPGHNTGGTIHIIINNQIGFTTSPRFARSSPHPSDVAKMVDAPIIHANGDDPEAVVYATRIATEFRLKFNRDVVIDLVCYRRFGHNEGDEPSFTQPLMYKKIRSHPSTINIYGKKLINENIILNEDLNSKIKKFKELLDQQFKTAKDYKPKIEWFEGTWSRYKPEKGKDKRGATGIDLNILSNISNRINTIPSEINIHKTINKILDNRKKT

SEQ ID NO: 96012 - protein, 393 aa, Unknown
  Bacterial polypetide isolated from the Sargasso Sea
VEKVWFRNRMEKEENQIKFTDTGKKAILNKIIQAEGFEKFLAKKYVGTKRFGLDGAESLIPAMEQIIKRGGQLGVKEIKIGMPHRGRLNVLANVLQKSYKRIFNEFAGEISSNLEDSAGDVKYHLGASSNREFDGNSVHVSLTDNPSHLEAVDPVVLGQTRAKQFFHRDTKRNKVIPILIHGDAAFAGQGVVAECFAMSGLPGHNTGGTIHIIVNNQIGFTTSPRFARSSPYPSDLGKVVDAPILHCNGDDPESVTHCAKIAIEFRQKFNKDVVLDMICYRRFGHNEGDEPSFTQPLMYKKIRQHPTTLNVYGNRLIKEGTINVDEFDKMKNDFKNLLEEQYKTAKDYKPKIEWYEGTWSRYKPEKGKDKRGKSGVDLSKIQKISDQINTIPS

SEQ ID NO: 96013 - protein, 186 aa, Unknown
  Bacterial polypetide isolated from the Sargasso Sea
FETSIHRDFRKPLVIMTPKSLLRNKLCVSNLEDFGKKNSFHRVLWDHAIDPKEEGFIKLKKSTEIKKVILCSGKIYFDLLHAREKMKIDDVIIFRIEQLYPFPVKPLVKEIAKYAKKAKFYWCQEEPKNMGAWLLVRDYIQWTLKYISAKNKEIMYIGRNPSASPATGYAKRHIAQQKAIIDQVFE

SEQ ID NO: 96014 - protein, 417 aa, Unknown
  Bacterial polypetide isolated from the Sargasso Sea
TLRDILAFLEKTYCSSVGVEYKFVRNPEVLQWLEEKMEGCSNAPDYSVEEQLEHLKNINEAVGFESFLHTKFVGQKRFSLEGSEAIIPALDTLVEKGAMLGVEEFIIGMAHRGRLNVLANILGKPYEDIFMEFEGKMVGSDGFDGDVKYHMGHSSDRLVRNGNTVHLSLTPNPSHLEAVNPVVAGISRGKIDRRYHGDVDKLVPILIHGDASIAGQGIVYEVLQMSQLPGYHIGGTVHVVLNNQVGFTADYFEGRSSTYCTDVAKTTLSPVFHVNGDDLDAVAYVTELALEFRQKFHRDVFVDIVAYRRHGHNESDEPRFTQPALYKKIAEHPNPLQVYSQRLIQEGRVSESELQKLIEDFKKQLSEKLESTRKQEISASTSFLEGAWSGIRQPGMIDFEYSPETGVEKSTFLRLAE

SEQ ID NO: 96015 - protein, 577 aa, Unknown
  Bacterial polypetide isolated from the Sargasso Sea
NKDNSSKFNFQVIANSNKNSISAVALIRAYRLRGHLLSKLDPLELMKSEYLDELHPEYYGFKKEDYDKEIFLNGIINKKSANIREILKFLKKTYCGPIGYEYMHISNPTERMWFRDRVEKDENALKFTKNGKQAILNKLIQAEGFEKFLNTKYVGTKRFGLDGGESLIPALEQIIKIGGQSKIKEVKIGMSHRGRLNVLANVLQKSYKRIFNEFAGEMDGSEDGAGDVKYHLGASSDREFDGNPVHVSLTDNPSHLEAVNPVVLGQTRAKQFFHKDKQRNKVIPILIHGDAAFAGQGIVAECFAMSGLPGHNTGGTIHIIVNNQIGFTTSPRFARSSPYPSDVGKMVDAPIIHVNGDDPEAVVYATRIATEFRLKFNRDVVIDLICYRRFGHNEGDEPSFTQPLMYKKIRSHPSTIKIYGEKLVNEGLFSKQDLDQQIVDFKNLLDDQFKNAKDYKPKIRWFEGTWSRYKPERGKDKRGVTGSDLKILNNISDRIHVFPTDKNIHKTITKIMENRKKTINEGSGIDWATAESLAFGSLLVEGYPVRLVGQDSGRGTFSQRHSVLRNQIDNSKVHTFK

SEQ ID NO: 96016 - protein, 499 aa, Unknown
  Bacterial polypetide isolated from the Sargasso Sea
GSIGYEYMHISNPLERKWIRDRVEKDENALKFTKNGKNAILNKLIQAEGFEKFLNTKFVGTKRFGLDGAESLIPSLEQIIKIGGQYKIKEVKIGMSHRGRLNVLANVLQKSYKKIFNEFAGEMNNDGEDTAGDVKYHLGASSDREFDGNSVHVSLTDNPSHLEAVNPVVLGQARAKQFFHKDKDRNKVIPILIHGDAAFAGQGVVAECFAMSGLPGHNTGGTIHIIINNQIGFTTSPRFARSSPHPSDVAKMVDAPIIHANGDDPEAVVYATRIATEFRLKFNRDVVIDLVCYRRFGHNEGDEPSFTQPLMYKKIRSHPSTTNIYGKKLIKENLILEDDLNVQIKKFKDLLDQQFKTAKDYKPKIEWFEGTWSRYRPEKGKDKRGATGVDSNILLNISNKINDVTPDSNIHKTITKILENRKIKVEKGFDIDWSTAEALAFGSLLEEGYPVRLVGQDSGRGTFSQRHSVLRNQVDNSRYIPLNNISKSQKNFEIVDSFL

SEQ ID NO: 96017 - protein, 330 aa, Unknown
  Bacterial polypetide isolated from the Sargasso Sea
LAYGTLMLEGFNVRISGQDVERGTFSHRHAVLKSEDFEEEYLPLNSIDSGEKGVLKIYNSPLSEYGVLGFDYGYALASPNSLTIWEAQFGDFSNGAQIIIDQYISSAEDKWKLQNGIVLYLPHGYEGQGAEHSSARMERYLQLCAKDNMYAANCTTPANLFHLLRRQMITNFRKPLILFTPKSLLRHPKVISDIEELTSSRFMPVISDSEIDPDKAESLVFCSGKFYFDLIDYRKKSNIKNVAIVRIEQLFPLPVKLIISEIKKFSNAKDVVWAQEEPRNMGAWNHIQTYHPIAKNMRPATRRFYGSTASGSYVRFERRHNQVIEYVFDK

SEQ ID NO: 96018 - protein, 362 aa, Unknown
  Bacterial polypetide isolated from the Sargasso Sea
SRYPGMKRFGIEGAESLIPLIDSLIQNTGIFGAQQICFGMAHRGRLNLLVNVLGKSPKDLFIEFEEGYELTGDNTGDVKYHLGVSSNILTPNGEVHVSLNNNPSHLEIVNPVILGSVRARQDRLGDTEREKVIPILIHGDASFSGQGVVMESLQMSQTRAYGVGGAIHVIVNNQIGFTTSNKEDARSTHYSTDVAKMIEAPILHVNADDPEMVVFAAKLACEYRHTFKKDIVIDMVCFRRRGHNETDDPSQTQPQMYQAVASHPGIKKLYQDRLIEDNVISLDECKNFEKKYRETIEQGESVAHNLATKPNESMWFDWNPYMNQEWWDFADTSFNPKEFAKLGSIISSIPEGFELQKPVTKL

SEQ ID NO: 96019 - protein, 233 aa, Unknown
  Bacterial polypetide isolated from the Sargasso Sea
MLLPHGYEGQGPEHSSARLERYLQLCGEDNMQVLNCSTPANYFHALRRQLKRDFRKPLIIMTPKSLLRHKMCVSSLSDMAEQTAFRRVIRDPNINLKDSEIKRVVICSGKVFYNLLEEREKRKINNIRILRLEQIYPFPSKTLKEMLSKIPNAEVVWCQEEPKNMGAWFFVDRRIEQVLVDIKAKLTRPTYAGRLEAASPATGSFFRHNKEQNDLVNDALKLTTKKASRHAAE

SEQ ID NO: 96020 - protein, 186 aa, Unknown
  Bacterial polypetide isolated from the Sargasso Sea
VPSTPGQIYHLLRRQAVRPLRKPLVVMSPKSLLRHKKATSSLEDLAHGTFHSVLDDLADLDSKKIKRVVMCSGKVYYDLLEKRDSDDLIDTALVRIEQLYPFPEQRLQEILEGYPNLEHLVWCQEEPKNQGAWYCSQHHMYRVAQKAGVGPVHYAGRDMAAAPAAGSMSLHVEQQQRLVQDAFEIK

SEQ ID NO: 96021 - protein, 308 aa, Unknown
  Bacterial polypetide isolated from the Sargasso Sea
MVGKKITEVPNNFNIHKTLLKILENKRKMFTDDKPIDWSTAELLAFGTLLNEGFSVRLSGQDSGRGTFSQRHAVFRDQDSHDRFVPLHNISKKQKSFEVIDSLLSELGVLGFEFGYSLSEPETLVLWEAQFGDFSNGAQVVIDQFISSGESKWSRASGLVMLLPHGYEGQGPEHSSARLERFLQLCAQENLQVVNCTTPANYFHVLRRQMRRDFRKPLIVMTPKSLLRHKRCISYLEDFTTKTRFHRILEDHAYLNQSKLIKLKKNNNIKKVIMCSGKIYFDLLEAREKNKNDEIVFIRIEQLYPFPV

SEQ ID NO: 96022 - protein, 259 aa, Unknown
  Bacterial polypetide isolated from the Sargasso Sea
EPGGLTIWEAQFGDFVNCAQVVIDQFLSSGEQKWGRLCGLTMLLPHGYEGQGPEHSSARLERFLQLCANHNMQVCVPSTPAQVYHMLRRQVVRPMRRPLVVMSPKSLLRHPLAVSSMEELAEGTFQNIIGEIDALDPSKVDRVVFCSGKVYFELLEKRRKENIDNIAIIRVEQLYPFPDVEMRAALETYQHVKDFVWCQEEPQNQGAWYCSQHHFWANIPAGAQLTYAGREASAAPACGYPALHVHQQESLVNSALKLS

SEQ ID NO: 96023 - protein, 316 aa, Unknown
  Bacterial polypetide isolated from the Sargasso Sea
QFKNAKDYKPKIEWFESTWSRYKPERGKDKRGKSGVDLNKLLKISEKINKIPAKMDVHKTIIRILDARKQSINNKKGIDWSSAESLAFGSLLLEGYPVRLVGQDSGRGTFSQRHSILRNQNDNSRYIPLNNISEKQKKFEIVDSFLSELAVLGFEYGYSLVEPSTLTIWEAQFGDFANGAQVVIDQFISSGERKWSRASGLVMLLPHAYEGQGPEHSSARLERFLQLCAQDNLQVINCTTPANYFHALRRQIHRDFRKPLVIMTPKSLLRNKLCVSNLEDFGKKNSFHRVLWDHAIDPNEKDFIKLKKPEKIKKVI

SEQ ID NO: 96024 - protein, 329 aa, Unknown
  Bacterial polypetide isolated from the Sargasso Sea
RASYAENLILGNVISENEVNDLNNGYRAALDTGEHVVKSLVKEPSVELFVDWSPYLGHDWSPLFNTSIPLTSLQGLAKKLVEVPKDFQLQRQVKKIYDDRLKMANEEIPVDWGFAESLAYASVLASGNTVRITGQDVGRGTFSHRHAIVYDNKTGEAHIPLQHFQGDKSFSIYDSLLSEAAVLAFEYGYSTTTPNALVIWEAQFGDFANSAQVVIDQFIASGEHKWQRLCGLTLLLPHGYEGQGPEHSSARLERFLQLSAEHNIQVCLPTSSAQVFHMLRKQVLCPLRKPLIVMSPKSLLRHKKTVSTLKEMAEGSFQVVLDDPKQSDP

SEQ ID NO: 96025 - protein, 311 aa, Unknown
  Bacterial polypetide isolated from the Sargasso Sea
VYAARIATDFRLKFNRDVVIDLICYRRFGHNEGDEPSFTQPLMYKKIRSHPSPVKVYGQKLIKKGLISENYLNDSTKKFKDLLDEQFKNAKNYKPKIEWFEGTWSRYKPERGKDKRGITGSDTKKLKNISDRINTIPEEINIHKTIKKILDNRKLSISNGKGIDWSTAEALAFGSLLEEGYPVRLVGQDSGRGTFSQRHSVLRNQLDNSRYIPLNHISKNQKNFEVVDSFLSELAVLGFEYGYSLVEPNTLTIWEAQFGDFANGAQVVIDQFVASGERKWSRASGLVMLLPHGYEGQGPEHSSARLERFYS

SEQ ID NO: 96026 - protein, 241 aa, Unknown
  Bacterial polypetide isolated from the Sargasso Sea
DQFISSGERKWSRASGLVLLLPHGYEGQGPEHSSGRLERFLQLCAQDNLQVMNCTTPANYFHALRRQIHRDFRKPLVIMTPKSLLRYKYCVSNLEDFNKKNSFHRVLWDHAMDKKEKGFLKLKSNKEIKKVILCSGKIYFDLLEAREKIKKNDVIFIRIEQLYPFPVKSLVKEIKSYAQNAKFYWCQEEPKNMGAWFSVRDYIQWTLDYIGAKNNKINYIGRKPAASTATGYAKRHFSQQK

SEQ ID NO: 96027 - protein, 283 aa, Unknown
  Bacterial polypetide isolated from the Sargasso Sea
DQIKRFKDLLDDQFKTAKDYNPKIEWFEGAWSSYKPKKGKDKRGITGADEKILKNISDKINVVPSEISIHKTISKILQSRKKSVDDGFNIDWSTAESLAFGSLLDEGFPVRLVGQDSGRGTFSQRHSVLRDQTNNSRYIPLNNISKHQKKFEIVDSFLSELAVLGFEYGYSLVEPNTLTLWEAQFGDFANGAQVIIDQFIASGERKWQRASGLVMLLPHGYEGQGPEHSSARLERFLQMCANDNLQIMNCTTPANYFHALRRQIHRDFRKPLVIMTPKSLLRN

SEQ ID NO: 96028 - protein, 308 aa, Unknown
  Bacterial polypetide isolated from the Sargasso Sea
MKWFDGVWSRFKPEIGQDRRGVTGVDQRELISIGKKITEIPKNFHLHKTLLRLFDNKRKMFEKEYPIDWATAEILAFGTLLNEGFSVRLSGQDSGRGTFSQRHSVLRNQDSHDRYVPLNNISKKQKRFEIIDSLLSELGVLGFEFGYSLSEPETLVLWEAQFGDFSNGAQVVIDQFIASGESKWSRASGLVLLLPHGYEGQGPEHSSARIERFLQLCAQDNLQVVNCTTPANYFHVLRRQMHRNFRKPLIVMTPKSLLRNKRCVSNLNDFTKKTTFHRILEDHSYLENSKLIKLKKDKKIEKVIMVQA

SEQ ID NO: 96029 - protein, 218 aa, Unknown
  Bacterial polypetide isolated from the Sargasso Sea
VLQKKVKNILKQRIDMAEGKLEFNWGFAEIAAYSSLLREGYPIRFSGQDIRRGTFDHRHAVMFDQGDGRTYYPLNKFAEKGNTNIGIYDSILSEEAVLGFEYGYSATWPTGLVIWEAQFGDFSNGAQVVIDQFISSAQHKWERLSGLVLLLPHGYEGMGPEHSSARIERFLQLCADQNIQVCMPSTAAQMFHLLRRQAIRNYRTPLIVITPKSLLRNK

SEQ ID NO: 96030 - protein, 313 aa, Unknown
  Bacterial polypetide isolated from the Sargasso Sea
AAELGEYLHTRYVGQKRFSLEGGESVIVALDHLLQRAGGNNTAEVVIGMAHRGRLNVLVNTMGKMPKDLFSEFEGKLDEQLLHGDVKYHQGFSADVMTPGGPMHVSLAFNPSHLEIVNPVVEGSVRARQTRKGMEGHKVLPVLLHGDAAFAGQGVVMETLNLYNTRGYRTGGTVHIVVNNQIGFTTSDVRDTGSTLYCTDVAKMIEAPVFHVNGDDPEAVALVTEVALDFRNKFAKDVVIDLVCFRKLGHNEQDEPMVTQPLMYRHIKKHPGTRKLYADKLTSNGVCEDGIADEMIKSYREALDEGVNTNKTV

SEQ ID NO: 96031 - protein, 254 aa, Unknown
  Bacterial polypetide isolated from the Sargasso Sea
GAQVIIDQFIASGERKWARASGLVMLLPHGYEGQGPEHSSARLERFLQLCAQENIQVINCTTPANYFHALRRQMHREFRKPLIIMTPKSLLRNKRCVSNIEDFTKKNYFHRVLPDHAEIKSYGLIKLQKDKKIKKVILCSGKIYFDLIEAREKIKNDSVFIVRIEQLYPFPVKTLAQELKRFRKKAKFFWCQEEPQNMGAWNSARNYIEWTLIHIGADDKEVRYIGRKPAASPATGYIKRHIDQQKQIVEKVLS

SEQ ID NO: 96032 - protein, 229 aa, Unknown
  Bacterial polypetide isolated from the Sargasso Sea
EHKWERLSGLVMLLPHGYEGQGPEHSSARLERYLQLCAHDNIQVCIPTTPAQIYHLLRLQTIRKMRRPLIIISPKSLLRNPLATSSLDELTNGTFMPVIDDQLKNKDKIKKLILCSGKVFYDLVEKREALNAENLAIIRMEQLYSFPYDELEIILKSYSNCDKFIWCQEEPANQGAWFSHRHRIQRVLDRFSEKQIQLISRPSASAPAVGLNKLHKKQQESLIDRVFED

SEQ ID NO: 96033 - protein, 233 aa, Unknown
  Bacterial polypetide isolated from the Sargasso Sea
MLLPHGYEGQGPEHSSARLERFLQLCAQENIQVVNCTTPANYFHALRRQIHRDFRKPLIVMTPKSLLRNKRCVSSIDDFSKKNTFHRVLNDHADFKKYNLVKLKEDKKIKKVVMCSGKIYFDLVEAREKSENREVFFIRIEQLYPFPAKTLARELKRFKKNSKFYWCQEEPQNMGAWNTARNYIQWSLNYIKAENREVNYIGRKPAASPASGYLKKHLAEQNEILEKVVGKFK

SEQ ID NO: 96034 - protein, 299 aa, Unknown
  Bacterial polypetide isolated from the Sargasso Sea
SDRLIKDGLIPEGEIDGMKARFQTFLSNEFENSKSYRPNKADWLDGKWSGVKSKEKLYQRGKTSITKSQFEKIGKSLTAVPKGFKIHKTVSRMLKSKEESIKSGTNIDWATGEAFAFGSLLLEGFPVRLSGQDCTRGTFSQRHSAFIDQETEERYYPLNNICSSQHEFEVIDSMLSEYAVLGYEYGYTLAEPNALCLWEAQFGDFANGAQIMFDQFISSGERKWLRMSGLTVLLPHGFEGQGPEHSSARLERFLQMSAEDNWIIVNCTTPANYFHVLRRQLHRKLRKPLIIMTPKSLLR

SEQ ID NO: 96035 - protein, 253 aa, Unknown
  Bacterial polypetide isolated from the Sargasso Sea
AQIMIDQFISSGEKKWLKMSGLVMLLPHGYEGQGPEHSSARLERFLQACAEDNWIIANCTTPSNYFHILRRQLYRSFRKPLVIMSPKSLLRNKRAISNTKEFINGSSFHRILLDDAEKGNSSTKLVKDTKIKRVVICSGKIYYDLLEEREERNISNIYLLRLEQFYPFPALSFIKELTRFKDAEFIWCQEEPKNQGGWSFVEPNLEWSLNRVNAKCKRAKFIGRAAAASPATGLATQHKEQQEKIINEALTIN

SEQ ID NO: 96036 - protein, 287 aa, Unknown
  Bacterial polypetide isolated from the Sargasso Sea
KPEKGKDKRGVTGFEEKKLKDLSTRINIIPPDKNIHKTISKIFNSRKDSIEKGIGIDWSSAEGLAFGSLLEEGYPVRLVGQDSGRGTFSQRHSVLRNQVNNSRYIPLNNISKNQKQFEIVDSFLSELAVLGFEYGYSLVEPNTLTIWEAQFGDFANGAQVVIDQFIASGERKWNRASGIVMLLPHGYEGQGPEHSSARLERFLQLCSNDNMQVMNCTTPANYFHALRRQMHRDFRKPLIIMTPKSLLRNKYCVSNLEDFNKKNTFHRVLWDHAIDPKSKGFIKFEKI

SEQ ID NO: 96037 - protein, 290 aa, Unknown
  Bacterial polypetide isolated from the Sargasso Sea
LLSGDVKYHNGFSSDILVNEKRMHLALAFNPSHLEIVSPVLEGSVRARQENLNKENPKNDVLAIHMHGDSAISGQGVVMETLNMSQTKGYGTGGSIHIVVNNQIGFTTSQSIDVRSTFYCTDIAKMIEAPIFHVNANDPEAVITVAKLAVEYRMKFNRDVFIDLIGFRLHGHNEADEPSATQPMMYATVKKMKPAREIYAQKLIEEGLITKDDSNKIFKDYKALLEHGDPVVNLIPANDKRLKTKKKGNANWKKYLGRKWDEEYPSKTSLTKLKSLAKKLEELPDGFTMQ

SEQ ID NO: 96038 - protein, 286 aa, Unknown
  Bacterial polypetide isolated from the Sargasso Sea
MVSEKQKNFEVIDSLLSELGVLGFEFGYSLSEPETLVLWEAQFGDFVNGAQVVIDQFISSGESKWSRASGLVMLLPHGYEGQGPEHSSGRLERFLQLCAQDNLQVVNCTTPANYFHVLRRQMHRDFRKPLIIMTPKSLLRHKRCLSNLEDFTKKNTFHRILEDSAYSKASKLVSLKKDNKIKKVVMCSGKIYYDLIEQREKRKNDSVVFLRIEQLYPFPVKQVGKQLKRYKNAKFFWCQEEPKNMGAWNTARHYIDRTLDIIPSKGEKVKYVGRNAAASPATGNLN

SEQ ID NO: 96039 - protein, 277 aa, Unknown
  Bacterial polypetide isolated from the Sargasso Sea
KIFQLRKETIKKGKGIDWSSAEALAFGSLLEEGYPVRLVGQDTGRGTFSQRHSVLRNQIDNSRYIPLNNISINQKKFEIVDSFLSELAVLGFEYGYSLVEPNTLTIWEAQFGDFANGAQVIIDQFISSGERKWLRASGLVLLLPHGYEGQGPEHSSARLERFLQLCSNDNMQVMNCTTPANYFHALRRQMHRDFRKPLVIMTPKSLLRNKFCVSNISDFSKSNSFHRVLWDHAVDPKSKGFIKLKKNNDIQKVILCSGKIYFDLLAAREKLKRDDVI

SEQ ID NO: 96040 - protein, 303 aa, Unknown
  Bacterial polypetide isolated from the Sargasso Sea
LKNISEKINTIPERKNVHKTILKILNVRKKVVDQGFGIDWATAEALAFGSLLEEGYPVRLVGQDSGRGTFSQRHSILRNQIDNSRYIPLNNISKNQKKFEIVDSFLSELAVLGFEYGYSLVEPNTLTLWEAQFGDFANGAQVIIDQFISSGERKWKRASGLVMLLPHGYEGQGPEHSSARLERFLQQCANDNLQVMNCTTPANYFHALRRQIHRDFRKPLIIMTPKSLLRNKYCVSNIEDFGKENSFHRVMWDHAIDPKYKDFVKLKKISEIKKVILCSGKIYFDLLAAREKLKKDDIIMFRM

SEQ ID NO: 96041 - protein, 304 aa, Unknown
  Bacterial polypetide isolated from the Sargasso Sea
MLKGTWSRYKPEKGKDKRGITGFEENKLKIISDKINSIPEEKNIHKTISKIFNARKESIEKGTGIDWSSAESLAFGSLLEEGYPVRLVGQDSGRGTFSQRHSVLRNQIDNSRYIPLNNISKNQKQFEVVDSFLSELAVLGFEYGYSLVEPNTLTLWEAQFGDFANGAQVVIDQFIASGERKWNRASGIVMLLPHGYEGQGPEHSSARLERFLQLCSNDNMQVMNCTTPANYFHALRRQMHRSFRKPLIIMTPKSLLRNKYCVSNLEDFNKKNTFHRVLWDHAIDPKSKGFIKLKESPKIRKVIL

SEQ ID NO: 96042 - protein, 313 aa, Unknown
  Bacterial polypetide isolated from the Sargasso Sea
LICYRRFGHNEGDEPSFTQPLMYKKIRSHPSPIKVYGQKLINEGSISVEFLNKEIKKFKDLLDDQFKNAKDYKPKIEWFEGTWSRYKPEKGKDKRGLTGSDTKELKEISNKINTIPVEINVHKTISKVIDNRKSSVLNEKKIDWSTAEALAFGTLLEEGYPVRLVGQDSGRGTFSQRHSVLRNQIDNSRYIPLNNISKKQKNFEIVDSFLSELAVLGFEYGYSLVEPNTLTIWEAQFGDFANGAQVVIDQFVASGERKWSRASGLVMLLPHGYEGQGPEHSSARLERFLQLCSNDNMQVMNCTTPANYFMRSE

SEQ ID NO: 96043 - protein, 273 aa, Unknown
  Bacterial polypetide isolated from the Sargasso Sea
FEVYNSFLSEYGVLGFEYGYAYASPNSLTIWEAQFGDFANGAQIVIDQFVSSSETKWQRMNGVVLMLPHGHEGQGPEHTSARIERFLTLCADNNMQIINCTTPANLFHVLRRQMTFPFRKPLVIFTPKSLLRHPKCVSPLDSFLEGNRFIEVIKDEYSHTQSVRKVLLCCGKIYYDLLEHQQKNQIKDIAIIRLEQLYPFPEKQLRSVLNLYSNTKNLCWVQEEPENMGAWSFMLRTFPQENRLLLVARDADSSPAVGFPQVHLSQQENLVQR

SEQ ID NO: 96044 - protein, 298 aa, Unknown
  Bacterial polypetide isolated from the Sargasso Sea
TLNIYGKKLIDNNSITEDQFKKKVNDFKNLLEEQFKTANDYKPKLNWFEGTWSRYQPKKGKDKRGQTGVDTTKLKKLSAKINLLKPELNVHKTIQKVFENRNKCVQEEKNIDWANAETLAFATLLEEGFPVRLVGQDSGRGTFSQRHSILRNQIDNSRYVPLDHVSSKQKKFEIVDSFLSELAVLGFEYGYSLVEPETLTIWEAQFGDFANGAQVVIDQFIASGERKWFRASGLVLLLPHGYEGQGPEHSSARLERFLQLCAQENMQVLNCTTPANYFHALRRQIHREFRKATCYNDP

SEQ ID NO: 96045 - protein, 285 aa, Unknown
  Bacterial polypetide isolated from the Sargasso Sea
LNLKIQKFKNLLDDQFKTAKDYKPKIEWFEGTWSRYKPEKGKDRRGVTGADIKILKEISNKINIAPQEKNIHKTIIKILDSRRQTVERGIGIGWATAEALAFGSLLEEGYPVRLVGQDSGRGTFSQRHSVLRNQIDNSRYIPLNNISKYQKNFEVVDSFLSELAVLGFEYGYSLVEPNTLTLWEAQFGDFANGAQVIIDQFVASGERKWNRASGLVMLLPHGYEGQGPEHSSARLERYLQLCANDNLQIMNCTTPANYFHALRRQMHRDFRKPLIMMTPKSLLRK

SEQ ID NO: 96046 - protein, 317 aa, Unknown
  Bacterial polypetide isolated from the Sargasso Sea
IENEKKCVKKALSDAHTAIRAPNFALGPTLYPKEYKTIFSSPKVSRSEAISRVETHVPIETLKSLGEAILEVPKDFALNPKVKRILDGRKRMLSGASKVDWSFAELLAFGSLAKEDFSIRLSGQDCRRGTFSSRHSVIFDSQTEQPLELLSRVGDVKIINSPLSEQGCLGFEFGYSIADSNSLVLWEAQFGDFANGAQIIIDQFIVASEAKWQQKSGLVMLLPHGHEGMGPEHSSGRPERYLQMCGNLNIQVCNVTTPAQLFHLLRRQMHRAFRKPLILMTPKSLLRHPKVQSPLSDFSDGYFSELSDDPYLLDRTK

SEQ ID NO: 96047 - protein, 288 aa, Unknown
  Bacterial polypetide isolated from the Sargasso Sea
KWFDGVWSRFKPGLGKDKRGKSGVDKNILNKVGQRVFKIPNNFNAHKTLKRVFELKNKMFQIGKVDWSSAETLAIGTLLIEGFSVRLSGQDSGRGTFSQRHAVLRNQDNHDRFIPLNNIEDNQKKFEVIDSLLSELAVLGFEYGYSLSEPETLVLWEAQFGDFANGAQVIIDQFITSSESKWGRASGLVMLLPHGYEGQGPEHSSARLERFLQLCAGENIQVVNCTTPSNYFHVLRRQMHREFRKPLIIMTPKSLLRHKRCISNISEFISKSSFHRVLEDDAYLKNSK

SEQ ID NO: 96048 - protein, 291 aa, Unknown
  Bacterial polypetide isolated from the Sargasso Sea
CFCTLLNEGFSVRLSGQDSGRGTFSQRHSVLRNQDNHDRYIPLNNISKNQKRFEIIDSLLSELAVLGFEFGYSLSEPETLVLWEAQFGDFANGGQVIIDQFITSSEHKWGRSSGLVMLLPHGYEGQGPEHSSARMERFLQLCAGENIQVVNCTTPANYFHVLRRQMHRDFRKPLIIMTPKSLLRHKKCVSNIEDFTKKNSFHRVLEDHAYLDNSGLIKLKKNKKIKKVVMCSGKIYFDLLEAREKTKNDEIVFIRIEQLYPFPVKTLGQVLKKYSKDVVYYWCQEEPKNMG

SEQ ID NO: 96049 - protein, 279 aa, Unknown
  Bacterial polypetide isolated from the Sargasso Sea
KGKDRRGKSGVDLNKIQKISEKINSIPLKINIHKTISKILEFRRQSILKKNGIDWSTAESLAFGTLLEEGYPVRLVGQDSGRGTFSQRHSVLRNQIDNSRYIPLNNISDKQKKFEIVDSFLSELAVLGFEYGYSLVEPSTLTIWEAQFGDFANGAQVIIDQFIASGERKWSRASGLVMLLPHGYEGQGPEHSSARLERFLQLCAQDNLQVMNCTTPANYFHALRRQIHRDFRKPLIIMTPKSLLRNKLCVSNLDDFGKKNSFHRVLWDHALDPKEKNFI

SEQ ID NO: 96050 - protein, 248 aa, Unknown
  Bacterial polypetide isolated from the Sargasso Sea
DQFITSSESKWGIASGLVMLLPHGYEGQGPEHSSARLERFLQLCAGENIQVVNCTTPSNYFHVLRRQMHREFRKPLIIMTPKSLLRHKRCISNISEFISKSSFHRVLEDDAYIKNNNLISLKKDNKIKKVVMCSGKIYYDLIEEREKLKSNNIVFVRLEQLYPFPAKTLARVLKKYKKSKFIWCQEEPKNMGAWNTVRNYIERTLEMINFKDINIKYVGRSASSTTATGNANKHLAQQKEILEKIFKH

SEQ ID NO: 96051 - protein, 266 aa, Unknown
  Bacterial polypetide isolated from the Sargasso Sea
TGYQTTKLIEISDKIHSLPSELNIHKTIMKIFESRKQSILKGDQIDWSTAEALAFGSLLEEGYPVRLVGQDSGRGTFSQRHSVLRNQVDNSRYIPLNNISSKQKKFEIVDSFLSELAVLGFEYGYSLVEPNTLTIWEAQFGDFANGAQVIIDQFISSGERKWLRASGLVLLLPHGFEGQGPEHSSARLERFLQLCSNDNMQVMNCTTPANYFHALRRQMHRDFRKPLIMMTPKSLLRNKYCISQIDDFSKKNSFHRVLWDHAIDPK

SEQ ID NO: 96052 - protein, 282 aa, Unknown
  Bacterial polypetide isolated from the Sargasso Sea
RGGEYERGKTAIPDETMADVGRALTSVPEGFPTHKTVTRLLDAKKGMFDSGEGFDWATAEALAFGSLLTEGYKVRLAGQDSTRGTFSQRHSGLVNQDTEERYYPLNNIRAGQASYEVIDSALSEYAVLGFEYGYSLAEPNALTMWEAQFGDFANGAQIMFDQFVSSGESKWLRMSGLVCLLPHGYEGQGPEHSSARLERFLQMCGQDNWIVANCTTPANYFHILRRQIHRDFRKPLILMTPKSLLRHKLAVNKAEDFLDGSSFHRVLWDDAQHGNSDHTLAA

SEQ ID NO: 96053 - protein, 332 aa, Unknown
  Bacterial polypetide isolated from the Sargasso Sea
QFEQNAFTKEGKLAIFKKLAEAEGFERFLHKRFPGTKRFGLDGGEAMVPALEQVIKRGGALGVDEIVFGMAHRGRLNTLAAVMGKPYKAIFHEFQGGSSVPSDIEGSGDVKYHMGASSDREFDGHKVHLSLTANPSHLEIVNPVVLGKSRAKQAFDIREAEVNLGKPDAEWVLDRSKVVPLLIHGDAAFAGQGVVAECFALMGLKGYRTGGTLHFVINNQIGFTTSPRNSRSSPYPSDVALMVQAPIFHVNGDDPEAVVFAAKVATEYRQKFHKDVVVDMFCYRRFGHNEGDDPTFTQPLMYAKIKNQPSTLEIYAKRLIAEGVITRPRWTP

SEQ ID NO: 96054 - protein, 285 aa, Unknown
  Bacterial polypetide isolated from the Sargasso Sea
AQVIFDQFLSSGESKWLRLCGLVMLLPHGMEGQGPEHSSARLERFLQLCAEDNMQVVNITTPANFFHVLRRQMLRNFRKPLVVMSPKSLLRHKLNTSTLQEMGPGTHFWRVLGEVDELRPNDEIKRVVLCSGKVYYDLLEFRRENKIDEVAIVRIEQLYPWPRTGLAETLSMYPNAEIIWCQEEPANMGAWTYLIQRLEYILMAIDQGKAEHRRPIYVGRPASASPATGSLGVHNREQAKLVSEALMVPASDLAQPFQRAPGDRALPGSSAVPVKKKAAKKKAAG

SEQ ID NO: 96055 - protein, 282 aa, Unknown
  Bacterial polypetide isolated from the Sargasso Sea
FATLLKEGYGVRLSGQDVGRGTFSQRHGVLYDQENENRFVPLRHFTKEQGLYEIVDSFLSEFGVLGFEYGYSQADPKTLVLWEAQFGDFANGAQIIIDQFITTGERKWLRMSGLTILLPHGHEGQGPEHSSSRIERFLTMCAEDNIQVANCTSPANYFHILRRQLLRDFRKPLILMTPKSTLRHKKNTSSIDEFINGSTFHRVLSDPIQEGEQKNIKRLILCSGKIYFELQDYIEKLKKTEIHIVRIEQLYPFPYETLTESIKNFNNCEMIWCQEEPKNMGA

SEQ ID NO: 96056 - protein, 283 aa, Unknown
  Bacterial polypetide isolated from the Sargasso Sea
LLVEGYPVRLVGQDSGRGTFSQRHSVLRNQIDNSRYIPLNNISSNQKNFEIVDSFLSELAVLGFEYGYSLVEPNTLTIWEAQFGDFANGAQVIIDQFISSGERKWKRASGLVMLLPHGYEGQGPEHSSARLERFLQLCANDNLQVMNCTTPANYFHALRRQMHRDFRKPLIIMTPKSLLRNKYCVSNLEDFSKQNSFHRVLWDHARDTKQKGFIKLKEDKKIRKVILCSGKIYFDLLAAREKLKVNDVILYRIEQLYPFPAKSLVKELKPFAKNSKFYWCQRG

SEQ ID NO: 96057 - protein, 252 aa, Unknown
  Bacterial polypetide isolated from the Sargasso Sea
RKVFENRYKMFSENRPIDWSTAETLAFGGLLDEGFSVRLSGQDSARGTFSQRHSVLRNQDNHERYIPLNNISLNQKKFEIIDSLLSELAVLGFEFGYSLSEPETLVIWEAQFGDFANGAQIIIDQFITSSESKWGRASGLVMLLPHGYEGQGPEHSSARLERFLQLCAGENIQVVNCTTPANYFHVLRRQMHRDFRKPLIVMTPKSLLRHKRCISFLEDFSKKNTFHRVLEDQAYLKKSGLINLKSDKKIEK

SEQ ID NO: 96058 - protein, 282 aa, Unknown
  Bacterial polypetide isolated from the Sargasso Sea
MGEKMTLIPEGFNAHPTLKKIFENKRKMFQTGKGFDWSTAEHLAFATLLDEGYPVRLSGQDSARGTFSQRHSVLKDQLNGTKYIPLNNISKNQKRFEVIDSLLSEMAVLGFEYGYALSEPSTLVIWEAQFGDFANGAQVIIDQFITSAERKWARANGLVMLLPHGYEGQGPEHSSARLERFLQLCAQENIQVVNCTTPANYFHVLRRQIHRDFRKPLIIMTPKSLLRNKMCTSNIEDFTKKNTFHRVLNDHADSKENELINLAEDKKIKKNIICSGKIYFDL

SEQ ID NO: 96059 - protein, 305 aa, Unknown
  Bacterial polypetide isolated from the Sargasso Sea
KNKFKSFLEKEFETSKNYKSELKWFEGAWSRFKPGLGKDKRGMSGVNKDKLIKVGKKISLIPPNMNAHKTLKKIFNNRYQIFEKNGLIDWSTAENLAFGTLLTEGFSVRLSGQDSGRGTFSQRHAVIRNQDNHDRYVPLNNIEKSQKKFEIIDSLLSELAVLGFEFGYSLSEPETLVLWEAQFGDFANGAQVIIDQFITSGESKWGRASGLVMLLPHGYEGQGPEHSSARLERFLQLCAGENIQVVNCTTPSNYFHVLRRQMHRDFRKPLIVMTPKSLLRHKKCVSNLEEFTTQNSFHRVLNDDA

SEQ ID NO: 96060 - protein, 266 aa, Unknown
  Bacterial polypetide isolated from the Sargasso Sea
MGGTICDFSNGAQVFIDQFIASGESKWSRASGLVMLLPHGYEGQGPEHSSARLERFLQLCAQDNLQVVNCTTPANYFHVLRRQMHRDFRKPLIVMTPKSLLRNKRCVSNLDDFTKKNSFHRILVDQAYLNGTKLIKLKKDKEIKKAVICSGKIYFDLIEAREKAKDDRTVFIRIEQLYPFPVKHLGRELKRYKNAEFFWCQEEPMNMGGWNTARYYIDRTLEIIRVKGEKVKYIGRNAAASPATGNHNKHLAEQKEILEKVFSRKN

SEQ ID NO: 96061 - protein, 314 aa, Unknown
  Bacterial polypetide isolated from the Sargasso Sea
HRYGKKIHITKKFNIHKLYKKFENKQKMFTQNHPIDWSTAELLAFATLLNDGFSVRLSGQDSGRGTFSQRHSVLRNQDSHERYIPLQHVSDKQKNFEVIDSLLSELGVLGFEFGYSLSEPETLVLWEAQFGDFVNGAQVVIDQFISSGESKWSRASGLVMLLPHGYEGQGPEHSSGRLERFLQLCAQDNLQVVNCTTPANYFHVLRRQMHRDFRKPLVVMTPKSLLRHKRCLSNLEDFTKKNTFHRILEDSAYLKGSKLVSLKKDEKIKKVVMCSGKIYYDLIEQREKIKNDSVVFLRIEQLYPFPVKQVGKQL

SEQ ID NO: 96062 - protein, 263 aa, Unknown
  Bacterial polypetide isolated from the Sargasso Sea
LLAISEKINLIPESSNIHKTIKKIFNLRYQTVKQRKNIDWSTAEALAFGSLLEEGFPVRLVGQDSGRGTFSQRHSVLRNQIDNSRYVPLNNISKKQKRYEIVDSLLSELAVLGFEYGYSLVEPNTLTIWEAQFGDFANGAQIVIDQFIASGERKWSRASGLVMLLPHGYEGQGPEHSSSRLERFLQLCAKENLQVMNCTTPANYFHALRRQIHRDFRKPLIMMTPKSLLRNKLCVSNLEDFGKQTSFHRVLWDHATEKKNGFI

SEQ ID NO: 96063 - protein, 245 aa, Unknown
  Bacterial polypetide isolated from the Sargasso Sea
HKTLKKILEQKHKMFTENAPIDWSTAESLAFATLLIDGFSVRLSGQDSARGTFSQRHSVLRNQENHERYIPLNNLTKNQKKFEVIDSLLSELAVLGFEFGYSLSEPETLVIWEAQFGDFANGAQVIIDQFITSGESKWGRASGLVLLLPHGYEGQGPEHSSARLERFLQMCAGENIQVVNCTTPANYFHALRRQMHRAFRKPLIVMTPKSLLRNKRCVSSIEDFTKKNSFHRVLEDHAYVNKSKI

SEQ ID NO: 96064 - protein, 244 aa, Unknown
  Bacterial polypetide isolated from the Sargasso Sea
SGERKWSRASGLVMLLPHGYEGQGPEHSSGRLERFLQLCAQDNLQVMNCTTPANYFHALRRQIHRDFRKPLVIMTPKSLLRNKVCVSNLEDFGKKNSFHRVLWDHAIDPNEDSFIKLKKTTEIRKVILCSGKVYFDLLDAREKLKINDVVMFRIEQLYPFPVKPLVKELKKYAKNAKFYWCQEEPKNMGAWFSVRDYIQWTLDYIGANNNNISYIGRNPAASPATGYAKRHLAQQKEIIKKVFE

SEQ ID NO: 96065 - protein, 325 aa, Unknown
  Bacterial polypetide isolated from the Sargasso Sea
SKVLEFRKQSIIYKKGIDWSTAEALAFGTLLEEGFPVRLVGQDSGRGTFSQRHSVLRNQVDNSRYIPLNNISNKQKNFEVVDSFLSELAVLGFEYGYSLVEPSTLTIWEAQFGDFVNGAQVIIDQFIASGERKWSRASGLVMLLPHGYEGQGPEHSSGRLERFLQLCAQDNLQVMNCTTPANYFHALRRQIHRDFRKPLVIMTPKSLLRNKLCVSNLEDFSKKNSFHRVLWDHAIDPKEKSFIKLKKSKNIKKVILCSGKIYFDLLQAREKIKKDDVIIFRIEQLYPFPVKPLVKEIAKYAENAKFYWCQEEPKNMGAWLLVRDY

SEQ ID NO: 96066 - protein, 267 aa, Unknown
  Bacterial polypetide isolated from the Sargasso Sea
FSQRHSVLRNQDNHERYIPLNNISKKQKRFEIIDSLLSELGVLGFEFGYSLSEPETLVLWEAQFGDFSNGGQVVIDQFISSGESKWSRASGLVMLLPHGYEGQGPEHSSARLERFLQLCAQENLQIVNCTTPANYFHVLRRQMHRDFRKPLVVMTPKSLLRNKRCTSNLSDFSKKTSFHRILKDHSYLEGSKLIKLKNDKDIKKVIICSGKIYFDLVEAREKAKEAKTVFIRIEQLYPFPVKHLGKELKRYKNAEFYWCQEEPMNMG

SEQ ID NO: 96067 - protein, 322 aa, Unknown
  Bacterial polypetide isolated from the Sargasso Sea
ADDPSATQPLMYEKISNHPSVLNQYENNLMKEGILDAEQSKKIKSNYRKSLEGGESVAKNLAKKPNDSLWFDWEPYLGVKWWPKVDTKYSKKELKKLGKEIISVPKEFNMGSQASKIFADRHEMNQGNIPINWGYAEVMAYATLLKDGYPIRLTGQDVRRGTFSHRHACIFDSKTGMGHISLSELAEKNKTSFDIYDSLLSEEAVLGFEYGYSATWPSGLTIWEAQFGDFANGAQVVIDQFIVSAQHKWERLSGLIMLLPHGYEGQGPEHSSARIERFLQLCASENIQVCVPSSPKQIFHLLRRQAIRKMRTPLIIISPKSL

SEQ ID NO: 96068 - protein, 293 aa, Unknown
  Bacterial polypetide isolated from the Sargasso Sea
MFTEGKPIDWATAESLAFGTLLNEGFSVRLSGQDSGRGTFSQRHAVLRNQNSHDRYVPLHHISKNQKKFEVIDSLLSELGVLGFEFGYSLSEPETLVLWEAQFGDFANGAQVVIDQFIASGESKWSRASGLVMLLPHGYEGQGPEHSSARLERFLQLCAQENLQVVNCTTPANYFHLLRRQMRRDFRKPLVVMTPKSLLRHKRCVSNLEDFTKKTRFHRILVDHAYIKENKLIKLEKNNKIKKVVMCSGKIYFDLLEAREKTRDDKTVFIRIEQLYPFPVKHLGRELKKYEKP

SEQ ID NO: 96069 - protein, 306 aa, Unknown
  Bacterial polypetide isolated from the Sargasso Sea
LKLEAVTNQNKADWLDGQWSGLKAAPDREQRRGDTSVKLQRLKEIGLSMTELPEGYELNKKLVRIVENRRKSINEEKNIDWSTAEHLAFGTLLDEGHPVRLSGQDSCRGTFSQRHAVFVDQNNENRYVPLNNLKENQPQFEVIDSPLSEASVLGFEYGYSLTEPAALVMWEAQFGDFANGAQVIVDQFISSGEAKWLRMSGLVMLLPHGYEGQGPEHSSARLERYLQLCGEDNMQVLNCSTPANYFHALRRQLKRDFRKPLIIMTPKSLLRHKLCVSNLSDMAENTSFHRIILDPNKTLKDKNINR

SEQ ID NO: 96070 - protein, 282 aa, Unknown
  Bacterial polypetide isolated from the Sargasso Sea
VLGFEFGYSLSEPETLVLWEAQFGDFVNGAQVVIDQFISSGESKWSRASGLVMLLPHGYEGQGPEHSSGRLERFLQLCAQENLQVVNCTTPANYFHVLRRQMHRDFRKPLIVMTPKSLLRHKKCISNLEDFTKKNSFHRILEDSAYLKGSKLISLKNDKKIKKVVMCSGKIYFDLIEQREKVKNDSIVLLRIEQLYPFPVKQVGKQLKRYKNAKFFWCQEEPKNMGAWNTARHYIDRTLDIIQVKGEKVKYVGRNAAASPATGNLNKHLAEQKEILEKVMNN

SEQ ID NO: 96071 - protein, 297 aa, Unknown
  Bacterial polypetide isolated from the Sargasso Sea
TISEQEFNTQIKDFKSLLDEQYNSAKNYQPKLKWFEGTWSRYKPEKGKDRRGNSGVNAEKLRIISEKINKIPAEINIHKTIKKILELRRKSVESGQGIDWSSSEALAFGSLLEEGYPVRLVGQDSGRGTFSQRHSVLRNQTDNSRYVPLNNISKNQKNFEIVDSFLSELAVLGFEYGYSMVEPNTLTIWEAQFGDFANGAQVVIDQFIASGERKWSRASGLVLLLPHGYEGQGPEHSSARLERFLQLGAQENIQVMNCTTPANYFHALRRQIHRDFRKPLIIMTPKSLLRNKYCTSN

SEQ ID NO: 96072 - protein, 221 aa, Unknown
  Bacterial polypetide isolated from the Sargasso Sea
WARASGLVMLLPHGYEGQGPEHSSARLERFLQLCSNDNMQVMNCTTPANYFHALRRQMHRDFRKPLVIMTPKSLLRHKHCISNLEDFGKKSSFHRVLWDHAIDPKSKGFIELKKTKKIEKVVLCSGKIYFDLIEAREKLKKDNVVFYRIEQLYPFPAKALVKELKPYAKTAKFYWCQEEPKNMGAWFSVRDYIQWTLDNIKANNNQISYIGRNPDASPATG

SEQ ID NO: 96073 - protein, 293 aa, Unknown
  Bacterial polypetide isolated from the Sargasso Sea
MVDSLIQNCGIFGAEQICFGMAHRGRLNLLVNVLGKSPKELFTEFEENFELEGASSGDVKYHLGFSSNILTPNGEVHVSLANNPSHLEIVDPVVLGSVRGRQDRLNDKNKELVVPILIHGDASFSGQGVVMETLQMSQTRGYGVGGTIHVIVNNQIGFTTSNEEDSRSTQYATDVAKMVEAPILHVNGDDPEMVVFAAKLACEYRHNFKKDIVLDLFCYRRRGHNEADEPSSTQPIMYQQISNHPSVKSLYQEQLINAGVTTQSECDEIEKKYRSTIEKGDSVAHNLATQPNE

SEQ ID NO: 96074 - protein, 260 aa, Unknown
  Bacterial polypetide isolated from the Sargasso Sea
GDFANGAQVIIDQFISSGERKWQRASGLVMLLPHGYEGQGPEHSSARLERFLQLCANDNLQVMNCTTPANYFHALRRQIHRDFRKPLVIMTPKSLLRNKFCVSTIDDFSKQTSFHRIMWDHALSDQSKNFIKLKKSSEIKKVIICSGKVYFDLLIAREKLKRDDVLMFRIEQLYPFPAKSLVKELKPYAKNANFYWCQEEPKNMGAWFSVRDYIQWTLDTIKAKNNEVSYIGRSPDASPATGYAKRHQLEQQEIINEVFD

SEQ ID NO: 96075 - protein, 233 aa, Unknown
  Bacterial polypetide isolated from the Sargasso Sea
ISVECNHIFDSEERRWFQRKFESRLAEYSFNKDEKINIFERLISAEGLAKYLSAKYPGMKRFGVDGAEALVPLVESVIQNCGVLGANQICFGMAHRGRLNLLVNVLGKLPSELFAAFNEDHELDGSSTGDVKYHLGFSSNFNTPGGEVHVSLFNNPSHLEIVDPVVLGSVRARQDRIKDLNRSKVVPVLVHGDASFSGQGVVMESLQMSQTRGFNVGGTIHIIVNNQIGFTTS

SEQ ID NO: 96076 - protein, 288 aa, Unknown
  Bacterial polypetide isolated from the Sargasso Sea
VRRADSKDFEESPQTGVSRKKFIDLSKRLTDLHKPGSPGEKLKFFAKIEKIYENRSKMVTEYKLLDWAMAENMAYATLLSQNCNVRLSGQDSGRGTFAQRHAIITAEDNTKYVPLNHLSEDQATFEVYNSFLSEYGVLGFEYGYAYASPNSLTIWEAQFGDFANGAQIVIDQFVASSETKWQRMNGVVLMLPHGHEGQGPEHTSARIERFLTLCADNNMQIINCTTPANFFHVLRRQMTFLFRKPLVIFTPKSLLRLPKCISPLEEFLESTRFMEVLKDEYADSQSVQ

SEQ ID NO: 96077 - protein, 311 aa, Unknown
  Bacterial polypetide isolated from the Sargasso Sea
ELSYTFYDLDENDLNKSFNFKSSKDNKNSSLQDIIEFLETVYCSSVGYEFKHICEKEITDWFIEKLERDKSPNSQLSNEEKIYILKRLGSAEGLAKFLSSRYPGMKRFGIEGAESLIPLVDSLIQNCGISGAEQICFGMAHRGRLNLLVNVLGKPPTELFSEFEEDFALTGDNTGDVKYHLGVSSNILTPNGEVHVSLNNNPSHLEIVDPVIIGSVRARQDRLGDTDREKVVPILIHGDASFSGQGVVMETLQMSQTRAYGVGGTIHIIVNNQIGFTTSNKSDARSTHYASDVAKMIEAQLFMLMQMIQKV

SEQ ID NO: 96078 - protein, 262 aa, Unknown
  Bacterial polypetide isolated from the Sargasso Sea
ERKGKTDVPVDLLREVGTAISTVPDEFNLNSKLRRIFDNRGKAIEAGEGIDWATGEALAFGTLLMEGHLVRLSGQDVARGTFSQRHVVVTDQENESVYIPLEQIRPGNQAKFIARNSTLSEAAVLGFEYGLSLADPEVLVMWEAQFGDFANGAQFIFDQFISSGESKWLRMSGLVMLLPHGFEGQGPEHSSARLERYLQLCAEDNWQVCNITTPANYFHALRRQIHRDFRKPLVITTPKSLLRHKRAVSKLEDFGLGTSFNR

SEQ ID NO: 96079 - protein, 322 aa, Unknown
  Bacterial polypetide isolated from the Sargasso Sea
NIGIECNHILDSEERRWFQKKFESKLTEYSFNPDEKLNIYERLNSAEGLAKYLSAKYPGMKRFGIDGAEALVPLVESVIQNCGSMGATQLCFGMAHRGRLNLLVNVLGKLPSELFSAFDEDTELEGASTGDVKYHLGFSSNFETPGGEVHVSLFNNPSHLEIVDPVVIGSVRARQDRIGDKDRSQVVPILLHGDASFSGQGVVMESLQMSQTRGFNVGGTIHIIVNNQIGFTTSNINDSRSTDYSSDVAKIIQAPVIHVNGDDPEMVVNAAKIACKYRNKFKKDIVIDLFCYRRRGHNEADDPSATPPLMYNKIFKHPSVLN

SEQ ID NO: 96080 - protein, 308 aa, Unknown
  Bacterial polypetide isolated from the Sargasso Sea
MRELGSRYKPERGKDKRGVTGADVKKLLEISNKINTIPDEKNIHKTITKILNNRKIAVKNGLAIDWSSAEALAFGSLLEEGYPVRLVGQDSGRGTFSQRHSVLRNQLDNSRYIPLNNISKKQKNFEIVDSFLSELAVLGFEYGYSLVEPNTLTIWEAQFGDFANGAQVVIDQFVASGERKWARASGLVMLLPHGYEGQGPEHSSARLERFLQLCSNDNMQIMNCTTPANYFHALRRQMHRDFRKPLVLMTPKSLLRHKYCVSNIEDFSKKNSFHRVLWDHAIDPKSKGFIKLKKPEKIKKVILCSGKG

SEQ ID NO: 96081 - protein, 233 aa, Unknown
  Bacterial polypetide isolated from the Sargasso Sea
VDSFLSEFGVLGFEYGYSQADPKTLVLWEAQFGDFANGAQTIIDQFITTGERKWLRMSGITLLLPHGHEGQGPEHTSARLERFLQMCAEDNIQIINCTSPANYFHVLRRQIHRNFRKPLIIMTPKSTLRHKKNTSKIEDFINGSTFHRVLRNELSKEEEKKIDRLIICSGKIYFELQDHIEKLNKKNVFVIRLEQLYPFPYDNFSRELERFTNSEIIWCQEEPKNMGAWGFVK

SEQ ID NO: 96082 - protein, 251 aa, Unknown
  Bacterial polypetide isolated from the Sargasso Sea
QLKFTENGKKAFLNKLIQAEGFEKFLALKFVGTKRFGLDGAESLIPALEQIIKKGGQLGVKEVKIGMAHRGRLNVLANLLQKSYKRIFNEFMGEFLNSHSDATGDVKYHLGASSDREFDGNSVHISLTDNPSHLEAVNPVVLGQTRAKQFFHKDTQRNKVIPILIHGDAAFAGQGIVAECFSMSGLPGHNTGGTIHFIINNQIGFTTSPRFARSSPYPSDLGKVIESPILHCNGDDPEAVIHCAKIAIEFR

SEQ ID NO: 96083 - protein, 256 aa, Unknown
  Bacterial polypetide isolated from the Sargasso Sea
TIHRIFSNRHKSILEKKNIDWSTAEALAFGSLLKEGFPVRLVGQDSGRGTFSQRHSVLRNQNDNSRYIPLNNISSNQKSFEVVDSLLSELAVLGFEYGYSLVEPETLTIWEAQFGDFANGAQVVIDQFIASGERKWSRASGLVLLLPHGYEGQGPEHSSARLERFLQLCGQENLQVMNCTTPANYFHALRRQIHRDFRKPLVIMTPKSLLRNKYCVSNLEDFSKDNSFHRILGDHANESGYNFINLKKKDKIKKVI

SEQ ID NO: 96084 - protein, 258 aa, Unknown
  Bacterial polypetide isolated from the Sargasso Sea
MYKKIRSHPSPVKVYGEKLVSEGSISNEYLIESIKKFKDLLNEQFENAKDYKPKIEWFEGTWSRYKPARGKDKRGVTGFDMKKLQEISDAINTIPKDINLHKTISKILENRKLNVKKGFDIDWSTAEALAFGSLLEEGYPVRLVGQDSGRGTFSQRHSVLRNQLDNTRYVPLNNISKKQKHFEVVDSFLSELAVLGFEYGYSLVEPNTLTLWEAQFGDFANGAQVVIDQFIASGERKWSRASGLVMLLPHGYEGQGPE

SEQ ID NO: 96085 - protein, 250 aa, Unknown
  Bacterial polypetide isolated from the Sargasso Sea
VVIDQFIASGERKWSRASGLVMLLPHGYEGQGPEHSSARLERFLQLCAQENIQVMNCTTPANYFHALRRQIHREFRKPLVIMTPKSLLRHKYCISNLDDFNKSNSFHRVLEDHALIKNSKFLKINKPKKIRKVIICSGKIYFDLLEAREKNKVDDVIFVRIEELYPFPVKSLTKAIKSYVSNSQFFWCQEEPKNMGAWSSVRDYIQWTLDNLGVKKKIEYIGRKAAASPATGYASRHAKQQKEILDKVFK

SEQ ID NO: 96086 - protein, 263 aa, Unknown
  Bacterial polypetide isolated from the Sargasso Sea
LHLIYIGEKLTKEGLITLDQLKKDKSKFKNYLEDEFLSSKNYKSELKWFDGVWSRFKPGLGKDKRGKSGVEKNILLNVGKKVFHIPSDFNAHKTLKRVFETRSKMFFSGKVDWSSAESLAIGTLLVEGFSVRLSGQDSGRGTFSQRHAVLRNQSNHDRYLPLNNIKAGQKKFEIIDSLLSELAVLGFEYGYSLSEPETLVLWEAQFGDFANGAQVIIDQFITSSESKWGRASGLVMLLPHGYEGQGPEHSSARLERFLQLCAG

SEQ ID NO: 96087 - protein, 267 aa, Unknown
  Bacterial polypetide isolated from the Sargasso Sea
SPVKVYGEKLINEKSISSDYLNGSIKRFKDLLNEQFENAKDYKPKIEWFEGTWSRYKPERGKDKRGTTGSDIKKLQEISNKINTIPEEINIHKTISKILEKRKLSVKNGEGIDWSTAEALAFGSLIEEGYPVRLVGQDSGRGTFSQRHSVLRNQLDNSRYIPLNNISKQQKHFEVVDSFLSELAVLGFEYGYSLVEPNTLTLWEAQFGDFANGAQVVIDQFIASGERKWSRASGLVMLLPHGYEGQGPEHSSARLERFLQLCSNDNM

SEQ ID NO: 96088 - protein, 296 aa, Unknown
  Bacterial polypetide isolated from the Sargasso Sea
EGDEPSFTQPLMYKKIRSHPTTLNIYGDRLIKENLISENDFKTQIDNFKLLLEDQFKTAKDYKPKLNWFEGTWSRYQPKKGKDRRGDTGVDLDIITQISEKINKLETNLNVHKTIHRIFSSRHKSILEKKNIDWSTAEALAFGSLLKEGFPVRLVGQDSGRGTFSQRHSVLRNQNDNSRYIPLNNISSNQKSFEVVDSLLSELAVLGFEYGYSLVEPETLTIWEAQFGDFANGAQVVIDQFIASGERKWSRASGLVLLLPHGYEGQGPEHSSARLERFLQLCGQENLQVMNCTTPA

SEQ ID NO: 96089 - protein, 331 aa, Unknown
  Bacterial polypetide isolated from the Sargasso Sea
RISGQDSGRGTFAHRHAIVTTEQDSKYIPLNHLSDKQAPFSVYNSLLSEYGVLGFEFGYAYATPRSLTIWEAQFGDFGNGAQIIFDQFISSAETKWHRMNGLVVLLPHGYEGQGPEHSSARIERYLELCADNNLMIINCTLPANMFHALRRQVEQPFRKPLIVFTPKSLLRHPKCVSPLEDFLGGSRFHEVLDDTKVEPGKVRKVLFCSGKIYYELESFREEKGQDHVAIVRLEQLHPLPIKQLEAVIEQYANCQTWCWVQEEPENMGAWCFMNRKFKFTPKPLQLVSRKESSSPAGGFAKIHQQNQQGLDRKGLQYRINLIISFSDHGSS

SEQ ID NO: 96090 - protein, 314 aa, Unknown
  Bacterial polypetide isolated from the Sargasso Sea
PKIRWFEGTWSRYKPERGKDKRGVTGSDSKILKDISDRIHVFPTDKNIHKTITKIMENRKKTINEGSGIDWATAESLAFGSLLVEGYPVRLVGQDSGRGTFSQRHSVLRNQIDNSRYIPLNNISSNQKNFEIVDSFLSELAVLGFEYGYSLVEPNTLTIWEAQFGDFANGAQVIIDQFISSGERKWKRASGLVMLLPHGYEGQGPEHSSARLERFLQLCANDNLQVMNCTTPANYFHALRRQMHRDFRKPLIIMTPKSLLRNKYCVSNLEDFNKQNSFHRVLWDHAKDSKQKGFIKLKNDKKIRKVILCSGKIY

SEQ ID NO: 96091 - protein, 263 aa, Unknown
  Bacterial polypetide isolated from the Sargasso Sea
MGDFANGAQVIIDQFIASAERKWARANGLVMLLPHGYEGQGPEHSSARLERFLQLCAQENIQVMNCTTPANYFHALRRQMRRDFRKPLIIMTPKSLLRNKKCTSNIEDFTKKNTFHRVLNDHADLKKYGLIKLNEDKKIKKVVICSGKIYFDLLEAREKAKNKELFIIRIEQLYPFPAKTLARELKRFKKNSKFYWCQEEPQNMGAWNTTRNYIQWSLDYIKAENREVKYIGRKPAASPASGYLKKHLAEQNEILEKVVGKFN

SEQ ID NO: 96092 - protein, 266 aa, Unknown
  Bacterial polypetide isolated from the Sargasso Sea
WFLLEEGFPVRFVGQDSGRGTFSQRHSVLRNQVDNTRYIPLNSISKNQKKLEIVDSFLSELAVLGFEYGYSLVEPNTLTIWEAQFGDFANGAQVIIDQFISSGERKWQRASGLIMLLPHGYEGQGPEHSSARLERFLQLCANDNLQVMNCTTPANYFHALRRQIHRDFRKPLVLMTPKSLLRNKYCVSNIEDFNKQTSFHRILWDHALNDESKNFIKLKNPTEIKKVIICSGKVYFDLLAAREKIKRDDVILFRIEQLYPFPVKSL

SEQ ID NO: 96093 - protein, 297 aa, Unknown
  Bacterial polypetide isolated from the Sargasso Sea
IKHPSVLSQYETDLKEHGILTSDEAKKIKSEYRKSLEGGESVAKNLAKNPNDQLWFDWEPYMDVKWWPKVDTKFNKDKFTKLGKAICKVPKSFNLGSQAKKIFDDRLRMNNGEIPINWGYAETMAYATLLYEGYPIRLTGQDVRRGTFSHRHACVFDSKNGMGYIPLSDIAEKNKSKFDIYDSLLSEEAVLAFEYGYSATWPSGLAIWEAQFGDFANGAQVVIDQFIVSAQHKWERLSGLVMLLPHGYEGQGPEHSSARIERFLQLCASENIQVCVPSSPKQIFHLLRRQAIRKMRT

SEQ ID NO: 96094 - protein, 293 aa, Unknown
  Bacterial polypetide isolated from the Sargasso Sea
RLNSAEGLAKYLSAKYPGMKRFGIDGAEALVPLVESVIQNCGSMGAKQICFGMAHRGRLNLLVNVLGKLPSELFSAFDEDTELEGASTGDVKYHLGFSSNFETPGGEVHVSLFNNPSHLEIVDPVVIGSVRARQDRIGDKDRSQVVPILLHGDASFSGQGVVMESLQMSQTRGFNVGGTIHIIVNNQIGFTTSNINDSRSTDYSSDVAKIIQAPVIHVNGDDPEMVVNAAKIACKYRNKFKKDIVIDLFCYRRRGHNEADDPSATQPLMYNKISKHPSVLNQYETNLIDHGIL
